United States Patent Application Publication US 2018/0126003 A1 - sequence listing, part 152

SEQ ID NO: 267035 - DNA, 4602 bp, Artificial Sequence
  derived and/or modified sequence
aactgggcggtaaaatagcccttctgttactgtccggggctgcggggtgagaggccagggccgagaagggcttcaggacgcgggaggcgcacttgcttcaagtcgcgggcgtgggaacggggttgcaaaacggggcctctttgtccgggcttgcttccggcgtcatggctcaaagggccttcccgaatccttatgctgattataacaaatccctggccgaaggctactttgatgctgccgggaggctgactcctgagttctcacaacgcttgaccaataagattcgggagcttcttcagcaaatggagagaggcctgaaatcagcagaccctcgggatggcaccggttacactggctgggcaggtattgctgtgctttacttacatctttatgatgtatttggggaccctgcctacctacagttagcacatggctatgtaaagcaaagtctgaactgcttaaccaagcgctccatcaccttcctttgtggggatgcaggccccctggcagtggccgctgtgctatatcacaagatgaacaatgagaagcaggcagaagattgcatcacacggctaattcacctaaataagattgatcctcatgctccaaatgaaatgctctatgggcgaataggctacatctatgctcttctttttgtcaataagaactttggagtggaaaagattcctcaaagccatattcagcagatttgtgaaacaattttaacctctggagaaaacctagctaggaagagaaacttcacggcaaagtctccactgatgtatgaatggtaccaggaatattatgtaggggctgctcatggcctggctggaatttattactacctgatgcagcccagccttcaagtgagccaagggaagttacatagtttggtcaagcccagtgtagactacgtctgccagctgaaattcccttctggcaattaccctccatgtataggtgataatcgagatctgcttgtccattggtgccatggcgcccctggggtaatctacatgctcatccaggcctataaggtattcagagaggaaaagtatctctgtgatgcctatcagtgtgctgatgtgatctggcaatatgggttgctgaagaagggatatgggctgtgccacggttctgcagggaatgcctatgccttcctgacactctacaacctcacacaggacatgaagtacctgtatagggcctgtaagtttgctgaatggtgcttagagtatggagaacatggatgcagaacaccagacacccctttctctctctttgaaggaatggctggaacaatatatttcctggctgacctgctagtccccacaaaagccaggttccctgcatttgaactctgaaaggatagcatgccacctgcaactcactgcatgaccctttctgtatattcaaacccaagctaagtgcttccgttgctttccaaggaaacaaagagtcaaactgtggacttgattttgttagcttttttcagaatttatctttcattcagttcccttccattatcatttacttttacttagaagtatccaaggaagtcttttaactttaatttccatttcttcctaaagggagagtgagtgatatgtacagtgttttgagattgtatacatatattccagaacttggaggaaatcttatttaagtttatgaatataaccatctgttactgttctaaaaatgtttaaaagaaactcaatacagataaagataaatatgtgactattattgggtattacacttcacttctctttaatatttttcctccaactggagggcagacaattttctgacttgcttttctctaggtggttcattttgaaaggggacagaaatataactaaatgcttccaggagaaaaattccaagagttacaatctggacttggtacctaaatatcattttttaaattcttgatgcctatttggactagaggtaaacatactttcagattggcctgtttttgtcggtaaggcatacagccttcagaagccaacatttttaatcaaaaacttataaaacatgatgatcattgtgaaaattctgagttgaaggttagtttaagataagctaacaataacagtctgtgttttctctaaaataatctgagttttttggaactctttatttaaatatgtgtgtttttcagtattcaaataagatcaggaagccaattttctatgtatgaatatgctttaacctaggatttcagtccactctgactgactttctaaactttaacttgggtttttacagtgactatgcattagtgctgactctttggtataagccataaaatattttccttcctatcaatttatctgaactttggtcttttcactaaattgtacagtattctacttctgtttaaaaaggggagatgagaaagggaatactatctaaccaataacttgaacaaaaacactaaactaagcatttaatagaaatgctttttattgaggaggtattatccagagttcatgcttagaacaaatgcatctttgcgtatcctagacttaacaattcatcagtttctgagaccacagaatcaggttttccgtagtagataaagactctctggtgcttcaaattctgttcaagtgttttgactcatcagcttctactctttctattactgcctttgcctggcttgttttgtctctttgcaactgattttgcaaaaaaaaattgtagctttaaaataacagggtctaagtattttaaatgtgcctatttcacagctctcttggtcacaaaaacatgctatttttattggaacttcaaaccaaatccccactgagtgtgtactggttcctgcaggtagcagtctcctattatctcctgtttagcaccaaaagagctaatattattggaaactgaccttttaaaggccactggcagtaggatttaaaaagcagcccactgctcagtttccaggatcagcttcctccttctgtcacttgtgtaagttggcactaccttgtgcctctcagattgctgaagtgctgctggtaagcatgtgcatgctctgcctttcttgtgaaagttttcaatcagcgatatcagcacttacagtaagaagtaaaagtagtgcacagcaaagctaatttgcctttgcctggggtgttcagcttgaaagaataaagctcatttggtttagttaaatgtcttactctactgtgcctatgcttttagctgcgttactaagcaagggaaaaataacagtttctctgagccagagaagacttgatcacagttctccaagcatcgtgatagcaatgcttaaccccaggaagatttcaaggcagggagaagaacatttcaaataagattcttgttaacccatttatgcctagtgttccattattggaatgctaagcttgtgggagtcatttacatcctactgctcaaagtcattgccaaggtctgatttttcacacaaaaaattgcaacccccagcataaatgggttagctactgtcatcagttagcaaattcatccacacaaacacaattagagtttggtttttttttaagcttttcaaaacttactaaactggcacaattttatatgtatgctatttgttgtatttatgcttaagagcaaaaaagttttgatgggattttaaattcaggcaaagcctacaacgctgagacaatcccctaacaacatggtagtaactaaagaaacttttatactaggcttcttagttttaaaaggaagtggcatcattgtttcagttctagtttgtatttttctctcagatatttttcttctttaaaaatctttcccagaagttggttcctagaaaactcaataccatcatctcttatctctatacagggactaggtaataaaaccttcaaaggttgtcaaaggtcatcaagcagtgttcatttatcctgtcacatgtttctgtttctatagtaatttagaaattgcaaatagttaacttttcatcatgtaaaaagttaacattatcctatttccatagataccatggacggcggtgtggcctgagttgtcagtctttaatcctgagtcatgtggctctcttttcatctttgatgtcagttccaattatttggcatcaaaaaccttcatggtaggtagagttttaggtaaaagtggatctagggttactttctttattaacatttcctaaataactgaattgagagacatactctgctactatgtcctcaggttaatttttgtctgatcttacgatgccctgccttttactagctactttagaaatagaaaatgtgaagagtgactatttacatgtatactcctttggctgctagaactcatctgtagtcctttattatttacactgaattccaatttcatttctgcttccgctaagtaagagcacctcattcctgtgttttctctactattgagctgtagacgaactgtttctctaattataaagcaaactgtttgggatattcagggaaactaccccaatgttatgttgtcatttaatgggaaaggctgggatcatatgtatttctatgttctgtaaagtatttgacttactagttctcaataaaattttattaggactatata

SEQ ID NO: 267036 - DNA, 2930 bp, Artificial Sequence
  derived and/or modified sequence
agattaccaatgataaagccggggctacggctaaagaaaggtaggatgcatacgcagaaacattagtgctaatatgctgcagaaaagccaagataaatcagtccagctctcatacatcactaagggagaagctgattgcaacttgaccatgttgcctgagtagtcccatcagtgagaagaggagaacatggatttaaaaaaaactagaatgtacccctagggctcctgccgtggtggacctgggagaagtgtctggtaaatatcgacagtatatggcaggacttctggctcctccttatggtgttatggaaacgggctctaacaatgacaggattcctgacaaggagaacgtcccttcagagaagatcctcagagctggaaaaattttacgaaatgccattctctctcgagcacctcacatgataagagatagaaaataccacctaaagacatacagacaatgctgtgtgggaactgaactggtggactggatgatgcagcagacaccatgtgttcactcccggactcaagctgttggcatgtggcaagtcctgttagaagatggtgttctcaaccacgtggaccaggagcaccatttccaagacaaatatttattctatcgatttctggatgatgagcacgaggatgcccctttgcctactgaggaggagaagaaggagtgtgatgaggagctccaggacaccatgctgctgctgtcacagatgggccccgacgcccacatgaggatgatccttcgcaaaccacctggccagaggactgtggatgacctagagattatctatgaggagcttcttcatattaaagccttatcccatctttctaccacagtgaaacgagagttagcaggtgttctcatttttgagtctcacgccaaaggagggactgtgttgtttaaccagggggaagaaggtacctcctggtacattattctaaaaggatcagtgaatgtagtcatttacggcaagggtgtggtctgcaccctgcatgaaggagatgacttcggcaagttagcactagtgaatgatgccccacgagctgcctctatcgtcttacgagaagataactgccatttcttaagagtagacaaggaggatttcaaccggatcctaagggacgtggaggcgaatacagtcagacttaaagaacatgaccaagatgtcttggtgctggagaaggtcccagcagggaacagagcttctaatcaaggaaactcacagcctcagcaaaagtatactgtgatgtcaggaacacctgaaaaaattttagagcattttctagaaacaatacgccttgaggcaactttaaatgaagcaacagattctgttttaaatgactttattatgatgcactgtgtttttatgccaaatacccagctttgcccggcactggtggcccactaccacgcacagccttcacaaggtacagaacaggagaaaatggattatgccctcaacaataagaggcgagtcatccgcctggttctacagtgggctgccatgtatggagacctcctgcaagaggatgacgtgtctatggccttcctggaggagttttatgtatctgtatcagatgatgcccggatgattgctgccctcaaggagcaactgccagagttggagaagattgtcaagcaaatctcagaagatgcaaaggcaccacaaaagaagcacaaggttcttttgcaacagttcaatacgggcgatgagagagcccagaagcgccagcctatccgcggctctgatgaagttctgtttaaggtctattgcatggaccacacctacacaaccattcgggtgccagtggccacttcggtgaaggaagtcatcagtgcagttgccgacaagctgggctccggggagggcctgatcatagtcaagatgagttccggaggagaaaaggtggtgctcaaacctaatgatgtttcagtatttacgacgctcaccattaatggacgcctgtttgcttgcccgcgagagcaattcgattcactgactcccttaccagaacaggaaggcccaactgttggaacagtgggaacttttgaactgatgagctccaaagatttagcataccagatgacaatttatgattgggaactcttcaactgcgtgcatgagctggagctaatctatcacacatttggaaggcataattttaaaaagaccacagcaaacttggatttgttcctgaggagatttaatgaaattcagttttgggtcgtcactgagatctgcctttgttctcagctcagcaagcgtgttcagctattaaaaaaatttattaagatagcagcccactgtaaggagtataaaaatctgaattccttttttgccatcgtcatgggactaagtaacgttgctgtgagccgcttggcactaacgtgggagaaactgccaagcaagttcaagaagttctatgcggagtttgaaagtttaatggacccttcaaggaaccacagggcctacaggctgacagtagctaagctggaacctcctctcatccccttcatgcctttgctcattaaagatatgacatttactcatgaggggaacaagacgttcattgacaatctagtaaactttgaaaaaatgcgcatgattgcaaatacggccagaacagtgagatactacaggagccaacccttcaatcctgatgcagctcaagctaataagaaccatcaggatgtccggagttatgtacggcaattaaatgtgattgacaaccagagaactttatcacagatgtcacacagattagagcctcgtcgaccatagacatttcaaatgcccaaagcaacagtttgtctccagtccacaatctttcaaaaatgccatttatgctactactgactgtattgccactagagaattctacaaaacaagcaaaaacacatcctgagacacctcagg

SEQ ID NO: 267037 - protein, 405 aa, Artificial Sequence
  derived and/or modified sequence
MAQQGQQGQMASGDSNLNFRMVAEIQNVEGQNLQEQVCPEPIFRFFRENKVEIASAITRPFPFLMGLRDRSFISEQMYEHFQEAFRNLVPVTRVMYCVLSELEKTFGWSHLEALFSRINLMAYPDLNEIYRSFQNVCYEHSPLQMNNVNDLEDRPRLLPYGKQENSNACHEMDDIAVPQEALSSSPRCEPGFSSESCEQLALPKAGGGDAEDAPSLLPGGGVSCKLAIQIDEGESEEMPKLLPYDTEVLESNGMIDAARTYSTAPGEKQGEEEGRNSPRKRNQDKEKYQESPEGRDKETFDLKTPQVTNEGEPEKGLCLLPGEGEEGSDDCSEMCDGEEPQEASSSLARCGSEGSDDCSEMCDGEERQEAQKQGRKVIKRVAQWILWILQTTPLWENPRGKEDKR

SEQ ID NO: 267038 - DNA, 1218 bp, Artificial Sequence
  derived and/or modified sequence
atggcccaacaggggcaacaaggacagatggccagtggcgatagtaacctgaattttcgtatggtggccgagatccagaatgtagaaggccaaaacctgcaggagcaagtgtgtcccgaacccatcttccggttcttcagggagaataaggttgaaatcgcctctgccattactcgtcccttcccattcctgatgggactgcgcgaccgcagcttcataagcgaacagatgtatgaacatttccaggaggccttccgtaatctagttccagttacccgcgtcatgtattgcgtgctgtctgaactggagaagacatttggctggtcacatctggaggcccttttttcccgtatcaaccttatggcatatccggatctcaacgaaatctaccgttcattccagaacgtgtgttacgagcatagcccactgcagatgaataatgtgaacgacctggaagatcggcccaggctgctgccctacggcaagcaagaaaattctaatgcctgtcacgagatggatgacatcgctgtcccacaagaagcgctaagcagctccccgcgctgtgagcctggattcagcagcgaaagttgcgagcaacttgctctgcctaaggccgggggtggtgacgccgaggacgcccccagcctactcccgggaggaggcgttagctgcaaactcgccattcagatagatgagggtgagtcggaagaaatgcccaagctattaccatatgacacagaagttctcgaaagtaacggaatgatcgacgccgcccgcacgtacagtaccgccccgggagagaagcagggcgaagaagaggggaggaactcaccccgcaagcgtaaccaagataaggaaaaataccaagagagtccagaggggagagacaaggagacatttgatctaaagacccctcaggtaactaacgaaggcgagcccgaaaaaggactttgcttacttccaggcgagggggaggagggcagcgacgactgcagcgagatgtgcgacggggaagagccacaggaagcatcttctagtcttgcccgatgtggaagtgaggggagtgacgattgttccgagatgtgcgatggcgaagagcggcaagaggcccagaagcaggggcgcaaggtgattaagcgggtggcccagtggatcctgtggattctgcagaccactcccctgtgggagaacccccgggggaaagaagataaaagatag

SEQ ID NO: 267039 - DNA, 1218 bp, Artificial Sequence
  derived and/or modified sequence
atggcccagcagggccagcagggccagatggccagcggggacagcaacctgaacttcaggatggtggccgagatccagaatgtggagggccagaacctgcaggagcaggtgtgcccagagcccatcttccgcttcttccgggagaacaaggtggagatcgccagcgccatcacccggcccttccccttcctgatgggcctgcgggaccgctccttcatcagcgagcagatgtatgagcacttccaggaggccttcaggaacctggtgcctgtgaccagggtgatgtactgtgtgctgtctgagctggagaagaccttcggctggagccacctggaggccctcttcagccgcatcaacctgatggcctacccagacctgaatgagatctaccgctccttccagaatgtgtgctatgagcacagccccctgcagatgaacaacgtgaatgacctggaggaccggccccggctgctgccctacggcaagcaggagaacagcaatgcctgccacgagatggatgacattgctgtgccccaggaggccctgagcagcagcccccgctgtgagcccggcttcagcagcgagagctgtgagcagctggccctgcccaaggccggcggcggagatgctgaagatgcccccagcctgctgcccggcggcggcgtgtcctgcaagctggccatccagattgatgaaggagagagcgaggagatgcccaagctgctgccctatgacacagaggtgctggagagcaatggcatgattgatgctgcccggacctacagcacagcccctggagagaagcagggcgaggaggagggcaggaacagccccaggaagaggaaccaggacaaggagaagtaccaggagagccctgagggccgggacaaggagacctttgacctgaagaccccccaggtgaccaatgaaggagagcctgagaagggcctgtgcctgctgcctggagagggggaggagggcagtgatgactgcagcgagatgtgtgatggagaggagccccaggaggccagcagcagcctggcccgctgtggcagcgagggcagtgatgactgcagcgagatgtgtgatggagaggagcggcaggaggcccagaagcagggcaggaaggtgatcaagagggtggcccagtggatcctgtggatcctgcagaccacccccctgtgggagaacccccggggcaaggaggacaagaggtag

SEQ ID NO: 267040 - DNA, 1218 bp, Artificial Sequence
  derived and/or modified sequence
atggcccagcagggccagcagggccagatggccagcggcgacagcaatttaaactttaggatggtggccgagatccaaaacgtggaagggcagaatctgcaagagcaggtatgccctgaaccaatcttcaggtttttccgcgaaaataaggtggagatcgcaagcgctattaccaggccctttccgttcctgatggggctacgcgatagatcttttatttctgagcaaatgtatgagcactttcaggaagcctttaggaatctggtgccagtgactagagtgatgtattgcgtgttatcagaactagaaaaaaccttcggatggtcacatttggaggccttgttctccaggataaacttgatggcctatcccgatctgaatgaaatctacagatcattccaaaacgtgtgttatgaacacagtcccctccaaatgaacaacgtaaatgatctggaagatagaccacgtctgctgccgtacggaaagcaggagaatagcaatgcctgccacgagatggatgacattgcggttccccaggaggctctgtcttcctccccccgttgcgagcccggcttctctagcgaatcctgcgaacaattggccttgccgaaggctggaggtggtgatgcagaggacgccccgtcactgctgcccggcggaggtgtgtcctgtaaacttgccatccagatcgatgagggtgaaagtgaagaaatgcccaagttgctcccatatgatactgaggtattggaatcgaacggcatgatcgatgccgcgaggacatattctacggcccctggggaaaaacagggggaggaggaggggagaaactcaccgcgcaagaggaatcaggacaaggaaaaatatcaggaatcgcctgaaggtagagacaaggagacgttcgatctgaagacaccccaggtgacaaacgagggggaacctgaaaagggactgtgcttattgcccggagagggagaagaggggagcgatgactgttcagaaatgtgtgacggggaagagccccaggaagcttcctcaagtttagcccgctgcgggagcgagggctccgatgactgttctgagatgtgcgatggcgaggaaagacaggaggcccagaagcagggtcgtaaggtaattaaaagggtcgcacagtggattctctggattctgcaaactactccgctgtgggaaaatccaagggggaaagaagataagcgctag

SEQ ID NO: 267041 - DNA, 1330 bp, Artificial Sequence
  derived and/or modified sequence
acttttcttttcctctttgactgagcaccgaggggcagttggcagcttcacctcagagctgcaggaaggaacggggcagtgaaaatcgaatcgggtgtgatcctaggccaagctcatggcccagcagggccagcaggggcagatggcaagtggagacagcaatctcaacttcaggatggtcgcagagatccagaacgtagagggtcagaacctgcaggagcaggtttgccctgagcccattttcaggttcttcagagaaaacaaggtggagattgcaagtgcaataacaaggccatttcctttccttatgggcctccgagaccgctccttcatctccgagcagatgtatgaacattttcaagaagcttttagaaacctggtcccagtgacaagagtgatgtattgtgtactcagtgaactggagaagacatttggctggtcacatctggaagcattgttcagcaggattaacctgatggcctatcctgatttaaacgagatttacagaagcttccagaatgtatgctatgaacactcacctctccaaatgaataatgtaaacgatttagaagatagacccagattactaccatatggtaaacaagagaacagcaatgcctgtcatgaaatggatgatatagcagtgcctcaggaagccttgagctcctcgccaaggtgtgagccaggtttctcttcagagtcttgtgagcagttagctctcccaaaggctggtggaggagatgctgaagatgcacccagcctactaccaggtgggggagtgtcctgtaaacttgctatacaaatagatgaaggagaatcagaagaaatgcccaagttactgccttatgatacagaagttctagaaagcaacgggatgatagatgcggcaaggacatacagcacagcaccaggggagaaacagggagaggaggaaggcaggaacagtcccagaaaaagaaaccaagacaaggagaagtaccaagagagtccagagggaagagacaaagagacctttgatctaaaaactccccaagtcactaatgaaggagaaccagagaaggggctctgtctactaccaggtgaaggagaagagggcagtgatgactgttcagaaatgtgtgatggagaagagccccaggaagcctctagctccctagcaagatgtgggtcagagggcagtgatgactgttcggaaatgtgtgatggagaagagcgccaggaagcccagaagcaaggacggaaagtgatcaagcgtgtggcacaatggatactgtggatattgcaaacaactccactttgggaaaacccaagaggaaaagaagacaaaagg

SEQ ID NO: 267042 - DNA, 1218 bp, Artificial Sequence
  derived and/or modified sequence
atggctcagcagggccagcaaggccaaatggcgagcggcgactccaaccttaacttccgcatggttgctgagatccagaacgtggaagggcagaacctccaggagcaggtgtgccccgaaccaatttttagatttttcagagaaaacaaagtcgaaattgcctccgccattaccagaccttttccctttctcatgggcctgcgagaccgatcttttatatcagaacagatgtacgaacacttccaggaggccttccgaaatttagtaccagttaccagagtgatgtattgcgttctgagcgagctggagaaaacatttgggtggtcccatttagaggctctgtttagcagaataaatcttatggcctatcctgacctgaacgagatctaccgtagtttccaaaatgtgtgttatgagcattccccattgcaaatgaataacgtaaacgacctggaggataggccccgactgcttccgtacggcaagcaagaaaactcaaacgcgtgtcatgagatggacgatatcgcagtccctcaagaagcattgagtagttcaccacggtgtgagccaggattctcctcagagtcttgcgaacagctcgccttacccaaggcgggtgggggtgacgctgaggatgcaccatctctgctgcctggcggaggggtcagttgcaaactggccatccagattgatgaaggagagagcgaggagatgcctaagctgctcccatacgacaccgaagtgctggaatcaaatgggatgatcgacgccgcacgtacctatagtacagctcccggtgaaaaacagggagaggaagagggacggaattccccacgaaagaggaatcaggacaaggagaaataccaggagtccccagagggtagagataaagagacttttgacctaaagaccccccaggtgaccaatgaaggggaacccgaaaagggattgtgtctgctgcctggcgagggagaagagggtagtgacgactgtagtgagatgtgtgatggagaggagcctcaagaagcctcttcatcactagctagatgcggatctgagggaagtgatgattgctctgaaatgtgcgacggcgaggaacgccaagaggcccagaagcaggggaggaaggtcatcaagagagtggctcagtggattctctggattctgcaaacaacccccttgtgggaaaacccacggggaaaggaagataagcggtag

SEQ ID NO: 267043 - DNA, 1218 bp, Artificial Sequence
  derived and/or modified sequence
atggcccagcagggccagcagggccagatggccagcggcgacagcaacctgaacttcagaatggtggccgagatccagaacgtggagggccagaacctgcaggagcaggtgtgccccgagcccatcttcagattcttcagagagaacaaggtggagatcgccagcgccatcaccagacccttccccttcctgatgggcctgagagacagaagcttcatcagcgagcagatgtacgagcacttccaggaggccttcagaaacctggtgcccgtgaccagagtgatgtactgcgtgctgagcgagctggagaagaccttcggctggagccacctggaggccctgttcagcagaatcaacctgatggcctaccccgacctgaacgagatctacagaagcttccagaacgtgtgctacgagcacagccccctgcagatgaacaacgtgaacgacctggaggacagacccagactgctgccctacggcaagcaggagaacagcaacgcctgccacgagatggacgacatcgccgtgccccaggaggccctgagcagcagccccagatgcgagcccggcttcagcagcgagagctgcgagcagctggccctgcccaaggccggcggcggcgacgccgaggacgcccccagcctgctgcccggcggcggcgtgagctgcaagctggccatccagatcgacgagggcgagagcgaggagatgcccaagctgctgccctacgacaccgaggtgctggagagcaacggcatgatcgacgccgccagaacctacagcaccgcccccggcgagaagcagggcgaggaggagggcagaaacagccccagaaagagaaaccaggacaaggagaagtaccaggagagccccgagggcagagacaaggagaccttcgacctgaagaccccccaggtgaccaacgagggcgagcccgagaagggcctgtgcctgctgcccggcgagggcgaggagggcagcgacgactgcagcgagatgtgcgacggcgaggagccccaggaggccagcagcagcctggccagatgcggcagcgagggcagcgacgactgcagcgagatgtgcgacggcgaggagagacaggaggcccagaagcagggcagaaaggtgatcaagagagtggcccagtggatcctgtggatcctgcagaccacccccctgtgggagaaccccagaggcaaggaggacaagagatag

SEQ ID NO: 267044 - protein, 568 aa, Artificial Sequence
  derived and/or modified sequence
MGSEVVAGNSVGPTMGAASSGPLPPPPPPLPPSSDTPETVQNGPVTPPMPPPPPLPGPAAETVPAPPLAPPLPSAPPLPGTSSPTVVFNSGLAAVKIKKPIKTKFRMPVFNWVALKPNQINGTVFNEIDDERILEDLNVDEFEEIFKTKAQGPAIDLSSSKQKIPQKGSNKVTLLEANRAKNLAITLRKAGKTADEICKAIHVFDLKTLPVDFVECLMRFLPTENEVKVLRLYERERKPLENLSDEDRFMMQFSKIERLMQKMTIMAFIGNFAESIQMLTPQLHAIIAASVSIKSSQKLKKILEIILALGNYMNSSKRGAVYGFKLQSLDLLLDTKSTDRKQTLLHYISNVVKEKYHQVSLFYNELHYVEKAAAVSLENVLLDVKELQRGMDLTKREYTMHDHNTLLKEFILNNEGKLKKLQDDAKIAQDAFDDVVKYFGENPKTTPPSVFFPVFVRFVKAYKQAEEENELRKKQEQALMEKLLEQEALMEQQDPKSPSHKSKRQQQELIAELRRRQVKDNRHVYEGKDGAIEDIITALKKNNITKFPNVHSRVRISSSTPVVEDTQS

SEQ ID NO: 267045 - DNA, 1707 bp, Artificial Sequence
  derived and/or modified sequence
atgggcagcgaggtggtggccggcaacagcgtgggccccaccatgggcgccgccagcagcggccccctgccccccccccccccccccctgccccccagcagcgacacccccgagaccgtgcagaacggccccgtgaccccccccatgcccccccccccccccctgcccggccccgccgccgagaccgtgcccgccccccccctggccccccccctgcccagcgccccccccctgcccggcaccagcagccccaccgtggtgttcaacagcggcctggccgccgtgaagatcaagaagcccatcaagaccaagttcagaatgcccgtgttcaactgggtggccctgaagcccaaccagatcaacggcaccgtgttcaacgagatcgacgacgagagaatcctggaggacctgaacgtggacgagttcgaggagatcttcaagaccaaggcccagggccccgccatcgacctgagcagcagcaagcagaagatcccccagaagggcagcaacaaggtgaccctgctggaggccaacagagccaagaacctggccatcaccctgagaaaggccggcaagaccgccgacgagatctgcaaggccatccacgtgttcgacctgaagaccctgcccgtggacttcgtggagtgcctgatgagattcctgcccaccgagaacgaggtgaaggtgctgagactgtacgagagagagagaaagcccctggagaacctgagcgacgaggacagattcatgatgcagttcagcaagatcgagagactgatgcagaagatgaccatcatggccttcatcggcaacttcgccgagagcatccagatgctgaccccccagctgcacgccatcatcgccgccagcgtgagcatcaagagcagccagaagctgaagaagatcctggagatcatcctggccctgggcaactacatgaacagcagcaagagaggcgccgtgtacggcttcaagctgcagagcctggacctgctgctggacaccaagagcaccgacagaaagcagaccctgctgcactacatcagcaacgtggtgaaggagaagtaccaccaggtgagcctgttctacaacgagctgcactacgtggagaaggccgccgccgtgagcctggagaacgtgctgctggacgtgaaggagctgcagagaggcatggacctgaccaagagagagtacaccatgcacgaccacaacaccctgctgaaggagttcatcctgaacaacgagggcaagctgaagaagctgcaggacgacgccaagatcgcccaggacgccttcgacgacgtggtgaagtacttcggcgagaaccccaagaccaccccccccagcgtgttcttccccgtgttcgtgagattcgtgaaggcctacaagcaggccgaggaggagaacgagctgagaaagaagcaggagcaggccctgatggagaagctgctggagcaggaggccctgatggagcagcaggaccccaagagccccagccacaagagcaagagacagcagcaggagctgatcgccgagctgagaagaagacaggtgaaggacaacagacacgtgtacgagggcaaggacggcgccatcgaggacatcatcaccgccctgaagaagaacaacatcaccaagttccccaacgtgcacagcagagtgagaatcagcagcagcacccccgtggtggaggacacccagagctag

SEQ ID NO: 267046 - DNA, 1707 bp, Artificial Sequence
  derived and/or modified sequence
atggggtcggaggtcgtggcggggaatagtgtgggccctaccatgggagccgcctcaagcggtcctctgccgccccccccacccccactccctccctcaagtgacacccccgaaactgtgcagaacggaccagtgactcctccgatgcctccccccccgccgttgccaggccccgccgccgaaacagtaccagcgccaccgctggccccaccactgccatctgcaccccccctaccgggcacaagctctcctaccgtggtctttaatagtggcttggcggccgtgaagatcaaaaagccaatcaaaactaagttcagaatgcctgtgtttaattgggttgcattgaagccaaatcagatcaatggcacggtgtttaacgagatcgatgacgagcgtatcctggaggatctgaacgttgatgaatttgaagaaatcttcaagaccaaagcccagggccctgccatcgacctctcctcatcaaagcaaaagattccccagaagggatcgaacaaggtaactctgctcgaggctaatcgtgccaagaatctggccatcaccctgcggaaggcagggaaaaccgctgacgaaatctgtaaggccattcacgtgtttgacctcaaaacattgccagtcgatttcgtggaatgtttaatgaggtttttacccactgaaaatgaagtcaaggtgctcagactctacgaacgggagaggaaacccctggaaaatttatcagacgaggacaggttcatgatgcaattctctaagattgaacgactgatgcagaaaatgacaatcatggctttcatcggaaactttgccgagtcaatccagatgctcactccccagctacacgctataatcgcagccagcgtgtccatcaagtccagccagaagctcaaaaagatacttgaaattatacttgccctgggcaactacatgaattcttccaagcgaggcgccgtctatggtttcaagctccagtcactagacttactccttgacacaaaaagtaccgatcgaaaacaaacccttctccattacattagcaatgtggtcaaggaaaaataccaccaagtctccctgttctataacgagttacactacgttgagaaagccgcagcagtgtccctcgaaaatgtattgctggacgtgaaagagctgcaacgcggcatggatttgacaaagagggaatatactatgcacgatcacaacacattgctgaaggagtttatcctgaataacgaagggaagctgaagaagctgcaggacgatgctaagattgctcaggacgccttcgacgatgtggttaaatattttggagagaaccctaagacaactccgcctagtgttttctttccggtatttgtacgtttcgtgaaagcatataaacaggccgaagaagaaaatgaattgcggaagaaacaagaacaggccctgatggagaaactcctggagcaggaggcattgatggagcagcaggaccctaaatcaccttcacataagagcaaacgccagcagcaagaactgatcgcggaattgagaagacggcaagtgaaagacaaccgccatgtgtatgaagggaaggatggagccatcgaagacattataaccgcgctcaaaaaaaataacatcacgaagtttcccaacgtgcactcccgcgttcggatctcttcttcaacacccgtcgtggaggacacacaaagctag

SEQ ID NO: 267047 - DNA, 3857 bp, Artificial Sequence
  derived and/or modified sequence
aaagacagtctaccctggaaaaaaagattcatgagctagagaaacaagggaccattaaaattcagaagaaaggggatggggatatcgccatactgccagttgtggcttctggcacattgtccatggggtcagaagtggtagcaggtaactctgtgggacccacaatgggggccgcttcctcaggacccttgccccctcctccaccaccactgcctccctcatcagacacacctgaaacagtgcaaaatggtccagtaacaccacctatgccaccgcctcctcctctcccaggccctgcagctgagactgtaccagctcctcccttagcacctccccttccctctgcacctccgctgcctggaacatcttcacccacagtggttttcaactcaggattagcagctgtgaaaattaagaagccaatcaagacgaagttcagaatgccagtgtttaactgggttgctctgaagcccaatcagatcaatggcacagtcttcaatgaaattgatgatgagcgaattctggaggatttaaatgtggatgaatttgaggaaatattcaagacaaaagcccaaggacctgccattgatctttcttcaagcaaacagaagataccacagaagggatcaaacaaagtgacattactagaagcaaacagggccaaaaatcttgccataactttaaggaaagctggaaagactgctgatgaaatatgtaaagctattcatgtatttgacttgaagacactgcctgtggactttgtggaatgcttgatgcggttcctaccaactgagaatgaagtgaaagtgcttcggctctacgagcgggaaaggaagcctctggaaaacttgtcagatgaagatcggttcatgatgcagtttagtaaaatcgagaggctcatgcagaagatgaccatcatggccttcattgggaactttgctgaaagcattcagatgctgactcctcaactacatgcgattatagcagcatctgtctctataaagtcgtcccaaaaactcaagaaaattctggagatcatcttagcccttggaaactacatgaatagcagtaaaagaggagcagtttatggatttaaacttcagagtttagatctgctcttagatacaaagtcaacagacagaaagcaaacactgttgcactatatatccaatgtggtgaaagaaaaatatcaccaagtgtccctgttttataatgagcttcattatgtggaaaaagctgctgcagtctcccttgagaatgttttgctggatgtcaaggagctccagaggggaatggacttgaccaagagagagtacaccatgcatgaccataacacgctgctgaaggagttcatcctcaacaatgaggggaagctgaagaagctgcaggatgatgccaagatcgcacaggatgcctttgatgatgttgtgaagtattttggagaaaaccccaagacaacaccaccctctgtcttctttcctgtctttgtccggtttgtgaaagcatataagcaagcagaagaggaaaatgagctgaggaaaaagcaggaacaagctctcatggaaaaactcctagagcaagaagctctgatggagcagcaggatccaaagtctccttctcataaatcaaagaggcagcagcaagagttaattgcagaattaagaagacgacaagttaaagataacagacatgtatatgagggaaaagatggtgccattgaagatattatcacagccttaaagaagaataatatcactaaatttccaaatgttcactcgagggtaaggatttcttctagcacaccggtggtggaggatacacagagctgatcttagaaaccaaccatacagacgagccgatgcggtgaggagaagcgtcaggcggcgctttgatgatcagaacttgcgttctgttaatggtgccgaaataacaatgtgaacctgagactggcctgcatgaatacagggtgtgcgtgaatgaaactgcccacatgaactttatgtgctacgatttaactgcagccttgaacacacacaaaaatattcttaagggctcagatttagcaaacacggaagaattttaaaatgagctctcctttcaacccttgttaacaagtgcctaaaaatggaagtacctgttcagattaatcaaagcaataggatttgatttgattaggtatctttttacaccagtatgttatttttaaccaaaatgtaaagttcttattaaactcattacctgccattgtgattgtcccatcatggcccacctggtttcctgatgttgtaaataacatcaatgcatctgctgtgggtcctttgctgagatgtcttcgaaggaattttgttttagccatatccatcaactttgtattttacttgcaatttggaagaaggaaagtcacatgatgaaactccttttgtctataaccaggccctggcaaagtgcaaacaggatgcaactgcagtggcacaaaggtcactcaatcctttgtttccagtttcacattctactacttctgcgctagagaacgatgctctgtgagaggcattcactagtatgaatgtggggatatagtgtataagacttatttgcagtactgtgttcttcagctagaggcagctttttaaataatgcaagtgtatttattagcattaaaattaacatctcagtaatcagcattagcatttctgaggaccattattaattctgagaacagaaattggtgccttgcaaggaagtttactagctctatcaacaagcattcaaggttacatctgctagcagagtagtgttaggaacctggccttactctcctctgacaatcgcaattttttcttattttttataaattcaagaagatacacttggcatcgtgtatcgaggctaagtttttcatgcatttcccagactacttatggagaattgcagtttaagttgctgaaaagtattaacatggtattaagcttaaataatacgtaatgggactagatggcccactaagccactgttattttccttcctctctggcagggcacttgatccattccaaagtcaaaaactggactgaagctaaatttgtacttttcataatatacattctgcttctggcttatcttcttggtacatcaatatattaattgtaaagtttattgtatagtatttaaccgctgaagttcctattttatgttgtgcttatgtgaaccccttggtgaaggtcccttttccttggatgtgtagttatatgatctttttaaatgtacagatattttgctataaaatcggtgcagttttttatggtttttacacttctctttaattcccacctaagcctctgggtaatattgtaaatattgttttaaaatgcatcagcctatgctatacaatctgaatgttattttaacttatagttttttttaatatatatatttaactataaggacagtttagggaacaagttacctaccacatttcactttagtgtacctatttacagaaagattaaactgccacctgcgggcacattcccataaatgtgtactttactttaaaaagaacatgccacgattttgtctttctgtggactcaacattcacttcgattaaaaatagcaatttgaccaagttggacttccactacaaagcagctgttttccaaagttcaatgctgacatatatgtatattaaaataattgcctatttattaatctacaaatagacaacgttggcatgttcttttctgtttgtctattaatgggcctgcttcttagcaatattagaatgttttataaaagcaattcatgttacttttctggtcttttcatggcatatgagcaaataataaactatttacactac

SEQ ID NO: 267048 - DNA, 1707 bp, Artificial Sequence
  derived and/or modified sequence
atgggcagcgaggtggtggccggcaacagcgtgggccccaccatgggcgccgccagcagcggccccctgcccccacctcctccacccctgccccccagcagtgacaccccagagaccgtgcagaatggacctgtgaccccacccatgcctcctcctccacccctgcccggccctgctgctgagaccgtgcctgccccacccctggccccacccctgcccagcgccccacccctgcccggcaccagcagccccaccgtggtgttcaacagcggcctggccgctgtgaagatcaagaagcccatcaagaccaagttcaggatgcctgtgttcaactgggtggccctgaagcccaaccagatcaatggaacagtgttcaatgaaattgatgatgagcgcatcctggaggacctgaatgtggatgaatttgaggagatcttcaagaccaaggcccagggccctgccatcgacctgagcagcagcaagcagaagatcccccagaagggcagcaacaaggtgaccctgctggaggccaacagagccaagaacctggccatcaccctgaggaaggccggcaagacagcagatgagatctgcaaggccatccacgtgtttgacctgaagaccctgcctgtggactttgtggagtgcctgatgaggttcctgcccacagaaaatgaggtgaaggtgctgcggctgtatgagcgggagaggaagcccctggagaacctgagtgatgaggaccgcttcatgatgcagttcagcaagattgaaaggctgatgcagaagatgaccatcatggccttcatcggcaactttgctgagagcatccagatgctgaccccccagctgcacgccatcatcgccgcctctgtgtccatcaagagcagccagaagctgaagaagatcctggagatcatcctggccctgggcaactacatgaacagcagcaagagaggagctgtgtatggcttcaagctgcagagcctggacctgctgctggacaccaagagcacagacaggaagcagaccctgctgcactacatcagcaatgtggtgaaggagaagtaccaccaggtgtccctcttctacaatgagctgcactacgtggagaaggctgctgctgtgtccctggagaatgtgctgctggatgtgaaggagctgcagaggggcatggacctgaccaagcgggagtacaccatgcatgaccacaacaccctgctgaaggagttcatcctgaacaatgaaggcaagctgaagaagctgcaggatgatgccaagatcgcccaggatgcctttgatgatgtggtgaagtactttggagagaaccccaagaccaccccaccttctgtgttcttccctgtgtttgtgcgctttgtgaaggcctacaagcaggccgaggaggagaatgagctgaggaagaagcaggagcaggccctgatggagaagctgctggagcaggaggccctgatggagcagcaggaccccaagagccccagccacaagagcaagaggcagcagcaggagctgattgctgagctgcggcggcggcaggtgaaggacaacagacatgtgtatgagggcaaggatggagccatcgaggacatcatcacagccctgaagaagaacaacatcaccaagttccccaacgtgcacagccgggtgcgcatcagcagcagcacccctgtggtggaggacacccagagctag

SEQ ID NO: 267049 - DNA, 1707 bp, Artificial Sequence
  derived and/or modified sequence
atgggcagcgaggtggtggccggcaacagcgtgggccccaccatgggcgccgccagcagcgggcccctccccccgcctccaccccctttacccccctcgtcggacacgcctgagaccgtgcagaacggccctgtgaccccgccgatgcccccaccccctccccttcctggacctgccgccgaaaccgtgccagctccgcctctcgcaccaccactcccatcggctcctcccctgccaggaacatcgtctcctacagtggtttttaactctggtctcgctgccgtgaaaattaaaaagccgatcaagacgaagtttaggatgcccgtgtttaactgggtggcccttaaaccgaaccagattaacggaacagttttcaacgagattgacgatgaacgtatcctcgaggacctaaatgtggacgaattcgaagaaatctttaaaaccaaggcacaggggccagccatcgatctttctagcagcaagcagaagatccctcagaaagggtcgaacaaagtgacactgctcgaggcaaatcgagcaaagaatctggccatcacgcttaggaaagccggcaagaccgccgatgaaatctgtaaggctatccacgtttttgacctgaagaccctgccggttgatttcgtggaatgcctgatgaggttcctgccaaccgaaaacgaggtgaaggttctgagactgtacgagcgtgaaaggaagcccctcgagaatctgagcgatgaagaccggtttatgatgcagttttccaaaattgagcgcctgatgcagaaaatgactatcatggccttcattggcaattttgccgagtctatccagatgcttacacctcagttgcacgctatcattgctgccagcgtaagcatcaagtctagccagaagctgaaaaagattctggaaattatcctcgcgctggggaattatatgaactcctccaagcggggcgcagtctatggcttcaaactgcaatctctcgacctgctgttggacacaaagagcaccgatcgaaagcagacactgctgcactacatctccaacgtggtcaaggaaaagtaccatcaagtgtcgttattctacaatgaactgcattatgtggagaaagctgcagccgttagcctggagaacgtcttgctggacgtgaaggagcttcaacgggggatggacttgaccaagcgggaatatacaatgcatgaccataacaccttactcaaagaattcattctgaacaatgagggcaagctcaagaaattgcaggacgatgctaagatagcacaggatgcttttgacgatgtggtgaagtatttcggcgagaaccccaagactactccgcccagcgtattctttccagtgtttgttaggttcgttaaagcctacaagcaagcagaggaggagaacgagctgcgaaagaagcaggaacaggccctcatggagaagctcctagagcaagaggcccttatggaacagcaagatccgaagagtcccagtcacaaatcaaaacgccaacagcaggagctgatagccgagcttcgccggcgccaggttaaggacaatagacatgtctacgaggggaaagacggcgctatcgaagacattatcacagcactcaagaagaacaacattacaaagttccccaacgtgcactctcgtgtccgcatcagttcttcaacccccgtggttgaggacacccagtcctag

SEQ ID NO: 267050 - DNA, 1707 bp, Artificial Sequence
  derived and/or modified sequence
atgggcagtgaggtagtggccggtaactccgtgggcccaaccatgggcgcagcgtccagcggtccgctacccccacctccaccaccattaccgccatcgagcgatacacctgagacggtgcagaatggacccgtgactccccctatgcctccaccacccccacttccagggccagccgctgaaaccgttcctgcccctcctcttgcgccacctctgccctccgctccccctctgcccggaacatcttctcccaccgtagtattcaatagcggacttgccgcagtgaaaatcaagaagcctataaagaccaaattccgcatgccagtgttcaactgggtggctctgaaacctaaccaaataaacggtaccgtgttcaatgaaattgatgacgagaggattttagaggacctaaatgtggatgaatttgaggagatcttcaaaactaaagcccagggccctgccatcgacctgagtagtagcaaacagaaaatacctcaaaaaggctccaacaaagtgaccctactcgaagcaaaccgcgctaagaacctcgccataacactgagaaaggccggtaagaccgcagacgaaatctgtaaagctatccacgtgtttgacctgaaaactctgccagtggattttgtcgagtgcctgatgcggttccttcctaccgaaaatgaggttaaggtgcttcgcctctatgaaagggaacgcaagccactggaaaatctctcggatgaggaccgcttcatgatgcagttttccaaaattgagcggctgatgcagaaaatgacgatcatggcctttatcggtaactttgcagagagcattcagatgttgaccccacaactgcacgccattatcgccgctagcgtgagtatcaagtcctctcagaagctcaagaaaatactggagataatcttggctctaggtaactatatgaatagttccaagcgcggagctgtctacgggtttaaactacagagcttggacctgttgctggatactaaatccaccgacaggaagcagacgctgctgcattacatttctaacgtcgtgaaggaaaaataccaccaggtctccctcttttacaacgagctccactatgtggagaaggcagctgcagtctctctcgagaacgttctgctggatgtgaaggagctgcagagagggatggacctgaccaaacgggaatacacgatgcatgaccacaatacactgctgaaggagttcatccttaacaacgagggaaaactaaagaagctacaggatgacgccaagatcgcacaggacgcttttgacgatgttgtgaaatattttggcgagaaccccaagacaactccaccctccgtttttttcccagtttttgttcgttttgtgaaggcctacaagcaggctgaggaagaaaatgagctgcgtaaaaaacaggaacaggctttgatggagaaattactggagcaagaagccttgatggaacagcaggatccaaaaagtccaagccacaaaagcaagagacagcagcaggaactcatcgcagaattgagaagacggcaggttaaagataatcggcacgtatacgagggcaaagatggcgcaattgaagatattattactgctctgaagaagaataacatcactaagttccctaatgtgcactccagagtgcgaatttcaagtagcactccagttgtagaggatacgcagtcatag

SEQ ID NO: 267051 - protein, 1498 aa, Artificial Sequence
  derived and/or modified sequence
MSARTAPRPQVLLLPLLLVLLAAAPAASKGCVCKDKGQCFCDGAKGEKGEKGFPGPPGSPGQKGFTGPEGLPGPQGPKSFRAIPSYSGGKSLQGISGLPGFSGSPGLPGTPGNTGPYGLVGVPGCSGSKGEQGFPGLPGTLGYPGIPGIHNLKIFKGAPAKEEDIELDAKGDPGLPGAPGPQGLPGPPGFPGPVGPPGPPGFFGFPGAMGPRGPKSFVLSSRISTKGEKGVKGLTGPPGPPGTVIVTLTGPDNRTDLKGEKGDKGAMGEPGPPGPSGLPGESYGSEKGAPGDPGLQGKPGKDGVPGFPGSEGVKGNRGFPGLMGEDGIKEEKRDVAIVSFSSKTEYYDTYQEKGDEGTPGPPGPRGARGPQGKNKFRCIPGSQGSSRPGLRGAPGWPGLKGSKGERGRPGKDAMGTPGSPGCAGSPGLPGSPGPPGPPGDIVFRKGPPGDHGLPGYLGSPGIPGVDGPKGEPGLLCTQCPYIPGPPGLPGLPGLHGVKGIPGRQGAAGLKGSPGSPGNTGLPGFPGFPGAQGDPGLKGEKGETLQPEGQVGVPGDPGLRGQPGRKGLDGIPGTPGVKGLPGPKGELALSGEKGDQGPPGDPGSPGSPGPAGPAGPPGYGPQGEPGLQGTQGVPGAPGPPGEAGPRGELSVSTPVPGPPGPPGPPGHPGPQGPPGIPGSLGKCGDPGLPGPDGEPGIPGIGFPGPPGPKGDQGFPGTKGSLGCPGKMGEPGLPGKPGLPGAKGEPAVAMPGGPGTPGFPGERGNSGEHGEIGLPGLPGLPGTPGNEGLDGPRGDPGQPGPPGEQGPPGRCIEGPRGAQGLPGLNGLKGQQGRRGKTGPKGDPGIPGLDRSGFPGETGSPGIPGHQGEMGPLGQRGYPGNPGILGPPGEDGVIGMMGFPGAIGPPGPPGNPGTPGQRGSPGIPGVKGQRGTPGAKGEQGDKGNPGPSEISHVIGDKGEPGLKGFAGNPGEKGNRGVPGMPGLKGLKGLPGPAGPPGPRGDLGSTGNPGEPGLRGIPGSMGNMGMPGSKGKRGTLGFPGRAGRPGLPGIHGLQGDKGEPGYSEGTRPGPPGPTGDPGLPGDMGKKGEMGQPGPPGHLGPAGPEGAPGSPGSPGLPGKPGPHGDLGFKGIKGLLGPPGIRGPPGLPGFPGSPGPMGIRGDQGRDGIPGPAGEKGETGLLRAPPGPRGNPGAQGAKGDRGAPGFPGLPGRKGAMGDAGPRGPTGIEGFPGPPGLPGAIIPGQTGNRGPPGSRGSPGAPGPPGPPGSHVIGIKGDKGSMGHPGPKGPPGTAGDMGPPGRLGAPGTPGLPGPRGDPGFQGFPGVKGEKGNPGFLGSIGPPGPIGPKGPPGVRGDPGTLKIISLPGSPGPPGTPGEPGMQGEPGPPGPPGNLGPCGPRGKPGKDGKPGTPGPAGEKGNKGSKGEPGPAGSDGLPGLKGKRGDSGSPATWTTRGFVFTRHSQTTAIPSCPEGTVPLYSGFSFLFVQGNQRAHGQDLDALFVKVLRSP

SEQ ID NO: 267052 - protein, 1637 aa, Artificial Sequence
  derived and/or modified sequence
MSARTAPRPQVLLLPLLLVLLAAAPAASKGCVCKDKGQCFCDGAKGEKGEKGFPGPPGSPGQKGFTGPEGLPGPQGPKSFRAIPSYSGGKSLQGISGLPGFSGSPGLPGTPGNTGPYGLVGVPGCSGSKGEQGFPGLPGTLGYPGIPGIHNLKIFKGAPAKEEDIELDAKGDPGLPGAPGPQGLPGPPGFPGPVGPPGPPGFFGFPGAMGPRGPKSFVLSSRISTKGEKGVKGLTGPPGPPGTVIVTLTGPDNRTDLKGEKGDKGAMGEPGPPGPSGLPGESYGSEKGAPGDPGLQGKPGKDGVPGFPGSEGVKGNRGFPGLMGEDGIKEEKRDVAIVSFSSKTEYYDTYQEKGDEGTPGPPGPRGARGPQGKNKFRCIPGSQGSSRPGLRGAPGWPGLKGSKGERGRPGKDAMGTPGSPGCAGSPGLPGSPGPPGPPGDIVFRKGPPGDHGLPGYLGSPGIPGVDGPKGEPGLLCTQCPYIPGPPGLPGLPGLHGVKGIPGRQGAAGLKGSPGSPGNTGLPGFPGFPGAQGDPGLKGEKGETLQPEGQVGVPGDPGLRGQPGRKGLDGIPGTPGVKGLPGPKGELALSGEKGDQGPPGDPGSPGSPGPAGPAGPPGYGPQGEPGLQGTQGVPGAPGPPGEAGPRGELSVSTPVPGPPGPPGPPGHPGPQGPPGIPGSLGKCGDPGLPGPDGEPGIPGIGFPGPPGPKGDQGFPGTKGSLGCPGKMGEPGLPGKPGLPGAKGEPAVAMPGGPGTPGFPGERGNSGEHGEIGLPGLPGLPGTPGNEGLDGPRGDPGQPGPPGEQGPPGRCIEGPRGAQGLPGLNGLKGQQGRRGKTGPKGDPGIPGLDRSGFPGETGSPGIPGHQGEMGPLGQRGYPGNPGILGPPGEDGVIGMMGFPGAIGPPGPPGNPGTPGQRGSPGIPGVKGQRGTPGAKGEQGDKGNPGPSEISHVIGDKGEPGLKGFAGNPGEKGNRGVPGMPGLKGLKGLPGPAGPPGPRGDLGSTGNPGEPGLRGIPGSMGNMGMPGSKGKRGTLGFPGRAGRPGLPGIHGLQGDKGEPGYSEGTRPGPPGPTGDPGLPGDMGKKGEMGQPGPPGHLGPAGPEGAPGSPGSPGLPGKPGPHGDLGFKGIKGLLGPPGIRGPPGLPGFPGSPGPMGIRGDQGRDGIPGPAGEKGETGLLRAPPGPRGNPGAQGAKGDRGAPGFPGLPGRKGAMGDAGPRGPTGIEGFPGPPGLPGAIIPGQTGNRGPPGSRGSPGAPGPPGPPGSHVIGIKGDKGSMGHPGPKGPPGTAGDMGPPGRLGAPGTPGLPGPRGDPGFQGFPGVKGEKGNPGFLGSIGPPGPIGPKGPPGVRGDPGTLKIISLPGSPGPPGTPGEPGMQGEPGPPGPPGNLGPCGPRGKPGKDGKPGTPGPAGEKGNKGSKGEPGPAGSDGLPGLKGKRGDSGSPATWTTRGFVFTRHSQTTAIPSCPEGTVPLYSGFSFLFVQGNQRAHGQDLGTLGSCLQRFTTMPFLFCNVNDVCNFASRNDYSYWLSTPALMPMNMAPITGRALEPYISRCTVCEGPAIAIAVHSQTTDIPPCPHGWISLWKGFSFIMKAYSINCESWGIRKNNKSLSGVHEEKTLKLKKTAELLFFILKNKVMTEHAVI

SEQ ID NO: 267053 - protein, 1494 aa, Artificial Sequence
  derived and/or modified sequence
MSARTAPRPQVLLLPLLLVLLAAAPAASKGCVCKDKGQCFCDGAKGEKGEKGFPGPPGSPGQKGFTGPEGLPGPQGPKSFRAIPSYSGGKSLQGISGLPGFSGSPGLPGTPGNTGPYGLVGVPGCSGSKGEQGFPGLPGTLGYPGIPGIHNLKIFKGAPAKEEDIELDAKGDPGLPGAPGPQGLPGPPGFPGPVGPPGPPGFFGFPGAMGPRGPKSFVLSSRISTKGEKGVKGLTGPPGPPGTVIVTLTGPDNRTDLKGEKGDKGAMGEPGPPGPSGLPGESYGSEKGAPGDPGLQGKPGKDGVPGFPGSEGVKGNRGFPGLMGEDGIKEEKRDVAIVSFSSKTEYYDTYQEKGDEGTPGPPGPRGARGPQGKNKFRCIPGSQGSSRPGLRGAPGWPGLKGSKGERGRPGKDAMGTPGSPGCAGSPGLPGSPGPPGPPGDIVFRKGPPGDHGLPGYLGSPGIPGVDGPKGEPGLLCTQCPYIPGPPGLPGLPGLHGVKGIPGRQGAAGLKGSPGSPGNTGLPGFPGFPGAQGDPGLKGEKGETLQPEGQVGVPGDPGLRGQPGRKGLDGIPGTPGVKGLPGPKGELALSGEKGDQGPPGDPGSPGSPGPAGPAGPPGYGPQGEPGLQGTQGVPGAPGPPGEAGPRGELSVSTPVPGPPGPPGPPGHPGPQGPPGIPGSLGKCGDPGLPGPDGEPGIPGIGFPGPPGPKGDQGFPGTKGSLGCPGKMGEPGLPGKPGLPGAKGEPAVAMPGGPGTPGFPGERGNSGEHGEIGLPGLPGLPGTPGNEGLDGPRGDPGQPGPPGEQGPPGRCIEGPRGAQGLPGLNGLKGQQGRRGKTGPKGDPGIPGLDRSGFPGETGSPGIPGHQGEMGPLGQRGYPGNPGILGPPGEDGVIGMMGFPGAIGPPGPPGNPGTPGQRGSPGIPGVKGQRGTPGAKGEQGDKGNPGPSEISHVIGDKGEPGLKGFAGNPGEKGNRGVPGMPGLKGLKGLPGPAGPPGPRGDLGSTGNPGEPGLRGIPGSMGNMGMPGSKGKRGTLGFPGRAGRPGLPGIHGLQGDKGEPGYSEGTRPGPPGPTGDPGLPGDMGKKGEMGQPGPPGHLGPAGPEGAPGSPGSPGLPGKPGPHGDLGFKGIKGLLGPPGIRGPPGLPGFPGSPGPMGIRGDQGRDGIPGPAGEKGETGLLRAPPGPRGNPGAQGAKGDRGAPGFPGLPGRKGAMGDAGPRGPTGIEGFPGPPGLPGAIIPGQTGNRGPPGSRGSPGAPGPPGPPGSHVIGIKGDKGSMGHPGPKGPPGTAGDMGPPGRLGAPGTPGLPGPRGDPGFQGFPGVKGEKGNPGFLGSIGPPGPIGPKGPPGVRGDPGTLKIISLPGSPGPPGTPGEPGMQGEPGPPGPPGNLGPCGPRGKPGKDGKPGTPGPAGEKGNKGSKGEPGPAGSDGLPGLKGKRGDSGSPATWTTRGFVFTRHSQTTAIPSCPEGTVPLYSGFSFLFVQGNQRAHGQDLESLFHQL

SEQ ID NO: 267054 - DNA, 357 bp, Artificial Sequence
  derived and/or modified sequence
atggtgaccccagctggctgcctgggcggcaggaaccagggcccccgggagatccctggaacagccttccccaggagcagcagagctggccagacaggccaggccgtgtctggggcccaggtgtcctcctggagggagcggcagccctgcagcggcagccggggccccctgcacatcctgggcacagatggaaatgtggacaccaccgggaagctgggcctggtgcccaccccaccccgcatccagaaggagaccaagcagggcgccctgtgtggcatgaagccacccttcctgcctgaggccctgctgattgtgtggtggctgccctttgtggccgtgagcccctgcctcttctag

SEQ ID NO: 267055 - DNA, 4497 bp, Artificial Sequence
  derived and/or modified sequence
atgagcgccagaaccgcccccagaccccaggtgctgctgctgcccctgctgctggtgctgctggccgccgcccccgccgccagcaagggctgcgtgtgcaaggacaagggccagtgcttctgcgacggcgccaagggcgagaagggcgagaagggcttccccggcccccccggcagccccggccagaagggcttcaccggccccgagggcctgcccggcccccagggccccaagagcttcagagccatccccagctacagcggcggcaagagcctgcagggcatcagcggcctgcccggcttcagcggcagccccggcctgcccggcacccccggcaacaccggcccctacggcctggtgggcgtgcccggctgcagcggcagcaagggcgagcagggcttccccggcctgcccggcaccctgggctaccccggcatccccggcatccacaacctgaagatcttcaagggcgcccccgccaaggaggaggacatcgagctggacgccaagggcgaccccggcctgcccggcgcccccggcccccagggcctgcccggcccccccggcttccccggccccgtgggcccccccggcccccccggcttcttcggcttccccggcgccatgggccccagaggccccaagagcttcgtgctgagcagcagaatcagcaccaagggcgagaagggcgtgaagggcctgaccggcccccccggcccccccggcaccgtgatcgtgaccctgaccggccccgacaacagaaccgacctgaagggcgagaagggcgacaagggcgccatgggcgagcccggcccccccggccccagcggcctgcccggcgagagctacggcagcgagaagggcgcccccggcgaccccggcctgcagggcaagcccggcaaggacggcgtgcccggcttccccggcagcgagggcgtgaagggcaacagaggcttccccggcctgatgggcgaggacggcatcaaggaggagaagagagacgtggccatcgtgagcttcagcagcaagaccgagtactacgacacctaccaggagaagggcgacgagggcacccccggcccccccggccccagaggcgccagaggcccccagggcaagaacaagttcagatgcatccccggcagccagggcagcagcagacccggcctgagaggcgcccccggctggcccggcctgaagggcagcaagggcgagagaggcagacccggcaaggacgccatgggcacccccggcagccccggctgcgccggcagccccggcctgcccggcagccccggcccccccggcccccccggcgacatcgtgttcagaaagggcccccccggcgaccacggcctgcccggctacctgggcagccccggcatccccggcgtggacggccccaagggcgagcccggcctgctgtgcacccagtgcccctacatccccggcccccccggcctgcccggcctgcccggcctgcacggcgtgaagggcatccccggcagacagggcgccgccggcctgaagggcagccccggcagccccggcaacaccggcctgcccggcttccccggcttccccggcgcccagggcgaccccggcctgaagggcgagaagggcgagaccctgcagcccgagggccaggtgggcgtgcccggcgaccccggcctgagaggccagcccggcagaaagggcctggacggcatccccggcacccccggcgtgaagggcctgcccggccccaagggcgagctggccctgagcggcgagaagggcgaccagggcccccccggcgaccccggcagccccggcagccccggccccgccggccccgccggcccccccggctacggcccccagggcgagcccggcctgcagggcacccagggcgtgcccggcgcccccggcccccccggcgaggccggccccagaggcgagctgagcgtgagcacccccgtgcccggcccccccggcccccccggcccccccggccaccccggcccccagggcccccccggcatccccggcagcctgggcaagtgcggcgaccccggcctgcccggccccgacggcgagcccggcatccccggcatcggcttccccggcccccccggccccaagggcgaccagggcttccccggcaccaagggcagcctgggctgccccggcaagatgggcgagcccggcctgcccggcaagcccggcctgcccggcgccaagggcgagcccgccgtggccatgcccggcggccccggcacccccggcttccccggcgagagaggcaacagcggcgagcacggcgagatcggcctgcccggcctgcccggcctgcccggcacccccggcaacgagggcctggacggccccagaggcgaccccggccagcccggcccccccggcgagcagggcccccccggcagatgcatcgagggccccagaggcgcccagggcctgcccggcctgaacggcctgaagggccagcagggcagaagaggcaagaccggccccaagggcgaccccggcatccccggcctggacagaagcggcttccccggcgagaccggcagccccggcatccccggccaccagggcgagatgggccccctgggccagagaggctaccccggcaaccccggcatcctgggcccccccggcgaggacggcgtgatcggcatgatgggcttccccggcgccatcggcccccccggcccccccggcaaccccggcacccccggccagagaggcagccccggcatccccggcgtgaagggccagagaggcacccccggcgccaagggcgagcagggcgacaagggcaaccccggccccagcgagatcagccacgtgatcggcgacaagggcgagcccggcctgaagggcttcgccggcaaccccggcgagaagggcaacagaggcgtgcccggcatgcccggcctgaagggcctgaagggcctgcccggccccgccggcccccccggccccagaggcgacctgggcagcaccggcaaccccggcgagcccggcctgagaggcatccccggcagcatgggcaacatgggcatgcccggcagcaagggcaagagaggcaccctgggcttccccggcagagccggcagacccggcctgcccggcatccacggcctgcagggcgacaagggcgagcccggctacagcgagggcaccagacccggcccccccggccccaccggcgaccccggcctgcccggcgacatgggcaagaagggcgagatgggccagcccggcccccccggccacctgggccccgccggccccgagggcgcccccggcagccccggcagccccggcctgcccggcaagcccggcccccacggcgacctgggcttcaagggcatcaagggcctgctgggcccccccggcatcagaggcccccccggcctgcccggcttccccggcagccccggccccatgggcatcagaggcgaccagggcagagacggcatccccggccccgccggcgagaagggcgagaccggcctgctgagagccccccccggccccagaggcaaccccggcgcccagggcgccaagggcgacagaggcgcccccggcttccccggcctgcccggcagaaagggcgccatgggcgacgccggccccagaggccccaccggcatcgagggcttccccggcccccccggcctgcccggcgccatcatccccggccagaccggcaacagaggcccccccggcagcagaggcagccccggcgcccccggcccccccggcccccccggcagccacgtgatcggcatcaagggcgacaagggcagcatgggccaccccggccccaagggcccccccggcaccgccggcgacatgggcccccccggcagactgggcgcccccggcacccccggcctgcccggccccagaggcgaccccggcttccagggcttccccggcgtgaagggcgagaagggcaaccccggcttcctgggcagcatcggcccccccggccccatcggccccaagggcccccccggcgtgagaggcgaccccggcaccctgaagatcatcagcctgcccggcagccccggcccccccggcacccccggcgagcccggcatgcagggcgagcccggcccccccggcccccccggcaacctgggcccctgcggccccagaggcaagcccggcaaggacggcaagcccggcacccccggccccgccggcgagaagggcaacaagggcagcaagggcgagcccggccccgccggcagcgacggcctgcccggcctgaagggcaagagaggcgacagcggcagccccgccacctggaccaccagaggcttcgtgttcaccagacacagccagaccaccgccatccccagctgccccgagggcaccgtgcccctgtacagcggcttcagcttcctgttcgtgcagggcaaccagagagcccacggccaggacctggacgccctgttcgtgaaggtgctgagaagcccctag

SEQ ID NO: 267056 - DNA, 4914 bp, Artificial Sequence
  derived and/or modified sequence
atgagcgccagaaccgcccccagaccccaggtgctgctgctgcccctgctgctggtgctgctggccgccgcccccgccgccagcaagggctgcgtgtgcaaggacaagggccagtgcttctgcgacggcgccaagggcgagaagggcgagaagggcttccccggcccccccggcagccccggccagaagggcttcaccggccccgagggcctgcccggcccccagggccccaagagcttcagagccatccccagctacagcggcggcaagagcctgcagggcatcagcggcctgcccggcttcagcggcagccccggcctgcccggcacccccggcaacaccggcccctacggcctggtgggcgtgcccggctgcagcggcagcaagggcgagcagggcttccccggcctgcccggcaccctgggctaccccggcatccccggcatccacaacctgaagatcttcaagggcgcccccgccaaggaggaggacatcgagctggacgccaagggcgaccccggcctgcccggcgcccccggcccccagggcctgcccggcccccccggcttccccggccccgtgggcccccccggcccccccggcttcttcggcttccccggcgccatgggccccagaggccccaagagcttcgtgctgagcagcagaatcagcaccaagggcgagaagggcgtgaagggcctgaccggcccccccggcccccccggcaccgtgatcgtgaccctgaccggccccgacaacagaaccgacctgaagggcgagaagggcgacaagggcgccatgggcgagcccggcccccccggccccagcggcctgcccggcgagagctacggcagcgagaagggcgcccccggcgaccccggcctgcagggcaagcccggcaaggacggcgtgcccggcttccccggcagcgagggcgtgaagggcaacagaggcttccccggcctgatgggcgaggacggcatcaaggaggagaagagagacgtggccatcgtgagcttcagcagcaagaccgagtactacgacacctaccaggagaagggcgacgagggcacccccggcccccccggccccagaggcgccagaggcccccagggcaagaacaagttcagatgcatccccggcagccagggcagcagcagacccggcctgagaggcgcccccggctggcccggcctgaagggcagcaagggcgagagaggcagacccggcaaggacgccatgggcacccccggcagccccggctgcgccggcagccccggcctgcccggcagccccggcccccccggcccccccggcgacatcgtgttcagaaagggcccccccggcgaccacggcctgcccggctacctgggcagccccggcatccccggcgtggacggccccaagggcgagcccggcctgctgtgcacccagtgcccctacatccccggcccccccggcctgcccggcctgcccggcctgcacggcgtgaagggcatccccggcagacagggcgccgccggcctgaagggcagccccggcagccccggcaacaccggcctgcccggcttccccggcttccccggcgcccagggcgaccccggcctgaagggcgagaagggcgagaccctgcagcccgagggccaggtgggcgtgcccggcgaccccggcctgagaggccagcccggcagaaagggcctggacggcatccccggcacccccggcgtgaagggcctgcccggccccaagggcgagctggccctgagcggcgagaagggcgaccagggcccccccggcgaccccggcagccccggcagccccggccccgccggccccgccggcccccccggctacggcccccagggcgagcccggcctgcagggcacccagggcgtgcccggcgcccccggcccccccggcgaggccggccccagaggcgagctgagcgtgagcacccccgtgcccggcccccccggcccccccggcccccccggccaccccggcccccagggcccccccggcatccccggcagcctgggcaagtgcggcgaccccggcctgcccggccccgacggcgagcccggcatccccggcatcggcttccccggcccccccggccccaagggcgaccagggcttccccggcaccaagggcagcctgggctgccccggcaagatgggcgagcccggcctgcccggcaagcccggcctgcccggcgccaagggcgagcccgccgtggccatgcccggcggccccggcacccccggcttccccggcgagagaggcaacagcggcgagcacggcgagatcggcctgcccggcctgcccggcctgcccggcacccccggcaacgagggcctggacggccccagaggcgaccccggccagcccggcccccccggcgagcagggcccccccggcagatgcatcgagggccccagaggcgcccagggcctgcccggcctgaacggcctgaagggccagcagggcagaagaggcaagaccggccccaagggcgaccccggcatccccggcctggacagaagcggcttccccggcgagaccggcagccccggcatccccggccaccagggcgagatgggccccctgggccagagaggctaccccggcaaccccggcatcctgggcccccccggcgaggacggcgtgatcggcatgatgggcttccccggcgccatcggcccccccggcccccccggcaaccccggcacccccggccagagaggcagccccggcatccccggcgtgaagggccagagaggcacccccggcgccaagggcgagcagggcgacaagggcaaccccggccccagcgagatcagccacgtgatcggcgacaagggcgagcccggcctgaagggcttcgccggcaaccccggcgagaagggcaacagaggcgtgcccggcatgcccggcctgaagggcctgaagggcctgcccggccccgccggcccccccggccccagaggcgacctgggcagcaccggcaaccccggcgagcccggcctgagaggcatccccggcagcatgggcaacatgggcatgcccggcagcaagggcaagagaggcaccctgggcttccccggcagagccggcagacccggcctgcccggcatccacggcctgcagggcgacaagggcgagcccggctacagcgagggcaccagacccggcccccccggccccaccggcgaccccggcctgcccggcgacatgggcaagaagggcgagatgggccagcccggcccccccggccacctgggccccgccggccccgagggcgcccccggcagccccggcagccccggcctgcccggcaagcccggcccccacggcgacctgggcttcaagggcatcaagggcctgctgggcccccccggcatcagaggcccccccggcctgcccggcttccccggcagccccggccccatgggcatcagaggcgaccagggcagagacggcatccccggccccgccggcgagaagggcgagaccggcctgctgagagccccccccggccccagaggcaaccccggcgcccagggcgccaagggcgacagaggcgcccccggcttccccggcctgcccggcagaaagggcgccatgggcgacgccggccccagaggccccaccggcatcgagggcttccccggcccccccggcctgcccggcgccatcatccccggccagaccggcaacagaggcccccccggcagcagaggcagccccggcgcccccggcccccccggcccccccggcagccacgtgatcggcatcaagggcgacaagggcagcatgggccaccccggccccaagggcccccccggcaccgccggcgacatgggcccccccggcagactgggcgcccccggcacccccggcctgcccggccccagaggcgaccccggcttccagggcttccccggcgtgaagggcgagaagggcaaccccggcttcctgggcagcatcggcccccccggccccatcggccccaagggcccccccggcgtgagaggcgaccccggcaccctgaagatcatcagcctgcccggcagccccggcccccccggcacccccggcgagcccggcatgcagggcgagcccggcccccccggcccccccggcaacctgggcccctgcggccccagaggcaagcccggcaaggacggcaagcccggcacccccggccccgccggcgagaagggcaacaagggcagcaagggcgagcccggccccgccggcagcgacggcctgcccggcctgaagggcaagagaggcgacagcggcagccccgccacctggaccaccagaggcttcgtgttcaccagacacagccagaccaccgccatccccagctgccccgagggcaccgtgcccctgtacagcggcttcagcttcctgttcgtgcagggcaaccagagagcccacggccaggacctgggcaccctgggcagctgcctgcagagattcaccaccatgcccttcctgttctgcaacgtgaacgacgtgtgcaacttcgccagcagaaacgactacagctactggctgagcacccccgccctgatgcccatgaacatggcccccatcaccggcagagccctggagccctacatcagcagatgcaccgtgtgcgagggccccgccatcgccatcgccgtgcacagccagaccaccgacatccccccctgcccccacggctggatcagcctgtggaagggcttcagcttcatcatgaaggcctacagcatcaactgcgagagctggggcatcagaaagaacaacaagagcctgagcggcgtgcacgaggagaagaccctgaagctgaagaagaccgccgagctgctgttcttcatcctgaagaacaaggtgatgaccgagcacgccgtgatctag

SEQ ID NO: 267057 - DNA, 4485 bp, Artificial Sequence
  derived and/or modified sequence
atgagcgccagaaccgcccccagaccccaggtgctgctgctgcccctgctgctggtgctgctggccgccgcccccgccgccagcaagggctgcgtgtgcaaggacaagggccagtgcttctgcgacggcgccaagggcgagaagggcgagaagggcttccccggcccccccggcagccccggccagaagggcttcaccggccccgagggcctgcccggcccccagggccccaagagcttcagagccatccccagctacagcggcggcaagagcctgcagggcatcagcggcctgcccggcttcagcggcagccccggcctgcccggcacccccggcaacaccggcccctacggcctggtgggcgtgcccggctgcagcggcagcaagggcgagcagggcttccccggcctgcccggcaccctgggctaccccggcatccccggcatccacaacctgaagatcttcaagggcgcccccgccaaggaggaggacatcgagctggacgccaagggcgaccccggcctgcccggcgcccccggcccccagggcctgcccggcccccccggcttccccggccccgtgggcccccccggcccccccggcttcttcggcttccccggcgccatgggccccagaggccccaagagcttcgtgctgagcagcagaatcagcaccaagggcgagaagggcgtgaagggcctgaccggcccccccggcccccccggcaccgtgatcgtgaccctgaccggccccgacaacagaaccgacctgaagggcgagaagggcgacaagggcgccatgggcgagcccggcccccccggccccagcggcctgcccggcgagagctacggcagcgagaagggcgcccccggcgaccccggcctgcagggcaagcccggcaaggacggcgtgcccggcttccccggcagcgagggcgtgaagggcaacagaggcttccccggcctgatgggcgaggacggcatcaaggaggagaagagagacgtggccatcgtgagcttcagcagcaagaccgagtactacgacacctaccaggagaagggcgacgagggcacccccggcccccccggccccagaggcgccagaggcccccagggcaagaacaagttcagatgcatccccggcagccagggcagcagcagacccggcctgagaggcgcccccggctggcccggcctgaagggcagcaagggcgagagaggcagacccggcaaggacgccatgggcacccccggcagccccggctgcgccggcagccccggcctgcccggcagccccggcccccccggcccccccggcgacatcgtgttcagaaagggcccccccggcgaccacggcctgcccggctacctgggcagccccggcatccccggcgtggacggccccaagggcgagcccggcctgctgtgcacccagtgcccctacatccccggcccccccggcctgcccggcctgcccggcctgcacggcgtgaagggcatccccggcagacagggcgccgccggcctgaagggcagccccggcagccccggcaacaccggcctgcccggcttccccggcttccccggcgcccagggcgaccccggcctgaagggcgagaagggcgagaccctgcagcccgagggccaggtgggcgtgcccggcgaccccggcctgagaggccagcccggcagaaagggcctggacggcatccccggcacccccggcgtgaagggcctgcccggccccaagggcgagctggccctgagcggcgagaagggcgaccagggcccccccggcgaccccggcagccccggcagccccggccccgccggccccgccggcccccccggctacggcccccagggcgagcccggcctgcagggcacccagggcgtgcccggcgcccccggcccccccggcgaggccggccccagaggcgagctgagcgtgagcacccccgtgcccggcccccccggcccccccggcccccccggccaccccggcccccagggcccccccggcatccccggcagcctgggcaagtgcggcgaccccggcctgcccggccccgacggcgagcccggcatccccggcatcggcttccccggcccccccggccccaagggcgaccagggcttccccggcaccaagggcagcctgggctgccccggcaagatgggcgagcccggcctgcccggcaagcccggcctgcccggcgccaagggcgagcccgccgtggccatgcccggcggccccggcacccccggcttccccggcgagagaggcaacagcggcgagcacggcgagatcggcctgcccggcctgcccggcctgcccggcacccccggcaacgagggcctggacggccccagaggcgaccccggccagcccggcccccccggcgagcagggcccccccggcagatgcatcgagggccccagaggcgcccagggcctgcccggcctgaacggcctgaagggccagcagggcagaagaggcaagaccggccccaagggcgaccccggcatccccggcctggacagaagcggcttccccggcgagaccggcagccccggcatccccggccaccagggcgagatgggccccctgggccagagaggctaccccggcaaccccggcatcctgggcccccccggcgaggacggcgtgatcggcatgatgggcttccccggcgccatcggcccccccggcccccccggcaaccccggcacccccggccagagaggcagccccggcatccccggcgtgaagggccagagaggcacccccggcgccaagggcgagcagggcgacaagggcaaccccggccccagcgagatcagccacgtgatcggcgacaagggcgagcccggcctgaagggcttcgccggcaaccccggcgagaagggcaacagaggcgtgcccggcatgcccggcctgaagggcctgaagggcctgcccggccccgccggcccccccggccccagaggcgacctgggcagcaccggcaaccccggcgagcccggcctgagaggcatccccggcagcatgggcaacatgggcatgcccggcagcaagggcaagagaggcaccctgggcttccccggcagagccggcagacccggcctgcccggcatccacggcctgcagggcgacaagggcgagcccggctacagcgagggcaccagacccggcccccccggccccaccggcgaccccggcctgcccggcgacatgggcaagaagggcgagatgggccagcccggcccccccggccacctgggccccgccggccccgagggcgcccccggcagccccggcagccccggcctgcccggcaagcccggcccccacggcgacctgggcttcaagggcatcaagggcctgctgggcccccccggcatcagaggcccccccggcctgcccggcttccccggcagccccggccccatgggcatcagaggcgaccagggcagagacggcatccccggccccgccggcgagaagggcgagaccggcctgctgagagccccccccggccccagaggcaaccccggcgcccagggcgccaagggcgacagaggcgcccccggcttccccggcctgcccggcagaaagggcgccatgggcgacgccggccccagaggccccaccggcatcgagggcttccccggcccccccggcctgcccggcgccatcatccccggccagaccggcaacagaggcccccccggcagcagaggcagccccggcgcccccggcccccccggcccccccggcagccacgtgatcggcatcaagggcgacaagggcagcatgggccaccccggccccaagggcccccccggcaccgccggcgacatgggcccccccggcagactgggcgcccccggcacccccggcctgcccggccccagaggcgaccccggcttccagggcttccccggcgtgaagggcgagaagggcaaccccggcttcctgggcagcatcggcccccccggccccatcggccccaagggcccccccggcgtgagaggcgaccccggcaccctgaagatcatcagcctgcccggcagccccggcccccccggcacccccggcgagcccggcatgcagggcgagcccggcccccccggcccccccggcaacctgggcccctgcggccccagaggcaagcccggcaaggacggcaagcccggcacccccggccccgccggcgagaagggcaacaagggcagcaagggcgagcccggccccgccggcagcgacggcctgcccggcctgaagggcaagagaggcgacagcggcagccccgccacctggaccaccagaggcttcgtgttcaccagacacagccagaccaccgccatccccagctgccccgagggcaccgtgcccctgtacagcggcttcagcttcctgttcgtgcagggcaaccagagagcccacggccaggacctggagagcctgttccaccagctgtag

SEQ ID NO: 267058 - DNA, 4275 bp, Artificial Sequence
  derived and/or modified sequence
atgagcgccagaaccgcccccagaccccaggtgctgctgctgcccctgctgctggtgctgctggccgccgcccccgccgccagcaagggctgcgtgtgcaaggacaagggccagtgcttctgcgacggcgccaagggcgagaagggcgagaagggcttccccggcccccccggcagccccggccagaagggcttcaccggccccgagggcctgcccggcccccagggccccaagagcttcagagccatccccagctacagcggcggcaagagcctgcagggcatcagcggcctgcccggcttcagcggcagccccggcctgcccggcacccccggcaacaccggcccctacggcctggtgggcgtgcccggctgcagcggcagcaagggcgagcagggcttccccggcctgcccggcaccctgggctaccccggcatccccggcatccacaacctgaagatcttcaagggcgcccccgccaaggaggaggacatcgagctggacgccaagggcgaccccggcctgcccggcgcccccggcccccagggcctgcccggcccccccggcttccccggccccgtgggcccccccggcccccccggcttcttcggcttccccggcgccatgggccccagaggccccaagagcttcgtgctgagcagcagaatcagcaccaagggcgagaagggcgtgaagggcctgaccggcccccccggcccccccggcaccgtgatcgtgaccctgaccggccccgacaacagaaccgacctgaagggcgagaagggcgacaagggcgccatgggcgagcccggcccccccggccccagcggcctgcccggcgagagctacggcagcgagaagggcgcccccggcgaccccggcctgcagggcaagcccggcaaggacggcgtgcccggcttccccggcagcgagggcgtgaagggcaacagaggcttccccggcctgatgggcgaggacggcatcaaggaggagaagagagacgtggccatcgtgagcttcagcagcaagaccgagtactacgacacctaccaggagaagggcgacgagggcacccccggcccccccggccccagaggcgccagaggcccccagggcaagaacaagttcagatgcatccccggcagccagggcagcagcagacccggcctgagaggcgcccccggctggcccggcctgaagggcagcaagggcgagagaggcagacccggcaaggacgccatgggcacccccggcagccccggctgcgccggcagccccggcctgcccggcagccccggcccccccggcccccccggcgacatcgtgttcagaaagggcccccccggcgaccacggcctgcccggctacctgggcagccccggcatccccggcgtggacggccccaagggcgagcccggcctgctgtgcacccagtgcccctacatccccggcccccccggcctgcccggcctgcccggcctgcacggcgtgaagggcatccccggcagacagggcgccgccggcctgaagggcagccccggcagccccggcaacaccggcctgcccggcttccccggcttccccggcgcccagggcgaccccggcctgaagggcgagaagggcgagaccctgcagcccgagggccaggtgggcgtgcccggcgaccccggcctgagaggccagcccggcagaaagggcctggacggcatccccggcacccccggcgtgaagggcctgcccggccccaagggcgagctggccctgagcggcgagaagggcgaccagggcccccccggcgaccccggcagccccggcagccccggccccgccggccccgccggcccccccggctacggcccccagggcgagcccggcctgcagggcacccagggcgtgcccggcgcccccggcccccccggcgaggccggccccagaggcgagctgagcgtgagcacccccgtgcccggcccccccggcccccccggcccccccggccaccccggcccccagggcccccccggcatccccggcagcctgggcaagtgcggcgaccccggcctgcccggccccgacggcgagcccggcatccccggcatcggcttccccggcccccccggccccaagggcgaccagggcttccccggcaccaagggcagcctgggctgccccggcaagatgggcgagcccggcctgcccggcaagcccggcctgcccggcgccaagggcgagcccgccgtggccatgcccggcggccccggcacccccggcttccccggcgagagaggcaacagcggcgagcacggcgagatcggcctgcccggcctgcccggcctgcccggcacccccggcaacgagggcctggacggccccagaggcgaccccggccagcccggcccccccggcgagcagggcccccccggcagatgcatcgagggccccagaggcgcccagggcctgcccggcctgaacggcctgaagggccagcagggcagaagaggcaagaccggccccaagggcgaccccggcatccccggcctggacagaagcggcttccccggcgagaccggcagccccggcatccccggccaccagggcgagatgggccccctgggccagagaggctaccccggcaaccccggcatcctgggcccccccggcgaggacggcgtgatcggcatgatgggcttccccggcgccatcggcccccccggcccccccggcaaccccggcacccccggccagagaggcagccccggcatccccggcgtgaagggccagagaggcacccccggcgccaagggcgagcagggcgacaagggcaaccccggccccagcgagatcagccacgtgatcggcgacaagggcgagcccggcctgaagggcttcgccggcaaccccggcgagaagggcaacagaggcgtgcccggcatgcccggcctgaagggcctgaagggcctgcccggccccgccggcccccccggccccagaggcgacctgggcagcaccggcaaccccggcgagcccggcctgagaggcatccccggcagcatgggcaacatgggcatgcccggcagcaagggcaagagaggcaccctgggcttccccggcagagccggcagacccggcctgcccggcatccacggcctgcagggcgacaagggcgagcccggctacagcgagggcaccagacccggcccccccggccccaccggcgaccccggcctgcccggcgacatgggcaagaagggcgagatgggccagcccggcccccccggccacctgggccccgccggccccgagggcgcccccggcagccccggcagccccggcctgcccggcaagcccggcccccacggcgacctgggcttcaagggcatcaagggcctgctgggcccccccggcatcagaggcccccccggcctgcccggcttccccggcagccccggccccatgggcatcagaggcgaccagggcagagacggcatccccggccccgccggcgagaagggcgagaccggcctgctgagagccccccccggccccagaggcaaccccggcgcccagggcgccaagggcgacagaggcgcccccggcttccccggcctgcccggcagaaagggcgccatgggcgacgccggccccagaggccccaccggcatcgagggcttccccggcccccccggcctgcccggcgccatcatccccggccagaccggcaacagaggcccccccggcagcagaggcagccccggcgcccccggcccccccggcccccccggcagccacgtgatcggcatcaagggcgacaagggcagcatgggccaccccggccccaagggcccccccggcaccgccggcgacatgggcccccccggcagactgggcgcccccggcacccccggcctgcccggccccagaggcgaccccggcttccagggcttccccggcgtgaagggcgagaagggcaaccccggcttcctgggcagcatcggcccccccggccccatcggccccaagggcccccccggcgtgagaggcgaccccggcaccctgaagatcatcagcctgcccggcagccccggcccccccggcacccccggcgagcccggcatgcagggcgagcccggcccccccggcccccccggcaacctgggcccctgcggccccagaggcaagcccggcaaggacggcaagcccggcacccccggccccgccggcgagaagggcaacaagggcagcaagggcgagcccgagagcctgttccaccagctgtag

SEQ ID NO: 267059 - DNA, 7918 bp, Artificial Sequence
  derived and/or modified sequence
gggagggacgaaccgcgcgaccgagccctacaaaacccgccccggccgagtggcgaggcgagctttccagccgggctcccagagccgcgctgcgcaggagacgcggtggcctgagagcctgagggtccccggactcgcccaggctctgagcgcgcgcccaccatgagcgcccggaccgcccccaggccgcaggtgctcctgctgccgctcctgctggtgctcctggcggcggcgcccgcagccagcaagggttgtgtctgtaaagacaaaggccagtgcttctgtgacggggccaaaggggagaagggggagaagggctttcctggaccccccggttctcctggccagaaaggattcacaggtcctgaaggcttgcctggaccgcagggacccaagtcgtttcgagctattcccagttatagtggaggaaaaagtcttcagggaataagtggattgccaggattttctggttctcctggacttccaggcaccccaggcaataccgggccttacggacttgtcggtgtaccaggatgcagtggttctaagggtgagcaggggtttccaggactcccagggacactgggctacccagggatcccgggaatacataacttgaaaattttcaagggtgctcctgctaaagaagaagatatagaacttgatgcaaaaggcgaccccgggttgccaggggctccaggaccccagggtttgccaggccctccaggttttcctgggcctgttggcccacctggtcctccgggattctttggctttccaggagccatgggacctagaggacctaagtcatttgttctatcttcccgtataagcactaaaggggaaaagggtgtgaaagggttaacaggacccccgggaccaccaggaacagttattgtgaccctaactggcccagataacagaacggacctcaagggggaaaagggagacaagggagcaatgggcgagcctggacctcctggaccctcaggactgcctggagaatcatatggatctgaaaagggtgctcctggagaccctggcctgcagggaaaacccggaaaagatggtgttcctggcttccctggaagtgagggagtcaagggcaacaggggtttccctgggttaatgggtgaagatggcattaaggaagaaaagagagatgtggcaattgtttctttctcctctaagacagaatattatgacacataccaggaaaagggagatgaaggcactccaggcccaccagggcccagaggagctcgtggcccacaaggtaagaataaatttcgttgtataccaggaagccaaggatcatcaaggcctggcctcagaggagcccctggatggccaggcctgaaaggaagtaaaggggaacgaggccgcccaggaaaggatgccatggggactcctgggtccccaggttgtgctggttcaccaggtcttccaggatcaccgggacctccaggaccgccaggtgacatcgtttttcgcaagggtccacctggagatcacggactgccaggctatctagggtctccaggaatcccaggagttgatgggcccaaaggagaaccaggcctcctgtgtacacagtgcccttatatcccagggcctcccggtctcccaggattgccagggttacatggtgtaaaaggaatcccaggaagacaaggcgcagctggcttgaaaggaagcccagggtccccaggaaatacaggtcttccaggatttccaggtttcccaggtgcccagggtgacccaggacttaaaggagaaaaaggtgaaacacttcagcctgaggggcaagtgggtgtcccaggtgacccggggctcagaggccaacctgggagaaagggcttggatggaattcctggaactccgggagtgaaaggattaccaggacctaaaggcgaactggctctgagtggtgagaaaggggaccaaggtcctccaggggatcctggctcccctgggtccccaggacctgcaggaccagctggaccacctggctacggaccccaaggagaacctggtctccagggcacgcaaggagttcctggagcccccggaccacccggagaagccggccctaggggagagctcagtgtttcaacaccagttccaggcccaccaggacctccagggccccctggccatcctggcccccaaggtccacctggtatccctggatccctggggaaatgtggagatcctggtcttccagggcctgatggtgaaccaggaattccaggaattggatttcctgggcctcctggacctaagggagaccaaggttttccaggtacaaaaggatcactgggttgtcctggaaaaatgggagagcctgggttacctggaaagccaggcctcccaggagccaagggagaaccagcagtagccatgcctggaggaccaggaacaccaggttttccaggagaaagaggcaattctggggaacatggagaaattggactccctggacttccaggtctccctggaactccaggaaatgaagggcttgatggaccacgaggagatccagggcagcctggaccacctggagaacaaggacccccaggaaggtgcatagagggtcccaggggagcccaaggacttccaggcttaaatggattgaaagggcaacaaggcagaagaggtaaaacggggccaaagggagacccaggaattccaggcttggatagatcaggatttcctggagaaactggatcaccaggaattccaggtcatcaaggtgaaatgggaccactgggtcaaagaggatatccaggaaatccgggaattttagggccaccaggtgaagatggagtgattgggatgatgggctttcctggagccattggccctccagggccccctgggaacccaggcacaccagggcagagggggagccctggaattccaggagtaaagggccagagaggaaccccaggagccaagggggaacaaggagataaaggaaatcccgggccttcagagatatcccacgtaataggggacaaaggagaaccaggtctcaaaggattcgcaggaaatccaggtgagaaaggaaacagaggcgttccagggatgccaggtttaaagggcctcaaaggactacccggaccagcaggaccaccaggccccagaggagatttgggcagcactgggaatcctggagaaccaggactgcgtggtataccaggaagcatggggaacatgggcatgccaggttctaaaggaaaaaggggaactttgggattcccaggtcgagcaggaagaccaggcctcccaggtattcatggtctccagggagataagggagagccaggttattcagaaggtacaaggccaggaccaccgggaccaacgggggatccaggactgccgggtgatatgggaaagaaaggagaaatggggcaacctggcccacctggacatttggggcctgctggacctgagggagcccctggaagtcctggaagtcctggcctcccaggaaagccaggtcctcatggtgatttgggttttaaaggaatcaaaggcctcctgggccctccaggaatcagaggccctccaggtcttccaggatttccaggatctcctggaccaatgggtataagaggtgaccaaggacgtgatggaattcctggtccagccggagaaaagggagaaacgggtttattgagggcccctccaggcccaagagggaaccctggtgctcaaggagccaaaggagacaggggagccccaggttttcctggcctcccgggcagaaaaggggccatgggagatgctggacctcgaggacccacaggcatagaaggattcccagggccaccaggtctgcccggtgcaattatccctggccagacaggaaatcgtggtccaccaggctcaagaggaagcccaggtgcgcctggtccccctggacctccagggagtcatgtaataggcataaaaggagacaaagggtctatgggccaccctggcccaaaaggtccacctggaactgcaggagacatgggaccaccaggtcgtctgggagcaccaggtactccaggtcttccaggacccagaggtgatcctggattccaggggtttccaggcgtgaaaggagaaaagggtaatcctggatttctaggatccattggacctccaggaccaattgggccaaaaggaccacctggtgtacgtggagaccctggcacacttaagattatctcccttccaggaagcccagggccacctggcacacctggagaaccagggatgcagggagaacctgggccaccagggccacctggaaacctaggaccctgtgggccaagaggtaagccaggcaaggatggaaaaccaggaactcctggaccagctggagaaaaaggcaacaaaggttctaaaggagagccaggaccagctggatcagatggattgccaggtttgaaaggaaaacgtggagacagtggatcacctgcaacctggacaacgagaggctttgtcttcacccgacacagtcaaaccacagcaattccttcatgtccagaggggacagtgccactctacagtgggttttcttttctttttgtacaaggaaatcaacgagcccacggacaagaccttgatgcactgtttgtgaaggtcctgcgatcgccatagccgttcacagccaaaccactgacattcctccatgtcctcacggctggatttctctctggaaaggattttcattcatcatgttcacaagtgcaggttctgagggcaccgggcaagcactggcctcccctggctcctgcctggaagaattccgagccagcccatttctagaatgtcatggaagaggaacgtgcaactactattcaaattcctacagtttctggctggcttcattaaacccagaaagaatgttcagaaagcctattccatcaactgtgaaagctggggaattagaaaaaataataagtcgctgtcaggtgtgcatgaagaaaagacactgaagctaaaaaagacagcagaactgctatttttcatcctaaagaacaaagtaatgacagaacatgctgttatttaggtatttttctttaaccaaacaatattgctccatgatgacttagtacaaagtttcaatttgtttccccacaaaacaaagcaattctttcaagtcagttctgtgatctgggtctctaatctgtgctgtttcaaagttctctgtggcaaagcagcaactattcacaaaatatcaccaaaaacctattccacttacatccaaggcactgtcactacggtgattgtatgaagtttgaatgctgcaagttatgaaatatttggcccgctggattcccacatttgtcttctttctgtctttaagactcagggaggctaaatcagtgtttgattgccccgccaacccttcctgaaacttcagaccctgggtaggggaagagaagggggcatgtggtatcctggagcattgtgtatagaactggattttcagacctgctgaggaccgtaaggcctgatggaacacagaactgaactgaggttcatggattttccaggactgtttcaaacatgcccattactaacggcaaaagggggattccctgatggaaccataatacccttggaaatactgtatggttttgttttgttttgttggtttttaaagatttttgtttgtttattgaattcatttcactgtagctctaaaatctgcttgtattccaagcatataaaattttcccccttagtgaattagttttaaaatgatattgttatatacatactatgaaatatgtataactttaacttctgttttaccagcatacccacacaaataacaagaatactacttatgaaatgtgcactttatcctcattccataaatgtcggtgcataccttatgtaagggagcagttcaataatccatgaaagaacttaaggcatttgttggtttatcagactcggaatctattttctcattgctctgaatatgtcatcactctaggttttacagatttattcctttgttacttctctaattcttcctttgtaaaaaaaaaaaaaagcaacactttttatgttatatgttgttcttacaaaccatactgaaagagtccattgtttaaaaatcttaatgtatcaaactgtataacttggccgctgtatgtcttaaaacctgcttttcaatgtgttgatacattcccaaggttacttaattcaacttaactatcatcttattcagcaccaagcatgtcccaggcactgtactaacctacagagatgctaagagaaaaaaaagacttgtttctgatctaatatcccagaaaaagtaactcattgctctgttaataatctcacatatacaagtagcttccctcccctctagttttttcttccttttcactgctgttatatttcatcatgataattcagcaggcccaagtaaaggttaaaaataaggtctatgcctagggaaactcagggcttctagtttctcttagaaaagctaagagaagataaggtctgaataatagcagaaaaaccaacatctacaaaacattaaactagtgttatacttgatgataacactatttgatgagtcttagagtccagacacaaagagacaaagctttgaagatgctttttgatctacctaggtggagttggtggtgctgatatttaaattcaggctactgcttcaatctcaattgctttgtaagtgaaaaacatgacccagaggacagcacagactatggccatggctcacatggtttacatccttcactgctcacgtgtttgctgtcaagccatttttacatctaaactaagatgtgcagcatttcacttatttagattcacttaacaaacaaatttttctgctttaaaaatgtcttattgtcccaagtgtactatagcggcatatagagctagctaatctctacaaaccctctgtaggccagtagttctcaaagtgtggtctctggaagagcagtatcagcatcatctgggaacttgtcacagatgcagattctagggaccactccagacctacacaatcagaaactcttgggggagggcccgaaatatctatgttttaccaagcccaccacatgattctgatgtactctaaatactgagaaaacctgttctagacaaatacccaagcaacaactccgcaggcagttaccaagtacggctggctacaactgctccatccgtgcctctttttaaagttcaaactcacaggtgactctaaggttatctacttttactcataagtaaaagccctagactggtgctaatgtcaaaccactggcctccactcaggcctccatcttctcatgccctcttaccagtatttaacttctgaggaagacaagtgatgctaaaacctgaaattccaatgaagccatatgaacagctgttcagttgcacttctaagactttacttagcagtaaattatagctcatgtgcattattttccagataacttagcttatgagtagcttatacaattatgaagatttaatattacagataaaatgtaaactgtttctttaaaattggggcttcaactttggaatttcacagcgtgctaaaataacagatttctcagaagtctttcagcaagataaacattattaagtaacttatttatgaaagtattaaaatgcttacatttgaacttgatggctaacttacaaagattctctatgtatcaaatgtaacttactgcgactaaacttaatttaatatttactctataaccaaatgaaatatatttaaaatatattgaatattttatattgttatatcctgacaagattataatattttaatgtactaatatttctgtaattatatctaaaatattattttattatattgcctaagaataaacatttgttaaattgg

SEQ ID NO: 267060 - DNA, 7923 bp, Artificial Sequence
  derived and/or modified sequence
gggagggacgaaccgcgcgaccgagccctacaaaacccgccccggccgagtggcgaggcgagctttccagccgggctcccagagccgcgctgcgcaggagacgcggtggcctgagagcctgagggtccccggactcgcccaggctctgagcgcgcgcccaccatgagcgcccggaccgcccccaggccgcaggtgctcctgctgccgctcctgctggtgctcctggcggcggcgcccgcagccagcaagggttgtgtctgtaaagacaaaggccagtgcttctgtgacggggccaaaggggagaagggggagaagggctttcctggaccccccggttctcctggccagaaaggattcacaggtcctgaaggcttgcctggaccgcagggacccaagtcgtttcgagctattcccagttatagtggaggaaaaagtcttcagggaataagtggattgccaggattttctggttctcctggacttccaggcaccccaggcaataccgggccttacggacttgtcggtgtaccaggatgcagtggttctaagggtgagcaggggtttccaggactcccagggacactgggctacccagggatcccgggaatacataacttgaaaattttcaagggtgctcctgctaaagaagaagatatagaacttgatgcaaaaggcgaccccgggttgccaggggctccaggaccccagggtttgccaggccctccaggttttcctgggcctgttggcccacctggtcctccgggattctttggctttccaggagccatgggacctagaggacctaagtcatttgttctatcttcccgtataagcactaaaggggaaaagggtgtgaaagggttaacaggacccccgggaccaccaggaacagttattgtgaccctaactggcccagataacagaacggacctcaagggggaaaagggagacaagggagcaatgggcgagcctggacctcctggaccctcaggactgcctggagaatcatatggatctgaaaagggtgctcctggagaccctggcctgcagggaaaacccggaaaagatggtgttcctggcttccctggaagtgagggagtcaagggcaacaggggtttccctgggttaatgggtgaagatggcattaaggaagaaaagagagatgtggcaattgtttctttctcctctaagacagaatattatgacacataccaggaaaagggagatgaaggcactccaggcccaccagggcccagaggagctcgtggcccacaaggtaagaataaatttcgttgtataccaggaagccaaggatcatcaaggcctggcctcagaggagcccctggatggccaggcctgaaaggaagtaaaggggaacgaggccgcccaggaaaggatgccatggggactcctgggtccccaggttgtgctggttcaccaggtcttccaggatcaccgggacctccaggaccgccaggtgacatcgtttttcgcaagggtccacctggagatcacggactgccaggctatctagggtctccaggaatcccaggagttgatgggcccaaaggagaaccaggcctcctgtgtacacagtgcccttatatcccagggcctcccggtctcccaggattgccagggttacatggtgtaaaaggaatcccaggaagacaaggcgcagctggcttgaaaggaagcccagggtccccaggaaatacaggtcttccaggatttccaggtttcccaggtgcccagggtgacccaggacttaaaggagaaaaaggtgaaacacttcagcctgaggggcaagtgggtgtcccaggtgacccggggctcagaggccaacctgggagaaagggcttggatggaattcctggaactccgggagtgaaaggattaccaggacctaaaggcgaactggctctgagtggtgagaaaggggaccaaggtcctccaggggatcctggctcccctgggtccccaggacctgcaggaccagctggaccacctggctacggaccccaaggagaacctggtctccagggcacgcaaggagttcctggagcccccggaccacccggagaagccggccctaggggagagctcagtgtttcaacaccagttccaggcccaccaggacctccagggccccctggccatcctggcccccaaggtccacctggtatccctggatccctggggaaatgtggagatcctggtcttccagggcctgatggtgaaccaggaattccaggaattggatttcctgggcctcctggacctaagggagaccaaggttttccaggtacaaaaggatcactgggttgtcctggaaaaatgggagagcctgggttacctggaaagccaggcctcccaggagccaagggagaaccagcagtagccatgcctggaggaccaggaacaccaggttttccaggagaaagaggcaattctggggaacatggagaaattggactccctggacttccaggtctccctggaactccaggaaatgaagggcttgatggaccacgaggagatccagggcagcctggaccacctggagaacaaggacccccaggaaggtgcatagagggtcccaggggagcccaaggacttccaggcttaaatggattgaaagggcaacaaggcagaagaggtaaaacggggccaaagggagacccaggaattccaggcttggatagatcaggatttcctggagaaactggatcaccaggaattccaggtcatcaaggtgaaatgggaccactgggtcaaagaggatatccaggaaatccgggaattttagggccaccaggtgaagatggagtgattgggatgatgggctttcctggagccattggccctccagggccccctgggaacccaggcacaccagggcagagggggagccctggaattccaggagtaaagggccagagaggaaccccaggagccaagggggaacaaggagataaaggaaatcccgggccttcagagatatcccacgtaataggggacaaaggagaaccaggtctcaaaggattcgcaggaaatccaggtgagaaaggaaacagaggcgttccagggatgccaggtttaaagggcctcaaaggactacccggaccagcaggaccaccaggccccagaggagatttgggcagcactgggaatcctggagaaccaggactgcgtggtataccaggaagcatggggaacatgggcatgccaggttctaaaggaaaaaggggaactttgggattcccaggtcgagcaggaagaccaggcctcccaggtattcatggtctccagggagataagggagagccaggttattcagaaggtacaaggccaggaccaccgggaccaacgggggatccaggactgccgggtgatatgggaaagaaaggagaaatggggcaacctggcccacctggacatttggggcctgctggacctgagggagcccctggaagtcctggaagtcctggcctcccaggaaagccaggtcctcatggtgatttgggttttaaaggaatcaaaggcctcctgggccctccaggaatcagaggccctccaggtcttccaggatttccaggatctcctggaccaatgggtataagaggtgaccaaggacgtgatggaattcctggtccagccggagaaaagggagaaacgggtttattgagggcccctccaggcccaagagggaaccctggtgctcaaggagccaaaggagacaggggagccccaggttttcctggcctcccgggcagaaaaggggccatgggagatgctggacctcgaggacccacaggcatagaaggattcccagggccaccaggtctgcccggtgcaattatccctggccagacaggaaatcgtggtccaccaggctcaagaggaagcccaggtgcgcctggtccccctggacctccagggagtcatgtaataggcataaaaggagacaaagggtctatgggccaccctggcccaaaaggtccacctggaactgcaggagacatgggaccaccaggtcgtctgggagcaccaggtactccaggtcttccaggacccagaggtgatcctggattccaggggtttccaggcgtgaaaggagaaaagggtaatcctggatttctaggatccattggacctccaggaccaattgggccaaaaggaccacctggtgtacgtggagaccctggcacacttaagattatctcccttccaggaagcccagggccacctggcacacctggagaaccagggatgcagggagaacctgggccaccagggccacctggaaacctaggaccctgtgggccaagaggtaagccaggcaaggatggaaaaccaggaactcctggaccagctggagaaaaaggcaacaaaggttctaaaggagagccaggaccagctggatcagatggattgccaggtttgaaaggaaaacgtggagacagtggatcacctgcaacctggacaacgagaggctttgtcttcacccgacacagtcaaaccacagcaattccttcatgtccagaggggacagtgccactctacagtgggttttcttttctttttgtacaaggaaatcaacgagcccacggacaagaccttggaactcttggcagctgcctgcagcgatttaccacaatgccattcttattctgcaatgtcaatgatgtatgtaattttgcatctcgaaatgattattcatactggctgtcaacaccagctctgatgccaatgaacatggctcccattactggcagagcccttgagccttatataagcagatgcactgtttgtgaaggtcctgcgatcgccatagccgttcacagccaaaccactgacattcctccatgtcctcacggctggatttctctctggaaaggattttcattcatcatgaaagcctattccatcaactgtgaaagctggggaattagaaaaaataataagtcgctgtcaggtgtgcatgaagaaaagacactgaagctaaaaaagacagcagaactgctatttttcatcctaaagaacaaagtaatgacagaacatgctgttatttaggtatttttctttaaccaaacaatattgctccatgatgacttagtacaaagtttcaatttgtttccccacaaaacaaagcaattctttcaagtcagttctgtgatctgggtctctaatctgtgctgtttcaaagttctctgtggcaaagcagcaactattcacaaaatatcaccaaaaacctattccacttacatccaaggcactgtcactacggtgattgtatgaagtttgaatgctgcaagttatgaaatatttggcccgctggattcccacatttgtcttctttctgtctttaagactcagggaggctaaatcagtgtttgattgccccgccaacccttcctgaaacttcagaccctgggtaggggaagagaagggggcatgtggtatcctggagcattgtgtatagaactggattttcagacctgctgaggaccgtaaggcctgatggaacacagaactgaactgaggttcatggattttccaggactgtttcaaacatgcccattactaacggcaaaagggggattccctgatggaaccataatacccttggaaatactgtatggttttgttttgttttgttggtttttaaagatttttgtttgtttattgaattcatttcactgtagctctaaaatctgcttgtattccaagcatataaaattttcccccttagtgaattagttttaaaatgatattgttatatacatactatgaaatatgtataactttaacttctgttttaccagcatacccacacaaataacaagaatactacttatgaaatgtgcactttatcctcattccataaatgtcggtgcataccttatgtaagggagcagttcaataatccatgaaagaacttaaggcatttgttggtttatcagactcggaatctattttctcattgctctgaatatgtcatcactctaggttttacagatttattcctttgttacttctctaattcttcctttgtaaaaaaaaaaaaaagcaacactttttatgttatatgttgttcttacaaaccatactgaaagagtccattgtttaaaaatcttaatgtatcaaactgtataacttggccgctgtatgtcttaaaacctgcttttcaatgtgttgatacattcccaaggttacttaattcaacttaactatcatcttattcagcaccaagcatgtcccaggcactgtactaacctacagagatgctaagagaaaaaaaagacttgtttctgatctaatatcccagaaaaagtaactcattgctctgttaataatctcacatatacaagtagcttccctcccctctagttttttcttccttttcactgctgttatatttcatcatgataattcagcaggcccaagtaaaggttaaaaataaggtctatgcctagggaaactcagggcttctagtttctcttagaaaagctaagagaagataaggtctgaataatagcagaaaaaccaacatctacaaaacattaaactagtgttatacttgatgataacactatttgatgagtcttagagtccagacacaaagagacaaagctttgaagatgctttttgatctacctaggtggagttggtggtgctgatatttaaattcaggctactgcttcaatctcaattgctttgtaagtgaaaaacatgacccagaggacagcacagactatggccatggctcacatggtttacatccttcactgctcacgtgtttgctgtcaagccatttttacatctaaactaagatgtgcagcatttcacttatttagattcacttaacaaacaaatttttctgctttaaaaatgtcttattgtcccaagtgtactatagcggcatatagagctagctaatctctacaaaccctctgtaggccagtagttctcaaagtgtggtctctggaagagcagtatcagcatcatctgggaacttgtcacagatgcagattctagggaccactccagacctacacaatcagaaactcttgggggagggcccgaaatatctatgttttaccaagcccaccacatgattctgatgtactctaaatactgagaaaacctgttctagacaaatacccaagcaacaactccgcaggcagttaccaagtacggctggctacaactgctccatccgtgcctctttttaaagttcaaactcacaggtgactctaaggttatctacttttactcataagtaaaagccctagactggtgctaatgtcaaaccactggcctccactcaggcctccatcttctcatgccctcttaccagtatttaacttctgaggaagacaagtgatgctaaaacctgaaattccaatgaagccatatgaacagctgttcagttgcacttctaagactttacttagcagtaaattatagctcatgtgcattattttccagataacttagcttatgagtagcttatacaattatgaagatttaatattacagataaaatgtaaactgtttctttaaaattggggcttcaactttggaatttcacagcgtgctaaaataacagatttctcagaagtctttcagcaagataaacattattaagtaacttatttatgaaagtattaaaatgcttacatttgaacttgatggctaacttacaaagattctctatgtatcaaatgtaacttactgcgactaaacttaatttaatatttactctataaccaaatgaaatatatttaaaatatattgaatattttatattgttatatcctgacaagattataatattttaatgtactaatatttctgtaattatatctaaaatattattttattatattgcctaagaataaacatttgttaaattgg

SEQ ID NO: 267061 - DNA, 7630 bp, Artificial Sequence
  derived and/or modified sequence
gggagggacgaaccgcgcgaccgagccctacaaaacccgccccggccgagtggcgaggcgagctttccagccgggctcccagagccgcgctgcgcaggagacgcggtggcctgagagcctgagggtccccggactcgcccaggctctgagcgcgcgcccaccatgagcgcccggaccgcccccaggccgcaggtgctcctgctgccgctcctgctggtgctcctggcggcggcgcccgcagccagcaagggttgtgtctgtaaagacaaaggccagtgcttctgtgacggggccaaaggggagaagggggagaagggctttcctggaccccccggttctcctggccagaaaggattcacaggtcctgaaggcttgcctggaccgcagggacccaagtcgtttcgagctattcccagttatagtggaggaaaaagtcttcagggaataagtggattgccaggattttctggttctcctggacttccaggcaccccaggcaataccgggccttacggacttgtcggtgtaccaggatgcagtggttctaagggtgagcaggggtttccaggactcccagggacactgggctacccagggatcccgggaatacataacttgaaaattttcaagggtgctcctgctaaagaagaagatatagaacttgatgcaaaaggcgaccccgggttgccaggggctccaggaccccagggtttgccaggccctccaggttttcctgggcctgttggcccacctggtcctccgggattctttggctttccaggagccatgggacctagaggacctaagtcatttgttctatcttcccgtataagcactaaaggggaaaagggtgtgaaagggttaacaggacccccgggaccaccaggaacagttattgtgaccctaactggcccagataacagaacggacctcaagggggaaaagggagacaagggagcaatgggcgagcctggacctcctggaccctcaggactgcctggagaatcatatggatctgaaaagggtgctcctggagaccctggcctgcagggaaaacccggaaaagatggtgttcctggcttccctggaagtgagggagtcaagggcaacaggggtttccctgggttaatgggtgaagatggcattaaggaagaaaagagagatgtggcaattgtttctttctcctctaagacagaatattatgacacataccaggaaaagggagatgaaggcactccaggcccaccagggcccagaggagctcgtggcccacaaggtaagaataaatttcgttgtataccaggaagccaaggatcatcaaggcctggcctcagaggagcccctggatggccaggcctgaaaggaagtaaaggggaacgaggccgcccaggaaaggatgccatggggactcctgggtccccaggttgtgctggttcaccaggtcttccaggatcaccgggacctccaggaccgccaggtgacatcgtttttcgcaagggtccacctggagatcacggactgccaggctatctagggtctccaggaatcccaggagttgatgggcccaaaggagaaccaggcctcctgtgtacacagtgcccttatatcccagggcctcccggtctcccaggattgccagggttacatggtgtaaaaggaatcccaggaagacaaggcgcagctggcttgaaaggaagcccagggtccccaggaaatacaggtcttccaggatttccaggtttcccaggtgcccagggtgacccaggacttaaaggagaaaaaggtgaaacacttcagcctgaggggcaagtgggtgtcccaggtgacccggggctcagaggccaacctgggagaaagggcttggatggaattcctggaactccgggagtgaaaggattaccaggacctaaaggcgaactggctctgagtggtgagaaaggggaccaaggtcctccaggggatcctggctcccctgggtccccaggacctgcaggaccagctggaccacctggctacggaccccaaggagaacctggtctccagggcacgcaaggagttcctggagcccccggaccacccggagaagccggccctaggggagagctcagtgtttcaacaccagttccaggcccaccaggacctccagggccccctggccatcctggcccccaaggtccacctggtatccctggatccctggggaaatgtggagatcctggtcttccagggcctgatggtgaaccaggaattccaggaattggatttcctgggcctcctggacctaagggagaccaaggttttccaggtacaaaaggatcactgggttgtcctggaaaaatgggagagcctgggttacctggaaagccaggcctcccaggagccaagggagaaccagcagtagccatgcctggaggaccaggaacaccaggttttccaggagaaagaggcaattctggggaacatggagaaattggactccctggacttccaggtctccctggaactccaggaaatgaagggcttgatggaccacgaggagatccagggcagcctggaccacctggagaacaaggacccccaggaaggtgcatagagggtcccaggggagcccaaggacttccaggcttaaatggattgaaagggcaacaaggcagaagaggtaaaacggggccaaagggagacccaggaattccaggcttggatagatcaggatttcctggagaaactggatcaccaggaattccaggtcatcaaggtgaaatgggaccactgggtcaaagaggatatccaggaaatccgggaattttagggccaccaggtgaagatggagtgattgggatgatgggctttcctggagccattggccctccagggccccctgggaacccaggcacaccagggcagagggggagccctggaattccaggagtaaagggccagagaggaaccccaggagccaagggggaacaaggagataaaggaaatcccgggccttcagagatatcccacgtaataggggacaaaggagaaccaggtctcaaaggattcgcaggaaatccaggtgagaaaggaaacagaggcgttccagggatgccaggtttaaagggcctcaaaggactacccggaccagcaggaccaccaggccccagaggagatttgggcagcactgggaatcctggagaaccaggactgcgtggtataccaggaagcatggggaacatgggcatgccaggttctaaaggaaaaaggggaactttgggattcccaggtcgagcaggaagaccaggcctcccaggtattcatggtctccagggagataagggagagccaggttattcagaaggtacaaggccaggaccaccgggaccaacgggggatccaggactgccgggtgatatgggaaagaaaggagaaatggggcaacctggcccacctggacatttggggcctgctggacctgagggagcccctggaagtcctggaagtcctggcctcccaggaaagccaggtcctcatggtgatttgggttttaaaggaatcaaaggcctcctgggccctccaggaatcagaggccctccaggtcttccaggatttccaggatctcctggaccaatgggtataagaggtgaccaaggacgtgatggaattcctggtccagccggagaaaagggagaaacgggtttattgagggcccctccaggcccaagagggaaccctggtgctcaaggagccaaaggagacaggggagccccaggttttcctggcctcccgggcagaaaaggggccatgggagatgctggacctcgaggacccacaggcatagaaggattcccagggccaccaggtctgcccggtgcaattatccctggccagacaggaaatcgtggtccaccaggctcaagaggaagcccaggtgcgcctggtccccctggacctccagggagtcatgtaataggcataaaaggagacaaagggtctatgggccaccctggcccaaaaggtccacctggaactgcaggagacatgggaccaccaggtcgtctgggagcaccaggtactccaggtcttccaggacccagaggtgatcctggattccaggggtttccaggcgtgaaaggagaaaagggtaatcctggatttctaggatccattggacctccaggaccaattgggccaaaaggaccacctggtgtacgtggagaccctggcacacttaagattatctcccttccaggaagcccagggccacctggcacacctggagaaccagggatgcagggagaacctgggccaccagggccacctggaaacctaggaccctgtgggccaagaggtaagccaggcaaggatggaaaaccaggaactcctggaccagctggagaaaaaggcaacaaaggttctaaaggagagccaggaccagctggatcagatggattgccaggtttgaaaggaaaacgtggagacagtggatcacctgcaacctggacaacgagaggctttgtcttcacccgacacagtcaaaccacagcaattccttcatgtccagaggggacagtgccactctacagtgggttttcttttctttttgtacaaggaaatcaacgagcccacggacaagaccttgaaagcctattccatcaactgtgaaagctggggaattagaaaaaataataagtcgctgtcaggtgtgcatgaagaaaagacactgaagctaaaaaagacagcagaactgctatttttcatcctaaagaacaaagtaatgacagaacatgctgttatttaggtatttttctttaaccaaacaatattgctccatgatgacttagtacaaagtttcaatttgtttccccacaaaacaaagcaattctttcaagtcagttctgtgatctgggtctctaatctgtgctgtttcaaagttctctgtggcaaagcagcaactattcacaaaatatcaccaaaaacctattccacttacatccaaggcactgtcactacggtgattgtatgaagtttgaatgctgcaagttatgaaatatttggcccgctggattcccacatttgtcttctttctgtctttaagactcagggaggctaaatcagtgtttgattgccccgccaacccttcctgaaacttcagaccctgggtaggggaagagaagggggcatgtggtatcctggagcattgtgtatagaactggattttcagacctgctgaggaccgtaaggcctgatggaacacagaactgaactgaggttcatggattttccaggactgtttcaaacatgcccattactaacggcaaaagggggattccctgatggaaccataatacccttggaaatactgtatggttttgttttgttttgttggtttttaaagatttttgtttgtttattgaattcatttcactgtagctctaaaatctgcttgtattccaagcatataaaattttcccccttagtgaattagttttaaaatgatattgttatatacatactatgaaatatgtataactttaacttctgttttaccagcatacccacacaaataacaagaatactacttatgaaatgtgcactttatcctcattccataaatgtcggtgcataccttatgtaagggagcagttcaataatccatgaaagaacttaaggcatttgttggtttatcagactcggaatctattttctcattgctctgaatatgtcatcactctaggttttacagatttattcctttgttacttctctaattcttcctttgtaaaaaaaaaaaaaagcaacactttttatgttatatgttgttcttacaaaccatactgaaagagtccattgtttaaaaatcttaatgtatcaaactgtataacttggccgctgtatgtcttaaaacctgcttttcaatgtgttgatacattcccaaggttacttaattcaacttaactatcatcttattcagcaccaagcatgtcccaggcactgtactaacctacagagatgctaagagaaaaaaaagacttgtttctgatctaatatcccagaaaaagtaactcattgctctgttaataatctcacatatacaagtagcttccctcccctctagttttttcttccttttcactgctgttatatttcatcatgataattcagcaggcccaagtaaaggttaaaaataaggtctatgcctagggaaactcagggcttctagtttctcttagaaaagctaagagaagataaggtctgaataatagcagaaaaaccaacatctacaaaacattaaactagtgttatacttgatgataacactatttgatgagtcttagagtccagacacaaagagacaaagctttgaagatgctttttgatctacctaggtggagttggtggtgctgatatttaaattcaggctactgcttcaatctcaattgctttgtaagtgaaaaacatgacccagaggacagcacagactatggccatggctcacatggtttacatccttcactgctcacgtgtttgctgtcaagccatttttacatctaaactaagatgtgcagcatttcacttatttagattcacttaacaaacaaatttttctgctttaaaaatgtcttattgtcccaagtgtactatagcggcatatagagctagctaatctctacaaaccctctgtaggccagtagttctcaaagtgtggtctctggaagagcagtatcagcatcatctgggaacttgtcacagatgcagattctagggaccactccagacctacacaatcagaaactcttgggggagggcccgaaatatctatgttttaccaagcccaccacatgattctgatgtactctaaatactgagaaaacctgttctagacaaatacccaagcaacaactccgcaggcagttaccaagtacggctggctacaactgctccatccgtgcctctttttaaagttcaaactcacaggtgactctaaggttatctacttttactcataagtaaaagccctagactggtgctaatgtcaaaccactggcctccactcaggcctccatcttctcatgccctcttaccagtatttaacttctgaggaagacaagtgatgctaaaacctgaaattccaatgaagccatatgaacagctgttcagttgcacttctaagactttacttagcagtaaattatagctcatgtgcattattttccagataacttagcttatgagtagcttatacaattatgaagatttaatattacagataaaatgtaaactgtttctttaaaattggggcttcaactttggaatttcacagcgtgctaaaataacagatttctcagaagtctttcagcaagataaacattattaagtaacttatttatgaaagtattaaaatgcttacatttgaacttgatggctaacttacaaagattctctatgtatcaaatgtaacttactgcgactaaacttaatttaatatttactctataaccaaatgaaatatatttaaaatatattgaatattttatattgttatatcctgacaagattataatattttaatgtactaatatttctgtaattatatctaaaatattattttattatattgcctaagaataaacatttgttaaattgg

SEQ ID NO: 267062 - DNA, 7420 bp, Artificial Sequence
  derived and/or modified sequence
gggagggacgaaccgcgcgaccgagccctacaaaacccgccccggccgagtggcgaggcgagctttccagccgggctcccagagccgcgctgcgcaggagacgcggtggcctgagagcctgagggtccccggactcgcccaggctctgagcgcgcgcccaccatgagcgcccggaccgcccccaggccgcaggtgctcctgctgccgctcctgctggtgctcctggcggcggcgcccgcagccagcaagggttgtgtctgtaaagacaaaggccagtgcttctgtgacggggccaaaggggagaagggggagaagggctttcctggaccccccggttctcctggccagaaaggattcacaggtcctgaaggcttgcctggaccgcagggacccaagtcgtttcgagctattcccagttatagtggaggaaaaagtcttcagggaataagtggattgccaggattttctggttctcctggacttccaggcaccccaggcaataccgggccttacggacttgtcggtgtaccaggatgcagtggttctaagggtgagcaggggtttccaggactcccagggacactgggctacccagggatcccgggaatacataacttgaaaattttcaagggtgctcctgctaaagaagaagatatagaacttgatgcaaaaggcgaccccgggttgccaggggctccaggaccccagggtttgccaggccctccaggttttcctgggcctgttggcccacctggtcctccgggattctttggctttccaggagccatgggacctagaggacctaagtcatttgttctatcttcccgtataagcactaaaggggaaaagggtgtgaaagggttaacaggacccccgggaccaccaggaacagttattgtgaccctaactggcccagataacagaacggacctcaagggggaaaagggagacaagggagcaatgggcgagcctggacctcctggaccctcaggactgcctggagaatcatatggatctgaaaagggtgctcctggagaccctggcctgcagggaaaacccggaaaagatggtgttcctggcttccctggaagtgagggagtcaagggcaacaggggtttccctgggttaatgggtgaagatggcattaaggaagaaaagagagatgtggcaattgtttctttctcctctaagacagaatattatgacacataccaggaaaagggagatgaaggcactccaggcccaccagggcccagaggagctcgtggcccacaaggtaagaataaatttcgttgtataccaggaagccaaggatcatcaaggcctggcctcagaggagcccctggatggccaggcctgaaaggaagtaaaggggaacgaggccgcccaggaaaggatgccatggggactcctgggtccccaggttgtgctggttcaccaggtcttccaggatcaccgggacctccaggaccgccaggtgacatcgtttttcgcaagggtccacctggagatcacggactgccaggctatctagggtctccaggaatcccaggagttgatgggcccaaaggagaaccaggcctcctgtgtacacagtgcccttatatcccagggcctcccggtctcccaggattgccagggttacatggtgtaaaaggaatcccaggaagacaaggcgcagctggcttgaaaggaagcccagggtccccaggaaatacaggtcttccaggatttccaggtttcccaggtgcccagggtgacccaggacttaaaggagaaaaaggtgaaacacttcagcctgaggggcaagtgggtgtcccaggtgacccggggctcagaggccaacctgggagaaagggcttggatggaattcctggaactccgggagtgaaaggattaccaggacctaaaggcgaactggctctgagtggtgagaaaggggaccaaggtcctccaggggatcctggctcccctgggtccccaggacctgcaggaccagctggaccacctggctacggaccccaaggagaacctggtctccagggcacgcaaggagttcctggagcccccggaccacccggagaagccggccctaggggagagctcagtgtttcaacaccagttccaggcccaccaggacctccagggccccctggccatcctggcccccaaggtccacctggtatccctggatccctggggaaatgtggagatcctggtcttccagggcctgatggtgaaccaggaattccaggaattggatttcctgggcctcctggacctaagggagaccaaggttttccaggtacaaaaggatcactgggttgtcctggaaaaatgggagagcctgggttacctggaaagccaggcctcccaggagccaagggagaaccagcagtagccatgcctggaggaccaggaacaccaggttttccaggagaaagaggcaattctggggaacatggagaaattggactccctggacttccaggtctccctggaactccaggaaatgaagggcttgatggaccacgaggagatccagggcagcctggaccacctggagaacaaggacccccaggaaggtgcatagagggtcccaggggagcccaaggacttccaggcttaaatggattgaaagggcaacaaggcagaagaggtaaaacggggccaaagggagacccaggaattccaggcttggatagatcaggatttcctggagaaactggatcaccaggaattccaggtcatcaaggtgaaatgggaccactgggtcaaagaggatatccaggaaatccgggaattttagggccaccaggtgaagatggagtgattgggatgatgggctttcctggagccattggccctccagggccccctgggaacccaggcacaccagggcagagggggagccctggaattccaggagtaaagggccagagaggaaccccaggagccaagggggaacaaggagataaaggaaatcccgggccttcagagatatcccacgtaataggggacaaaggagaaccaggtctcaaaggattcgcaggaaatccaggtgagaaaggaaacagaggcgttccagggatgccaggtttaaagggcctcaaaggactacccggaccagcaggaccaccaggccccagaggagatttgggcagcactgggaatcctggagaaccaggactgcgtggtataccaggaagcatggggaacatgggcatgccaggttctaaaggaaaaaggggaactttgggattcccaggtcgagcaggaagaccaggcctcccaggtattcatggtctccagggagataagggagagccaggttattcagaaggtacaaggccaggaccaccgggaccaacgggggatccaggactgccgggtgatatgggaaagaaaggagaaatggggcaacctggcccacctggacatttggggcctgctggacctgagggagcccctggaagtcctggaagtcctggcctcccaggaaagccaggtcctcatggtgatttgggttttaaaggaatcaaaggcctcctgggccctccaggaatcagaggccctccaggtcttccaggatttccaggatctcctggaccaatgggtataagaggtgaccaaggacgtgatggaattcctggtccagccggagaaaagggagaaacgggtttattgagggcccctccaggcccaagagggaaccctggtgctcaaggagccaaaggagacaggggagccccaggttttcctggcctcccgggcagaaaaggggccatgggagatgctggacctcgaggacccacaggcatagaaggattcccagggccaccaggtctgcccggtgcaattatccctggccagacaggaaatcgtggtccaccaggctcaagaggaagcccaggtgcgcctggtccccctggacctccagggagtcatgtaataggcataaaaggagacaaagggtctatgggccaccctggcccaaaaggtccacctggaactgcaggagacatgggaccaccaggtcgtctgggagcaccaggtactccaggtcttccaggacccagaggtgatcctggattccaggggtttccaggcgtgaaaggagaaaagggtaatcctggatttctaggatccattggacctccaggaccaattgggccaaaaggaccacctggtgtacgtggagaccctggcacacttaagattatctcccttccaggaagcccagggccacctggcacacctggagaaccagggatgcagggagaacctgggccaccagggccacctggaaacctaggaccctgtgggccaagaggtaagccaggcaaggatggaaaaccaggaactcctggaccagctggagaaaaaggcaacaaaggttctaaaggagagccagaaagcctattccatcaactgtgaaagctggggaattagaaaaaataataagtcgctgtcaggtgtgcatgaagaaaagacactgaagctaaaaaagacagcagaactgctatttttcatcctaaagaacaaagtaatgacagaacatgctgttatttaggtatttttctttaaccaaacaatattgctccatgatgacttagtacaaagtttcaatttgtttccccacaaaacaaagcaattctttcaagtcagttctgtgatctgggtctctaatctgtgctgtttcaaagttctctgtggcaaagcagcaactattcacaaaatatcaccaaaaacctattccacttacatccaaggcactgtcactacggtgattgtatgaagtttgaatgctgcaagttatgaaatatttggcccgctggattcccacatttgtcttctttctgtctttaagactcagggaggctaaatcagtgtttgattgccccgccaacccttcctgaaacttcagaccctgggtaggggaagagaagggggcatgtggtatcctggagcattgtgtatagaactggattttcagacctgctgaggaccgtaaggcctgatggaacacagaactgaactgaggttcatggattttccaggactgtttcaaacatgcccattactaacggcaaaagggggattccctgatggaaccataatacccttggaaatactgtatggttttgttttgttttgttggtttttaaagatttttgtttgtttattgaattcatttcactgtagctctaaaatctgcttgtattccaagcatataaaattttcccccttagtgaattagttttaaaatgatattgttatatacatactatgaaatatgtataactttaacttctgttttaccagcatacccacacaaataacaagaatactacttatgaaatgtgcactttatcctcattccataaatgtcggtgcataccttatgtaagggagcagttcaataatccatgaaagaacttaaggcatttgttggtttatcagactcggaatctattttctcattgctctgaatatgtcatcactctaggttttacagatttattcctttgttacttctctaattcttcctttgtaaaaaaaaaaaaaagcaacactttttatgttatatgttgttcttacaaaccatactgaaagagtccattgtttaaaaatcttaatgtatcaaactgtataacttggccgctgtatgtcttaaaacctgcttttcaatgtgttgatacattcccaaggttacttaattcaacttaactatcatcttattcagcaccaagcatgtcccaggcactgtactaacctacagagatgctaagagaaaaaaaagacttgtttctgatctaatatcccagaaaaagtaactcattgctctgttaataatctcacatatacaagtagcttccctcccctctagttttttcttccttttcactgctgttatatttcatcatgataattcagcaggcccaagtaaaggttaaaaataaggtctatgcctagggaaactcagggcttctagtttctcttagaaaagctaagagaagataaggtctgaataatagcagaaaaaccaacatctacaaaacattaaactagtgttatacttgatgataacactatttgatgagtcttagagtccagacacaaagagacaaagctttgaagatgctttttgatctacctaggtggagttggtggtgctgatatttaaattcaggctactgcttcaatctcaattgctttgtaagtgaaaaacatgacccagaggacagcacagactatggccatggctcacatggtttacatccttcactgctcacgtgtttgctgtcaagccatttttacatctaaactaagatgtgcagcatttcacttatttagattcacttaacaaacaaatttttctgctttaaaaatgtcttattgtcccaagtgtactatagcggcatatagagctagctaatctctacaaaccctctgtaggccagtagttctcaaagtgtggtctctggaagagcagtatcagcatcatctgggaacttgtcacagatgcagattctagggaccactccagacctacacaatcagaaactcttgggggagggcccgaaatatctatgttttaccaagcccaccacatgattctgatgtactctaaatactgagaaaacctgttctagacaaatacccaagcaacaactccgcaggcagttaccaagtacggctggctacaactgctccatccgtgcctctttttaaagttcaaactcacaggtgactctaaggttatctacttttactcataagtaaaagccctagactggtgctaatgtcaaaccactggcctccactcaggcctccatcttctcatgccctcttaccagtatttaacttctgaggaagacaagtgatgctaaaacctgaaattccaatgaagccatatgaacagctgttcagttgcacttctaagactttacttagcagtaaattatagctcatgtgcattattttccagataacttagcttatgagtagcttatacaattatgaagatttaatattacagataaaatgtaaactgtttctttaaaattggggcttcaactttggaatttcacagcgtgctaaaataacagatttctcagaagtctttcagcaagataaacattattaagtaacttatttatgaaagtattaaaatgcttacatttgaacttgatggctaacttacaaagattctctatgtatcaaatgtaacttactgcgactaaacttaatttaatatttactctataaccaaatgaaatatatttaaaatatattgaatattttatattgttatatcctgacaagattataatattttaatgtactaatatttctgtaattatatctaaaatattattttattatattgcctaagaataaacatttgttaaattgg

SEQ ID NO: 267063 - DNA, 4497 bp, Artificial Sequence
  derived and/or modified sequence
atgtccgcgcggaccgcgcctagaccccaggtactgcttcttcctctgctcttggtcctgcttgccgccgcccccgccgcttccaaaggatgtgtgtgcaaggacaagggccagtgcttttgtgatggtgccaagggagagaagggcgaaaaaggattccccggcccgcccggcagccccgggcagaagggtttcacaggtcccgaaggactacccggaccacaaggacccaagtccttcagagccattccctcatatagcgggggtaagtctttgcagggcatctcaggtctgccgggtttttctggtagcccaggattgcccggaacacccggcaacacaggtccatacggcttggtgggagtccccggttgcagtggttcgaagggggaacaaggctttcctggactcccaggcacactcggataccccggcatccccggaattcacaacctgaaaatcttcaagggagcccccgcaaaagaggaggacatcgagctcgatgctaagggcgatccaggcttacctggtgcaccagggcctcagggcttgccgggacctcctggcttccccggccctgttggaccacctggtccgcccgggtttttcggcttcccaggagcaatgggacccagaggtcctaaaagttttgttttgtcgtctagaatcagcacaaagggagagaagggagtgaaggggctgacaggacccccgggccctcctggaaccgtgatagttactttaaccggaccagacaatcgcaccgacctgaagggcgaaaagggcgataaaggcgctatgggcgagcccgggcctcctggtccatctgggctgcctggagagagctacggttctgagaagggagcacccggcgatccgggcctccagggcaagcctgggaaagacggagtgccaggcttcccaggatcagagggggtgaaaggaaatcggggtttcccgggacttatgggcgaagatggcatcaaagaggaaaaacgggacgtagccatcgtgagctttagttctaagaccgaatactacgatacgtatcaggagaagggggacgagggcacccccgggccacccggccccagaggggcgagaggtccgcagggcaagaataagtttaggtgtatccccggttctcagggctcaagccggcctggactcaggggagctcccgggtggccagggcttaagggttccaaaggtgagcggggcaggcccggtaaggacgcaatggggacccctggcagccccggctgtgctggcagtcctggacttccgggatctccgggtcctcctggcccacctggtgatatcgtgttccgtaagggacctcctggggatcacggcctgccaggatacctggggtcaccaggaattcctggcgtcgatggccccaagggtgagcccgggcttttatgcactcagtgcccgtacatcccgggccccccaggattacctggcctgcctgggctgcacggagtgaaagggatccctgggagacaaggagcagcaggactcaaaggctcaccaggatccccagggaacaccggactgcctggattccccggattccccggtgcccagggggaccctgggctcaagggcgagaagggggagacactccagcctgaggggcaggttggagtgccaggcgacccaggcctccgcggacaacctggcaggaagggactcgacggaattccaggtactccaggtgtcaagggcctcccaggcccaaagggggaactggctctatccggggaaaagggggaccagggccctcccggcgaccctggatcccctggatctccaggacctgccggtccagcaggcccgcccgggtacggaccacagggagagcctgggcttcagggtacccaaggtgtcccaggtgcccctgggccgccgggggaggctggtccccgaggcgagctatcagtgagtacgcctgtacccggtccgccaggccctcccggtccacctggccatcccggtcctcaggggccacccggtattcccggtagcctgggtaagtgtggcgatccaggattaccagggccagacggtgagcccggaattccaggcattggcttcccaggacccccaggcccaaaaggcgatcagggatttcccggtaccaagggatccttgggatgtccagggaaaatgggtgagcccgggctgcccggaaaacccgggttgccaggcgccaagggcgagcctgccgttgccatgccaggtggtccaggaactcccggctttcccggcgaaagaggcaattccggggagcacggagaaatcggattgcccggccttcccggcctacccgggacacccggaaatgaaggactggacgggccacgtggagatcctggacaacccgggccacccggggagcagggaccaccgggaaggtgcattgaaggtcctaggggcgctcaggggttacccggtttgaacggactgaaggggcagcagggacggcgaggaaagaccggaccgaagggggatcccggcataccagggctcgatagatcagggtttccaggggaaacaggttctccagggattccaggccaccagggggagatgggcccacttggccaaagaggctatcctggaaatcctggtatcctcggccccccaggcgaggacggtgttatcggcatgatggggttccctggagccatcggaccccccggacctcctggaaatcctgggaccccaggacagcgcggaagccccggcattcccggcgtcaagggccagcggggtacccctggcgcaaagggagagcaaggcgacaaaggtaacccaggtcctagtgaaatcagccacgtaatcggtgacaagggagagcccggccttaaggggttcgccggcaatcctggggaaaaaggaaaccgcggagtcccaggcatgcctgggttaaagggactcaaggggctgcccggtcctgcaggcccccccggcccgcgaggagatctgggtagtactgggaatcccggagaacctggcctcaggggaatccctgggagcatgggcaacatgggaatgccggggagcaaagggaagagagggacactcgggtttcccggaagggcgggccgcccaggactacccgggatccacgggctccagggagacaagggggagcccggctacagcgaggggacacgaccgggtcctccgggtccgacaggagaccccgggttgcccggagatatgggcaaaaagggcgaaatggggcagcctggtccccccggacatctcgggcctgcaggcccagagggtgccccgggctcgcctggttcaccaggattacctgggaagcccggacctcacggggatctaggcttcaaagggatcaagggtctcctaggaccgccagggattagagggccacccggcctgcctgggttccctggaagtcctggaccaatgggcattcggggcgatcaggggcgtgacggcattccaggacccgcaggagaaaagggcgagacaggcctcctgcgcgcgccacctggacccagagggaatcccggggcccaaggggctaagggtgaccggggagctcccggcttccctgggttgcctggcagaaaaggagctatgggagatgcaggtccaagaggtcccactggcatcgagggcttccccggtcccccagggttgcccggagctatcatacctggccagacaggcaatcgcggaccccctggatcacgcggcagcccaggcgcaccgggacctccaggaccacccgggtcccacgtgattggaattaagggcgataagggatccatgggacaccccggacctaagggcccccccggaaccgccggagacatgggacctccaggacgcctcggggctcctggtactcctgggctgccaggccctcggggggatcctgggtttcagggattccccggcgtcaaaggcgagaaaggaaacccaggattcctaggctcaatcgggcccccaggccctatcggtccgaaaggcccaccgggcgtccgcggggaccctggcacactcaagataatttctttgcccggttctcctggacctcctggcaccccgggcgagccaggcatgcaaggggagcccggaccccccggaccgcccggcaacttaggaccttgtgggccccgtggcaaacctggtaaggacggtaagcctggaacaccggggcctgccggcgagaaggggaacaagggcagtaaaggcgaacccggtcccgccgggagcgacggactccccggtttgaagggcaagaggggagattctggcagccccgcaacatggacgacgagaggctttgtcttcacccgccactcacagactacggccatcccctcctgtcccgagggtaccgtgccactatattccggcttcagtttcctcttcgtccagggcaaccagcgcgcccatggccaagatcttgacgcactatttgttaaggtgctgcgaagcccgtag

SEQ ID NO: 267064 - DNA, 4914 bp, Artificial Sequence
  derived and/or modified sequence
atgtcagcacgcaccgccccccgcccccaagttctgcttctgcccctcctcctggttcttttggcggccgctcctgccgctagcaagggctgcgtgtgcaaggacaaggggcagtgtttttgtgatggtgctaagggagagaagggagaaaagggatttccagggccccctggtagtcctggacagaaagggtttaccggtcccgaagggctgcctggcccacaggggccaaagagctttagagcgattccctcctactctggtggcaaaagcctgcaaggcatttctggactgccaggcttcagtgggagccctggcctccctggcacacccggcaacaccggaccctatggactggtaggggtgccaggctgctccggatcaaaaggggagcagggattccctggtttgccaggcacccttgggtacccaggcatacccgggatccacaacttgaaaatctttaagggggctcccgcaaaggaagaagatatcgagctcgacgctaaaggtgatcctggcctgcctggagcccctgggccgcagggacttccagggccgcctggctttcccgggcctgtcgggccaccgggacctccgggatttttcggattccctggggctatgggccctagaggcccaaagagctttgtgctctcatcacgcatttctaccaaaggcgaaaagggggtgaagggtctgactggacctcccggccctcctggcactgtgatcgtgaccctgaccggcccagataacagaaccgatctgaagggggagaagggggataagggtgccatgggggaacccggacctccaggacctagtggcctgccaggggagtcttacggtagcgagaaaggcgcccctggcgacccaggcctccagggcaaacccggaaaggacggagtccctgggtttcctggctccgagggcgtgaagggcaatagaggttttcccgggttaatgggcgaagatggcatcaaagaggagaaacgcgatgtagcgattgtgtccttctcaagtaaaacagagtactacgacacgtatcaggaaaagggcgatgagggcaccccagggccgcctggtcctagaggcgcacgggggccccagggaaaaaacaagtttcggtgtataccgggctcccaaggcagctctcgacctggactgcgcggtgcccctggatggccgggattgaagggcagcaaaggagaaagaggccggcctggcaaggatgccatgggcacaccaggtagtccaggctgtgcagggagtccgggtctccccggatctccggggccccctggtccgcccggtgacatcgtgtttagaaaaggcccccccggggatcatggacttcccggctacctcgggtcacccggaattcccggtgtcgatggacctaagggagaaccaggcctactctgcacgcagtgtccatacattcccggtccacccggcctgcccggcctcccaggcttgcacggagtgaagggtattccaggacgacagggtgccgccggtctcaagggtagtcccggtagtccaggcaatactggccttcccggattccctggattccccggcgcccaaggcgatccggggctgaagggcgagaagggagaaaccttacagcctgagggccaagtcggggtgcccggcgaccctggccttcgcggtcagccaggacggaagggcctggacggcatccctgggactcccggcgtgaaggggctgcctggacccaagggtgaactcgcactgtctggcgaaaaaggagatcagggtcccccaggcgatccaggaagccccggatccccgggacccgcagggccagccggtccacccggctacggcccacagggtgaacccggactgcaaggcacccaaggagtgccaggtgcacctggaccacccggtgaagctggtccccggggagagttgtccgtgtctacacccgtgcccgggccccccgggccacccggtcctcctggccatcccggcccacagggaccccccggcattccaggctctctgggcaaatgcggggacccagggctgcccgggcctgatggtgaaccaggcattcccggcattgggtttccggggccacctggccccaaaggggatcaggggttcccgggcacgaagggtagcctcggctgtcccggaaagatgggcgagccaggactcccagggaagcccggacttccaggagcgaagggtgagccagccgtggcaatgcccggtggaccgggtactccaggcttccctggcgaacggggcaatagcggcgagcacggggagattgggctaccaggcctccccgggcttcccgggactcctggtaacgagggcctggacggccctagaggagatccaggccaacccggccctcctggtgagcagggcccccccggccggtgtatcgaaggacctcgtggagcacagggactccctggcttaaacggtcttaagggccagcagggacgtaggggcaagacaggacccaagggcgacccaggtatcccaggcttggatcgctccggatttcccggtgaaaccggctccccaggtatcccggggcatcaaggggagatgggacctcttggccagcgcggctatcccgggaaccctgggatcctggggcctccaggagaagacggcgtgataggaatgatggggtttccaggagccatcggtccgccagggccccctggcaacccgggcactcccggacagagaggctcccctggtatccccggcgtgaagggccaaaggggaacaccaggagccaaaggagagcaaggggacaagggaaatccgggcccctccgagatctctcatgttattggagataagggagagcctggtctgaagggcttcgcaggaaatcccggggagaagggcaataggggcgttcctggcatgccaggccttaaaggcctcaaagggctgcccggcccagccggtccaccggggcccaggggtgatctgggatccacgggaaacccgggagagcctggcctaagggggataccggggtcaatggggaacatgggaatgcccggctccaaggggaagaggggcaccctcggattccctggtcgcgccgggcgacctggtctgcctggtatacatggactgcaaggtgacaagggcgagcccggctacagtgaaggcacacggccaggtccccccggcccaacaggcgatcctggattacccggagatatggggaagaagggcgaaatgggacaacctgggccgccgggccatttgggacccgccggacctgaaggcgcccccgggagtcccggttcaccgggcctgcccggcaagcctggccctcacggcgatcttggattcaaaggaatcaagggattgttaggaccacctgggataaggggacctcctggcctgccagggttccctggcagtcctgggcctatggggattaggggagatcagggaagagacggaattcctgggcctgccggcgaaaaaggagagactgggctgctgcgcgcgccgcccggtcctagaggcaatcctggggctcaaggagccaagggcgaccgaggcgccccggggtttcctggcctccccgggaggaagggcgcaatgggggatgcggggcctcgaggccctaccggaattgaaggcttccctgggcctcccggcctgccgggggctatcattcctggacaaaccggtaataggggcccacccggcagccgcggcagcccaggcgccccaggacctccgggtccccccgggtcacacgtgataggtatcaagggtgacaaagggagcatgggacaccctggaccaaagggcccccctggcacagcaggcgatatgggcccgcccggccggctgggggcacctggcacacccgggttacccggcccccgtggcgatcccgggtttcagggcttccctggagtgaaaggtgagaaagggaatcccggctttctgggttccattggtccccccggtcctatcggccctaagggaccaccgggcgttcgcggggacccagggacactgaagataattagtttacctgggtcgcccggcccacccgggacaccgggtgagccggggatgcaaggcgagccagggcctcctgggccacctggcaaccttggcccatgtggtcctcgtggcaagccaggcaaagacggcaaacccggtacacctggaccagcaggcgaaaagggaaacaaggggtctaagggagagccgggccccgccggctccgatggacttcctggtctgaaaggcaagcgcggcgattctggatccccagcaacctggacaactcgaggctttgtgttcacaaggcacagtcagaccaccgccattccatcctgtcctgagggaacagtcccactatattctggtttttctttcctcttcgttcagggtaaccaacgggcccatgggcaagatctgggaacgcttggcagctgcctgcagagatttacaacaatgcccttcttattctgtaacgtcaacgatgtttgcaacttcgcgagccgaaacgactactcttattggctgagcaccccagcgctgatgcccatgaatatggctcccattactggtcgcgccctggagccgtatatcagtcggtgcacagtgtgcgagggcccggccatagccatcgcagtgcatagccagacaacagacatacccccttgtccgcatggttggatatcactgtggaaaggcttttcttttatcatgaaggcttacagcattaactgcgaaagctggggtatccgtaagaataataagagtctcagtggggtccatgaagagaaaacactgaagcttaaaaaaactgccgaactactgtttttcatacttaagaacaaagttatgactgaacatgccgtgatctag

SEQ ID NO: 267065 - DNA, 4485 bp, Artificial Sequence
  derived and/or modified sequence
atgtctgcaagaaccgccccacggccacaggtgctacttctgccactgttactcgttctgttggcggctgctcctgccgccagtaaaggttgtgtgtgcaaagataagggccagtgcttttgcgatggcgcgaagggcgaaaagggcgaaaaggggtttcctggccccccaggttcccctggccagaaaggcttcacagggccagaagggttgcctggtccccagggacccaaatcctttagggcaattcctagctattcaggcggtaagagtctgcagggcattagcggactacctggcttctctggttctccaggtttacctggaacccccggaaataccggtccctacggcctggtaggagtgcctggctgttcaggttctaagggggagcaggggtttccaggactgcccgggactctgggttaccccgggatccctggaatccacaacttgaagatattcaaaggcgctccggcgaaagaagaagacatcgagctagatgctaaaggcgatcctggacttccaggggccccagggccccaaggtcttccgggacctcccgggttcccaggtcccgtggggccgcccggcccaccgggctttttcgggtttccaggggccatgggaccaaggggtccaaaatcatttgtgcttagctcacgcatcagtactaagggcgaaaagggcgttaaggggctgacaggccctccaggaccacccgggacggtgatcgtgacactcacaggcccggacaaccgcactgatctgaaaggggaaaaaggcgataagggggcaatgggagagcccgggccaccagggccatcaggacttccgggagagtcctacggctccgagaagggtgcccctggggacccaggtctccaggggaagcctggcaaggacggcgtgccaggatttccgggaagcgaaggggtcaagggcaatcgcggatttcccgggctcatgggcgaggacggaataaaggaggaaaaacgagacgttgcaattgtgtctttctccagcaagactgagtattacgatacataccaggagaaaggggatgagggcacccctggacctccaggaccaaggggcgcccgagggcctcaggggaaaaacaaatttaggtgcattcctggctctcagggcagcagccggcctgggctgagaggcgctcctgggtggcctgggcttaaggggagtaagggggagcggggccgccccggaaaagacgctatggggactcctggttcgccaggatgtgctggcagtccagggctgcctggatcgccgggccccccaggtcctccgggagatatcgtgttcaggaaaggtccccctggggaccacgggctccccgggtatctgggatcccctggaataccaggtgtagatgggccaaagggagagcccggcctgctgtgtactcagtgcccctacatacctggtccacccggccttcctggcttgccaggactccatggggtcaaaggaattccaggccgccagggggcggcaggtcttaagggtagcccaggctcccctggaaacactggactgcccggtttccccggatttcccggcgcccagggcgaccccggactcaaaggcgaaaagggcgagacactgcagccagagggacaggtaggtgtcccaggtgatccaggactgagaggacaaccagggcggaaaggcttggatggcattcctggcacccctggtgtcaaaggcctgccgggaccaaaaggcgagctcgcgctctccggggaaaagggtgaccagggcccgcctggagaccccggttcccccggaagccctggccctgccggtcctgccggaccaccgggttacggtccacagggcgagcctggtctacagggaactcagggagtccctggggcaccagggccgcctggggaggccggccctcggggtgagctgtcagtcagtacacctgtgcctggcccgccaggaccacctggaccacccgggcatcccggtccccagggcccccccggtatcccgggctcattagggaagtgcggggacccaggcctgcctggtcctgacggggagccgggcatccctggtatcgggtttcctgggcctcctggacccaagggcgaccaagggtttcccggcaccaaaggctctcttggctgcccaggcaaaatgggcgaaccaggactgcctggcaagcccggcctcccaggagccaagggcgagcccgccgtggctatgcccggggggccaggtactcccggatttcctggagaaaggggcaattccggagaacatggcgaaattggtctgccagggttgccaggactcccgggcacaccgggcaatgagggtcttgacggaccccgaggtgacccagggcagcccggcccgcccggtgaacagggacccccgggccgatgcatcgagggaccacgtggagcccaaggactgcccggattgaacggtttaaaaggccagcagggcaggaggggtaagacagggcccaagggcgacccagggattccaggactcgataggtccgggttccctggggaaacgggatcgcccggcattccggggcaccagggggaaatgggccctctgggtcagcgcgggtatcccgggaaccccggtatcctcggaccccctggcgaagatggcgtgatcggtatgatggggttcccaggcgctatcgggccgcctggcccacccggcaacccaggtactcctggacagcgcggcagcccaggaatccccggagtaaaaggccagaggggtacccctggtgctaagggcgagcaaggtgataagggtaacccaggcccgagtgaaatctcccatgttattggggacaagggggaacctgggcttaaaggctttgcaggcaaccctggcgaaaaggggaatcgcggggtgccgggaatgccaggcctcaaggggcttaagggtcttcccgggccggccggccctcctggaccccgaggcgacttaggttctactggaaaccctggcgagccgggcttgagggggatccctggctctatggggaacatgggtatgcccgggagtaagggaaagcgaggcactctcggttttccagggcgggccggacgccctggactccccgggattcacggcttgcagggggacaaaggagagcccgggtacagcgaaggaacaagacccggaccgcccggtccgacaggggacccaggcctgcccggagacatgggcaagaaaggcgagatgggccagccaggaccccccgggcatctgggcccagccggtcctgagggggcaccaggcagccctggtagtcccgggctgcccggcaaaccaggcccccacggagatctcggattcaaggggatcaaagggctgctgggcccaccaggcatccggggtccgccgggtctccccggcttcccaggctcacctggcccaatgggtattaggggcgaccagggccgcgatggcatccctgggcctgcaggagaaaagggagaaacaggcctgctgagggcgccacccggcccaaggggcaatccaggagctcaaggtgcgaagggcgatcggggcgctccaggcttcccaggcctgccgggcagaaaaggtgccatgggagacgctggacctcggggacccaccggaattgagggttttcccggcccccctggcctccctggggccatcattcccggccagactggtaaccggggacctccgggtagcagaggctctccgggcgcaccggggcctcccgggccacccgggtctcacgtgatcgggatcaagggggataagggatcaatgggccaccctggtccaaagggccccccgggcaccgccggcgatatggggcctcctggcaggctcggagctccaggaacccctggattgccaggcccccgcggcgacccaggctttcaaggctttccaggggtgaaaggagaaaaaggcaacccgggatttctgggttctattggtcccccagggccgatcggtcctaaaggccctccaggggtacgcggggaccctggtacactcaagatcatctcacttcctggcagcccgggccctcccggcacccccggagagcccgggatgcagggtgaaccaggcccccctggacctccgggaaacttggggccttgcggacctcggggaaaaccgggaaaagacggcaagcccggaactcccgggccagccggtgaaaagggaaataaggggtcaaaaggagagccagggcccgccggctctgacggactgccaggcctcaagggaaaaaggggcgattccggctcccccgctacatggaccactcgtggatttgtgtttaccaggcactctcaaactaccgcgattcccagttgcccagaggggaccgtgcccctttattctggatttagctttttattcgtgcaaggcaaccaaagggctcacggccaggacctggagagcctcttccaccagctgtag

SEQ ID NO: 267066 - DNA, 4275 bp, Artificial Sequence
  derived and/or modified sequence
atgtcagctcgcactgcccctcgcccgcaggttctgctgctgccactgctcctggtgctgctggctgccgctccagccgctagcaaagggtgtgtgtgcaaggataagggccaatgcttttgcgatggggccaagggtgaaaagggggaaaaggggttcccggggccccctggatctccaggacagaaagggtttactggcccagagggccttcctgggcctcaaggccctaagagttttagagccataccatcctatagcgggggaaaaagcctacaggggatcagtggcctcccaggtttctctggcagccctgggctccctggaactccgggcaatacaggcccctacggccttgtcggggtcccaggctgttcaggttcaaaaggagagcagggtttccccggccttcctggtactctgggttaccctggcattcctgggatacataatctcaaaatttttaagggcgcaccggctaaagaagaggacatcgaacttgacgctaagggagacccaggccttcccggtgctcctgggccacagggcttgcccggcccccccgggttccctggccccgtcggccctccaggccctccaggtttcttcggctttcccggggccatggggccgcgcgggcctaaatcctttgtgctttctagtagaatatctacgaagggcgaaaaaggcgtgaagggactgactgggccccccggacctcctggaactgtgatcgtgactctcactggccccgacaatcgcaccgatctgaagggcgagaaaggggacaagggcgctatgggggagccgggacctccaggtccgtctgggttgcccggtgagagctatggtagtgagaagggcgcccctggcgatccaggcctccaaggtaagcctggaaaagacggggttcccggattccccggatccgaaggcgtgaaagggaatcggggcttcccgggccttatgggcgaggatgggattaaggaggaaaaacgggacgtggcaattgtatccttttctagcaagaccgagtactacgatacatatcaggagaagggggatgaaggtaccccgggacctcccggtcctagaggggcccgggggccacaaggcaagaacaagttcaggtgcattccagggtctcaagggtcatctaggccaggcctcaggggtgctccgggttggcccgggctgaaaggatcaaaaggagagcgaggcaggccaggaaaagacgccatgggcactcccggcagtccgggctgcgcaggctcgccgggccttccaggaagtcctggaccccctggcccccctggagacatcgttttccgaaaaggcccgcctggcgaccatggcctgcctgggtacctggggtctcctggtatccctggggtcgacggtccaaaaggggagccggggttactttgcacacaatgtccctatatccccggaccgcccgggctccctggactacccgggctccacggagttaaaggcatccctgggcggcaaggcgcagcgggcttgaaagggtctccggggtcgcccggcaatactggattacctggcttccctgggtttccgggcgctcagggggatccaggactgaaaggtgaaaagggagaaacactgcagcctgaaggtcaagtgggtgttcccggggacccaggcctgagggggcagccagggcggaagggattggatggtatccctgggacgcccggtgtgaagggcctaccagggcccaagggcgaactggcactgagcggcgagaagggggaccaagggccgcctggagatcccggctctcctggatccccaggacccgccgggcccgccggtccgccgggctacggcccacaaggggagccgggcctgcagggcacccagggagtccccggtgcccccggccctccaggagaagctggcccccggggggagctgtctgtgtccacccccgtgcccggtccccccgggccaccagggccgccgggacatccggggccgcaaggacctcctggaattcctggctccctggggaaatgcggagaccctggcctgcccggcccagatggagagccagggattcccggaatcggctttccggggcctcctgggccaaaaggggatcagggctttcctggaaccaaggggtcactcggatgtcccggcaagatgggcgaacccggtttgcccgggaagcctggactgccgggcgctaaaggagagcccgctgtcgccatgccgggcggtcctgggaccccagggtttccaggtgaaaggggaaattccggcgagcacggagaaatcgggttaccaggactacctggactccctgggacgcccggcaatgagggcctggatggtccaagaggcgatcccggacagccaggcccccccggcgagcaaggcccacctggcaggtgtattgagggccctcgcggcgcccaggggctccctgggctgaatgggctcaaaggtcagcaaggcaggcgagggaaaactggcccaaagggagatccaggaatccccggcttggacaggagcgggttccctggagagaccggaagtccaggcatcccaggccaccagggagagatgggacccctgggacagagaggatatcctgggaatccggggatattggggccacctggcgaagatggtgtcattggcatgatgggtttccccggcgctatcgggccccccggcccccctgggaatcccggaacccctgggcagaggggaagccccgggataccaggtgttaaaggccagcgcgggacccccggagctaaaggcgagcagggtgacaaaggaaatcccgggccatctgagatttcccatgtgataggagataagggcgaacccggactaaaaggcttcgccggcaacccaggcgagaaggggaatcgcggggtgcctgggatgcccggcctaaaagggctgaaagggctgcccggtcctgccggtcctccggggccccggggtgatctcggtagcacggggaaccccggggagcccggccttcgaggcattcccgggtctatggggaacatgggcatgccgggctccaaggggaagagagggacgctgggctttccgggcagggctggacgtcctggactcccaggaatccatggcctgcaaggagacaaaggagagcctggctatagtgagggaaccaggcctggcccccctggacctacaggggaccccggccttcccggggatatgggcaaaaagggagagatgggccaacctggccctcctggccatcttgggcccgcaggacccgagggagcaccaggctcccctggaagtccaggactgccaggtaaacccggtccccatggcgatctgggattcaaagggattaaaggattattgggacctcccggcatcaggggcccacccggcctgccaggttttcctgggagtcccgggccgatggggatcagaggagaccaagggagagatggaatccctggccctgctggggagaaaggcgagaccggccttctgcgagccccgccaggccctcggggtaatcctggcgcgcagggtgccaagggagaccggggcgcccccggtttccccggactcccaggtagaaaaggtgctatgggcgacgctgggccacgcggacctaccggcatagaaggctttcctgggcccccagggttgcctggcgccatcatacctggtcaaacagggaaccgggggcctcctggatccaggggctcacctggcgcccccggccccccaggtccccccggctctcacgttattggcattaaaggggacaagggatccatgggccaccctggcccaaagggcccacccggcaccgccggcgacatgggcccccctggtagactgggcgcacctggcacaccagggctgcctgggccccgaggggatcctggattccagggatttccaggagtgaagggggaaaaaggcaatccaggattcctcggctccattggacctcctggccctatcggtcccaaagggccacccggagtgcggggagatccaggaacactcaaaatcatttcactgcccggatcccctgggccacccgggaccccaggggaacccggcatgcagggggagcctggcccaccaggcccgcccggcaacctggggccttgcggaccacgcgggaaaccgggcaaagatgggaaacctggaaccccaggtccagcaggtgagaagggcaacaagggaagtaagggggagcccgagtccctgttccaccagctctag

SEQ ID NO: 267067 - DNA, 4497 bp, Artificial Sequence
  derived and/or modified sequence
atgtctgccaggacagccccccggccccaggtgctgctgctgcccctgctgctggtgctgctggccgccgccccagctgccagcaagggctgtgtgtgcaaggacaagggccagtgcttctgtgatggagccaagggggagaagggggagaagggcttccctggccccccaggcagccctggccagaagggcttcaccggccctgagggcctgcccggcccccagggccccaagagcttccgggccatccccagctacagcggcggcaagagcctgcagggcatcagcggcctgcccggcttcagcggcagccctggcctgcccggcaccccaggcaacacaggcccctacggcctggtgggcgtgcccggctgcagcggcagcaaaggagagcagggcttccctggcctgcccggcaccctgggctacccaggcatccctggcatccacaacctgaagatcttcaagggggccccagccaaggaggaggacatcgagctggatgccaagggggaccccggcctgcccggggcccctggcccccagggcctgcccggccccccaggcttccctggccctgtgggccccccaggccccccaggcttcttcggcttccctggggccatgggcccccggggccccaagagctttgtgctgagcagccgcatcagcaccaagggggagaagggcgtgaagggcctgactggacctcctggccccccaggcaccgtgattgtgaccctgactggaccagacaacagaacagacctgaagggggagaagggggacaagggggccatgggagagcccggccccccaggccccagcggcctgcctggagagagctatggcagcgagaagggggcccctggggaccccggcctgcagggcaagccaggcaaggatggagtgcccggcttccctggcagcgagggcgtgaagggcaacagaggcttccctggcctgatgggagaagatggcatcaaggaggagaagagagatgtggccatcgtgtccttcagcagcaagacagagtactatgacacctaccaggagaagggagatgagggcaccccaggccccccaggccccaggggggcccggggcccccagggcaagaacaagttccgctgcatccctggcagccagggcagcagccggcccggcctgcggggggcccctggctggccaggcctgaagggcagcaaaggagagcggggccggcctgggaaggatgccatgggcaccccaggcagccctggctgtgccggcagccctggcctgcccggcagccctggccccccaggccccccaggggacatcgtgttcagaaaaggacctcctggggaccacggcctgcccggctacctgggcagccctggcatccctggggtggatggccccaagggggagcccggcctgctgtgcacccagtgcccctacatccctggccccccaggcctgcccggcctgcccggcctgcatggagtgaagggcatccctggccggcagggcgctgctggcctgaagggcagccctggcagccctggcaacacaggcctgcccggcttccctggcttccctggggcccagggcgaccccggcctgaagggggagaagggggagaccctgcagcctgagggccaggtgggcgtgcctggggaccccggcctgcggggccagcccggcaggaagggcctggatggcatccctggcaccccaggagtgaagggcctgcccggccccaagggggagctggccctgtctggagagaagggggaccagggccccccaggggaccccggcagccctggcagccctggccctgctggccctgctggccccccaggctacggcccccagggcgagcccggcctgcagggcacccagggcgtgcctggggcccctggccccccaggagaggccggccccagaggagagctgtctgtgtccacccctgtgcccggccccccaggccccccaggccccccaggccaccctggcccccagggccccccaggcatccctggcagcctgggcaaatgtggggaccccggcctgcccggcccagatggagagcccggcatccctggcatcggcttccctggccccccaggccccaagggggaccagggcttccctggcaccaagggcagcctgggctgccctgggaagatgggagagcccggcctgcccgggaagccaggcctgcccggggccaagggggagcctgctgtggccatgcctgggggccctggcaccccaggcttccctggagagcggggcaacagcggggagcacggggagatcggcctgcccggcctgcccggcctgcccggcaccccaggaaatgaaggcctggatggccccaggggggaccccggccagcccggccccccaggagagcagggccccccaggccgctgcatcgagggccccaggggggcccagggcctgcccggcctgaatggcctgaagggccagcagggcagaagaggcaagacaggccccaagggggaccccggcatccctggcctggacagaagtggcttccctggagaaacaggcagccctggcatccctggccaccagggcgagatgggccccctgggccagaggggctacccaggcaaccctggcatcctgggccccccaggagaagatggagtgattggcatgatgggcttccctggggccatcggccccccaggccccccaggcaaccctggcaccccaggccagaggggcagccctggcatccctggggtgaagggccagaggggcacccctggggccaagggggagcagggcgacaagggcaaccctggccccagcgagatcagccacgtgattggagacaagggggagcccggcctgaagggctttgctggcaaccctggagagaagggcaacagaggagtgcccggcatgcctggcctgaagggcctgaagggcctgcccggccctgctggccccccaggccccaggggggacctgggcagcacaggcaaccctggagagcccggcctgcggggcatccctggctccatgggcaacatgggcatgcctggcagcaagggcaagaggggcaccctgggcttccctggccgggccggccggcccggcctgcccggcatccacggcctgcagggcgacaagggggagcccggctacagcgagggcacccggcccggccccccaggccccaccggggaccccggcctgcccggggacatgggcaagaagggggagatgggccagcccggccccccaggccacctgggccctgctggccctgagggcgcccctggcagccctggcagccctggcctgcccgggaagccaggcccccacggggacctgggcttcaagggcatcaagggcctgctgggccccccaggcatccggggccccccaggcctgcccggcttccctggcagccctggccccatgggcatccggggggaccagggcagagatggcatccctggccctgctggggagaagggggagaccggcctgctgcgggcccctcctggcccccggggcaaccctggggcccagggcgccaagggggacagaggagcccctggcttccctggcctgcccggcaggaagggggccatgggagatgctggcccccggggccccaccggcatcgagggcttccctggccccccaggcctgcccggggccatcatccctggccagacaggcaacagaggccccccaggcagccggggcagccctggggcccctggccccccaggccccccaggcagccacgtgattggcatcaagggggacaagggctccatgggccaccctggccccaagggccccccaggcacagctggggacatgggccccccaggccgcctgggcgcccctggcaccccaggcctgcccggccccaggggggaccccggcttccagggcttccctggggtgaagggggagaagggcaaccctggcttcctgggcagcatcggccccccaggccccatcggccccaagggccccccaggagtgcggggggaccccggcaccctgaagatcatcagcctgcccggcagccctggccccccaggcaccccaggagagcccggcatgcagggcgagcccggccccccaggccccccaggcaacctgggcccctgtggcccccggggcaagccaggcaaggatggcaagccaggcaccccaggccctgctggggagaagggcaacaagggcagcaagggggagcccggccctgctggcagtgatggcctgcccggcctgaagggcaagagaggagacagcggcagccctgccacctggaccacccggggctttgtgttcaccaggcacagccagaccacagccatccccagctgcccagagggcaccgtgcccctgtacagcggcttctccttcctgtttgtgcagggcaaccagagggcccacggccaggacctggatgccctgtttgtgaaggtgctgcggagcccctag

SEQ ID NO: 267068 - DNA, 4914 bp, Artificial Sequence
  derived and/or modified sequence
atgtctgccaggacagccccccggccccaggtgctgctgctgcccctgctgctggtgctgctggccgccgccccagctgccagcaagggctgtgtgtgcaaggacaagggccagtgcttctgtgatggagccaagggggagaagggggagaagggcttccctggccccccaggcagccctggccagaagggcttcaccggccctgagggcctgcccggcccccagggccccaagagcttccgggccatccccagctacagcggcggcaagagcctgcagggcatcagcggcctgcccggcttcagcggcagccctggcctgcccggcaccccaggcaacacaggcccctacggcctggtgggcgtgcccggctgcagcggcagcaaaggagagcagggcttccctggcctgcccggcaccctgggctacccaggcatccctggcatccacaacctgaagatcttcaagggggccccagccaaggaggaggacatcgagctggatgccaagggggaccccggcctgcccggggcccctggcccccagggcctgcccggccccccaggcttccctggccctgtgggccccccaggccccccaggcttcttcggcttccctggggccatgggcccccggggccccaagagctttgtgctgagcagccgcatcagcaccaagggggagaagggcgtgaagggcctgactggacctcctggccccccaggcaccgtgattgtgaccctgactggaccagacaacagaacagacctgaagggggagaagggggacaagggggccatgggagagcccggccccccaggccccagcggcctgcctggagagagctatggcagcgagaagggggcccctggggaccccggcctgcagggcaagccaggcaaggatggagtgcccggcttccctggcagcgagggcgtgaagggcaacagaggcttccctggcctgatgggagaagatggcatcaaggaggagaagagagatgtggccatcgtgtccttcagcagcaagacagagtactatgacacctaccaggagaagggagatgagggcaccccaggccccccaggccccaggggggcccggggcccccagggcaagaacaagttccgctgcatccctggcagccagggcagcagccggcccggcctgcggggggcccctggctggccaggcctgaagggcagcaaaggagagcggggccggcctgggaaggatgccatgggcaccccaggcagccctggctgtgccggcagccctggcctgcccggcagccctggccccccaggccccccaggggacatcgtgttcagaaaaggacctcctggggaccacggcctgcccggctacctgggcagccctggcatccctggggtggatggccccaagggggagcccggcctgctgtgcacccagtgcccctacatccctggccccccaggcctgcccggcctgcccggcctgcatggagtgaagggcatccctggccggcagggcgctgctggcctgaagggcagccctggcagccctggcaacacaggcctgcccggcttccctggcttccctggggcccagggcgaccccggcctgaagggggagaagggggagaccctgcagcctgagggccaggtgggcgtgcctggggaccccggcctgcggggccagcccggcaggaagggcctggatggcatccctggcaccccaggagtgaagggcctgcccggccccaagggggagctggccctgtctggagagaagggggaccagggccccccaggggaccccggcagccctggcagccctggccctgctggccctgctggccccccaggctacggcccccagggcgagcccggcctgcagggcacccagggcgtgcctggggcccctggccccccaggagaggccggccccagaggagagctgtctgtgtccacccctgtgcccggccccccaggccccccaggccccccaggccaccctggcccccagggccccccaggcatccctggcagcctgggcaaatgtggggaccccggcctgcccggcccagatggagagcccggcatccctggcatcggcttccctggccccccaggccccaagggggaccagggcttccctggcaccaagggcagcctgggctgccctgggaagatgggagagcccggcctgcccgggaagccaggcctgcccggggccaagggggagcctgctgtggccatgcctgggggccctggcaccccaggcttccctggagagcggggcaacagcggggagcacggggagatcggcctgcccggcctgcccggcctgcccggcaccccaggaaatgaaggcctggatggccccaggggggaccccggccagcccggccccccaggagagcagggccccccaggccgctgcatcgagggccccaggggggcccagggcctgcccggcctgaatggcctgaagggccagcagggcagaagaggcaagacaggccccaagggggaccccggcatccctggcctggacagaagtggcttccctggagaaacaggcagccctggcatccctggccaccagggcgagatgggccccctgggccagaggggctacccaggcaaccctggcatcctgggccccccaggagaagatggagtgattggcatgatgggcttccctggggccatcggccccccaggccccccaggcaaccctggcaccccaggccagaggggcagccctggcatccctggggtgaagggccagaggggcacccctggggccaagggggagcagggcgacaagggcaaccctggccccagcgagatcagccacgtgattggagacaagggggagcccggcctgaagggctttgctggcaaccctggagagaagggcaacagaggagtgcccggcatgcctggcctgaagggcctgaagggcctgcccggccctgctggccccccaggccccaggggggacctgggcagcacaggcaaccctggagagcccggcctgcggggcatccctggctccatgggcaacatgggcatgcctggcagcaagggcaagaggggcaccctgggcttccctggccgggccggccggcccggcctgcccggcatccacggcctgcagggcgacaagggggagcccggctacagcgagggcacccggcccggccccccaggccccaccggggaccccggcctgcccggggacatgggcaagaagggggagatgggccagcccggccccccaggccacctgggccctgctggccctgagggcgcccctggcagccctggcagccctggcctgcccgggaagccaggcccccacggggacctgggcttcaagggcatcaagggcctgctgggccccccaggcatccggggccccccaggcctgcccggcttccctggcagccctggccccatgggcatccggggggaccagggcagagatggcatccctggccctgctggggagaagggggagaccggcctgctgcgggcccctcctggcccccggggcaaccctggggcccagggcgccaagggggacagaggagcccctggcttccctggcctgcccggcaggaagggggccatgggagatgctggcccccggggccccaccggcatcgagggcttccctggccccccaggcctgcccggggccatcatccctggccagacaggcaacagaggccccccaggcagccggggcagccctggggcccctggccccccaggccccccaggcagccacgtgattggcatcaagggggacaagggctccatgggccaccctggccccaagggccccccaggcacagctggggacatgggccccccaggccgcctgggcgcccctggcaccccaggcctgcccggccccaggggggaccccggcttccagggcttccctggggtgaagggggagaagggcaaccctggcttcctgggcagcatcggccccccaggccccatcggccccaagggccccccaggagtgcggggggaccccggcaccctgaagatcatcagcctgcccggcagccctggccccccaggcaccccaggagagcccggcatgcagggcgagcccggccccccaggccccccaggcaacctgggcccctgtggcccccggggcaagccaggcaaggatggcaagccaggcaccccaggccctgctggggagaagggcaacaagggcagcaagggggagcccggccctgctggcagtgatggcctgcccggcctgaagggcaagagaggagacagcggcagccctgccacctggaccacccggggctttgtgttcaccaggcacagccagaccacagccatccccagctgcccagagggcaccgtgcccctgtacagcggcttctccttcctgtttgtgcagggcaaccagagggcccacggccaggacctgggcaccctgggcagctgcctgcagcgcttcaccaccatgcccttcctgttctgcaatgtgaatgatgtgtgcaactttgccagcagaaatgactacagctactggctgagcaccccagccctgatgcccatgaacatggcccccatcaccggccgggccctggagccctacatcagccgctgcaccgtgtgtgagggccctgccatcgccatcgctgtgcacagccagaccacagacatccccccctgcccccacggctggatcagcctgtggaagggcttctccttcatcatgaaggcctacagcatcaactgtgagagctggggcatcaggaagaacaacaagagcctgtctggagtgcatgaggagaagaccctgaagctgaagaagacagctgagctgctcttcttcatcctgaagaacaaggtgatgacagagcacgctgtgatctag

SEQ ID NO: 267069 - DNA, 4485 bp, Artificial Sequence
  derived and/or modified sequence
atgtctgccaggacagccccccggccccaggtgctgctgctgcccctgctgctggtgctgctggccgccgccccagctgccagcaagggctgtgtgtgcaaggacaagggccagtgcttctgtgatggagccaagggggagaagggggagaagggcttccctggccccccaggcagccctggccagaagggcttcaccggccctgagggcctgcccggcccccagggccccaagagcttccgggccatccccagctacagcggcggcaagagcctgcagggcatcagcggcctgcccggcttcagcggcagccctggcctgcccggcaccccaggcaacacaggcccctacggcctggtgggcgtgcccggctgcagcggcagcaaaggagagcagggcttccctggcctgcccggcaccctgggctacccaggcatccctggcatccacaacctgaagatcttcaagggggccccagccaaggaggaggacatcgagctggatgccaagggggaccccggcctgcccggggcccctggcccccagggcctgcccggccccccaggcttccctggccctgtgggccccccaggccccccaggcttcttcggcttccctggggccatgggcccccggggccccaagagctttgtgctgagcagccgcatcagcaccaagggggagaagggcgtgaagggcctgactggacctcctggccccccaggcaccgtgattgtgaccctgactggaccagacaacagaacagacctgaagggggagaagggggacaagggggccatgggagagcccggccccccaggccccagcggcctgcctggagagagctatggcagcgagaagggggcccctggggaccccggcctgcagggcaagccaggcaaggatggagtgcccggcttccctggcagcgagggcgtgaagggcaacagaggcttccctggcctgatgggagaagatggcatcaaggaggagaagagagatgtggccatcgtgtccttcagcagcaagacagagtactatgacacctaccaggagaagggagatgagggcaccccaggccccccaggccccaggggggcccggggcccccagggcaagaacaagttccgctgcatccctggcagccagggcagcagccggcccggcctgcggggggcccctggctggccaggcctgaagggcagcaaaggagagcggggccggcctgggaaggatgccatgggcaccccaggcagccctggctgtgccggcagccctggcctgcccggcagccctggccccccaggccccccaggggacatcgtgttcagaaaaggacctcctggggaccacggcctgcccggctacctgggcagccctggcatccctggggtggatggccccaagggggagcccggcctgctgtgcacccagtgcccctacatccctggccccccaggcctgcccggcctgcccggcctgcatggagtgaagggcatccctggccggcagggcgctgctggcctgaagggcagccctggcagccctggcaacacaggcctgcccggcttccctggcttccctggggcccagggcgaccccggcctgaagggggagaagggggagaccctgcagcctgagggccaggtgggcgtgcctggggaccccggcctgcggggccagcccggcaggaagggcctggatggcatccctggcaccccaggagtgaagggcctgcccggccccaagggggagctggccctgtctggagagaagggggaccagggccccccaggggaccccggcagccctggcagccctggccctgctggccctgctggccccccaggctacggcccccagggcgagcccggcctgcagggcacccagggcgtgcctggggcccctggccccccaggagaggccggccccagaggagagctgtctgtgtccacccctgtgcccggccccccaggccccccaggccccccaggccaccctggcccccagggccccccaggcatccctggcagcctgggcaaatgtggggaccccggcctgcccggcccagatggagagcccggcatccctggcatcggcttccctggccccccaggccccaagggggaccagggcttccctggcaccaagggcagcctgggctgccctgggaagatgggagagcccggcctgcccgggaagccaggcctgcccggggccaagggggagcctgctgtggccatgcctgggggccctggcaccccaggcttccctggagagcggggcaacagcggggagcacggggagatcggcctgcccggcctgcccggcctgcccggcaccccaggaaatgaaggcctggatggccccaggggggaccccggccagcccggccccccaggagagcagggccccccaggccgctgcatcgagggccccaggggggcccagggcctgcccggcctgaatggcctgaagggccagcagggcagaagaggcaagacaggccccaagggggaccccggcatccctggcctggacagaagtggcttccctggagaaacaggcagccctggcatccctggccaccagggcgagatgggccccctgggccagaggggctacccaggcaaccctggcatcctgggccccccaggagaagatggagtgattggcatgatgggcttccctggggccatcggccccccaggccccccaggcaaccctggcaccccaggccagaggggcagccctggcatccctggggtgaagggccagaggggcacccctggggccaagggggagcagggcgacaagggcaaccctggccccagcgagatcagccacgtgattggagacaagggggagcccggcctgaagggctttgctggcaaccctggagagaagggcaacagaggagtgcccggcatgcctggcctgaagggcctgaagggcctgcccggccctgctggccccccaggccccaggggggacctgggcagcacaggcaaccctggagagcccggcctgcggggcatccctggctccatgggcaacatgggcatgcctggcagcaagggcaagaggggcaccctgggcttccctggccgggccggccggcccggcctgcccggcatccacggcctgcagggcgacaagggggagcccggctacagcgagggcacccggcccggccccccaggccccaccggggaccccggcctgcccggggacatgggcaagaagggggagatgggccagcccggccccccaggccacctgggccctgctggccctgagggcgcccctggcagccctggcagccctggcctgcccgggaagccaggcccccacggggacctgggcttcaagggcatcaagggcctgctgggccccccaggcatccggggccccccaggcctgcccggcttccctggcagccctggccccatgggcatccggggggaccagggcagagatggcatccctggccctgctggggagaagggggagaccggcctgctgcgggcccctcctggcccccggggcaaccctggggcccagggcgccaagggggacagaggagcccctggcttccctggcctgcccggcaggaagggggccatgggagatgctggcccccggggccccaccggcatcgagggcttccctggccccccaggcctgcccggggccatcatccctggccagacaggcaacagaggccccccaggcagccggggcagccctggggcccctggccccccaggccccccaggcagccacgtgattggcatcaagggggacaagggctccatgggccaccctggccccaagggccccccaggcacagctggggacatgggccccccaggccgcctgggcgcccctggcaccccaggcctgcccggccccaggggggaccccggcttccagggcttccctggggtgaagggggagaagggcaaccctggcttcctgggcagcatcggccccccaggccccatcggccccaagggccccccaggagtgcggggggaccccggcaccctgaagatcatcagcctgcccggcagccctggccccccaggcaccccaggagagcccggcatgcagggcgagcccggccccccaggccccccaggcaacctgggcccctgtggcccccggggcaagccaggcaaggatggcaagccaggcaccccaggccctgctggggagaagggcaacaagggcagcaagggggagcccggccctgctggcagtgatggcctgcccggcctgaagggcaagagaggagacagcggcagccctgccacctggaccacccggggctttgtgttcaccaggcacagccagaccacagccatccccagctgcccagagggcaccgtgcccctgtacagcggcttctccttcctgtttgtgcagggcaaccagagggcccacggccaggacctggagagcctcttccaccagctgtag

SEQ ID NO: 267070 - DNA, 4275 bp, Artificial Sequence
  derived and/or modified sequence
atgtctgccaggacagccccccggccccaggtgctgctgctgcccctgctgctggtgctgctggccgccgccccagctgccagcaagggctgtgtgtgcaaggacaagggccagtgcttctgtgatggagccaagggggagaagggggagaagggcttccctggccccccaggcagccctggccagaagggcttcaccggccctgagggcctgcccggcccccagggccccaagagcttccgggccatccccagctacagcggcggcaagagcctgcagggcatcagcggcctgcccggcttcagcggcagccctggcctgcccggcaccccaggcaacacaggcccctacggcctggtgggcgtgcccggctgcagcggcagcaaaggagagcagggcttccctggcctgcccggcaccctgggctacccaggcatccctggcatccacaacctgaagatcttcaagggggccccagccaaggaggaggacatcgagctggatgccaagggggaccccggcctgcccggggcccctggcccccagggcctgcccggccccccaggcttccctggccctgtgggccccccaggccccccaggcttcttcggcttccctggggccatgggcccccggggccccaagagctttgtgctgagcagccgcatcagcaccaagggggagaagggcgtgaagggcctgactggacctcctggccccccaggcaccgtgattgtgaccctgactggaccagacaacagaacagacctgaagggggagaagggggacaagggggccatgggagagcccggccccccaggccccagcggcctgcctggagagagctatggcagcgagaagggggcccctggggaccccggcctgcagggcaagccaggcaaggatggagtgcccggcttccctggcagcgagggcgtgaagggcaacagaggcttccctggcctgatgggagaagatggcatcaaggaggagaagagagatgtggccatcgtgtccttcagcagcaagacagagtactatgacacctaccaggagaagggagatgagggcaccccaggccccccaggccccaggggggcccggggcccccagggcaagaacaagttccgctgcatccctggcagccagggcagcagccggcccggcctgcggggggcccctggctggccaggcctgaagggcagcaaaggagagcggggccggcctgggaaggatgccatgggcaccccaggcagccctggctgtgccggcagccctggcctgcccggcagccctggccccccaggccccccaggggacatcgtgttcagaaaaggacctcctggggaccacggcctgcccggctacctgggcagccctggcatccctggggtggatggccccaagggggagcccggcctgctgtgcacccagtgcccctacatccctggccccccaggcctgcccggcctgcccggcctgcatggagtgaagggcatccctggccggcagggcgctgctggcctgaagggcagccctggcagccctggcaacacaggcctgcccggcttccctggcttccctggggcccagggcgaccccggcctgaagggggagaagggggagaccctgcagcctgagggccaggtgggcgtgcctggggaccccggcctgcggggccagcccggcaggaagggcctggatggcatccctggcaccccaggagtgaagggcctgcccggccccaagggggagctggccctgtctggagagaagggggaccagggccccccaggggaccccggcagccctggcagccctggccctgctggccctgctggccccccaggctacggcccccagggcgagcccggcctgcagggcacccagggcgtgcctggggcccctggccccccaggagaggccggccccagaggagagctgtctgtgtccacccctgtgcccggccccccaggccccccaggccccccaggccaccctggcccccagggccccccaggcatccctggcagcctgggcaaatgtggggaccccggcctgcccggcccagatggagagcccggcatccctggcatcggcttccctggccccccaggccccaagggggaccagggcttccctggcaccaagggcagcctgggctgccctgggaagatgggagagcccggcctgcccgggaagccaggcctgcccggggccaagggggagcctgctgtggccatgcctgggggccctggcaccccaggcttccctggagagcggggcaacagcggggagcacggggagatcggcctgcccggcctgcccggcctgcccggcaccccaggaaatgaaggcctggatggccccaggggggaccccggccagcccggccccccaggagagcagggccccccaggccgctgcatcgagggccccaggggggcccagggcctgcccggcctgaatggcctgaagggccagcagggcagaagaggcaagacaggccccaagggggaccccggcatccctggcctggacagaagtggcttccctggagaaacaggcagccctggcatccctggccaccagggcgagatgggccccctgggccagaggggctacccaggcaaccctggcatcctgggccccccaggagaagatggagtgattggcatgatgggcttccctggggccatcggccccccaggccccccaggcaaccctggcaccccaggccagaggggcagccctggcatccctggggtgaagggccagaggggcacccctggggccaagggggagcagggcgacaagggcaaccctggccccagcgagatcagccacgtgattggagacaagggggagcccggcctgaagggctttgctggcaaccctggagagaagggcaacagaggagtgcccggcatgcctggcctgaagggcctgaagggcctgcccggccctgctggccccccaggccccaggggggacctgggcagcacaggcaaccctggagagcccggcctgcggggcatccctggctccatgggcaacatgggcatgcctggcagcaagggcaagaggggcaccctgggcttccctggccgggccggccggcccggcctgcccggcatccacggcctgcagggcgacaagggggagcccggctacagcgagggcacccggcccggccccccaggccccaccggggaccccggcctgcccggggacatgggcaagaagggggagatgggccagcccggccccccaggccacctgggccctgctggccctgagggcgcccctggcagccctggcagccctggcctgcccgggaagccaggcccccacggggacctgggcttcaagggcatcaagggcctgctgggccccccaggcatccggggccccccaggcctgcccggcttccctggcagccctggccccatgggcatccggggggaccagggcagagatggcatccctggccctgctggggagaagggggagaccggcctgctgcgggcccctcctggcccccggggcaaccctggggcccagggcgccaagggggacagaggagcccctggcttccctggcctgcccggcaggaagggggccatgggagatgctggcccccggggccccaccggcatcgagggcttccctggccccccaggcctgcccggggccatcatccctggccagacaggcaacagaggccccccaggcagccggggcagccctggggcccctggccccccaggccccccaggcagccacgtgattggcatcaagggggacaagggctccatgggccaccctggccccaagggccccccaggcacagctggggacatgggccccccaggccgcctgggcgcccctggcaccccaggcctgcccggccccaggggggaccccggcttccagggcttccctggggtgaagggggagaagggcaaccctggcttcctgggcagcatcggccccccaggccccatcggccccaagggccccccaggagtgcggggggaccccggcaccctgaagatcatcagcctgcccggcagccctggccccccaggcaccccaggagagcccggcatgcagggcgagcccggccccccaggccccccaggcaacctgggcccctgtggcccccggggcaagccaggcaaggatggcaagccaggcaccccaggccctgctggggagaagggcaacaagggcagcaagggggagcctgagagcctcttccaccagctgtag

SEQ ID NO: 267071 - DNA, 4497 bp, Artificial Sequence
  derived and/or modified sequence
atgagcgcccggaccgccccccggccccaggtgctgctgctgcccctcctgctcgtgctgctcgctgccgctccagccgctagtaaaggctgcgtgtgtaaggataaagggcagtgtttctgtgacggagctaagggcgagaagggcgaaaagggattccctggcccacctggctcacctggacagaagggctttacgggccccgagggtttacccggcccccagggccccaaatctttcagagctattccgtcttattccggtggtaaatcactgcagggcattagtgggttaccaggattttcaggctctccagggctgccgggaacgcctggcaatactgggccttacgggctggtaggggttccggggtgtagcggctctaagggcgaacagggcttccccggactccctggcaccttgggctatcctggtattcctggaattcacaacctgaagatatttaagggagctccagctaaggaggaggacatcgagctggatgctaaaggtgatccgggattgccaggagccccaggtcctcaggggttaccaggaccccctgggttccctggccctgtgggtccgcccgggcctccaggcttttttggcttccccggggcaatggggccgcgggggccgaagagctttgtattaagctcacgaatatccaccaaaggcgagaaaggagtaaagggcctcaccggtcctccgggccctcctgggactgtaattgtcactttgacaggcccagataacaggacggacctgaagggtgagaaaggcgataaaggagccatgggcgagcctggtccgcccggcccttctgggctgcccggggaatcttacggcagtgagaaaggggcacctggggatcctggtctacagggcaagcccggcaaagacggagtcccgggttttcctgggtcggaaggggtgaagggtaacagaggcttcccaggcctcatgggtgaggacggtataaaagaggaaaaaagagatgtagctattgtttcattttctagtaaaacagaatattatgacacctaccaggagaagggcgatgaaggaacgcccggcccgccagggccaaggggcgctaggggcccccaggggaaaaacaagttccggtgtatccccgggagtcagggttcttcccggcccgggctcaggggggcccccgggtggccagggctcaagggcagcaagggcgagagggggcgcccaggcaaggacgccatgggcactcccggctctccaggctgcgctggatcaccaggactccctggcagccctggccccccgggtcccccaggagatatcgtttttagaaaaggccctcctggcgaccatgggttaccaggctaccttggcagccccgggattccaggcgtggatgggcctaagggggagccgggtcttctttgcacccaatgtccctacattcccggaccgcctggcctgcctggcttgccaggactgcatggggtgaagggcataccagggcgccagggagcagctggtctgaagggctcacccgggagcccgggaaatacaggactgcctggtttccctggattccctggagctcagggcgatcccggcctgaagggagagaagggtgagaccctccaacccgagggacaggtcggagttcctggcgacccagggctccgcggccagcccggacgaaaagggctagacggcattcctggcactcccggcgtaaaagggctgcccggcccaaagggagagctggccctgtccggtgaaaaaggtgatcagggaccaccaggggatccggggagtcctggctctccagggcctgccggaccagccgggccacctggctatggcccacagggggagccaggcctccagggaacccagggggtgccaggcgcccctggaccacctggcgaagccggtccacggggggagctctctgtttcaacgccagtccccggacctcctgggcctcctggccctccggggcacccaggtcctcaggggccacctgggatcccaggctctttaggtaagtgcggcgacccaggcttgcccggcccagatggtgagcccggcatccctggcatcggctttcctgggcctcctggcccaaagggagaccaggggttccccggcaccaagggaagcctgggctgcccgggcaaaatgggcgaacccggcctccctgggaagcccggcctgccaggtgcaaaaggtgagcctgctgtggccatgcctggcggacccggaacccccggatttcctggcgagagaggtaattctggagagcacggcgagatcggattaccaggcctgccaggcctgccaggcacaccagggaacgaaggcctggacggacctcgaggagatcccgggcagcccgggcccccaggcgagcagggaccaccaggaagatgcattgagggaccaaggggtgcccagggcttgccagggctaaacggcctgaagggacagcaagggcggaggggtaaaactggaccgaaaggtgatcctggcattcccggacttgacagatctggattccctggcgagaccggttccccgggtatccctggacaccagggggagatggggccactgggacagagaggatatccaggcaatcctgggatcctgggaccgcctggcgaggacggggtaatcggtatgatgggatttcctggcgcgatcggcccgccagggccgccaggaaacccggggacacccggccagagaggctccccaggaatcccaggagttaaaggccagagagggacgcccggggcaaaaggtgagcaaggggacaagggtaacccaggaccatcagagattagtcacgttattggggataagggtgaacccgggctgaagggctttgctggcaacccaggcgaaaagggaaaccggggtgtgccaggaatgccggggttgaaaggcctgaaaggactaccgggccccgccggaccaccaggaccaagaggagatcttgggagcactggaaatcccggggaaccaggactaaggggaatccccggaagcatggggaacatgggaatgcccggcagtaaaggaaaacggggcacactcgggtttccagggagggcaggtcgcccagggttgccagggatccacggtctccagggggacaaaggggaaccaggatactctgaggggacaagaccaggtccacccggaccaaccggcgaccccggcctgcctggtgacatgggaaagaagggggaaatgggacagccaggaccaccaggccacctcggccccgccggccccgaaggcgccccagggagtcctgggtcccctgggctgcctgggaagcccggcccgcacggggacctgggctttaaaggaataaagggcctgctgggccccccggggattaggggccctcccggacttccaggatttcctgggagtcccggacctatgggcatacgcggtgatcagggcagagacggaatcccagggccagctggcgaaaagggcgagactggcctgttacgggcacctcctgggccgagggggaatcctggcgcacaaggggcgaaaggagatcggggcgctccggggtttcccgggctccccggcagaaagggggccatgggtgatgccggcccaagaggacctacaggtattgaaggcttccctggacctcctgggctcccgggtgctattatccccggccagactgggaataggggtcccccgggatccaggggtagtcctggagcaccgggacctcccgggccacctggaagccacgttatcggtatcaagggggacaaaggaagtatggggcaccccggccccaaaggtccgcctggcacggctggggacatgggaccacccggcagactcggcgcccccggaacccccggtctgcctggacccagaggcgatccaggattccagggttttcccggagtgaagggagagaaagggaaccctggcttcctgggatctatcggaccacccgggccaataggccccaagggaccaccaggggtcagaggggatcccggaactcttaagataatatcgctacctggcagcccagggcctccagggacccctggagaaccagggatgcagggagaaccggggcctcccgggcctccaggcaacctgggaccctgcggcccacgtggcaagccaggcaaggacggcaagcctggaacccctggccccgctggagagaagggtaacaaaggatcgaagggagagcctgggcccgcaggctccgacggtctgccaggattgaaggggaagcgaggcgattctggaagtcctgccacctggaccactcgtggtttcgtttttaccaggcactcccaaactactgcaatcccctcatgccccgaagggactgtgccgctgtatagtgggttttccttcctgttcgtgcagggcaaccaacgcgcccatggacaagacctagatgcgctgttcgtcaaagtgctcagatcaccctag

SEQ ID NO: 267072 - DNA, 4914 bp, Artificial Sequence
  derived and/or modified sequence
atgagcgcccggaccgccccccggccccaggtgctgctgctgcccctcctcctggtgctgctggccgcagcacctgctgcttccaagggctgtgtgtgtaaagacaaaggccagtgtttctgcgacggagcaaaaggagaaaagggagaaaagggtttccccggccctcccggatcccctgggcagaaaggcttcaccggcccggagggtctgcctgggccacagggacctaagtcctttagagccatcccaagctactcaggcggtaagtcactgcaaggcatcagtgggctgccagggttctccggcagcccaggtctgcccgggacacctggcaataccggaccctatggattggtcggggttcctgggtgttcaggatccaaaggcgaacagggcttccctggactgccgggcactctcggatacccaggtatcccgggtatccataacttgaagatatttaagggtgctcccgctaaagaggaggacatcgaattggatgccaagggagatcccggactcccgggagccccaggccctcaggggctcccgggcccacctggttttccaggcccagttggacctccgggaccacctggttttttcggttttccgggggcaatgggaccccggggccctaaatccttcgtgctctcttcgaggatatccacaaaaggggaaaagggcgtcaaagggttaacaggccctccagggcctcctggtaccgtgatcgttactctcaccggccctgataacaggactgatttaaagggtgagaagggcgataaaggggctatgggagagccaggaccgcccggtccatctggcttgccgggagaaagttacggttctgaaaaaggtgccccgggggatcctggactccagggcaagcctgggaaggacggagtccctggttttcctggatctgaaggagttaagggcaataggggcttcccgggtttgatgggcgaagacggaatcaaagaggagaagcgggatgtggcaatcgtctcctttagttctaagaccgagtactatgacacttaccaggagaagggcgatgagggcactcctgggccgcccggacctaggggcgctagaggtcctcaggggaagaacaaatttcgctgcattcccgggtcccagggatcttctcgccccggcttgcgcggagcccctggttggcccggacttaagggaagcaaaggggagagaggacggcccggcaaagacgccatggggacccctgggtcacctggctgcgcaggctcccccgggctgcccggtagtcctgggcctccaggtccacccggggacattgtgtttcgaaagggaccgccaggcgaccatggcctgccagggtacctgggatctccggggatcccaggggttgatggtcctaagggtgagccaggcctcctgtgcacccaatgcccctatatacctggccctcccggcctgccgggactccccggcctgcacggggtcaaaggcatcccaggccggcaaggcgccgccggattgaaaggctctccgggttcccccggcaatacgggcctgcccggcttccctgggtttcctggcgcccagggtgaccccggattaaagggagaaaagggcgagaccttgcagcctgagggacaggtgggcgtgccaggcgatcccgggcttcgcggtcagcccgggagaaagggcttggacggcattccgggcacccccggggtcaaggggttgccaggccctaagggagagcttgccctgtctggtgagaagggtgatcagggcccccccggcgatcctggatcgccaggatccccaggccctgcagggccagcgggtcccccaggctatggtcctcagggggaaccaggcctgcagggaacacaaggtgtgcccggcgcacccggaccgccaggggaggctggtccacgcggcgaactgtcagtgtccacaccagtgcctggcccaccaggccccccaggcccacccgggcatcccggtccgcaggggccccccgggatacctggcagtttgggaaagtgcggcgacccaggccttcctggaccggatggggaacctggcatccccggcattggtttcccgggccctcccggtcctaagggagaccaggggtttccaggcactaagggatctctcggctgtcctgggaaaatgggagaacccggcttgccaggtaagccgggtttgccgggggctaagggcgaacccgcagtggctatgccgggcgggcctgggacccccggttttcctggtgaacgcggcaattctggcgagcatggcgagattggactacctggcttacccgggctccccggcacaccaggcaacgagggccttgatggacctaggggcgacccagggcaaccaggtccccctggtgaacaaggcccccctgggcgttgcatcgagggtcctcggggggctcagggacttcctggactgaatggactgaagggacagcagggaaggagaggcaaaactggtcctaaaggggaccccggaattcccggactggaccgcagtggctttcctggcgaaaccggtagcccaggaattcctggtcatcagggcgagatggggcctttagggcaaagagggtacccaggcaaccctggcattctcggcccacccggcgaagacggtgttattggcatgatgggttttccaggggctattgggccccccggtccgcctgggaatccaggcactccgggtcagcgagggagcccgggcattcctggcgtcaaaggtcagcgggggaccccaggcgccaagggggagcagggggataaggggaacccagggcctagcgagatcagccatgttattggtgacaaaggggagcccgggctgaaagggtttgctggcaatcccggggaaaagggtaatcgtggagtcccaggaatgcccggtctcaaaggactgaagggactgccaggaccagccggacctcctggtcccaggggggacttgggatctacggggaaccccggcgagcctggcctgcggggtatccccggctcaatgggaaacatggggatgccagggtccaagggcaaaagaggaacgttggggttccctgggagagcaggacgtccaggcctgccaggcatacatggtttgcagggcgataagggagagccaggatacagcgagggcacccgacctggacccccaggtccaacgggcgatcccggtctcccaggggacatggggaaaaagggagaaatgggtcaacccgggccccctggtcacctcggacccgccgggccagagggtgcaccaggctcgcctggaagcccaggccttccaggcaaacctggccctcacggggacctggggttcaagggcattaaggggttactagggccccctggtatacgcggaccccctggcttgcccggcttcccgggaagccctggccctatgggaatacgcggggaccagggacgcgacggtatcccaggacccgcgggagaaaaaggcgagactggcctgttgcgcgctcctcctggtccgcgaggcaaccctggggcccagggggcgaaaggagaccggggtgctccaggcttcccgggtctgccaggtcggaagggagcgatgggcgacgcaggcccaagaggccctacaggtatagaaggcttccccggccctcccggtctccctggtgcgattattccaggccaaactgggaacagaggcccacctggctccagaggctctccgggggcccccggccctcccgggccccctggtagtcatgtaatcgggatcaagggagacaagggctcgatgggccaccccggtcctaagggacctcccggcacggcgggagacatggggccaccaggaagactgggggcacccgggacccctggcctacccggccctcgtggggacccggggtttcagggcttccccggagtgaagggtgaaaaaggtaatcctggttttctgggctccatcgggccgcccggccccatcggcccaaaaggccctcccggagttagaggagatcccggcacactaaaaataatctctctgccaggatcccctggcccacctggcactccaggagaaccggggatgcagggcgagcctggacccccgggaccacctgggaacctaggcccatgtgggccacgtggcaaaccgggtaaagacgggaagccaggcaccccaggaccagctggtgaaaagggaaataagggttcaaaaggagaaccaggcccggcaggttcagatggcctcccaggactaaagggaaagcgaggtgacagtgggagtcccgccacatggacaacgcgaggtttcgtgttcacacgccattcccagacaacagctattccgagctgtcctgagggaaccgtgccattatattccgggttttctttcttattcgtgcaaggcaaccagcgcgcacacggacaggacttgggaaccctgggaagctgcctgcagcgctttacaacaatgccgttcctcttttgtaatgttaatgatgtatgcaactttgcctcaagaaacgactatagctactggctcagcactcctgccctgatgcccatgaacatggcccctatcaccggccgtgccctcgaaccatacatcagcagatgcacagtgtgcgaggggcccgctatcgcgattgctgtacattcacaaaccacagatatccctccctgcccacatggatggattagtctgtggaaaggcttttcatttatcatgaaggcatatagtattaactgcgaaagctggggaatcaggaaaaacaataagagcctgtccggagtccacgaagagaagacactcaagctcaaaaagaccgccgagctgcttttttttattctgaagaacaaggtcatgactgagcacgcagtaatttag

SEQ ID NO: 267073 - DNA, 4485 bp, Artificial Sequence
  derived and/or modified sequence
atgagcgcccggaccgccccccggccccaggtgctgctgctgcccctactgctcgtgctgctggccgccgctccggccgccagtaagggttgtgtttgcaaggataaaggacagtgcttttgcgatggggctaagggagagaaaggtgagaaaggcttccccggtccacctgggtcacccggtcagaaaggcttcaccgggccagaggggctccctggcccccagggacccaaaagcttcagggctattccaagttactccggaggcaagtcactgcaggggattagtggcttgcctggcttctcaggaagtccgggcctccctggaaccccgggcaataccggcccctacggcctggtcggggtgcctgggtgctctgggtcaaaaggtgagcaggggtttcctgggttacctgggaccttgggctaccccgggataccggggatccataacctgaagatttttaagggggcaccagccaaagaggaagatatcgagctggatgccaagggagatccaggattgcccggagctccaggaccacaagggctgccgggccctcccggtttcccgggccccgtgggtccacctgggcccccgggtttttttggcttccctggggccatgggaccacgcgggcccaaatccttcgtgctgtcaagccgcatctctactaagggcgagaagggagtaaaaggcctgaccggcccccccggtccccccgggacagtgatcgttactctcaccgggcctgacaaccggactgatctcaagggcgagaagggggacaagggggccatgggtgagccgggtccacctggaccatcagggcttcccggcgagtcatacggctctgagaagggtgctcctggggaccctgggctccaaggaaagcccggtaaggatggtgttcccggctttcctggctcagagggggttaagggcaatcgcggatttccaggcttaatgggtgaggatggaataaaagaggaaaagagggacgtggctatagtgtcattctcgtccaaaactgaatactacgatacttatcaggaaaagggggacgaggggacacccggaccacccggtccacggggagctcgaggtccacaagggaaaaataagtttaggtgtatccctggaagtcaggggagtagcaggccagggttaagaggagctccggggtggcctgggctgaagggaagcaaaggagaacgagggagaccaggaaaagacgccatggggacacctggtagccccggctgcgcgggctctcccggactcccagggtcgcccggacccccgggaccccctggcgatatagtgttccgcaaaggcccacctggagatcatgggctgccaggttaccttggttcacccggaatccccggcgtggatggccctaagggggagcccggtctcctttgtacacaatgcccatacatccctggaccaccaggcttgcctggattgcccggcctgcacggagtgaagggcatccctggccgtcagggtgctgccgggctgaaaggcagccccgggagcccaggtaacactggactgccgggattccctggattccctggcgcacagggggatcccggtttaaagggtgagaagggagagactcttcagccagagggtcaagtaggggtgccgggagaccctggcctgagagggcaacctggccgaaaaggattagacggcattcccggaaccccgggggtcaaggggctgccaggacctaagggtgaacttgctctcagtggcgagaagggtgatcagggccccccgggagaccctgggtcacccggtagccccggccccgctggaccggccggcccacctggatatggcccccagggcgaacccggtctgcagggcacccaaggagtacccggggctcccggaccgcctggtgaggctggacctcgcggtgagctgtctgtcagtacgcctgtgcctggcccgcccggccccccagggccaccaggacacccaggtccacaaggacccccaggcattcctggtagcctggggaaatgcggtgacccaggcctgccgggacctgacggcgaacctggaatcccggggatcggtttcccgggcccacccggccctaagggcgatcagggctttccaggtactaagggaagcctagggtgtccgggcaaaatgggcgagcctggtctccccgggaaaccaggattaccaggcgctaagggagaacccgcggtcgcaatgccaggcggacccggaacgccaggtttcccgggcgagagaggcaactcaggcgaacacggtgaaatcggactgcctggcctgcctgggttaccgggaacccctggaaacgagggcctcgacggaccaaggggagatcctggacaaccaggccctcccggcgaacagggaccaccaggtcgctgcattgaagggcctcgaggagcacaagggctgccgggactgaacgggctgaagggccaacagggacggaggggcaagaccggcccgaagggcgatccaggcattccggggctggacagaagcgggtttccgggcgaaaccgggtcccccggtatccccggccaccaaggggaaatgggaccactggggcagagaggctaccctgggaatcctggcattctgggaccaccaggcgaagacggggtgatcgggatgatgggtttccccggcgctattggtccacctggacctcccggcaacccgggcacacccggtcagagaggctcccctggcattccaggggtgaagggacagagggggacaccaggcgctaaaggcgagcagggtgataagggtaaccctgggccctctgagatttcacacgttatcggagataaaggggagccaggactgaaggggttcgccggcaaccccggcgaaaagggcaacagaggcgtgcccgggatgcccggccttaagggcctcaaggggcttccaggacccgccggcccgccaggaccaaggggcgatctcgggagcaccggaaatccaggggaaccgggattaagagggattccaggatccatgggtaacatgggaatgccaggctccaaggggaaacggggcaccctgggatttccagggcgcgctggtcggcccgggctccccggcattcacggactgcaaggcgataagggcgaaccgggatatagcgagggcacacgcccgggtcctcccggtccaacaggcgatcccggcctacctggcgacatgggaaagaagggagaaatgggacagcctggccccccgggccatttgggccctgctggacccgaaggggctccagggtctcctggctcgccagggttacccggcaaacctggccctcatggtgatctgggctttaaggggatcaaaggccttctgggcccccccgggattcgtgggccacccggactccctggcttccctgggagtccaggaccaatggggattcgcggagatcagggccgtgacggtatcccaggccccgcgggggagaagggagagaccggactcctccgcgcacctcctggtccccgcggtaaccccggcgcacagggtgcaaaaggcgaccgcggtgcccccggcttccctggattgccggggcgcaagggcgctatgggggacgcagggccgagggggccgacaggcatcgaggggtttcctggcccaccagggttacctggggccatcattcccggtcagaccggcaaccggggtcctccaggatcccgggggtcccctggtgctcctggacctcctggcccccccgggtcacacgtgatcggcattaagggtgacaagggctcgatgggtcaccccggacccaaagggccaccgggaaccgccggcgacatgggtccacctggcagactaggcgcccccgggactcctggactgcccggaccacgaggagatccaggattccaaggatttccaggagtaaagggcgagaaagggaacccaggatttctaggctccataggacccccaggtccgattggtcctaaaggccccccaggcgtgcgcggcgaccccggcactctaaagatcataagtcttccaggctcaccaggaccaccaggcacccctggagaacccgggatgcagggcgaacctggtccgcccggtccccctgggaacctgggtccttgcggccctcgtggcaagccagggaaagatggtaagcccggcaccccagggcctgcgggagagaagggaaacaaagggtctaagggggagccaggcccggctggctccgatggtcttccaggcttaaaggggaagagaggtgattccggcagtcctgcaacatggactacccgggggtttgtcttcaccaggcactctcagacaacagcaattccatcatgtcctgaagggactgtgccactttattccggcttctccttcctgtttgtgcagggtaaccagcgcgcccacgggcaggatcttgaatcactgttccaccagctgtag

SEQ ID NO: 267074 - DNA, 4275 bp, Artificial Sequence
  derived and/or modified sequence
atgagcgcccggaccgccccccggccccaggtgctgctgctgcccctcctgctggtgctactggcagccgcacctgcagcaagcaagggctgtgtatgtaaggataagggccagtgtttttgtgatggtgctaagggtgaaaagggagagaaaggtttcccagggcctcccgggtctccaggccagaagggattcaccggacccgaggggcttccaggcccgcaaggaccaaagtctttccgggccataccaagctattcaggagggaagtccctgcaggggatctcagggcttcccggcttcagcggttcaccgggactgcctggcacccccgggaacactgggccttatggtctcgtaggggttcccggttgtagcggatcaaagggagagcaaggattcccggggctgcctgggaccctcggttacccagggatcccaggtattcacaaccttaaaatattcaaaggagcacccgctaaggaagaagatatcgagctggacgctaagggcgatcctgggctcccgggagcccccgggccacaggggctgccaggacctccgggattccccggccctgtggggcctcccggcccacctggtttctttgggtttccgggagctatgggaccccgcggaccgaaaagtttcgttctgtcctccaggatttccacaaagggtgaaaaaggcgtgaaagggctcacggggcccccgggacctcccggaaccgtgatcgtgactctcaccggcccagacaatcgcacagacttgaagggcgagaagggcgataagggcgccatgggtgaaccaggtcctcctggaccttcaggcttacccggcgagtcttacggctctgaaaaaggggctccgggagatcctggcctgcaagggaagccagggaaagacggagtgcctggtttccctggttcggagggtgtgaagggcaaccgcggattccccgggctgatgggggaagacggaataaaggaggaaaaacgcgacgtggccattgtgtcattttcctccaagacagagtattatgatacgtatcaagaaaagggcgacgaggggacgccggggccacctggccctcgtggcgctagagggccacagggtaaaaataagtttagatgcattcctggctcccagggcagctcaaggcctggcctgagaggtgctccagggtggccgggccttaaggggtcgaagggcgaaagggggagacccggcaaggacgctatgggcacccctgggtccccaggatgcgccggctccccgggcctgcccggctctccaggcccccccggcccacctggggacatcgtattcaggaagggaccaccaggggatcacggcttgcccggttatctaggtagcccgggtattcctggagtcgacggtccgaagggcgagccaggcctactgtgcacacagtgtccgtacatacccggccctcctggattgcctggactgccgggcctgcatggagttaaaggcattccaggcagacagggcgctgccggtctgaaaggcagcccaggaagccccggaaatacaggcttgccaggatttcccggtttccctggggctcagggcgatcccggacttaaaggagagaagggcgaaacactccaacccgaaggccaggtgggcgtgccaggcgaccccggcctcagaggacagccggggaggaaaggcctggatgggatcccaggaacacccggtgtgaaggggcttccaggaccaaagggcgagctggccctgtctggggaaaaaggtgaccaaggcccacccggggaccccgggtcccccggtagccctggtcccgccggacctgccgggccaccgggttatggcccccagggcgaaccgggactgcagggcacccagggtgtccccggcgctccagggccacccggcgaagctgggccacgcggtgagctctccgtaagcacgcccgtccctggacctcccggtccacccggacctccaggccaccctggccctcagggccctcctggaattcctgggtccctcggtaagtgtggcgatccagggctgccggggccagatggcgagcctggtattcccggaattggatttcctggcccgccgggcccgaaaggagaccaggggttcccaggcaccaaagggtccctcggttgtccaggaaaaatgggagaacccggactaccgggcaagccaggcttaccaggcgcaaagggggaacccgccgtggccatgccaggagggcctggcactcccggatttccaggcgagcggggtaactctggcgaacatggtgagatcggcctccctggcctgcccggacttccagggacgccaggcaatgaagggctagatggaccccgcggggaccctggtcagccaggtccgccaggtgaacaaggcccccccggcaggtgcattgagggcccgagaggcgctcagggactgcctggactaaatggcctgaaaggacagcagggccggagaggcaagactggtccaaaaggggacccggggattcccgggctggacagatcaggctttcccggcgagacaggcagcccagggattcctggacatcagggggaaatgggcccactcgggcaaagaggctaccctggcaacccggggattctgggccccccaggtgaggatggcgtaatcggtatgatgggcttccccggtgcaattgggccgccggggcctccaggcaaccctggtacacctggtcagcgagggtcaccaggtattcctggggtgaagggtcaacgagggactcccggagccaagggcgagcagggagataagggcaatccaggcccttcagagattagccatgtgataggtgataaaggagagcccgggctgaagggcttcgcaggaaatcccggcgagaagggcaataggggggttccaggcatgccaggcctaaaaggactcaaagggttgccaggccctgccggccctccgggacccaggggcgacttggggtctaccggtaacccgggggagcctggactgcggggaatccctggctcgatggggaacatgggtatgcctggcagcaagggtaagagaggaacactgggtttcccaggcagagccgggcgacctggtttgcccggcattcatggactgcagggagataagggcgagcccgggtactctgagggcactaggccagggccgcccggacctactggagacccaggcctcccaggtgacatgggaaaaaaaggggaaatggggcaacccggccctcccggccatctgggccccgcaggtccagagggagcccccggaagccctggctctccaggactgcctggcaagcctggcccgcacggggacttgggctttaaaggcatcaagggactattgggaccgccaggcattagagggccaccaggccttccaggattccctggtagtccagggccgatgggaatcaggggcgatcagggtcgagatggaatccccggccctgctggtgaaaagggcgaaacaggcctacttcgggccccgcctggtccccgcggaaatcctggtgctcaaggggcaaagggggaccgcggcgctcctggcttccccggactgcccggcagaaagggggccatgggggacgctggcccacggggacctaccgggatcgaaggattccccggccctccaggactgccgggtgccatcattcccggacagacaggcaataggggccctccaggcagcaggggatcaccgggcgcccccgggccccccgggccccccggttcacatgttatcgggatcaaaggggacaagggctccatgggccaccccggacccaagggacccccaggcaccgctggagatatggggccccccggacgcctgggtgctcccggcaccccgggcctgccagggccacgaggcgaccccggtttccaggggttccctggagtgaagggcgagaaaggtaacccaggctttttaggctccatcggcccgcctggccctatcggacctaagggtccacccggtgtacgaggcgacccaggcacactgaagattatctctctgcctggctctcctgggccccctgggacacccggggagcccggtatgcagggcgaaccaggacctcccggacctccaggcaacctgggcccctgcggcccacgcggaaaacctggaaaggatggaaagccagggacgcctggccccgcaggagagaaaggtaacaaaggctctaaaggcgagccagagtccttgtttcaccaactgtag

SEQ ID NO: 267075 - DNA, 4497 bp, Artificial Sequence
  derived and/or modified sequence
atgagcgctcgaaccgctccaagaccccaagtactgctccttccactccttctggtgctgctcgccgctgccccagctgcgagtaaagggtgtgtgtgcaaggacaaaggtcagtgcttttgtgatggggctaagggcgaaaagggagaaaagggttttcccggaccgcctggctctcccggtcaaaagggttttaccgggcctgagggcctacctggaccacagggcccaaagtccttccgcgcaattccttcctactcaggaggaaaatcacttcaaggtatctctggcctccctggtttctcaggaagtccagggcttcccggtacaccaggaaataccggaccttatggactggtcggcgtgccgggatgttctggtagtaagggcgagcagggctttcctgggctaccaggcaccctgggctaccctgggattccagggattcacaatctgaagattttcaaaggggctcccgcaaaagaggaggacatcgagctggatgccaaaggcgaccctgggctccctggcgcaccaggcccacagggcctgccgggaccacctgggttccccggtcctgtggggcctccaggccctcccggtttctttgggtttccgggtgcaatggggcctcggggacctaagagcttcgtgctaagttcaaggatatcgaccaagggggaaaaaggtgttaaaggactcaccgggcctccaggcccaccgggtacagtgattgttactctgactggacctgacaataggacggacctaaagggggaaaagggtgacaagggtgccatgggtgagcccggtccccctggcccaagtggccttccgggtgagtcatacggtagtgaaaagggggctcctggagatcctggtctgcaaggtaagcccggaaaggacggcgttccagggttcccaggctctgaaggcgtcaagggaaataggggatttccagggcttatgggtgaggatggaatcaaagaggagaaacgtgatgttgccatcgtctccttttctagcaaaactgaatattacgacacttatcaagaaaagggggacgagggcacgcccggacctccaggccctaggggggctcgaggccctcagggcaagaacaagttccgttgcatcccagggagccagggtagctctaggccaggcctaaggggagcgccaggctggcctgggttgaaaggtagtaagggggagagaggcagaccgggaaaggatgcaatgggcacccccggaagcccgggatgcgccggttcccccggtttgcccggaagtcccggaccacccggtcctcctggagatattgttttccgtaaggggcctcccggtgatcatggcctgcctggatatctgggcagtcccggtattccaggagttgatgggcctaagggcgaacctggactactgtgtacccagtgcccctacatcccaggtccccctggcttgccaggcttacccggtctgcatggtgttaagggtatccccggacgtcagggtgccgcaggcctgaagggctcacccggatctccgggtaataccggcctgccagggttccccggattcccaggcgcacagggggaccctgggctgaagggtgaaaagggagaaacgctccagcccgaaggacaggtaggggtgcccggagaccctggacttcgaggccaaccaggcaggaagggtctcgatgggatcccaggaactcccggtgtgaaaggtctgcctgggcctaaaggagaacttgccttgtctggagaaaagggtgaccaagggcctccgggagaccccggttctcctggatcacctggtccagctgggcctgccggaccccctggatatggcccacagggagagccaggtctgcaggggactcaaggagtgccaggggctcccggacctcccggtgaggcaggaccaaggggagagttatccgtgtccaccccagtgcccggtcccccagggccacctggcccacccggacatcctggacctcagggcccacccggtatcccaggatccctcggtaagtgcggggaccctgggctgcccggtcctgatggcgagcccggtattccgggaattggatttccaggccctccgggtcccaagggtgaccaggggttccctggaactaagggatccttgggctgtcctggaaaaatgggggagccaggattacccggaaaaccaggactgccgggagcaaaaggtgagccagccgtggcaatgcccggaggcccaggcacgcccggattcccaggtgaaagaggcaattctggtgaacacggcgagataggcttgccagggctgcccggtttaccaggcactcccggaaatgaagggttggacggccctaggggagacccaggccagccaggtcctccaggcgagcagggtccacctggccgatgcatcgagggacccagaggtgcccagggcctgccgggattaaacggcctgaaagggcaacaggggaggcgaggaaaaactggacccaagggggatcccggtattccaggactggacaggtccggattcccaggagaaactggtagccccggtatccctggacaccagggcgaaatgggacccctcggccagcgtggttatcctggcaatcctggaatcctgggacctcccggtgaagacggagtaatcggaatgatgggcttccctggcgcaatcgggccacctggacccccaggcaacccaggcacccccggacaaagaggctctccgggaatccccggagttaaagggcaacgcggaacacccggtgccaaaggggagcagggcgacaagggaaatcctggtcccagtgagatttcacatgtgatcggagacaaaggggaacccggtctgaaggggtttgcgggaaacccgggagaaaagggcaataggggcgtacctggcatgcctggtctgaagggactgaagggtctgccaggaccagcaggcccacctggcccacgcggagacctggggtctactgggaaccccggtgagccgggtttgagaggaatcccaggaagtatgggtaacatgggaatgccaggctctaaggggaagcggggtacattaggtttccccggacgggctggacgccctgggctgcctggcatccacggtctgcaaggagataagggggagccgggttattcagaggggactagacctggtccccctggacctacgggtgatcccggactgccgggtgacatgggcaagaaaggggaaatgggtcagcctggaccacctgggcacctgggtccggctggtcccgaaggagcgccaggttccccgggaagcccaggtctgcccggaaaacctggaccccacggagacctagggtttaaagggatcaagggtctacttggtccaccaggcatcaggggacctccgggactgcccggattcccaggttcacccggacccatgggcatccggggtgatcagggccgtgatggcatccccggacctgcaggcgaaaagggtgaaactggcctgctaagagcccctcccggtccccgaggcaatcccggagctcaaggagctaagggcgatcgtggagcaccaggttttccagggctcccgggtagaaaaggagccatgggagacgctggcccacgtggcccaaccggaattgagggcttccccggtccgcctggactcccaggtgccattattcctggtcagaccggaaatcggggaccaccaggatcaagaggttccccaggggctcccggtccacctgggccacccggatcccacgtgattggaataaagggtgacaaggggagcatggggcatccgggaccgaagggccctcccggaacagccggtgacatgggaccacccggacgcctgggtgcaccaggcacccctgggctcccaggacctcggggtgacccgggattccagggcttccccggagttaagggcgaaaaaggcaaccccggtttccttggctcaatcggtccccctggacctattgggccaaagggacctcctggagtgcgcggagatcctggcacgctcaaaatcatatctctgcctgggtcgcctggcccacctggtactcccggagaaccgggaatgcagggggagccagggccacctgggcctccaggcaacctggggccatgtggtcccaggggtaaacccggtaaagacgggaaaccaggcacacctggccctgccggagaaaaaggtaataagggttccaaaggggaacctggcccagcaggaagcgacgggttgcctggcctgaagggtaagcgaggagactcaggcagtcccgctacgtggactacaagggggtttgtgtttacacggcattctcagacaactgccattccctcatgtcccgaagggactgtacccctatattccggattcagttttttattcgtacagggcaatcaacgggcacacgggcaggatctcgatgctttattcgtaaaagttttgaggagtccctag

SEQ ID NO: 267076 - DNA, 4913 bp, Artificial Sequence
  derived and/or modified sequence
atgtccgccagaaccgcccctcggcctcaagtattattgctaccccttctgcttgttttactcgcagccgctccggctgcttcaaaaggctgcgtgtgtaaggataagggacagtgtttctgcgacggtgccaagggcgaaaagggagaaaaaggattccccggtccaccaggttcgcctggccagaagggattcaccgggcctgagggtttgcctggtccccagggccctaagtctttccgcgctatccccagttactccgggggaaagtccttgcaaggtatttcagggcttccgggtttttcagggagtccaggcctaccaggaactccagggaacaccggtccctacggcctagtgggagttccgggttgctccggctctaagggggaacagggctttccaggcctcccaggcaccttagggtatccgggtatcccgggtatccacaatctgaagatatttaagggagctcctgccaaggaagaggatattgagctcgacgcaaagggagacccaggcctgcccggtgcaccagggcctcagggcttgcctggaccgccaggcttccccggaccggtgggccctccaggacctccaggcttctttgggttccctggtgctatgggacccaggggaccgaagtcctttgtcctttctagccggattagtaccaagggcgaaaagggcgtgaagggattaaccggccctcccggaccgccaggaacagtgatagttacacttactgggcctgacaatcggactgaccttaaaggggaaaagggcgataagggagccatgggtgagccaggccctccagggccttccgggctcccgggagaatcgtatggaagtgaaaaaggggctcctggggatccagggctccagggtaagcccggaaaagacggcgttcccggttttccaggatctgaaggcgtgaaaggcaatcgagggttcccagggttgatgggcgaggacggtatcaaagaagagaaacgagacgtcgctatagtctcgttttcgagtaaaacagagtactacgatacctatcaggagaaaggcgatgaggggaccccaggcccacccggtcctagaggggcacgaggccctcagggtaagaataaattcaggtgtatcccgggtagtcagggttcttcccgaccaggactcaggggggcacccggatggccgggactgaaaggatcaaaaggtgagagagggcgacccggtaaggatgcaatggggaccccaggcagcccgggttgcgccggtagtccgggtctgccagggtcccctggccctcctggtcctcctggtgatattgtgttcagaaaaggcccacccggtgaccacgggctgccagggtaccttggatcccccggtatccctggagtagacggtccaaagggggaacccggtctgctttgtacacaatgcccctatattcctggccctccgggtctgcccggactacctgggctgcatggggtcaagggcatccccggtagacagggggcagccggtttgaaaggtagccccggatcccctggcaacacaggactgcccggtttccccggattccccggtgcccagggcgacccgggtctgaaaggagaaaaaggggagacactgcagcccgagggacaggtgggtgtacccggagatccagggctgcgaggccagccaggtaggaaaggccttgatggaattccgggaaccccgggagtaaagggactgcccggacctaaaggcgagctggctctgtctggagaaaaaggcgatcaagggcctccgggtgaccccggtagtccgggtagccccggtccagcgggtccggcaggacctcctgggtacggccctcaaggagagcctggtctgcaggggacccaaggcgtccccggagccccaggaccccctggagaggctggcccaaggggtgaactgtccgttagcactcccgtgcccggtccacctggtcctcctgggcctcctggccacccaggtccacagggaccacccggaatccctggatctttaggcaagtgtggggaccccggacttcccggtcctgacggggagcctggcatccctggaataggatttccgggacctcccggtccaaaaggcgatcagggattcccgggtacgaaaggcagcctgggatgtccaggtaagatgggagaaccaggtctccccggaaagcctggcctccctggggctaagggggaacccgctgtggcaatgccaggagggccaggcactcctggctttcctggtgaacgaggcaattctggcgaacacggggaaatagggttaccaggcctgccaggccttcctgggacacccggaaacgagggattggacggacctagaggtgacccaggtcagccaggtccccctggagaacaaggcccacccggacggtgcattgagggaccgcgaggggcacagggcttgccgggtctcaatggcctgaaaggccagcagggacggagaggcaagactggtccaaaaggcgatccaggtatcccaggcctggacagatcaggatttccgggtgagaccgggtcaccaggcatccctggacaccagggagagatggggccactggggcagcgagggtatccaggtaatcctggcatcttaggaccccctggcgaggacggagtgattgggatgatgggcttcccaggagcaatcggtcctccaggcccacctggtaatccgggtacccctggccaacggggaagtccaggcattccaggtgtgaagggacagaggggcacgcccggtgccaagggcgagcagggagataaaggcaatccaggcccttccgagatttcccacgttatcggagataagggtgagccagggctgaaagggtttgccggtaatccaggagaaaaagggaataggggggtcccaggtatgcccggtctaaaaggcctgaaagggttgcctggtcccgcaggccctcctgggcctagaggagacctcgggagtacaggaaatcccggagagccaggtctgagaggcatccctggatctatgggaaatatggggatgcccggttcgaaaggcaagaggggcacattgggattccctggtagggctggcaggcccggtctgcctggcatccatggcctacagggagacaagggggaacccggatattctgagggtacaagaccgggaccccctggcccaactggagacccgggattaccaggcgacatgggcaaaaaaggcgaaatgggccaacccggaccaccaggccacctgggaccagccggaccagagggtgcacccggttccccaggtagcccaggattgccaggcaaacccggtccccacggtgacctggggtttaaggggataaagggcttgctaggccctccagggattaggggcccaccgggtttacctggatttcctgggagccccggtcctatggggatacggggagaccagggacgggatggcattcctggcccagcgggagaaaaaggcgagactgggttgctcagggcacccccaggcccacggggaaaccccggagcccagggggctaagggagatcgaggagcgccagggttcccagggctgccgggtcgcaagggagccatgggtgacgctggccctaggggcccaaccggcatagaaggatttccaggtccacccggattgcctggggcaattatccccggacaaaccgggaaccggggacccccaggaagtcggggttctccaggtgcccctggcccacctggccctcctggaagccacgtgatcggcataaagggggacaaggggtccatgggccatcctgggccaaagggccctcccggtaccgcaggggacatggggccacccggacgcctgggagcgccaggcacaccgggactgcccggacctcgaggtgaccccggtttccaaggctttcccggagtgaagggggaaaagggaaatccaggcttccttggctctataggacctcccggaccaatagggccaaagggccctcctggggttcggggtgatcccggaacccttaagatcatatccctgccaggctcccccggacccccaggcactcccggagagcctgggatgcagggggagccgggacctccagggccaccgggaaacctgggcccatgcggaccccgaggtaagccaggcaaggacggcaaacctggaacaccgggaccagccggtgaaaaaggaaataaggggagcaagggtgagccaggccctgccggatcagatggtctaccaggactcaaaggtaagcggggtgatagtggttccccagcaacatggaccacaagaggttttgtgttcaccaggcatagtcagacaactgccattccatcttgtccagagggaacagttccattgtatagtggtttctccttcctgtttgtgcagggaaatcagagagctcatgggcaagatctgggaacgttggggtcatgtctgcagagattcaccactatgccctttctgttttgtaatgttaacgatgtttgcaacttcgcaagccgcaatgattacagctattggctaagcacccctgccttgatgccgatgaatatggcccctatcacagggagagcactggagccctacatatctcgatgtacagtgtgtgagggacctgctatcgccattgctgtccactcacagaccaccgatattccaccatgcccgcacgggtggatcagcctttggaagggttttagtttcattatgaaggcttatagcataaattgcgagtcctgggggatcaggaagaataacaagtcactgagcggcgtccacgaggagaagaccctgaagttgaaaaagaccgcagagctgctattcttcattctcaaaaacaaagttatgactgaacacgctgttattta

SEQ ID NO: 267077 - DNA, 4485 bp, Artificial Sequence
  derived and/or modified sequence
atgagcgccagaactgcaccaagaccacaggtgctcctcctccctctgctgttggtcctcctggctgcagcgccagctgcttcaaagggctgtgtgtgcaaggataaggggcaatgcttctgtgatggggcaaagggtgagaagggagagaaaggatttccaggccctcctggcagtcccggtcagaaaggttttaccgggcctgaaggtctgccgggacctcagggcccaaagagtttcagagctattccaagctattctgggggaaagagtctgcagggaatatcaggactcccagggtttagcggctcaccaggactgcctgggacaccaggaaacactggcccatacggactggtgggtgtgcctgggtgctcagggagtaagggggaacagggctttcctgggctaccagggacgttgggataccccggtatcccaggaatccacaacttaaagattttcaagggcgcacctgctaaggaggaagatatagagctggatgctaagggggaccccggactccccggagcccctggtcctcagggtttgcccggacccccaggattcccaggacccgtaggcccacccggtcccccaggattttttggattccctggagccatggggcctagggggccaaaatcttttgtgctgagctctagaatctccactaagggagaaaaaggcgtcaaaggactcactggcccacctggtcccccaggcaccgtcatcgtcaccctcaccggaccagacaaccgaacggacttaaagggggaaaaaggtgacaagggcgctatgggggagcccggtccccctgggcctagcgggttgccaggcgaaagttacggctctgagaagggggcaccaggagatccaggtcttcagggaaagcccggaaaggatggtgtccctggctttcccggttccgaaggagtcaaaggcaaccggggttttcctggcctgatgggagaggacgggatcaaggaggagaagagagacgtggctatcgtgagcttcagttccaaaacagagtattatgacacctaccaagaaaaaggtgacgagggaactcctggcccaccgggacctaggggagcccgtggccctcagggaaaaaataaattccgatgcatccccggatcgcaaggctcttctcgccctgggctgaggggtgcacccggatggcccggactaaagggaagcaaaggggagagaggcagacccggaaaggatgcaatgggaactcccggttccccaggttgcgctggttcccccggattaccaggcagccccggacctcctgggcctccgggagatatcgtatttcggaagggtcctccaggtgaccacggcctgccaggctaccttggatctcctggaatacccggagtggatggccctaagggagaacccggtttactgtgcacgcagtgtccatatattcctggaccgccaggactcccgggactgcccggactgcacggcgtgaaggggatcccagggaggcagggggctgccggattgaagggcagccctggctcaccaggcaacacaggactgcccggattcccaggatttccgggagctcagggagatcccggtctcaagggcgagaaaggtgaaactctgcaacccgagggccaggtgggtgtccccggagacccgggattaagggggcagcctgggaggaaaggattagatggaattccgggtactcctggcgtgaaaggacttccagggcctaaaggcgagctcgccctgagcggcgagaagggggatcagggccctcctggcgatccagggtctcccggatctcctggacccgcaggcccagcaggcccacctggatatggcccacaaggagagcctggcttacaaggaacccaaggcgttcctggcgcaccaggccctccaggtgaagccggtcctcggggagaattgagcgtatcaactccagtgcccggaccccctggaccaccgggaccaccaggacatccaggacctcagggaccccctggcattcctggtagtctgggcaagtgcggtgatccaggcttgccaggcccagatggagaaccagggattcctgggatagggtttcctggtcctcctggtccaaagggagaccagggcttcccaggcacgaagggaagtctaggatgccctggaaagatgggagagccaggactgccgggaaaacccggtctccctggcgcaaagggagagcctgcagtggccatgcccggagggcctgggacgcccggatttcccggagagaggggtaacagcggggaacacggcgagatcggcctccccggtttacctggccttccaggaacacctggcaatgaaggacttgatggtcctagaggcgacccaggccagcccggaccgccaggcgaacaaggaccgccagggaggtgcatagaggggcctcgtggtgcccaaggcttgcccggactcaatgggctcaagggccagcaaggcagaagaggaaagactgggccaaaaggggaccccggaatcccaggcctggacaggagcggattccccggagagactgggagcccagggatccctggccaccagggggagatgggccctctggggcaacggggatatccaggaaatcccggaatcttagggcctcctggagaggacggagtgattgggatgatgggctttccaggggcaattggccctcctggaccccctggcaaccccggtaccccaggacagcggggatcgccaggtatccccggagtcaaaggccagcgcggtacgcctggtgcgaagggggaacagggtgataagggcaacccgggaccttcagagatcagccatgttattggcgacaagggcgagccaggtctgaagggttttgcgggaaatccaggggagaagggtaataggggagtccccggaatgccagggttgaaaggactgaaaggcctgcccggacccgctggaccacccggtccacgaggcgacctagggagcacaggcaaccccggagagcccggtctccgcggtatccccggaagcatggggaacatgggaatgcccggaagtaagggcaagcggggaactctcggatttcccggacgagctgggcgtccagggctaccaggcatccatggtttacaaggcgacaagggcgagcctggttattctgaggggacacgcccaggtcctcctggcccaaccggcgatccgggactgcccggagatatgggtaagaagggagaaatggggcagcccggaccccctgggcatctggggcctgctggaccagagggtgcgccagggagccccggttcaccgggtctccccggtaaacccggtccacacggggaccttggcttcaaggggattaaggggctattgggcccacccggaataaggggtcctccagggctgccagggtttccagggtccccaggtcccatgggtatccggggagaccaggggagagacggcatccccggtcctgccggagagaaaggagaaactgggttactgagagcgccacccggtcctcggggaaatccaggggcacaaggggctaaaggggacaggggggctccagggtttcccggattgccagggcgaaagggggctatgggggacgcaggcccacgcggtcctactggaatcgaaggcttccctggtcctccagggttacctggtgcaatcattccaggccagacgggaaaccgcggtcctcctgggtctcgtggatccccgggagcacccggtccgccagggcctcctggcagccacgtgatcgggattaaaggagataagggatcaatgggccacccaggcccaaagggacctccaggcaccgctggcgacatgggcccacctggacggctgggcgcacctggtactcctggtcttccaggacccagaggggatccaggcttccaggggttcccaggtgtgaaaggcgagaagggcaatcccggattcctaggaagtatcggccctccgggacccatcggacccaagggccctcctggcgtgcgcggtgaccctggtaccttaaagatcatcagtctcccaggcagcccagggccacccggaactccgggagagccaggaatgcagggggaaccaggaccccctggtcccccagggaatctgggaccctgcggtccccgtggcaaaccaggtaaggacggcaaacccggaactcctggccctgcaggggagaagggtaataaaggcagtaaaggggagcccggacctgcaggtagtgatggccttccaggcttgaaaggcaagcgtggcgattcggggagcccagccacatggaccacacggggttttgtctttacaagacacagtcaaaccaccgcaattccaagctgtcccgaaggtaccgtcccgttatacagcgggttcagctttctttttgtccaagggaaccagcgggctcatggccaggaccttgagtctcttttccaccagctttag

SEQ ID NO: 267078 - DNA, 4275 bp, Artificial Sequence
  derived and/or modified sequence
atgtctgccagaactgctcctaggccacaggtgctgttgctgcccttactgctagttttgcttgctgccgctccagcagcctctaaggggtgcgtttgcaaggacaagggccagtgtttctgcgatggagctaaaggcgaaaaaggagagaaagggttccctgggccaccagggtctccaggccaaaagggcttcactggccctgaaggattgccgggaccccagggccctaagagcttccgcgctattccctcgtattctggcggtaaatcactgcaggggatatctgggctccccggattcagcggttcccccggactgccagggactcccggtaatacaggaccatatggcctcgtcggcgtccctggatgttccggatccaaaggtgagcagggtttccccggtctcccgggaacattagggtaccctgggatacctggcatccataacttgaaaattttcaaaggggctccagcaaaagaagaggacatcgaattagacgcgaagggggacccagggttacctggggctcctggcccacagggcttaccgggaccacctggtttcccagggccagtagggccacccggaccacctggcttcttcgggttccctggcgctatgggtccgaggggcccaaagtcgttcgtgctgtcaagcaggatctctacaaaaggggaaaaaggggtcaaaggattgactggcccacccggtcccccaggtacagtaattgtgacgctcacaggcccagataacaggaccgatctgaagggcgagaaaggcgacaaaggcgctatgggtgagcccggaccaccagggccaagcgggctaccaggagaaagttatgggtccgagaaaggggctcccggtgatcccggactccagggcaagcccggtaaggacggcgtgcccggatttccgggatcggagggcgttaagggtaacagaggattccccggactgatgggcgaggatggaatcaaggaagagaagcgagacgtcgcaatcgtcagcttctcgtcaaaaaccgaatattatgatacctaccaagagaagggtgacgagggtactcctggcccacccggtccaaggggtgccaggggcccacagggaaagaataaatttcgctgtatccctggctcacagggttcgtcccgtcctggcctgcggggtgcacccggttggcctggacttaagggttctaaaggagagaggggtcggccaggcaaagacgcaatgggcacgcctggaagcccaggatgcgcaggaagtcctggactgcccggttctccaggccctccaggaccaccaggagatatcgtgttccggaaggggcctcctggggaccatggactgcccggatacttgggtagtcctgggattccgggagtcgatggcccaaaaggggagccaggcctcctgtgcacacaatgcccttatattcctggcccacccggtctccccggtctgcctgggctgcatggcgtcaagggcatccccggtaggcagggagctgcaggactgaagggatcgcctgggtctcctgggaatactggcctacctggcttccctggattccccggagctcagggggaccctgggctcaaaggtgagaaaggggagacacttcaacccgagggacaggtgggggtccccggtgatcccggactccgtgggcagcctggacggaagggcttggacggcatccctgggactccgggagtgaaggggctgccgggacctaagggcgagctggcgctctccggtgagaagggagatcaaggaccgcctggcgatcctggctctccagggtccccgggacctgctggaccagcaggacctccgggttatgggcctcagggagagcctggcctgcaggggactcagggagtgcccggtgcccctggtccacccggagaggcaggcccacggggagagctatctgtttctacccctgtgccgggacctccgggtccacctggccctccaggccacccaggccctcagggccctccaggtattcccggaagtctagggaagtgcggcgacccgggattgccaggccctgatggagaaccaggaatccccggaattggcttccctggccctccgggtccaaaaggagaccaaggttttccaggcactaaaggttcactgggatgtcccggtaagatgggggaacccggtttgcccggtaagccaggtcttccgggagcgaagggagagcccgctgtggccatgcccggaggccctggcaccccaggctttccaggagagagaggcaacagtggagaacacggagaaatcggcctgcctggccttcctgggttacctggtacccctggaaacgaaggtttggacgggcctcgtggtgaccccggacagcctgggccacccggagaacagggccctccgggtcggtgtatcgaaggaccacggggagctcaaggcctgcccggtttaaacgggcttaaaggccagcagggaagaagggggaaaaccggtcccaagggagaccccggaatccctggcctcgacagaagcgggtttcccggtgaaactggctctcctgggatcccaggccaccagggcgagatggggccactgggacaacggggatatcccggtaaccccggtattctggggccaccaggtgaagatggcgtcatcggcatgatgggtttcccaggagctatcggcccacctgggccaccaggcaacccaggaacccccggtcagcggggtagcccaggaatccctggcgtcaaaggtcaacgcggtacacccggagcgaaaggggaacagggagacaaaggaaaccctgggccttctgagatttctcacgtcatcggagacaaaggcgagccaggcctcaagggatttgctggcaacccaggagagaaaggcaacagaggggtccccggaatgccgggacttaaaggactgaaagggctgcccggtccagccggaccaccagggccacgcggagacctcggctctacgggaaacccgggtgagccaggactccgaggcatccctggttccatgggaaatatggggatgccaggcagcaaggggaagcggggaacacttggattccccggtcgggctggtcgcccaggccttcccggtattcacgggctgcagggcgacaagggagaacccggatatagtgagggcacccgcccagggcctcccggacctacaggagaccccggtctgcccggagacatgggcaaaaaaggagaaatggggcagcctggcccacccggacatctggggcctgcaggccctgaaggggctcccggaagcccaggttcccccggattgcctggcaagccaggtcctcacggggatcttggatttaaagggattaaaggcctccttgggccaccgggaatcaggggaccaccaggtttgcccggatttccgggtagccccggacctatgggtattcggggtgatcaaggcagagatgggattccgggacctgccggagaaaagggggagactggccttcttagagccccacctgggcctcgagggaatcccggagcccaaggggctaaaggcgaccggggtgcgcctggcttccctgggctaccaggccgaaaaggtgcaatgggggacgcagggcctcgcggtccaaccggtatcgaaggattccctggcccacccggactgcccggagccatcattccaggccagacggggaataggggacctccgggttctagaggatcccctggagctcctggtccacccggacccccaggttctcacgtgattggaattaaaggagataaggggtctatgggacatcctgggccaaaagggcctccgggaacggctggggacatgggtccccctggccgactcggtgcccctggtacacccggtttgcctggacctagaggagacccaggatttcaaggcttcccaggtgtcaagggcgagaaaggaaatcctggatttctaggctcaatcggacctcctggacccatcggcccaaaagggcctcctggagtgcggggagaccccggaactctcaagattatatccttacctggaagtccgggacccccaggtacccctggggaacccggtatgcagggggaaccaggtcctccgggtccccctggaaacctaggaccttgtggccctagaggaaagcctggaaaggacggcaagccagggacccctggtcccgctggagaaaaaggcaacaaaggaagcaagggtgagcctgaatctctgtttcatcagctatag

SEQ ID NO: 267079 - protein, 1687 aa, Artificial Sequence [sequence omitted]

SEQ ID NO: 267080 - protein, 1690 aa, Artificial Sequence
  derived and/or modified sequence
MWSLHIVLMRCSFRLTKSLATGPWSLILILFSVQYVYGSGKKYIGPCGGRDCSVCHCVPEKGSRGPPGPPGPQGPIGPLGAPGPIGLSGEKGMRGDRGPPGAAGDKGDKGPTGVPGFPGLDGIPGHPGPPGPRGKPGMSGHNGSRGDPGFPGGRGALGPGGPLGHPGEKGEKGNSVFILGAVKGIQGDRGDPGLPGLPGSWGAGGPAGPTGYPGEPGLVGPPGQPGRPGLKGNPGVGVKGQMGDPGEVGQQGSPGPTLLVEPPDFCLYKGEKGIKGIPGMVGLPGPPGRKGESGIGAKGEKGIPGFPGPRGDPGSYGSPGFPGLKGELGLVGDPGLFGLIGPKGDPGNRGHPGPPGVLVTPPLPLKGPPGDPGFPGRYGETGDVGPPGPPGLLGRPGEACAGMIGPPGPQGFPGLPGLPGEAGIPGRPDSAPGKPGKPGSPGLPGAPGLQGLPGSSVIYCSVGNPGPQGIKGKVGPPGGRGPKGEKGNEGLCACEPGPMGPPGPPGLPGRQGSKGDLGLPGWLGTKGDPGPPGAEGPPGLPGKHGASGPPGNKGAKGDMVVSRVKGHKGERGPDGPPGFPGQPGSHGRDGHAGEKGDPGPPGDHEDATPGGKGFPGPLGPPGKAGPVGPPGLGFPGPPGERGHPGVPGHPGVRGPDGLKGQKGDTISCNVTYPGRHGPPGFDGPPGPKGFPGPQGAPGLSGSDGHKGRPGTPGTAEIPGPPGFRGDMGDPGFGGEKGSSPVGPPGPPGSPGVNGQKGIPGDPAFGHLGPPGKRGLSGVPGIKGPRGDPGCPGAEGPAGIPGFLGLKGPKGREGHAGFPGVPGPPGHSCERGAPGIPGQPGLPGYPGSPGAPGGKGQPGDVGPPGPAGMKGLPGLPGRPGAHGPPGLPGIPGPFGDDGLPGPPGPKGPRGLPGFPGFPGERGKPGAEGCPGAKGEPGEKGMSGLPGDRGLRGAKGAIGPPGDEGEMAIISQKGTPGEPGPPGDDGFPGERGDKGTPGMQGRRGEPGRYGPPGFHRGEPGEKGQPGPPGPPGPPGSTGLRGFIGFPGLPGDQGEPGSPGPPGFSGIDGARGPKGNKGDPASHFGPPGPKGEPGSPGCPGHFGASGEQGLPGIQGPRGSPGRPGPPGSSGPPGCPGDHGMPGLRGQPGEMGDPGPRGLQGDPGIPGPPGIKGPSGSPGLNGLHGLKGQKGTKGASGLHDVGPPGPVGIPGLKGERGDPGSPGISPPGPRGKKGPPGPPGSSGPPGPAGATGRAPKDIPDPGPPGDQGPPGPDGPRGAPGPPGLPGSVDLLRGEPGDCGLPGPPGPPGPPGPPGYKGFPGCDGKDGQKGPVGFPGPQGPHGFPGPPGEKGLPGPPGRKGPTGLPGPRGEPGPPADVDDCPRIPGLPGAPGMRGPEGAMGLPGMRGPSGPGCKGEPGLDGRRGVDGVPGSPGPPGRKGDTGEDGYPGGPGPPGPIGDPGPKGFGPGYLGGFLLVLHSQTDQEPTCPLGMPRLWTGYSLLYLEGQEKAHNQDLGLAGSCLPVFSTLPFAYCNIHQVCHYAQRNDRSYWLASAAPLPMMPLSEEAIRPYVSRCAVCEAPAQAVAVHSQDQSIPPCPQTWRSLWIGYSFLMHTGAGDQGGGQALMSPGSCLEDFRAAPFLECQGRQGTCHFFANKYSFWLTTVKADLQFSSAPAPDTLKESQAQRQKISRCQVCVKYS

SEQ ID NO: 267081 - DNA, 504 bp, Artificial Sequence
  derived and/or modified sequence
atgcctttcacgggcgaacgtagactttccttacggcgtcaagacgaaggaggcctgcttgccggagctgaagacgagctcgccggagtggacgccactacggtgcatcaacaccaactgcgaccttctgaggttcccggtgccctgagacagccaggatcaagcgtcttagtgtgcctacccggattactcggggaggtcacaaccgccggacggacctccggggctttgtggacatgggtgtgggggtcccatccgccaagcgagtcacgcaccaaccctgttcgaatgtcacttactctcaaccaggcccgaactaccgtctctgatcaaagggccgaggaggaacggggtatttggggaagaagagccggagtgcaggccggtccactgcagagccaggggcacgccgctcacctaccacaccaggcattccctgtgccacggggatggctgccaggcgaggggccacacagtgatcctgccggtagcggcgctggctag

SEQ ID NO: 267082 - protein, 709 aa, Artificial Sequence
  derived and/or modified sequence
MIASKQRQFTEVFRIMSSTFSQSRFLYAAVVTDSPENDIPMEITTAEPQVSEAVYDCVICGQSGPSSEDRPTGLVVLLQASSVLGQCRDNVEPKKLPISEEEQIYPWDTCAAVHDVRLSLLQRYFKDSSCLLAVSIGWEGGVYVQTCGHTLHIDCHKSYMESLRNDQVLQGFSVDKGEFTCPLCRQFANSVLPCYPGSNVENNPWQRPSNKSIQDLIKEVEELQGRPGAFPSETNLSKEMESVMKDIKNTTQKKYRDYSKTPGSPDNDFLFMYSVARTNLELELIHRGGNLCSGGASTAGKRSCLNQLFHVLALHMRLYSIDSEYNPWRKLTQLEEMNPQLGYEEQQPEVPILYHDVTSLLLIQILMMPQPLRKDHFTCIVKVLFTLLYTQALAALSVKCSEEDRSAWKHAGALKKSTCDAEKSYEVLLSFVISELFKGKLYHEEGTQECAMVNPIAWSPESMEKCLQDFCLPFLRITSLLQHHLFGEDLPSCQEEEEFSVLASCLGLLPTFYQTEHPFISASCLDWPVPAFDIITQWCFEIKSFTERHAEQGKALLIQESKWKLPHLLQLPENYNTIFQYYHRKTCSVCTKVPKDPAVCLVCGTFVCLKGLCCKQQSYCECVLHSQNCGAGTGIFLLINASVIIIIRGHRFCLWGSVYLDAHGEEDRDLRRGKPLYICKERYKVLEQQWISHTFDHINKRWGPHYNGL

SEQ ID NO: 267083 - DNA, 2130 bp, Artificial Sequence
  derived and/or modified sequence
atgatcgccagcaagcagagacagttcaccgaggtgttcagaatcatgagcagcaccttcagccagagcagattcctgtacgccgccgtggtgaccgacagccccgagaacgacatccccatggagatcaccaccgccgagccccaggtgagcgaggccgtgtacgactgcgtgatctgcggccagagcggccccagcagcgaggacagacccaccggcctggtggtgctgctgcaggccagcagcgtgctgggccagtgcagagacaacgtggagcccaagaagctgcccatcagcgaggaggagcagatctacccctgggacacctgcgccgccgtgcacgacgtgagactgagcctgctgcagagatacttcaaggacagcagctgcctgctggccgtgagcatcggctgggagggcggcgtgtacgtgcagacctgcggccacaccctgcacatcgactgccacaagagctacatggagagcctgagaaacgaccaggtgctgcagggcttcagcgtggacaagggcgagttcacctgccccctgtgcagacagttcgccaacagcgtgctgccctgctaccccggcagcaacgtggagaacaacccctggcagagacccagcaacaagagcatccaggacctgatcaaggaggtggaggagctgcagggcagacccggcgccttccccagcgagaccaacctgagcaaggagatggagagcgtgatgaaggacatcaagaacaccacccagaagaagtacagagactacagcaagacccccggcagccccgacaacgacttcctgttcatgtacagcgtggccagaaccaacctggagctggagctgatccacagaggcggcaacctgtgcagcggcggcgccagcaccgccggcaagagaagctgcctgaaccagctgttccacgtgctggccctgcacatgagactgtacagcatcgacagcgagtacaacccctggagaaagctgacccagctggaggagatgaacccccagctgggctacgaggagcagcagcccgaggtgcccatcctgtaccacgacgtgaccagcctgctgctgatccagatcctgatgatgccccagcccctgagaaaggaccacttcacctgcatcgtgaaggtgctgttcaccctgctgtacacccaggccctggccgccctgagcgtgaagtgcagcgaggaggacagaagcgcctggaagcacgccggcgccctgaagaagagcacctgcgacgccgagaagagctacgaggtgctgctgagcttcgtgatcagcgagctgttcaagggcaagctgtaccacgaggagggcacccaggagtgcgccatggtgaaccccatcgcctggagccccgagagcatggagaagtgcctgcaggacttctgcctgcccttcctgagaatcaccagcctgctgcagcaccacctgttcggcgaggacctgcccagctgccaggaggaggaggagttcagcgtgctggccagctgcctgggcctgctgcccaccttctaccagaccgagcaccccttcatcagcgccagctgcctggactggcccgtgcccgccttcgacatcatcacccagtggtgcttcgagatcaagagcttcaccgagagacacgccgagcagggcaaggccctgctgatccaggagagcaagtggaagctgccccacctgctgcagctgcccgagaactacaacaccatcttccagtactaccacagaaagacctgcagcgtgtgcaccaaggtgcccaaggaccccgccgtgtgcctggtgtgcggcaccttcgtgtgcctgaagggcctgtgctgcaagcagcagagctactgcgagtgcgtgctgcacagccagaactgcggcgccggcaccggcatcttcctgctgatcaacgccagcgtgatcatcatcatcagaggccacagattctgcctgtggggcagcgtgtacctggacgcccacggcgaggaggacagagacctgagaagaggcaagcccctgtacatctgcaaggagagatacaaggtgctggagcagcagtggatcagccacaccttcgaccacatcaacaagagatggggcccccactacaacggcctgtag

SEQ ID NO: 267084 - DNA, 2130 bp, Artificial Sequence
  derived and/or modified sequence
atgatcgccagtaaacagagacagtttacagaggtgtttcggatcatgtcatcgaccttctcacagtcccgattcctgtatgctgcagtggtcaccgatagccctgaaaatgatattccaatggagattacgacagcagaaccgcaggtctcggaagccgtctatgattgtgttatatgcgggcaaagcggcccgtcctctgaggacaggcctaccggacttgtagtgctgctgcaggcctccagcgtactgggccagtgcagggacaatgtggagcctaaaaagttacctatctccgaggaggagcagatctacccttgggacacttgcgctgcagtacatgacgtgcggctctcactcttgcaacgctactttaaagattcatcctgtctgctggccgtttctataggctgggaaggaggggtctatgtgcagacttgcggacatacactccatatcgattgccataagtcctacatggaaagcttacggaatgatcaggttctccagggtttttcagtggacaaaggcgaatttacctgtccattatgccggcagttcgcgaattcagtactgccctgttaccctggttcaaacgtggaaaacaatccctggcagcgcccatctaataagtctattcaggatctgataaaggaagtcgaggaactccagggacgaccaggagctttcccatccgagacgaacctgtccaaagagatggaatctgtgatgaaagacattaagaacactacccagaaaaaatatcgcgactatagcaaaacgccgggatcacccgacaacgatttcctctttatgtattccgtggcccggacaaacttggagctggaacttatccaccgagggggaaacctgtgcagtggcggcgcatcaaccgcgggaaaaagaagctgtttgaaccagttgttccacgtgctagccctgcatatgaggttatacagtattgactccgaatataatccatggcgtaaactaactcagttggaagaaatgaaccctcagctgggatatgaagagcagcagcctgaagtgccaatcctgtaccacgacgtgacatcacttctcctgatacagattctgatgatgccacagcccttaagaaaagaccattttacatgcatcgtgaaagttctgttcaccctgctatatacacaagccctggccgccttgagtgttaaatgttcagaagaagatcggagcgcctggaagcatgccggggcattgaagaaaagtacctgtgatgcggagaagtcatatgaagtcctactgtccttcgtgattagtgagttgttcaagggcaaactgtaccacgaggaagggactcaagagtgcgctatggtgaatccgattgcatggtctccggaatcaatggagaagtgcctccaagatttttgcctgcctttcctgcgaatcacaagtctgctacagcaccatctcttcggagaggacctgccatcctgtcaagaagaggaagaattctcagtcttggcctcttgcctgggactgctgcctacattctatcaaactgagcaccccttcatctccgcttcgtgcctagattggccagttccagcctttgatataatcacacaatggtgctttgaaatcaaatctttcaccgagcggcacgccgaacaaggtaaggctctcctgatacaggagtctaaatggaaactgccccatcttctccagctcccagagaactacaatacgatcttccagtattatcataggaaaacatgttcagtttgtaccaaagtcccgaaggatcctgccgtttgtttggtgtgcggcactttcgtgtgtctgaagggactttgttgcaagcaacagagttattgcgaatgcgtgctccactctcagaactgtggggccggaacaggtattttcttgctgatcaacgccagcgtgatcatcataatcagaggccatagattttgcctgtggggaagcgtctacctcgatgcgcacggcgaggaagacagagatctccgccgtgggaagcctctttatatctgcaaggaacgatataaagtcttagagcagcagtggattagccacacgtttgatcacatcaacaagcggtggggcccacactacaatggtttgtag

SEQ ID NO: 267085 - DNA, 2130 bp, Artificial Sequence
  derived and/or modified sequence
atgattgccagcaagcagaggcagttcacagaggtgttccgcatcatgagcagcaccttcagccagagccgcttcctgtatgctgctgtggtgacagacagcccagaaaatgacatccccatggagatcaccacagctgagccccaggtgtctgaggccgtgtatgactgtgtgatctgtggccagagcggccccagcagcgaggaccggcccaccggcctggtggtgctgctgcaggccagctctgtgctgggccagtgccgggacaacgtggagcccaagaagctgcccatcagcgaggaggagcagatctacccctgggacacctgtgccgctgtgcatgatgtgcggctgagcctgctgcagcgctacttcaaggacagcagctgcctgctggccgtgtccatcggctgggagggcggcgtgtatgtgcagacctgtggccacaccctgcacatcgactgccacaagagctacatggagagcctgagaaatgaccaggtgctgcagggcttctctgtggacaagggggagttcacctgccccctgtgccggcagtttgccaacagcgtgctgccctgctacccaggcagcaatgtggagaacaacccctggcagaggcccagcaacaagagcatccaggacctgatcaaggaggtggaggagctgcagggccggcctggggccttccccagcgagaccaacctgagcaaggagatggagagcgtgatgaaggacatcaagaacaccacccagaagaagtacagagactacagcaagaccccaggcagcccagacaatgacttcctgttcatgtacagcgtggcccggaccaacctggagctggagctgatccaccggggcggcaacctgtgcagcggcggggccagcacagctgggaagaggagctgcctgaaccagctgttccacgtgctggccctgcacatgaggctgtacagcattgattctgagtacaacccctggaggaagctgacccagctggaggagatgaacccccagctgggctatgaggagcagcagcctgaggtgcccatcctgtaccatgatgtgaccagcctgctgctgatccagatcctgatgatgccccagcccctgaggaaggaccacttcacctgcatcgtgaaggtgctcttcaccctgctgtacacccaggccctggccgccctgtctgtgaagtgcagtgaagaagatagaagtgcctggaagcatgctggggccctgaagaagagcacctgtgatgctgagaagagctatgaggtgctgctgagctttgtgatcagcgagctgttcaagggcaagctgtaccacgaggagggcacccaggagtgtgccatggtgaaccccatcgcctggagccctgagagcatggagaagtgcctgcaggacttctgcctgcccttcctgcgcatcaccagcctgctgcagcaccacctgtttggagaggacctgcccagctgccaggaggaggaggagttctctgtgctggccagctgcctgggcctgctgcccaccttctaccagacagagcaccccttcatcagcgccagctgcctggactggcctgtgcctgcctttgacatcatcacccagtggtgctttgagatcaagagcttcacagaaagacatgctgagcagggcaaggccctgctgatccaggagagcaagtggaagctgccccacctgctgcagctgcctgagaactacaacaccatcttccagtactaccacaggaagacctgcagcgtgtgcaccaaggtgcccaaggaccctgctgtgtgcctggtgtgtggcacctttgtgtgcctgaagggcctgtgctgcaagcagcagagctactgtgaatgtgtgctgcacagccagaactgtggggccggcaccggcatcttcctgctgatcaatgccagcgtcatcatcatcatccggggccaccgcttctgcctgtggggctctgtgtacctggatgcccatggagaggaggaccgggacctgcggcggggcaagcccctgtacatctgcaaggagcgctacaaggtgctggagcagcagtggatcagccacacctttgaccacatcaacaagcgctggggcccccactacaacggcctgtag

SEQ ID NO: 267086 - DNA, 2130 bp, Artificial Sequence
  derived and/or modified sequence
atgatcgccagcaagcagcggcagttcaccgaggtgttccggatcatgtcatcgaccttttcccagagccgcttcttgtacgcagctgttgtgactgactcacctgagaacgatatccccatggagatcaccactgccgaaccccaggtctcggaggcggtatacgactgtgtcatatgtggccagtccggtccttcttcagaggatcgccccaccgggctggtggtgctgctgcaggctagcagcgtattgggccaatgtcgcgataacgtggaacccaagaagttgccaatttcagaggaggagcaaatatatccttgggacacttgcgcagcagtacacgacgtccggcttagtctcctacagcggtatttcaaggactcctcttgtctgcttgccgtaagcatcggatgggaggggggcgtgtatgtgcagacttgcggccacactcttcatatcgattgccataaatcctatatggagagtctgcgaaatgatcaagttcttcagggcttctcagtcgataagggggagttcacttgtccactgtgccggcagttcgcaaactcagtgttaccttgttacccaggttcaaacgtggagaacaacccatggcaacgccctagcaacaagtcaattcaggacctcatcaaagaggtggaggagttgcaggggcgcccaggcgcttttccaagtgagacgaatctctctaaagagatggagtccgtgatgaaggacataaaaaacaccacccagaagaaatatcgtgactactccaaaactcccggttcaccagataatgactttcttttcatgtattcagtggcccgtaccaatctggaattggagctcatacaccgggggggcaacctctgctctggaggagcctcaaccgcagggaaacgatcatgtcttaaccagttatttcatgtgctggcgcttcacatgcgactttactctattgattcagagtacaatccgtggagaaaattgacccaactggaggagatgaacccgcagctgggatacgaggaacagcagccagaggtgccaattctgtaccatgacgtcactagcttattgctcatccaaatcctgatgatgccccagcccctccgaaaagatcacttcacctgcatcgttaaagtgctctttacattactctacacacaagcactggcggcgctttccgttaagtgttcggaagaagataggtccgcctggaaacacgctggcgctctgaaaaagagtacgtgcgatgctgaaaaatcatacgaggtactgctgtcctttgtcatatccgaactgtttaaggggaagttataccacgaggagggcacccaggagtgcgccatggtgaatccaatcgcatggagtccggaaagcatggagaagtgtctccaggatttctgtctgcctttcctacgcataacttccctccttcagcaccacctgttcggcgaggacttaccatcctgtcaggaggaggaggagtttagtgttctggctagctgcctgggcctgctgccaaccttttaccagacagagcaccccttcatctctgcaagttgtctggactggccagtacctgccttcgacattattacgcagtggtgcttcgagatcaagagtttcactgaaaggcacgccgaacaggggaaggccctactcatccaagaaagtaagtggaagctgccacacctgttgcagttaccagaaaactacaatactatcttccagtactatcacaggaagacatgctcagtttgtaccaaagtgccgaaggatccggctgtgtgcctcgtctgtggtacgttcgtgtgtctgaagggcttgtgttgtaagcagcaatcttactgcgaatgtgtactccactcccagaactgtggggctggaacggggatcttccttctgatcaacgcaagtgtcattatcataatccgcggacacaggttctgtctatggggaagcgtctatctggatgcccatggagaagaggacagggacctgcggagaggcaagcccctgtatatatgcaaagaacgttacaaagtcttggagcagcagtggataagccacaccttcgatcatatcaataagagatggggtccccattacaacggtctgtag

SEQ ID NO: 267087 - DNA, 2130 bp, Artificial Sequence
  derived and/or modified sequence
atgatcgcctctaaacaaaggcagtttactgaagtgtttaggatcatgagtagcaccttctcgcagagccgtttcctttacgcggcagtggtgacagacagtccagagaacgatattcccatggagatcaccacggccgagccccaggtttcagaagctgtgtatgactgcgtcatctgcggccaatctggacccagttctgaggacagacctactggcctggtcgttctgctacaagcctcttctgtgctgggtcaatgtcgggacaacgtggagccgaaaaaactccctatctccgaagaagagcaaatctatccatgggacacctgcgccgctgtgcatgatgtgcggctcagcttgctgcaacgctacttcaaagactcttcctgtctgctggccgtatcaatcggctgggagggtggcgtgtacgtacaaacgtgtgggcacactctgcacatcgactgtcataaatcttatatggagtcactacgaaatgatcaggtcttacaaggattctcagtggacaagggggagtttacatgcccactgtgtaggcagtttgcaaactctgtgctcccatgttatccgggaagtaacgtcgagaataatccatggcagagacccagcaataaatcaatccaggatctgatcaaagaagttgaagaactgcagggaagaccgggagccttcccctcggagacaaatctctctaaggagatggaatcagtgatgaaggatattaaaaacactacgcagaagaaataccgggattattccaagacacccggtagccctgacaacgacttcttattcatgtatagtgtcgcgaggaccaacttggaattggaactcatccacagaggtggaaacttgtgctctggaggcgcatctactgccggaaagagaagctgtctgaaccaactgtttcacgtgctggcactgcatatgaggctttacagcatcgactctgagtataatccttggcggaagctgacccagcttgaggaaatgaatccgcaactggggtacgaagagcaacagccagaagttccaatactgtaccacgacgtaacttctctactgctcatacaaattctaatgatgccgcagcctctgcgcaaagatcattttacctgcatcgtgaaagtcctgtttaccctcctatacacacaggcccttgccgctctaagtgttaaatgttccgaagaggacagaagcgcctggaaacacgccggtgctctgaagaaatccacatgtgatgcagaaaaaagctacgaggtcctgctctccttcgtgattagcgagctgttcaagggcaagctctaccacgaggaggggacacaagagtgcgctatggtgaatccaatagcttggtcccccgaatcgatggagaagtgtctgcaagatttttgcctgccttttctgcgaataacctccctgctgcagcatcatctctttggggaggaccttccgagttgccaagaggaagaggaattctcggtattagctagctgcctgggccttctgcccaccttctaccagacggagcatcccttcatcagcgcctcttgccttgactggcccgtgcctgcattcgacatcattactcagtggtgttttgagattaagtccttcaccgaacgtcacgccgagcagggcaaagctctactgattcaggaatctaaatggaaactgcctcacctgttgcagctgccagagaattataacacgatctttcagtattaccataggaaaacatgttcagtctgtacaaaggtcccgaaagatccagctgtttgtttagtctgcggcacctttgtgtgtctaaagggcctctgttgtaagcagcaatcctattgtgaatgcgttttgcatagtcagaactgcggagcagggaccgggatcttcctattgatcaacgcttccgttattattatcattcgcggacataggttctgtctgtgggggtctgtatacctggacgctcacggcgaggaggatagggacctaaggcgtgggaagccgctgtatatatgcaaagagagatacaaagttctggagcagcagtggatatcacacaccttcgaccatattaacaagaggtggggcccacactacaacgggctgtag

SEQ ID NO: 267088 - DNA, 4414 bp, Artificial Sequence
  derived and/or modified sequence
atgattgctagcaaacagaggcagttcacagaagtcttcaggataatgagctctactttctcccagtctcggttcttgtatgctgcagtggtgacagattctcctgagaatgatattcctatggagatcaccacggcagaaccacaggtttccgaggcagtatatgactgtgttatttgtggacagagtggcccctcctctgaagatcgacctactggattagttgtactgttacaagcatcctcagttttggggcagtgccgtgacaatgttgagccaaaaaagttgccgatcagtgaagaggagcagatttacccttgggatacctgtgcagccgttcatgatgtgaggctttcattattacagcgttattttaaggatagttcatgtctcttggcagtatcaattggctgggaaggaggtgtttatgtacaaacctgtggtcacacattacatatagattgtcataaatcttacatggaatcattacggaatgaccaggttcttcagggcttctcggtggacaaaggagaattcacgtgtccactctgtaggcagtttgctaacagtgttcttccatgttatcctggaagcaatgtggaaaataacccttggcaacgtcctagcaacaaaagcatacaagatctcataaaggaagtggaggagctgcagggacgaccgggagctttcccatcagaaacaaatttaagtaaagaaatggaatctgtaatgaaagatataaaaaataccactcagaagaaatatagagactatagcaagaccccgggctcaccagacaatgattttctctttatgtactctgttgctagaaccaatttagaacttgaattgattcatcgaggaggcaatttgtgttcaggtggtgcaagcacagctggcaaaaggtcttgtttaaatcagctgtttcatgtattagccttgcacatgcggctttatagcattgactctgagtataatccctggagaaagctcacccagttagaagagatgaatccacagctgggatatgaagaacaacagcctgaggttccaattctttatcatgatgtaacatcccttttgctcatccagatcttaatgatgccacaacccttacgcaaagaccactttacctgcattgtgaaggtactttttaccctactgtacacacaggctcttgcagcactctcagttaaatgcagcgaagaagataggtcagcctggaaacacgcgggagctctcaaaaagagtacatgtgatgcagaaaagtcttacgaagtattactgagctttgtgataagtgaactatttaaaggaaagttataccatgaagaaggaactcaggaatgtgcaatggttaaccctattgcttggtctcctgaatccatggaaaaatgcttacaggacttctgcttaccttttctcagaatcaccagccttcttcagcaccacctttttggggaagatttacctagctgccaggaagaagaagaattttcagttcttgccagctgcctgggacttctgccaacgttttaccaaacagaacatccattcatcagtgcctcctgtctggattggccagttccagcatttgatattataactcagtggtgttttgagataaaatcatttactgaaagacatgcagaacaaggaaaggccttgcttatccaagagtcaaaatggaaattaccacacctactacagttgcctgagaattataacaccatttttcagtactaccacagaaaaacctgtagtgtctgcaccaaggttcctaaagatcctgctgtttgccttgtgtgtggtacttttgtatgcctgaaaggactttgctgcaagcaacaaagttactgtgaatgtgtactgcactctcagaactgtggtgcaggaacaggtattttccttttgatcaatgcatcggtaattatcatcattcgaggtcaccgcttctgcctctggggttccgtgtatttggatgctcatggagaggaagaccgggatcttaggcgaggcaaacctctctacatttgtaaggaaagatacaaagttcttgagcaacagtggatttctcatacttttgatcacatcaataaaagatggggtccacattacaatgggctgtgactctccacctcagcattgcatcgtatcatcattttcgctacgaatttatttttcaacaataagctttaacttaatttgggggattaacacttttgctgagggagaaaaagaaaacatacattatgaagcctttccaaaattaggtgcttggtaatcacgttaatggtataattttttttttttaatatctggagaacattaataacaagttaaattattctttagtggtcattttttaagtgcacaattaataagaagcacaacttgttcacaaactcattcagaaatgattctcccaacaatgcgtatcagctattcattgatacttagagtgggtgtgatttatttgacattttactgcttctttctgtctgtgtgttttaatttgcatctgccaagcataatgcatcttttttcctctgccattcttgtgttgattggagaatttttctgtatgtaattagaaaaaaatgtaaaacatgatttatgtgaaatactgtatagtaaaagttggtctaatagtagaactttaaaattttttcttattgtgaggaatctgttaaaagtttaaagctttgctgaaaactgaattcattctcaggaatttcataaatcttctccccaggtaaataattgaaatagctgtaaaataagtagatagctgctgttaatataatacagtacattttggggggcatatgtgtggttggggggtccttaaaaatcaaaatttgccatttcagttggatgaattactagaggtaataacaaatcttactatgaaatcaagaggtttaagaacatacactgggcagatgttgattccgtgcatgcccaccttttattaccaaacaaggttttgtttatatgattgtattagaaatgctcagacttccccagaaatgaaccataaattttggaacttcctttcagctcaagaggttcagctatattgtatttgtgcagtgtaatcactactatttctgctcggtttcctaaaaggaaaaaaaaggcgcagtggtgatgaccctcatgaatgagccacgcttctgcattcttcttagaaactgctgtgaaaaacaatttatgtttgcagggtttaaaaatcagtaaaaatgggaatgattgagctaaaacccactctatgagaaggaagattactgaaaagcatgtgacatattgctacaaagattttttttcctaaatgattcagtaattgaatgattatttaatatatagtgctatcaagcaatccctggtactttggacttccatggcttgttatataaaattacatttttacatgtaaaaataaactaaacaaatctaatgataaaatatgtcagatccatgttctaaaaaatttttgtaatgacatgacattacaagagtataaaaatggacattaaatcatggccttgcattaaaatatggaaagcagagcagtacatattcaaatgtattcagaaagtcaaaagattacctatcgttctacaataaaatacatggaaatagcttgctatttttatatacatttccaaaatattaagataactttctgtaagagtcaatgattctgttcgactaaatagctgtcctttccaacacattgctacttttttaaatactgtatcataagttcagcctgtcatactttttgcattgatcgttatgaataccagaccatttgtaagtgtggttgaagagcaaaatgctaattgacatctctagtaaatactgttacaggattcatgaacttgaataattctacagtttgaaactctgatgctatatatacatggtataatgtattcagactttgattactacttatttaaaatggaatgttttatggttgtgcatatggatgtgaagtgaaaatattagccttaactttaaaatttgggtgtttgatagtgtttattttgatattggtgaattagtcaccagtaaattttaaaaaagcacttggttgaaaattgtacttgaatacatacatgcatgctgctaaactagaactttaatttttccccataacttttataagtcccatttataaacccacttttaaaaataacaggtccaagttagagtgatgtgtgtatattattcaaaaaaatgtactggtgtgatatcttgtatgaatgatcatttaaatacagtacattactgtagaagctaaattgatctttataattaagcagaaattacaaaactaggaataatcaacattgtaagatatgttaataaaaacctgctgtcatttggtttgtgaaaggtcctt

SEQ ID NO: 267089 - protein, 632 aa, Artificial Sequence
  derived and/or modified sequence
MSDKSELKAELERKKQRLAQIREEKKRKEEERKKKETDQKKEAVAPVQEESDLEKKRREAEALLQSMGLTPESPIVPPPMSPSSKSVSTPSEAGSQDSGDGAVGSRTLHWDTDPSVLQLHSDSDLGRGPIKLGMAKITQVDFPPREIVTYTKETQTPVMAQPKEDEEEDDDVVAPKPPIEPEEEKTLKKDEENDSKAPPHELTEEEKQQILHSEEFLSFFDHSTRIVERALSEQINIFFDYSGRDLEDKEGEIQAGAKLSLNRQFFDERWSKHRVVSCLDWSSQYPELLVASYNNNEDAPHEPDGVALVWNMKYKKTTPEYVFHCQSAVMSATFAKFHPNLVVGGTYSGQIVLWDNRSNKRTPVQRTPLSAAAHTHPVYCVNVVGTQNAHNLISISTDGKICSWSLDMLSHPQDSMELVHKQSKAVAVTSMSFPVGDVNNFVVGSEEGSVYTACRHGSKAGISEMFEGHQGPITGIHCHAAVGAVDFSHLFVTSSFDWTVKLWTTKNNKPLYSFEDNADYVYDVMWSPTHPALFACVDGMGRLDLWNLNNDTEVPTASISVEGNPALNRVRWTHSGREIAVGDSEGQIVIYDVGEQIAVPRNDEWARFGRTLAEINANRADAEEEAATRIPA

SEQ ID NO: 267090 - DNA, 1899 bp, Artificial Sequence
  derived and/or modified sequence
atgtcggataagagcgagctcaaggctgagctggagcgcaagaagcaacgcctggcacagatcagagaggagaagaaaagaaaagaagaagagcggaagaagaaggagaccgaccagaagaaggaggctgtggccccagtgcaggaggagtctgatctggaaaagaaacggcgcgaggcagaagccctgctgcaatccatggggttgacacccgagtcccccattgtgcctccacccatgagccctagctctaaatccgtgagcactccgtctgaggcggggtcacaggactcaggagacggggctgtaggtagtaggacccttcactgggataccgaccctagcgtcctacagttgcactcagattccgatcttggacgaggaccgattaaactggggatggcaaaaattacccaggtggactttccacctagggagatcgtcacgtatacaaaggagactcagacaccagtgatggctcaacccaaagaagacgaggaggaagacgatgacgtggttgcacccaaaccacccattgaacccgaagaagaaaaaaccttaaaaaaagatgaagagaatgatagcaaggcccctccccatgaactgactgaggaggagaagcagcagattcttcattccgaggagttcctatccttctttgaccacagtacccgcatcgtggaaagagccttgtccgagcagattaatattttcttcgattacagtggccgtgaccttgaggataaagagggcgaaatccaggcaggggctaagttaagtctgaaccggcagttttttgacgaaagatggtcaaaacacagggttgtatcttgcctggactggtcctctcaatatcccgaactcctggtcgcgtcatacaataacaatgaggacgcaccccatgagccagatggagtagccctggtctggaacatgaaatacaagaaaaccacacctgagtatgtgttccattgtcagagcgcagtaatgtcggccacgtttgctaaattccatccgaatttggtggtaggaggcacctacagcgggcagattgtcttatgggacaaccgctctaacaaaagaaccccagtgcagaggacccctctgagcgccgccgctcatacacacccagtctattgcgtgaacgtagtagggacacagaatgctcataacctcatctcaattagtaccgacggaaagatttgctcctggtccttagacatgttatcccacccacaagactccatggagctggtgcacaaacaaagtaaggctgtggccgtaacgtcaatgtctttccccgtgggcgatgtgaataattttgtggtagggtcagaggagggcagcgtttatactgcttgtagacacggctcgaaagcggggatttccgaaatgttcgagggccatcagggtcccattaccggcatacactgtcatgctgcagtgggcgcggtggacttctcccacctgtttgtgaccagctcttttgattggactgtaaaactgtggaccacgaaaaacaacaaacccctgtactcctttgaggacaacgcggattacgtttatgatgtgatgtggagccccacccacccagccctgttcgcatgcgtggatgggatgggccggttggatctctggaatctgaacaacgatactgaagtgcctaccgcttctatttctgttgaggggaacccagctctgaaccgcgtccggtggacacacagtggaagggaaatcgccgtaggtgactcagaaggacagatcgtgatctatgacgtgggggagcaaatcgcagtgcccagaaacgacgagtgggctaggtttggaaggacccttgctgagattaatgcgaaccgggctgacgctgaagaggaagccgccacccgaatccccgcgtag

SEQ ID NO: 267091 - DNA, 1899 bp, Artificial Sequence
  derived and/or modified sequence
atgtccgacaaatccgaacttaaggctgagctcgagaggaaaaaacagcgtcttgcccaaatccgcgaggaaaaaaagaggaaggaggaagagcgtaagaagaaagagactgatcagaagaaagaggccgtggccccggtccaggaggagagtgacctggaaaagaaacggcgcgaagctgaagcattgctgcagagtatggggctcacaccagagagcccaatcgtgcctccacctatgtctccatcgagtaagtccgttagcacgcccagtgaggctggatctcaggacagtggtgatggagccgtgggcagccggacgctgcactgggatacagaccctagtgtcctacagctgcacagcgattcagacttggggcgtggtcccataaaacttggcatggccaagataacacaggtggacttcccaccaagggagatagtgacttacaccaaagaaactcagactcccgtgatggcacagcctaaagaagacgaggaggaggatgatgatgtggtcgctccaaaacctcctatcgagcccgaggaagagaagacactgaagaaagacgaagagaatgactcaaaggcccctcctcacgagctaacagaggaggagaaacaacagattctgcactctgaggaattccttagcttttttgaccattcaacaagaatagtggagagggctctgtccgaacagattaacattttctttgattatagcggaagagatctggaagataaagaaggtgagatccaggctggagccaaactgagtctgaatcgccagttcttcgacgagcgctggtctaagcatcgggtggtgtcttgtctggactggtctagtcaatatcccgaactgttggttgcctcctataacaacaacgaggatgcaccacatgagcctgatggagttgcccttgtgtggaatatgaagtacaaaaaaaccacgcccgagtatgtcttccattgccagagcgccgtgatgagcgctacctttgcgaaatttcacccgaaccttgtggtgggagggacctattcaggccagattgttctctgggacaacagaagcaataaacgaacccctgtacagagaacacccctgagcgccgcagcacatacccaccccgtttactgcgtgaatgtcgttgggacacagaacgctcacaaccttataagtatcagcactgatggaaaaatttgctcatggagcttggacatgctgtctcatccacaagattccatggagctcgttcataaacagtcgaaagccgtggcagtcactagtatgtcattcccagtgggggatgttaacaatttcgtagttgggtccgaggaaggttctgtatataccgcatgcaggcacggtagtaaagctgggatcagtgaaatgtttgaaggacatcagggccccataactggaatccactgccatgccgccgtgggggcagtggacttcagtcatctgttcgtgacctcatcgttcgattggaccgtcaaactgtggactaccaagaataataaaccactgtatagcttcgaagataatgctgactacgtgtatgatgtcatgtggagcccaacccaccccgcactttttgcgtgcgttgatggtatggggcgcttagacctgtggaacctgaacaacgatactgaagtgcccaccgccagtatctctgtcgaggggaatccggccctgaatcgggtgaggtggacgcacagcggtagagagattgccgtgggagatagcgaggggcaaatcgtgatctacgacgtgggcgagcagatcgccgtcccaaggaacgatgagtgggccaggttcggtaggacacttgccgaaatcaatgctaatcgtgctgatgccgaagaagaagctgcaacgcgcatccccgcctag

SEQ ID NO: 267092 - DNA, 1899 bp, Artificial Sequence
  derived and/or modified sequence
atgtctgacaagtctgagctgaaggccgagctggagaggaagaagcagaggctggcccagatccgggaggagaagaagaggaaggaggaggagaggaagaagaaggagacagaccagaagaaggaggccgtggcccctgtgcaggaggagagtgacctggagaagaagagaagagaggccgaggccctgctgcagagcatgggcctgaccccagagagccccatcgtgcccccacccatgagccccagcagcaagtctgtgtccaccccatctgaggccggcagccaggacagcggagatggagctgtgggcagcaggaccctgcactgggacacagaccccagcgtgctgcagctgcacagcgacagcgacctgggccggggccccatcaagctgggcatggccaagatcacccaggtggacttccccccccgggagatcgtgacctacaccaaggagacccagacccctgtgatggcccagcccaaggaggatgaggaggaggatgatgatgtggtggcccccaagccacccatcgagcctgaggaggagaagaccctgaagaaggatgaggagaatgacagcaaggcccctcctcatgagctgacagaggaggagaagcagcagatcctgcacagcgaggagttcctgtccttctttgaccacagcacccgcatcgtggagcgggccctgtctgagcagatcaacatcttctttgactacagcggccgggacctggaggacaaggagggggagatccaggccggggccaagctgagcctgaaccggcagttctttgatgagcgctggagcaagcaccgggtggtgtcctgcctggactggagcagccagtacccagagctgctggtggccagctacaacaacaatgaagatgcccctcatgagccagatggagtggccctggtgtggaacatgaagtacaagaagaccaccccagaatatgtgttccactgccagagcgctgtgatgtctgccacctttgccaagttccaccccaacctggtggtgggcggcacctacagcggccagatcgtgctgtgggacaacagaagcaacaagaggacccctgtgcagaggacccccctgtctgctgctgcccacacccaccctgtgtactgtgtgaatgtggtgggcacccagaatgcccacaacctgatcagcatcagcacagatggcaagatctgctcctggagcctggacatgctgagccacccccaggacagcatggagctggtgcacaagcagagcaaggctgtggccgtgacctccatgtccttccctgtgggagatgtgaacaactttgtggtgggcagcgaggagggctctgtgtacacagcctgccgccacggcagcaaggccggcatcagcgagatgtttgagggccaccagggccccatcaccggcatccactgccacgccgctgtgggcgctgtggacttcagccacctgtttgtgaccagcagctttgactggacagtgaagctgtggaccaccaagaacaacaagcccctgtacagctttgaagataatgctgactatgtgtatgatgtgatgtggagccccacccacccagccctgtttgcctgtgtggatggcatgggccgcctggacctgtggaacctgaacaatgacacagaggtgcccacagccagcatctctgtggagggcaacccagccctgaacagagtgcgctggacccacagcggccgggagattgctgtgggggacagcgagggccagatcgtcatctatgatgtgggggagcagattgctgtgcccagaaatgatgagtgggcccgcttcggccgcaccctggccgagatcaatgccaacagagcagatgctgaggaggaggccgccacccgcatcccagcctag

SEQ ID NO: 267093 - DNA, 1899 bp, Artificial Sequence
  derived and/or modified sequence
atgagcgacaagagcgagctgaaggccgagctggagcggaagaagcagcgccttgctcagattagagaagaaaaaaagagaaaagaagaagagcgtaagaagaaagagactgatcagaaaaaggaagctgtggccccagtgcaggaggaatctgacctggaaaagaagcgcagagaggccgaggcacttttgcagagcatggggttgacaccggagtctcctatcgtgccgccccccatgtccccgtcttcgaagagcgtctccactcccagcgaggccggcagtcaggattcaggcgatggtgcagtaggttctcgaactttacactgggacaccgacccgtctgtgctccagctacattccgatagtgacctggggcgcggccctataaaactggggatggctaagatcacacaagttgactttccaccacgagaaatagtgacctacaccaaagaaactcagactccagttatggcgcagccaaaggaagatgaggaagaggacgacgacgttgttgcccctaagccccctatcgaaccagaagaagagaagacattgaaaaaggacgaggagaacgactccaaggccccaccccacgagctgaccgaggaggagaagcaacagattctgcattcggaggaattcctgtctttcttcgaccacagcaccaggatagttgaaagagctctgtcagaacagattaatatcttcttcgactacagcggccgcgaccttgaggataaagaaggcgaaattcaggcaggcgccaaactgagtctgaatcgccagttttttgacgaaagatggtccaagcatcgggtggttagttgtctggactggagttctcaataccctgagttactggtggcttcatacaacaataacgaggatgccccccacgaacccgatggagtggcactagtttggaacatgaaatataaaaaaaccacacccgagtacgtcttccactgccagagtgctgtcatgtctgcaaccttcgccaaatttcatccaaaccttgtggtgggaggtacatactctgggcaaattgttctatgggacaacaggtccaacaaacggaccccggtacagcggacccccctgagtgcagccgcgcatacacacccagtatactgcgtaaatgttgtcggtacacagaacgcccataacttgatcagcataagtacagacggcaagatctgtagctggtccttagatatgctctcacatccccaggatagcatggaactcgtccacaagcaaagcaaagccgtcgctgtaacgagcatgagtttccccgttggtgatgtgaataattttgttgtgggcagtgaagagggtagcgtctacaccgcttgtcggcacggatccaaagctggcatatccgaaatgtttgaaggtcatcagggacctatcactggtatccattgtcatgctgctgtgggagctgtggacttttcccacctgtttgtgacctcatcattcgattggaccgtaaagctgtggacaactaagaacaataaaccactatattctttcgaggataatgcggattacgtgtacgacgtcatgtggtctcctactcatcccgccctcttcgcctgcgtggatggcatggggaggctggacctgtggaacctcaataatgatacggaggtgcccaccgccagcattagtgtcgaaggcaacccagcattgaaccgcgtgcggtggacacacagcggccgggagattgcagtgggcgactcggagggacagatagtgatctacgacgtgggcgagcagatcgctgtgccaagaaacgacgagtgggcaagatttgggagaaccctcgctgagattaacgccaacagagccgatgccgaggaggaggccgccaccaggatccctgcatag

SEQ ID NO: 267094 - DNA, 1899 bp, Artificial Sequence
  derived and/or modified sequence
atgagcgacaagagcgagctgaaggccgagctggagcggaagaagcagcggctcgcccaaattcgtgaagaaaagaaacgcaaggaggaagaacgaaagaagaaggagacggaccagaaaaaagaggcagtggcccccgtacaggaggaaagcgacctggagaagaagcgtcgagaggccgaagctctgctgcagagcatgggcctgactccggagtcacccatcgtgcctccacctatgtctccttcctcaaagtctgtgtcaactccttcggaagctggctcccaagactctggcgatggtgcagtgggaagtaggactctgcattgggacacagacccctccgtgctgcagctgcattccgactctgacttaggacgcggtcccattaaactcggaatggcgaagatcacacaagtggactttccaccccgcgaaattgtcacatacaccaaggaaacccaaaccccagttatggcccaaccaaaggaggacgaagaggaagatgatgatgttgtggcacctaaaccccccattgaacctgaagaagaaaaaacccttaagaaggatgaagaaaatgatagcaaagcgcctccccacgaactgacggaagaagagaagcaacagatcctgcacagtgaggagttcttgtctttttttgatcattcaacacgcattgtggagcgcgctttaagcgagcagatcaatatcttcttcgactactctggacgtgacctcgaagataaagaaggcgagattcaggccggggccaagctatcactcaatcgccaattcttcgacgagaggtggtcaaaacaccgggtggtcagttgcttagattggtcttctcaatatcccgagctcttagttgctagctataataataatgaggacgcaccccatgaacctgatggcgtggcgctggtgtggaatatgaaatataagaagaccacccccgagtatgtcttccactgccagtccgccgtgatgagcgctaccttcgcaaagtttcaccctaacctggttgttggcgggacctattccggtcagatcgtgttgtgggacaaccgctccaataaacggactccagtgcagagaacaccactttccgctgccgcacatacacaccccgtgtattgcgtgaacgtcgtaggcacacagaacgcccataacctgatatccataagcaccgacggcaaaatttgcagctggagcctggacatgctgtcccatccccaggattccatggagctcgtgcacaagcaaagcaaggcagttgccgtgacatcaatgtctttccctgtaggtgacgtcaacaatttcgtcgtcggttccgaagagggctccgtgtacaccgcttgtcgtcacggatctaaggctggcatcagcgaaatgttcgagggtcaccagggtcctattacgggaattcattgccacgctgcagttggagccgttgatttttcccacctgttcgtgacgtcctcattcgattggaccgtcaaactgtggacaactaagaacaacaagcctctatactcttttgaagataatgccgactatgtctacgatgtcatgtggagtccgacacacccagccttatttgcctgcgtggacggcatggggcgactggacctctggaatctaaataacgacacagaggtgcctactgcttctatatctgtggaaggtaatcccgccctgaatcgcgtccggtggacacacagcggtagagagatcgcagtcggcgacagcgagggccagattgtgatctatgatgtaggagagcagatcgccgtgccacggaacgacgaatgggctcggtttggaagaactctcgctgaaatcaacgcgaaccgagctgacgccgaggaggaggccgcgacgagaatccctgcctag

SEQ ID NO: 267095 - DNA, 1899 bp, Artificial Sequence
  derived and/or modified sequence
atgagcgacaagagcgaactgaaagcagaactggaacgcaaaaagcagcgtctggcacaaatccgagaggaaaagaaaaggaaagaggaggaacgaaaaaaaaaagaaactgaccagaaaaaggaggccgtggcacctgtgcaggaggagtccgacctggaaaagaagagacgggaggcagaagcccttctccagagtatgggactgacgccagaatcccctatagtgccacctccgatgtctccctcgtccaagtcagtgtcaacaccatctgaggctggatcccaggattctggcgacggtgctgtcgggtccagaacattgcactgggacactgatccctcagtcctccaattgcactcggactccgacctggggaggggtccaatcaagctgggcatggctaagatcactcaggtggactttccccctcgagaaattgttacctacaccaaagagacacaaactcctgtgatggcccaacccaaggaagatgaggaggaggatgacgacgtggtagcacccaaacccccaattgagcctgaggaagaaaagacgctcaaaaaggatgaggagaatgattctaaagccccaccgcacgaattaactgaagaggaaaaacagcagatcctgcacagtgaggagttcctcagtttctttgatcatagtacgcggattgtcgaaagagcccttagtgagcagatcaatatcttttttgactacagcggacgcgaccttgaagataaggaaggtgagatccaggccggagccaagctctccctaaataggcaattctttgacgagcggtggagtaagcatcgtgtggtatcctgtttagattggtcaagccaataccccgagctgctcgtggcaagctataacaacaatgaggatgcaccacatgaaccagatggagttgctctcgtttggaatatgaagtacaaaaagaccactccggaatatgtattccattgtcaaagcgcggttatgtccgccacgttcgctaaattccaccctaatctcgtggtgggagggacatacagcggtcagattgtgctttgggacaaccggtccaacaaaaggacccctgtccaaagaactccactgtcagcagccgctcacactcaccccgtgtactgcgtaaatgttgtgggtacgcagaacgcacacaatctcatctcaatctctacggatggtaagatttgctcttggtctctggacatgctctctcacccccaggactccatggaattggtacacaagcaatctaaggccgtggctgttacatcaatgtcctttccggtgggagatgtgaataactttgtcgttggctccgaagaagggtccgtatacaccgcttgtagacacggaagtaaggccggaatttctgagatgttcgaagggcaccaggggcctataacgggtatccactgccacgccgctgtgggagccgtggattttagccacctttttgtcacctcctcattcgattggaccgtgaagctctggactacaaagaacaacaaacctctgtattcgttcgaggataacgccgactatgtgtatgatgttatgtggagtcccactcacccagcattgtttgcatgtgtggatggaatgggccgactcgatctctggaatttgaataacgacaccgaggtaccgaccgcctccatctctgtggaaggaaacccggcacttaaccgagtgcggtggacacactcggggagagagatagccgtcggtgacagcgagggacagattgtcatatacgacgtaggtgagcaaatagctgttccacgaaacgacgagtgggctcggtttgggcgaacgcttgccgagattaatgcaaacagggccgacgctgaagaagaggcggctactagaattcctgcttag

SEQ ID NO: 267096 - DNA, 1899 bp, Artificial Sequence
  derived and/or modified sequence
atgagcgacaagtctgagcttaaggcggagcttgagcggaagaaacaaagattggctcagataagagaggagaagaagcgaaaggaagaggaacggaaaaaaaaggagacagaccagaagaaggaggctgtggccccagtgcaagaggagtccgacctcgagaagaaacgcagggaggctgaagctctgctgcagagcatgggtctgactcctgagagccccatagtgcctcctcccatgtctccaagcagcaagtcggtctcaaccccctcagaagccggtagtcaggatagcggtgatggcgctgtggggtccaggaccctccattgggatacggacccttcagtcttgcagctccactcagattccgacctaggtcgaggccctatcaagctggggatggctaagatcacccaggttgatttcccccctagagagatcgtgacgtacactaaagagacccagacaccagtgatggcccagcccaaggaggatgaagaggaagacgacgacgtggttgcacccaaacccccaatagaacccgaagaagaaaaaactctcaaaaaggatgaagaaaacgatagcaaagccccacctcacgaactgacagaggaagaaaaacaacagatcttgcacagcgaggagtttctcagtttctttgaccatagcacaagaatcgttgagagagctctgtctgagcaaatcaacattttcttcgactattccggaagggatctcgaggataaagagggggagatccaggctggcgctaaattatcccttaacaggcaattcttcgacgagagatggtctaaacaccgagttgtgtcctgcctcgactggagctcgcaataccctgagctgctggtggccagctacaacaataatgaagacgctccccatgagcctgatggagtggcactggtgtggaatatgaagtacaaaaaaacgacacccgagtacgtcttccattgtcagtcggctgtcatgagcgctaccttcgcgaaatttcacccaaatctcgtcgtgggaggaacctattctggtcaaatcgttctctgggataaccgatcaaataaaaggaccccggtgcaaaggacccccctcagcgctgccgctcacactcaccctgtgtactgtgtaaatgtagtgggcacccagaacgctcacaacttaatctcaatcagcacagacggaaaaatctgttcctggagtctggatatgctgtctcatccacaagattccatggagctggttcataaacagtccaaggcagtggcagtgaccagtatgtcttttccagtgggggatgttaataactttgtggttggtagtgaagaagggtccgtgtacacggcatgtcggcacggaagtaaagccggaatttccgagatgtttgaggggcaccagggacccataacaggcatacattgccacgccgctgtcggtgcagttgacttttcccacctgttcgtgacatccagtttcgactggacagtcaagctgtggacaacgaagaataacaaaccactctactccttcgaggataatgctgattatgtgtacgacgttatgtggagcccaacacaccctgcactcttcgcgtgcgtggatggaatgggcagattagatctgtggaacctgaataatgataccgaagttccaaccgcctcaatctcggtagagggtaatcccgcactgaatagggtgcggtggacccatagcgggagagaaattgcggtcggggacagcgagggccagattgtcatttatgacgtgggtgaacagattgcagtcccacgtaatgacgaatgggcaagattcggaagaacattggcagagattaacgctaacagagcagacgctgaggaggaggcagcaactagaattcccgcatag

SEQ ID NO: 267097 - DNA, 1899 bp, Artificial Sequence
  derived and/or modified sequence
atgagcgacaagagcgagctgaaggccgagctggagagaaagaagcagagactggcccagatcagagaggagaagaagagaaaggaggaggagagaaagaagaaggagaccgaccagaagaaggaggccgtggcccccgtgcaggaggagagcgacctggagaagaagagaagagaggccgaggccctgctgcagagcatgggcctgacccccgagagccccatcgtgcccccccccatgagccccagcagcaagagcgtgagcacccccagcgaggccggcagccaggacagcggcgacggcgccgtgggcagcagaaccctgcactgggacaccgaccccagcgtgctgcagctgcacagcgacagcgacctgggcagaggccccatcaagctgggcatggccaagatcacccaggtggacttcccccccagagagatcgtgacctacaccaaggagacccagacccccgtgatggcccagcccaaggaggacgaggaggaggacgacgacgtggtggcccccaagccccccatcgagcccgaggaggagaagaccctgaagaaggacgaggagaacgacagcaaggcccccccccacgagctgaccgaggaggagaagcagcagatcctgcacagcgaggagttcctgagcttcttcgaccacagcaccagaatcgtggagagagccctgagcgagcagatcaacatcttcttcgactacagcggcagagacctggaggacaaggagggcgagatccaggccggcgccaagctgagcctgaacagacagttcttcgacgagagatggagcaagcacagagtggtgagctgcctggactggagcagccagtaccccgagctgctggtggccagctacaacaacaacgaggacgccccccacgagcccgacggcgtggccctggtgtggaacatgaagtacaagaagaccacccccgagtacgtgttccactgccagagcgccgtgatgagcgccaccttcgccaagttccaccccaacctggtggtgggcggcacctacagcggccagatcgtgctgtgggacaacagaagcaacaagagaacccccgtgcagagaacccccctgagcgccgccgcccacacccaccccgtgtactgcgtgaacgtggtgggcacccagaacgcccacaacctgatcagcatcagcaccgacggcaagatctgcagctggagcctggacatgctgagccacccccaggacagcatggagctggtgcacaagcagagcaaggccgtggccgtgaccagcatgagcttccccgtgggcgacgtgaacaacttcgtggtgggcagcgaggagggcagcgtgtacaccgcctgcagacacggcagcaaggccggcatcagcgagatgttcgagggccaccagggccccatcaccggcatccactgccacgccgccgtgggcgccgtggacttcagccacctgttcgtgaccagcagcttcgactggaccgtgaagctgtggaccaccaagaacaacaagcccctgtacagcttcgaggacaacgccgactacgtgtacgacgtgatgtggagccccacccaccccgccctgttcgcctgcgtggacggcatgggcagactggacctgtggaacctgaacaacgacaccgaggtgcccaccgccagcatcagcgtggagggcaaccccgccctgaacagagtgagatggacccacagcggcagagagatcgccgtgggcgacagcgagggccagatcgtgatctacgacgtgggcgagcagatcgccgtgcccagaaacgacgagtgggccagattcggcagaaccctggccgagatcaacgccaacagagccgacgccgaggaggaggccgccaccagaatccccgcctag

SEQ ID NO: 267098 - DNA, 2587 bp, Artificial Sequence
  derived and/or modified sequence
cttctcgatcgtgtcagtttgtaaggcgagggcggaagttggattcctggcctgagaatattaggcgtagttttccagtttttggcaaagcggaaatacttaaggcccctgggttgactgggttctttgttttatctaccggcttctgctttacgacaggtcacaaacatgtcagacaaaagtgaattaaaggctgagttggaacgtaagaagcagcgactggcccaaatcagagaggaaaagaagagaaaagaagaagaaaggaaaaaaaaagaaacagaccagaagaaggaagctgttgctcctgtgcaagaagaatcagatcttgaaaaaaaaaggagagaagctgaagcattgcttcaaagcatggggctaactccagaatcccccattgtccctcctcctatgtctccatcctccaaatctgtgagcactccaagtgaagctggaagccaagactctggagatggcgccgtgggatctaggacgctgcattgggatacagatccatcagttcttcagcttcactcagattccgatttgggacgaggacctattaaacttggaatggctaaaatcacgcaagtcgactttcctcctcgagaaattgtcacgtatacaaaggaaactcagactccagttatggctcaacccaaagaagatgaagaggaagatgatgatgtagtggctcctaaaccacctattgaacctgaagaagagaaaactttaaagaaagatgaggaaaatgatagtaaagctccccctcatgagctgactgaagaagaaaagcaacaaatcttgcactctgaggaatttttaagtttctttgaccattctacaagaattgtagaaagagctctttctgagcagattaacatcttctttgactatagtgggagagatttggaagacaaagaaggagagattcaagcaggtgctaaactgtcattaaatcgacaattttttgacgaacgttggtcaaagcatcgggtggttagttgtttggattggtcatctcagtatccggagttactcgtggcttcctataacaacaatgaagatgcccctcatgagcctgatggtgtggcccttgtatggaatatgaaatacaaaaaaactaccccagagtatgtgtttcactgccagtcagctgtgatgtctgccacatttgcaaaatttcatccaaatcttgttgttggtggtacatattcaggccaaattgtgctttgggataaccgtagcaataaaagaactccagtgcaaagaactccactgtcagcagctgcacacacacaccctgtatattgtgtaaatgttgttggaacacaaaatgctcacaatctgattagcatctctactgatggaaaaatttgttcatggagtctggacatgctttcccatccacaggatagcatggagttggttcataaacagtcaaaagcagtagctgtgacatctatgtccttccctgttggagatgtcaacaactttgttgttgggagtgaagaaggttctgtgtacacagcatgccgccatggcagcaaagctggaatcagtgagatgtttgaggggcatcaaggaccaatcactggcatccattgtcatgcagctgttggagcagtagacttctcacatctttttgtcacttcatcgtttgactggacagtaaagctttggacaactaagaataacaagcctttgtattcatttgaagataatgcagactatgtttatgatgttatgtggtcacctacccacccagccctgtttgcctgtgtggatggcatggggagattggatttgtggaatctcaataatgacacagaggtaccaactgccagcatttctgtggagggtaatcctgctcttaatcgtgtgagatggacccattctggcagagagattgctgtgggtgattctgaaggacagattgttatatacgatgtgggagagcagattgctgttccccgcaatgatgaatgggcacggtttggccgaacacttgcagaaattaatgcaaaccgagctgatgcagaggaggaagcagctacccgaatacctgcttagttcctgaaaaggggagtgtaactagtggatttgggaaaggttcttaagtagatcctgagactatttgcatgcttctgtctaaatgataattaaaaggaaatttcatggattaaaccatgggtttaatgcagcaaggaaacttacaatgtccctttatatataacatgcatcttgttttggatttgtgtcattttttaatatagctgattgacttcacagaaagcagcttttttgaattctaatacataggtgtatatttggtattagttattttgagttcttttcaacttataacactgtatacagttatttctaaagcacagatgaaataagttctgcatatttttaaataatcacagttccctgttatacagataatgttctcactacccataatatgtaggaacattgtttctccttagccgtagtatgcatacacctatccatgttcattctgacatcctttgttgtctttataattcatgtggtagttacctataaataaaaacaaatatgcgtt

SEQ ID NO: 267099 - DNA, 2196 bp, Artificial Sequence
  derived and/or modified sequence
atttgtccctaagctctcgccgtagcagccgccgcccatccctctttgtgtgctttggaaagccgcggagctggtggtggctacagttggtgttgggggcttaggcgagggacgttaccgggaagttgcaggcgggaggactcttccccatccagtcacctgacaggtcacaaacatgtcagacaaaagtgaattaaaggctgagttggaacgtaagaagcagcgactggcccaaatcagagaggaaaagaagagaaaagaagaagaaaggaaaaaaaaagaaacagaccagaagaaggaagctgttgctcctgtgcaagaagaatcagatcttgaaaaaaaaaggagagaagctgaagcattgcttcaaagcatggggctaactccagaatcccccattgtccctcctcctatgtctccatcctccaaatctgtgagcactccaagtgaagctggaagccaagactctggagatggcgccgtgggatctaggacgctgcattgggatacagatccatcagttcttcagcttcactcagattccgatttgggacgaggacctattaaacttggaatggctaaaatcacgcaagtcgactttcctcctcgagaaattgtcacgtatacaaaggaaactcagactccagttatggctcaacccaaagaagatgaagaggaagatgatgatgtagtggctcctaaaccacctattgaacctgaagaagagaaaactttaaagaaagatgaggaaaatgatagtaaagctccccctcatgagctgactgaagaagaaaagcaacaaatcttgcactctgaggaatttttaagtttctttgaccattctacaagaattgtagaaagagctctttctgagcagattaacatcttctttgactatagtgggagagatttggaagacaaagaaggagagattcaagcaggtgctaaactgtcattaaatcgacaattttttgacgaacgttggtcaaagcatcgggtggttagttgtttggattggtcatctcagtatccggagttactcgtggcttcctataacaacaatgaagatgcccctcatgagcctgatggtgtggcccttgtatggaatatgaaatacaaaaaaactaccccagagtatgtgtttcactgccagtcagctgtgatgtctgccacatttgcaaaatttcatccaaatcttgttgttggtggtacatattcaggccaaattgtgctttgggataaccgtagcaataaaagaactccagtgcaaagaactccactgtcagcagctgcacacacacaccctgtatattgtgtaaatgttgttggaacacaaaatgctcacaatctgattagcatctctactgatggaaaaatttgttcatggagtctggacatgctttcccatccacaggatagcatggagttggttcataaacagtcaaaagcagtagctgtgacatctatgtccttccctgttggagatgtcaacaactttgttgttgggagtgaagaaggttctgtgtacacagcatgccgccatggcagcaaagctggaatcagtgagatgtttgaggggcatcaaggaccaatcactggcatccattgtcatgcagctgttggagcagtagacttctcacatctttttgtcacttcatcgtttgactggacagtaaagctttggacaactaagaataacaagcctttgtattcatttgaagataatgcagactatgtttatgatgttatgtggtcacctacccacccagccctgtttgcctgtgtggatggcatggggagattggatttgtggaatctcaataatgacacagaggtaccaactgccagcatttctgtggagggtaatcctgctcttaatcgtgtgagatggacccattctggcagagagattgctgtgggtgattctgaaggacagattgttatatacgatgtgggagagcagattgctgttccccgcaatgatgaatgggcacggtttggccgaacacttgcagaaattaatgcaaaccgagctgatgcagaggaggaagcagctacccgaatacctgcttagttcctgaaaaggggagtgtaactagtggatttgggaaaggttcttaagtagatcctgagactatttgcatgcttctgtctaaatgataattaaaaggaaatttcatggattaaaccatgggt

SEQ ID NO: 267100 - DNA, 276 bp, Artificial Sequence
  derived and/or modified sequence
atggccggcatcttctacttcgccctgttcagctgcctgttcggcatctgcgacgccgtgaccggcagcagagtgtaccccgccaacgaggtgaccctgctggacagcagaagcgtgcagggcgagctgggctggatcgccagccccctggagggcggctgggaggaggtgagcatcatggacgagaagaacacccccatcagaacctaccaggtgtgcaacgtgatggagcccagccagaacaactggctgagaaccgactggatcaccagatag

SEQ ID NO: 267101 - DNA, 450 bp, Artificial Sequence
  derived and/or modified sequence
atggccggcatcttctacttcgccctgttcagctgcctgttcggcatctgcgacgccgtgaccggcagcagagtgtaccccgccaacgaggtgaccctgctggacagcagaagcgtgcagggcgagctgggctggatcgccagccccctggagggcggctgggaggaggtgagcatcatggacgagaagaacacccccatcagaacctaccaggtgtgcaacgtgatggagcccagccagaacaactggctgagaaccgactggatcaccagagagggcgcccagagagtgtacatcgagatcaagttcaccctgagagactgcaacagcctgcccggcgtgatgggcacctgcaaggagaccttcaacctgtactactacgagagcgacaacgacaaggagagattcatcagagagaaccagttcgtgaagatcgacaccatcgcctag

SEQ ID NO: 267102 - DNA, 617 bp, Artificial Sequence
  derived and/or modified sequence
agctcggctctgagtttgcatgagaaaccagcgcagctctcgagccacgggagaaaacacgatctgctgcggagcccagtgacctgaaactgtagcagtgactcgagacctgtcctctcctcgacgtcgccctataaccctcccgctttatttaggatccgcttttccgagagcagccactcaggcaacccccggaaggtttgttaggagtttctccttgaaacgctttccgattccatcttttgaaatccagcaggcgagagtcacgacagactccaggacctcttgagcgctgtccgcagccccacgaagcggcaggagcagcgttggcaccggcgaaccatggctgggattttctatttcgccctattttcgtgtctcttcgggatttgcgacgctgtcacaggttccagggtataccccgcgaatgaagttaccttattggattccagatctgttcagggagaacttgggtggatagcaagccctctggaaggagggtgggaggaagtgagtatcatggatgaaaaaaatacaccaatccgaacctaccaagtgtgcaatgtgatggaacccagccagaataactggctacgaactgattggatcacccgaga

SEQ ID NO: 267103 - DNA, 558 bp, Artificial Sequence
  derived and/or modified sequence
accggccgggcccgcccccttggcaatgtcttcagcccgctgctctcctaacttaagcatttattccactgggatagaagcggcaggagcagcgttggcaccggcgaaccatggctgggattttctatttcgccctattttcgtgtctcttcgggatttgcgacgctgtcacaggttccagggtataccccgcgaatgaagttaccttattggattccagatctgttcagggagaacttgggtggatagcaagccctctggaaggagggtgggaggaagtgagtatcatggatgaaaaaaatacaccaatccgaacctaccaagtgtgcaatgtgatggaacccagccagaataactggctacgaactgattggatcacccgagaaggggctcagagggtgtatattgagattaaattcaccttgagggactgcaatagtcttccgggcgtcatggggacttgcaaggagacgtttaacctgtactactatgaatcagacaacgacaaagagcgtttcatcagagagaaccagtttgtcaaaattgacaccattgctg

SEQ ID NO: 267104 - DNA, 276 bp, Artificial Sequence
  derived and/or modified sequence
atggcaggcatattttacttcgcgctattttcctgtctattcggcatatgtgacgccgtgacaggctcgagagtgtaccctgcaaatgaagtgacactgctggatagtagatcagtccaaggcgaactcggatggattgcctcaccacttgaaggagggtgggaggaagtttcaatcatggacgaaaaaaacaccccaatccgaacctaccaggtctgcaatgttatggagccgtcccagaacaactggctcaggacagactggataacccggtag

SEQ ID NO: 267105 - DNA, 450 bp, Artificial Sequence
  derived and/or modified sequence
atggccgggattttctactttgccttgttttcatgtctctttggcatttgcgatgctgtcactggctcacgcgtgtacccagctaacgaagtgacattgctggatagtcgttcagtccagggcgaactcggctggattgcgtcccctctggaaggggggtgggaggaagtctcaattatggacgagaagaatacccccattcgcacgtaccaagtctgtaatgtgatggaacccagccagaataattggctgagaactgactggatcaccagagagggcgcccagcgagtttatatcgagatcaaattcacattgagggactgcaattcactgccgggggtgatgggaacctgtaaggaaacatttaatttatactattacgaatcagacaatgacaaagaaaggtttatccgagagaaccaattcgtgaaaatagataccatcgcttag

SEQ ID NO: 267106 - DNA, 276 bp, Artificial Sequence
  derived and/or modified sequence
atggccggcatcttctactttgccctcttcagctgcctgtttggcatctgtgatgctgtgacaggcagccgggtgtacccagccaatgaggtgaccctgctggacagccgctctgtgcagggcgagctgggctggatcgccagccccctggagggcggctgggaggaggtgtccatcatggatgagaagaacacccccatccgcacctaccaggtgtgcaatgtgatggagcccagccagaacaactggctgaggacagactggatcaccaggtag

SEQ ID NO: 267107 - DNA, 450 bp, Artificial Sequence
  derived and/or modified sequence
atggccggcatcttctactttgccctcttcagctgcctgtttggcatctgtgatgctgtgacaggcagccgggtgtacccagccaatgaggtgaccctgctggacagccgctctgtgcagggcgagctgggctggatcgccagccccctggagggcggctgggaggaggtgtccatcatggatgagaagaacacccccatccgcacctaccaggtgtgcaatgtgatggagcccagccagaacaactggctgaggacagactggatcacccgggagggcgcccagagggtgtacatcgagatcaagttcaccctgcgggactgcaacagcctgcccggggtgatgggcacctgcaaggagaccttcaacctgtactactatgaaagtgacaatgacaaggagcgcttcatccgggagaaccagtttgtgaagattgacaccatcgcctag

SEQ ID NO: 267108 - DNA, 276 bp, Artificial Sequence
  derived and/or modified sequence
atggccggcatcttctacttcgccctgttcagctgcctgttcggcatttgcgatgctgtgactggcagcagagtgtatccagcgaatgaggtcaccctcctggattcgaggagtgtacagggagaattaggttggatcgcttctcctctggaaggcggttgggaagaagtgtcaataatggatgaaaagaacacaccgatccggacatatcaggtgtgcaacgtcatggagccatcccagaacaactggctaaggacagactggattactcggtag

SEQ ID NO: 267109 - DNA, 450 bp, Artificial Sequence
  derived and/or modified sequence
atggccggcatcttctacttcgccctgttcagctgcctgttcggcatttgcgacgcagtgaccggaagtagagtctatcctgcgaatgaggtaaccctgctggactcccgaagtgtccaaggcgagctggggtggatcgcctccccattggaaggtgggtgggaggaggtgagtatcatggacgaaaaaaatactcccattcgaacctaccaggtctgcaatgtgatggaaccatcacagaacaactggctgcgcacggattggattactcgcgagggagctcaaagagtctacatcgagatcaagttcaccttgagagattgcaactctctgccaggggtgatgggcacctgcaaggagacattcaacctgtactactacgaatctgacaacgacaaagagcggtttatccgtgagaaccagtttgtcaagatcgacactatcgcctag

SEQ ID NO: 267110 - DNA, 276 bp, Artificial Sequence
  derived and/or modified sequence
atggctggaattttctactttgcactgtttagctgtctcttcggaatctgtgacgccgtcacaggatctagggtgtacccggctaacgaggtgacactacttgattctaggtcagtgcagggagagttaggctggattgcgagtccactggagggaggatgggaagaggtgtctattatggatgaaaaaaataccccgatccggacataccaggtgtgtaacgtgatggagccaagccagaacaactggttacgcactgactggatcacacggtag

SEQ ID NO: 267111 - DNA, 450 bp, Artificial Sequence
  derived and/or modified sequence
atggcaggcatcttctatttcgcgcttttttcttgtctgttcggaatctgtgacgcagtgactggctcacgggtgtacccagcaaatgaggtcacactgctggatagccgcagtgtgcagggcgagctgggctggatagcctccccgttagagggcggatgggaggaagtttcgatcatggacgagaaaaatacccccatccgtacctatcaagtctgcaacgtgatggagccgtcccagaataactggctgagaacagattggattacccgcgaaggcgctcagcgcgtatacatcgagattaagttcacattaagagattgcaatagcctcccaggtgttatggggacgtgtaaggaaactttcaacctttattattacgagtccgataacgacaaggagcgtttcattcgcgaaaaccaatttgtgaagattgacactattgcctag

SEQ ID NO: 267112 - protein, 731 aa, Artificial Sequence
  derived and/or modified sequence
  misc_feature (1)..(1): Xaa can be any naturally occurring amino acid
XKPATGLWVWVSLLVAAGTVQPSDSQSVCAGTENKLSSLSDLEQQYRALRKYYENCEVVMGNLEITSIEHNRDLSFLRSVREVTGYVLVALNQFRYLPLENLRIIRGTKLYEDRYALAIFLNYRKDGNFGLQELGLKNLTEILNGGVYVDQNKFLCYADTIHWQDIVRNPWPSNLTLVSTNGSSGCGRCHKSCTGRCWGPTENHCQTLTRTVCAEQCDGRCYGPYVSDCCHRECAGGCSGPKDTDCFACMNFNDSGACVTQCPQTFVYNPTTFQLEHNFNAKYTYGAFCVKKCPHNFVVDSSSCVRACPSSKMEVEENGIKMCKPCTDICPKACDGIGTGSLMSAQTVDSSNIDKFINCTKINGNLIFLVTGIHGDPYNAIEAIDPEKLNVFRTVREITGFLNIQSWPPNMTDFSVFSNLVTIGGRVLYSGLSLLILKQQGITSLQFQSLKEISAGNIYITDNSNLCYYHTINWTTLFSTINQRIVIRDNRKAENCTAEGMVCNHLCSSDGCWGPGPDQCLSCRRFSRGRICIESCNLYDGEFREFENGSICVECDPQCEKMEDGLLTCHGPGPDNCTKCSHFKDGPNCVEKCPDGLQGANSFIFKYADPDRECHPCHPNCTQGCIGSSIEDCIGLMDRTPLIAAGVIGGLFILVIVGLTFAVYVRRKSIKKKRALRRFLETELVEPLTPSGTAPNQAQLRILKETELKRVKVLGSGAFGTVYKGIWVPEG

SEQ ID NO: 267113 - protein, 1298 aa, Artificial Sequence
  derived and/or modified sequence
MKPATGLWVWVSLLVAAGTVQPSDSQSVCAGTENKLSSLSDLEQQYRALRKYYENCEVVMGNLEITSIEHNRDLSFLRSVREVTGYVLVALNQFRYLPLENLRIIRGTKLYEDRYALAIFLNYRKDGNFGLQELGLKNLTEILNGGVYVDQNKFLCYADTIHWQDIVRNPWPSNLTLVSTNGSSGCGRCHKSCTGRCWGPTENHCQTLTRTVCAEQCDGRCYGPYVSDCCHRECAGGCSGPKDTDCFACMNFNDSGACVTQCPQTFVYNPTTFQLEHNFNAKYTYGAFCVKKCPHNFVVDSSSCVRACPSSKMEVEENGIKMCKPCTDICPKACDGIGTGSLMSAQTVDSSNIDKFINCTKINGNLIFLVTGIHGDPYNAIEAIDPEKLNVFRTVREITGFLNIQSWPPNMTDFSVFSNLVTIGGRVLYSGLSLLILKQQGITSLQFQSLKEISAGNIYITDNSNLCYYHTINWTTLFSTINQRIVIRDNRKAENCTAEGMVCNHLCSSDGCWGPGPDQCLSCRRFSRGRICIESCNLYDGEFREFENGSICVECDPQCEKMEDGLLTCHGPGPDNCTKCSHFKDGPNCVEKCPDGLQGANSFIFKYADPDRECHPCHPNCTQGCIGSSIEDCIGLMDRTPLIAAGVIGGLFILVIVGLTFAVYVRRKSIKKKRALRRFLETELVEPLTPSGTAPNQAQLRILKETELKRVKVLGSGAFGTVYKGIWVPEGETVKIPVAIKILNETTGPKANVEFMDEALIMASMDHPHLVRLLGVCLSPTIQLVTQLMPHGCLLEYVHEHKDNIGSQLLLNWCVQIAKGMMYLEERRLVHRDLAARNVLVKSPNHVKITDFGLARLLEGDEKEYNADGGKMPIKWMALECIHYRKFTHQSDVWSYGVTIWELMTFGGKPYDGIPTREIPDLLEKGERLPQPPICTIDVYMVMVKCWMIDADSRPKFKELAAEFSRMARDPQRYLVIQGDDRMKLPSPNDSKFFQNLLDEEDLEDMMDAEEYLVPQAFNIPPPIYTSRARIDSNRSEIGHSPPPAYTPMSGNQFVYRDGGFAAEQGVSVPYRAPTSTIPEAPVAQGATAEIFDDSCCNGTLRKPVAPHVQEDSSTQRYSADPTVFAPERSPRGELDEEGYMTPMRDKPKQEYLNPVEENPFVSRRKNGDLQALDNPEYHNASNGPPKAEDEYVNEPLYLNTFANTLGKAEYLKNNILSMPEKAKKAFDNPDYWNHSLPPRSTLQHPDYLQEYSTKYFYKQNGRIRPIVAENPEYLSEFSLKPGTVLPPPPYRHRNTVV

SEQ ID NO: 267114 - DNA, 3897 bp, Artificial Sequence
  derived and/or modified sequence
atgaagcccgccaccggcctgtgggtgtgggtgagcctgctggtggccgccggcaccgtgcagcccagcgacagccagagcgtgtgcgccggcaccgagaacaagctgagcagcctgagcgacctggagcagcagtacagagccctgagaaagtactacgagaactgcgaggtggtgatgggcaacctggagatcaccagcatcgagcacaacagagacctgagcttcctgagaagcgtgagagaggtgaccggctacgtgctggtggccctgaaccagttcagatacctgcccctggagaacctgagaatcatcagaggcaccaagctgtacgaggacagatacgccctggccatcttcctgaactacagaaaggacggcaacttcggcctgcaggagctgggcctgaagaacctgaccgagatcctgaacggcggcgtgtacgtggaccagaacaagttcctgtgctacgccgacaccatccactggcaggacatcgtgagaaacccctggcccagcaacctgaccctggtgagcaccaacggcagcagcggctgcggcagatgccacaagagctgcaccggcagatgctggggccccaccgagaaccactgccagaccctgaccagaaccgtgtgcgccgagcagtgcgacggcagatgctacggcccctacgtgagcgactgctgccacagagagtgcgccggcggctgcagcggccccaaggacaccgactgcttcgcctgcatgaacttcaacgacagcggcgcctgcgtgacccagtgcccccagaccttcgtgtacaaccccaccaccttccagctggagcacaacttcaacgccaagtacacctacggcgccttctgcgtgaagaagtgcccccacaacttcgtggtggacagcagcagctgcgtgagagcctgccccagcagcaagatggaggtggaggagaacggcatcaagatgtgcaagccctgcaccgacatctgccccaaggcctgcgacggcatcggcaccggcagcctgatgagcgcccagaccgtggacagcagcaacatcgacaagttcatcaactgcaccaagatcaacggcaacctgatcttcctggtgaccggcatccacggcgacccctacaacgccatcgaggccatcgaccccgagaagctgaacgtgttcagaaccgtgagagagatcaccggcttcctgaacatccagagctggccccccaacatgaccgacttcagcgtgttcagcaacctggtgaccatcggcggcagagtgctgtacagcggcctgagcctgctgatcctgaagcagcagggcatcaccagcctgcagttccagagcctgaaggagatcagcgccggcaacatctacatcaccgacaacagcaacctgtgctactaccacaccatcaactggaccaccctgttcagcaccatcaaccagagaatcgtgatcagagacaacagaaaggccgagaactgcaccgccgagggcatggtgtgcaaccacctgtgcagcagcgacggctgctggggccccggccccgaccagtgcctgagctgcagaagattcagcagaggcagaatctgcatcgagagctgcaacctgtacgacggcgagttcagagagttcgagaacggcagcatctgcgtggagtgcgacccccagtgcgagaagatggaggacggcctgctgacctgccacggccccggccccgacaactgcaccaagtgcagccacttcaaggacggccccaactgcgtggagaagtgccccgacggcctgcagggcgccaacagcttcatcttcaagtacgccgaccccgacagagagtgccacccctgccaccccaactgcacccagggctgcatcggcagcagcatcgaggactgcatcggcctgatggacagaacccccctgatcgccgccggcgtgatcggcggcctgttcatcctggtgatcgtgggcctgaccttcgccgtgtacgtgagaagaaagagcatcaagaagaagagagccctgagaagattcctggagaccgagctggtggagcccctgacccccagcggcaccgcccccaaccaggcccagctgagaatcctgaaggagaccgagctgaagagagtgaaggtgctgggcagcggcgccttcggcaccgtgtacaagggcatctgggtgcccgagggcgagaccgtgaagatccccgtggccatcaagatcctgaacgagaccaccggccccaaggccaacgtggagttcatggacgaggccctgatcatggccagcatggaccacccccacctggtgagactgctgggcgtgtgcctgagccccaccatccagctggtgacccagctgatgccccacggctgcctgctggagtacgtgcacgagcacaaggacaacatcggcagccagctgctgctgaactggtgcgtgcagatcgccaagggcatgatgtacctggaggagagaagactggtgcacagagacctggccgccagaaacgtgctggtgaagagccccaaccacgtgaagatcaccgacttcggcctggccagactgctggagggcgacgagaaggagtacaacgccgacggcggcaagatgcccatcaagtggatggccctggagtgcatccactacagaaagttcacccaccagagcgacgtgtggagctacggcgtgaccatctgggagctgatgaccttcggcggcaagccctacgacggcatccccaccagagagatccccgacctgctggagaagggcgagagactgccccagccccccatctgcaccatcgacgtgtacatggtgatggtgaagtgctggatgatcgacgccgacagcagacccaagttcaaggagctggccgccgagttcagcagaatggccagagacccccagagatacctggtgatccagggcgacgacagaatgaagctgcccagccccaacgacagcaagttcttccagaacctgctggacgaggaggacctggaggacatgatggacgccgaggagtacctggtgccccaggccttcaacatccccccccccatctacaccagcagagccagaatcgacagcaacagaagcgagatcggccacagccccccccccgcctacacccccatgagcggcaaccagttcgtgtacagagacggcggcttcgccgccgagcagggcgtgagcgtgccctacagagcccccaccagcaccatccccgaggcccccgtggcccagggcgccaccgccgagatcttcgacgacagctgctgcaacggcaccctgagaaagcccgtggccccccacgtgcaggaggacagcagcacccagagatacagcgccgaccccaccgtgttcgcccccgagagaagccccagaggcgagctggacgaggagggctacatgacccccatgagagacaagcccaagcaggagtacctgaaccccgtggaggagaaccccttcgtgagcagaagaaagaacggcgacctgcaggccctggacaaccccgagtaccacaacgccagcaacggcccccccaaggccgaggacgagtacgtgaacgagcccctgtacctgaacaccttcgccaacaccctgggcaaggccgagtacctgaagaacaacatcctgagcatgcccgagaaggccaagaaggccttcgacaaccccgactactggaaccacagcctgccccccagaagcaccctgcagcaccccgactacctgcaggagtacagcaccaagtacttctacaagcagaacggcagaatcagacccatcgtggccgagaaccccgagtacctgagcgagttcagcctgaagcccggcaccgtgctgcccccccccccctacagacacagaaacaccgtggtgtag

SEQ ID NO: 267115 - DNA, 3897 bp, Artificial Sequence
  derived and/or modified sequence
atgaagcctgcaaccggcctgtgggtgtgggtgtccctgctggtggctgcaggcactgtgcagcccagcgattcccaaagcgtttgcgcaggtaccgaaaataagctaagttctttgtccgatctggaacaacaataccgagcactccgtaagtattacgagaactgcgaggtggtcatgggcaacctagaaataacatctatcgagcataatcgggacctgagttttttaagatctgtacgggaggtgaccggatacgtgctagtggcactaaaccagtttcgctatcttcccctggaaaacttgcggattatccggggaacaaaactgtacgaagatcgctacgccctggcaatcttccttaattacagaaaggacggaaacttcggtctgcaggagttaggcttaaagaatctgacagagatcttaaacggcggagtttatgtggaccaaaacaagtttctgtgttacgctgacactattcattggcaagatatcgtgcggaatccctggccgtcgaacctgacattggtgagtaccaacgggagcagtggatgtggcaggtgccataagtcatgcacggggcggtgttggggaccaacagagaatcactgtcaaaccttgacaagaacggtctgtgccgaacagtgtgatggccggtgctacggtccctatgtttctgactgttgtcatcgggagtgcgccggcggctgcagtggccccaaagacactgactgtttcgcttgtatgaacttcaacgactcaggagcatgcgtcacacaatgtcctcaaacgtttgtatataatcccacaactttccagctggagcacaacttcaacgccaaatatacatacggagccttctgtgtgaagaaatgcccccacaatttcgtggtcgacagtagctcctgcgtgagagcctgtccctcaagtaaaatggaggtggaggagaacggaatcaagatgtgcaagccctgcacggacatctgtccaaaggcttgcgacggaattggaacaggcagcctcatgtctgcacaaacagttgactcatctaatattgataagttcattaattgtacgaaaatcaacggcaacctcatctttctggtgacgggaattcatggcgatccatataacgcaattgaggccatagatccggagaagctcaatgtatttagaacagttagggagatcacaggcttcctcaatattcagagctggccccccaatatgactgacttctctgtcttttcaaatctcgtgacaatcggggggagggtgttgtatagcggactgtctctgctgatactgaagcagcagggtattacgagtctccaattccagtccctcaaggaaatctccgccggtaacatttatatcactgataactcaaatctgtgctactaccacactatcaattggaccacactcttctccacaattaatcaaaggatcgtcattagagataatcgaaaggccgagaactgtacggccgagggcatggtttgcaatcacctatgctcatcagacggctgctggggaccagggcccgatcagtgcctctcttgtcgaagattttcccgggggcggatttgcatcgagagctgtaacctgtatgatggcgaattccgggagttcgagaacggcagcatctgtgttgagtgtgatccgcaatgtgagaagatggaggacgggctgcttacctgccatgggcctggacccgataactgtaccaaatgttcacattttaaagatggaccaaattgcgtcgaaaaatgtccagacggcctgcagggggcaaacagttttattttcaaatacgccgatccagatcgcgaatgccacccctgccatcctaactgtacccaaggctgcataggcagcagcatcgaagactgcatcggactcatggatcgtacgcccttgatagcagcaggcgtgatcggtggactctttattctggttatagtcgggctcaccttcgccgtgtacgtcagaaggaagagtattaaaaagaaaagagccctgagacgcttcctagaaaccgagctggtagagccgctgaccccatccggaaccgcacccaatcaggcccagcttcgcatcttgaaggagactgaacttaagagagtcaaggtcctcgggtcaggagctttcggtactgtctacaaaggcatctgggtgccggagggcgagactgtcaagatcccagtggcaattaaaatcttgaacgagacaacgggtccaaaagccaacgtggaattcatggatgaggcgcttattatggcatcgatggatcatcctcacctggttcgccttctgggcgtgtgtctctccccgaccatccagctggtaactcagctcatgcctcacggctgtctgctcgagtatgtccatgaacacaaagataacattggaagccagctactactgaattggtgcgtccagattgccaagggaatgatgtacctggaagagagacgattggtgcatagggatctcgcagcaaggaacgttttggttaaatctcccaatcacgtgaaaattaccgacttcggcctcgctcgactgctggagggcgacgaaaaagagtacaatgccgacggaggtaagatgcccatcaaatggatggctctggaatgtatccactacagaaagtttacacaccagtccgatgtgtggtcctacggcgtgaccatatgggaacttatgacctttggaggcaagccttacgacggaatacccacaagggagatcccagatcttttggagaaaggggaaagacttccacagccccccatctgcacgattgacgtatacatggttatggtgaagtgctggatgatcgacgccgatagcagacctaagtttaaggaacttgcagcggaatttagccggatggctcgggaccctcagcgatatttggttatacaaggcgatgatcggatgaaactgccttcaccaaacgatagcaagttcttccagaaccttctcgatgaagaagatcttgaagacatgatggacgcagaggagtacctcgtgccccaagcatttaatattcctccccccatttacacctctagagctcgcattgacagcaaccggagcgagattggacattctcctcctccagcatatactcctatgtcggggaaccaattcgtgtatagggacggaggctttgccgccgagcaaggcgtctctgtgccctatcgagccccaacgtcaacaatccctgaggcacccgtggcccagggtgcaacagctgagattttcgatgacagttgttgcaatggaaccctgcggaaacctgtcgcaccccatgtccaggaggacagcagcacacagcgatatagcgccgatcctaccgttttcgcccctgagcgctccccacgtggtgagctggatgaggaaggctatatgacacccatgagagataaacccaaacaggagtatttaaacccagtggaggagaaccccttcgtcagcagacgtaaaaatggagacctgcaggccctagacaaccctgagtaccataacgccagcaatggtccacctaaagccgaagacgagtacgtgaatgagccactgtacctgaatacatttgccaacactctcggcaaggccgagtatctcaagaacaacatcctgtccatgccagagaaggccaaaaaggcatttgacaatcccgattattggaaccattctctaccacctcgctctacacttcagcatccagattatctccaggaatacagcacaaagtatttttacaaacaaaacggacggattcgacccatcgtggctgagaatccggaatatctttccgagttctcactgaagccaggcacggtgttacccccgccgccctatcgtcatcgcaatacagtcgtgtag

SEQ ID NO: 267116 - DNA, 3897 bp, Artificial Sequence
  derived and/or modified sequence
atgaagccagccaccggcctgtgggtgtgggtgtccctgctggtggccgccggcaccgtgcagcccagcgacagccagagcgtgtgtgccggcacagagaacaagctgagcagcctgagtgacctggagcagcagtaccgggccctgaggaagtactatgagaactgtgaggtggtgatgggcaacctggagatcaccagcattgagcacaacagagacctgtccttcctgcggtctgtgcgggaggtgacaggctacgtgctggtggccctgaaccagttccgctacctgcccctggagaacctgcgcatcatccggggcaccaagctgtatgaggacagatatgccctggccatcttcctgaactacaggaaggatggcaactttggcctgcaggagctgggcctgaagaacctgacagagatcctgaatggaggagtgtatgtggaccagaacaagttcctgtgctacgccgacaccatccactggcaggacatcgtgaggaacccctggcccagcaacctgaccctggtgtccaccaacggcagcagcggctgcggccgctgccacaagagctgcaccggccgctgctggggccccacagagaaccactgccagaccctgaccaggacagtgtgtgccgagcagtgtgatggccgctgctacggcccctacgtgtctgactgctgccacagagaatgtgccggcggctgcagcggccccaaggacacagactgctttgcctgcatgaacttcaatgattctggggcctgtgtgacccagtgcccccagacctttgtgtacaaccccaccaccttccagctggagcacaacttcaatgccaagtacacctatggagccttctgtgtgaagaagtgcccccacaactttgtggtggacagcagcagctgtgtgcgggcctgccccagcagcaagatggaggtggaggagaatggcatcaagatgtgcaagccctgcacagacatctgccccaaggcctgtgatggcattggaacaggcagcctgatgtctgcccagacagtggacagcagcaacatcgacaagttcatcaactgcaccaagatcaatggaaacctgatcttcctggtgacaggcatccacggggacccctacaatgccatcgaggccatcgaccctgagaagctgaatgtgttcagaacagtgcgggagatcaccggcttcctgaacatccagagctggccacccaacatgacagacttctctgtgttcagcaacctggtgaccatcggcggccgggtgctgtacagcggcctgagcctgctgatcctgaagcagcagggcatcaccagcctgcagttccagagcctgaaggagatctctgctggcaacatctacatcacagacaacagcaacctgtgctactaccacaccatcaactggaccaccctcttcagcaccatcaaccagagaattgtcatccgggacaacaggaaggccgagaactgcacagctgagggcatggtgtgcaaccacctgtgcagcagtgatggctgctggggccctggccctgaccagtgcctgagctgccgccgcttcagccggggccgcatctgcatcgagagctgcaacctgtatgatggagagttccgggagtttgaaaatggcagcatctgtgtggagtgtgacccccagtgtgagaagatggaggatggcctgctgacctgccacggccctggccctgacaactgcaccaagtgcagccacttcaaggatggccccaactgtgtggagaagtgcccagatggcctgcagggcgccaacagcttcatcttcaagtatgctgaccctgaccgggagtgccacccctgccaccccaactgcacccagggctgcatcggcagcagcattgaggactgcatcggcctgatggacaggacccccctgattgctgctggggtcatcggcggcctcttcatcctggtgattgtgggcctgacctttgctgtgtatgtgcggaggaagagcatcaagaagaagagggccctgcggcgcttcctggagacagagctggtggagcccctgaccccatctggaacagcccccaaccaggcccagctgcgcatcctgaaggagacagagctgaagagggtgaaggtgctgggcagcggggcctttggaacagtgtacaagggcatctgggtgcctgagggggagaccgtgaagatccctgtggccatcaagatcctgaatgagaccaccggccccaaggccaacgtggagttcatggatgaggccctgatcatggcctccatggaccacccccacctggtgcggctgctgggcgtgtgcctgagccccaccatccagctggtgacccagctgatgcctcatggctgcctgctggagtatgtgcatgagcacaaggacaacatcggcagccagctgctgctgaactggtgtgtgcagatcgccaagggcatgatgtacctggaggagcggcggctggtgcaccgggacctggccgccagaaatgtgctggtgaagagccccaaccacgtgaagatcacagactttggcctggcccggctgctggagggagatgagaaggagtacaatgctgatggcggcaagatgcccatcaagtggatggccctggagtgcatccactacaggaagttcacccaccagagtgatgtgtggagctatggagtgaccatctgggagctgatgaccttcggcggcaagccctatgatggcatccccacccgggagatcccagacctgctggagaagggggagcggctgccccagccccccatctgcaccattgatgtgtacatggtgatggtgaagtgctggatgattgatgctgacagccggcccaagttcaaggagctggccgctgagttcagcaggatggcccgggacccccagcgctacctggtgatccagggagatgacaggatgaagctgcccagccccaatgacagcaagttcttccagaacctgctggatgaggaggacctggaggacatgatggatgctgaggagtacctggtgccccaggccttcaacatccccccacccatctacaccagccgggccagaattgacagcaacagaagtgagatcggccacagccccccaccagcctacacccccatgagcggcaaccagtttgtgtacagagatggcggctttgctgctgagcagggcgtgtctgtgccctaccgggcccccaccagcaccatccctgaggcccctgtggcccagggcgccacagctgagatctttgatgacagctgctgcaatggcaccctgaggaagcctgtggccccccacgtgcaggaggacagcagcacccagcgctacagcgctgaccccaccgtgtttgcccctgagaggagccccagaggagagctggatgaggagggctacatgacccccatgagggacaagcccaagcaggagtacctgaaccctgtggaggagaacccctttgtgtccaggaggaagaatggagacctgcaggccctggacaaccctgagtaccacaatgccagcaatggaccacccaaggcagaagatgaatatgtgaatgagcccctgtacctgaacacctttgccaacaccctgggcaaggccgagtacctgaagaacaacatcctgtccatgcctgagaaggccaagaaggcctttgacaacccagactactggaaccacagcctgccccccaggagcaccctgcagcacccagactacctgcaggagtacagcaccaagtacttctacaagcagaatggccgcatccggcccatcgtggccgagaaccctgagtacctgtctgagttcagcctgaagccaggcaccgtgctgcccccaccaccctaccgccacaggaacacagtggtgtag

SEQ ID NO: 267117 - DNA, 3897 bp, Artificial Sequence
  derived and/or modified sequence
atgaagcccgccaccggcctgtgggtgtgggtgagcctgctggtggctgcaggcaccgtacagcctagcgatagccagagtgtctgtgctgggacagagaacaagctgagtagtcttagcgatcttgaacagcagtaccgcgcgctgcgaaagtactacgagaattgcgaggtggtgatggggaacctcgaaataacgtctatcgagcataaccgtgacctgagcttccttagaagcgtccgggaagttacagggtatgtccttgttgccttaaatcagttccgctatctgccacttgaaaacctgaggatcattcggggcactaaattatatgaggaccggtatgctctagcaattttcctgaattacaggaaagacggcaatttcgggttgcaggaactgggtcttaaaaatctgacggagatcctgaacggaggtgtctacgtggaccagaacaagtttctctgttacgcagatacgattcattggcaggatatcgtgcggaacccctggccatccaacctgacactggtcagcactaatggctcttccggctgtggcaggtgtcataagtcctgcaccgggcggtgctggggacctaccgagaaccactgtcaaaccctgactcgcaccgtctgcgccgagcagtgtgatgggagatgctacggtccgtatgtctctgattgttgtcatagggagtgtgccggcggctgtagcgggccaaaggacacggactgcttcgcatgtatgaactttaatgattcaggtgcctgcgtgactcagtgcccacagacattcgtctacaacccaactacgtttcagttggaacacaattttaacgccaaatacacctatggcgcattttgtgtgaagaaatgcccccataatttcgtagtcgattctagcagctgcgtgcgtgcctgcccgagttcaaaaatggaagtggaggaaaacggtatcaagatgtgtaagccctgcacggatatatgccctaaggcctgcgacggtatcggcacgggcagtcttatgagcgcacagactgtcgacagctctaacattgataagtttataaattgtacaaagatcaatgggaacctgattttcctggtgaccggcatacatggcgatccctataatgccattgaggccatcgatcctgaaaagcttaacgtgttccgcacggttcgggaaattacaggtttcctgaatatccagtcatggccacccaacatgactgacttctctgtgttttctaacctggtgactattggggggcgggttttgtactctggcctgagcttactgatcttgaaacagcaaggtattacatctctgcagttccagtcactcaaagaaatctcggcagggaacatctacataactgataactccaacttgtgttattatcacaccatcaactggacaaccctcttttcgaccatcaaccaaagaatcgtgataagagacaacaggaaggccgagaactgtactgcagagggaatggtgtgcaaccatttgtgtagttctgatggttgctggggccctgggcctgaccagtgtctttcttgtagacgcttttcgcggggaaggatctgcattgagtcctgtaatctgtacgatggggagtttcgcgaattcgaaaacggcagcatctgtgtggagtgtgatccccagtgtgagaagatggaggacggtttgttgacatgccatgggcccggtccggataactgcacgaaatgctcccattttaaagatgggcctaactgcgttgaaaaatgccctgatgggttacaaggagctaattccttcatctttaaatacgccgaccccgacagagaatgccacccctgccaccccaactgcactcaaggctgtatcggatcctctattgaggactgcattgggctcatggataggacccccctgatcgctgctggcgtcatcgggggtctgttcatattagtcatagttggcctgacttttgccgtgtacgtgcggcgcaaaagtatcaaaaagaaacgggctctgagacggttcctcgagactgagcttgtggaacccctgacaccttccgggactgctcctaaccaggcccaacttcggatcttgaaagagacagaactaaagcgagtgaaggtgctggggtctggcgccttcgggacggtgtacaaaggcatatgggtgccagagggcgaaacagtaaaaattccagtggccattaaaatccttaacgaaaccacaggcccaaaggccaacgtcgaatttatggatgaggcactgattatggccagcatggaccacccgcatcttgttcgcctgctgggtgtgtgtctttctcccacgatacaactggtgactcagctgatgccacacggatgtctgctggagtacgtgcacgaacacaaggataacattggatcccagttgctcctgaactggtgtgttcaaatagccaaggggatgatgtacctagaagagaggcggctcgtccaccgcgaccttgcagcccggaacgtattggttaagtcccccaatcacgtaaaaattacggattttggcttggctcgacttttagaaggggatgaaaaagagtacaatgccgatggtggcaagatgcccattaaatggatggctctcgaatgcatccattacaggaaattcactcatcagtcggacgtgtggtcgtatggagttaccatctgggaattaatgacattcggggggaaaccttacgacggcatacctacaagagagattccagaccttctggagaaaggggagaggttgcctcagcctccaatttgcacaattgatgtctacatggtgatggtgaagtgttggatgatcgacgccgacagtcggccaaaatttaaagaattagcggccgagttttccaggatggcccgggatccccagcgctacctcgtcatccagggagacgatcggatgaagctgccctcgcctaatgatagcaaattcttccagaacttgttagacgaggaggacttagaagacatgatggacgccgaggaatatttggttccccaggcctttaacatcccgccccccatctacacttcccgcgcccgcatcgatagtaatcggagtgagatcgggcattccccaccccctgcgtacaccccaatgtccggcaatcagtttgtgtatcgcgacggtggcttcgcagccgagcagggcgtttccgtaccttaccgcgcccctacctcaaccattcccgaggcccccgttgcccaaggagctactgcagaaatctttgatgacagttgctgtaacggcactctcaggaaacccgtggctccacatgttcaggaagattcatctacccagcgatattcagccgatccgactgtctttgctccagagagatccccacgtggagagctcgacgaggaggggtatatgacgccaatgcgcgacaaacccaagcaagagtatctgaaccccgtcgaagagaaccctttcgtaagtcgccggaagaacggagatttgcaggcattggacaaccctgagtaccacaatgcgtccaacggcccacccaaggccgaggacgaatacgtgaacgaacctttatatctcaacacctttgcgaacaccctgggaaaggcagaatatctgaagaataatattctcagcatgcccgagaaggcaaaaaaggcttttgataatcccgactactggaaccacagccttccacccagaagcactcttcaacatcccgactaccttcaggagtactccacgaaatacttctataagcagaacggaaggataagacccatcgttgcagagaacccggaatatttgtccgagttcagcttgaaacctgggacagtcctgcccccgcctccatatcgacataggaatacagtagtgtag

SEQ ID NO: 267118 - DNA, 3897 bp, Artificial Sequence
  derived and/or modified sequence
atgaagcctgctaccggcctgtgggtttgggtgtccttactggttgctgctggaacggtgcagccatcagattcccagagcgtctgcgcaggcacggagaataagcttagcagtctctccgatctggagcagcagtatcgggcactgcgcaaatactacgaaaactgtgaggtggtgatggggaacctcgaaataacatcaattgaacacaatcgggacttgtctttcctacggagcgtcagagaggtgactggctatgtgctggtagcactgaatcagttccgctatctgccattagaaaatctgcggattatcagggggaccaaactctacgaggaccgctatgcactggctattttcctgaattatcggaaggatggtaactttgggctgcaggagctcggactgaagaatctaacagagattctgaatggcggagtctatgtggaccaaaacaagttcttgtgctacgccgataccatccattggcaggacatcgtgaggaacccttggccaagcaaccttacactcgtgtcgacgaatgggtcttcaggctgcggtcgctgtcacaagagctgcactggacggtgctgggggcctaccgagaatcactgccagacactcacgaggacagtttgtgccgagcagtgcgacgggaggtgttatggaccatatgtctctgactgttgtcaccgtgaatgtgccggaggctgttcaggtcccaaagacacagactgctttgcctgtatgaatttcaacgattccggggcatgcgtgacccaatgcccacagacgtttgtgtacaatcccacgacattccagttggagcacaacttcaatgccaaatatacctacggcgcattctgcgttaagaagtgcccacataatttcgtggtggactccagctcctgcgttagggcgtgcccttccagtaagatggaagtggaggaaaatgggatcaagatgtgcaagccgtgtacagatatctgtcctaaggcatgcgatggcatcggtacgggttctctgatgtccgctcagaccgtcgacagttctaacatcgacaagtttattaactgcactaagatcaatggcaatcttatattcttagtgactggcatccacggggacccatacaatgcaattgaggctattgatcccgagaagttgaacgtattccgcactgttcgagaaattacaggcttccttaacattcaatcatggccccctaacatgaccgacttctccgtgttctctaatcttgtgacaatcggcggtcgggtcctatattcgggcctgtctctgttaatcttgaaacaacagggcatcacatctcttcagtttcagtctttaaaggagatcagcgcaggcaatatttatattaccgacaactcaaatttatgctattatcataccatcaattggactactctattttctaccattaaccagcggattgtgatccgtgataataggaaggccgagaattgcacagccgaaggcatggtctgtaatcatttgtgctcgtcagatggctgttggggacctgggcctgaccagtgtctgtcgtgccgaaggtttagtcgcggaagaatctgcattgagtcatgcaatctgtacgatggagagttccgcgagtttgagaatggcagcatttgtgtggagtgtgatccccagtgtgaaaaaatggaggatggactgctcacttgtcatgggcctggccctgataattgcaccaaatgctcccacttcaaggatggcccaaactgtgtcgaaaaatgtcctgacgggttgcagggcgcaaactccttcatcttcaagtacgctgacccggaccgcgagtgccacccgtgccaccctaactgtacccagggatgtatcggctcttctatcgaggactgtatcgggttaatggatagaacacccctgattgcagccggagtgattggaggtttgtttatccttgtcatcgtggggctgaccttcgccgtctatgtccgcaggaaaagtatcaagaagaaacgagccctgcgaagatttctggaaactgaactagtcgagcccctgacaccatcaggtaccgcccctaatcaggcgcaactccgaatcttgaaagaaacagaactgaagcgcgtgaaagtactgggtagcggagcatttggtactgtgtataagggaatatgggtgcccgagggggaaaccgtgaagattcctgtagcaataaagatccttaacgagaccactggaccgaaggccaacgtcgaattcatggacgaggccctcatcatggcctccatggaccacccacatctggtgcggcttctcggcgtctgtctctcaccgaccattcagctcgtcacgcagctgatgccacatggatgccttttagaatacgtgcatgagcacaaagacaatatcgggtcccagttgctgctgaactggtgcgtccagattgccaaaggaatgatgtatctagaagagaggagattggtccatcgagaccttgcagcacggaacgtcctggtcaagtccccaaaccacgttaaaataacagattttgggctggcacggcttctcgagggcgatgagaaggagtacaacgcagatggaggtaaaatgcctatcaagtggatggcgttggagtgcatacattacagaaaattcactcatcagtcagatgtatggagttacggcgtgaccatctgggaactgatgaccttcggcggtaagccctacgacgggataccaacaagagaaatacccgacctgctggaaaagggcgagagactccctcagccccctatctgcaccatcgacgtctacatggtgatggtgaaatgttggatgatcgacgccgactcacgaccaaagtttaaagagctcgccgctgaattttcgaggatggccagagacccacaaaggtacctggtcattcaaggtgacgatcgcatgaaactgccatcccctaatgactctaaattcttccaaaatctgcttgacgaggaagacctggaggacatgatggacgcagaagaatatctcgtcccccaggcattcaacattccgccacccatctataccagccgcgcaagaatcgattccaacaggagcgagatcggccacagccccccaccagcctatactcctatgtcgggcaaccaattcgtgtacagagacggaggctttgctgctgaacagggggtcagtgtgccgtaccgagcacccaccagcaccattcctgaggccccagtggctcagggcgcaacagccgaaatattcgatgattcttgttgtaacggaaccctccgtaagcctgtcgcgccacatgtgcaagaggactcttctacccagcggtattctgcagatcccactgtgttcgccccagagagaagtcctagaggcgagctggacgaagaaggatatatgacccccatgcgcgacaagcccaaacaagagtacctgaatcccgtcgaagaaaatcctttcgtatcccggagaaagaatggagatctgcaggccctcgacaacccagagtaccacaacgcatccaacgggcctcccaaggccgaagacgaatatgttaacgagcctttatatctgaatacgttcgctaacacactgggcaaagccgaatatttaaagaataacatattaagcatgcccgagaaagccaaaaaagcatttgacaatcctgactattggaaccatagcctcccccctagaagcacgctccagcatcccgactacctgcaggagtatagtactaagtacttctataaacagaatgggaggattcgacccatagtggcggagaacccagagtacctgtctgaatttagccttaagcccggtactgttttgcccccacccccatacaggcataggaacactgtggtctag

SEQ ID NO: 267119 - DNA, 3897 bp, Artificial Sequence
  derived and/or modified sequence
atgaagccggcgacaggactttgggtctgggtgagccttctcgtggcggcggggaccgtccagcccagcgattctcagtcagtgtgtgcaggaacggagaataaactgagctctctctctgacctggaacagcagtaccgagccttgcgcaagtactatgaaaactgtgaggttgtcatgggcaacctggagataaccagcattgagcacaaccgggacctctccttcctgcggtctgttcgagaagtcacaggctacgtgttagtggctcttaatcagtttcgttacctgcctctggagaatttacgcattattcgtgggacaaaactttatgaggatcgatatgccttggcaatatttttaaactacagaaaagatggaaactttggacttcaagaacttggattaaagaacttgacagaaatcctaaatggtggagtctatgtagaccagaacaaattcctttgttatgcagacaccattcattggcaagatattgttcggaacccatggccttccaacttgactcttgtgtcaacaaatggtagttcaggatgtggacgttgccataagtcctgtactggccgttgctggggacccacagaaaatcattgccagactttgacaaggacggtgtgtgcagaacaatgtgacggcagatgctacggaccttacgtcagtgactgctgccatcgagaatgtgctggaggctgctcaggacctaaggacacagactgctttgcctgcatgaatttcaatgacagtggagcatgtgttactcagtgtccccaaacctttgtctacaatccaaccacctttcaactggagcacaatttcaatgcaaagtacacatatggagcattctgtgtcaagaaatgtccacataactttgtggtagattccagttcttgtgtgcgtgcctgccctagttccaagatggaagtagaagaaaatgggattaaaatgtgtaaaccttgcactgacatttgcccaaaagcttgtgatggcattggcacaggatcattgatgtcagctcagactgtggattccagtaacattgacaaattcataaactgtaccaagatcaatgggaatttgatctttctagtcactggtattcatggggacccttacaatgcaattgaagccatagacccagagaaactgaacgtctttcggacagtcagagagataacaggtttcctgaacatacagtcatggccaccaaacatgactgacttcagtgttttttctaacctggtgaccattggtggaagagtactctatagtggcctgtccttgcttatcctcaagcaacagggcatcacctctctacagttccagtccctgaaggaaatcagcgcaggaaacatctatattactgacaacagcaacctgtgttattatcataccattaactggacaacactcttcagcacaatcaaccagagaatagtaatccgggacaacagaaaagctgaaaattgtactgctgaaggaatggtgtgcaaccatctgtgttccagtgatggctgttggggacctgggccagaccaatgtctgtcgtgtcgccgcttcagtagaggaaggatctgcatagagtcttgtaacctctatgatggtgaatttcgggagtttgagaatggctccatctgtgtggagtgtgacccccagtgtgagaagatggaagatggcctcctcacatgccatggaccgggtcctgacaactgtacaaagtgctctcattttaaagatggcccaaactgtgtggaaaaatgtccagatggcttacagggggcaaacagtttcattttcaagtatgctgatccagatcgggagtgccacccatgccatccaaactgcacccaagggtgcataggctcaagtattgaagactgcatcggcctgatggatagaactcccctgattgcagctggagtaattggtgggctcttcattctggtcattgtgggtctgacatttgctgtttatgttagaaggaagagcatcaaaaagaaaagagccttgagaagattcttggaaacagagttggtggaaccattaactcccagtggcacagcacccaatcaagctcaacttcgtattttgaaagaaactgagctgaagagggtaaaagtccttggctcaggtgcttttggaacggtttataaaggtatttgggtacctgaaggagaaactgtgaagattcctgtggctattaagattcttaatgagacaactggtcccaaggcaaatgtggagttcatggatgaagctctgatcatggcaagtatggatcatccacacctagtccggttgctgggtgtgtgtctgagcccaaccatccagctggttactcaacttatgccccatggctgcctgttggagtatgtccacgagcacaaggataacattggatcacaactgctgcttaactggtgtgtccagatagctaagggaatgatgtacctggaagaaagacgactcgttcatcgggatttggcagcccgtaatgtcttagtgaaatctccaaaccatgtgaaaatcacagattttgggctagccagactcttggaaggagatgaaaaagagtacaatgctgatggaggaaagatgccaattaaatggatggctctggagtgtatacattacaggaaattcacccatcagagtgacgtttggagctatggagttactatatgggaactgatgacctttggaggaaaaccctatgatggaattccaacgcgagaaatccctgatttattagagaaaggagaacgtttgcctcagcctcccatctgcactattgacgtttacatggtcatggtcaaatgttggatgattgatgctgacagtagacctaaatttaaggaactggctgctgagttttcaaggatggctcgagaccctcaaagatacctagttattcagggtgatgatcgtatgaagcttcccagtccaaatgacagcaagttctttcagaatctcttggatgaagaggatttggaagatatgatggatgctgaggagtacttggtccctcaggctttcaacatcccacctcccatctatacttccagagcaagaattgactcgaataggagtgaaattggacacagccctcctcctgcctacacccccatgtcaggaaaccagtttgtataccgagatggaggttttgctgctgaacaaggagtgtctgtgccctacagagccccaactagcacaattccagaagctcctgtggcacagggtgctactgctgagatttttgatgactcctgctgtaatggcaccctacgcaagccagtggcaccccatgtccaagaggacagtagcacccagaggtacagtgctgaccccaccgtgtttgccccagaacggagcccacgaggagagctggatgaggaaggttacatgactcctatgcgagacaaacccaaacaagaatacctgaatccagtggaggagaacccttttgtttctcggagaaaaaatggagaccttcaagcattggataatcccgaatatcacaatgcatccaatggtccacccaaggccgaggatgagtatgtgaatgagccactgtacctcaacacctttgccaacaccttgggaaaagctgagtacctgaagaacaacatactgtcaatgccagagaaggccaagaaagcgtttgacaaccctgactactggaaccacagcctgccacctcggagcacccttcagcacccagactacctgcaggagtacagcacaaaatatttttataaacagaatgggcggatccggcctattgtggcagagaatcctgaatacctctctgagttctccctgaagccaggcactgtgctgccgcctccaccttacagacaccggaatactgtggtgtaa

SEQ ID NO: 267120 - DNA, 2196 bp, Artificial Sequence
  derived and/or modified sequence
tgaaagcccgccaccggcctgtgggtgtgggtgagcctgctggtggccgccggcaccgtgcagcccagcgacagccagagcgtgtgcgccggcaccgagaacaagctgagcagcctgagcgacctggagcagcagtacagagccctgagaaagtactacgagaactgcgaggtggtgatgggcaacctggagatcaccagcatcgagcacaacagagacctgagcttcctgagaagcgtgagagaggtgaccggctacgtgctggtggccctgaaccagttcagatacctgcccctggagaacctgagaatcatcagaggcaccaagctgtacgaggacagatacgccctggccatcttcctgaactacagaaaggacggcaacttcggcctgcaggagctgggcctgaagaacctgaccgagatcctgaacggcggcgtgtacgtggaccagaacaagttcctgtgctacgccgacaccatccactggcaggacatcgtgagaaacccctggcccagcaacctgaccctggtgagcaccaacggcagcagcggctgcggcagatgccacaagagctgcaccggcagatgctggggccccaccgagaaccactgccagaccctgaccagaaccgtgtgcgccgagcagtgcgacggcagatgctacggcccctacgtgagcgactgctgccacagagagtgcgccggcggctgcagcggccccaaggacaccgactgcttcgcctgcatgaacttcaacgacagcggcgcctgcgtgacccagtgcccccagaccttcgtgtacaaccccaccaccttccagctggagcacaacttcaacgccaagtacacctacggcgccttctgcgtgaagaagtgcccccacaacttcgtggtggacagcagcagctgcgtgagagcctgccccagcagcaagatggaggtggaggagaacggcatcaagatgtgcaagccctgcaccgacatctgccccaaggcctgcgacggcatcggcaccggcagcctgatgagcgcccagaccgtggacagcagcaacatcgacaagttcatcaactgcaccaagatcaacggcaacctgatcttcctggtgaccggcatccacggcgacccctacaacgccatcgaggccatcgaccccgagaagctgaacgtgttcagaaccgtgagagagatcaccggcttcctgaacatccagagctggccccccaacatgaccgacttcagcgtgttcagcaacctggtgaccatcggcggcagagtgctgtacagcggcctgagcctgctgatcctgaagcagcagggcatcaccagcctgcagttccagagcctgaaggagatcagcgccggcaacatctacatcaccgacaacagcaacctgtgctactaccacaccatcaactggaccaccctgttcagcaccatcaaccagagaatcgtgatcagagacaacagaaaggccgagaactgcaccgccgagggcatggtgtgcaaccacctgtgcagcagcgacggctgctggggccccggccccgaccagtgcctgagctgcagaagattcagcagaggcagaatctgcatcgagagctgcaacctgtacgacggcgagttcagagagttcgagaacggcagcatctgcgtggagtgcgacccccagtgcgagaagatggaggacggcctgctgacctgccacggccccggccccgacaactgcaccaagtgcagccacttcaaggacggccccaactgcgtggagaagtgccccgacggcctgcagggcgccaacagcttcatcttcaagtacgccgaccccgacagagagtgccacccctgccaccccaactgcacccagggctgcatcggcagcagcatcgaggactgcatcggcctgatggacagaacccccctgatcgccgccggcgtgatcggcggcctgttcatcctggtgatcgtgggcctgaccttcgccgtgtacgtgagaagaaagagcatcaagaagaagagagccctgagaagattcctggagaccgagctggtggagcccctgacccccagcggcaccgcccccaaccaggcccagctgagaatcctgaaggagaccgagctgaagagagtgaaggtgctgggcagcggcgccttcggcaccgtgtacaagggcatctgggtgcccgagggctag

SEQ ID NO: 267121 - DNA, 387 bp, Artificial Sequence
  derived and/or modified sequence
atgggcaacctggagatcaccagcatcgagcacaacagagacctgagcttcctgagaagcgtgagagaggtgaccggctacgtgctggtggccctgaaccagttcagatacctgcccctggagaacctgagaatcatcagaggcaccaagctgtacgaggacagatacgccctggccatcttcctgaactacagaaaggacggcaacttcggcctgcaggagctgggcctgaagaacctgaccgagatcctgaacggcggcgtgtacgtggaccagaacaagttcctgtgctacgccgacaccatccactggcaggacatcgtgagaaacccctggcccagcaacctgaccctggtgagcaccaacggcagcagcggctgcggctag

SEQ ID NO: 267122 - DNA, 2196 bp, Artificial Sequence
  derived and/or modified sequence
tgaaagcctgctacaggactctgggtgtgggtcagtctgctagtcgctgccggcactgtgcagccctccgattcacagtccgtctgtgccggaaccgagaacaagttaagctctctttctgatctcgagcaacaataccgtgctttacgcaagtactatgagaattgtgaagtcgtgatgggtaatctggaaatcacatctattgagcacaatcgcgaccttagctttctgcgctctgtgcgcgaagtgacaggttatgttctagtggcactgaaccaattccgttacctgccgctggagaacctgaggattattaggggcacgaaactgtacgaagaccgttacgccttagcaatttttttgaattatcgcaaggatggtaatttcggcctccaggagttaggcctcaaaaacctcaccgagatactgaatggtggtgtttacgtcgaccaaaacaagttcctgtgctatgccgataccatacactggcaggatattgtgcgaaatccatggcccagtaatctcaccctggtctccaccaatggatctagtggatgtgggaggtgtcacaagagttgcacaggacggtgttggggccctaccgaaaaccactgccaaaccctgactcggactgtctgcgcagagcagtgcgatggccgctgttacggcccttacgtttctgattgctgccatcgggagtgcgctggcggttgtagcgggcccaaggacaccgactgctttgcctgtatgaatttcaacgattcgggtgcctgcgttacacaatgtccgcagacgtttgtttataaccccacgacatttcagctagagcacaactttaacgccaaatacacctatggggccttctgtgttaagaaatgtccgcataacttcgtggtggattcaagcagctgcgtgagagcctgccctagctcaaaaatggaggtggaggagaatgggatcaaaatgtgtaagccttgtactgacatatgtcccaaggcatgcgatggtatcggcactggatcgctgatgtcagcccaaacagttgattcctcaaatattgacaagttcataaattgtactaagattaatgggaatttgatttttcttgtgacaggaatccatggggacccatacaacgccatagaggcgattgaccccgagaagctgaatgtgttccggacagtacgggagataaccggatttcttaatattcagagttggccaccaaatatgactgacttctccgtcttcagcaacctggtaacaatcggtggacgcgtcttatattcggggctgagtctcttgatcctgaaacagcaggggatcacatcgctgcagttccaatctcttaaggaaatttctgctgggaatatctacatcaccgacaacagcaatctgtgctattatcacacaattaactggacaactcttttctccaccatcaatcagagaatcgtgatccgggataacagaaaggcagagaattgtacagcggaaggaatggtttgtaatcacctgtgctcctcagacggatgctggggcccaggacccgatcagtgcctgagctgccgacgcttctcaaggggccgcatatgcatagagtcatgcaacctgtatgatggtgaatttcgggagtttgaaaatgggagcatctgtgtcgagtgtgacccacagtgtgagaaaatggaagatggactgttgacatgccacggtcccggccccgataattgcactaaatgttctcatttcaaagatgggcctaactgtgtggaaaagtgccccgatggattgcagggggccaattcttttatctttaaatacgccgacccagatagggagtgtcacccctgccatccaaattgtacccagggatgtatcggcagctccatcgaggattgtatcgggctgatggacaggacgccattgatcgctgctggcgtgatagggggcctgttcatcctggtgattgtcggtctcaccttcgccgtgtacgttaggaggaaatctatcaaaaaaaagcgagctctgcgacggttccttgagaccgagctggtggaacctctgaccccctcagggactgctccaaatcaggcgcagctgcgaatcttgaaggagactgagctaaagagggttaaggtgctaggcagcggggcgttcggcactgtgtacaaaggcatctgggtcccagagggctag

SEQ ID NO: 267123 - DNA, 387 bp, Artificial Sequence
  derived and/or modified sequence
atgggaaatctcgaaattaccagcatcgaacacaaccgggacctcagctttcttagatctgttagggaagtcacaggatacgttcttgttgcgttgaatcagttcagatatcttccgctggaaaacctgagaataatcagggggacaaagctgtatgaggaccgctatgcacttgccatttttctcaattatcgtaaagatggcaatttcgggctgcaggaactgggtctaaaaaacctcacagaaattttgaatgggggcgtctatgtcgatcaaaacaagtttctctgttatgccgacaccatccactggcaggacattgtaaggaatccttggccttcaaacctgacgttagtcagcaccaacggcagcagtggatgcgggtag

SEQ ID NO: 267124 - DNA, 2196 bp, Artificial Sequence
  derived and/or modified sequence
tgaaaaccagccaccggcctgtgggtgtgggtgtccctgctggtggccgccggcaccgtgcagcccagcgacagccagagcgtgtgtgccggcacagagaacaagctgagcagcctgagtgacctggagcagcagtaccgggccctgaggaagtactatgagaactgtgaggtggtgatgggcaacctggagatcaccagcattgagcacaacagagacctgtccttcctgcggtctgtgcgggaggtgacaggctacgtgctggtggccctgaaccagttccgctacctgcccctggagaacctgcgcatcatccggggcaccaagctgtatgaggacagatatgccctggccatcttcctgaactacaggaaggatggcaactttggcctgcaggagctgggcctgaagaacctgacagagatcctgaatggaggagtgtatgtggaccagaacaagttcctgtgctacgccgacaccatccactggcaggacatcgtgaggaacccctggcccagcaacctgaccctggtgtccaccaacggcagcagcggctgcggccgctgccacaagagctgcaccggccgctgctggggccccacagagaaccactgccagaccctgaccaggacagtgtgtgccgagcagtgtgatggccgctgctacggcccctacgtgtctgactgctgccacagagaatgtgccggcggctgcagcggccccaaggacacagactgctttgcctgcatgaacttcaatgattctggggcctgtgtgacccagtgcccccagacctttgtgtacaaccccaccaccttccagctggagcacaacttcaatgccaagtacacctatggagccttctgtgtgaagaagtgcccccacaactttgtggtggacagcagcagctgtgtgcgggcctgccccagcagcaagatggaggtggaggagaatggcatcaagatgtgcaagccctgcacagacatctgccccaaggcctgtgatggcattggaacaggcagcctgatgtctgcccagacagtggacagcagcaacatcgacaagttcatcaactgcaccaagatcaatggaaacctgatcttcctggtgacaggcatccacggggacccctacaatgccatcgaggccatcgaccctgagaagctgaatgtgttcagaacagtgcgggagatcaccggcttcctgaacatccagagctggccacccaacatgacagacttctctgtgttcagcaacctggtgaccatcggcggccgggtgctgtacagcggcctgagcctgctgatcctgaagcagcagggcatcaccagcctgcagttccagagcctgaaggagatctctgctggcaacatctacatcacagacaacagcaacctgtgctactaccacaccatcaactggaccaccctcttcagcaccatcaaccagagaattgtcatccgggacaacaggaaggccgagaactgcacagctgagggcatggtgtgcaaccacctgtgcagcagtgatggctgctggggccctggccctgaccagtgcctgagctgccgccgcttcagccggggccgcatctgcatcgagagctgcaacctgtatgatggagagttccgggagtttgaaaatggcagcatctgtgtggagtgtgacccccagtgtgagaagatggaggatggcctgctgacctgccacggccctggccctgacaactgcaccaagtgcagccacttcaaggatggccccaactgtgtggagaagtgcccagatggcctgcagggcgccaacagcttcatcttcaagtatgctgaccctgaccgggagtgccacccctgccaccccaactgcacccagggctgcatcggcagcagcattgaggactgcatcggcctgatggacaggacccccctgattgctgctggggtcatcggcggcctcttcatcctggtgattgtgggcctgacctttgctgtgtatgtgcggaggaagagcatcaagaagaagagggccctgcggcgcttcctggagacagagctggtggagcccctgaccccatctggaacagcccccaaccaggcccagctgcgcatcctgaaggagacagagctgaagagggtgaaggtgctgggcagcggggcctttggaacagtgtacaagggcatctgggtgcctgagggctag

SEQ ID NO: 267125 - DNA, 387 bp, Artificial Sequence
  derived and/or modified sequence
atgggcaacctggagatcaccagcattgagcacaacagagacctgtccttcctgcggtctgtgcgggaggtgacaggctacgtgctggtggccctgaaccagttccgctacctgcccctggagaacctgcgcatcatccggggcaccaagctgtatgaagatagatatgccctggccatcttcctgaactacaggaaggatggcaactttggcctgcaggagctgggcctgaagaacctgacagagatcctgaatggaggagtgtatgtggaccagaacaagttcctgtgctatgctgacaccatccactggcaggacatcgtgaggaacccctggcccagcaacctgaccctggtgtccaccaacggcagcagcggctgcggctag

SEQ ID NO: 267126 - DNA, 2196 bp, Artificial Sequence
  derived and/or modified sequence
tgaaagcccgccaccggcctgtgggtgtgggtgagcctgctggtggccgcagggacggtccagccctctgacagccagtcagtgtgcgccggcacagagaataagctttcatccctgagcgatctggagcagcagtaccgggctctcagaaaatactacgaaaactgcgaggtagttatgggcaatcttgagatcactagtattgaacataaccgggacctgtcatttctgcgaagcgtacgggaggtcactggctatgtccttgtcgcgctaaaccagtttcgctaccttccactcgagaaccttaggatcattaggggaactaagctttacgaggatagatatgcgctggcgattttcttgaactataggaaggatggcaacttcgggctgcaggagctcggccttaaaaaccttaccgagattctgaatggcggcgtatatgtggaccaaaataaatttctgtgttatgccgatactatccactggcaagacatcgtcaggaacccatggccatctaacctgactctggtctctacgaacggatccagcggctgcggaaggtgccacaaatcctgcaccggtcgctgttggggtcccacagagaatcattgccaaaccttaacccggacagtttgcgcagaacagtgtgacggtcgatgttacggcccctacgtgtctgactgctgtcacagagagtgcgccggtggctgttctgggccaaaagatactgattgcttcgcttgtatgaacttcaatgacagtggcgcttgcgtcactcagtgcccgcaaacattcgtctataatcccacaaccttccagttagagcacaactttaacgctaaatatacctacggagccttttgtgtcaagaagtgccctcataacttcgtcgttgactcgtccagttgcgtgcgtgcttgcccaagcagcaagatggaggtggaggagaatggcattaaaatgtgcaagccatgtaccgatatttgccccaaggcttgcgatgggatcggcactggttcccttatgtctgctcaaacagtggactcatccaatatcgataaatttattaattgcaccaagattaacgggaacttgatttttttggtcaccggaattcatggcgatccctataatgcaattgaagccatcgaccctgaaaaattgaatgtttttcggacagtccgagaaattactggtttcctaaacatacagagctggccgcctaacatgaccgacttctctgtcttctctaatctggtcacaatcggtggcagggtgctctatagcgggcttagccttttgatcctgaaacagcagggaatcacctcgctgcaatttcaatctctcaaagagatctccgccgggaatatatatatcaccgataattcaaacctgtgctattatcatactataaactggaccaccctcttttccacaataaaccagcgaattgttatcagagataaccggaaagcagaaaactgtacagccgaaggcatggtgtgcaaccatctgtgcagttcagacgggtgctggggcccaggccctgaccaatgcttgtcctgtaggcgattcagccgcggcaggatttgtattgagtcatgcaatctttatgacggcgaattccgggagtttgagaatggatccatttgcgtggaatgcgatccacagtgcgagaaaatggaagacggccttctgacttgtcatggacctggacccgacaattgcaccaagtgctcccactttaaagatggccctaactgtgtggagaaatgtcccgacgggctgcagggcgcaaactctttcatttttaagtatgcagatccggatagagaatgccacccttgtcatccaaattgcactcagggctgcatcggctcaagcatcgaggattgcataggactgatggatcggactcccctgatagccgccggtgtaattggcggtctcttcatcctcgtaatcgtggggctgactttcgctgtctatgtcaggagaaagtccattaagaaaaaaagagccttgcggcggttcttggagactgagctggtggaacctctgacaccatcggggactgccccaaatcaggctcagctgcgcatattgaaagagactgagctgaagcgagtcaaggtgctggggtctggagctttcgggactgtctacaaagggatttgggtgccagaggggtag

SEQ ID NO: 267127 - DNA, 387 bp, Artificial Sequence
  derived and/or modified sequence
atgggcaacctggagatcaccagcatcgagcacaaccgggacctgtcattcctgcgaagcgtgcgcgaagtgacaggttatgttctggtcgctcttaatcaattccggtatttacctttggagaatttgagaatcattagaggcaccaaactgtatgaggatagatatgcccttgctatattcctaaactatagaaaggacggcaactttgggctccaggagctgggattgaagaacctgaccgagatcctcaacggcggagtgtatgtggatcagaacaagttcttgtgctatgccgacactattcattggcaggacatcgtgcgtaacccgtggccgtcgaacctgaccctcgtgagcacaaatggcagtagcgggtgtggctag

SEQ ID NO: 267128 - DNA, 2196 bp, Artificial Sequence
  derived and/or modified sequence
tgaaaacctgccaccggcctatgggtgtgggtcagcctactcgtggccgctgggacagtacagccctccgacagccaatccgtatgcgcaggcaccgaaaataagctgagctccctctcagacttggagcagcagtatcgggcactccgcaaatactacgaaaactgtgaggtggtcatgggtaacctcgagattacaagcatagaacacaatagagatttgtctttcctccgctcggtaagagaggtcactggatacgtcctggtggcccttaatcagtttaggtacctgccactggagaacctgcgaatcattagggggactaagttatacgaggacaggtacgccttggcgatctttctgaattaccgaaaagatgggaatttcggcctacaggaactgggcctaaagaaccttacagagattctgaatgggggagtgtacgttgatcaaaacaagtttctttgttacgcggatacgatccactggcaagacatagtgcggaatccatggccttctaatttgacgctagtgagcacgaacggtagttccggctgtgggaggtgtcacaagagctgcaccggacggtgttggggacctactgagaatcattgccagacattaacaagaacggtgtgtgccgaacaatgcgatggtaggtgctacggtccctacgtcagtgactgttgccatcgggagtgcgccggaggttgtagcggtcccaaagatacggactgcttcgcctgcatgaacttcaatgactcaggcgcttgcgtcacgcagtgccctcaaacctttgtctacaacccaaccaccttccagttggagcataactttaacgcaaagtacacctatggagccttctgtgttaagaagtgcccacacaactttgtggtggattcatcatcatgtgtacgcgcatgtccgagcagcaaaatggaagtcgaggagaacggcatcaagatgtgcaagccatgtaccgacatctgtccaaaagcctgcgatggtatagggacaggctccctgatgagtgcccaaacagtggattcaagcaacatagacaaatttataaactgcacgaagatcaacgggaatctgatcttcctggtaaccggtattcacggcgacccatacaatgcgatcgaagctattgaccctgaaaaactgaatgtcttccgcaccgtgagagaaatcacaggctttctcaatatccagagttggcctccaaatatgaccgattttagcgtgttctcaaacctggtcaccataggtggacgtgtcctgtatagtggactgagccttctgatattgaagcaacagggcataacgagcctgcaatttcagtccctgaaagagatcagtgctgggaatatttacatcactgataactccaatttgtgttattaccacactattaactggaccacactcttttcaacaatcaatcagcgcatagtgatacgggacaaccgcaaagctgaaaattgtaccgctgaagggatggtatgcaaccacctgtgttccagcgacggttgctgggggccaggcccagaccagtgcctgtcctgccgtaggttctcacgaggacggatatgtattgaatcgtgcaacctgtatgatggagagtttagagaatttgaaaatggcagcatttgcgtcgaatgcgacccgcaatgcgagaagatggaggacggactgcttacctgccatgggccaggcccagacaattgtacgaagtgtagccattttaaggatgggccaaattgcgttgagaagtgccccgacggtctgcagggcgctaattctttcatttttaagtatgcagatcccgaccgagaatgccacccctgtcacccgaattgtacccaaggctgcatcggtagtagtattgaagattgcatcggcttgatggacagaacgcctcttatcgccgcaggggtcattggcggtctgtttatcctcgttattgtcgggttgaccttcgcagtttacgtgagacgtaagagcattaagaagaagagagccctgcgtcggtttctggaaacagagctggtggaaccactgacccccagcgggacggccccaaaccaagcacagctgaggatcctgaaggagacagaactcaagagagttaaagtgcttgggtccggcgcattcggcactgtgtacaagggtatctgggtccctgaagggtag

SEQ ID NO: 267129 - DNA, 387 bp, Artificial Sequence
  derived and/or modified sequence
atggggaacctagaaataacaagcattgaacataatcgggacttatccttcctgcggagcgtgagagaggtcactgggtatgttctcgtggctctcaaccagtttcggtatcttccactggagaacttacggattattcgcggaacaaagctgtatgaggatcgttacgctctcgccatctttctaaattacagaaaggacggcaatttcggcctccaggaactgggtttgaaaaatttgactgagatcctcaacggaggtgtgtacgtcgaccagaataaatttttgtgctacgccgacaccatacactggcaggatattgtgcgcaacccctggccttccaatctgactcttgtgtctactaatggatcaagtggctgcggttag

SEQ ID NO: 267130 - DNA, 2194 bp, Artificial Sequence
  derived and/or modified sequence
tgaagccggcgacaggactttgggtctgggtgagccttctcgtggcggcggggaccgtccagcccagcgattctcagtcagtgtgtgcaggaacggagaataaactgagctctctctctgacctggaacagcagtaccgagccttgcgcaagtactatgaaaactgtgaggttgtcatgggcaacctggagataaccagcattgagcacaaccgggacctctccttcctgcggtctgttcgagaagtcacaggctacgtgttagtggctcttaatcagtttcgttacctgcctctggagaatttacgcattattcgtgggacaaaactttatgaggatcgatatgccttggcaatatttttaaactacagaaaagatggaaactttggacttcaagaacttggattaaagaacttgacagaaatcctaaatggtggagtctatgtagaccagaacaaattcctttgttatgcagacaccattcattggcaagatattgttcggaacccatggccttccaacttgactcttgtgtcaacaaatggtagttcaggatgtggacgttgccataagtcctgtactggccgttgctggggacccacagaaaatcattgccagactttgacaaggacggtgtgtgcagaacaatgtgacggcagatgctacggaccttacgtcagtgactgctgccatcgagaatgtgctggaggctgctcaggacctaaggacacagactgctttgcctgcatgaatttcaatgacagtggagcatgtgttactcagtgtccccaaacctttgtctacaatccaaccacctttcaactggagcacaatttcaatgcaaagtacacatatggagcattctgtgtcaagaaatgtccacataactttgtggtagattccagttcttgtgtgcgtgcctgccctagttccaagatggaagtagaagaaaatgggattaaaatgtgtaaaccttgcactgacatttgcccaaaagcttgtgatggcattggcacaggatcattgatgtcagctcagactgtggattccagtaacattgacaaattcataaactgtaccaagatcaatgggaatttgatctttctagtcactggtattcatggggacccttacaatgcaattgaagccatagacccagagaaactgaacgtctttcggacagtcagagagataacaggtttcctgaacatacagtcatggccaccaaacatgactgacttcagtgttttttctaacctggtgaccattggtggaagagtactctatagtggcctgtccttgcttatcctcaagcaacagggcatcacctctctacagttccagtccctgaaggaaatcagcgcaggaaacatctatattactgacaacagcaacctgtgttattatcataccattaactggacaacactcttcagcacaatcaaccagagaatagtaatccgggacaacagaaaagctgaaaattgtactgctgaaggaatggtgtgcaaccatctgtgttccagtgatggctgttggggacctgggccagaccaatgtctgtcgtgtcgccgcttcagtagaggaaggatctgcatagagtcttgtaacctctatgatggtgaatttcgggagtttgagaatggctccatctgtgtggagtgtgacccccagtgtgagaagatggaagatggcctcctcacatgccatggaccgggtcctgacaactgtacaaagtgctctcattttaaagatggcccaaactgtgtggaaaaatgtccagatggcttacagggggcaaacagtttcattttcaagtatgctgatccagatcgggagtgccacccatgccatccaaactgcacccaagggtgcataggctcaagtattgaagactgcatcggcctgatggatagaactcccctgattgcagctggagtaattggtgggctcttcattctggtcattgtgggtctgacatttgctgtttatgttagaaggaagagcatcaaaaagaaaagagccttgagaagattcttggaaacagagttggtggaaccattaactcccagtggcacagcacccaatcaagctcaacttcgtattttgaaagaaactgagctgaagagggtaaaagtccttggctcaggtgcttttggaacggtttataaaggtatttgggtacctgaaggaga

SEQ ID NO: 267131 - DNA, 569 bp, Artificial Sequence
  derived and/or modified sequence
atttgttctcctggttccctctctgtgagatcttcttaatctgtgtctttcaagggaaggtcattgctgctctgaaggaagctgcattttgtgtgcaggaacggagaataaactgagctctctctctgacctggaacagcagtaccgagccttgcgcaagtactatgaaaactgtgaggttgtcatgggcaacctggagataaccagcattgagcacaaccgggacctctccttcctgcggtctgttcgagaagtcacaggctacgtgttagtggctcttaatcagtttcgttacctgcctctggagaatttacgcattattcgtgggacaaaactttatgaggatcgatatgccttggcaatatttttaaactacagaaaagatggaaactttggacttcaagaacttggattaaagaacttgacagaaatcctaaatggtggagtctatgtagaccagaacaaattcctttgttatgcagacaccattcattggcaagatattgttcggaacccatggccttccaacttgactcttgtgtcaacaaatggtagttcaggatgtggac

SEQ ID NO: 267132 - protein, 378 aa, Artificial Sequence
  derived and/or modified sequence
MEVKPPPGRPQPDSGRRRRRRGEEGHDPKEPEQLRKLFIGGLSFETTDDSLREHFEKWGTLTDCVVMRDPQTKRSRGFGFVTYSCVEEVDAAMCARPHKVDGRVVEPKRAVSREDSVKPGAHLTVKKIFVGGIKEDTEEYNLRDYFEKYGKIETIEVMEDRQSGKKRGFAFVTFDDHDTVDKIVVQKYHTINGHNCEVKKALSKQEMQSAGSQRGRGGGSGNFMGRGGNFGGGGGNFGRGGNFGGRGGYGGGGGGSRGSYGGGDGGYNGFGGDGGNYGGGPGYSSRGGYGGGGPGYGNQGGGYGGGGGYDGYNEGGNFGGGNYGGGGNYNDFGNYSGQQQSNYGPMKGGSFGGRSSGSPYGGGYGSGGGSGGYGSRRF

SEQ ID NO: 267133 - protein, 356 aa, Artificial Sequence
  derived and/or modified sequence
MEGHDPKEPEQLRKLFIGGLSFETTDDSLREHFEKWGTLTDCVVMRDPQTKRSRGFGFVTYSCVEEVDAAMCARPHKVDGRVVEPKRAVSREDSVKPGAHLTVKKIFVGGIKEDTEEYNLRDYFEKYGKIETIEVMEDRQSGKKRGFAFVTFDDHDTVDKIVVQKYHTINGHNCEVKKALSKQEMQSAGSQRGRGGGSGNFMGRGGNFGGGGGNFGRGGNFGGRGGYGGGGGGSRGSYGGGDGGYNGFGGDGGNYGGGPGYSSRGGYGGGGPGYGNQGGGYGGGGGYDGYNEGGNFGGGNYGGGGNYNDFGNYSGQQQSNYGPMKGGSFGGRSSGSPYGGGYGSGGGSGGYGSRRF

SEQ ID NO: 267134 - protein, 323 aa, Artificial Sequence
  derived and/or modified sequence
MEGHDPKEPEQLRKLFIGGLSFETTDDSLREHFEKWGTLTDCVVMRDPQTKRSRGFGFVTYSCVEEVDAAMCARPHKVDGRVVEPKRAVSREDSVKPGAHLTVKKIFVGGIKEDTEEYNLRDYFEKYGKIETIEVMEDRQSGKKRGFAFVTFDDHDTVDKIVVQKYHTINGHNCEVKKALSKQEMQSAGSQRGRGGGSGNFMGRGGNFGGGGGNFGRGGGNYGGGPGYSSRGGYGGGGPGYGNQGGGYGGGGGYDGYNEGGNFGGGNYGGGGNYNDFGNYSGQQQSNYGPMKGGSFGGRSSGSPYGGGYGSGGGSGGYGSRRF

SEQ ID NO: 267135 - DNA, 1071 bp, Artificial Sequence
  derived and/or modified sequence
atggagggccacgaccccaaggagcccgagcagctgagaaagctgttcatcggcggcctgagcttcgagaccaccgacgacagcctgagagagcacttcgagaagtggggcaccctgaccgactgcgtggtgatgagagacccccagaccaagagaagcagaggcttcggcttcgtgacctacagctgcgtggaggaggtggacgccgccatgtgcgccagaccccacaaggtggacggcagagtggtggagcccaagagagccgtgagcagagaggacagcgtgaagcccggcgcccacctgaccgtgaagaagatcttcgtgggcggcatcaaggaggacaccgaggagtacaacctgagagactacttcgagaagtacggcaagatcgagaccatcgaggtgatggaggacagacagagcggcaagaagagaggcttcgccttcgtgaccttcgacgaccacgacaccgtggacaagatcgtggtgcagaagtaccacaccatcaacggccacaactgcgaggtgaagaaggccctgagcaagcaggagatgcagagcgccggcagccagagaggcagaggcggcggcagcggcaacttcatgggcagaggcggcaacttcggcggcggcggcggcaacttcggcagaggcggcaacttcggcggcagaggcggctacggcggcggcggcggcggcagcagaggcagctacggcggcggcgacggcggctacaacggcttcggcggcgacggcggcaactacggcggcggccccggctacagcagcagaggcggctacggcggcggcggccccggctacggcaaccagggcggcggctacggcggcggcggcggctacgacggctacaacgagggcggcaacttcggcggcggcaactacggcggcggcggcaactacaacgacttcggcaactacagcggccagcagcagagcaactacggccccatgaagggcggcagcttcggcggcagaagcagcggcagcccctacggcggcggctacggcagcggcggcggcagcggcggctacggcagcagaagattctag

SEQ ID NO: 267136 - DNA, 972 bp, Artificial Sequence
  derived and/or modified sequence
atggagggccacgaccccaaggagcccgagcagctgagaaagctgttcatcggcggcctgagcttcgagaccaccgacgacagcctgagagagcacttcgagaagtggggcaccctgaccgactgcgtggtgatgagagacccccagaccaagagaagcagaggcttcggcttcgtgacctacagctgcgtggaggaggtggacgccgccatgtgcgccagaccccacaaggtggacggcagagtggtggagcccaagagagccgtgagcagagaggacagcgtgaagcccggcgcccacctgaccgtgaagaagatcttcgtgggcggcatcaaggaggacaccgaggagtacaacctgagagactacttcgagaagtacggcaagatcgagaccatcgaggtgatggaggacagacagagcggcaagaagagaggcttcgccttcgtgaccttcgacgaccacgacaccgtggacaagatcgtggtgcagaagtaccacaccatcaacggccacaactgcgaggtgaagaaggccctgagcaagcaggagatgcagagcgccggcagccagagaggcagaggcggcggcagcggcaacttcatgggcagaggcggcaacttcggcggcggcggcggcaacttcggcagaggcggcggcaactacggcggcggccccggctacagcagcagaggcggctacggcggcggcggccccggctacggcaaccagggcggcggctacggcggcggcggcggctacgacggctacaacgagggcggcaacttcggcggcggcaactacggcggcggcggcaactacaacgacttcggcaactacagcggccagcagcagagcaactacggccccatgaagggcggcagcttcggcggcagaagcagcggcagcccctacggcggcggctacggcagcggcggcggcagcggcggctacggcagcagaagattctag

SEQ ID NO: 267137 - DNA, 1071 bp, Artificial Sequence
  derived and/or modified sequence
atggagggacacgatcctaaagaaccagagcagctgagaaagctgttcatcggaggattgtccttcgaaactacggatgactccctgcgagagcattttgagaaatggggcaccctaaccgattgtgtagtcatgcgagatccgcaaactaaacggtcgaggggattcgggttcgtcacatattcctgtgtggaagaggtggacgccgcaatgtgcgccaggccacacaaagtggacgggcgggtcgtggagccaaagcgcgccgtttctcgggaggactccgtgaagccaggcgctcatctcaccgtaaagaagatcttcgtgggaggcatcaaggaggatactgaagagtataacctacgggactactttgagaagtacggcaagatcgagactatagaggtgatggaagaccgtcaaagcgggaaaaagcgtggctttgccttcgtgactttcgacgaccatgacacagtggacaaaattgtggtacagaaatatcatacaataaacggacataactgcgaagtaaagaaggcgctttctaaacaggagatgcagagcgcaggctcccagcggggaaggggtggagggtctggaaatttcatgggcagaggcggtaacttcggcgggggtggcggcaactttggaagggggggtaactttggcggacgcggtggctacggcggtggaggaggaggtagcaggggcagttacggcggcggggacggcggttataacgggttcggcggcgatgggggaaactatggaggggggcctggatattcaagccggggtggctacggcggcggaggacccggctatgggaatcagggcggaggttacggcggcgggggggggtacgacggttataacgagggaggcaacttcggtggcggaaactacgggggcggtgggaactacaacgacttcgggaattactcgggtcagcagcagagcaactatggacctatgaaaggaggttcgttcggaggcaggtcaagcggatcgccctacggaggtggttacgggtccggcggtggttccggcggatatggttcgcgccggttctag

SEQ ID NO: 267138 - DNA, 972 bp, Artificial Sequence
  derived and/or modified sequence
atggagggtcacgatcccaaggaaccagagcaactacgcaaactgttcattggggggctgtcctttgaaacgaccgatgattccctccgcgaacattttgaaaagtgggggacactcaccgactgcgtcgttatgagagatcctcagaccaagcggtccagggggttcggttttgtgacctacagctgcgttgaggaagtagacgcggcgatgtgtgctcgtccccacaaagtcgatggtagagttgtggaaccgaagcgcgccgtctctcgcgaagattctgtgaaaccaggagcgcacttaacagttaagaagatcttcgttggcggaattaaggaggatactgaggaatataacctcagagattatttcgagaagtacggaaaaattgagaccatcgaagtcatggaggatagacagtccggtaagaagaggggctttgccttcgtcaccttcgacgaccacgacaccgtggataaaatcgtcgtgcagaaataccatacaataaacggccataattgtgaggttaagaaggctctcagcaagcaggagatgcagtccgccggctcacagaggggaagagggggggggtcaggaaatttcatgggcagaggcgggaatttcggaggcgggggagggaacttcgggaggggcggcggaaattatggggggggacccggctactcgagccgagggggatatggagggggcggtcctggctacggaaaccagggcggtgggtacggcggtggggggggatacgacgggtacaatgagggaggcaacttcggcggcggcaattacggagggggggggaactataatgatttcggaaattactctggacagcaacagtctaactacgggcctatgaagggcggatccttcggcggtaggtcatccggttcaccgtatggcggaggctacggaagtgggggcggaagtggcggttacggtagccgacgcttctag

SEQ ID NO: 267139 - DNA, 1071 bp, Artificial Sequence
  derived and/or modified sequence
atggagggccatgaccccaaggagcctgagcagctgaggaagctgttcatcggcggcctgagctttgagaccacagatgacagcctgcgggagcactttgagaagtggggcaccctgacagactgtgtggtgatgagggacccccagaccaagaggagccggggcttcggctttgtgacctacagctgtgtggaggaggtggatgctgccatgtgtgcccggccccacaaggtggatggccgggtggtggagcccaagagagctgtgtcccgggaggacagcgtgaagccaggggcccacctgactgtgaagaagatctttgtgggcggcatcaaggaggacacagaggagtacaacctgcgggactactttgagaagtatggcaagattgagaccatcgaggtgatggaggaccggcagagcggcaagaagaggggctttgcctttgtgacctttgatgaccatgacacagtggacaagatcgtggtgcagaagtaccacaccatcaatggccacaactgtgaggtgaagaaggccctgagcaagcaggagatgcagagcgctggcagccagaggggccggggcggcggcagcggcaacttcatgggccggggcggcaactttggaggcggcggcggcaactttggccggggcggcaactttggaggccggggcggctatggaggcggcggcggcggcagccggggcagctatggaggaggagatggcggctacaacggctttggaggagatggcggcaactatggaggcggccctggctacagcagcagaggaggctatggaggcggcggccctggctacggcaaccagggcggcggctatggaggcggcggcggctatgatggctacaatgaaggaggcaactttggaggcggcaactatggaggcggcggcaactacaatgactttggaaactacagcggccagcagcagagcaactacggccccatgaagggcggcagctttggaggccgcagcagcggcagcccctacggcggcggctacggcagcggcggcggcagcggcggctacggcagccgccgcttctag

SEQ ID NO: 267140 - DNA, 972 bp, Artificial Sequence
  derived and/or modified sequence
atggagggccatgaccccaaggagcctgagcagctgaggaagctgttcatcggcggcctgagctttgagaccacagatgacagcctgcgggagcactttgagaagtggggcaccctgacagactgtgtggtgatgagggacccccagaccaagaggagccggggcttcggctttgtgacctacagctgtgtggaggaggtggatgctgccatgtgtgcccggccccacaaggtggatggccgggtggtggagcccaagagagctgtgtcccgggaggacagcgtgaagccaggggcccacctgactgtgaagaagatctttgtgggcggcatcaaggaggacacagaggagtacaacctgcgggactactttgagaagtatggcaagattgagaccatcgaggtgatggaggaccggcagagcggcaagaagaggggctttgcctttgtgacctttgatgaccatgacacagtggacaagatcgtggtgcagaagtaccacaccatcaatggccacaactgtgaggtgaagaaggccctgagcaagcaggagatgcagagcgctggcagccagaggggccggggcggcggcagcggcaacttcatgggccggggcggcaactttggaggcggcggcggcaactttggccggggcggcggcaactacggcggcggccctggctacagcagccggggcggctacggcggcggcggccctggctacggcaaccagggcggcggctacggcggcggcggcggctatgatggctacaatgaaggaggcaactttggaggcggcaactacggcggcggcggcaactacaatgactttggaaactacagcggccagcagcagagcaactacggccccatgaagggcggcagctttggaggccgcagcagcggcagcccctatggaggcggctacggcagcggcggcggcagcggcggctacggcagccgccgcttctag

SEQ ID NO: 267141 - DNA, 1071 bp, Artificial Sequence
  derived and/or modified sequence
atggagggccacgaccccaaggagcccgagcagctgcggaagctgtttatcggtggactcagcttcgaaactaccgacgacagcctccgggagcattttgaaaagtgggggacactgaccgattgtgtggtgatgcgggacccacagaccaagaggtctcgaggctttggatttgtgacctattcctgtgtggaggaggtggatgcggccatgtgtgctaggccccataaggtggacgggcgcgtggtcgaacccaagagagccgtaagcagagaggattcagtcaaaccaggtgcccatctgacagtaaagaaaatcttcgtgggcggcatcaaggaggatacagaagagtacaacctcagagactattttgaaaagtacggaaagattgaaactatcgaagtgatggaggaccggcaatccggcaagaaacgtggctttgcttttgtaaccttcgatgatcacgataccgtagacaaaatagtggtgcaaaaataccacaccattaacggccataactgtgaggtcaagaaagccctcagtaagcaggagatgcagtccgcaggatctcagcggggcagaggcggtgggagtggaaatttcatgggacgtggaggtaactttgggggagggggcggaaacttcggacgtggagggaactttggtggaaggggcggttatgggggagggggggggggatctcgagggagctatggcggaggcgacggcggatataatgggtttgggggggacggcggtaactatggcggtggtccaggatacagttcccgaggggggtatggcggaggagggccaggatacgggaaccagggcgggggatatggcgggggcggcggttacgatggctacaatgagggcgggaactttgggggggggaactacggcggcggaggaaattacaatgattttggtaattacagtggccaacagcagagcaattacggccctatgaaaggcggctcatttgggggccggagctccggatctccctacgggggcggctacggctctggaggagggtccggtggatacggaagcaggaggttctag

SEQ ID NO: 267142 - DNA, 972 bp, Artificial Sequence
  derived and/or modified sequence
atggagggccacgaccccaaggagcccgagcagctgcggaagctgtttattggtggcctgtcattcgagaccacagacgactccctacgtgagcacttcgagaaatggggcactctgaccgactgcgtagttatgcgggaccctcaaaccaaaaggagtcgcggttttggattcgtgacctacagctgcgttgaagaggtggatgctgccatgtgcgccagaccccataaagtggacgggcgggtcgttgagcccaaacgcgcagtcagcagagaggattctgttaaacctggagcccatctgaccgtcaagaagattttcgtgggcggtattaaggaagatacagaggaatataatctcagagactactttgagaaatacggcaaaatagagactatcgaggtgatggaagatagacaatccgggaagaagcgaggattcgccttcgtgacgttcgatgaccatgacaccgtcgacaaaattgtggtgcagaagtaccatactattaatggccacaactgcgaggtgaaaaaagccctgtctaagcaggagatgcagtcggctggctcacagcgtgggcggggggggggatccggcaatttcatgggtaggggtggcaattttggcgggggtggcggcaacttcggcagaggcgggggtaattatgggggcggacctggttacagttcacggggaggctacggaggaggcgggccaggctacggcaaccaggggggcggttacggggggggcgggggttacgacgggtacaacgaaggaggtaattttggagggggcaattacggcggtggcggtaattataatgatttcggaaactacagcggtcagcagcagtctaactacgggcctatgaaagggggatcttttggcgggcgatccagtggatcaccctacgggggaggatacggatctgggggtggatcaggggggtacggctcacgcaggttctag

SEQ ID NO: 267143 - DNA, 3113 bp, Artificial Sequence
  derived and/or modified sequence
ctctcggtcccatattgaactcgagttggaagaggcgagtccggtctcaaaatggagggccatgatccaaaggaaccagagcagttgagaaaactgtttattggtggtctgagctttgaaactacagatgatagtttacgagaacattttgagaaatggggcacactcacagattgtgtggtaatgagagacccccaaacaaaacgttccaggggctttggttttgtgacttattcttgtgttgaagaggtggatgcagcaatgtgtgctcgaccacacaaggttgatgggcgtgtagtggaaccaaagagagctgtttctagagaggattctgtaaagcctggtgcccatctaacagtgaagaaaatttttgttggtggtattaaagaagatacagaagaatataatttgagagactactttgaaaagtatggcaagattgaaaccatagaagttatggaagacaggcagagtggaaaaaagagaggatttgcttttgtaacttttgatgatcatgatacagttgataaaattgttgttcagaaataccacactattaatgggcataattgtgaagtgaaaaaggccctttctaaacaagagatgcagtctgctggatcacagagaggtcgtggaggtggatctggcaattttatgggtcgcggagggaactttggaggtggtggaggtaattttggccgtggtggaaactttggtggaagaggaggctatggtggtggaggtggtggcagcagaggtagttatggaggaggtgatggtggatataatggatttggaggtgatggtggcaactatggcggtggtcctggttatagtagtagagggggctatggtggtggtggaccaggatatggaaaccaaggtggtggatatggtggaggtggaggatatgatggttacaatgaaggaggaaattttggcggtggtaactatggtggtggtgggaactataatgattttggaaattatagtggacaacagcaatcaaattatggacccatgaaagggggcagttttggtggaagaagctcgggcagtccctatggtggtggttatggatctggtggtggaagtggtggatatggtagcagaaggttctaaaaacagcagaaaagggctacagttcttagcaggagagagagcgaggagttgtcaggaaagctgcaggttactttgagacagtcgtcccaaatgcattagaggaactgtaaaaatctgccacagaaggaacgatgatccatagtcagaaaagttactgcagcttaaacaggaaacccttcttgttcaggactgtcatagccacagtttgcaaaaagtgcagctattgattaatgcaatgtagtgtcaattagatgtacattcctgaggtcttttatctgttgtagctttgtctttttctttttcttttcattacatcaggtatattgccctgtaaattgtggtagtggtaccaggaataaaaaattaaggaatttttaacttttcaatatttgtgtagttcagtttttctacattttagtacagaaactttaacaaaatgcagtttcgaaggtgtttccttgtgagttaacaagtaaagaagatcattgttaattactattttgtatgaattttgctaaagttaactgtaaagaaacacctgctgacttgcagtttaaggggaatctattctccccatttccaaaccatgatatgaatgggcgctgacatgtggagagaatagataatttgtgtgtttgcaatgtgtgttttagataaataggattgggtatttaaattagcatttgtgaatttaatagcattaagattaccttcaaatgaaaaaaaatctcaaaatttctatttggtttttgtgcattttcttttaaaatgtaatcatatgattttagtgtgttagacttgctgagtcctagctgtgtttagaacatctctattctacatttaccttggtcaaatttgaactgctgccataggttttgggtgtaaagaatgtttactgccctccatttaaattctgaaaagggatggtggatgttttccctctcctacgttagaaaccattcttaaaaacttttgaaaatatagaaccattaagcctgctatatctgagcaaattagtgggtaccttttttttcttatttaaagcacaagaggcccataaatcttgagttactttaaattcttttttttgatacaagttttcagagcaagagaataaaaatcatgtgttattaaacccctaactggctggcatgctttcctgtttgtattctatacattttgctggatgaaaccaaggatagttcaggtataattgtccaaaataacctaactgcagcagaaatgtagcacagttgcttagtacaggcttctcacttcctacagacctgaattcaaatttggatagtctgagttcttaaattcccaaagaacacactgttatttcttgtgtatatttcaacataaatcatgttgttaccaatttgtttggaaggccctggttgagaagagttttagttaataaggtcatatatacatatattaatataaaccaatgtctactgttttgctccagctagtgcttacagtttcattcgagccctgagtatgtgccctgctgttactctctttggtagttgaacgttgaattcaagtcttttgttttaagaagtactaagcaaacaagcaataaaaaggggaatggggtgtgctagtgtttgaatatgctctcttgttgctctaattctgtgcctctgtgcattaatatttggatgcatgcaatgccagcatggaaattggtcttcacacatactgcagttttccagaaacattcacaaaccaataaatgtaacagacattccatttgttaatgggcatatatgtgaaaagcagtgtagaaaataggctaatattagaaaatggttaagtcctaaataacttcaagtgtggttatataatggacactgtcaatgttcataacttaaacctgggtacctggtcaaaataatgcttgggaaacattaaaattgagctaaattgtctcaagttcttttattcatataaataaagtttaaaggaatgggggagattaa

SEQ ID NO: 267144 - DNA, 1435 bp, Artificial Sequence
  derived and/or modified sequence
gaactcgagttggaagaggcgagtccggtctcaaaatggagggccatgatccaaaggaaccagagcagttgagaaaactgtttattggtggtctgagctttgaaactacagatgatagtttacgagaacattttgagaaatggggcacactcacagattgtgtggtaatgagagacccccaaacaaaacgttccaggggctttggttttgtgacttattcttgtgttgaagaggtggatgcagcaatgtgtgctcgaccacacaaggttgatgggcgtgtagtggaaccaaagagagctgtttctagagaggattctgtaaagcctggtgcccatctaacagtgaagaaaatttttgttggtggtattaaagaagatacagaagaatataatttgagagactactttgaaaagtatggcaagattgaaaccatagaagttatggaagacaggcagagtggaaaaaagagaggatttgcttttgtaacttttgatgatcatgatacagttgataaaattgttgttcagaaataccacactattaatgggcataattgtgaagtgaaaaaggccctttctaaacaagagatgcagtctgctggatcacagagaggtcgtggaggtggatctggcaattttatgggtcgcggagggaactttggaggtggtggaggtaattttggccgtggtggtggcaactatggcggtggtcctggttatagtagtagagggggctatggtggtggtggaccaggatatggaaaccaaggtggtggatatggtggaggtggaggatatgatggttacaatgaaggaggaaattttggcggtggtaactatggtggtggtgggaactataatgattttggaaattatagtggacaacagcaatcaaattatggacccatgaaagggggcagttttggtggaagaagctcgggcagtccctatggtggtggttatggatctggtggtggaagtggtggatatggtagcagaaggttctaaaaacagcagaaaagggctacagttcttagcaggagagagagcgaggagttgtcaggaaagctgcaggttactttgagacagtcgtcccaaatgcattagaggaactgtaaaaatctgccacagaaggaacgatgatccatagtcagaaaagttactgcagcttaaacaggaaacccttcttgttcaggactgtcatagccacagtttgcaaaaagtgcagctattgattaatgcaatgtagtgtcaattagatgtacattcctgaggtcttttatctgttgtagctttgtctttttctttttcttttcattacatcaggtatattgccctgtaaattgtggtagtggtaccaggaataaaaaattaaggaatttttaacttttcaatatttgtgtagttcagtttttctacattttagtacagaaact

SEQ ID NO: 267145 - DNA, 1071 bp, Artificial Sequence
  derived and/or modified sequence
atggagggccacgacccaaaagaacccgagcagttacgaaagctatttatcggaggtctgtccttcgagacaactgatgactcactgcgggagcattttgaaaagtggggcaccctgactgactgcgtggttatgcgtgatcctcagaccaagcggtcaaggggtttcggctttgttacatatagctgcgttgaagaggtagacgccgcaatgtgtgcccgtccacacaaggtggatgggagggtggtggaaccaaagagggccgtgtcgcgggaagactccgtgaagcctggggcacaccttaccgtaaagaagattttcgtggggggaatcaaagaggacactgaagaatataacctgcgggattatttcgagaagtatggcaagatcgaaactatcgaggtaatggaggaccgacagtccgggaaaaaacgaggctttgcgtttgtgactttcgacgatcatgacaccgtcgacaagattgtcgtgcagaagtatcacactataaacgggcacaattgtgaagtcaagaaggctctgagcaaacaggagatgcaaagcgccggttcacagcgcggtcgcggtggtgggtctggcaactttatgggcagagggggaaatttcggcggtggaggcggaaactttggaagggggggaaactttggcggtaggggcggttatgggggagggggtggcggttcccgcggatcttacgggggtggtgatggcggatacaatggatttggaggtgacggcggaaattatggtggcggaccgggttattccagcaggggcggttacggaggtggaggacctggctacgggaaccagggtggcggatacggcggaggcggaggatatgacggctataatgaaggtggtaattttggcggtggcaattacggtgggggtggtaattataacgattttggcaactattctggccagcagcagtccaactatggccctatgaagggcggatcttttggcggacggagctcaggaagcccatatggaggagggtacggctctggcggaggctctggcggttatgggtctagacgtttctag

SEQ ID NO: 267146 - DNA, 972 bp, Artificial Sequence
  derived and/or modified sequence
atggaaggccacgatcctaaggagcccgagcaactgcgaaaactcttcatcggagggctgagctttgagaccactgatgattctttaagagaacacttcgagaagtggggaaccttgacggactgtgttgtcatgagagaccctcagactaaaagaagcagaggcttcggattcgttacatactcatgtgtggaagaggtggacgctgccatgtgcgccagaccacacaaggtcgatggcagggtcgtggaacccaagcgcgcagtgagtcgggaggattcagtcaaacccggtgctcaccttactgttaagaaaatctttgtcggcggtatcaaggaggacaccgaagaatacaacctgagggattacttcgagaagtatggaaagattgaaaccatcgaggtgatggaggatagacaaagtggcaaaaagagggggttcgccttcgtcaccttcgacgaccacgacactgtggataagattgtcgtgcagaagtaccacacaattaacggacacaattgcgaggtcaagaaagctctgtccaagcaggagatgcagtccgctggcagccaaagaggcaggggaggtggtagtggcaattttatgggacgtggcggtaactttggtgggggaggaggtaatttcggtcgtggtggcggaaattatggtggaggacccggatactcctctagagggggatacggaggaggagggcctggttacggaaatcagggtggtggatacggtgggggagggggatacgatggttataatgaaggcggtaacttcggcggagggaattacgggggaggcggtaattataacgactttgggaattattccggccagcaacagtcaaactacggccctatgaaggggggatcatttggagggaggtcatccggttctccttacgggggtggctatggcagtgggggtggaagtgggggttatgggtctagaagattctag

SEQ ID NO: 267147 - protein, 454 aa, Artificial Sequence
  derived and/or modified sequence
METEAIDGYITCDNELSPEREHSNMAIDLTSSTPNGQHASPSHMTSTNSVKLEMQSDEECDRKPLSREDEIRGHDEGSSLEEPLIESSEVADNRKVQELQGEGGIRLPNGERPFHCNQCGASFTQKGNLLRHIKLHSGEKPFKCPFCSYACRRRDALTGHLRTHSVPPMEDCKEQEPIMDNNISLVPFERPAVIEKLTGNMGKRKSSTPQKFVGEKLMRFSYPDIHFDMNLTYEKEAELMQSHMMDQAINNAITYLGAEALHPLMQHPPSTIAEVAPVISSAYSQVYHPNRIERPISRETADSHENNMDGPISLIRPKSRPQEREASPSNSCLDSTDSESSHDDHQSYQGHPALNPKRKQSPAYMKEDVKALDTTKAPKGSLKDIYKVFNGEGEQIRAFKCEHCRVLFLDHVMYTIHMGCHGYRDPLECNICGYRSQDRYEFSSHIVRGEHTFH

SEQ ID NO: 267148 - DNA, 2001 bp, Artificial Sequence
  derived and/or modified sequence
gctcctcgctgaagatggaggaagtaaaaacaggattacccttagctacagatccactgccttagtttccaccaccaactgcagtgcacaaacacacgttaggcacaggaaagaaagaaagacagaggacacattaacagtaaacacaaacaaaagggtgatgggattattttactgcatgcactgctgagcccgacattgtcacctcctctttgaggggttagaagaagctgagatctcccgacagagctggaaatggtgatgaatcttttttaatcaaaggacaatttcttttcattgcactttgactatggaaacagaggctattgatggctatataacgtgtgacaatgagctttcacccgaaagggagcactccaatatggcaattgacctcacctcaagcacacccaatggacagcatgcctcaccaagtcacatgacaagcacaaattcagtaaagctagaaatgcagagtgatgaagagtgtgacaggaaacccctgagccgtgaagatgagatcaggggccatgatgagggtagcagcctagaagaacccctaattgagagcagcgaggtggctgacaacaggaaagtccaggagcttcaaggcgagggaggaatccggcttccgaatggtgaacgccccttccactgtaaccagtgtggagcttcttttactcagaagggcaaccttctgagacacataaagttacactctggagagaagccgttcaaatgtcctttctgtagctacgcctgtagaagaagggacgccctcacaggacacctcaggacccattctgtgggtaaacctcacaagtgcaactactgtggacgaagctacaagcagcgcagttcactggaggagcacaaggaacgctgccacaactatctccagaatgtcagcatggaggctgctgggcaggtcatgagtcaccatgtacctcctatggaagattgtaaggaacaagagcctattatggacaacaatatttctctggtgccttttgagagacctgctgtcatagagaagctcacggggaatatgggaaaacgtaaaagctccactccacaaaagtttgtgggggaaaagctcatgcgattcagctacccagatattcactttgatatgaacttaacatatgagaaggaggctgagctgatgcagtctcatatgatggaccaagccatcaacaatgcaatcacctaccttggagctgaggcccttcaccctctgatgcagcacccgccaagcacaatcgctgaagtggccccagttataagctcagcttattctcaggtctatcatccaaataggatagaaagacccattagcagggaaactgctgatagtcatgaaaacaacatggatggccccatctctctcatcagaccaaagagtcgaccccaggaaagagaggcctctcccagcaatagctgcctggattccactgactcagaaagcagccatgatgaccaccagtcctaccaaggacaccctgccttaaatcccaagaggaaacaaagcccagcttacatgaaggaggatgtcaaagctttggatactaccaaggctcctaagggctctctgaaggacatctacaaggtcttcaatggagaaggagaacagattagggccttcaagtgtgagcactgccgagtccttttcctagaccatgtcatgtacaccattcacatgggttgccatggctaccgggacccactggaatgcaacatctgtggctacagaagccaggaccgttatgagttttcatcacacattgttcgaggggagcacacattccactaggccttttcattccaaaggggacccctatgaagtaaagaactgcacatgaagaaatactgcacttacaatcccacctttcctcaaatgttgacataccttttattttttttaatattattactgttgataattcttattttgtggaggcagtgtcatttgctctgcctaattacgataaggaagaaaca

SEQ ID NO: 267149 - protein, 615 aa, Artificial Sequence
  derived and/or modified sequence
MERRSESPCLRDSPDRRSGSPDVKGPPPVKVARLEQNGSPMGARGRPNGAVAKAVGGLMIPVFCVVEQLDGSLEYDNREEHAEFVLVRKDVLFSQLVETALLALGYSHSSAAQAQVERVERENLSDYCVLGQRPMHLPNMNQLASLGKTNEQSPHSQIHHSTPIRNQVPALQPIMSPGLLSPQLSPQLVRQQIAMAHLINQQIAVSRLLAHQHPQAINQQFLNHPPIPRAVKPEPTNSSVEVSPDIYQQVRDELKRASVSQAVFARVAFNRTQGLLSEILRKEEDPRTASQSLLVNLRAMQNFLNLPEVERDRIYQDERERSMNPNVSMVSSASSSPSSSRTPQAKTSTPTTDLPIKVDGANINITAAIYDEIQQEMKRAKVSQALFAKVAANKSQGWLCELLRWKENPSPENRTLWENLCTIRRFLNLPQHERDVIYEEESRHHHSERMQHVVQLPPEPVQVLHRQQSQPAKESSPPREEAPPPPPPTEDSCAKKPRSRTKISLEALGILQSFIHDVGLYPDQEAIHTLSAQLDLPKHTIIKFFQNQRYHVKHHGKLKEHLGSAVDVAEYKDEELLTESEENDSEEGSEEMYKVEAEEENADKSKAAPAEIDQR

SEQ ID NO: 267150 - DNA, 1848 bp, Artificial Sequence
  derived and/or modified sequence
atggagcgccgttcggaatcaccctgccttagggatagtcccgatagacggagcgggtctccagacgttaaaggccctcctcccgtaaaggttgccaggctggaacagaatggatctcccatgggggcccgcggtcggcccaatggagccgtcgcgaaagccgttggcgggctgatgatcccagtgttttgtgtggtcgagcagctggatggatcactagaatatgacaatagagaggagcatgcggagtttgtgctggtccggaaggacgtgctttttagtcagctagtggagacagccctcttagccttgggttatagtcatagttccgcggcacaggcccaggtggagagggtcgaaagagaaaatctgagtgattattgcgtattgggccaaaggccaatgcatctgccaaacatgaaccagctggctagccttggaaagaccaacgagcagtcacctcactctcagatacaccactcaacgcccataagaaaccaggtgccagctctccagcccatcatgtccccaggtttgctttcgccacagctatctcctcagcttgtgcgtcaacagatcgccatggcacatctgatcaaccaacagatagcagtctctaggctcctcgcccatcaacacccccaggccatcaaccagcagttcctgaaccacccacctattcccagggcagtgaaacctgaacctactaacagctccgtcgaggtgtcccccgacatttaccaacaggtcagggacgaattaaaacgtgcctcggtctctcaagccgtgttcgccagagtggcgttcaatcgaacacaagggctgctcagtgaaatccttaggaaggaagaggacccacgtaccgcctcgcagagcctgctggtaaacttacgtgctatgcagaacttcctgaatctaccggaggtcgagcgagatcggatctatcaggatgagcgagagcgcagcatgaatcccaacgtctcgatggttagtagcgctagcagtagcccgtccagctcacgcacccctcaggcaaagacctccacacctaccaccgacctgcccattaaagtggatggcgccaatattaacataaccgccgccatctatgacgaaattcaacaggagatgaaacgcgcaaaagtcagccaagctttgtttgccaaagtggccgccaacaagagccagggatggctatgcgagctgctaagatggaaggagaatcccagtcctgagaaccggaccctctgggaaaacctgtgtacaatccggaggtttctcaatctgcctcagcatgagcgagatgtgatttatgaggaggagtcccgtcaccatcattctgagagaatgcagcatgtcgtgcagctccctcctgaaccagtgcaggttttgcaccgtcagcagtctcagcccgctaaggagagctcacctccacgtgaggaagctccgcctccacccccgcctaccgaggatagttgcgctaagaaaccccgatctcgaactaaaatctctctcgaagctctggggatcttgcagagcttcattcatgacgtgggcctctatcccgatcaagaagccattcacactctcagtgcccaactggacctgccaaagcatacaattatcaagtttttccagaaccagcgctaccacgttaagcaccacggaaagctcaaagagcatctggggtcagccgtggatgttgccgagtacaaggatgaggaactgttaactgagtcggaggaaaatgactcagaggagggatcagaggagatgtacaaggtggaggcagaagaagaaaatgccgacaagagcaaggccgcccccgccgaaatcgaccagcgatag

SEQ ID NO: 267151 - DNA, 1848 bp, Artificial Sequence
  derived and/or modified sequence
atggagaggagaagtgagagcccctgcctgcgggacagcccagaccggcgcagcggcagcccagatgtgaagggccccccacctgtgaaggtggcccggctggagcagaatggcagccccatgggcgcccggggccggcccaacggggctgtggccaaggctgtgggcggcctgatgatccctgtgttctgtgtggtggagcagctggatggcagcctggagtatgacaaccgggaggagcacgccgagtttgtgctggtgaggaaggatgtgctcttcagccagctggtggagacagccctgctggccctgggctacagccacagcagcgctgcccaggcccaggtggagcgggtggagcgggagaacctgagtgactactgtgtgctgggccagaggcccatgcacctgcccaacatgaaccagctggccagcctgggcaagaccaatgagcagagcccccacagccagatccaccacagcacccccatccggaaccaggtgcctgccctgcagcccatcatgagccctggcctgctgagcccccagctgagcccccagctggtgcggcagcagatcgccatggcccacctgatcaaccagcagattgctgtgtcccggctgctggcccaccagcacccccaggccatcaaccagcagttcctgaaccacccccccatccccagggctgtgaagccagagcccaccaacagctctgtggaggtgtccccagacatctaccagcaggtgagagatgagctgaagagggcctctgtgtcccaggccgtgtttgcccgggtggccttcaacagaacccagggcctgctgtctgagatcctgaggaaggaggaggaccccaggacagccagccagagcctgctggtgaacctgcgggccatgcagaacttcctgaacctgcctgaggtggagcgggaccgcatctaccaggatgagcgggagaggtccatgaaccccaacgtgtccatggtgagcagcgccagcagcagccccagcagcagcaggaccccccaggccaagaccagcacccccaccacagacctgcccatcaaggtggatggagccaacatcaacatcacagctgccatctatgatgagatccagcaggagatgaagagggccaaggtgtcccaggccctgtttgccaaggtggccgccaacaagagccagggctggctgtgtgagctgctgcgctggaaggagaaccccagccctgagaacagaaccctgtgggagaacctgtgcaccatccgccgcttcctgaacctgccccagcacgagagagatgtgatctatgaggaggagagccgccaccaccacagcgagaggatgcagcacgtggtgcagctgcccccagagcctgtgcaggtgctgcaccggcagcagagccagcctgccaaggagagcagccccccccgggaggaggcccctcctcctcctccacccacagaggacagctgtgccaagaagcccaggagcaggaccaagatcagcctggaggccctgggcatcctgcagagcttcatccatgatgtgggcctgtacccagaccaggaggccatccacaccctgagcgcccagctggacctgcccaagcacaccatcatcaagttcttccagaaccagcgctaccacgtgaagcaccacggcaagctgaaggagcacctgggcagcgctgtggatgtggccgagtacaaggatgaggagctgctgacagagagcgaggagaatgattctgaggagggcagcgaggagatgtacaaggtggaggccgaggaggagaatgctgacaagagcaaggccgccccagctgagattgaccagaggtag

SEQ ID NO: 267152 - DNA, 1848 bp, Artificial Sequence
  derived and/or modified sequence
atggagcggcggagcgagagcccctgcctgcgggacagccccgaccggagaagtggatcacctgacgtaaagggtccaccacccgtgaaagtggcacgcttggagcagaacgggagtcccatgggcgccagagggaggcctaacggcgcagtcgccaaggcggtaggtggcttgatgatccccgtattttgcgtggtggagcaacttgatgggtctttagaatatgacaatagagaggagcacgcagagttcgtcttggttcggaaagatgtgctgttctctcaattggtggaaactgcactgctggctcttggatactcacacagttccgcagctcaggcccaggtggagagggtggaaagggagaatctttcggactactgcgtactgggacagcggcccatgcatctgccgaacatgaatcagctcgcatctctcggcaaaacaaacgagcagtctcctcattcacagattcaccacagcaccccgattcggaaccaggtccctgctttacaacctataatgtctcctggtctcctgagtccccaactgtctccacaacttgttcgtcagcagatagcaatggctcatctgatcaatcagcagatcgctgtttcccggctcctcgctcatcagcacccccaggccattaatcagcaatttctgaaccaccccccgatcccacgcgccgtgaagcctgagccaacaaactcatcagtggaggtgtctccggacatctaccagcaggttcgcgacgagttgaaacgcgccagtgtgagccaagcagtcttcgctcgggttgcctttaatcggactcagggactcctgtccgagatcctgcggaaggaagaagaccctcggacagcaagccaaagccttctcgttaatttgcgggcaatgcagaatttcctgaatttacccgaggttgaaagagatcggatataccaggatgaaagggaaaggtctatgaaccctaacgtcagtatggttagcagcgcctcttctagcccctcctctagtagaacaccacaggccaaaactagcacgcccactaccgacctaccaattaaggtagacggtgccaatatcaatatcaccgcggctatctacgatgaaattcaacaggaaatgaagcgagccaaggtgtcacaggccctctttgctaaagtcgcagcaaataagtctcagggctggctatgcgaactcctaaggtggaaggaaaacccaagccctgaaaataggacactgtgggagaatttatgcactatcagaagatttctcaacctccctcagcacgagagagacgtgatatacgaggaggagtcaagacatcaccattctgaacgcatgcagcatgttgtgcaactgcctcccgagccagtgcaggttttgcaccgccaacagtcccagccagccaaggagtcttcaccacctagggaggaggccccacctccccccccacctactgaggactcttgtgccaagaagccgcgtagccgcacaaagattagtctcgaggctctcggcattctgcaatccttcatccacgacgtgggcctttatccagaccaggaagcaattcacacactgagtgcacaattggatcttccaaagcacactatcattaagttcttccaaaatcagaggtaccacgtgaaacaccatggaaagctgaaggagcacctgggatcggccgttgacgtagcggaatacaaagatgaagaactcctgaccgagagtgaggaaaatgacagtgaagaaggctccgaggaaatgtataaggtggaagctgaagaggagaatgctgataagtccaaagctgcccctgccgaaatcgaccaacgctag

SEQ ID NO: 267153 - DNA, 1848 bp, Artificial Sequence
  derived and/or modified sequence
atggaacgacgctcagagagcccctgcctcagagatagccccgacaggagaagtggctctcctgacgttaaaggcccacctcccgtgaaggtggccagactcgaacagaatggatccccgatgggagcacgcggaaggcctaatggagcggttgcaaaggccgtcggaggcctgatgatcccagtcttttgtgtcgtggagcagttagacggctcgcttgaatatgacaatagagaagagcacgccgaatttgttctggtgagaaaggacgttcttttctctcagctcgttgaaaccgccctcctggccctcggttattcccattcaagtgctgctcaggctcaggttgagcgtgtggaacgcgaaaatttgtccgattactgcgtgctgggacagcgccctatgcacctgccaaacatgaatcagctggcctctctcgggaagacaaatgaacaaagtccccacagccagatacaccacagcacgcccatccggaaccaagtcccggctctacagccaatcatgtcccccggattactgagccctcaacttagtcctcagcttgtcaggcagcaaatagctatggctcacctaatcaatcagcagatagccgtttcccgcttactggcacaccagcacccccaggccattaaccaacagttcttaaatcacccacctattcccagagcagtgaagccagagccgaccaattcatcggtcgaggttagcccagacatctatcaacaagttcgcgatgagctgaagagggcaagcgtgagccaggctgttttcgctcgcgttgcctttaatcgaacacagggacttctcagcgaaattctcaggaaggaggaggatcctagaaccgctagtcagtccctcctggtaaatctgagggccatgcagaatttcctcaatctgcctgaagtcgagagagataggatctaccaagacgaaagagagcggagtatgaatcctaatgtttccatggtctcctcagcttcgtcttcaccttcctccagcaggactccccaggctaaaacaagcaccccgacaacggatctgcctatcaaggttgatggtgccaatatcaatatcaccgcagccatctatgatgagattcagcaggagatgaaaagggcaaaagtgagccaggcattgttcgctaaggtggctgccaacaaatcgcaaggttggctctgcgaattactgaggtggaaagagaatccctcacctgagaaccgcacgttatgggagaacttgtgtactattcggcgatttctcaatctgccccagcatgaacgcgacgtcatttacgaggaggaatcccggcatcatcacagcgaacgcatgcagcacgtcgtgcagctgccaccggagcccgtgcaggttctgcaccggcagcagtcccagccagccaaggaaagttccccaccgagggaggaagctcctcctccaccaccgccaacagaagattcttgcgctaaaaaacctcgatccaggactaagatatccctcgaagctctgggaatccttcaatcttttattcacgatgttgggctgtatccggaccaggaagcaattcacacactatctgcacaactggacctgccgaagcatacaattattaaatttttccagaatcagcggtaccacgttaaacatcatggaaagttgaaggaacacctgggcagcgcggtggacgtggctgagtataaagacgaggaactgctcacagagagcgaggagaacgattcagaggaaggctccgaggagatgtacaaagttgaggccgaagaagagaatgcggataagagcaaagcggcacctgctgagattgatcaaaggtag

SEQ ID NO: 267154 - DNA, 2135 bp, Artificial Sequence
  derived and/or modified sequence
gcgttttattgcgacctgccggtgggaactttgtctccgagtcggagcagcatggagcggcggagcgagagcccgtgtctgcgggacagccccgaccggcggagcggcagcccggacgtcaaggggcctcccccagtgaaggtggcccggctggagcagaacggcagccccatgggagcccgcgggaggcccaacggcgccgtggccaaggccgtgggaggtttgatgattcctgtcttttgtgtcgtggagcagttggacggctctcttgaatatgacaacagagaagaacacgccgagtttgtcctggtgcggaaagatgtgctttttagccagctggtggagactgcgctcctggccctggggtattctcacagctctgcggcccaggcccaagtggaaagagtggaacgagaaaacctttcagactattgtgttctgggccagcgtccaatgcatttaccaaatatgaaccagctggcatccctggggaaaaccaacgaacagtctcctcacagccaaattcaccacagtactccaatccgaaaccaagtgcccgcattacagcccatcatgagccctggtcttctttctccccagcttagtccacaacttgtaaggcaacaaatagccatggcccatctgataaaccaacagattgccgttagccggctcctggctcaccagcatcctcaagccatcaaccagcagttcctgaaccatccacccatccccagagcagttaagccagagccaaccaactcttccgtggaagtctctccagatatctaccagcaagtcagagatgagctgaagagggccagtgtgtcccaagctgtctttgcaagagtggcattcaaccgcacacagggattgttgtctgagattctgcgtaaggaagaagaccctcggacagcctctcagtctcttctagtaaacctgagggccatgcagaatttcctcaatctgccagaagtggagcgagatcgcatctaccaggatgagagggagcggagcatgaatcccaatgtgagcatggtctcctcggcctccagcagtcccagctcctcccgaacccctcaggccaaaacctcgacaccgacaacagacctccctattaaggtggacggcgccaacatcaacatcacagctgccatttatgacgagatccaacaggagatgaaaagggccaaggtgtctcaagccctgtttgccaaagtggctgcaaataaaagtcagggctggctgtgtgaactgctccgctggaaggagaacccaagcccagaaaaccgcaccctctgggaaaacctctgtaccatccgtcgcttcctgaaccttccccagcatgagagggatgtcatctatgaggaggagtcaaggcatcaccacagcgaacgcatgcaacacgtggtccagcttccccctgagccggtgcaggtacttcatagacagcagtctcagccagccaaggagagttcccctcccagagaagaagcgcctcccccacctcctccgactgaagacagttgtgccaaaaagccccggtctcgcacaaagatctccttagaagccctggggatcctccaaagctttattcatgatgtaggcctgtacccagaccaggaagccatccacactctttcggctcagctggatctccccaaacacaccatcatcaagttcttccagaaccagcggtaccacgtgaagcaccacgggaagctgaaagagcacctgggctccgcggtggacgtggctgaatataaggacgaggagctgctgaccgagtcagaggagaacgacagcgaggaaggctccgaggagatgtacaaagtggaggctgaggaggaaaatgctgacaaaagcaaggcagcacctgccgaaattgaccagagataatgtgaacttctactaggcaaagcaatacatcggtccaaggattttctgctttcatttctttaaaagttttttgttagtttgttttttgtttttgtttttgggtttttttggctttatttttgtctttttatgtctgttttgtttttcttacccttttggacatttctttgttgcacaggatacacctatagactgaataagttcagtatttccgaatcagacatcgccttggcaaa

SEQ ID NO: 267155 - DNA, 1848 bp, Artificial Sequence
  derived and/or modified sequence
atggagagaagaagcgagagcccctgcctgagagacagccccgacagaagaagcggcagccccgacgtgaagggccccccccccgtgaaggtggccagactggagcagaacggcagccccatgggcgccagaggcagacccaacggcgccgtggccaaggccgtgggcggcctgatgatccccgtgttctgcgtggtggagcagctggacggcagcctggagtacgacaacagagaggagcacgccgagttcgtgctggtgagaaaggacgtgctgttcagccagctggtggagaccgccctgctggccctgggctacagccacagcagcgccgcccaggcccaggtggagagagtggagagagagaacctgagcgactactgcgtgctgggccagagacccatgcacctgcccaacatgaaccagctggccagcctgggcaagaccaacgagcagagcccccacagccagatccaccacagcacccccatcagaaaccaggtgcccgccctgcagcccatcatgagccccggcctgctgagcccccagctgagcccccagctggtgagacagcagatcgccatggcccacctgatcaaccagcagatcgccgtgagcagactgctggcccaccagcacccccaggccatcaaccagcagttcctgaaccacccccccatccccagagccgtgaagcccgagcccaccaacagcagcgtggaggtgagccccgacatctaccagcaggtgagagacgagctgaagagagccagcgtgagccaggccgtgttcgccagagtggccttcaacagaacccagggcctgctgagcgagatcctgagaaaggaggaggaccccagaaccgccagccagagcctgctggtgaacctgagagccatgcagaacttcctgaacctgcccgaggtggagagagacagaatctaccaggacgagagagagagaagcatgaaccccaacgtgagcatggtgagcagcgccagcagcagccccagcagcagcagaaccccccaggccaagaccagcacccccaccaccgacctgcccatcaaggtggacggcgccaacatcaacatcaccgccgccatctacgacgagatccagcaggagatgaagagagccaaggtgagccaggccctgttcgccaaggtggccgccaacaagagccagggctggctgtgcgagctgctgagatggaaggagaaccccagccccgagaacagaaccctgtgggagaacctgtgcaccatcagaagattcctgaacctgccccagcacgagagagacgtgatctacgaggaggagagcagacaccaccacagcgagagaatgcagcacgtggtgcagctgccccccgagcccgtgcaggtgctgcacagacagcagagccagcccgccaaggagagcagcccccccagagaggaggccccccccccccccccccccaccgaggacagctgcgccaagaagcccagaagcagaaccaagatcagcctggaggccctgggcatcctgcagagcttcatccacgacgtgggcctgtaccccgaccaggaggccatccacaccctgagcgcccagctggacctgcccaagcacaccatcatcaagttcttccagaaccagagataccacgtgaagcaccacggcaagctgaaggagcacctgggcagcgccgtggacgtggccgagtacaaggacgaggagctgctgaccgagagcgaggagaacgacagcgaggagggcagcgaggagatgtacaaggtggaggccgaggaggagaacgccgacaagagcaaggccgcccccgccgagatcgaccagagatag

SEQ ID NO: 267156 - protein, 32 aa, Artificial Sequence
  derived and/or modified sequence
MLRGPGPGRLLLLAVLCLGTSVRCTETGKSKR

SEQ ID NO: 267157 - protein, 1103 aa, Artificial Sequence
  derived and/or modified sequence
LRWTPLNSSTIIGYRITVVAAGEGIPIFEDFVDSSVGYYTVTGLEPGIDYDISVITLINGGESAPTTLTQQTAVPPPTDLRFTNIGPDTMRVTWAPPPSIDLTNFLVRYSPVKNEEDVAELSISPSDNAVVLTNLLPGTEYVVSVSSVYEQHESTPLRGRQKTGLDSPTGIDFSDITANSFTVHWIAPRATITGYRIRHHPEHFSGRPREDRVPHSRNSITLTNLTPGTEYVVSIVALNGREESPLLIGQQSTVSDVPRDLEVVAATPTSLLISWDAPAVTVRYYRITYGETGGNSPVQEFTVPGSKSTATISGLKPGVDYTITVYAVTGRGDSPASSKPISINYRTEIDKPSQMQVTDVQDNSISVKWLPSSSPVTGYRVTTTPKNGPGPTKTKTAGPDQTEMTIEGLQPTVEYVVSVYAQNPSGESQPLVQTAVTTIPAPTDLKFTQVTPTSLSAQWTPPNVQLTGYRVRVTPKEKTGPMKEINLAPDSSSVVVSGLMVATKYEVSVYALKDTLTSRPAQGVVTTLENVSPPRRARVTDATETTITISWRTKTETITGFQVDAVPANGQTPIQRTIKPDVRSYTITGLQPGTDYKIYLYTLNDNARSSPVVIDASTAIDAPSNLRFLATTPNSLLVSWQPPRARITGYIIKYEKPGSPPREVVPRPRPGVTEATITGLEPGTEYTIYVIALKNNQKSEPLIGRKKTDELPQLVTLPHPNLHGPEILDVPSTVQKTPFVTHPGYDTGNGIQLPGTSGQQPSVGQQMIFEEHGFRRTTPPTTATPIRHRPRPYPPNVGEEIQIGHIPREDVDYHLYPHGPGLNPNASTGQEALSQTTISWAPFQDTSEYIISCHPVGTDEEPLQFRVPGTSTSATLTGLTRGATYNVIVEALKDQQRHKVREEVVTVGNSVNEGLNQPTDDSCFDPYTVSHYAVGDEWERMSESGFKLLCQCLGFGSGHFRCDSSRWCHDNGVNYKIGEKWDRQGENGQMMSCTCLGNGKGEFKCDPHEATCYDDGKTYHVGEQWQKEYLGAICSCTCFGGQRGWRCDNCRRPGGEPSPEGTTGQSYNQYSQRYHQRTNTNVNCPIECFMPLDVQADREDSRE

SEQ ID NO: 267158 - DNA, 3312 bp, Artificial Sequence
  derived and/or modified sequence
ctgagatggacccccctgaacagcagcaccatcatcggctacagaatcaccgtggtggccgccggcgagggcatccccatcttcgaggacttcgtggacagcagcgtgggctactacaccgtgaccggcctggagcccggcatcgactacgacatcagcgtgatcaccctgatcaacggcggcgagagcgcccccaccaccctgacccagcagaccgccgtgcccccccccaccgacctgagattcaccaacatcggccccgacaccatgagagtgacctgggcccccccccccagcatcgacctgaccaacttcctggtgagatacagccccgtgaagaacgaggaggacgtggccgagctgagcatcagccccagcgacaacgccgtggtgctgaccaacctgctgcccggcaccgagtacgtggtgagcgtgagcagcgtgtacgagcagcacgagagcacccccctgagaggcagacagaagaccggcctggacagccccaccggcatcgacttcagcgacatcaccgccaacagcttcaccgtgcactggatcgcccccagagccaccatcaccggctacagaatcagacaccaccccgagcacttcagcggcagacccagagaggacagagtgccccacagcagaaacagcatcaccctgaccaacctgacccccggcaccgagtacgtggtgagcatcgtggccctgaacggcagagaggagagccccctgctgatcggccagcagagcaccgtgagcgacgtgcccagagacctggaggtggtggccgccacccccaccagcctgctgatcagctgggacgcccccgccgtgaccgtgagatactacagaatcacctacggcgagaccggcggcaacagccccgtgcaggagttcaccgtgcccggcagcaagagcaccgccaccatcagcggcctgaagcccggcgtggactacaccatcaccgtgtacgccgtgaccggcagaggcgacagccccgccagcagcaagcccatcagcatcaactacagaaccgagatcgacaagcccagccagatgcaggtgaccgacgtgcaggacaacagcatcagcgtgaagtggctgcccagcagcagccccgtgaccggctacagagtgaccaccacccccaagaacggccccggccccaccaagaccaagaccgccggccccgaccagaccgagatgaccatcgagggcctgcagcccaccgtggagtacgtggtgagcgtgtacgcccagaaccccagcggcgagagccagcccctggtgcagaccgccgtgaccaccatccccgcccccaccgacctgaagttcacccaggtgacccccaccagcctgagcgcccagtggaccccccccaacgtgcagctgaccggctacagagtgagagtgacccccaaggagaagaccggccccatgaaggagatcaacctggcccccgacagcagcagcgtggtggtgagcggcctgatggtggccaccaagtacgaggtgagcgtgtacgccctgaaggacaccctgaccagcagacccgcccagggcgtggtgaccaccctggagaacgtgagcccccccagaagagccagagtgaccgacgccaccgagaccaccatcaccatcagctggagaaccaagaccgagaccatcaccggcttccaggtggacgccgtgcccgccaacggccagacccccatccagagaaccatcaagcccgacgtgagaagctacaccatcaccggcctgcagcccggcaccgactacaagatctacctgtacaccctgaacgacaacgccagaagcagccccgtggtgatcgacgccagcaccgccatcgacgcccccagcaacctgagattcctggccaccacccccaacagcctgctggtgagctggcagccccccagagccagaatcaccggctacatcatcaagtacgagaagcccggcagcccccccagagaggtggtgcccagacccagacccggcgtgaccgaggccaccatcaccggcctggagcccggcaccgagtacaccatctacgtgatcgccctgaagaacaaccagaagagcgagcccctgatcggcagaaagaagaccgacgagctgccccagctggtgaccctgccccaccccaacctgcacggccccgagatcctggacgtgcccagcaccgtgcagaagacccccttcgtgacccaccccggctacgacaccggcaacggcatccagctgcccggcaccagcggccagcagcccagcgtgggccagcagatgatcttcgaggagcacggcttcagaagaaccaccccccccaccaccgccacccccatcagacacagacccagaccctacccccccaacgtgggcgaggagatccagatcggccacatccccagagaggacgtggactaccacctgtacccccacggccccggcctgaaccccaacgccagcaccggccaggaggccctgagccagaccaccatcagctgggcccccttccaggacaccagcgagtacatcatcagctgccaccccgtgggcaccgacgaggagcccctgcagttcagagtgcccggcaccagcaccagcgccaccctgaccggcctgaccagaggcgccacctacaacgtgatcgtggaggccctgaaggaccagcagagacacaaggtgagagaggaggtggtgaccgtgggcaacagcgtgaacgagggcctgaaccagcccaccgacgacagctgcttcgacccctacaccgtgagccactacgccgtgggcgacgagtgggagagaatgagcgagagcggcttcaagctgctgtgccagtgcctgggcttcggcagcggccacttcagatgcgacagcagcagatggtgccacgacaacggcgtgaactacaagatcggcgagaagtgggacagacagggcgagaacggccagatgatgagctgcacctgcctgggcaacggcaagggcgagttcaagtgcgacccccacgaggccacctgctacgacgacggcaagacctaccacgtgggcgagcagtggcagaaggagtacctgggcgccatctgcagctgcacctgcttcggcggccagagaggctggagatgcgacaactgcagaagacccggcggcgagcccagccccgagggcaccaccggccagagctacaaccagtacagccagagataccaccagagaaccaacaccaacgtgaactgccccatcgagtgcttcatgcccctggacgtgcaggccgacagagaggacagcagagagtag

SEQ ID NO: 267159 - DNA, 3312 bp, Artificial Sequence
  derived and/or modified sequence
cttagatggacacccttgaactccagcacaatcatcggctataggatcactgtcgtcgccgctggagaaggaatcccaatctttgaggactttgtggatagcagcgtggggtactacactgtgacggggctggaaccgggaatcgactatgacattagcgtaataactctgatcaacggaggggagtcggcccctactacactgactcaacaaacggctgtcccgcctcccaccgatctgagattcacaaacatcggccccgacactatgcgagttacgtgggctccgccgccaagcatcgaccttacgaacttcctagtcaggtactcccctgtaaagaacgaggaagacgtggcggagctcagcatctcgccttctgacaacgcagtagttttgactaatctgttgcccggcaccgaatatgtggttagcgtgtctagcgtgtacgaacaacatgagtctacgcctctgcggggacggcagaagaccgggctagactctccgaccggtatagacttctccgatattacagcaaacagcttcacagtacactggatcgcccccagagctacaattaccgggtacagaatccggcatcaccctgagcatttctcagggcgcccaagggaggaccgagtcccccattccagaaattccattactttgacaaacttaactccaggaacagaatatgtcgtgtctatagtcgcactgaatgggagggaggagtccccactgctcatcgggcagcagtcgaccgtcagcgacgtgccaagggatttggaggtggtcgccgcgactcctacgtccctgctgatctcttgggacgcgcccgcagtgacagttaggtactatcggattacctatggcgaaacaggaggcaactccccggtccaggagttcacagtgcccggttccaaatctactgctacaatcagcgggctaaagcccggcgtagattacactatcaccgtatacgccgtgactgggcgcggagattcaccagccagctcaaaacccataagtataaactaccgtactgaaatcgataaaccctctcagatgcaggtgaccgacgttcaggacaacagcattagcgttaaatggctcccatcttccagccccgtcaccgggtaccgagtcaccactacccccaagaacgggcctggcccgactaagacaaagactgctggccctgaccaaactgagatgactattgagggcctacaaccaactgtggaatacgtcgtctccgtgtacgcacagaatccctcaggggaatcccagccgctcgtccagaccgcagtgactaccattccagctcctactgacctgaagttcactcaggtcacacccacatccttatccgcccagtggactcccccgaatgtccagctgaccggataccgggtacgcgtgactcctaaggagaaaacagggccgatgaaggagatcaatttagcacctgactcatcctccgtcgtggtgtctggactgatggtcgcaaccaaatacgaagtgagtgtttatgcacttaaagacacattaaccagtcgccctgctcaaggcgtggtgaccacattagagaatgtgtcacctccccggagagcccgagtgaccgatgccactgaaacaactatcacaatttcatggaggaccaagaccgagacaatcaccggcttccaggtggatgctgtccccgctaacggccagacgcctatccagcgaaccataaaaccggacgtcaggtcctatactattacaggtctacagcctgggactgactacaagatctatctctatacattgaacgataacgctagaagctccccggtggtgatcgacgcctctactgcaattgacgccccaagtaatctcagatttctggccaccacgccaaattcactgctggtgtcttggcagccccctcgggccaggataacgggttatatcataaagtacgaaaagccaggtagcccgcctcgggaggtagtgccccgcccgcggccaggcgttacggaggccaccataactggcctggagccaggcaccgaatatactatatacgtaatagctctgaagaacaatcagaaatctgaacctttaataggtcgaaagaagaccgacgagcttcctcaacttgtgaccctgccgcatcccaaccttcacggtccagaaatactggacgttccctccaccgtccagaagactccgttcgtcacccaccccggatacgacactgggaatggaatccagttgcctgggacgtctgggcagcaaccctctgtaggccagcagatgattttcgaagagcacggttttcgtcggactacaccaccaactacggcgactcctatcagacacaggccgcgcccatatccgcctaacgttggagaagagattcaaatcgggcatatacctcgggaggatgttgactaccatctctatccccacggcccgggactgaatcccaacgcctcaaccggccaagaagctctcagccagaccactatcagttgggcccctttccaagataccagcgagtacatcatatcctgccatccagtgggaacggatgaggaaccactacagtttcgcgtccctggtacctcaactagtgccaccctgacggggttaacaagaggagcaacttataacgtgattgtggaggcccttaaggatcagcagcgtcacaaggtgagagaggaggtggtcacggtcggcaactcggtcaatgagggactaaaccagcccactgatgacagctgcttcgatccctataccgtctcacactacgcagtgggggatgagtgggagagaatgagtgaatctggattcaaacttctttgtcagtgtcttggttttggatcaggccactttagatgtgatagctcccgctggtgccacgataatggagtgaactataaaattggtgagaaatgggataggcaaggcgaaaacggacagatgatgagctgcacctgtctggggaacggaaagggagagttcaaatgtgatccgcacgaggcgacttgctacgacgacggaaagacttatcacgtgggcgaacaatggcaaaaagagtatctaggtgcaatttgctcttgcacatgtttcgggggccagcgcggctggcgttgtgacaattgtagacgacccggcggagagccttctcctgaggggacgaccggccaaagctacaatcagtactcccagagatatcaccagaggacgaatactaatgtgaattgtccgatagaatgcttcatgcccctggatgttcaggctgatagggaagatagtagagaatag

SEQ ID NO: 267160 - DNA, 3720 bp, Artificial Sequence
  derived and/or modified sequence
ctgaggtggaccccgctaaactcttccaccattattgggtaccgcatcacagtagttgcggcaggagaaggtatccctatttttgaagattttgtggactcctcagtaggatactacacagtcacagggctggagccgggcattgactatgatatcagcgttatcactctcattaatggcggcgagagtgcccctactacactgacacaacaaacggctgttcctcctcccactgacctgcgattcaccaacattggtccagacaccatgcgtgtcacctgggctccacccccatccattgatttaaccaacttcctggtgcgttactcacctgtgaaaaatgaggaagatgttgcagagttgtcaatttctccttcagacaatgcagtggtcttaacaaatctcctgcctggtacagaatatgtagtgagtgtctccagtgtctacgaacaacatgagagcacacctcttagaggaagacagaaaacaggtcttgattccccaactggcattgacttttctgatattactgccaactcttttactgtgcactggattgctcctcgagccaccatcactggctacaggatccgccatcatcccgagcacttcagtgggagacctcgagaagatcgggtgccccactctcggaattccatcaccctcaccaacctcactccaggcacagagtatgtggtcagcatcgttgctcttaatggcagagaggaaagtcccttattgattggccaacaatcaacagtttctgatgttccgagggacctggaagttgttgctgcgacccccaccagcctactgatcagctgggatgctcctgctgtcacagtgagatattacaggatcacttacggagagacaggaggaaatagccctgtccaggagttcactgtgcctgggagcaagtctacagctaccatcagcggccttaaacctggagttgattataccatcactgtgtatgctgtcactggccgtggagacagccccgcaagcagcaagccaatttccattaattaccgaacagaaattgacaaaccatcccagatgcaagtgaccgatgttcaggacaacagcattagtgtcaagtggctgccttcaagttcccctgttactggttacagagtaaccaccactcccaaaaatggaccaggaccaacaaaaactaaaactgcaggtccagatcaaacagaaatgactattgaaggcttgcagcccacagtggagtatgtggttagtgtctatgctcagaatccaagcggagagagtcagcctctggttcagactgcagtaaccactattcctgcaccaactgacctgaagttcactcaggtcacacccacaagcctgagcgcccagtggacaccacccaatgttcagctcactggatatcgagtgcgggtgacccccaaggagaagaccggaccaatgaaagaaatcaaccttgctcctgacagctcatccgtggttgtatcaggacttatggtggccaccaaatatgaagtgagtgtctatgctcttaaggacactttgacaagcagaccagctcagggagttgtcaccactctggagaatgtcagcccaccaagaagggctcgtgtgacagatgctactgagaccaccatcaccattagctggagaaccaagactgagacgatcactggcttccaagttgatgccgttccagccaatggccagactccaatccagagaaccatcaagccagatgtcagaagctacaccatcacaggtttacaaccaggcactgactacaagatctacctgtacaccttgaatgacaatgctcggagctcccctgtggtcatcgacgcctccactgccattgatgcaccatccaacctgcgtttcctggccaccacacccaattccttgctggtatcatggcagccgccacgtgccaggattaccggctacatcatcaagtatgagaagcctgggtctcctcccagagaagtggtccctcggccccgccctggtgtcacagaggctactattactggcctggaaccgggaaccgaatatacaatttatgtcattgccctgaagaataatcagaagagcgagcccctgattggaaggaaaaagacagacgagcttccccaactggtaacccttccacaccccaatcttcatggaccagagatcttggatgttccttccacagttcaaaagacccctttcgtcacccaccctgggtatgacactggaaatggtattcagcttcctggcacttctggtcagcaacccagtgttgggcaacaaatgatctttgaggaacatggttttaggcggaccacaccgcccacaacggccacccccataaggcataggccaagaccatacccgccgaatgtaggtgaggaaatccaaattggtcacatccccagggaagatgtagactatcacctgtacccacacggtccgggactcaatccaaatgcctctacaggacaagaagctctctctcagacaaccatctcatgggccccattccaggacacttctgagtacatcatttcatgtcatcctgttggcactgatgaagaacccttacagttcagggttcctggaacttctaccagtgccactctgacaggcctcaccagaggtgccacctacaacgtcatagtggaggcactgaaagaccagcagaggcataaggttcgggaagaggttgttaccgtgggcaactctgtcaacgaaggcttgaaccaacctacggatgactcgtgctttgacccctacacagtttcccattatgccgttggagatgagtgggaacgaatgtctgaatcaggctttaaactgttgtgccagtgcttaggctttggaagtggtcatttcagatgtgattcatctagatggtgccatgacaatggtgtgaactacaagattggagagaagtgggaccgtcagggagaaaatggccagatgatgagctgcacatgtcttgggaacggaaaaggagaattcaagtgtgaccctcatgaggcaacgtgttatgatgatgggaagacataccacgtaggagaacagtggcagaaggaatatctcggtgccatttgctcctgcacatgctttggaggccagcggggctggcgctgtgacaactgccgcagacctgggggtgaacccagtcccgaaggcactactggccagtcctacaaccagtattctcagagataccatcagagaacaaacactaatgttaattgcccaattgagtgcttcatgcctttagatgtacaggctgacagagaagattcccgagagtaaatcatctttccaatccagaggaacaagcatgtctctctgccaagatccatctaaactggagtgatgttagcagacccagcttagagttcttctttctttcttaagccctttgctctggaggaagttctccagcttcagctcaactcacagcttctccaagcatcaccctgggagtttcctgagggttttctcataaatgagggctgcacattgcctgttctgcttcgaagtattcaataccgctcagtattttaaatgaagtgattctaagatttggtttgggatcaataggaaagcatatgcagccaaccaagatgcaaatgttttgaaatgatatgaccaaaattttaagtaggaaagtcacccaaacacttctgctttcacttaagtgtctggcccgcaatactg

SEQ ID NO: 267161 - DNA, 3312 bp, Artificial Sequence
  derived and/or modified sequence
ctgcgctggacccccctgaacagcagcaccatcatcggctaccgcatcaccgtggtggccgccggggagggcatccccatctttgaagattttgtggacagctctgtgggctactacacagtgacaggcctggagcccggcatcgactatgacatcagcgtcatcaccctcatcaatggaggagagagcgcccccaccaccctgacccagcagacagctgtgcccccacccacagacctgcgcttcaccaacattggaccagacaccatgagggtgacctgggcccctcctccttccattgacctgaccaacttcctggtgcgctacagccctgtgaagaatgaggaggatgtggccgagctgagcatcagccccagcgacaatgctgtggtgctgaccaacctgctgcctggaacagaatatgtggtgtctgtgtcctctgtgtatgagcagcacgagagcacccccctgcggggccggcagaagacaggcctggacagccccactggaattgacttcagtgacatcacagccaacagcttcaccgtgcactggatcgccccccgggccaccatcaccggctaccgcatccgccaccaccctgagcacttcagcggccggccccgggaggacagagtgccccacagcagaaattccatcaccctgaccaacctgaccccaggcacagaatatgtggtgtccatcgtggccctgaatggccgggaggagagccccctgctgattggccagcagagcacagtgtctgatgtgccccgggacctggaggtggtggccgccacccccaccagcctgctgatctcctgggatgccccagctgtgacagtgcgctactaccgcatcacctatggagagaccggcggcaacagccctgtgcaggagttcaccgtgcccggcagcaagagcacagccaccatcagcggcctgaagccaggagtggactacaccatcaccgtgtatgctgtgacaggccgcggggacagccctgccagcagcaagcccatcagcatcaactacagaacagaaattgacaagcccagccagatgcaggtgacagatgtgcaggacaacagcatctctgtgaagtggctgcccagcagcagccctgtgacaggctacagagtgaccaccacccccaagaatggacctggccccaccaagaccaagacagctggccctgaccagacagagatgaccatcgagggcctgcagcccaccgtggagtatgtggtgtctgtgtatgcccagaaccccagcggggagagccagcccctggtgcagacagctgtgaccaccatcccagcccccacagacctgaagttcacccaggtgacccccaccagcctgagcgcccagtggaccccaccaaatgtgcagctgaccggctacagagtgcgggtgacccccaaggagaagacaggccccatgaaggagatcaacctggccccagacagcagctctgtggtggtgtctggcctgatggtggccaccaagtatgaggtgtctgtgtatgccctgaaggacaccctgaccagcaggcctgcccagggcgtggtgaccaccctggagaatgtgtccccaccaagaagagcccgggtgacagatgccacagagaccaccatcaccatctcctggaggaccaagacagagaccatcaccggcttccaggtggatgctgtgcctgccaacggccagacccccatccagaggaccatcaagccagatgtgcgcagctacaccatcaccggcctgcagcccggcacagactacaagatctacctgtacaccctgaatgacaatgcccggagcagccctgtggtgattgatgccagcacagccattgatgcccccagcaacctgcgcttcctggccaccacccccaacagcctgctggtgtcctggcagcccccccgggcccgcatcaccggctacatcatcaagtatgagaagccaggcagccccccccgggaggtggtgccccggcccaggcctggggtgacagaggccaccatcaccggcctggagcccggcacagagtacaccatctacgtgattgccctgaagaacaaccagaagtctgagcccctgattggaaggaagaagacagatgagctgccccagctggtgaccctgccccaccccaacctgcacggccctgagatcctggatgtgcccagcacagtgcagaagaccccatttgtgacccaccctggctatgacacaggaaatggcatccagctgcccggcaccagcggccagcagcccagcgtgggccagcagatgatctttgaggagcacggcttccggaggaccaccccacccaccacagccacccccatccgccaccggccccggccctacccacccaacgtgggggaggagatccagatcggccacatccccagagaagatgtggactaccacctgtacccccacggccctggcctgaaccccaatgccagcacaggccaggaggccctgagccagaccaccatctcctgggcccccttccaggacaccagcgagtacatcatcagctgccaccctgtgggcacagatgaggagcccctgcagttccgggtgcccggcaccagcaccagcgccaccctgaccggcctgaccaggggggccacctacaacgtcatcgtggaggccctgaaggaccagcagaggcacaaggtgcgggaggaggtggtgacagtgggcaacagcgtgaatgaaggcctgaaccagcccacagatgacagctgctttgacccctacacagtgagccactatgctgtgggagatgagtgggagaggatgtctgagagcggcttcaagctgctgtgccagtgcctgggctttggaagtggccacttccgctgtgacagcagccgctggtgccacgacaatggagtgaactacaagattggagagaagtgggaccggcagggagaaaatggccagatgatgagctgcacctgcctgggcaatggcaagggggagttcaagtgtgacccccatgaggccacctgctatgatgatggcaagacctaccacgtgggggagcagtggcagaaggagtacctgggcgccatctgcagctgcacctgctttggaggccagaggggctggaggtgtgacaactgcagaagacctggaggagagcccagccctgagggcaccaccggccagagctacaaccagtacagccagcgctaccaccagaggaccaacaccaacgtgaactgccccatcgagtgcttcatgcccctggatgtgcaggccgaccgggaggacagccgggagtag

SEQ ID NO: 267162 - DNA, 3312 bp, Artificial Sequence
  derived and/or modified sequence
ctgcggtggacccccctgaacagcagcaccatcatcggctaccggattaccgttgtggctgctggggaaggcattccaatattcgaagatttcgttgattcttctgtgggctattatacagtcacagggctcgaaccggggatcgattacgatatatctgttataacactgataaatggcggggaaagcgcacccaccactttgacccagcagacagcggtgccgcctccaaccgatctgcggtttacaaacatcggaccggacaccatgcgcgttacctgggctcctccccctagcatcgacctcacaaacttcctggtgcgatactcgccggttaagaacgaagaagatgtggccgaactctcgatctcaccctccgacaacgcggtggttttgacaaacctgttgccgggaactgagtacgtggtctctgtctcgagtgtatatgaacagcacgaaagtacaccactcaggggtcggcagaagacaggccttgacagccccacgggaattgacttctctgatattaccgcaaacagcttcaccgtgcattggatcgctccgcgcgctaccatcacagggtacaggataaggcaccatccagaacattttagtggccgcccaagggaggatcgggtcccacattctcgaaatagcataaccttaacaaatttgacccctggaactgagtacgttgtctcaatcgtggctcttaacggcagagaggaaagcccgttgttgataggacagcagagcactgtgagcgacgtgcctcgagatctagaggtggttgctgcaacacccacatctctgctgatttcgtgggatgcacccgccgtcaccgttagatattacagaatcacctacggcgaaacaggtggtaactcacccgtacaggaatttactgtcccaggcagtaaatcaaccgccaccatctcgggtcttaagccaggcgttgattacacgatcaccgtctatgccgtgacgggtcgtggcgactccccagccagctcgaagccaatttccattaactatcgcacagagattgataagccctctcagatgcaggtgacggatgttcaggacaattccatatcagttaagtggctgccctcgtcctcaccagtcacagggtatcgggtgaccactacccccaaaaatggacctggccctacaaagaccaaaactgccggccccgatcagacggaaatgaccatagaagggctccagcctacagtggagtatgtggtaagtgtgtacgctcagaatccctcaggagaatcacaacccttggttcagaccgcagtcacgaccattcctgcacccacagatcttaagttcactcaggtcacacctacctccctctcagcccaatggacaccaccaaacgttcagcttaccggatatagagtcagggttactccaaaggaaaagactggtcctatgaaagaaattaacctggcgcccgattcctctagcgtcgtcgtctccgggctcatggtggctaccaaatatgaagtctcagtgtacgcattgaaagacaccctcacaagtcgcccggctcagggagtggttacaacccttgaaaacgtgagtcctcccagacgggcccgtgtgaccgatgccactgagaccacaataacaatatcttggaggacaaagacagaaactataacaggattccaggtggatgctgtccccgctaatgggcagacaccaattcaaagaacaattaaaccggacgtaagaagctatactataacaggcctccagcccggcacagactacaagatctacctctacaccctgaacgacaacgcgcgatcctccccagttgtgatagatgcatccacagcaattgacgccccatctaacctgagattcctggctactacaccaaatagcctactggtctcctggcagcctccccgggctcggatcaccggctacatcatcaagtatgaaaaacccggctcacctcctagagaagttgtgccccggccacggcccggggtgacagaggccaccataaccggtctcgagcccggtaccgaatatacaatttatgtgatagccctcaaaaacaaccagaaatcggagccgctgatagggcgaaaaaaaaccgacgagctaccccagctggtcacactgccacaccccaacttacatggacctgagatactggacgtacccagcacggtccagaagaccccatttgtcactcatcctggatatgatacgggaaatggcatccagctaccagggacatctggccagcaaccaagcgttgggcagcagatgatctttgaggaacacggattccgtcgcactactccacctaccacggcaacccccattaggcacaggccaagaccttacccaccaaatgtcggggaagagatccagatcggccacatccctagagaagacgtggactaccatctttaccctcatggacctgggttgaatcccaacgctagcactggccaagaggccctgtctcaaacgacaatctcctgggcgcctttccaggacactagtgaatacatcatctcttgccacccagtgggaactgacgaggagcctctgcagttcagggtaccgggtaccagcaccagtgccaccctcaccgggctcacacgaggagctacttataatgtgatcgtcgaggccttaaaagatcagcagcgacacaaggtgcgagaggaggtcgttacggttggcaactccgtcaacgaaggcctgaaccagcccaccgatgattcttgcttcgatccctacaccgtttcacactacgctgtcggagatgaatgggagaggatgagcgagtctggatttaaactgctttgccagtgcttggggtttggctcagggcacttccgatgtgacagttcccggtggtgccacgacaacggggtgaattacaagatcggcgaaaaatgggatagacagggcgaaaatgggcagatgatgtcttgcacctgtctaggaaacgggaaaggtgaatttaaatgtgaccctcacgaagcaacatgctacgacgacgggaagacgtaccacgttggggaacaatggcagaaggagtatctgggagccatctgcagttgtacttgttttggaggacagcgcggctggaggtgcgacaattgcaggcggcccggaggggagcccagccccgaaggtaccaccggccaatcctacaatcagtactcccagcgctaccaccagcgtaccaacactaatgtgaattgtcccatagaatgtttcatgcccttggacgtgcaggcagacagagaggactccagggagtag

SEQ ID NO: 267163 - DNA, 3312 bp, Artificial Sequence
  derived and/or modified sequence
ctgaggtggacccctttgaacagcagcaccatcatcggttaccggatcaccgtcgtggcagctggagagggcatcccgatttttgaggacttcgtggactcttcagttggttactacaccgtaacgggcttggaacctggtatcgactacgacatttctgtgattactctgatcaacggtggggaatctgcaccaaccacgctcacccagcagacggccgtgcctccccctaccgacctcaggttcacgaacatcggtcccgatacgatgcgggtgacctgggcccctcctccgagcattgacctgaccaattttctagttagatactcacccgtaaaaaatgaagaggacgtcgccgagctgagcatcagcccatcagataatgcggtggtccttacgaatctgttgccgggtacagagtacgtggtgagcgtgagcagcgtgtacgagcagcatgaatctacgcccctgcgcggaaggcagaagacaggacttgattctcccacaggtattgacttctcagatataactgctaactccttcaccgtgcactggatagctccaagggctacaatcacagggtatagaatcaggcaccatcccgagcactttagcggtaggcccagagaggaccgggttcctcattcaagaaactcaatcaccctgacaaacctcactcctggcaccgagtacgtcgtgtctattgtggctttgaatgggcgagaggaatccccgttgttgatcggccagcagagcaccgtgagtgacgtacctcgagacttagaagtcgtcgccgcaacgcctactagtctgctgatctcctgggatgctccagccgtgaccgttaggtactaccggatcacatatggcgaaacaggagggaactcacccgtgcaagaatttaccgtgcctggatctaagagtaccgcaaccatatcaggcctgaagcctggcgtagactacaccattaccgtgtacgcagtgacaggcaggggagactcccctgcttctagtaagccaatatcaattaactatcgtaccgaaattgataagccctctcaaatgcaggtgactgacgtacaagacaattccatcagtgttaaatggctccccagctcctctcctgtcactggatatcgggtcacaacaacaccaaagaatggcccagggcctaccaaaacaaagactgccggacctgaccaaacggagatgaccatagaaggccttcagccgaccgtggagtatgtcgtgagtgtttatgctcaaaatccatctggagagagccagcccctggtgcagactgccgttaccactatccccgcacctacagacctcaagttcacccaggtcacccccactagcctgtctgctcagtggactccgccaaacgtgcaactcaccggatatcgcgtgagggtcacgcccaaagagaagaccgggccaatgaaagaaataaatcttgcacccgatagctcctcggtagtggtatctggtctcatggtggcaaccaaatacgaggtctctgtatacgcattgaaagacacacttacctcgaggccagcgcagggagtggttacaacactagagaacgtctctccccctagacgggcacgggtcaccgatgccacggagaccactattacgatcagctggagaacgaagactgagaccatcaccggcttccaagttgacgctgtgcctgccaacggccaaacgcccattcagcgtacaataaagcctgacgtgagatcctacaccattactggattacagccaggaacagattacaaaatatacctatatacccttaatgataatgctcgcagcagtccagttgtgatcgatgctagcactgcgattgatgccccaagcaatctccgattcttagccacgactcccaacagcctgctggtgagctggcagccccctcgggctcgcatcaccggttatataatcaaatacgaaaaaccaggctcaccgccaagggaagtggtccccagacctagaccaggcgtgactgaggccacaatcactggccttgaaccaggcacggaatataccatctacgtaatcgccttgaagaacaatcagaagagtgagcctctcatcggacggaaaaagaccgacgaactccctcaactggtgacactgccgcaccccaatttacacggacccgaaatccttgacgtgccaagtacagttcaaaaaacgccttttgtgacacaccctggctatgacacggggaatggcatccagctgcctggaaccagtggtcagcagccaagcgtgggacagcaaatgatcttcgaggaacacgggtttcggaggacaacacccccaactaccgctacccccattagacacagaccgagaccctaccccccaaatgttggcgaagaaatccagataggccacatccctagggaggatgtggactatcacctatatcctcatggacccggtctgaacccaaacgccagtactggtcaggaggctctcagtcagaccaccatcagttgggcccctttccaggataccagtgagtatataattagctgccaccctgtgggtactgacgaggaacccctacaatttcgagtccccggaacgagcaccagtgctacattgacgggcctgacacgaggcgcaacgtacaatgtgatcgtagaagcattaaaagatcagcagcgccacaaggtgagggaggaggtggtgacagtcgggaactcagttaacgagggactcaaccagccaacagatgactcatgcttcgacccctacaccgtaagccattacgctgtaggcgatgagtgggagcggatgagcgagagtggcttcaagctcctgtgtcagtgccttggctttggatcaggacacttccgctgcgactcatccagatggtgccacgacaatggtgtaaactataaaatcggagagaaatgggaccggcagggtgaaaacggccaaatgatgtcatgcacgtgcttgggaaacgggaaaggcgagttcaaatgtgacccacacgaggcaacctgttacgatgatgggaagacatatcacgtgggcgagcaatggcaaaaagagtaccttggggctatttgtagttgtacctgctttgggggacagcggggttggcgctgtgacaactgccgcaggccaggcggtgagccatcccccgagggaaccactggccagagttataatcagtattcacaacgttaccatcagcgcactaatacaaacgttaattgcccaatcgaatgctttatgccattggatgtgcaagctgatagagaagactccagggaatag

SEQ ID NO: 267164 - DNA, 3312 bp, Artificial Sequence
  derived and/or modified sequence
ctccggtggacaccactcaacagcagcaccattatcgggtaccgcatcacagttgtggctgctggggaaggtattcccatatttgaggactttgtggattcatcagttggctactacacagtgacgggactcgaacccggaatcgactatgatatcagcgtgataactctgattaacggtggagaatccgcacctaccactttaacccaacaaacagccgtccctccacctactgacttaagatttactaacatcggcccagacactatgagagttacctgggccccaccaccgtcaatcgatttaacgaattttctcgttagatattctccggtgaaaaacgaggaagacgtggccgagctgtccattagtcctagtgataacgcagtcgtcctaacaaatctgctgcccgggactgaatacgtggtaagcgtatctagcgtatacgaacagcatgagagcacaccgttacgtggccggcagaagaccgggcttgatagtcctacagggatcgacttttccgacattacagccaactctttcaccgtgcactggattgccccacgggcaaccatcacaggatatcgcattcgccaccatcctgagcatttttccggcaggccacgcgaagacagggtcccccacagtcggaactccatcaccctcactaacttgacccctggcacagaatacgtggtgtctattgtggccctgaacggacgagaagagtcccccttgctcatagggcagcagtctacagtcagcgacgtcccccgagacctcgaggtggttgcagcgacccccacctcactactgataagctgggacgctccagcagttaccgtgcggtattaccgcataacatatggcgagactggaggcaattctcctgttcaggaatttaccgtacctgggtctaaatctacagctactatttctggcctgaaaccgggcgtggactatacaattactgtctatgccgtaaccgggcgcggagattcaccagcgagttccaaacccatatccatcaactatagaacagaaattgacaagccgtcccagatgcaagtcacagacgtgcaggacaatagcattagcgtgaaatggctgccatcatcctccccagtgaccggctatagagtcaccacaactcccaaaaacggccccgggcccacaaagactaagacagccggacctgatcagacggaaatgaccatagaaggcctccagcccaccgtagagtatgtggtgtccgtctacgcacaaaatcccagcggagagtcccagcccctggttcagaccgcagtcacaaccataccagctccaacggaccttaaattcacgcaggttacccccactagcctcagcgcccaatggacaccccctaatgtgcagttgaccggctacagagtaagagtcacaccaaaagaaaaaaccggtccgatgaaagaaattaacctggctccagattcatcgtcggtcgtggtgagtggcctgatggtagccaccaagtatgaggtttccgtgtatgccctgaaagataccctcaccagcagaccagcgcaaggtgtagtgacaaccctcgaaaatgtgtctccacctcgccgggctcgggtaacggacgcaaccgaaaccaccatcacaatctcatggagaaccaaaaccgagaccatcacaggcttccaggtcgacgcagtgcccgccaatggtcagactcctattcagagaaccatcaagcctgacgttaggtcttacacaataactggactgcagcctgggaccgactataagatctatctgtacacgctaaacgataacgcccgaagtagcccagtcgtcatagacgcctctacagccatcgatgctccgagcaacctgagatttctggccaccactcccaatagcctccttgtgagttggcaacccccacgggctcggatcacgggctacatcatcaaatacgaaaagccggggagcccccccagagaagtcgttccaagacccagaccaggcgttacagaagcaacaattacgggcctcgaaccaggcacagagtacaccatttatgtgattgccctgaaaaataaccaaaaaagtgagcctttgatagggaggaaaaaaacggatgagctgccacaactggtgaccctccctcatccaaatctgcatgggcccgaaattctagacgtaccatctactgtgcaaaagaccccatttgtcactcaccctggctatgacactgggaatggtatccaactgccgggtacaagcggccagcagccttccgtaggtcagcagatgattttcgaggagcacggatttcggcgaaccactccccccactactgccactccaattagacataggccaaggccttatccgcctaacgttggtgaggaaatccagatcggccacattcctcgagaagacgttgattaccacctgtacccccacggaccaggactcaacccaaacgcttccacaggccaagaggctttgagccagaccaccatcagttgggcaccatttcaagacacctccgaatacatcattagctgtcaccccgtcgggactgacgaggagccactccagttccgggtcccaggcaccagcacctccgccactctgaccgggttgactaggggcgccacttacaacgttatagtggaggctctcaaagatcaacaacgccacaaggtgcgcgaagaggtcgtaacggttgggaattcggttaatgaagggttgaatcagcccaccgacgactcgtgctttgatccttacacagtgtcacactatgcagtcggggacgagtgggagcgtatgtccgaatctggattcaaactactttgccaatgcctcgggttcggcagcggccatttcagatgcgactcttcaagatggtgccacgacaatggagtcaactataagattggggagaaatgggacaggcagggcgagaatgggcaaatgatgagttgtacctgtttagggaatggaaagggagagttcaagtgtgatcctcatgaggccacttgttacgatgacgggaaaacctatcacgtgggggagcagtggcagaaagaatacctgggcgcaatatgctcttgtacctgcttcggagggcaacggggctggcggtgcgataactgtaggcggcctggcggtgagcccagtcctgagggcaccactggccagagttacaaccagtatagccagcggtaccaccagagaacaaacactaatgtgaactgcccgattgagtgcttcatgccgctggacgtacaagcagatagagaggacagcagagagtag

SEQ ID NO: 267165 - DNA, 3312 bp, Artificial Sequence
  derived and/or modified sequence
ctgcgttggacccccctcaatagtagtacaatcattggctatagaatcaccgtggtcgctgccggagagggcattcccatatttgaggacttcgttgactcttcagtcggatactacactgtgacagggcttgaaccaggtattgactatgatataagcgtcattactctgatcaatggcggagaaagtgcccccacaactctcacccagcagacggctgtgcccccaccaacagacctgagatttaccaatatcggtcctgacacaatgcgcgttacttgggcacctccaccttccatcgacctaaccaactttttggtcaggtatagtcccgtgaaaaatgaggaagacgtggctgagctttcgatttcccctagtgataacgcagtcgtcctaacaaatctcttaccaggcaccgagtatgtcgtcagcgttagtagcgtttacgagcagcatgagagcacccccctccgagggcgccaaaagacagggttggactcaccaaccggaattgactttagcgatataacagcaaactcttttaccgtccattggatcgcaccaagagcaacgattaccggctacaggattcgccatcaccctgaacacttttccgggcgaccaagggaagatcgcgtgccccattctcggaacagtataacactcacaaatcttactccagggaccgaatacgtcgtcagtattgtagcccttaatggacgcgaagagtcccccctactgatcggccaacagtcaaccgtatcggacgtgccacgtgacctcgaagtcgtagctgccacacctacctccctgctgatttcttgggacgcgcccgcagttaccgtgcgatactatcgcatcacctatggggaaacaggcggcaattcgccagtccaggagttcaccgtgcccggcagcaagtctacagcaactatatctggcctgaaacccggtgtcgactatactattactgtctatgcggtgacaggaaggggtgattcgccagcaagctctaaacctatttcaataaattatcgcacagaaatcgataaacctagccagatgcaggtcaccgacgtccaggacaattcaatctcagtaaagtggctcccctcctccagccccgtcaccggctaccgagtgaccacaactcctaaaaacggacccggaccgacaaagaccaaaacagctggccccgatcagacagagatgaccatagagggactgcaacccacagttgaatacgtggtttcagtatatgcccagaatcccagcggggagagccagcccctcgtgcaaactgcagtgacaactatcccagcccctaccgatcttaaattcacccaggttacacctacttcactctccgcgcaatggacaccacctaatgtgcagctcaccggttatagagttcgagtgacacctaaggagaagacaggcccaatgaaggaaatcaatttggcacccgattcctcctcagtagtcgtctccggcttgatggtcgcaaccaagtacgaggtctccgtatacgccttaaaggacaccctgacctcaaggcctgcccagggcgttgtaacaaccttggagaacgtaagcccccctcgcagagcccgtgtgaccgatgcgaccgaaaccacaataacaattagttggaggacaaagacagagacgataacaggcttccaagttgatgccgttcctgccaatggacaaacccccatccagcgtacaatcaaacccgacgtcagaagctatacaatcaccggcctgcagcccggaacagactacaagatctacctgtacaccctgaatgacaacgccagatcatctccagttgtgattgatgcctccacagccatcgacgccccctctaatttgagatttctcgcaaccaccccaaattcgctgcttgttagctggcagcccccccgagctcgaatcactggatacatcattaagtacgaaaagccaggttccccgcctcgtgaagttgttcctaggccccgtccaggcgttactgaggccactatcaccggactcgaacccggcaccgaatacacaatctacgtcatagcgctgaaaaataaccagaaaagcgagccacttattggccggaagaaaacagacgaactaccacaactcgtgaccctgccacatccgaacctacacggacctgagattcttgatgtgcctagcactgtccagaagaccccctttgttacacacccaggttacgatacgggaaacggcatccaactgccgggcacctccggtcagcagccatcagtggggcaacaaatgatctttgaggaacacggctttaggcgaaccaccccacccaccacagccaccccaataagacatagaccccgtccttaccccccgaacgtgggcgaagagatccaaattggccatatccctcgggaagacgtcgattaccacctctacccacacggtccagggctgaatcctaacgctagcaccggccaggaggccctatcccagacaacaatttcatgggctccgttccaagataccagcgagtacattatttcttgccatccagttgggacagacgaagagccattgcaattcagagtgcctggaacttcaaccagtgctaccctcacaggacttacccgtggagctacatacaacgtcatagtcgaggcccttaaagatcagcaaagacataaggtccgcgaagaagtggtgaccgtgggcaactccgttaacgagggactcaaccagccaaccgacgactcttgcttcgatccttataccgtctcacactacgccgtcggagacgaatgggagagaatgtctgaatccgggttcaagctgctatgccaatgtctgggatttggaagcggccactttcgatgtgacagcagcaggtggtgtcacgataatggcgttaattataagataggagaaaaatgggaccgccagggcgagaacggccagatgatgagttgcacatgtctgggaaacggcaagggagaattcaaatgcgacccacacgaggccacatgttatgacgacggcaaaacctaccatgtcggagaacaatggcaaaaagagtatcttggagctatctgttcttgcacctgcttcggagggcagagagggtggcgatgcgataattgccgtagacctgggggagaaccgtcgcccgaaggcaccaccggacagagctataatcaatattctcagcgttaccatcaacggaccaataccaacgtgaactgtcctattgaatgcttcatgccactggacgtgcaggcagacagagaagacagtagagagtag

SEQ ID NO: 267166 - RNA, 3312 nt, Artificial Sequence
  derived and/or modified sequence
cuccgguggacaccacucaacagcagcaccauuaucggguaccgcaucacaguuguggcugcuggggaagguauucccauauuugaggacuuuguggauucaucaguuggcuacuacacagugacgggacucgaacccggaaucgacuaugauaucagcgugauaacucugauuaacgguggagaauccgcaccuaccacuuuaacccaacaaacagccgucccuccaccuacugacuuaagauuuacuaacaucggcccagacacuaugagaguuaccugggccccaccaccgucaaucgauuuaacgaauuuucucguuagauauucuccggugaaaaacgaggaagacguggccgagcuguccauuaguccuagugauaacgcagucguccuaacaaaucugcugcccgggacugaauacgugguaagcguaucuagcguauacgaacagcaugagagcacaccguuacguggccggcagaagaccgggcuugauaguccuacagggaucgacuuuuccgacauuacagccaacucuuucaccgugcacuggauugccccacgggcaaccaucacaggauaucgcauucgccaccauccugagcauuuuuccggcaggccacgcgaagacagggucccccacagucggaacuccaucacccucacuaacuugaccccuggcacagaauacguggugucuauuguggcccugaacggacgagaagagucccccuugcucauagggcagcagucuacagucagcgacgucccccgagaccucgaggugguugcagcgacccccaccucacuacugauaagcugggacgcuccagcaguuaccgugcgguauuaccgcauaacauauggcgagacuggaggcaauucuccuguucaggaauuuaccguaccugggucuaaaucuacagcuacuauuucuggccugaaaccgggcguggacuauacaauuacugucuaugccguaaccgggcgcggagauucaccagcgaguuccaaacccauauccaucaacuauagaacagaaauugacaagccgucccagaugcaagucacagacgugcaggacaauagcauuagcgugaaauggcugccaucauccuccccagugaccggcuauagagucaccacaacucccaaaaacggccccgggcccacaaagacuaagacagccggaccugaucagacggaaaugaccauagaaggccuccagcccaccguagaguaugugguguccgucuacgcacaaaaucccagcggagagucccagccccugguucagaccgcagucacaaccauaccagcuccaacggaccuuaaauucacgcagguuacccccacuagccucagcgcccaauggacacccccuaaugugcaguugaccggcuacagaguaagagucacaccaaaagaaaaaaccgguccgaugaaagaaauuaaccuggcuccagauucaucgucggucguggugaguggccugaugguagccaccaaguaugagguuuccguguaugcccugaaagauacccucaccagcagaccagcgcaagguguagugacaacccucgaaaaugugucuccaccucgccgggcucggguaacggacgcaaccgaaaccaccaucacaaucucauggagaaccaaaaccgagaccaucacaggcuuccaggucgacgcagugcccgccaauggucagacuccuauucagagaaccaucaagccugacguuaggucuuacacaauaacuggacugcagccugggaccgacuauaagaucuaucuguacacgcuaaacgauaacgcccgaaguagcccagucgucauagacgccucuacagccaucgaugcuccgagcaaccugagauuucuggccaccacucccaauagccuccuugugaguuggcaacccccacgggcucggaucacgggcuacaucaucaaauacgaaaagccggggagcccccccagagaagucguuccaagacccagaccaggcguuacagaagcaacaauuacgggccucgaaccaggcacagaguacaccauuuaugugauugcccugaaaaauaaccaaaaaagugagccuuugauagggaggaaaaaaacggaugagcugccacaacuggugacccucccucauccaaaucugcaugggcccgaaauucuagacguaccaucuacugugcaaaagaccccauuugucacucacccuggcuaugacacugggaaugguauccaacugccggguacaagcggccagcagccuuccguaggucagcagaugauuuucgaggagcacggauuucggcgaaccacuccccccacuacugccacuccaauuagacauaggccaaggccuuauccgccuaacguuggugaggaaauccagaucggccacauuccucgagaagacguugauuaccaccuguacccccacggaccaggacucaacccaaacgcuuccacaggccaagaggcuuugagccagaccaccaucaguugggcaccauuucaagacaccuccgaauacaucauuagcugucaccccgucgggacugacgaggagccacuccaguuccgggucccaggcaccagcaccuccgccacucugaccggguugacuaggggcgccacuuacaacguuauaguggaggcucucaaagaucaacaacgccacaaggugcgcgaagaggucguaacgguugggaauucgguuaaugaaggguugaaucagcccaccgacgacucgugcuuugauccuuacacagugucacacuaugcagucggggacgagugggagcguauguccgaaucuggauucaaacuacuuugccaaugccucggguucggcagcggccauuucagaugcgacucuucaagauggugccacgacaauggagucaacuauaagauuggggagaaaugggacaggcagggcgagaaugggcaaaugaugaguuguaccuguuuagggaauggaaagggagaguucaagugugauccucaugaggccacuuguuacgaugacgggaaaaccuaucacgugggggagcaguggcagaaagaauaccugggcgcaauaugcucuuguaccugcuucggagggcaacggggcuggcggugcgauaacuguaggcggccuggcggugagcccaguccugagggcaccacuggccagaguuacaaccaguauagccagcgguaccaccagagaacaaacacuaaugugaacugcccgauugagugcuucaugccgcuggacguacaagcagauagagaggacagcagagaguag

SEQ ID NO: 267167 - RNA, 3312 nt, Artificial Sequence
  derived and/or modified sequence
cugcguuggaccccccucaauaguaguacaaucauuggcuauagaaucaccguggucgcugccggagagggcauucccauauuugaggacuucguugacucuucagucggauacuacacugugacagggcuugaaccagguauugacuaugauauaagcgucauuacucugaucaauggcggagaaagugcccccacaacucucacccagcagacggcugugcccccaccaacagaccugagauuuaccaauaucgguccugacacaaugcgcguuacuugggcaccuccaccuuccaucgaccuaaccaacuuuuuggucagguauagucccgugaaaaaugaggaagacguggcugagcuuucgauuuccccuagugauaacgcagucguccuaacaaaucucuuaccaggcaccgaguaugucgucagcguuaguagcguuuacgagcagcaugagagcaccccccuccgagggcgccaaaagacaggguuggacucaccaaccggaauugacuuuagcgauauaacagcaaacucuuuuaccguccauuggaucgcaccaagagcaacgauuaccggcuacaggauucgccaucacccugaacacuuuuccgggcgaccaagggaagaucgcgugccccauucucggaacaguauaacacucacaaaucuuacuccagggaccgaauacgucgucaguauuguagcccuuaauggacgcgaagaguccccccuacugaucggccaacagucaaccguaucggacgugccacgugaccucgaagucguagcugccacaccuaccucccugcugauuucuugggacgcgcccgcaguuaccgugcgauacuaucgcaucaccuauggggaaacaggcggcaauucgccaguccaggaguucaccgugcccggcagcaagucuacagcaacuauaucuggccugaaacccggugucgacuauacuauuacugucuaugcggugacaggaaggggugauucgccagcaagcucuaaaccuauuucaauaaauuaucgcacagaaaucgauaaaccuagccagaugcaggucaccgacguccaggacaauucaaucucaguaaaguggcuccccuccuccagccccgucaccggcuaccgagugaccacaacuccuaaaaacggacccggaccgacaaagaccaaaacagcuggccccgaucagacagagaugaccauagagggacugcaacccacaguugaauacgugguuucaguauaugcccagaaucccagcggggagagccagccccucgugcaaacugcagugacaacuaucccagccccuaccgaucuuaaauucacccagguuacaccuacuucacucuccgcgcaauggacaccaccuaaugugcagcucaccgguuauagaguucgagugacaccuaaggagaagacaggcccaaugaaggaaaucaauuuggcacccgauuccuccucaguagucgucuccggcuugauggucgcaaccaaguacgaggucuccguauacgccuuaaaggacacccugaccucaaggccugcccagggcguuguaacaaccuuggagaacguaagccccccucgcagagcccgugugaccgaugcgaccgaaaccacaauaacaauuaguuggaggacaaagacagagacgauaacaggcuuccaaguugaugccguuccugccaauggacaaacccccauccagcguacaaucaaacccgacgucagaagcuauacaaucaccggccugcagcccggaacagacuacaagaucuaccuguacacccugaaugacaacgccagaucaucuccaguugugauugaugccuccacagccaucgacgcccccucuaauuugagauuucucgcaaccaccccaaauucgcugcuuguuagcuggcagcccccccgagcucgaaucacuggauacaucauuaaguacgaaaagccagguuccccgccucgugaaguuguuccuaggccccguccaggcguuacugaggccacuaucaccggacucgaacccggcaccgaauacacaaucuacgucauagcgcugaaaaauaaccagaaaagcgagccacuuauuggccggaagaaaacagacgaacuaccacaacucgugacccugccacauccgaaccuacacggaccugagauucuugaugugccuagcacuguccagaagacccccuuuguuacacacccagguuacgauacgggaaacggcauccaacugccgggcaccuccggucagcagccaucaguggggcaacaaaugaucuuugaggaacacggcuuuaggcgaaccaccccacccaccacagccaccccaauaagacauagaccccguccuuaccccccgaacgugggcgaagagauccaaauuggccauaucccucgggaagacgucgauuaccaccucuacccacacgguccagggcugaauccuaacgcuagcaccggccaggaggcccuaucccagacaacaauuucaugggcuccguuccaagauaccagcgaguacauuauuucuugccauccaguugggacagacgaagagccauugcaauucagagugccuggaacuucaaccagugcuacccucacaggacuuacccguggagcuacauacaacgucauagucgaggcccuuaaagaucagcaaagacauaagguccgcgaagaaguggugaccgugggcaacuccguuaacgagggacucaaccagccaaccgacgacucuugcuucgauccuuauaccgucucacacuacgccgucggagacgaaugggagagaaugucugaauccggguucaagcugcuaugccaaugucugggauuuggaagcggccacuuucgaugugacagcagcagguggugucacgauaauggcguuaauuauaagauaggagaaaaaugggaccgccagggcgagaacggccagaugaugaguugcacaugucugggaaacggcaagggagaauucaaaugcgacccacacgaggccacauguuaugacgacggcaaaaccuaccaugucggagaacaauggcaaaaagaguaucuuggagcuaucuguucuugcaccugcuucggagggcagagaggguggcgaugcgauaauugccguagaccugggggagaaccgucgcccgaaggcaccaccggacagagcuauaaucaauauucucagcguuaccaucaacggaccaauaccaacgugaacuguccuauugaaugcuucaugccacuggacgugcaggcagacagagaagacaguagagaguag

SEQ ID NO: 267168 - protein, 2387 aa, Artificial Sequence
  derived and/or modified sequence
MLRGPGPGLLLLAVQCLGTAVPSTGASKSKRQAQQMVQPQSPVAVSQSKPGCYDNGKHYQINQQWERTYLGNALVCTCYGGSRGFNCESKPEAEETCFDKYTGNTYRVGDTYERPKDSMIWDCTCIGAGRGRISCTIANRCHEGGQSYKIGDTWRRPHETGGYMLECVCLGNGKGEWTCKPIAEKCFDHAAGTSYVVGETWEKPYQGWMMVDCTCLGEGSGRITCTSRNRCNDQDTRTSYRIGDTWSKKDNRGNLLQCICTGNGRGEWKCERHTSVQTTSSGSGPFTDVRAAVYQPQPHPQPPPYGHCVTDSGVVYSVGMQWLKTQGNKQMLCTCLGNGVSCQETAVTQTYGGNSNGEPCVLPFTYNGRTFYSCTTEGRQDGHLWCSTTSNYEQDQKYSFCTDHTVLVQTRGGNSNGALCHFPFLYNNHNYTDCTSEGRRDNMKWCGTTQNYDADQKFGFCPMAAHEEICTTNEGVMYRIGDQWDKQHDMGHMMRCTCVGNGRGEWTCIAYSQLRDQCIVDDITYNVNDTFHKRHEEGHMLNCTCFGQGRGRWKCDPVDQCQDSETGTFYQIGDSWEKYVHGVRYQCYCYGRGIGEWHCQPLQTYPSSSGPVEVFITETPSQPNSHPIQWNAPQPSHISKYILRWRPKNSVGRWKEATIPGHLNSYTIKGLKPGVVYEGQLISIQQYGHQEVTRFDFTTTSTSTPVTSNTVTGETTPFSPLVATSESVTEITASSFVVSWVSASDTVSGFRVEYELSEEGDEPQYLDLPSTATSVNIPDLLPGRKYIVNVYQISEDGEQSLILSTSQTTAPDAPPDTTVDQVDDTSIVVRWSRPQAPITGYRIVYSPSVEGSSTELNLPETANSVTLSDLQPGVQYNITIYAVEENQESTPVVIQQETTGTPRSDTVPSPRDLQFVEVTDVKVTIMWTPPESAVTGYRVDVIPVNLPGEHGQRLPISRNTFAEVTGLSPGVTYYFKVFAVSHGRESKPLTAQQTTKLDAPTNLQFVNETDSTVLVRWTPPRAQITGYRLTVGLTRRGQPRQYNVGPSVSKYPLRNLQPASEYTVSLVAIKGNQESPKATGVFTTLQPGSSIPPYNTEVTETTIVITWTPAPRIGFKLGVRPSQGGEAPREVTSDSGSIVVSGLTPGVEYVYTIQVLRDGQERDAPIVNKVVTPLSPPTNLHLEANPDTGVLTVSWERSTTPDITGYRITTTPTNGQQGNSLEEVVHADQSSCTFDNLSPGLEYNVSVYTVKDDKESVPISDTIIPEVPQLTDLSFVDITDSSIGLRWTPLNSSTIIGYRITVVAAGEGIPIFEDFVDSSVGYYTVTGLEPGIDYDISVITLINGGESAPTTLTQQTAVPPPTDLRFFSDITANSFTVHWIAPRATITGYRIRHHPEHFSGRPREDRVPHSRNSITLTNLTPGTEYVVSIVALNGREESPLLIGQQSTVSDVPRDLEVVAATPTSLLISWDAPAVTVRYYRITYGETGGNSPVQEFTVPGSKSTATISGLKPGVDYTITVYAVTGRGDSPASSKPISINYRTEIDKPSQMQVTDVQDNSISVKWLPSSSPVTGYRVTTTPKNGPGPTKTKTAGPDQTEMTIEGLQPTVEYVVSVYAQNPSGESQPLVQTAVTNIDRPKGLAFTDVDVDSIKIAWESPQGQVSRYRVTYSSPEDGIHELFPAPDGEEDTAELQGLRPGSEYTVSVVALHDDMESQPLIGTQSTAIPAPTDLKFTQVTPTSLSAQWTPPNVQLTGYRVRVTPKEKTGPMKEINLAPDSSSVVVSGLMVATKYEVSVYALKDTLTSRPAQGVVTTLENVSPPRRARVTDATETTITISWRTKTETITGFQVDAVPANGQTPIQRTIKPDVRSYTITGLQPGTDYKIYLYTLNDNARSSPVVIDASTAIDAPSNLRFLATTPNSLLVSWQPPRARITGYIIKYEKPGSPPREVVPRPRPGVTEATITGLEPGTEYTIYVIALKNNQKSEPLIGRKKTDELPQLVTLPHPNLHGPEILDVPSTVQKTPFVTHPGYDTGNGIQLPGTSGQQPSVGQQMIFEEHGFRRTTPPTTATPIRHRPRPYPPNVGEEIQIGHIPREDVDYHLYPHGPGLNPNASTGQEALSQTTISWAPFQDTSEYIISCHPVGTDEEPLQFRVPGTSTSATLTGLTRGATYNVIVEALKDQQRHKVREEVVTVGNSVNEGLNQPTDDSCFDPYTVSHYAVGDEWERMSESGFKLLCQCLGFGSGHFRCDSSRWCHDNGVNYKIGEKWDRQGENGQMMSCTCLGNGKGEFKCDPHEATCYDDGKTYHVGEQWQKEYLGAICSCTCFGGQRGWRCDNCRRPGGEPSPEGTTGQSYNQYSQRYHQRTNTNVNCPIECFMPLDVQADREDSRE

SEQ ID NO: 267169 - protein, 2386 aa, Artificial Sequence
  derived and/or modified sequence
MLRGPGPGLLLLAVQCLGTAVPSTGASKSKRQAQQMVQPQSPVAVSQSKPGCYDNGKHYQINQQWERTYLGNALVCTCYGGSRGFNCESKPEAEETCFDKYTGNTYRVGDTYERPKDSMIWDCTCIGAGRGRISCTIANRCHEGGQSYKIGDTWRRPHETGGYMLECVCLGNGKGEWTCKPIAEKCFDHAAGTSYVVGETWEKPYQGWMMVDCTCLGEGSGRITCTSRNRCNDQDTRTSYRIGDTWSKKDNRGNLLQCICTGNGRGEWKCERHTSVQTTSSGSGPFTDVRAAVYQPQPHPQPPPYGHCVTDSGVVYSVGMQWLKTQGNKQMLCTCLGNGVSCQETAVTQTYGGNSNGEPCVLPFTYNGRTFYSCTTEGRQDGHLWCSTTSNYEQDQKYSFCTDHTVLVQTRGGNSNGALCHFPFLYNNHNYTDCTSEGRRDNMKWCGTTQNYDADQKFGFCPMAAHEEICTTNEGVMYRIGDQWDKQHDMGHMMRCTCVGNGRGEWTCIAYSQLRDQCIVDDITYNVNDTFHKRHEEGHMLNCTCFGQGRGRWKCDPVDQCQDSETGTFYQIGDSWEKYVHGVRYQCYCYGRGIGEWHCQPLQTYPSSSGPVEVFITETPSQPNSHPIQWNAPQPSHISKYILRWRPKNSVGRWKEATIPGHLNSYTIKGLKPGVVYEGQLISIQQYGHQEVTRFDFTTTSTSTPVTSNTVTGETTPFSPLVATSESVTEITASSFVVSWVSASDTVSGFRVEYELSEEGDEPQYLDLPSTATSVNIPDLLPGRKYIVNVYQISEDGEQSLILSTSQTTAPDAPPDTTVDQVDDTSIVVRWSRPQAPITGYRIVYSPSVEGSSTELNLPETANSVTLSDLQPGVQYNITIYAVEENQESTPVVIQQETTGTPRSDTVPSPRDLQFVEVTDVKVTIMWTPPESAVTGYRVDVIPVNLPGEHGQRLPISRNTFAEVTGLSPGVTYYFKVFAVSHGRESKPLTAQQTTKLDAPTNLQFVNETDSTVLVRWTPPRAQITGYRLTVGLTRRGQPRQYNVGPSVSKYPLRNLQPASEYTVSLVAIKGNQESPKATGVFTTLQPGSSIPPYNTEVTETTIVITWTPAPRIGFKLGVRPSQGGEAPREVTSDSGSIVVSGLTPGVEYVYTIQVLRDGQERDAPIVNKVVTPLSPPTNLHLEANPDTGVLTVSWERSTTPDITGYRITTTPTNGQQGNSLEEVVHADQSSCTFDNLSPGLEYNVSVYTVKDDKESVPISDTIIPAVPPPTDLRFTNIGPDTMRVTWAPPPSIDLTNFLVRYSPVKNEEDVAELSISPSDNAVVLTNLLPGTEYVVSVSSVYEQHESTPLRGRQKTGLDSPTGIDFSDITANSFTVHWIAPRATITGYRIRHHPEHFSGRPREDRVPHSRNSITLTNLTPGTEYVVSIVALNGREESPLLIGQQSTVSDVPRDLEVVAATPTSLLISWDAPAVTVRYYRITYGETGGNSPVQEFTVPGSKSTATISGLKPGVDYTITVYAVTGRGDSPASSKPISINYRTEIDKPSQMQVTDVQDNSISVKWLPSSSPVTGYRVTTTPKNGPGPTKTKTAGPDQTEMTIEGLQPTVEYVVSVYAQNPSGESQPLVQTAVTNIDRPKGLAFTDVDVDSIKIAWESPQGQVSRYRVTYSSPEDGIHELFPAPDGEEDTAELQGLRPGSEYTVSVVALHDDMESQPLIGTQSTAIPAPTDLKFTQVTPTSLSAQWTPPNVQLTGYRVRVTPKEKTGPMKEINLAPDSSSVVVSGLMVATKYEVSVYALKDTLTSRPAQGVVTTLENVSPPRRARVTDATETTITISWRTKTETITGFQVDAVPANGQTPIQRTIKPDVRSYTITGLQPGTDYKIYLYTLNDNARSSPVVIDASTAIDAPSNLRFLATTPNSLLVSWQPPRARITGYIIKYEKPGSPPREVVPRPRPGVTEATITGLEPGTEYTIYVIALKNNQKSEPLIGRKKTDELPQLVTLPHPNLHGPEILDVPSTVQKTPFVTHPGYDTGNGIQLPGTSGQQPSVGQQMIFEEHGFRRTTPPTTATPIRHRPRPYPPNVGEEIQIGHIPREDVDYHLYPHGPGLNPNASTGQEALSQTTISWAPFQDTSEYIISCHPVGTDEEPLQFRVPGTSTSATLTGLTRGATYNVIVEALKDQQRHKVREEVVTVGNSVNEGLNQPTDDSCFDPYTVSHYAVGDEWERMSESGFKLLCQCLGFGSGHFRCDSSRWCHDNGVNYKIGEKWDRQGENGQMMSCTCLGNGKGEFKCDPHEATCYDDGKTYHVGEQWQKEYLGAICSCTCFGGQRGWRCDNCRRPGGEPSPEGTTGQSYNQYSQRYHQRTNTNVNCPIECFMPLDVQADREDSRE

SEQ ID NO: 267170 - DNA, 7164 bp, Artificial Sequence
  derived and/or modified sequence
atgctgagaggccccggccccggcctgctgctgctggccgtgcagtgcctgggcaccgccgtgcccagcaccggcgccagcaagagcaagagacaggcccagcagatggtgcagccccagagccccgtggccgtgagccagagcaagcccggctgctacgacaacggcaagcactaccagatcaaccagcagtgggagagaacctacctgggcaacgccctggtgtgcacctgctacggcggcagcagaggcttcaactgcgagagcaagcccgaggccgaggagacctgcttcgacaagtacaccggcaacacctacagagtgggcgacacctacgagagacccaaggacagcatgatctgggactgcacctgcatcggcgccggcagaggcagaatcagctgcaccatcgccaacagatgccacgagggcggccagagctacaagatcggcgacacctggagaagaccccacgagaccggcggctacatgctggagtgcgtgtgcctgggcaacggcaagggcgagtggacctgcaagcccatcgccgagaagtgcttcgaccacgccgccggcaccagctacgtggtgggcgagacctgggagaagccctaccagggctggatgatggtggactgcacctgcctgggcgagggcagcggcagaatcacctgcaccagcagaaacagatgcaacgaccaggacaccagaaccagctacagaatcggcgacacctggagcaagaaggacaacagaggcaacctgctgcagtgcatctgcaccggcaacggcagaggcgagtggaagtgcgagagacacaccagcgtgcagaccaccagcagcggcagcggccccttcaccgacgtgagagccgccgtgtaccagccccagccccacccccagccccccccctacggccactgcgtgaccgacagcggcgtggtgtacagcgtgggcatgcagtggctgaagacccagggcaacaagcagatgctgtgcacctgcctgggcaacggcgtgagctgccaggagaccgccgtgacccagacctacggcggcaacagcaacggcgagccctgcgtgctgcccttcacctacaacggcagaaccttctacagctgcaccaccgagggcagacaggacggccacctgtggtgcagcaccaccagcaactacgagcaggaccagaagtacagcttctgcaccgaccacaccgtgctggtgcagaccagaggcggcaacagcaacggcgccctgtgccacttccccttcctgtacaacaaccacaactacaccgactgcaccagcgagggcagaagagacaacatgaagtggtgcggcaccacccagaactacgacgccgaccagaagttcggcttctgccccatggccgcccacgaggagatctgcaccaccaacgagggcgtgatgtacagaatcggcgaccagtgggacaagcagcacgacatgggccacatgatgagatgcacctgcgtgggcaacggcagaggcgagtggacctgcatcgcctacagccagctgagagaccagtgcatcgtggacgacatcacctacaacgtgaacgacaccttccacaagagacacgaggagggccacatgctgaactgcacctgcttcggccagggcagaggcagatggaagtgcgaccccgtggaccagtgccaggacagcgagaccggcaccttctaccagatcggcgacagctgggagaagtacgtgcacggcgtgagataccagtgctactgctacggcagaggcatcggcgagtggcactgccagcccctgcagacctaccccagcagcagcggccccgtggaggtgttcatcaccgagacccccagccagcccaacagccaccccatccagtggaacgccccccagcccagccacatcagcaagtacatcctgagatggagacccaagaacagcgtgggcagatggaaggaggccaccatccccggccacctgaacagctacaccatcaagggcctgaagcccggcgtggtgtacgagggccagctgatcagcatccagcagtacggccaccaggaggtgaccagattcgacttcaccaccaccagcaccagcacccccgtgaccagcaacaccgtgaccggcgagaccacccccttcagccccctggtggccaccagcgagagcgtgaccgagatcaccgccagcagcttcgtggtgagctgggtgagcgccagcgacaccgtgagcggcttcagagtggagtacgagctgagcgaggagggcgacgagccccagtacctggacctgcccagcaccgccaccagcgtgaacatccccgacctgctgcccggcagaaagtacatcgtgaacgtgtaccagatcagcgaggacggcgagcagagcctgatcctgagcaccagccagaccaccgcccccgacgccccccccgacaccaccgtggaccaggtggacgacaccagcatcgtggtgagatggagcagaccccaggcccccatcaccggctacagaatcgtgtacagccccagcgtggagggcagcagcaccgagctgaacctgcccgagaccgccaacagcgtgaccctgagcgacctgcagcccggcgtgcagtacaacatcaccatctacgccgtggaggagaaccaggagagcacccccgtggtgatccagcaggagaccaccggcacccccagaagcgacaccgtgcccagccccagagacctgcagttcgtggaggtgaccgacgtgaaggtgaccatcatgtggaccccccccgagagcgccgtgaccggctacagagtggacgtgatccccgtgaacctgcccggcgagcacggccagagactgcccatcagcagaaacaccttcgccgaggtgaccggcctgagccccggcgtgacctactacttcaaggtgttcgccgtgagccacggcagagagagcaagcccctgaccgcccagcagaccaccaagctggacgcccccaccaacctgcagttcgtgaacgagaccgacagcaccgtgctggtgagatggaccccccccagagcccagatcaccggctacagactgaccgtgggcctgaccagaagaggccagcccagacagtacaacgtgggccccagcgtgagcaagtaccccctgagaaacctgcagcccgccagcgagtacaccgtgagcctggtggccatcaagggcaaccaggagagccccaaggccaccggcgtgttcaccaccctgcagcccggcagcagcatccccccctacaacaccgaggtgaccgagaccaccatcgtgatcacctggacccccgcccccagaatcggcttcaagctgggcgtgagacccagccagggcggcgaggcccccagagaggtgaccagcgacagcggcagcatcgtggtgagcggcctgacccccggcgtggagtacgtgtacaccatccaggtgctgagagacggccaggagagagacgcccccatcgtgaacaaggtggtgacccccctgagcccccccaccaacctgcacctggaggccaaccccgacaccggcgtgctgaccgtgagctgggagagaagcaccacccccgacatcaccggctacagaatcaccaccacccccaccaacggccagcagggcaacagcctggaggaggtggtgcacgccgaccagagcagctgcaccttcgacaacctgagccccggcctggagtacaacgtgagcgtgtacaccgtgaaggacgacaaggagagcgtgcccatcagcgacaccatcatccccgaggtgccccagctgaccgacctgagcttcgtggacatcaccgacagcagcatcggcctgagatggacccccctgaacagcagcaccatcatcggctacagaatcaccgtggtggccgccggcgagggcatccccatcttcgaggacttcgtggacagcagcgtgggctactacaccgtgaccggcctggagcccggcatcgactacgacatcagcgtgatcaccctgatcaacggcggcgagagcgcccccaccaccctgacccagcagaccgccgtgcccccccccaccgacctgagattcttcagcgacatcaccgccaacagcttcaccgtgcactggatcgcccccagagccaccatcaccggctacagaatcagacaccaccccgagcacttcagcggcagacccagagaggacagagtgccccacagcagaaacagcatcaccctgaccaacctgacccccggcaccgagtacgtggtgagcatcgtggccctgaacggcagagaggagagccccctgctgatcggccagcagagcaccgtgagcgacgtgcccagagacctggaggtggtggccgccacccccaccagcctgctgatcagctgggacgcccccgccgtgaccgtgagatactacagaatcacctacggcgagaccggcggcaacagccccgtgcaggagttcaccgtgcccggcagcaagagcaccgccaccatcagcggcctgaagcccggcgtggactacaccatcaccgtgtacgccgtgaccggcagaggcgacagccccgccagcagcaagcccatcagcatcaactacagaaccgagatcgacaagcccagccagatgcaggtgaccgacgtgcaggacaacagcatcagcgtgaagtggctgcccagcagcagccccgtgaccggctacagagtgaccaccacccccaagaacggccccggccccaccaagaccaagaccgccggccccgaccagaccgagatgaccatcgagggcctgcagcccaccgtggagtacgtggtgagcgtgtacgcccagaaccccagcggcgagagccagcccctggtgcagaccgccgtgaccaacatcgacagacccaagggcctggccttcaccgacgtggacgtggacagcatcaagatcgcctgggagagcccccagggccaggtgagcagatacagagtgacctacagcagccccgaggacggcatccacgagctgttccccgcccccgacggcgaggaggacaccgccgagctgcagggcctgagacccggcagcgagtacaccgtgagcgtggtggccctgcacgacgacatggagagccagcccctgatcggcacccagagcaccgccatccccgcccccaccgacctgaagttcacccaggtgacccccaccagcctgagcgcccagtggaccccccccaacgtgcagctgaccggctacagagtgagagtgacccccaaggagaagaccggccccatgaaggagatcaacctggcccccgacagcagcagcgtggtggtgagcggcctgatggtggccaccaagtacgaggtgagcgtgtacgccctgaaggacaccctgaccagcagacccgcccagggcgtggtgaccaccctggagaacgtgagcccccccagaagagccagagtgaccgacgccaccgagaccaccatcaccatcagctggagaaccaagaccgagaccatcaccggcttccaggtggacgccgtgcccgccaacggccagacccccatccagagaaccatcaagcccgacgtgagaagctacaccatcaccggcctgcagcccggcaccgactacaagatctacctgtacaccctgaacgacaacgccagaagcagccccgtggtgatcgacgccagcaccgccatcgacgcccccagcaacctgagattcctggccaccacccccaacagcctgctggtgagctggcagccccccagagccagaatcaccggctacatcatcaagtacgagaagcccggcagcccccccagagaggtggtgcccagacccagacccggcgtgaccgaggccaccatcaccggcctggagcccggcaccgagtacaccatctacgtgatcgccctgaagaacaaccagaagagcgagcccctgatcggcagaaagaagaccgacgagctgccccagctggtgaccctgccccaccccaacctgcacggccccgagatcctggacgtgcccagcaccgtgcagaagacccccttcgtgacccaccccggctacgacaccggcaacggcatccagctgcccggcaccagcggccagcagcccagcgtgggccagcagatgatcttcgaggagcacggcttcagaagaaccaccccccccaccaccgccacccccatcagacacagacccagaccctacccccccaacgtgggcgaggagatccagatcggccacatccccagagaggacgtggactaccacctgtacccccacggccccggcctgaaccccaacgccagcaccggccaggaggccctgagccagaccaccatcagctgggcccccttccaggacaccagcgagtacatcatcagctgccaccccgtgggcaccgacgaggagcccctgcagttcagagtgcccggcaccagcaccagcgccaccctgaccggcctgaccagaggcgccacctacaacgtgatcgtggaggccctgaaggaccagcagagacacaaggtgagagaggaggtggtgaccgtgggcaacagcgtgaacgagggcctgaaccagcccaccgacgacagctgcttcgacccctacaccgtgagccactacgccgtgggcgacgagtgggagagaatgagcgagagcggcttcaagctgctgtgccagtgcctgggcttcggcagcggccacttcagatgcgacagcagcagatggtgccacgacaacggcgtgaactacaagatcggcgagaagtgggacagacagggcgagaacggccagatgatgagctgcacctgcctgggcaacggcaagggcgagttcaagtgcgacccccacgaggccacctgctacgacgacggcaagacctaccacgtgggcgagcagtggcagaaggagtacctgggcgccatctgcagctgcacctgcttcggcggccagagaggctggagatgcgacaactgcagaagacccggcggcgagcccagccccgagggcaccaccggccagagctacaaccagtacagccagagataccaccagagaaccaacaccaacgtgaactgccccatcgagtgcttcatgcccctggacgtgcaggccgacagagaggacagcagagagtag

SEQ ID NO: 267171 - DNA, 7161 bp, Artificial Sequence
  derived and/or modified sequence
atgctgagaggccccggccccggcctgctgctgctggccgtgcagtgcctgggcaccgccgtgcccagcaccggcgccagcaagagcaagagacaggcccagcagatggtgcagccccagagccccgtggccgtgagccagagcaagcccggctgctacgacaacggcaagcactaccagatcaaccagcagtgggagagaacctacctgggcaacgccctggtgtgcacctgctacggcggcagcagaggcttcaactgcgagagcaagcccgaggccgaggagacctgcttcgacaagtacaccggcaacacctacagagtgggcgacacctacgagagacccaaggacagcatgatctgggactgcacctgcatcggcgccggcagaggcagaatcagctgcaccatcgccaacagatgccacgagggcggccagagctacaagatcggcgacacctggagaagaccccacgagaccggcggctacatgctggagtgcgtgtgcctgggcaacggcaagggcgagtggacctgcaagcccatcgccgagaagtgcttcgaccacgccgccggcaccagctacgtggtgggcgagacctgggagaagccctaccagggctggatgatggtggactgcacctgcctgggcgagggcagcggcagaatcacctgcaccagcagaaacagatgcaacgaccaggacaccagaaccagctacagaatcggcgacacctggagcaagaaggacaacagaggcaacctgctgcagtgcatctgcaccggcaacggcagaggcgagtggaagtgcgagagacacaccagcgtgcagaccaccagcagcggcagcggccccttcaccgacgtgagagccgccgtgtaccagccccagccccacccccagccccccccctacggccactgcgtgaccgacagcggcgtggtgtacagcgtgggcatgcagtggctgaagacccagggcaacaagcagatgctgtgcacctgcctgggcaacggcgtgagctgccaggagaccgccgtgacccagacctacggcggcaacagcaacggcgagccctgcgtgctgcccttcacctacaacggcagaaccttctacagctgcaccaccgagggcagacaggacggccacctgtggtgcagcaccaccagcaactacgagcaggaccagaagtacagcttctgcaccgaccacaccgtgctggtgcagaccagaggcggcaacagcaacggcgccctgtgccacttccccttcctgtacaacaaccacaactacaccgactgcaccagcgagggcagaagagacaacatgaagtggtgcggcaccacccagaactacgacgccgaccagaagttcggcttctgccccatggccgcccacgaggagatctgcaccaccaacgagggcgtgatgtacagaatcggcgaccagtgggacaagcagcacgacatgggccacatgatgagatgcacctgcgtgggcaacggcagaggcgagtggacctgcatcgcctacagccagctgagagaccagtgcatcgtggacgacatcacctacaacgtgaacgacaccttccacaagagacacgaggagggccacatgctgaactgcacctgcttcggccagggcagaggcagatggaagtgcgaccccgtggaccagtgccaggacagcgagaccggcaccttctaccagatcggcgacagctgggagaagtacgtgcacggcgtgagataccagtgctactgctacggcagaggcatcggcgagtggcactgccagcccctgcagacctaccccagcagcagcggccccgtggaggtgttcatcaccgagacccccagccagcccaacagccaccccatccagtggaacgccccccagcccagccacatcagcaagtacatcctgagatggagacccaagaacagcgtgggcagatggaaggaggccaccatccccggccacctgaacagctacaccatcaagggcctgaagcccggcgtggtgtacgagggccagctgatcagcatccagcagtacggccaccaggaggtgaccagattcgacttcaccaccaccagcaccagcacccccgtgaccagcaacaccgtgaccggcgagaccacccccttcagccccctggtggccaccagcgagagcgtgaccgagatcaccgccagcagcttcgtggtgagctgggtgagcgccagcgacaccgtgagcggcttcagagtggagtacgagctgagcgaggagggcgacgagccccagtacctggacctgcccagcaccgccaccagcgtgaacatccccgacctgctgcccggcagaaagtacatcgtgaacgtgtaccagatcagcgaggacggcgagcagagcctgatcctgagcaccagccagaccaccgcccccgacgccccccccgacaccaccgtggaccaggtggacgacaccagcatcgtggtgagatggagcagaccccaggcccccatcaccggctacagaatcgtgtacagccccagcgtggagggcagcagcaccgagctgaacctgcccgagaccgccaacagcgtgaccctgagcgacctgcagcccggcgtgcagtacaacatcaccatctacgccgtggaggagaaccaggagagcacccccgtggtgatccagcaggagaccaccggcacccccagaagcgacaccgtgcccagccccagagacctgcagttcgtggaggtgaccgacgtgaaggtgaccatcatgtggaccccccccgagagcgccgtgaccggctacagagtggacgtgatccccgtgaacctgcccggcgagcacggccagagactgcccatcagcagaaacaccttcgccgaggtgaccggcctgagccccggcgtgacctactacttcaaggtgttcgccgtgagccacggcagagagagcaagcccctgaccgcccagcagaccaccaagctggacgcccccaccaacctgcagttcgtgaacgagaccgacagcaccgtgctggtgagatggaccccccccagagcccagatcaccggctacagactgaccgtgggcctgaccagaagaggccagcccagacagtacaacgtgggccccagcgtgagcaagtaccccctgagaaacctgcagcccgccagcgagtacaccgtgagcctggtggccatcaagggcaaccaggagagccccaaggccaccggcgtgttcaccaccctgcagcccggcagcagcatccccccctacaacaccgaggtgaccgagaccaccatcgtgatcacctggacccccgcccccagaatcggcttcaagctgggcgtgagacccagccagggcggcgaggcccccagagaggtgaccagcgacagcggcagcatcgtggtgagcggcctgacccccggcgtggagtacgtgtacaccatccaggtgctgagagacggccaggagagagacgcccccatcgtgaacaaggtggtgacccccctgagcccccccaccaacctgcacctggaggccaaccccgacaccggcgtgctgaccgtgagctgggagagaagcaccacccccgacatcaccggctacagaatcaccaccacccccaccaacggccagcagggcaacagcctggaggaggtggtgcacgccgaccagagcagctgcaccttcgacaacctgagccccggcctggagtacaacgtgagcgtgtacaccgtgaaggacgacaaggagagcgtgcccatcagcgacaccatcatccccgccgtgcccccccccaccgacctgagattcaccaacatcggccccgacaccatgagagtgacctgggcccccccccccagcatcgacctgaccaacttcctggtgagatacagccccgtgaagaacgaggaggacgtggccgagctgagcatcagccccagcgacaacgccgtggtgctgaccaacctgctgcccggcaccgagtacgtggtgagcgtgagcagcgtgtacgagcagcacgagagcacccccctgagaggcagacagaagaccggcctggacagccccaccggcatcgacttcagcgacatcaccgccaacagcttcaccgtgcactggatcgcccccagagccaccatcaccggctacagaatcagacaccaccccgagcacttcagcggcagacccagagaggacagagtgccccacagcagaaacagcatcaccctgaccaacctgacccccggcaccgagtacgtggtgagcatcgtggccctgaacggcagagaggagagccccctgctgatcggccagcagagcaccgtgagcgacgtgcccagagacctggaggtggtggccgccacccccaccagcctgctgatcagctgggacgcccccgccgtgaccgtgagatactacagaatcacctacggcgagaccggcggcaacagccccgtgcaggagttcaccgtgcccggcagcaagagcaccgccaccatcagcggcctgaagcccggcgtggactacaccatcaccgtgtacgccgtgaccggcagaggcgacagccccgccagcagcaagcccatcagcatcaactacagaaccgagatcgacaagcccagccagatgcaggtgaccgacgtgcaggacaacagcatcagcgtgaagtggctgcccagcagcagccccgtgaccggctacagagtgaccaccacccccaagaacggccccggccccaccaagaccaagaccgccggccccgaccagaccgagatgaccatcgagggcctgcagcccaccgtggagtacgtggtgagcgtgtacgcccagaaccccagcggcgagagccagcccctggtgcagaccgccgtgaccaacatcgacagacccaagggcctggccttcaccgacgtggacgtggacagcatcaagatcgcctgggagagcccccagggccaggtgagcagatacagagtgacctacagcagccccgaggacggcatccacgagctgttccccgcccccgacggcgaggaggacaccgccgagctgcagggcctgagacccggcagcgagtacaccgtgagcgtggtggccctgcacgacgacatggagagccagcccctgatcggcacccagagcaccgccatccccgcccccaccgacctgaagttcacccaggtgacccccaccagcctgagcgcccagtggaccccccccaacgtgcagctgaccggctacagagtgagagtgacccccaaggagaagaccggccccatgaaggagatcaacctggcccccgacagcagcagcgtggtggtgagcggcctgatggtggccaccaagtacgaggtgagcgtgtacgccctgaaggacaccctgaccagcagacccgcccagggcgtggtgaccaccctggagaacgtgagcccccccagaagagccagagtgaccgacgccaccgagaccaccatcaccatcagctggagaaccaagaccgagaccatcaccggcttccaggtggacgccgtgcccgccaacggccagacccccatccagagaaccatcaagcccgacgtgagaagctacaccatcaccggcctgcagcccggcaccgactacaagatctacctgtacaccctgaacgacaacgccagaagcagccccgtggtgatcgacgccagcaccgccatcgacgcccccagcaacctgagattcctggccaccacccccaacagcctgctggtgagctggcagccccccagagccagaatcaccggctacatcatcaagtacgagaagcccggcagcccccccagagaggtggtgcccagacccagacccggcgtgaccgaggccaccatcaccggcctggagcccggcaccgagtacaccatctacgtgatcgccctgaagaacaaccagaagagcgagcccctgatcggcagaaagaagaccgacgagctgccccagctggtgaccctgccccaccccaacctgcacggccccgagatcctggacgtgcccagcaccgtgcagaagacccccttcgtgacccaccccggctacgacaccggcaacggcatccagctgcccggcaccagcggccagcagcccagcgtgggccagcagatgatcttcgaggagcacggcttcagaagaaccaccccccccaccaccgccacccccatcagacacagacccagaccctacccccccaacgtgggcgaggagatccagatcggccacatccccagagaggacgtggactaccacctgtacccccacggccccggcctgaaccccaacgccagcaccggccaggaggccctgagccagaccaccatcagctgggcccccttccaggacaccagcgagtacatcatcagctgccaccccgtgggcaccgacgaggagcccctgcagttcagagtgcccggcaccagcaccagcgccaccctgaccggcctgaccagaggcgccacctacaacgtgatcgtggaggccctgaaggaccagcagagacacaaggtgagagaggaggtggtgaccgtgggcaacagcgtgaacgagggcctgaaccagcccaccgacgacagctgcttcgacccctacaccgtgagccactacgccgtgggcgacgagtgggagagaatgagcgagagcggcttcaagctgctgtgccagtgcctgggcttcggcagcggccacttcagatgcgacagcagcagatggtgccacgacaacggcgtgaactacaagatcggcgagaagtgggacagacagggcgagaacggccagatgatgagctgcacctgcctgggcaacggcaagggcgagttcaagtgcgacccccacgaggccacctgctacgacgacggcaagacctaccacgtgggcgagcagtggcagaaggagtacctgggcgccatctgcagctgcacctgcttcggcggccagagaggctggagatgcgacaactgcagaagacccggcggcgagcccagccccgagggcaccaccggccagagctacaaccagtacagccagagataccaccagagaaccaacaccaacgtgaactgccccatcgagtgcttcatgcccctggacgtgcaggccgacagagaggacagcagagagtag

SEQ ID NO: 267172 - DNA, 7164 bp, Artificial Sequence
  derived and/or modified sequence
atgctgagaggtccaggacctggcttacttctcctggccgtgcaatgtctgggcacggccgtcccgagcactggtgcgagcaagagtaagcgacaagcgcaacagatggtgcagcctcaaagtccagtggccgtcagccagtctaagcccgggtgttatgataacgggaaacattaccaaataaaccagcagtgggagcggacttatcttgggaacgcactggtgtgcacttgctatggcggaagccggggttttaattgcgaatccaaacccgaggccgaggagacatgctttgataagtataccggcaacacataccgggtgggcgatacttacgaacgtccaaaggatagtatgatttgggattgtacatgcatcggggccggtcggggacggatctcatgtacaattgccaatcgttgccacgaagggggacagtcttataagattggcgacacctggagacgcccacacgaaacaggcggctacatgctcgaatgcgtgtgcttaggtaacggcaagggggagtggacgtgcaagcctatcgccgaaaagtgctttgatcatgcggcgggcactagctacgtggtgggcgagacatgggaaaaaccttaccaggggtggatgatggtggactgcacatgtcttggcgaaggatcaggccgcattacctgcacttcaagaaatcgctgcaatgatcaagatactcgaacgtcctatcggattggcgacacatggtccaaaaaagataacaggggcaatctgctgcagtgcatatgtacaggaaatggccgaggtgagtggaaatgtgagaggcatacctccgtgcaaacgaccagtagtggtagcggacccttcaccgacgtcagagcggctgtctatcagcctcagcctcatccccagccccctccgtatggccactgcgtgaccgactctggagtcgtctatagtgtgggcatgcaatggctgaaaacccagggcaacaagcagatgttgtgcacatgcctcggcaacggcgtatcatgtcaagagactgctgtaactcagacctacggcggaaacagcaatggcgagccttgcgttctgccatttacctacaatggccgtacattttacagctgtacgaccgaaggccgccaggacggtcatctgtggtgcagcaccacttccaactatgagcaggatcagaagtactctttctgcacagaccataccgttctcgtgcagacccggggtggcaactctaatggcgccctgtgtcacttcccatttctctacaacaaccataactacacagattgcacatcagaaggcagaagggacaatatgaaatggtgcggaacaacacagaactacgatgcagaccagaaattcggattttgtccgatggccgctcatgaggagatttgtaccaccaacgaaggggtgatgtatcgtatcggtgaccagtgggataagcaacacgacatgggccacatgatgcgatgtacttgcgtcggcaatggaagaggcgagtggacctgcattgcttacagccaactgagagatcagtgtatcgtagacgatatcacctacaacgtgaacgacaccttccacaagaggcatgaggaggggcatatgttaaactgcacctgcttcggccaggggcgcggacgctggaagtgtgatcccgtcgaccagtgccaagatagtgaaaccggtacattttaccagattggcgattcctgggagaagtatgtacatggagtccggtatcaatgttattgttacgggagaggaatcggagaatggcattgtcagcccctgcaaacatacccatcctcttccggtcccgtcgaggtctttatcacagagacacccagtcaaccaaacagccacccaatccagtggaacgctccacaacccagccatatctcaaaatatatcctgcgatggcgacctaagaattccgttgggcgctggaaagaagccacaattcccggccatcttaactcctacacgattaagggtcttaaaccaggcgtcgtgtacgagggtcaactgatatctattcagcagtatgggcaccaggaggtcaccagattcgattttactaccaccagcacgtccacaccagtgacatccaacacagttacgggcgaaaccactccctttagccccctggtggcaacatctgagagcgttacagagattactgcctcatcctttgtcgtgagctgggtgtccgccagcgataccgtatccggatttcgggtggagtacgaattgagtgaagaaggggacgaaccacagtacctggacctgccttcaacagcaacttccgtgaacatcccagatttgctaccaggcagaaagtatatcgtgaacgtgtaccaaatctccgaggatggcgagcagtccttgattctttccacgagtcaaacgaccgcacccgatgcaccacccgatacaacagtcgatcaggtggacgatacctcaattgtggtccgttggagccggccacaggcaccaatcaccgggtacagaatcgtgtacagcccctctgtagaaggatcaagcacagagcttaatttgccagagacggctaactcagtgaccctgtccgatctccagcctggcgtacagtataacatcaccatttacgctgtggaggaaaaccaagagagcactcccgtagtcattcaacaggagacaactggcacgccgcgctccgacaccgtccccagccctcgcgaccttcagtttgtagaggtgacagacgtcaaagttaccataatgtggaccccccccgagagcgccgtgaccgggtacagggtggatgttatccctgtgaacctccctggagaacacgggcagaggctcccaatatcgcggaatacgttcgctgaggtcaccgggttaagccctggggttacatactattttaaggtgttcgctgtttctcatggtcgtgagagcaagccgctaacagcacagcagaccaccaagctggatgctccgaccaatttgcagttcgtgaacgaaaccgactcgacggtgctcgttcggtggacccctcccagggcccaaataactgggtatcggctcacggttgggctcacccgccgcggtcagccccgccagtacaatgtcggtcctagcgtgtccaagtatcccctgcgaaatctgcagccagcttccgaatacacagtgagcctcgttgcaattaagggtaaccaggagagcccgaaagccaccggagtgttcacaaccttacagccaggcagcagtatccctccatacaataccgaagtgaccgagactacaatagtgattacatggacgccggcaccccggataggattcaagttgggagttcggcccagccaagggggggaagccccaagagaggtgactagtgacagcggatctattgtggtatccgggttgacccccggggtggagtatgtgtatacaattcaggtcctccgggacgggcaggaacgggacgcccctatcgtgaacaaagtggtcactcccctgtcgcctccaaccaaccttcacttagaggcaaacccggatacaggtgtgctgactgtttcatgggaacgtagcacaaccccggatatcacaggatacagaattaccactacgccgactaatggccagcagggaaattcattggaggaagtcgtccacgcagaccagtcttcctgcacctttgacaatctgtctccaggattagaatataatgtgtccgtgtacaccgttaaggacgataaagaaagtgtgcccatatccgacacaattattcccgaggtcccacagctcactgacctgagttttgtggacattacagattctagtataggcctgcggtggacacccctcaactcctcaacaatcatcggataccgcattacagtagtcgccgcgggtgagggcatccccattttcgaagactttgtcgactccagtgtgggatattacaccgtcaccggactggagccgggtattgactacgatataagcgttattacgttgataaacggtggtgagtcagcccctactacactcacccaacagaccgccgtccctcctccgactgatcttcggttcttttctgatatcactgccaatagctttacagtgcattggatcgcacccagagctacgattacagggtaccgcattcgccatcaccctgaacattttagcggacgcccaagagaggatcgggtaccgcattccagaaactcgataacattgaccaatttgactccagggacagaatacgtggtaagcattgttgcgctaaatggacgcgaggaatctccactgttgatcgggcagcagagcactgttagcgacgtgccaagggatttagaggtcgtcgccgccaccccgactagcttgctcattagttgggacgcgccagcagtcacagttaggtattacagaattacctacggcgaaaccgggggaaacagcccagtccaagagttcacagtccccggcagcaaatctactgccacaatttcaggcctgaagcctggagtggattatacaattacagtgtatgctgtgactggcaggggcgacagccctgcgtcaagtaagccaatctcgattaattaccggactgagatcgataagcctagtcagatgcaggttactgacgttcaggataacagtatcagcgtcaagtggctccctagtagctctccagttaccggataccgcgtgacaactactcccaaaaacggtcccggcccgactaaaacaaaaacggcaggaccggaccaaaccgagatgactattgaggggcttcaacccactgtcgaatatgtagtctctgtgtacgcgcagaaccccagcggggagagtcagccgctggtccaaacggccgtcacgaacatagacaggcccaagggactggcctttacagacgtggatgtggacagcatcaagatcgcctgggagagtccacagggacaggtcagccgctatcgcgtgacctacagctctccggaagatgggatccacgagttgttccccgcacctgacggagaggaggacacagcagaattacaaggcttacggcccgggagcgagtacactgtgagtgtcgtcgcactgcacgacgatatggagtcgcaaccactgatcggaacccagtctaccgcaatccctgcgcccactgaccttaaatttactcaagtgacccccacttccctctctgcgcagtggacgccccccaatgtacagttgaccggatatagagtgcgggtgacgcctaaagagaagaccggtccgatgaaggagattaacttagcacccgacagtagctctgtggttgtgtctggactgatggtcgctactaagtatgaagtgagtgtgtatgcgctgaaagacacactgaccagcaggcctgcccagggcgtcgtcactacactcgagaatgtcagcccacctagacgagcgagagtcactgacgccactgagacaacgatcacaattagttggaggactaaaacagagacaatcaccgggttccaggtagatgccgtgccggctaacggacaaactccaatccagaggaccatcaaacccgatgtgagatcctacacaatcaccggcctgcaacctggcacggactataagatttatctttatactctcaacgataacgctcgcagcagtccagttgttatcgatgcatctactgcaattgacgccccatccaacttacggttcttggccacaacccccaactccctccttgtgagctggcaacctccccgcgccagaatcactggctacattatcaagtatgaaaaacccggcagtccccctagggaggtggtgccacggccgcgacccggagtaactgaggctacaatcacgggtctggagcctggcacagagtacaccatctatgtcatcgctctgaaaaataatcagaagagtgaacccttaattggtaggaagaaaactgacgaactgccacagctggtgaccctcccacacccaaacctgcacggtcccgagatactcgacgtaccatcaacggtgcaaaaaaccccttttgtcacacacccagggtatgacaccgggaatggcatccagctgcctggcacttcaggccagcagcctagcgtcggtcaacagatgatatttgaggagcacggattccggaggacaactcccccgaccacagccacacccataagacacagaccacgaccttatccacctaacgtgggtgaggagatacaaattggacacatcccaagagaggatgtcgattatcacttgtatccacacggcccgggccttaaccccaatgcttcaaccggccaggaggctctttcccaaactactatcagttgggcccccttccaggataccagcgaatatattatttcctgccatcctgtgggaacggatgaggagccactgcagtttcgagtgccaggaaccagtacatctgcaacactgactggtctaactagaggtgcaacatacaacgtcatcgtggaggctctgaaggaccagcagagacataaggtgagggaagaggtggtcacggtcggaaattccgttaacgagggcctgaaccagcctacggatgattcttgcttcgacccatacacagtaagtcattacgcagtgggggacgaatgggagagaatgtccgagagcgggtttaaactgctctgccaatgcctggggtttggatctgggcatttcagatgcgactcctcacggtggtgccacgacaacggtgtaaactacaagataggtgaaaagtgggatagacagggtgagaatggacagatgatgtcgtgtacgtgcttgggcaatggcaaaggtgaatttaagtgcgacccccatgaggctacctgctacgacgatggcaaaacataccacgtcggggagcagtggcagaaagagtacctgggtgctatttgtagctgtacatgttttggagggcagagggggtggcggtgtgacaactgcagacgaccgggcggcgagccctccccggaggggacaaccgggcaatcttacaaccaatactcacaaagataccaccagcgaactaatactaacgtcaattgtcctattgagtgttttatgccgctggatgttcaagccgatagagaagatagtcgcgagtag

SEQ ID NO: 267173 - DNA, 7161 bp, Artificial Sequence
  derived and/or modified sequence
atgctgcgcggtcccggccccgggctcttactcttagccgtacagtgcctcgggacagccgtgccctccaccggcgcctctaaatcaaagagacaagctcagcagatggtgcaacctcaatctccagtggccgtgagccagtctaagcccgggtgttatgataacgggaaacattatcagatcaaccaacagtgggagaggacgtatcttggaaacgctctggtatgcacatgctatgggggctcccgtggtttcaattgtgagtcaaaaccagaggccgaagagacctgctttgacaagtacacaggcaacacgtatagggtcggcgatacatatgagaggcccaaagacagtatgatatgggactgtacctgtattggagccggcagaggcagaatctcctgcactatagcaaacagatgtcacgaaggagggcagtcctacaaaatcggcgatacctggcggcgcccccatgaaaccggggggtatatgctggaatgtgtgtgtctcggtaacggcaagggggaatggacctgtaagccgatcgcagaaaaatgcttcgaccatgcagcaggcacgtcatacgtggtcggcgagacatgggaaaaaccatatcagggctggatgatggtggattgtacctgcctgggggaggggagcggccgaattacatgcaccagccgaaatcgatgtaatgaccaggatactcgaaccagttacagaattggcgacacctggagcaagaaagacaacagaggtaatctcttacagtgtatatgcacggggaatggccggggggaatggaaatgcgaaaggcacacctccgttcagacaacctcctctggtagcgggccctttacagatgtccgggctgccgtgtatcagccccagccacatccacagcctcctccctatgggcactgtgtgactgatagcggagtggtatattcagtcggtatgcagtggctgaaaacgcagggcaataaacagatgctatgcacctgcctgggcaacggcgtgagctgccaggagactgctgtgacccaaacatatggcggaaattccaacggggaaccctgtgtgttgcccttcacatacaacggccgaacattctattcatgtaccacagagggtaggcaggatggccacctctggtgcagtaccacatcaaactacgagcaggaccagaagtattctttctgcacagatcacaccgtactggttcagacaagaggtggcaacagcaacggggcattgtgccatttccctttcctgtataataaccataattacaccgactgcacgtcagaaggacgcagggataatatgaagtggtgtggaacaactcagaactacgatgccgaccagaagtttggcttctgccccatggccgcccacgaggaaatttgcaccacgaacgaaggcgtaatgtacaggatcggggaccagtgggataaacagcatgacatgggccacatgatgaggtgcacgtgtgtgggaaacggcagaggagaatggacctgtatagcctattctcagcttcgggaccagtgtattgtcgacgacattacgtacaatgtgaacgatacgttccataaaagacatgaggagggccacatgctgaattgtacctgcttcggccagggtaggggcaggtggaaatgtgatcccgtggatcaatgtcaggattctgagacaggcaccttctaccaaataggggatagctgggagaaatacgtccacggggttaggtatcagtgttactgctacggccggggcattggagagtggcactgccaacccctacagacatatccttcctcctctggccctgtggaagtatttatcacagaaacacccagccaaccaaattcacatccaatacagtggaatgcaccccagcctagtcatatctctaagtatatccttcgatggaggccaaagaatagtgtcggtcgatggaaggaggctacaatcccaggccacttaaactcatataccattaaggggcttaagcccggcgtcgtttacgagggccagttaatctccatccagcagtacgggcaccaggaagtgacccggtttgactttacaactacttctacgagcacgcccgtcacgtccaacacggtaactggagagaccacaccattcagtcccctggtggcaaccagcgaaagcgtgaccgagatcaccgcatcctccttcgtcgtgtcatgggtgagtgccagcgataccgtctctggatttcgcgtggagtatgagttgagtgaagagggggatgagccccagtacttggatctgccctccactgccacgagcgtgaacattccagacctgttgcccgggcgtaagtacattgtaaacgtctaccagatttcagaggatggtgaacagagtctcattcttagcaccagccaaaccactgcgccagacgcaccccctgatacaacagtcgatcaggtcgatgataccagcatcgtagtgcggtggagccggcctcaggcacctattacaggataccggattgtctacagcccatccgtggaggggagttcaaccgaacttaacctgccggagacagcaaattctgtgaccctgtctgacttacagcctggggtgcagtacaacatcacgatctatgctgtggaggagaaccaggaatcaactccagttgtgatacagcaggagacaactggtaccccacggtctgataccgtgcccagcccccgagatctacagttcgtcgaagtcacagacgtcaaagttaccattatgtggacacccccagaatccgccgtcactgggtatagggtggatgtgatacccgttaacctcccaggagagcatgggcagagactgcccatttctaggaacacatttgctgaagtcaccggtctgtctcccggggtcacgtactactttaaagtattcgccgtgtctcacgggagggaaagcaaacctctgaccgcacagcagaccaccaagctcgacgctcctactaatctccaattcgtgaatgagactgactccaccgtgctggtcagatggacgcctcctcgtgcacaaatcacagggtataggcttactgtgggacttacacggagggggcaaccacgccaatacaatgttggaccctcagtttcgaagtatcccctccgcaaccttcaacctgccagtgagtacactgtgagcctggttgccatcaaggggaaccaggaatcccctaaagcaacaggtgtgttcaccactctacagcccggaagctcaatacctccctacaacactgaggttacagagaccaccatcgtgattacctggacgcccgcccccagaatagggtttaagttgggggtcagaccttcacagggcggcgaggcacctcgcgaagtgactagcgatagcggctctattgtggtgtcaggcctcacacctggggttgagtatgtctacaccatacaggtgctgcgagatggccaggaacgggacgcaccaatagtgaataaagttgtgacaccgctgtcgccaccgaccaatctacacctggaggccaatcctgacactggtgtgcttacggtgagttgggagcgctctactaccccggatataacaggctaccggattacaacgactcccaccaatggtcaacaggggaattccctggaggaagtggtccatgcagatcagtcttcatgcacattcgataacctgtctccgggcctggaatacaatgtgtcagtttacacagtcaaggacgataaagagtctgtgccgatctctgacacaatcattcctgccgtgcctcccccaactgacctccgctttacgaacataggcccagacactatgagagtgacctgggctccaccacctagcatcgacctgactaattttcttgttcggtacagcccggttaagaacgaagaggatgtggctgaactctctatttccccatcagataacgcggtggtgctgacgaacctgctccccggcactgaatatgtcgtctctgtgtcgagcgtgtatgagcagcacgaatctacacctctgagaggcagacagaaaactggccttgattctccaacaggaatcgacttcagcgatatcactgctaactctttcacggtccattggatcgcaccacgtgccaccatcactggatacaggatcaggcaccacccagaacactttagtggaagacccagggaagatagagttcctcactcgagaaacagtatcaccttgacaaatctgactcccggtaccgagtatgtggtatcgatcgtcgctctgaacggaagagaggagtctccccttctgattggccagcagtctactgtgtccgatgtaccccgcgatttggaagtcgtggcggccactcctacaagtcttcttattagttgggacgccccagctgtgactgtaagatattacagaattacttatggcgagacagggggtaacagtccggtgcaagaatttactgtcccgggaagtaagtctaccgctacaatatccggactcaagcccggggtggactacaccataaccgtgtacgctgtaaccggtaggggggattctccggcctcctccaaacccatcagcattaactaccggacagagatcgacaagcctagccagatgcaggtgacagatgtgcaggacaacagcatttctgtgaaatggctgccttcctcatccccagtgacagggtaccgggtgaccacaacacccaaaaacggcccgggacctactaagactaaaacggctggtcctgatcaaacagaaatgaccattgaaggtttacagcctaccgtggaatacgtggtgtctgtgtatgcccaaaacccctcgggcgagtcccagccgttagtgcagactgccgttaccaatattgatcgacccaaaggactggcttttactgatgtggacgtggacagtatcaagatcgcctgggaatcaccccagggacaagtttcccgctaccgcgtgacttacagttcaccagaagacgggatacatgaactgtttccagcgccggacggcgaagaagacacggccgagttacagggcctccgaccgggctctgaatacacagtctcggtcgtggcactgcacgacgatatggaatcccaacctctaatcggaactcagtcaactgctatcccagccccgaccgacctaaagtttacccaggtgacaccgacctcactgtcagcacagtggacgccccctaatgtgcagttgaccgggtaccgagtcagagtcaccccaaaggaaaagacaggacctatgaaagagatcaatctggccccggactcttcaagcgtagtggtgtctggtctgatggtggccacgaagtatgaagttagcgtctatgccttgaaagatacactcacctctagaccagctcagggtgtggtgactaccctggagaatgtgagccctcctcggcgcgcccgagttaccgacgctacggaaaccactatcacgatctcttggcgaaccaagacggagaccatcacaggctttcaggtcgatgcagttcccgcaaatggccagactcccattcagcggacaataaaacccgacgtcaggagttacacaattacaggacttcagcctgggaccgactacaagatatatctgtatacactgaacgataatgcccggagtagtcccgtcgtgattgacgcttcaaccgccatcgatgccccgagtaatcttcggtttctggccacaaccccgaactcactgctggtgtcctggcagcccccacgagcccgcatcacaggatacattatcaagtacgaaaagcctgggagcccgccaagggaagtcgttccaaggccccgaccaggagtcaccgaagctaccatcactggtttggagccaggaacggagtacacaatatacgtgatagccctcaagaataaccagaaatccgagcccctgataggcaggaaaaaaaccgacgagctgcctcaactcgtcacgttacctcaccctaacctccacggccccgaaatccttgacgttccatctaccgttcagaagaccccttttgttacccaccccggatatgacacaggaaatggtattcagctcccgggcactagtggccagcagccttctgttggacagcaaatgatctttgaggaacacggcttcagacgtaccacaccccctacaacagctacaccaatccgacaccgcccccgaccatacccccccaacgtgggcgaggagatccagattggccatatcccacgggaagacgttgattatcacctgtatccgcatggtcccggccttaaccctaacgccagtacagggcaggaggccctgagccaaacaacgatctcctgggctccttttcaggacacctctgagtacattattagctgccatcctgttggcaccgatgaggagcctctgcagttccgggttcctggcacttccacgagcgccacattaaccggcctcaccaggggtgccacttataatgtgatcgtcgaagctctcaaggatcaacagcggcacaaagttcgcgaagaggtagtgaccgtcggcaacagcgtgaatgagggcttgaaccagcctaccgatgactcatgcttcgacccttacaccgtgagtcactatgccgtgggggatgaatgggagcggatgagcgagtccggttttaaattgctgtgccagtgcctgggattcggctcgggacatttcagatgcgactcctcaaggtggtgccacgataatggagtgaactataagatcggagaaaagtgggaccgacaaggagagaacggccagatgatgtcttgcacctgcctgggcaacggtaagggagagttcaagtgtgatccgcatgaagccacgtgctatgacgatggaaaaacctaccacgtgggcgagcagtggcagaaagaatatctcggtgccatatgttcttgtacatgtttcggtggccagcgcggatggaggtgcgataactgtcggcgtccaggtggggagcctagccctgaaggaaccaccggccaaagttacaatcagtattcacaaaggtaccatcagcggacaaacacaaacgtcaactgccctatcgaatgttttatgccactcgatgtccaggctgatcgcgaagacagccgagaatag

SEQ ID NO: 267174 - DNA, 8527 bp, Artificial Sequence
  derived and/or modified sequence
gcccgcgccggctgtgctgcacagggggaggagagggaaccccaggcgcgagcgggaagaggggacctgcagccacaacttctctggtcctctgcatcccttctgtccctccacccgtccccttccccaccctctggcccccaccttcttggaggcgacaacccccgggaggcattagaagggatttttcccgcaggttgcgaagggaagcaaacttggtggcaacttgcctcccggtgcgggcgtctctcccccaccgtctcaacatgcttaggggtccggggcccgggctgctgctgctggccgtccagtgcctggggacagcggtgccctccacgggagcctcgaagagcaagaggcaggctcagcaaatggttcagccccagtccccggtggctgtcagtcaaagcaagcccggttgttatgacaatggaaaacactatcagataaatcaacagtgggagcggacctacctaggcaatgcgttggtttgtacttgttatggaggaagccgaggttttaactgcgagagtaaacctgaagctgaagagacttgctttgacaagtacactgggaacacttaccgagtgggtgacacttatgagcgtcctaaagactccatgatctgggactgtacctgcatcggggctgggcgagggagaataagctgtaccatcgcaaaccgctgccatgaagggggtcagtcctacaagattggtgacacctggaggagaccacatgagactggtggttacatgttagagtgtgtgtgtcttggtaatggaaaaggagaatggacctgcaagcccatagctgagaagtgttttgatcatgctgctgggacttcctatgtggtcggagaaacgtgggagaagccctaccaaggctggatgatggtagattgtacttgcctgggagaaggcagcggacgcatcacttgcacttctagaaatagatgcaacgatcaggacacaaggacatcctatagaattggagacacctggagcaagaaggataatcgaggaaacctgctccagtgcatctgcacaggcaacggccgaggagagtggaagtgtgagaggcacacctctgtgcagaccacatcgagcggatctggccccttcaccgatgttcgtgcagctgtttaccaaccgcagcctcacccccagcctcctccctatggccactgtgtcacagacagtggtgtggtctactctgtggggatgcagtggctgaagacacaaggaaataagcaaatgctttgcacgtgcctgggcaacggagtcagctgccaagagacagctgtaacccagacttacggtggcaactcaaatggagagccatgtgtcttaccattcacctacaatggcaggacgttctactcctgcaccacagaagggcgacaggacggacatctttggtgcagcacaacttcgaattatgagcaggaccagaaatactctttctgcacagaccacactgttttggttcagactcgaggaggaaattccaatggtgccttgtgccacttccccttcctatacaacaaccacaattacactgattgcacttctgagggcagaagagacaacatgaagtggtgtgggaccacacagaactatgatgccgaccagaagtttgggttctgccccatggctgcccacgaggaaatctgcacaaccaatgaaggggtcatgtaccgcattggagatcagtgggataagcagcatgacatgggtcacatgatgaggtgcacgtgtgttgggaatggtcgtggggaatggacatgcattgcctactcgcagcttcgagatcagtgcattgttgatgacatcacttacaatgtgaacgacacattccacaagcgtcatgaagaggggcacatgctgaactgtacatgcttcggtcagggtcggggcaggtggaagtgtgatcccgtcgaccaatgccaggattcagagactgggacgttttatcaaattggagattcatgggagaagtatgtgcatggtgtcagataccagtgctactgctatggccgtggcattggggagtggcattgccaacctttacagacctatccaagctcaagtggtcctgtcgaagtatttatcactgagactccgagtcagcccaactcccaccccatccagtggaatgcaccacagccatctcacatttccaagtacattctcaggtggagacctaaaaattctgtaggccgttggaaggaagctaccataccaggccacttaaactcctacaccatcaaaggcctgaagcctggtgtggtatacgagggccagctcatcagcatccagcagtacggccaccaagaagtgactcgctttgacttcaccaccaccagcaccagcacacctgtgaccagcaacaccgtgacaggagagacgactcccttttctcctcttgtggccacttctgaatctgtgaccgaaatcacagccagtagctttgtggtctcctgggtctcagcttccgacaccgtgtcgggattccgggtggaatatgagctgagtgaggagggagatgagccacagtacctggatcttccaagcacagccacttctgtgaacatccctgacctgcttcctggccgaaaatacattgtaaatgtctatcagatatctgaggatggggagcagagtttgatcctgtctacttcacaaacaacagcgcctgatgcccctcctgacacgactgtggaccaagttgatgacacctcaattgttgttcgctggagcagaccccaggctcccatcacagggtacagaatagtctattcgccatcagtagaaggtagcagcacagaactcaaccttcctgaaactgcaaactccgtcaccctcagtgacttgcaacctggtgttcagtataacatcactatctatgctgtggaagaaaatcaagaaagtacacctgttgtcattcaacaagaaaccactggcaccccacgctcagatacagtgccctctcccagggacctgcagtttgtggaagtgacagacgtgaaggtcaccatcatgtggacaccgcctgagagtgcagtgaccggctaccgtgtggatgtgatccccgtcaacctgcctggcgagcacgggcagaggctgcccatcagcaggaacacctttgcagaagtcaccgggctgtcccctggggtcacctattacttcaaagtctttgcagtgagccatgggagggagagcaagcctctgactgctcaacagacaaccaaactggatgctcccactaacctccagtttgtcaatgaaactgattctactgtcctggtgagatggactccacctcgggcccagataacaggataccgactgaccgtgggccttacccgaagaggacagcccaggcagtacaatgtgggtccctctgtctccaagtacccactgaggaatctgcagcctgcatctgagtacaccgtatccctcgtggccataaagggcaaccaagagagccccaaagccactggagtctttaccacactgcagcctgggagctctattccaccttacaacaccgaggtgactgagaccaccattgtgatcacatggacgcctgctccaagaattggttttaagctgggtgtacgaccaagccagggaggagaggcaccacgagaagtgacttcagactcaggaagcatcgttgtgtccggcttgactccaggagtagaatacgtctacaccatccaagtcctgagagatggacaggaaagagatgcgccaattgtaaacaaagtggtgacaccattgtctccaccaacaaacttgcatctggaggcaaaccctgacactggagtgctcacagtctcctgggagaggagcaccaccccagacattactggttatagaattaccacaacccctacaaacggccagcagggaaattctttggaagaagtggtccatgctgatcagagctcctgcacttttgataacctgagtcccggcctggagtacaatgtcagtgtttacactgtcaaggatgacaaggaaagtgtccctatctctgataccatcatcccagaggtgccccaactcactgacctaagctttgttgatataaccgattcaagcatcggcctgaggtggaccccgctaaactcttccaccattattgggtaccgcatcacagtagttgcggcaggagaaggtatccctatttttgaagattttgtggactcctcagtaggatactacacagtcacagggctggagccgggcattgactatgatatcagcgttatcactctcattaatggcggcgagagtgcccctactacactgacacaacaaacggctgttcctcctcccactgacctgcgattcttttctgatattactgccaactcttttactgtgcactggattgctcctcgagccaccatcactggctacaggatccgccatcatcccgagcacttcagtgggagacctcgagaagatcgggtgccccactctcggaattccatcaccctcaccaacctcactccaggcacagagtatgtggtcagcatcgttgctcttaatggcagagaggaaagtcccttattgattggccaacaatcaacagtttctgatgttccgagggacctggaagttgttgctgcgacccccaccagcctactgatcagctgggatgctcctgctgtcacagtgagatattacaggatcacttacggagagacaggaggaaatagccctgtccaggagttcactgtgcctgggagcaagtctacagctaccatcagcggccttaaacctggagttgattataccatcactgtgtatgctgtcactggccgtggagacagccccgcaagcagcaagccaatttccattaattaccgaacagaaattgacaaaccatcccagatgcaagtgaccgatgttcaggacaacagcattagtgtcaagtggctgccttcaagttcccctgttactggttacagagtaaccaccactcccaaaaatggaccaggaccaacaaaaactaaaactgcaggtccagatcaaacagaaatgactattgaaggcttgcagcccacagtggagtatgtggttagtgtctatgctcagaatccaagcggagagagtcagcctctggttcagactgcagtaaccaacattgatcgccctaaaggactggcattcactgatgtggatgtcgattccatcaaaattgcttgggaaagcccacaggggcaagtttccaggtacagggtgacctactcgagccctgaggatggaatccatgagctattccctgcacctgatggtgaagaagacactgcagagctgcaaggcctcagaccgggttctgagtacacagtcagtgtggttgccttgcacgatgatatggagagccagcccctgattggaacccagtccacagctattcctgcaccaactgacctgaagttcactcaggtcacacccacaagcctgagcgcccagtggacaccacccaatgttcagctcactggatatcgagtgcgggtgacccccaaggagaagaccggaccaatgaaagaaatcaaccttgctcctgacagctcatccgtggttgtatcaggacttatggtggccaccaaatatgaagtgagtgtctatgctcttaaggacactttgacaagcagaccagctcagggagttgtcaccactctggagaatgtcagcccaccaagaagggctcgtgtgacagatgctactgagaccaccatcaccattagctggagaaccaagactgagacgatcactggcttccaagttgatgccgttccagccaatggccagactccaatccagagaaccatcaagccagatgtcagaagctacaccatcacaggtttacaaccaggcactgactacaagatctacctgtacaccttgaatgacaatgctcggagctcccctgtggtcatcgacgcctccactgccattgatgcaccatccaacctgcgtttcctggccaccacacccaattccttgctggtatcatggcagccgccacgtgccaggattaccggctacatcatcaagtatgagaagcctgggtctcctcccagagaagtggtccctcggccccgccctggtgtcacagaggctactattactggcctggaaccgggaaccgaatatacaatttatgtcattgccctgaagaataatcagaagagcgagcccctgattggaaggaaaaagacagacgagcttccccaactggtaacccttccacaccccaatcttcatggaccagagatcttggatgttccttccacagttcaaaagacccctttcgtcacccaccctgggtatgacactggaaatggtattcagcttcctggcacttctggtcagcaacccagtgttgggcaacaaatgatctttgaggaacatggttttaggcggaccacaccgcccacaacggccacccccataaggcataggccaagaccatacccgccgaatgtaggtgaggaaatccaaattggtcacatccccagggaagatgtagactatcacctgtacccacacggtccgggactcaatccaaatgcctctacaggacaagaagctctctctcagacaaccatctcatgggccccattccaggacacttctgagtacatcatttcatgtcatcctgttggcactgatgaagaacccttacagttcagggttcctggaacttctaccagtgccactctgacaggcctcaccagaggtgccacctacaacgtcatagtggaggcactgaaagaccagcagaggcataaggttcgggaagaggttgttaccgtgggcaactctgtcaacgaaggcttgaaccaacctacggatgactcgtgctttgacccctacacagtttcccattatgccgttggagatgagtgggaacgaatgtctgaatcaggctttaaactgttgtgccagtgcttaggctttggaagtggtcatttcagatgtgattcatctagatggtgccatgacaatggtgtgaactacaagattggagagaagtgggaccgtcagggagaaaatggccagatgatgagctgcacatgtcttgggaacggaaaaggagaattcaagtgtgaccctcatgaggcaacgtgttatgatgatgggaagacataccacgtaggagaacagtggcagaaggaatatctcggtgccatttgctcctgcacatgctttggaggccagcggggctggcgctgtgacaactgccgcagacctgggggtgaacccagtcccgaaggcactactggccagtcctacaaccagtattctcagagataccatcagagaacaaacactaatgttaattgcccaattgagtgcttcatgcctttagatgtacaggctgacagagaagattcccgagagtaaatcatctttccaatccagaggaacaagcatgtctctctgccaagatccatctaaactggagtgatgttagcagacccagcttagagttcttctttctttcttaagccctttgctctggaggaagttctccagcttcagctcaactcacagcttctccaagcatcaccctgggagtttcctgagggttttctcataaatgagggctgcacattgcctgttctgcttcgaagtattcaataccgctcagtattttaaatgaagtgattctaagatttggtttgggatcaataggaaagcatatgcagccaaccaagatgcaaatgttttgaaatgatatgaccaaaattttaagtaggaaagtcacccaaacacttctgctttcacttaagtgtctggcccgcaatactgtaggaacaagcatgatcttgttactgtgatattttaaatatccacagtactcactttttccaaatgatcctagtaattgcctagaaatatctttctcttacctgttatttatcaatttttcccagtatttttatacggaaaaaattgtattgaaaacacttagtatgcagttgataagaggaatttggtataattatggtgggtgattattttttatactgtatgtgccaaagctttactactgtggaaagacaactgttttaataaaagatttacattccacaacttgaagttcatctatttgatataagacaccttcgggggaaataattcctgtgaatattctttttcaattcagcaaacatttgaaaatctatgatgtgcaagtctaattgttgatttcagtacaagattttctaaatcagttgctacaaaaactgattggtttttgtcacttcatctcttcactaatggagatagctttacactttctgctttaatagatttaagtggaccccaatatttattaaaattgctagtttaccgttcagaagtataatagaaataatctttagttgctcttttctaaccattgtaattcttcccttcttccctccacctttccttcattgaataaacctctgttcaaagagattgcctgcaagggaaataaaaatgactaagatatt

SEQ ID NO: 267175 - DNA, 8524 bp, Artificial Sequence
  derived and/or modified sequence
gcccgcgccggctgtgctgcacagggggaggagagggaaccccaggcgcgagcgggaagaggggacctgcagccacaacttctctggtcctctgcatcccttctgtccctccacccgtccccttccccaccctctggcccccaccttcttggaggcgacaacccccgggaggcattagaagggatttttcccgcaggttgcgaagggaagcaaacttggtggcaacttgcctcccggtgcgggcgtctctcccccaccgtctcaacatgcttaggggtccggggcccgggctgctgctgctggccgtccagtgcctggggacagcggtgccctccacgggagcctcgaagagcaagaggcaggctcagcaaatggttcagccccagtccccggtggctgtcagtcaaagcaagcccggttgttatgacaatggaaaacactatcagataaatcaacagtgggagcggacctacctaggcaatgcgttggtttgtacttgttatggaggaagccgaggttttaactgcgagagtaaacctgaagctgaagagacttgctttgacaagtacactgggaacacttaccgagtgggtgacacttatgagcgtcctaaagactccatgatctgggactgtacctgcatcggggctgggcgagggagaataagctgtaccatcgcaaaccgctgccatgaagggggtcagtcctacaagattggtgacacctggaggagaccacatgagactggtggttacatgttagagtgtgtgtgtcttggtaatggaaaaggagaatggacctgcaagcccatagctgagaagtgttttgatcatgctgctgggacttcctatgtggtcggagaaacgtgggagaagccctaccaaggctggatgatggtagattgtacttgcctgggagaaggcagcggacgcatcacttgcacttctagaaatagatgcaacgatcaggacacaaggacatcctatagaattggagacacctggagcaagaaggataatcgaggaaacctgctccagtgcatctgcacaggcaacggccgaggagagtggaagtgtgagaggcacacctctgtgcagaccacatcgagcggatctggccccttcaccgatgttcgtgcagctgtttaccaaccgcagcctcacccccagcctcctccctatggccactgtgtcacagacagtggtgtggtctactctgtggggatgcagtggctgaagacacaaggaaataagcaaatgctttgcacgtgcctgggcaacggagtcagctgccaagagacagctgtaacccagacttacggtggcaactcaaatggagagccatgtgtcttaccattcacctacaatggcaggacgttctactcctgcaccacagaagggcgacaggacggacatctttggtgcagcacaacttcgaattatgagcaggaccagaaatactctttctgcacagaccacactgttttggttcagactcgaggaggaaattccaatggtgccttgtgccacttccccttcctatacaacaaccacaattacactgattgcacttctgagggcagaagagacaacatgaagtggtgtgggaccacacagaactatgatgccgaccagaagtttgggttctgccccatggctgcccacgaggaaatctgcacaaccaatgaaggggtcatgtaccgcattggagatcagtgggataagcagcatgacatgggtcacatgatgaggtgcacgtgtgttgggaatggtcgtggggaatggacatgcattgcctactcgcagcttcgagatcagtgcattgttgatgacatcacttacaatgtgaacgacacattccacaagcgtcatgaagaggggcacatgctgaactgtacatgcttcggtcagggtcggggcaggtggaagtgtgatcccgtcgaccaatgccaggattcagagactgggacgttttatcaaattggagattcatgggagaagtatgtgcatggtgtcagataccagtgctactgctatggccgtggcattggggagtggcattgccaacctttacagacctatccaagctcaagtggtcctgtcgaagtatttatcactgagactccgagtcagcccaactcccaccccatccagtggaatgcaccacagccatctcacatttccaagtacattctcaggtggagacctaaaaattctgtaggccgttggaaggaagctaccataccaggccacttaaactcctacaccatcaaaggcctgaagcctggtgtggtatacgagggccagctcatcagcatccagcagtacggccaccaagaagtgactcgctttgacttcaccaccaccagcaccagcacacctgtgaccagcaacaccgtgacaggagagacgactcccttttctcctcttgtggccacttctgaatctgtgaccgaaatcacagccagtagctttgtggtctcctgggtctcagcttccgacaccgtgtcgggattccgggtggaatatgagctgagtgaggagggagatgagccacagtacctggatcttccaagcacagccacttctgtgaacatccctgacctgcttcctggccgaaaatacattgtaaatgtctatcagatatctgaggatggggagcagagtttgatcctgtctacttcacaaacaacagcgcctgatgcccctcctgacacgactgtggaccaagttgatgacacctcaattgttgttcgctggagcagaccccaggctcccatcacagggtacagaatagtctattcgccatcagtagaaggtagcagcacagaactcaaccttcctgaaactgcaaactccgtcaccctcagtgacttgcaacctggtgttcagtataacatcactatctatgctgtggaagaaaatcaagaaagtacacctgttgtcattcaacaagaaaccactggcaccccacgctcagatacagtgccctctcccagggacctgcagtttgtggaagtgacagacgtgaaggtcaccatcatgtggacaccgcctgagagtgcagtgaccggctaccgtgtggatgtgatccccgtcaacctgcctggcgagcacgggcagaggctgcccatcagcaggaacacctttgcagaagtcaccgggctgtcccctggggtcacctattacttcaaagtctttgcagtgagccatgggagggagagcaagcctctgactgctcaacagacaaccaaactggatgctcccactaacctccagtttgtcaatgaaactgattctactgtcctggtgagatggactccacctcgggcccagataacaggataccgactgaccgtgggccttacccgaagaggacagcccaggcagtacaatgtgggtccctctgtctccaagtacccactgaggaatctgcagcctgcatctgagtacaccgtatccctcgtggccataaagggcaaccaagagagccccaaagccactggagtctttaccacactgcagcctgggagctctattccaccttacaacaccgaggtgactgagaccaccattgtgatcacatggacgcctgctccaagaattggttttaagctgggtgtacgaccaagccagggaggagaggcaccacgagaagtgacttcagactcaggaagcatcgttgtgtccggcttgactccaggagtagaatacgtctacaccatccaagtcctgagagatggacaggaaagagatgcgccaattgtaaacaaagtggtgacaccattgtctccaccaacaaacttgcatctggaggcaaaccctgacactggagtgctcacagtctcctgggagaggagcaccaccccagacattactggttatagaattaccacaacccctacaaacggccagcagggaaattctttggaagaagtggtccatgctgatcagagctcctgcacttttgataacctgagtcccggcctggagtacaatgtcagtgtttacactgtcaaggatgacaaggaaagtgtccctatctctgataccatcatcccagctgttcctcctcccactgacctgcgattcaccaacattggtccagacaccatgcgtgtcacctgggctccacccccatccattgatttaaccaacttcctggtgcgttactcacctgtgaaaaatgaggaagatgttgcagagttgtcaatttctccttcagacaatgcagtggtcttaacaaatctcctgcctggtacagaatatgtagtgagtgtctccagtgtctacgaacaacatgagagcacacctcttagaggaagacagaaaacaggtcttgattccccaactggcattgacttttctgatattactgccaactcttttactgtgcactggattgctcctcgagccaccatcactggctacaggatccgccatcatcccgagcacttcagtgggagacctcgagaagatcgggtgccccactctcggaattccatcaccctcaccaacctcactccaggcacagagtatgtggtcagcatcgttgctcttaatggcagagaggaaagtcccttattgattggccaacaatcaacagtttctgatgttccgagggacctggaagttgttgctgcgacccccaccagcctactgatcagctgggatgctcctgctgtcacagtgagatattacaggatcacttacggagagacaggaggaaatagccctgtccaggagttcactgtgcctgggagcaagtctacagctaccatcagcggccttaaacctggagttgattataccatcactgtgtatgctgtcactggccgtggagacagccccgcaagcagcaagccaatttccattaattaccgaacagaaattgacaaaccatcccagatgcaagtgaccgatgttcaggacaacagcattagtgtcaagtggctgccttcaagttcccctgttactggttacagagtaaccaccactcccaaaaatggaccaggaccaacaaaaactaaaactgcaggtccagatcaaacagaaatgactattgaaggcttgcagcccacagtggagtatgtggttagtgtctatgctcagaatccaagcggagagagtcagcctctggttcagactgcagtaaccaacattgatcgccctaaaggactggcattcactgatgtggatgtcgattccatcaaaattgcttgggaaagcccacaggggcaagtttccaggtacagggtgacctactcgagccctgaggatggaatccatgagctattccctgcacctgatggtgaagaagacactgcagagctgcaaggcctcagaccgggttctgagtacacagtcagtgtggttgccttgcacgatgatatggagagccagcccctgattggaacccagtccacagctattcctgcaccaactgacctgaagttcactcaggtcacacccacaagcctgagcgcccagtggacaccacccaatgttcagctcactggatatcgagtgcgggtgacccccaaggagaagaccggaccaatgaaagaaatcaaccttgctcctgacagctcatccgtggttgtatcaggacttatggtggccaccaaatatgaagtgagtgtctatgctcttaaggacactttgacaagcagaccagctcagggagttgtcaccactctggagaatgtcagcccaccaagaagggctcgtgtgacagatgctactgagaccaccatcaccattagctggagaaccaagactgagacgatcactggcttccaagttgatgccgttccagccaatggccagactccaatccagagaaccatcaagccagatgtcagaagctacaccatcacaggtttacaaccaggcactgactacaagatctacctgtacaccttgaatgacaatgctcggagctcccctgtggtcatcgacgcctccactgccattgatgcaccatccaacctgcgtttcctggccaccacacccaattccttgctggtatcatggcagccgccacgtgccaggattaccggctacatcatcaagtatgagaagcctgggtctcctcccagagaagtggtccctcggccccgccctggtgtcacagaggctactattactggcctggaaccgggaaccgaatatacaatttatgtcattgccctgaagaataatcagaagagcgagcccctgattggaaggaaaaagacagacgagcttccccaactggtaacccttccacaccccaatcttcatggaccagagatcttggatgttccttccacagttcaaaagacccctttcgtcacccaccctgggtatgacactggaaatggtattcagcttcctggcacttctggtcagcaacccagtgttgggcaacaaatgatctttgaggaacatggttttaggcggaccacaccgcccacaacggccacccccataaggcataggccaagaccatacccgccgaatgtaggtgaggaaatccaaattggtcacatccccagggaagatgtagactatcacctgtacccacacggtccgggactcaatccaaatgcctctacaggacaagaagctctctctcagacaaccatctcatgggccccattccaggacacttctgagtacatcatttcatgtcatcctgttggcactgatgaagaacccttacagttcagggttcctggaacttctaccagtgccactctgacaggcctcaccagaggtgccacctacaacgtcatagtggaggcactgaaagaccagcagaggcataaggttcgggaagaggttgttaccgtgggcaactctgtcaacgaaggcttgaaccaacctacggatgactcgtgctttgacccctacacagtttcccattatgccgttggagatgagtgggaacgaatgtctgaatcaggctttaaactgttgtgccagtgcttaggctttggaagtggtcatttcagatgtgattcatctagatggtgccatgacaatggtgtgaactacaagattggagagaagtgggaccgtcagggagaaaatggccagatgatgagctgcacatgtcttgggaacggaaaaggagaattcaagtgtgaccctcatgaggcaacgtgttatgatgatgggaagacataccacgtaggagaacagtggcagaaggaatatctcggtgccatttgctcctgcacatgctttggaggccagcggggctggcgctgtgacaactgccgcagacctgggggtgaacccagtcccgaaggcactactggccagtcctacaaccagtattctcagagataccatcagagaacaaacactaatgttaattgcccaattgagtgcttcatgcctttagatgtacaggctgacagagaagattcccgagagtaaatcatctttccaatccagaggaacaagcatgtctctctgccaagatccatctaaactggagtgatgttagcagacccagcttagagttcttctttctttcttaagccctttgctctggaggaagttctccagcttcagctcaactcacagcttctccaagcatcaccctgggagtttcctgagggttttctcataaatgagggctgcacattgcctgttctgcttcgaagtattcaataccgctcagtattttaaatgaagtgattctaagatttggtttgggatcaataggaaagcatatgcagccaaccaagatgcaaatgttttgaaatgatatgaccaaaattttaagtaggaaagtcacccaaacacttctgctttcacttaagtgtctggcccgcaatactgtaggaacaagcatgatcttgttactgtgatattttaaatatccacagtactcactttttccaaatgatcctagtaattgcctagaaatatctttctcttacctgttatttatcaatttttcccagtatttttatacggaaaaaattgtattgaaaacacttagtatgcagttgataagaggaatttggtataattatggtgggtgattattttttatactgtatgtgccaaagctttactactgtggaaagacaactgttttaataaaagatttacattccacaacttgaagttcatctatttgatataagacaccttcgggggaaataattcctgtgaatattctttttcaattcagcaaacatttgaaaatctatgatgtgcaagtctaattgttgatttcagtacaagattttctaaatcagttgctacaaaaactgattggtttttgtcacttcatctcttcactaatggagatagctttacactttctgctttaatagatttaagtggaccccaatatttattaaaattgctagtttaccgttcagaagtataatagaaataatctttagttgctcttttctaaccattgtaattcttcccttcttccctccacctttccttcattgaataaacctctgttcaaagagattgcctgcaagggaaataaaaatgactaagatatt

SEQ ID NO: 267176 - DNA, 7164 bp, Artificial Sequence
  derived and/or modified sequence
atgctgcggggccctggccctggcctgctgctgctggccgtgcagtgcctgggcacagctgtgcccagcactggagccagcaagagcaagaggcaggcccagcagatggtgcagccccagagccctgtggccgtgtcccagagcaagccaggctgctatgacaatggcaagcactaccagatcaaccagcagtgggagaggacctacctgggcaatgccctggtgtgcacctgctatggaggcagccggggcttcaactgtgagagcaagccagaggccgaggagacctgctttgacaagtacacaggcaacacctacagagtgggggacacctatgaaagacccaaggacagcatgatctgggactgcacctgcatcggggccggccggggccgcatcagctgcaccatcgccaaccgctgccacgagggcggccagagctacaagatcggggacacctggaggcggccccatgagaccggcggctacatgctggagtgtgtgtgcctgggcaatggcaagggggagtggacctgcaagcccatcgccgagaagtgctttgaccacgccgccggcaccagctatgtggtgggggagacctgggagaagccctaccagggctggatgatggtggactgcacctgcctgggggagggcagcggccgcatcacctgcaccagcaggaaccgctgcaatgaccaggacaccaggaccagctaccgcatcggggacacctggagcaagaaggacaacagaggcaacctgctgcagtgcatctgcacaggaaatggccgcggggagtggaagtgtgagcggcacacctctgtgcagaccaccagcagcggcagcggccccttcacagatgtgcgggctgctgtgtaccagccccagccccacccccagcccccaccctacggccactgtgtgacagacagcggcgtggtgtacagcgtgggcatgcagtggctgaagacccagggcaacaagcagatgctgtgcacctgcctgggcaatggagtgtcctgccaggagacagctgtgacccagacctatggaggcaacagcaatggagagccctgtgtgctgcccttcacctacaatggaagaaccttctacagctgcaccacagagggccggcaggacggccacctgtggtgcagcaccaccagcaactatgagcaggaccagaagtacagcttctgcacagaccacacagtgctggtgcagacccggggcggcaacagcaatggagccctgtgccacttccccttcctgtacaacaaccacaactacacagactgcaccagcgagggcagaagagacaacatgaagtggtgtggcaccacccagaactatgatgctgaccagaagtttggcttctgccccatggccgcccacgaggagatctgcaccaccaatgaaggagtgatgtaccgcatcggggaccagtgggacaagcagcacgacatgggccacatgatgcgctgcacctgtgtgggcaatggccgcggggagtggacctgcatcgcctacagccagctgcgggaccagtgcatcgtggatgacatcacctacaacgtgaatgacaccttccacaagagacatgaggagggccacatgctgaactgcacctgcttcggccagggccggggccgctggaagtgtgaccctgtggaccagtgccaggacagcgagaccggcaccttctaccagatcggggacagctgggagaagtatgtgcatggagtgcgctaccagtgctactgctacggccggggcatcggggagtggcactgccagcccctgcagacctaccccagcagcagcggccctgtggaggtgttcatcacagagacccccagccagcccaacagccaccccatccagtggaatgccccccagcccagccacatcagcaagtacatcctgcgctggaggcccaagaacagcgtgggccgctggaaggaggccaccatccctggccacctgaacagctacaccatcaagggcctgaagccaggagtggtgtatgagggccagctgatcagcatccagcagtatggccaccaggaggtgaccaggtttgacttcaccaccaccagcaccagcacccctgtgaccagcaacacagtgactggagagaccacccccttcagccccctggtggccaccagcgagagcgtgacagagatcacagccagcagctttgtggtgtcctgggtgtctgccagtgacacagtgtctggcttccgggtggagtatgagctgtctgaggagggagatgagccccagtacctggacctgcccagcacagccacctctgtgaacatcccagacctgctgcccggcaggaagtacatcgtgaatgtgtaccagatcagtgaagatggagagcagagcctcatcctgagcaccagccagaccacagccccagatgcccccccagacaccaccgtggaccaggtggatgacaccagcatcgtggtgcgctggagccggccccaggcccccatcaccggctacagaattgtgtacagccccagcgtggagggcagcagcacagagctgaacctgcctgagacagccaacagcgtgaccctgagtgacctgcagcccggggtgcagtacaacatcaccatctatgctgtggaggagaaccaggagagcacccctgtggtgatccagcaggagaccaccggcacccccaggagtgacacagtgcccagcccccgggacctgcagtttgtggaggtgacagatgtgaaggtgaccatcatgtggaccccacctgagagcgctgtgacaggctacagagtggatgtgattcctgtgaacctgcctggagagcacggccagaggctgcccatcagcaggaacacctttgctgaggtgacaggcctgagccctggggtgacctactacttcaaggtgtttgctgtgagccacggccgggagagcaagcccctgacagcccagcagaccaccaagctggatgcccccaccaacctgcagtttgtgaatgaaacagacagcacagtgctggtgcgctggaccccaccccgggcccagatcaccggctaccgcctgactgtgggcctgacccggcggggccagccccggcagtacaacgtgggccccagcgtgtccaagtaccccctgaggaacctgcagcctgccagcgagtacacagtgtccctggtggccatcaagggcaaccaggagagccccaaggccactggagtcttcaccaccctgcagcccggcagcagcatccccccctacaacacagaggtgacagagaccaccatcgtcatcacctggaccccagcccccagaattggcttcaagctgggcgtgcggcccagccagggcggggaggccccccgggaggtgaccagtgacagcggcagcatcgtggtgtctggcctgaccccaggagtggagtatgtgtacaccatccaggtgctgagagatggccaggagagagatgcccccatcgtgaacaaggtggtgacccccctgagcccccccaccaacctgcacctggaggccaacccagacaccggggtgctgactgtgtcctgggagaggagcaccaccccagacatcaccggctaccgcatcaccaccacccccaccaacggccagcagggcaacagcctggaggaggtggtgcatgctgaccagagcagctgcacctttgacaacctgagccctggcctggagtacaacgtgtctgtgtacacagtgaaggatgacaaggagagcgtgcccatcagtgacaccatcatccctgaggtgccccagctgacagacctgagctttgtggacatcacagacagcagcatcggcctgcgctggacccccctgaacagcagcaccatcatcggctaccgcatcaccgtggtggccgccggggagggcatccccatctttgaagattttgtggacagctctgtgggctactacacagtgacaggcctggagcccggcatcgactatgacatcagcgtcatcaccctcatcaatggaggagagagcgcccccaccaccctgacccagcagacagctgtgcccccacccacagacctgcgcttcttcagtgacatcacagccaacagcttcaccgtgcactggatcgccccccgggccaccatcaccggctaccgcatccgccaccaccctgagcacttcagcggccggccccgggaggacagagtgccccacagcagaaattccatcaccctgaccaacctgaccccaggcacagaatatgtggtgtccatcgtggccctgaatggccgggaggagagccccctgctgattggccagcagagcacagtgtctgatgtgccccgggacctggaggtggtggccgccacccccaccagcctgctgatctcctgggatgccccagctgtgacagtgcgctactaccgcatcacctatggagagaccggcggcaacagccctgtgcaggagttcaccgtgcccggcagcaagagcacagccaccatcagcggcctgaagccaggagtggactacaccatcaccgtgtatgctgtgacaggccgcggggacagccctgccagcagcaagcccatcagcatcaactacagaacagaaattgacaagcccagccagatgcaggtgacagatgtgcaggacaacagcatctctgtgaagtggctgcccagcagcagccctgtgacaggctacagagtgaccaccacccccaagaatggacctggccccaccaagaccaagacagctggccctgaccagacagagatgaccatcgagggcctgcagcccaccgtggagtatgtggtgtctgtgtatgcccagaaccccagcggggagagccagcccctggtgcagacagctgtgaccaacatcgaccggcccaagggcctggccttcacagatgtggatgtggacagcatcaagatcgcctgggagagcccccagggccaggtgagccgctacagagtgacctacagcagcccagaagatggcatccacgagctgtttcctgccccagatggagaggaggacacagctgagctgcagggcctgcggcccggcagcgagtacacagtgtctgtggtggccctgcatgatgacatggagagccagcccctcatcggcacccagagcacagccatcccagcccccacagacctgaagttcacccaggtgacccccaccagcctgagcgcccagtggaccccaccaaatgtgcagctgaccggctacagagtgcgggtgacccccaaggagaagacaggccccatgaaggagatcaacctggccccagacagcagctctgtggtggtgtctggcctgatggtggccaccaagtatgaggtgtctgtgtatgccctgaaggacaccctgaccagcaggcctgcccagggcgtggtgaccaccctggagaatgtgtccccaccaagaagagcccgggtgacagatgccacagagaccaccatcaccatctcctggaggaccaagacagagaccatcaccggcttccaggtggatgctgtgcctgccaacggccagacccccatccagaggaccatcaagccagatgtgcgcagctacaccatcaccggcctgcagcccggcacagactacaagatctacctgtacaccctgaatgacaatgcccggagcagccctgtggtgattgatgccagcacagccattgatgcccccagcaacctgcgcttcctggccaccacccccaacagcctgctggtgtcctggcagcccccccgggcccgcatcaccggctacatcatcaagtatgagaagccaggcagccccccccgggaggtggtgccccggcccaggcctggggtgacagaggccaccatcaccggcctggagcccggcacagagtacaccatctacgtgattgccctgaagaacaaccagaagtctgagcccctgattggaaggaagaagacagatgagctgccccagctggtgaccctgccccaccccaacctgcacggccctgagatcctggatgtgcccagcacagtgcagaagaccccatttgtgacccaccctggctatgacacaggaaatggcatccagctgcccggcaccagcggccagcagcccagcgtgggccagcagatgatctttgaggagcacggcttccggaggaccaccccacccaccacagccacccccatccgccaccggccccggccctacccacccaacgtgggggaggagatccagatcggccacatccccagagaagatgtggactaccacctgtacccccacggccctggcctgaaccccaatgccagcacaggccaggaggccctgagccagaccaccatctcctgggcccccttccaggacaccagcgagtacatcatcagctgccaccctgtgggcacagatgaggagcccctgcagttccgggtgcccggcaccagcaccagcgccaccctgaccggcctgaccaggggggccacctacaacgtcatcgtggaggccctgaaggaccagcagaggcacaaggtgcgggaggaggtggtgacagtgggcaacagcgtgaatgaaggcctgaaccagcccacagatgacagctgctttgacccctacacagtgagccactatgctgtgggagatgagtgggagaggatgtctgagagcggcttcaagctgctgtgccagtgcctgggctttggaagtggccacttccgctgtgacagcagccgctggtgccacgacaatggagtgaactacaagattggagagaagtgggaccggcagggagaaaatggccagatgatgagctgcacctgcctgggcaatggcaagggggagttcaagtgtgacccccatgaggccacctgctatgatgatggcaagacctaccacgtgggggagcagtggcagaaggagtacctgggcgccatctgcagctgcacctgctttggaggccagaggggctggaggtgtgacaactgcagaagacctggaggagagcccagccctgagggcaccaccggccagagctacaaccagtacagccagcgctaccaccagaggaccaacaccaacgtgaactgccccatcgagtgcttcatgcccctggatgtgcaggccgaccgggaggacagccgggagtag

SEQ ID NO: 267177 - DNA, 7161 bp, Artificial Sequence
  derived and/or modified sequence
atgctgcggggccctggccctggcctgctgctgctggccgtgcagtgcctgggcacagctgtgcccagcactggagccagcaagagcaagaggcaggcccagcagatggtgcagccccagagccctgtggccgtgtcccagagcaagccaggctgctatgacaatggcaagcactaccagatcaaccagcagtgggagaggacctacctgggcaatgccctggtgtgcacctgctatggaggcagccggggcttcaactgtgagagcaagccagaggccgaggagacctgctttgacaagtacacaggcaacacctacagagtgggggacacctatgaaagacccaaggacagcatgatctgggactgcacctgcatcggggccggccggggccgcatcagctgcaccatcgccaaccgctgccacgagggcggccagagctacaagatcggggacacctggaggcggccccatgagaccggcggctacatgctggagtgtgtgtgcctgggcaatggcaagggggagtggacctgcaagcccatcgccgagaagtgctttgaccacgccgccggcaccagctatgtggtgggggagacctgggagaagccctaccagggctggatgatggtggactgcacctgcctgggggagggcagcggccgcatcacctgcaccagcaggaaccgctgcaatgaccaggacaccaggaccagctaccgcatcggggacacctggagcaagaaggacaacagaggcaacctgctgcagtgcatctgcacaggaaatggccgcggggagtggaagtgtgagcggcacacctctgtgcagaccaccagcagcggcagcggccccttcacagatgtgcgggctgctgtgtaccagccccagccccacccccagcccccaccctacggccactgtgtgacagacagcggcgtggtgtacagcgtgggcatgcagtggctgaagacccagggcaacaagcagatgctgtgcacctgcctgggcaatggagtgtcctgccaggagacagctgtgacccagacctatggaggcaacagcaatggagagccctgtgtgctgcccttcacctacaatggaagaaccttctacagctgcaccacagagggccggcaggacggccacctgtggtgcagcaccaccagcaactatgagcaggaccagaagtacagcttctgcacagaccacacagtgctggtgcagacccggggcggcaacagcaatggagccctgtgccacttccccttcctgtacaacaaccacaactacacagactgcaccagcgagggcagaagagacaacatgaagtggtgtggcaccacccagaactatgatgctgaccagaagtttggcttctgccccatggccgcccacgaggagatctgcaccaccaatgaaggagtgatgtaccgcatcggggaccagtgggacaagcagcacgacatgggccacatgatgcgctgcacctgtgtgggcaatggccgcggggagtggacctgcatcgcctacagccagctgcgggaccagtgcatcgtggatgacatcacctacaacgtgaatgacaccttccacaagagacatgaggagggccacatgctgaactgcacctgcttcggccagggccggggccgctggaagtgtgaccctgtggaccagtgccaggacagcgagaccggcaccttctaccagatcggggacagctgggagaagtatgtgcatggagtgcgctaccagtgctactgctacggccggggcatcggggagtggcactgccagcccctgcagacctaccccagcagcagcggccctgtggaggtgttcatcacagagacccccagccagcccaacagccaccccatccagtggaatgccccccagcccagccacatcagcaagtacatcctgcgctggaggcccaagaacagcgtgggccgctggaaggaggccaccatccctggccacctgaacagctacaccatcaagggcctgaagccaggagtggtgtatgagggccagctgatcagcatccagcagtatggccaccaggaggtgaccaggtttgacttcaccaccaccagcaccagcacccctgtgaccagcaacacagtgactggagagaccacccccttcagccccctggtggccaccagcgagagcgtgacagagatcacagccagcagctttgtggtgtcctgggtgtctgccagtgacacagtgtctggcttccgggtggagtatgagctgtctgaggagggagatgagccccagtacctggacctgcccagcacagccacctctgtgaacatcccagacctgctgcccggcaggaagtacatcgtgaatgtgtaccagatcagtgaagatggagagcagagcctcatcctgagcaccagccagaccacagccccagatgcccccccagacaccaccgtggaccaggtggatgacaccagcatcgtggtgcgctggagccggccccaggcccccatcaccggctacagaattgtgtacagccccagcgtggagggcagcagcacagagctgaacctgcctgagacagccaacagcgtgaccctgagtgacctgcagcccggggtgcagtacaacatcaccatctatgctgtggaggagaaccaggagagcacccctgtggtgatccagcaggagaccaccggcacccccaggagtgacacagtgcccagcccccgggacctgcagtttgtggaggtgacagatgtgaaggtgaccatcatgtggaccccacctgagagcgctgtgacaggctacagagtggatgtgattcctgtgaacctgcctggagagcacggccagaggctgcccatcagcaggaacacctttgctgaggtgacaggcctgagccctggggtgacctactacttcaaggtgtttgctgtgagccacggccgggagagcaagcccctgacagcccagcagaccaccaagctggatgcccccaccaacctgcagtttgtgaatgaaacagacagcacagtgctggtgcgctggaccccaccccgggcccagatcaccggctaccgcctgactgtgggcctgacccggcggggccagccccggcagtacaacgtgggccccagcgtgtccaagtaccccctgaggaacctgcagcctgccagcgagtacacagtgtccctggtggccatcaagggcaaccaggagagccccaaggccactggagtcttcaccaccctgcagcccggcagcagcatccccccctacaacacagaggtgacagagaccaccatcgtcatcacctggaccccagcccccagaattggcttcaagctgggcgtgcggcccagccagggcggggaggccccccgggaggtgaccagtgacagcggcagcatcgtggtgtctggcctgaccccaggagtggagtatgtgtacaccatccaggtgctgagagatggccaggagagagatgcccccatcgtgaacaaggtggtgacccccctgagcccccccaccaacctgcacctggaggccaacccagacaccggggtgctgactgtgtcctgggagaggagcaccaccccagacatcaccggctaccgcatcaccaccacccccaccaacggccagcagggcaacagcctggaggaggtggtgcatgctgaccagagcagctgcacctttgacaacctgagccctggcctggagtacaacgtgtctgtgtacacagtgaaggatgacaaggagagcgtgcccatcagtgacaccatcatcccagctgtgcccccacccacagacctgcgcttcaccaacatcggccctgacaccatgagggtgacctgggcccccccacccagcattgacctgaccaacttcctggtgcgctacagccctgtgaagaatgaagaagatgtggccgagctgagcatcagccccagcgacaatgctgtggtgctgaccaacctgctgcccggcacagaatatgtggtgtctgtgtcctctgtgtatgagcagcacgagagcacccccctgcggggccggcagaagacaggcctggacagccccaccggcatcgacttcagtgacatcacagccaacagcttcaccgtgcactggatcgccccccgggccaccatcaccggctaccgcatccgccaccaccctgagcacttcagcggccggcccagagaagatagagtgccccacagcaggaacagcatcaccctgaccaacctgaccccaggcacagaatatgtggtgtccatcgtggccctgaatggccgggaggagagccccctgctgattggccagcagagcacagtgtctgatgtgccccgggacctggaggtggtggccgccacccccaccagcctgctgatctcctgggatgccccagctgtgacagtgcgctactaccgcatcacctacggggagactggaggcaacagccctgtgcaggagttcaccgtgcccggcagcaagagcacagccaccatcagcggcctgaagccaggagtggactacaccatcaccgtgtatgctgtgacaggccgcggggacagccctgccagcagcaagcccatcagcatcaactacagaacagaaattgacaagcccagccagatgcaggtgacagatgtgcaggacaacagcatctctgtgaagtggctgcccagcagcagccctgtgacaggctacagagtgaccaccacccccaagaatggacctggccccaccaagaccaagacagctggccctgaccagacagagatgaccatcgagggcctgcagcccaccgtggagtatgtggtgtctgtgtatgcccagaaccccagcggggagagccagcccctggtgcagacagctgtgaccaacatcgaccggcccaagggcctggccttcacagatgtggatgtggacagcatcaagatcgcctgggagagcccccagggccaggtgagccgctacagagtgacctacagcagcccagaagatggcatccacgagctgtttcctgccccagatggagaggaggacacagctgagctgcagggcctgcggcccggcagcgagtacacagtgtctgtggtggccctgcatgatgacatggagagccagcccctgattggcacccagagcacagccatcccagcccccacagacctgaagttcacccaggtgacccccaccagcctgagcgcccagtggaccccacccaacgtgcagctgaccggctacagagtgcgggtgacccccaaggagaagacaggccccatgaaggagatcaacctggccccagacagcagctctgtggtggtgtctggcctgatggtggccaccaagtatgaggtgtctgtgtatgccctgaaggacaccctgaccagcaggcctgcccagggcgtggtgaccaccctggagaatgtgagccccccccggcgggcccgggtgacagatgccacagagaccaccatcaccatctcctggaggaccaagacagagaccatcaccggcttccaggtggatgctgtgcctgccaacggccagacccccatccagaggaccatcaagccagatgtgcgcagctacaccatcaccggcctgcagcctggaacagactacaagatctacctgtacaccctgaatgacaatgcccggagcagccctgtggtgattgatgccagcacagccattgatgcccccagcaacctgcgcttcctggccaccacccccaacagcctgctggtgtcctggcagcccccccgggcccgcatcaccggctacatcatcaagtatgagaagccaggcagccccccccgggaggtggtgccccggcccaggcctggggtgacagaggccaccatcaccggcctggagcctggaacagagtacaccatctacgtgattgccctgaagaacaaccagaagtctgagcccctcatcggcaggaagaagacagatgagctgccccagctggtgaccctgccccaccccaacctgcacggccctgagatcctggatgtgcccagcacagtgcagaagaccccatttgtgacccaccctggctatgacacaggaaatggcatccagctgcccggcaccagcggccagcagcccagcgtgggccagcagatgatctttgaggagcacggcttccggaggaccaccccacccaccacagccacccccatccgccaccggccccggccctaccccccaaatgtgggggaggagatccagatcggccacatcccccgggaggatgtggactaccacctgtacccccacggccctggcctgaaccccaatgccagcacaggccaggaggccctgagccagaccaccatctcctgggcccccttccaggacaccagcgagtacatcatcagctgccaccctgtgggcacagatgaggagcccctgcagttccgggtgcccggcaccagcaccagcgccaccctgaccggcctgaccaggggggccacctacaacgtgattgtggaggccctgaaggaccagcagaggcacaaggtgcgggaggaggtggtgacagtgggcaacagcgtgaatgaaggcctgaaccagcccacagatgacagctgctttgacccctacacagtgagccactatgctgtgggagatgagtgggagaggatgtctgagagcggcttcaagctgctgtgccagtgcctgggcttcggcagcggccacttccgctgtgacagcagccgctggtgccacgacaacggggtgaactacaagatcggggagaagtgggaccggcagggagaaaatggccagatgatgagctgcacctgcctgggcaatggaaaaggagagttcaagtgtgacccccatgaggccacctgctatgatgatggcaagacctaccacgtgggggagcagtggcagaaggagtacctgggcgccatctgcagctgcacctgcttcggcggccagaggggctggaggtgtgacaactgccggcggcctggaggagagcccagccctgagggcaccaccggccagagctacaaccagtacagccagcgctaccaccagaggaccaacaccaacgtgaactgccccatcgagtgcttcatgcccctggatgtgcaggccgaccgggaggacagccgggagtag

SEQ ID NO: 267178 - DNA, 7164 bp, Artificial Sequence
  derived and/or modified sequence
atgctgcggggccccggccccggcctgctgctgctggccgtgcagtgcctggggacggctgttcccagtactggcgcatccaaaagtaaacgccaggcacagcagatggtccagccccagtctcccgtggcagtcagtcaaagtaagcccggttgctatgacaatggaaagcattatcagatcaatcagcagtgggaacgaacatatctcggcaacgccctggtctgtacctgttatggtggctctcgtggatttaactgtgagtcaaagccggaagcagaagaaacgtgctttgacaaatatacaggaaacacatacagagtgggagacacatacgagagacctaaggatagcatgatatgggactgtacatgcatcggagcgggccgcggccgcatttcttgtaccattgctaacagatgtcacgaaggaggacagtcttacaagatcggagacacctggcgcagaccccatgaaactggcggttacatgctggaatgtgtgtgtctggggaacggcaagggagaatggacatgtaagccaatcgctgaaaagtgtttcgaccacgccgccggaacctcctatgttgtcggcgagacatgggaaaagccctaccaggggtggatgatggtggactgcacctgcttgggagagggtagcggacgaatcacttgcacaagcagaaatcgctgtaacgaccaggacacccggacctcgtatcgcatcggagacacctggtctaagaaggacaatcggggaaacctcctgcaatgcatttgtaccggcaacggacggggcgaatggaagtgtgagcgccatacaagtgtgcagactacaagctccggatccggtcctttcaccgatgtgagggcagctgtctatcagccccagcctcaccctcagcctccaccctacgggcattgtgttaccgattctggcgtcgtatatagtgtagggatgcaatggctcaagacacagggaaacaaacagatgctctgtacctgcttgggaaacggggtcagctgccaggagactgccgtgactcagacctacggcggcaattccaacggtgaaccttgtgtgctgcccttcacctacaacggacggaccttttactcctgcacaacagaggggagacaggacggccacctctggtgtagcaccacatccaactatgagcaggatcagaagtacagcttctgtacagaccacacagtcctcgtgcaaacacgaggtggcaacagtaacggagcactgtgtcactttcccttcctgtataacaaccataattacacagattgcaccagcgaagggcgccgggataatatgaagtggtgcggaacaacgcagaactacgacgctgaccaaaagtttgggttctgtccgatggccgctcatgaagagatttgtaccacaaacgaaggtgtgatgtatcgcatcggtgatcaatgggataagcagcatgatatgggccatatgatgaggtgcacatgcgtcggtaatggaagaggggaatggacatgcatcgcatatagtcagctgagagaccagtgcatcgtcgacgacattacctataatgtgaacgacacgtttcataaacgacatgaggagggtcatatgcttaactgtacttgcttcggccaagggagaggccgttggaagtgcgatcccgtggaccaatgccaggactccgagactggcacattttaccagattggggactcatgggagaagtacgtgcacggcgtaaggtatcaatgttattgttatggccgaggcattggcgagtggcactgccagcccctgcagacttacccctcctctagcggtccggtcgaggtgtttatcactgaaacgccctcccagcctaactcacatcccatccagtggaatgccccacagccatctcatattagtaaatacattttaagatggagaccaaaaaacagcgtgggaaggtggaaagaagccacgattccaggtcacttgaattcttacaccattaaaggactcaaacctggggtagtctatgagggccagctgatcagcatccagcagtacggccaccaggaggtgaccaggtttgatttcaccacaacctctacttctactcccgttaccagcaacaccgtcaccggagaaaccactccatttagcccacttgttgccacctcggagagcgtcaccgagattaccgcttctagtttcgtggtaagctgggtgtccgctagtgatacagtgagtggctttcgtgtcgaatatgagctctccgaggagggggatgagccccagtacctggacctaccaagcaccgcgacaagtgtcaatattcccgatcttctgccaggacggaaatatattgtcaacgtgtatcaaatttcggaagacggcgagcagagcctgattctgtccacttcccagacgacggcccccgatgcccctccagacacgacggtggatcaggtcgacgacacaagtatcgttgtcaggtggtccagacctcaagcccctataacggggtacaggattgtctactcaccctccgtggagggctctagcaccgagctgaacctgcccgagacagcaaactctgtgacactaagcgatcttcagccaggggtccaatacaacataacaatctatgcggtagaggaaaatcaggaatccactcccgtggtcattcaacaggagacaacgggaaccccaaggagcgacactgtgccttccccgcgggatttacagtttgtcgaagttaccgacgtgaaagtcactataatgtggacaccccccgagagcgccgttaccgggtatcgggtagacgtgattcctgtcaacctgccaggggaacatggtcagcgcttaccaatttcccgcaatacatttgctgaggtgactggcttgtcgcctggagtcacctactattttaaagtcttcgctgtttcgcacggtagggagagtaaacctctcacagcccagcagaccactaaactggacgctcccactaacttgcaattcgtcaacgagacggactcaaccgtgttagttaggtggacccctccccgcgctcaaatcacaggctaccgactgactgtggggcttactagacgcggccagccccggcagtacaacgtcggtccatctgtcagcaagtatccgctgagaaacctgcagccagccagtgagtacaccgtcagtttagtggccatcaaaggaaatcaggaatcccccaaggctacaggggtgtttactaccttacagccgggcagttcaatcccaccctacaacaccgaggttaccgagaccacaattgtcatcacatggactcctgcacctcgaatcgggtttaaacttggagtacggcccagccaggggggtgaggcaccacgcgaggtaacaagcgattcgggttcaatcgtggtctctggactgacccctggcgttgagtacgtgtataccattcaggtgctccgtgacggccaagaacgggatgctccaatcgtgaataaagtagtcaccccactgagcccacctacaaacctgcacctggaggctaatccagacacgggggtattgaccgtgtcctgggaacgttccactaccccagatatcacaggctaccgcattacgactacaccaaccaacggccagcagggcaatagtctggaagaggtggtccatgcagaccaatcatcatgtacgttcgacaatctgtcaccaggtttggagtacaacgtctcggtttacacagtcaaggacgacaaggagtcagtaccaatttctgatactattattcccgaggtgccccaactaacggacctgtcgttcgtggatataaccgactccagcattggattacgctggactccacttaactctagcacaattattggatatagaatcaccgttgtggcggcaggtgaaggcattccaatctttgaggatttcgtggattcttcagtcggatactacactgtgacgggcctagagcctggcatcgattacgacatttccgtgatcacactcataaatggcggcgaatccgctcccacaaccttaactcaacaaacagccgtgcctccccccacggacctcaggttcttcagtgacatcactgcaaactccttcaccgtgcactggattgccccccgggcaacgatcacaggttaccgcattcgacatcaccctgaacacttttctgggcgtccccgggaggatcgcgtgccacattcgcggaattcgatcaccctgacaaatctgacacctggaactgaatacgtggtttccattgtggcactgaacgggcgggaagaaagtccgctcctgatcggccagcaatccaccgtcagtgatgtgccaagggatctggaagtggttgccgctacacccactagcttgctcatctcctgggatgcgcccgcagtgaccgtgcgctactaccgcataacctacggggagaccggagggaacagccctgttcaggaatttaccgttcccggcagcaagtccacagctactatctccggcctgaagcccggcgtcgactacaccattactgtctacgctgtgacaggtagaggagactcaccggctagctccaaaccaatatccatcaattacaggacagaaatagataaacctagccagatgcaggtgaccgatgtacaggacaatagcattagcgtgaagtggctccctagcagctcccccgtcacggggtatcgtgtcacaactacgccaaaaaatggacccggtccgaccaaaaccaagactgccgggcctgaccagaccgagatgacaatagagggcttgcagccgacagtggaatacgtggtgtcagtgtatgcccagaacccctccggggagagccagcccttagtgcagaccgccgttacaaacatagaccgacctaaaggtctggcgtttacggatgttgatgtggactccattaagattgcatgggagagtcctcagggtcaggtttctcgttatagggtcacgtactcctctcccgaggacgggatccacgagctctttcctgccccagacggcgaggaggacactgcagaattgcagggtttgaggcctggttccgaatacaccgtgagcgtggttgcattacacgatgacatggagtctcagcctctgatcgggacacagagtactgcaattcctgcccctacagacctgaagtttacccaggtgacccccacctctctgtctgcacaatggacgcctccgaacgtccaattgactggctacagggtgcgggtgactccaaaggagaagacgggaccaatgaaggaaatcaatcttgctcccgattcctccagtgtggttgtttccggacttatggttgccacaaagtacgaagtgagcgtctacgccctgaaagacacacttacatcgaggcccgctcagggagttgtgacgacccttgaaaatgtgtcccctccccggagggcccgcgtcaccgacgcgaccgagaccaccatcacaatcagctggcggacaaaaaccgagaccataaccgggttccaggtggacgccgtaccggctaacggccagacccctatccagcggaccattaaacctgatgtcaggagttatacaatcaccgggctccaacctgggacagattataaaatatatctctataccttgaacgacaacgcccggtcgtcaccagtggttattgatgcctccaccgctatagatgccccatccaacctcagattcctggctactactcctaactccctgctggtgtcgtggcagcccccgagagcaaggattaccggttacatcatcaaatacgagaagcccggaagcccccctagagaagtggtccccaggcccagacccggcgtgactgaagccaccattaccggtttggaacctggaactgagtataccatctatgtcattgccctcaaaaacaaccagaagtctgagcctctcatcggaagaaagaaaacagatgagcttccccagctcgttaccctgccccaccctaatctgcacggtccagaaatcctggacgtgccatctactgtgcagaagacccctttcgttacccacccgggctatgatactgggaatgggatccagctgccaggtacctctggtcagcaacctagtgtaggccagcagatgatcttcgaagaacacggcttcagaagaactacaccccccacaaccgccacccctattcgtcacagacccaggccttatcccccaaatgtcggagaggagatccagattggtcacatccctcgagaggacgtggattaccacctatacccgcatgggccaggtctgaatcctaatgcttctactggacaggaagccttgagccagacaactattagctgggcaccattccaggacacctccgagtacataattagctgccacccagtcgggaccgacgaagaacctctgcagtttcgagtacctggaacctctacaagtgccacactgaccggcctgactcgcggcgcgacctataatgttatagtggaggctctcaaggaccagcaacgacataaggtgcgggaagaagttgtgactgttggtaactccgtcaacgaggggctgaaccaacccacagacgactcctgctttgacccctacacggtgtcccactatgcggtaggggatgagtgggagagaatgtctgaaagtggctttaagctgctctgtcagtgccttggctttggctctgggcactttcgctgcgacagctcccgatggtgccatgacaacggtgtgaattacaagatcggtgaaaagtgggaccgccaaggggaaaacggacaaatgatgagctgtacgtgtctggggaacggcaagggagagttcaaatgcgatcctcacgaggccacatgctacgacgatgggaaaacataccacgtgggagagcaatggcagaaggagtatttgggagccatttgctcctgtacttgcttcggcggacagagggggtggcggtgtgacaactgccggaggcccggcggcgagcctagccctgagggcacaaccggccaatcttacaaccaatattctcagagatatcaccagaggaccaacacaaacgtgaactgtcccatcgagtgttttatgccactggatgttcaggcagatagagaagattctcgagaatag

SEQ ID NO: 267179 - DNA, 7161 bp, Artificial Sequence
  derived and/or modified sequence
atgctgcggggccccggccccggcctgctgctgctggccgtgcagtgtctcggtactgctgtgccgagcacaggggcttcgaagtcaaaaaggcaagcccagcagatggtgcagccgcagagccccgtcgcagtgagccagagcaagcctggatgctatgataatgggaagcattaccagattaaccagcagtgggagaggacctacttgggaaatgccctggtctgtacatgttacggaggctcaagaggattcaattgtgagagcaagccagaggcagaggagacgtgttttgacaaatatactggtaacacataccgggtgggggacacctatgagagaccaaaggattccatgatctgggactgtacttgcatcggggccggcagaggcagaattagttgcacgatagcaaatagatgccacgagggagggcagtcctacaagataggcgacacatggcggcgaccacatgagaccggtggatatatgttggaatgtgtttgtcttgggaacggaaagggagaatggacctgtaaaccaatcgccgagaaatgctttgatcacgctgcaggcacctcctacgttgttggtgaaacttgggagaaaccataccaggggtggatgatggtcgactgtacctgcctgggagaggggtctggccggatcacctgcacctcccgcaataggtgcaatgatcaagatacacgcacatcttaccgcattggcgacacatggagcaagaaggacaataggggtaacctactgcagtgtatatgcacaggaaatgggagaggtgagtggaagtgcgaacggcacacctctgttcagacgacctccagtgggtccggtccattcaccgacgtccgtgcggctgtgtaccagccccagccccatccgcagccgcccccctatggccattgtgtgacggactctggcgtggtttattcagtaggaatgcagtggcttaaaactcagggaaataagcagatgctgtgtacgtgtttgggcaatggcgtttcctgccaagaaactgcagtaacccagacatacggagggaattccaatggtgaaccttgtgtgctcccattcacatataatggccgtaccttctactcttgcaccacagaagggcgacaagacgggcacctatggtgttcaactacaagcaattatgagcaagatcagaaatatagcttctgcacagatcatactgtgttagtccagactcggggtggcaactctaacggcgctctgtgtcactttcccttcctctacaataatcacaactatacagactgtacctccgagggtagacgggacaatatgaaatggtgcggtaccacccagaattacgacgccgaccagaaatttggattttgccccatggccgcccatgaggagatttgcaccaccaatgaaggcgtaatgtataggatcggagaccagtgggacaaacaacatgacatggggcatatgatgcgatgtacatgcgttggtaacggtagaggcgaatggacatgtatcgcctattcccagctcagggaccagtgtattgttgacgacatcacgtataacgtgaacgacacgttccacaagaggcacgaagaagggcatatgctcaactgtacttgtttcgggcaggggagagggcgctggaagtgtgatccggtcgaccagtgtcaggactcggagactggcacattttaccagatcggtgactcctgggagaaatatgtgcatggtgtacgttatcaatgctactgttatggccgaggcatcggagaatggcattgtcagcccctccaaacctatccttcctcaagcggccctgtggaggtatttataaccgagacccctagtcaacctaactcccatcctattcaatggaatgctccccagccttcccacatttcaaaatacattctcaggtggcgccccaagaactcagtaggccgatggaaagaagccacaatcccgggccacttgaactcctacaccattaaagggctgaagccgggagtcgtctacgagggtcaactgatttccattcagcagtatgggcaccaggaagtgaccagattcgattttacaacaacatcaacttcgacaccagtcacatcgaatacagtgaccggcgaaaccactccgtttagtccactagtggcaacgagcgagagcgtcacagaaatcacggcgtcttcgtttgtcgtgagctgggtgagcgccagtgacaccgtatctgggttccgcgtggagtacgagttatcagaagagggagatgaaccacagtacctcgatctcccttctacagcaacgtccgtcaacatccccgatctgctgccaggccggaaatacatcgtcaacgtgtatcagatctcagaggatggggaacaatccttaattctttccactagtcagaccacagcgcctgacgcaccaccggatacaaccgtcgatcaagtggatgatactagtatagtggtgcggtggtcccgcccacaggctccgatcaccggttacagaattgtatactccccctcagtagaagggtcaagtactgaactcaaccttcctgagacagccaacagcgtcacactgagcgacctgcagcccggcgtgcagtacaatattacaatttatgccgtcgaagagaaccaagagtccacacccgtggtaattcagcaggagacaaccggcactcctcgttcagataccgttcctagcccccgtgacctgcagtttgtggaagtgaccgatgtgaaggtgaccataatgtggactcccccagagagtgcagtcaccgggtatcgtgttgacgtgatacctgtgaacttgcctggagaacacggccagagactgccaatctcccggaatacatttgcagaagtcacaggcctttctcccggggtgacatactactttaaagtgtttgctgtctcccacggcagggaatccaaacctctcaccgcacaacagacaaccaaactggacgcaccaacaaacctgcagttcgtcaatgaaacagattctacagtgctcgtgcggtggactcctcctagagcccaaattacaggctacaggcttacggtcggactgacgcggcggggccagccacgacaatacaatgtgggtccctcggtgagtaagtacccactgagaaatcttcagcctgcttctgagtacactgtgtctctggtggccattaagggcaatcaagagtccccaaaagccacaggagtgtttacaactctacagccaggatcctccattccgccttacaataccgaggtgactgagaccacaatcgtgattacctggactcccgctccccgcattgggtttaaattgggggtgagaccttcccaggggggtgaggctccacgggaagtgacatcggatagtgggtccatcgttgtgagtggcctgacccccggtgtcgaatacgtgtatactatccaggtgctaagggatgggcaagagcgggacgctcccatcgtgaacaaggtagtgacaccactgtcaccgccaacaaaccttcatcttgaagccaatcctgacacaggagtactgactgtgtcctgggagaggtcaacaactcctgacatcacaggctatagaattactactacccccacaaacgggcaacagggtaactcactcgaagaagtcgttcacgccgatcagtcaagctgcacattcgataacttgagcccaggcttggagtacaacgtttcagtttataccgtgaaggatgacaaggagtccgtccccatttccgatacaatcatccccgctgtgccccccccaaccgatcttagatttacaaatatcggccccgacacgatgcgagtcacgtgggcccctcctccgagtatagacctgacaaattttctggttcgctactccccggtcaaaaatgaggaagacgtcgctgaactttccatcagtccaagcgacaatgcagtcgtgcttactaatctgctccctggcacggaatacgtggtgtcagtgagctcagtgtatgaacagcacgagagtacgccactgagagggcgacagaaaactgggcttgacagccctacaggcatagacttttctgatatcactgccaatagttttactgtgcattggattgcaccaagagcgaccatcaccggctaccggataaggcaccatccagagcacttttccggacgaccgagagaagacagagttccccacagcagaaattctataacactcaccaatctaacacccggaaccgagtacgtcgtcagcattgtggctctcaacgggcgagaagagtcaccccttctgattgggcagcagagcacggtgagcgatgtccccagagatctggaggtggtcgctgcaacccctaccagtctgctcatttcatgggatgcaccagccgtaaccgtgcgttattatagaatcacttacggtgagaccggcgggaattcacctgtgcaagagttcaccgtccccgggagcaagtccaccgccacaatctcagggcttaagcccggtgttgactacaccattacagtgtatgccgttaccggtcgcggcgattctcctgctagttctaagccaatctcgatcaattaccgtacagaaatcgataagccgagccagatgcaggtgaccgatgtccaggacaactcaatcagtgtgaagtggctgccatctagctctcccgtcacaggttacagggtcactacaaccccaaagaacgggcccggccctaccaagaccaaaaccgctggacctgatcagactgagatgacgatcgaaggcctgcagccgacagttgaatatgtggtgagcgtctacgcacaaaacccttccggcgagtcccagccgttggtccagacagctgtgaccaatatagatcggcccaagggactggctttcacggacgtagacgtggactcgataaaaatcgcctgggagtcacctcagggccaggtgtcgaggtatagagttacctattcctctcccgaagatggcatacatgaactcttccccgcaccagatggcgaggaagatacggcggagctgcaggggcttcgacccggctccgaatacacagtctcggtggttgctctgcatgacgatatggaaagccagccactcattgggacacagagcacggccatcccggctcctaccgaccttaaatttacccaggtaacacctaccagcctgagtgcgcaatggaccccacctaatgtccagttgactgggtatagagtccgtgtgactcctaaggaaaagacagggcccatgaaagagattaacctggctcccgacagcagctctgtggtggtttcaggcctcatggttgcgacaaagtacgaggtgagtgtatatgccttaaaggacactctgacgtcgcgccctgctcaaggcgtcgtgactacactagagaatgtctctcccccgcgacgtgcacgcgttacagatgccacggagaccacaatcactatttcctggcgaaccaagacagagacaataaccgggttccaagtggacgccgttcccgcaaacgggcagacacctatccaacggacaatcaaacccgacgtgcggtcctacacgattacaggtctccagcccggcactgactacaaaatctatctctacaccctgaacgacaatgcaaggtcatcccctgtggttatcgatgcatcgactgcaattgatgcgccctcaaaccttaggttcctggccacaacccccaatagcctactggtcagttggcagccccccagagcccgcatcacggggtacattattaaatatgagaagccggggagcccgcccagagaggtcgtcccccggcctaggccaggcgtaacagaagccactataacaggattggagcctggaactgaatataccatctacgtcatagccctgaaaaataaccagaagagcgagccacttattgggaggaagaaaaccgacgagttgcctcaactggtaactctgccccacccaaacttacacgggcctgaaattctagatgtcccctctaccgtgcagaaaacaccatttgtaacgcaccctggctatgataccgggaacggaatccagctccccggaacatccggtcagcagccctcagtggggcaacagatgatcttcgaagaacacggcttcaggcgcaccaccccaccaactaccgctacccctatccgccataggcctcgaccctatccacctaacgtgggcgaagagatccagatcggacatatccccagggaggatgtcgattaccatctctaccctcacgggccgggactcaatccaaacgcttctactggccaggaagccctgtctcaaacaacgatcagctgggcccctttccaggacacctccgagtatattatttcttgtcaccccgtgggaaccgatgaggaacctctccagttcagagtgcccggaacaagcaccagcgccacactgactgggctgacacggggtgcaacctacaacgtaatagtagaagccctcaaggaccagcagcgccacaaggtgagggaggaggtggtgacggtgggaaactcagtgaacgaaggactcaatcaacccacagacgattcctgcttcgatccctacaccgtgtcccactacgctgtgggggatgaatgggagagaatgtcagaatctggcttcaaactgctatgccagtgccttggcttcggaagcggccattttcgctgtgacagttcacgttggtgtcacgataatggcgtgaactataaaatcggcgaaaaatgggaccgccagggggaaaatggccagatgatgtcatgtacatgtctaggaaacggcaagggcgagttcaagtgcgacccgcatgaagctacctgctacgacgatggcaaaacctaccacgtaggggagcagtggcagaaggagtatctgggagcgatctgctcatgcacctgtttcggcggtcaaagaggatggcgatgtgataactgtcgtcggcccggcggagagccaagcccagaaggaaccactgggcagagctataaccagtacagtcagcgctaccaccagaggaccaataccaacgtcaattgtcctattgagtgcttcatgcctctagatgtccaggcagaccgggaggatagtcgtgagtag

SEQ ID NO: 267180 - DNA, 7163 bp, Artificial Sequence
  derived and/or modified sequence
atgctgcggggtcctgggcctggcctactccttttagccgtccagtgtctgggaaccgctgtcccaagcactggagcgtctaagagtaagcggcaggctcagcaaatggtccagcctcagagtcctgttgccgtatcccaatctaaacccggttgctacgataacggaaaacattaccaaatcaaccaacaatgggaaaggacgtatctcggtaatgccctggtatgcacttgctacggcggtagtaggggcttcaactgcgagagtaagccggaggccgaagaaacatgttttgataagtacacaggcaatacttatcgagtcggggatacatacgagaggcccaaggactccatgatttgggactgtacatgtataggcgctggtagaggccgaatctcttgtacaattgcaaacagatgccacgagggtggccaaagttataagatcggcgatacctggaggcgaccacacgagactggagggtatatgctggagtgtgtgtgtctcggtaatggcaagggtgagtggacatgtaagcccatcgccgaaaagtgcttcgatcatgccgcaggtactagctacgttgtgggtgaaacctgggaaaaaccttaccaaggctggatgatggtcgattgcacatgtcttggggagggctccgggcgaattacttgtacctcccggaataggtgcaatgatcaggatactcgcacttcatatcgtatcggtgacacgtggagcaaaaaggataaccggggaaaccttcttcagtgtatatgtactggaaatgggagaggcgagtggaaatgcgagcgtcatacttccgtccaaaccacctcaagcggatccggacctttcacagatgtgcgtgctgccgtctaccaaccacagccacatccacaaccgccaccttatgggcattgtgtgacagatagcggagtcgtctattccgttgggatgcagtggcttaagacgcaggggaataagcagatgctgtgcacctgcctggggaatggggtgtcttgccaggagaccgcggtcacacagacttatggcggaaattctaatggtgagccctgtgtacttccctttacctataacggacgtacgttttactcctgtaccaccgagggcagacaggatggacacttgtggtgctccacgaccagcaattacgaacaggaccagaagtacagcttttgcactgaccataccgttttggttcagacaagaggcggaaattctaacggagctttatgccacttccccttcttatacaacaaccataactatactgactgcacaagcgagggtcgcagggataacatgaagtggtgtggcacaacacaaaattacgacgcagatcaaaaattcggattttgcccgatggcagctcacgaggaaatctgcacgacaaacgaaggtgtgatgtaccggataggagaccagtgggataagcagcatgacatgggccatatgatgagatgcacctgcgtgggcaacggaaggggggagtggacctgcattgcatatagccagctacgcgaccagtgcattgtggacgacattacttataacgtgaacgatacctttcacaaacgtcacgaagagggccacatgttgaattgcacttgctttggccaggggagaggcaggtggaagtgtgaccccgtagaccagtgccaggattcagagacgggtaccttctaccagataggagactcttgggagaagtatgttcatggggtgaggtaccagtgctactgttacggtagaggtattggagagtggcactgccagccattacagacctatccttcctcttcaggaccagtggaggtgttcattacagaaacaccatctcagcctaatagccatccaattcagtggaacgcgccacaaccctctcatataagtaagtacattctccgctggcgtccgaaaaactcagttggccgttggaaagaggccaccattcccggacatttgaattcttacacaattaaaggcctcaagccaggagtcgtgtatgagggccagctgatttctatccagcaatatgggcaccaggaagtgacacgctttgattttacaacaacatctacctcaacgccggtcacatctaatactgtgaccggggagacaaccccttttagtccactggtagccacgtctgagagcgtcacggagataactgctagttctttcgttgtctcgtgggtaagcgcttcagacacggtgagcgggtttagggtggagtatgaactctctgaagaaggtgacgagcctcaatacctagatttaccaagtaccgctaccagtgtgaatattcctgacttgctccccggacggaagtatatagttaacgtctatcagatttctgaggatggagaacaatcgttgatactgagtacatcacagaccacggctccagatgcccctccggacactaccgtagaccaagtcgacgacacttccatcgtcgtgcgttggagtcgtccacaagctcctatcaccggttacaggatcgtatactcaccttcagtggagggatcaagtactgagctcaatctgccagagactgctaattccgtcaccttatctgatcttcagccgggagttcagtacaacatcaccatatacgctgtggaggagaatcaggagagtactccagttgttattcaacaggagaccacaggtactcccaggtccgatacagtaccctctccccgtgaccttcagtttgtagaggttaccgacgtcaaagtcacaattatgtggaccccaccagagtccgccgtcactggctaccgggttgacgtcatacccgtcaacttgcccggagagcacggtcagcgtttacctattagcagaaatacattcgccgaagtgaccggtctcagtccaggggtgacctactattttaaagtgttcgcagtgtctcacggtcgcgagagtaagcctctcacagcgcagcagacaacgaaactggacgcacctaccaacctgcagttcgtcaatgagacagacagtacggtgctggtgcggtggacacctccaagagcacagataaccggctacaggctgacagttggcctcaccagaaggggccagccccgacagtacaatgttggaccgtctgtgagcaagtacccgttgagaaacctgcaacctgcttcggagtataccgtgtcactggttgccattaagggcaaccaggagagccctaaggccaccggggttttcaccacactacagcccggaagctctatccctccttataacactgaagtgacagagaccaccatcgttatcacctggacaccggcaccacgaattggattcaagctaggagttagaccgagtcagggtggagaggccccaagggaagtgacttccgatagcggttctattgtagtctccggccttaccccaggtgtggagtatgtgtacacaatccaggtgctgagagatggccaggagagggacgcacccatcgttaataaagtggtgactcctttatctccgcctacaaacctgcatctcgaggccaatccagatacaggggttctgacagtctcttgggagcggtccactaccccagatattactggctacagaatcacaaccacccctactaatgggcagcagggaaattcccttgaagaagtggtacatgccgatcaatcctcttgtacctttgacaatctttcccccggtcttgagtacaacgttagtgtgtacactgtgaaggatgataaggagagcgttccaatcagcgatacaatcatcccagaggtgccccagctgaccgacctatcctttgttgacataacggatagctcgataggcctcagatggaccccactgaacagctcaaccattatcggttaccgtattacagtggtggctgcaggcgaagggataccaatcttcgaagatttcgttgacagttcggtcgggtattacaccgtgaccggacttgagcccggaatcgattatgatatctcagtgataactcttatcaacggcggtgaatcagccccaactaccctaacacagcagaccgctgtccctccacccacagatcttcggttttttagcgatataacagcgaactcatttaccgttcattggatcgcaccaagagcaactatcactggataccgcattcgacatcatcctgaacacttctcaggacgccctagagaagaccgagtacctcacagccgaaactctatcaccctgaccaatttgacccccggaacggagtatgttgtaagtatcgtcgcactcaacgggagggaagagagccctcttcttataggtcaacagagtacagtgtctgacgttccacgggacctggaggtggtcgcagcgactccgacgtctttgctcatctcttgggacgccccagccgtcaccgtgcggtattacagaattacttacggcgaaactggaggtaactccccagtccaggagttcaccgttcccggttctaagagcactgctaccattagcggactcaagcccggagtggactacactattacagtctacgctgtaaccggcagaggggatagccccgcatcttccaagcccattagcattaactaccgcacggagatcgataagccctcccagatgcaggtcactgatgtacaggataactcaatcagcgtgaaatggttgcccagctcatcgcctgtcacaggctatagggtgacaacaacacctaaaaacggaccaggcccaactaaaacaaagaccgcagggcctgaccaaaccgaaatgactatcgaaggactgcaacccaccgtggagtacgtcgtcagcgtatacgcccagaatcccagtggtgaatcacaacccctggttcagacagccgtaaccaatatcgatagacctaagggattagcatttaccgacgtggacgtagacagtattaagatagcttgggaatctcctcaggggcaagttagcaggtacagagtgacctattcttcccccgaggacggcatccacgagctgtttccagcaccagatggggaagaagatactgccgaacttcaaggccttagacctggctcggagtacaccgtgagcgtggtcgctctccacgacgacatggagtctcagccgctgataggcacccagtctaccgctatcccagctccaactgacctgaaattcacccaggtgactccaactagcctgagcgcacagtggacaccacctaatgtgcagctcaccggctaccgggtgagagtgactccaaaggagaagaccggccctatgaaagaaatcaacctcgctccagattctagctctgtcgtcgtatctggcctcatggtggctacgaaatatgaagtctctgtgtacgctctgaaggacaccctcacatcccggcctgcgcaaggcgtcgttacaacattagaaaacgtctcccctcctcgccgtgctcgtgttacagatgcaacggagactactatcacaatttcctggcggacaaaaactgaaacaataacagggtttcaggttgacgccgttcccgcaaatggacagactccgattcagcgaaccatcaagccagatgtcagaagctatactattacgggcttacagcctggcactgattacaagatttatttgtacactcttaatgacaacgccagatcaagccccgttgtgatcgacgcctcaaccgcaatcgacgcaccctctaacctcaggttcctggcaactactccgaattccctgctggtgagctggcagccaccccgagccaggatcaccggatacatcatcaagtacgaaaagccagggagtcctccacgggaagtcgtgcccaggccacggccaggggtcactgaggccacaatcaccggcctcgaaccgggtaccgaatacactatttacgtaattgccctgaagaataatcagaagtctgaaccactcatcggcagaaaaaagacagatgaactgccgcaactagtcactttgcctcaccccaatctgcacggacccgagattctcgacgtgccatcaaccgtacaaaaaaccccgttcgtcacacaccctggatacgacacaggcaacggaattcaactgcctggcacctccggtcagcaacccagtgtgggccagcagatgatctttgaggagcacggcttccggagaactacgcctccaactaccgctactccgatccggcaccggcctagaccttaccccccaaacgtcggcgaagaaattcagatcggccacattcccagggaggacgtggactatcacctctatcctcacgggcctggactaaaccccaatgccagcaccgggcaggaggccttatcccaaacgactatcagctgggcccctttccaggatacctcagagtatatcatttcatgccatcctgtgggaaccgacgaggagcccctccagttccgggtgcctgggaccagcacttcagctaccctgacaggtttgactcgaggcgcaacatacaatgtcattgttgaggcccttaaagaccaacagcgacataaggtgagagaagaggtcgtcacagtgggtaatagcgtgaacgaaggcctcaaccagccaaccgatgatagctgctttgacccatacacagtatcccattatgctgtcggggacgagtgggagcgcatgagcgagagtggctttaagttactgtgccaatgcctcggattcggttctggacattttcggtgcgacagcagtaggtggtgtcacgacaatggggtcaattacaagatcggagagaagtgggaccggcagggggagaacggccaaatgatgagctgcacatgcttgggaaatggaaaaggggagttcaaatgcgaccctcacgaggccacctgctacgacgatggaaaaacttatcacgtgggagagcagtggcagaaagagtaccttggcgctatctgctcatgcacatgctttgggggacagaggggttggagatgcgacaactgcagacgccctggtggcgagccaagccccgaaggaactacaggccagtcctataaccagtactcacagaggtaccaccagcgcaccaacaccaatgtcaactgtcctatcgagtgctttatgcctttggatgtgcaggcagatagagaagatagccgtgaata

SEQ ID NO: 267181 - DNA, 7161 bp, Artificial Sequence
  derived and/or modified sequence
atgctaagagggccaggccctggccttctactgctggcagtgcagtgtttggggactgccgttccctcaacaggagcatcaaagtctaagaggcaggcccaacagatggtgcagccccaatcacctgtggctgtgtcacaaagcaagcctgggtgctacgataacggcaaacattatcagatcaaccaacaatgggaacggacttatcttggcaacgcgcttgtgtgcacctgctacgggggaagccggggtttcaattgcgagtcaaagcctgaagcagaggagacttgctttgacaaatacactggcaacacctaccgagtcggcgatacctacgaacgccctaaagatagtatgatctgggattgtacctgcatcggcgcagggcgaggccgaatttcatgtactatagccaatagatgccacgagggaggccagagttataaaattggcgacacatggcggagaccccatgagaccggagggtatatgctggaatgcgtctgtctggggaacggtaaaggcgaatggacctgcaagcctatcgctgagaaatgttttgatcatgccgcaggcacctcttacgtcgtcggagagacctgggagaagccttatcaaggctggatgatggttgactgcacatgcctcggggaaggtagcgggcgaattacttgcacatctcggaacagatgtaacgaccaagatacaagaaccagttataggataggggacacctggtccaaaaaggataaccgcggaaacctgctccagtgtatctgtacaggcaacgggaggggcgaatggaagtgcgaacgccatactagcgttcagactaccagtagcggttcagggccatttacagatgtgagggcagctgtgtaccaaccccagccccatccacagccgcctccctatggccattgcgttacagactcaggcgtcgtgtattctgttggcatgcagtggttgaagacccagggtaacaagcagatgttgtgtacttgcttgggcaacggcgttagttgtcaggagacagcggtcacacaaacctatggcggaaactccaacggagagccatgcgttctgccctttacctacaacggcaggactttctattcttgcactaccgaaggcagacaggatggccacctctggtgttcaacgacgagcaactacgagcaggaccagaagtattctttctgtacggatcataccgttctcgtacagacgagggggggtaattccaacggtgcattgtgccactttcccttcctgtacaataatcacaactacacagactgcacttctgaagggaggcgcgataatatgaagtggtgcggaaccactcagaactatgacgccgatcagaagttcggcttttgtcctatggccgctcacgaggagatttgtaccactaacgagggcgtaatgtatcggatcggggaccagtgggacaagcagcacgatatgggccacatgatgcgctgcacctgcgtcgggaacggcagaggagaatggacatgcatcgcttactcccagctcagggaccaatgcatcgtagacgacattacttacaacgtgaatgacacatttcacaaacgtcatgaagaggggcacatgttgaactgcacctgctttgggcaggggagaggaaggtggaagtgcgatcccgtggaccagtgtcaggacagcgagacagggacgttttaccagataggggactcctgggaaaagtatgtgcacggtgtgaggtaccagtgttattgttacgggaggggtatcggtgagtggcattgccagccattgcagacgtatccctcaagttctggcccagtggaggtctttataaccgagaccccttcgcaaccgaactctcaccccattcagtggaacgcccctcagccatctcacatcagtaaatatatcttgcggtggcgcccaaagaactcagttggaagatggaaggaggcgacaatcccgggtcacctgaacagctacactatcaaaggactgaaacccggtgtggtttatgaagggcagctcatcagtatccagcagtatgggcatcaggaggtgacccggttcgactttacaaccaccagcacttccaccccagttacaagtaacacggttacgggagagacaacccctttttcacctcttgtggccacgtcggagagcgtcacggagattactgcatccagctttgtggttagttgggtgagtgccagcgatacggtctcaggattccgagtggaatatgagctcagcgaagagggggacgagccccagtatctcgacctgccgagcacagcgacctccgtcaatattccggatctgctgccagggaggaaatatatagtgaacgtgtaccagatcagcgaggacggggaacagagcctcatcctcagtacttcccagaccaccgcgccagatgctccgcctgacaccacggtggaccaagtcgacgacacatccatcgtggtcaggtggtcccgaccccaagctccgatcacgggctatagaattgtgtattccccttccgtggaaggatcatctacagaattaaatctgcctgagaccgcaaactccgttactctgtctgatctgcaacctggagtgcaatataacatcaccatctacgcggtcgaggagaaccaggaaagcacacctgtggtgatccaacaggagactacaggtactccaaggtctgacacagtccccagtcctcgtgacttgcaattcgtggaagtcaccgacgtgaaagtgacaataatgtggactccccctgagagcgctgttaccggttaccgcgttgatgttatcccggtgaatctgcctggcgaacacggacagcggctccccatatcccgcaacacctttgcagaggtgaccgggctatcacctggcgttacgtattactttaaagtttttgccgtcagccatgggagagagtctaagccgcttacggcccagcagaccacaaagctagacgcacccacaaatctccagttcgtcaatgagacagattccaccgtgctggtgagatggaccccgccaagagctcaaatcaccggttacagactcaccgtgggcctcactagaaggggacagcccagacagtataacgttggcccaagtgtttcgaaatatccactgcgcaatttgcagcctgcctccgaatacactgtcagtctggtggctatcaaagggaatcaggaatcccccaaagccacaggcgtcttcaccactctgcagcctggctcatctattccgccttacaatacagaagtgaccgagaccaccattgtgatcacatggacccccgcacctcgcatcggcttcaaactaggggtgaggccatctcaaggaggggaagctcctcgagaggtcaccagtgacagcggaagcatagtcgtgtcaggcctgacacctggtgtcgaatacgtgtatacaattcaagtcttgcgggatgggcaggagcgcgatgccccaatcgtgaacaaagttgtgactccgctttcccctccgacgaacttgcacctggaggcgaaccctgacacaggcgtacttacggtcagctgggagaggtctacaacacccgacattacgggatataggattaccaccaccccgacgaacgggcagcagggcaattctctggaggaagtggtccacgcagatcagagcagctgcacttttgataacctctcacctggactggaatataatgttagcgtttacactgtcaaagatgacaaagaatccgtgcctatctctgatactattattcccgctgtcccaccgcctaccgatctgcggttcacaaacattggacctgataccatgcgcgttacctgggcccctcccccatcaatcgatcttacaaattttctggtacggtattcacccgtcaaaaatgaggaagatgtggcagagctctctatcagccccagcgacaacgcagtcgtcctgacaaacctcctgcctggtacagaatatgtcgtcagcgtatcctcagtgtacgagcaacacgaatccaccccactgaggggacgccagaaaacagggttagattcacctacgggcattgattttagtgatatcacagccaatagctttacggtccactggattgctcctcgcgctacgattacaggataccggatcaggcatcacccggaacatttttccggtcgtcccagggaggaccgggtcccacatagtcgaaactctatcacattgaccaacctcactcccggtaccgaatatgtggtcagcattgtcgcgttaaatgggcgagaggagtcgccactgcttattggccagcaatctaccgtgagcgatgtgccgagggacttagaagtggtcgccgcaaccccaacctccctcctgatctcctgggacgccccagccgtgactgtgcggtactatagaatcacctatggggagacaggagggaatagtccagtgcaagaatttaccgtaccaggaagcaaatctactgccaccatcagcggactgaaacctggtgtggattatacaatcacggtgtacgctgtgactggcaggggcgacagtcccgcaagtagcaaaccgatctcaataaactatcgtactgagatcgacaagcctagccagatgcaggtgaccgacgtccaggacaactcaatctccgtgaagtggttaccctcaagtagccctgtgaccggatacagagtgaccactacacctaagaatgggccagggcctaccaagaccaagactgccggacccgaccagacagagatgactatagaaggcctacagcccaccgtggagtacgtcgtgagtgtatacgcccagaatccatccggggagagccaacctttggtgcagactgccgtcacaaatatcgaccgcccaaagggcctggctttcacggacgttgatgtggacagtatcaagatagcctgggagagcccacagggacaggtttcaaggtacagggtaacctacagctctcctgaagatggcatccatgagctttttccagccccagatggagaagaagatacagcagagctgcagggactaaggcccggaagcgagtacactgtctcagtcgtggcattgcacgacgatatggagtctcagccccttattgggacccagagcacagccataccagctcccactgacctcaaattcactcaagtcactcccaccagtttatcagcgcagtggaccccacctaatgtacaacttaccggttacagggtaagggtgactcccaaggaaaagaccggaccaatgaaggaaataaatctcgcgcctgattcatccagcgtagtcgtgagtggactgatggtggccaccaaatacgaggtcagcgtgtacgcactgaaagacacgcttaccagccgccctgcccaaggcgtcgtcacaacactcgaaaatgtgtcaccaccacggagggccagggttactgacgctaccgagacgacgatcactatatcatggaggacaaagactgagacaatcaccggttttcaggtggatgcagttccagccaacggccaaaccccaatccagcggactataaaaccggacgtgcggtcctacactatcacggggttacagccaggaaccgactacaaaatttacctatatacactcaacgacaacgcccgatcctctcccgtagtcattgatgcatccactgccattgacgcaccgtctaacctgcgattccttgcaactacacccaattccctgctggtgtcctggcaacctccgagagcgagaattacaggctacataattaagtacgaaaaacctggaagtccccctagggaggtggtccctcgtccccgtccgggagtgactgaggctaccataacagggctagagcctggtacagagtatacaatttacgtgatcgctctgaagaacaatcaaaagtccgagccgctgattggcagaaaaaagaccgatgagctgccccaactcgtcacactgcctcacccgaaccttcacggcccagagatcctcgacgtgccttcaaccgtgcagaagacaccttttgtgacacaccctggctatgacactggcaatgggattcaactgccagggacctccgggcagcagccgagcgtgggacagcagatgatctttgaagagcacggatttagacgcactaccccgccaactaccgccactcccataaggcacaggcctcgcccttatcctcccaatgtgggcgaagaaatccaaattggacatatacccagggaggatgtggattatcatctgtatcctcatggtcccggtctgaaccccaacgctagtaccggtcaggaagctctcagtcagacaaccatctcttgggcaccattccaggacacctcggaatacatcatcagctgccacccagtgggaacggacgaggaacctttacagtttagagttccaggaaccagcaccagtgcaaccctgaccggactcacacgaggagctacatacaatgtgattgtagaggcacttaaggatcagcagcggcacaaagtgagggaagaggtcgtcacagtaggcaatagcgtcaacgaaggcctgaaccagcccaccgacgactcatgtttcgatccctacacggtcagtcactacgccgttggggacgaatgggaaaggatgtcagaaagcggttttaagcttttgtgtcagtgcctaggttttggaagcgggcacttcaggtgtgactcgagccggtggtgtcacgataacggcgttaattataagattggagaaaagtgggatcgccagggcgagaatgggcaaatgatgagctgcacctgtctgggtaatgggaagggagagtttaagtgtgaccctcacgaggcaacctgctacgacgacggtaaaacctaccatgtgggcgagcaatggcaaaaggaatacttaggggctatttgttcatgcacgtgcttcggaggacagcggggttggcgttgcgacaactgccgtaggccaggtggggagccaagcccggagggaaccactggccaaagctataatcagtatagtcagcgctaccaccagagaacaaacactaacgttaactgccccatcgagtgcttcatgccactcgatgtccaggcagatcgtgaggattctcgggagtac

SEQ ID NO: 267182 - DNA, 7164 bp, Artificial Sequence
  derived and/or modified sequence
atgttgcgtggccctggccctggcttgctgctcctggctgtccagtgcttgggcacagccgtgcccagtaccggcgccagcaagtccaaaagacaagcccagcagatggtgcagccccagtctcccgtggccgtctcacaatcgaagcctggctgctacgataacggcaagcactatcagataaaccagcagtgggagagaacgtacctgggaaacgccctggtctgcacctgctacggtggtagcaggggattcaactgcgaatcgaagccggaggccgaggaaacttgctttgacaaatacaccggcaacacgtaccgcgtcggagatacttatgagcgacctaaggactcaatgatctgggattgcacctgcatcggagccgggagggggcgaatttcatgtacgattgcaaaccgctgtcacgagggtggtcagtcttataagattggcgacacatggcgacgtcctcacgagaccggcggctacatgctggaatgcgtgtgcttgggcaacgggaagggggaatggacttgcaagccaattgccgagaaatgttttgaccacgcagccgggaccagctacgtagtaggggagacatgggaaaagccatatcagggctggatgatggtcgactgtacatgtctgggcgaaggatcaggacgcatcacttgcacgtcccggaatcgctgtaatgaccaggacacccggacgtcctatcgaatcggcgatacttggtcgaagaaggataacagggggaacctgcttcagtgtatttgtacaggaaacggtcgcggcgagtggaaatgcgagagacacacgtccgtccagaccacatccagcggctcaggtccgttcacagacgttagggccgctgtctaccagcctcaacctcacccacagcccccgccctatggacactgtgttacagattcaggggtggtgtacagcgtcgggatgcagtggctgaaaactcaaggaaataaacaaatgctgtgtacctgtctcggtaacggcgtctcttgccaggaaacggccgtgacccagacctatggtggcaatagtaatggggaaccttgcgtcttacccttcacctataatgggcggactttttactcttgtaccaccgaaggacgtcaggatggccatttgtggtgtagcacaacgtccaactatgagcaggatcagaagtactcattttgcactgaccacaccgtattagtccagacccgggggggcaactctaacggcgcactctgccattttccattcttatacaacaaccataattacaccgactgcacctccgagggccgcagagataatatgaagtggtgcggaactactcagaactatgatgcagaccagaagttcggattttgccccatggctgcccatgaggaaatctgcaccaccaatgagggggtcatgtataggatcggcgatcagtgggacaaacagcatgatatggggcacatgatgcggtgcacatgtgttgggaacggaaggggcgagtggacatgtattgcctatagtcagctgcgggaccagtgtatagtggacgacataacttataacgttaatgacaccttccataaacgacatgaggaaggacacatgctcaactgtacatgtttcggccagggacgtggacgttggaagtgcgaccctgtcgatcagtgccaggactcagagactgggactttctatcagatcggcgactcatgggaaaaatacgtccacggggtcagatatcaatgctactgctacgggagagggatcggagagtggcactgccagcctctccagacctatccctcatccagtgggcctgtggaggtttttatcaccgaaacccccagtcagcccaactctcacccgatccagtggaacgccccacaaccctcccacatctcgaaatacatcctgcgttggcgccccaagaactccgtaggacggtggaaagaagccactattccaggccaccttaactcctacaccatcaagggacttaagccaggagtagtgtatgagggccagctgatcagtattcagcaatacgggcaccaagaagttacaaggtttgattttacaactacctctacctcaacaccagttaccagcaatacagtcaccggagagaccacacctttctccccactggtggctacctctgagtctgtgacagaaataacagcatcatcatttgttgtgtcctgggtgagtgcctcagacactgtgagtgggttccgcgtggaatacgagctctctgaggagggagatgagccacaatacctggatctgcccagcacggcaacatcagtcaatattccggatttgctgccagggcggaagtatattgtcaatgtgtaccagatttccgaagacggcgagcagagcctgatactctccactagccagaccacagccccagacgcaccgccggacacaactgtcgatcaggtggacgatacttccatcgtcgtgcgttggtcccgtccccaggcacctatcaccggctacagaatcgtgtatagcccgtcagtcgaaggttcatccaccgagctgaacctgccggagaccgcgaatagtgttacactctccgacctacagcccggagtccagtacaatatcacaatctatgcagtagaagaaaaccaggaaagtactccagtcgtcattcaacaggaaacaacgggaaccccgcggtccgacaccgtgccatcaccacgagaccttcagttcgtcgaagttacagatgttaaggtcacaatcatgtggacaccaccagaaagcgccgtcacaggatacagagtcgacgtcatcccagttaatttacctggagaacacggtcagcgactgcctattagcaggaatacctttgctgaggttaccggcctaagccccggcgtgacttattacttcaaagtgtttgctgtctcccatggaagggagtccaagccattaaccgcccagcagacgactaaactggacgccccgacgaatctccagttcgtgaacgaaactgattccaccgttctcgtgagatggactcctccccgagcacaaatcacaggatacaggctcacagtcggcctcacccggagagggcagcctcggcaatataatgtgggcccttctgtgtctaaatatccactgcgtaatctgcagcccgcctccgagtataccgtctccctagttgctattaaaggaaatcaggaaagccctaaggccaccggcgttttcaccacattgcagccagggtcatcaatcccgccttataataccgaagtgaccgagacaactatcgtcatcacttggaccccagcacctagaatcgggttcaagctcggcgtgcgccccagtcagggcggcgaggcccccagggaagtgacatcggacagcgggagcatcgtggtgtcaggtctgactccaggcgtggaatacgtgtacactattcaggtcctaagggacggacaggagagagacgctcccatagtgaacaaggtggtaacacccctgagtcctcccaccaacttacacctcgaagctaatccggataccggcgttctgacagtgtcttgggaacgcagcaccactcccgacatcacaggatacagaatcaccaccacccctacaaacggtcagcaggggaactctctcgaggaagttgtgcatgccgatcaatctagctgtacgttcgacaatctgagcccaggacttgaatacaatgtatccgtgtatacagtcaaggatgataaggagtcagtacctattagcgacaccatcatcccagaggtcccccaactgactgatctgagctttgtcgacatcaccgatagctccataggcttgaggtggaccccactaaattcctcaactatcatagggtaccggatcaccgtggtggctgcaggcgagggaattcccatctttgaagattttgttgactccagcgtgggctactacaccgtgaccggtctggagcccggcatcgactacgatatctctgtgattaccctgattaatgggggcgagtcagccccgaccacattgactcaacagacagctgttccccctccaactgaccttcggttcttttctgatattaccgcgaactcttttacagtgcattggatcgcgcctcgggccacaatcaccggctacagaatcagacatcacccagaacacttctcaggtcggccccgggaagacagagttcctcacagcagaaactctatcacactgactaacctgactccagggacggaatatgtggtgtcgatcgtggccctcaatgggcgggaagagagtcccttactgatcgggcagcaaagtacagtgagcgatgtgccaagggacctcgaggtggtcgcggcgacacctactagcttattgatttcatgggatgctcctgctgtgactgtacggtactatcgcatcacatacggcgaaaccggcggtaacagcccggtgcaagaattcaccgtacccggctcaaaaagcaccgctacgatatccggcctgaaaccaggcgtggactacacaattaccgtatacgcagtgaccggacggggtgatagcccagcaagctccaagcctatttcaatcaactatcgaacagagattgataaaccctcccagatgcaagttaccgatgtgcaggacaactccatcagtgtgaagtggttgccctcatcctcaccagttaccggataccgcgtcactacaaccccaaaaaacggtccaggcccaacaaaaactaagacggcggggccagaccagacagagatgaccattgaaggattacagcccaccgttgaatacgtcgtgtcagtgtatgcacaaaatccaagcggcgaatctcagcctttggtccaaacagcggtgacaaatatcgataggcccaagggccttgccttcacggacgtggacgtagattctattaaaatcgcgtgggagagcccccagggccaggtttcaagatatcgcgtgacatatagctctcctgaggacggaatacatgaactcttccctgcccccgacggtgaggaggacaccgccgagctccaaggcttacggcccgggagcgaatacaccgtaagcgtcgtggccttacatgatgacatggaatcgcagccactaatcggaacccaatctactgccattccagcgccaacagacctgaagtttacacaggttactcccacaagcttgtccgctcagtggacaccacctaatgtgcagctcaccgggtaccgagtcagagttacacccaaggaaaaaactggacccatgaaggaaataaacctggctcctgacagcagctcggtagtggtcagcggtctgatggtcgccaccaaatacgaggtctctgtttatgccttaaaagacacattgactagtaggccggctcaaggtgttgtgacgacactggaaaatgtgagtccccctcgcagggcgagagttacggacgccacagaaaccactatcacgatcagttggcgcacgaagaccgagacaatcactggatttcaggtggacgccgtgcctgctaacggccaaactccgatacagcgcactattaagccagatgtccggtcctataccattactggattgcagcctgggacagactacaagatctacctctacacactgaacgataacgctaggagctcccccgtggtcatcgatgccagcactgcgattgatgcaccctctaatctgcgctttctcgcaaccacccccaatagcctgcttgtttcctggcaaccgccccgcgccagaatcaccggctatattattaagtatgagaaacccggatctccccctcgcgaagtggtcccccgtccacgtccgggcgttactgaggcaactataaccggtctggaaccgggaaccgagtacaccatatatgtcatagcattgaagaataaccagaaatcggagcccctgattgggcgcaagaagacagatgagctgccgcagttagtgaccctgccccaccctaatctgcacgggccagaaatactggatgtcccctcaacggtccagaaaactccttttgtcacacaccccggatatgatactggaaacgggattcagttacccggcacatcagggcagcagccttcagtcggacagcagatgatcttcgaggagcatggatttagacgcaccaccccgccaactaccgccaccccaattcgccataggccacgcccatacccccccaacgtgggggaggagattcagatcggacatattccccgagaggacgtagattatcacctctacccccatggacctggattgaacccaaacgcctcaaccggtcaggaggctttgagccaaactactatttcatgggctccgtttcaagatacaagtgaatacattatttcttgccacccagtcgggacagacgaagagcccctgcagttccgggtgcctggtacatccacctccgccacactgaccggcctcacaaggggcgccacctataatgtgatcgtcgaggctctgaaagaccagcagaggcacaaagtgcgggaggaagttgtgactgtggggaatagcgtaaatgaagggcttaatcagcctactgacgactcctgcttcgacccatatactgtttctcactacgccgtgggcgatgagtgggagcgtatgtcagaaagtggcttcaagctgctttgtcaatgtctcggtttcggaagcggtcacttcaggtgcgattcaagcaggtggtgtcatgataacggggtgaattacaaaatcggggagaagtgggacaggcagggcgagaacggacagatgatgtcttgtacatgcttagggaatgggaaaggtgagttcaagtgcgacccccacgaggcgacttgctacgatgacgggaagacctaccatgtcggtgagcagtggcagaaagagtatctgggagctatctgttcctgtacctgtttcggagggcagcgcggatggcgatgtgataactgtcgcaggcctggaggcgaaccttccccagagggtactacgggtcaaagttacaaccaatatagtcaaaggtatcaccaacgaaccaatacgaatgttaattgccccatagaatgttttatgcccctggacgtgcaggcagatagagaggatagtcgagagtag

SEQ ID NO: 267183 - DNA, 7161 bp, Artificial Sequence
  derived and/or modified sequence
atgctgagagggcccggaccaggcctcctccttctcgccgtccagtgtctgggcaccgccgtgccctcaacgggagcctctaagtccaaacgccaggctcagcaaatggtgcagcctcagagccctgttgcagtttcccaaagcaaaccaggttgttacgacaacggaaagcactaccaaatcaaccagcagtgggaacggacttacctgggcaacgcactcgtatgtacatgctatggtggatctagaggatttaactgcgaatcgaagccagaagctgaagagacatgctttgataagtatacaggcaatacctatcgagtcggcgatacgtacgagagacctaaggacagcatgatctgggactgtacttgcatcggtgccggaagagggcgtatcagttgtactatcgccaatagatgccatgaaggcgggcagtcctacaagatcggagatacatggcgcagacctcacgaaactggcggctacatgctggagtgtgtctgccttgggaacgggaagggggaatggacatgtaagcccatcgcagagaaatgttttgatcatgccgccggtacttcttacgtcgtgggggagacctgggagaagccgtaccaggggtggatgatggtcgactgcacatgtctgggcgaaggctctggcagaatcacctgtacttctcgtaatagatgcaatgaccaggatactagaacttcctacagaatcggggacacttggtccaaaaaagacaatcgcggcaacctcctgcagtgcatttgtactggaaatgggcgaggggaatggaaatgcgagcggcacacttccgttcagaccacctcaagcggttctggcccattcaccgatgtgcgggccgctgtctaccagccacagccacatccgcagcctccgccttacggccactgcgttacggactcaggtgtggtgtactctgttggcatgcagtggttgaagacccaggggaacaagcagatgctgtgcacatgccttggtaatggcgtgagttgccaggaaactgccgttacccagacatatgggggtaacagcaatggggaaccttgcgtgctgccattcacatacaatggccgcaccttttacagttgcaccacagagggtcggcaggatggccacctatggtgtagcaccacttccaattacgagcaggaccagaaatattcgttctgtaccgaccataccgtcctagtgcagacccgagggggcaacagtaatggagccctctgccatttccctttcctgtacaataaccacaactatactgactgtacgagcgaagggcggcgagacaacatgaagtggtgcggaacaacccagaattatgacgctgatcagaaattcggattctgtcccatggctgcacacgaagagatctgtactacaaatgagggtgtcatgtaccgaatcggagaccagtgggataaacaacacgacatggggcacatgatgagatgcacttgtgttggaaacgggaggggagagtggacttgtattgcttatagccagcttagagatcaatgtattgtggacgatatcacctataatgttaacgatacattccacaaaagacatgaggagggccacatgctcaactgcacatgctttggccaggggcgaggcagatggaagtgcgacccagttgaccagtgtcaggacagtgagaccggtactttttatcagattggtgatagttgggagaaatatgtccatggggtacgctaccaatgttactgctacggccgcgggatcggggaatggcattgccagccccttcagacttacccctcttcatccggccctgtggaggtgtttattacagaaactccctctcagcccaactcccaccctatccaatggaatgcccctcagccatcacatatctctaagtacatccttcgttggagacccaaaaatagcgtgggacgctggaaggaagcgacaatcccggggcaccttaactcttatacgattaagggcctgaaacccggcgtcgtgtatgaagggcagttgataagtatccagcaatacggtcaccaggaggtaacacggttcgactttaccacaacatctacatctacacccgtcaccagcaacacggtcacaggagaaacaacccccttctccccattggtagctacctcagagagtgtgacagaaattacagcttcatccttcgtggtaagttgggtcagtgcctctgataccgtgtctggttttcgagtggagtacgagctcagtgaagagggtgatgagccacagtatctggacctgccttccactgccacctctgtgaatatacccgacttactccctgggcggaagtatattgtcaacgtctaccaaatctctgaagatggggagcagtctctgattttatctacttcccaaactacggcacctgatgcaccaccagacaccacagtggatcaggtcgacgacacatccatcgtggtgagatggtctagacctcaggcaccaataacagggtaccgcatcgtgtactccccgtccgtggaaggttccagcacagaattgaatctgccagaaaccgctaattcagtgaccctgtcagacctgcagcccggggtgcagtacaacatcacaatatacgcagtagaagagaatcaagaatccactcccgtcgtgattcaacaagagactaccgggacacctagaagtgacaccgttccatctccacgtgatctgcaattcgttgaggtaacagacgtcaaagtaaccattatgtggacacctcctgagagtgccgtgaccgggtaccgggtggacgtaattccagtaaatttacccggtgagcatggacagcgtctcccaatctctcgtaacactttcgcagaggtgacagggctctcacccggagtgacctattactttaaagtctttgcggtgagccacgggagggagagcaaacctctaacggcgcagcagacaaccaagctcgacgcccccaccaacctgcagtttgtgaatgagactgactccacagtgcttgttcgttggacaccccctcgcgctcaaattacagggtataggctcacagttggactcacccgcaggggacagccaaggcagtacaatgtaggcccctcggtttcaaagtaccccctgagaaatctacagccagctagcgagtataccgtctccctcgtcgccataaaaggcaaccaggagtctcccaaagccactggggtgttcaccactctccagccgggctcctccattccaccgtataacaccgaagttactgagaccactatcgtcataacctggacccctgcccctcgcattggctttaagctaggtgtcaggccctcacagggcggggaagccccaagggaagtgactagtgactctgggagtattgtggtgagcggcttgacccccggtgtggaatatgtgtacacaatccaggtgctccgggatggtcaagaacgggacgcgcctatcgttaataaggttgtgacaccacttagcccccccacaaatctgcacttagaggccaatcccgacacgggcgtcttaacagtaagttgggagcggagcactacacccgatatcaccggataccgaatcactacgactcctacaaatggtcagcaagggaattcacttgaggaggtggttcacgctgaccaatccagctgtacattcgacaatctttcacccggactcgaatacaacgtatcagtatatactgttaaggacgacaaagagtcggtgccgatttcagacactattatccccgctgtgccaccacccacagacctgcgatttacaaacattggacccgataccatgcgcgtgacttgggccccaccaccaagcattgaccttaccaatttcttagtaaggtatagtccagtgaagaatgaggaggacgtcgccgagcttagtatttcaccctctgataacgccgtggtgctcaccaatctgctgccaggaacagaatacgttgtcagcgtgtcttcggtgtatgaacagcatgagtctactcctcttcgcggtcggcagaagaccgggctggactcacctactggcatagactttagcgacatcactgcaaacagctttacggtacattggatcgctccccgggctacaattaccgggtatcgcattcgtcaccaccctgagcatttctctggaagacctagggaagatcgagtgcctcattccaggaattctattactctgaccaatcttactcctggcacagaatacgtggtatccatcgttgctctaaacggaagggaagaaagtcctctacttatcggacagcaatcaacagtttctgatgttccacgagacctggaggttgtcgccgcaacgcctacaagcctgctgataagctgggatgctccggcagtgacagtgaggtactaccggatcacctacggcgaaaccggagggaactctcctgtgcaagaattcacggtgccgggatctaaaagcaccgccacgatcagcgggctgaaacctggggtggattacaccatcacggtctacgcagtgacaggacggggagactcccctgctagcagcaaaccgatttcgatcaactatcgcaccgagatcgataaaccatcccaaatgcaggtgaccgacgtgcaggacaacagcatttctgtgaagtggctgccgtcatcttctcccgtgaccggctatagagtgacgaccacaccgaagaacggcccaggacctacaaaaaccaaaaccgccggaccagatcagacagagatgaccatcgagggccttcagccgaccgtagaatacgtggtcagcgtgtacgctcaaaatccatcaggggagtcacaaccactcgtccagaccgccgtgacgaacatagatcgaccaaaagggctagcatttaccgatgtcgacgtggatagcattaagattgcttgggaatcccctcagggccaggtcagcagatacagagtgacctacagctcccccgaggacggcatccacgaactttttccagcaccggacggtgaagaggatacggccgaattgcagggcctccgtcccggtagcgagtacaccgtgtccgttgttgctctgcacgacgatatggagtctcaacccctgattggcacacagagtactgcaatccctgccccaacggaccttaagttcactcaagtgacccctacttctctttcagcacagtggacgcccccaaacgtgcagcttaccggctatagagtacgtgtgacacctaaggaaaaaactgggcctatgaaagagatcaacctggccccagacagcagttccgtggtcgtctcaggcctcatggtcgctacgaagtacgaagtttcggtctacgccctgaaggacactttgacttcccgccccgcccagggagtcgtcacaacccttgaaaacgtgagccctcctcggagggctcgtgttactgatgccacagagactacaataaccataagctggcggaccaaaacagagacaattaccggctttcaggtagacgcggttcccgctaacgggcaaacgcctatccaaaggaccattaagcccgacgttcgatcctatacaattaccgggctccagcctggcacggactataagatctatctgtacactctcaatgataacgctaggtcaagcccagttgtcatcgatgccagcaccgctatcgacgcaccctcaaacttgaggttcctagctactactccaaatagtttgctggtgtcctggcagcccccccgggcccgcataaccggatacattattaagtatgagaagcctggcagccctccgagagaggtagtgccccgcccccgtcccggagtcacagaagctaccatcaccggactcgagccaggaaccgaatacactatatacgtgatcgccctgaaaaataatcagaagtccgagccactcatcgggcgcaagaaaacagacgagcttccccagctggtcaccctgccgcatccgaatcttcatggtcccgagatcctggatgtgccgagcaccgtgcagaaaacaccatttgtgacccaccctggatacgatacaggaaatggaatacagcttcctggtacctcaggtcaacagccctcagttggacaacagatgatcttcgaagaacacggctttcggcggaccaccccacctaccactgcgactccaattcggcatcgcccccggccgtacccaccaaacgtgggtgaagagatccagattggccacattccaagggaagacgttgactaccacttgtatcctcatggcccgggattaaacccaaatgctagtacaggccaggaagccctgtctcagacaactatctcttgggcaccatttcaagacactagcgaatacatcatctcctgccatcctgtcggcacagatgaagaacccctgcagttccgtgtgccaggtaccagcacctctgctactttgaccgggctcacacgtggggcaacttacaacgtgattgtcgaggcactgaaggaccagcagagacacaaagtaagggaggaggtggtcacggtcgggaactccgtgaacgaaggcttgaatcagcctaccgacgattcttgcttcgacccatatacggtgtctcattacgccgtgggcgatgagtgggagcggatgtccgagtcgggttttaaactgctgtgccagtgtctcgggttcggatccggacatttccggtgcgattcgtctcgatggtgccacgacaatggagtaaattataagatcggtgaaaagtgggacaggcagggggaaaatgggcagatgatgagctgcacatgcctcggcaatggaaagggtgaatttaagtgtgatccccacgaagccacatgctatgacgacgggaaaacctaccatgtgggagaacagtggcagaaagagtacctgggcgccatctgtagctgcacgtgcttcggcggacagcggggctggagatgcgataattgccgaagacctggcggagagccatctccagaagggactaccggccaaagttacaatcaatactctcaaagatatcaccagaggaccaataccaatgtcaattgtcctatcgaatgttttatgcccctggacgtgcaggctgatcgcgaggattcaagagaatag

SEQ ID NO: 267184 - DNA, 7164 bp, Artificial Sequence
  derived and/or modified sequence
atgctaagaggtccaggacctggcctattgctgttagcggtccaatgcctggggaccgcagttcccagtaccggcgcgtccaagtccaagcgacaagcacagcagatggtgcagccccaatctcccgttgcagtgtcacagagtaagcccggatgctatgataacggcaaacactatcagatcaaccagcagtgggagcgcacatacctcgggaacgcattagtatgcacttgctatggaggcagtcgcgggttcaattgcgagtcaaagccagaggcagaggagacctgttttgataaatacaccggaaacacctatagagtcggggatacctacgagaggccgaaagattctatgatctgggactgtacttgcataggggctgggaggggtcgtatctcatgtaccatcgccaatagatgccatgagggggggcagagttacaaaatcggggacacttggcggaggccacatgagaccggaggatacatgctggagtgcgtctgtttgggaaatggtaaaggagagtggacttgtaaacctatcgccgaaaagtgttttgatcatgccgcgggaacttcttacgtggttggagagacatgggagaaaccataccagggctggatgatggtggactgcacttgtctaggagagggatctgggcggattacttgtacaagcaggaatcggtgtaatgatcaggataccaggaccagttaccggatcggggatacgtggtccaagaaggataacagaggaaacctcttacaatgtatctgtacagggaatggtaggggggaatggaaatgtgagcggcatactagcgtgcagacgacttcatctggctccggacccttcacagacgttcgagccgccgtctaccaaccacaaccgcaccctcaaccacccccctatgggcactgcgtcaccgacagcggcgtcgtatactcagtgggcatgcaatggttgaaaacgcagggcaacaaacagatgttatgtacatgtctaggcaacggcgtgtcatgtcaggagacagccgtgacccaaacttacggcgggaacagcaacggagagccatgcgtccttcccttcacttataacggcaggactttttacagctgcactacagagggacggcaggatggccacctttggtgctcgaccacctctaactacgagcaggatcagaaatatagtttctgcaccgaccatacagtcttagtgcaaaccagggggggtaacagcaacggcgcactgtgccactttccgtttttatacaataatcataattacacagattgcacttcggagggaaggcgcgacaatatgaaatggtgcggtaccacacagaattacgatgccgaccagaaattcggattttgtcccatggccgcgcacgaggagatatgtactacaaacgaaggagtaatgtatcgcataggagatcagtgggataagcagcacgacatggggcacatgatgagatgtacatgtgttggcaacggacgcggtgagtggacatgtatcgcttatagccaactgagagaccaatgtattgtggatgacattacgtacaatgtaaacgatacttttcataaaagacacgaagaaggccacatgttgaattgtacttgtttcggccagggccggggaagatggaagtgtgacccggtggaccaatgccaagacagtgagacaggcaccttctaccaaattggtgatagctgggagaaatatgtccatggagtgagatatcagtgttattgttacgggaggggaataggcgagtggcactgccagccactgcagacatacccttcctcatcaggaccagtggaagtattcataaccgaaacaccaagccagcccaatagccatccaattcagtggaatgccccacagccatcacatatttccaagtacatcctgcgatggcggcctaaaaatagcgtcggcagatggaaggaagctacaatccctggacatttgaatagttataccatcaaaggcttgaagccaggcgtcgtttatgaaggacaacttatatctatccagcagtatggccaccaagaagtcacccggtttgactttaccactacctctacaagcacaccggtgaccagcaacacagtgacaggcgaaaccactccattctcacctctcgttgcaacttccgagagcgttacagaaatcacagcatcttccttcgtcgtttcttgggtttccgcttcagacactgtctcaggctttcgcgtcgagtacgaactgagtgaggagggagatgaaccccagtatctcgacttaccatccactgctacgtcagtcaacatccccgatctcctacccggccgtaagtatattgttaacgtgtatcaaatcagcgaggatggcgaacagtctctcatcctcagcacttcccagacgacagcacccgatgccccaccggataccaccgtagatcaggtagatgacacatcaatcgttgtgaggtggtcacgaccgcaagcccctattacgggttacagaattgtgtactcaccctctgtagaagggtctagcaccgaactgaacctgccagaaaccgcaaacagcgtgactctttcggatctgcaacctggagtgcagtacaatatcaccatttacgccgtagaagagaatcaggaatcaaccccagtcgtaattcagcaagaaaccaccggtaccccgcggtccgacaccgtgccatcaccacgagaccttcagttcgtcgaagttacagatgttaaggtcacaatcatgtggacaccaccagaaagcgccgtcacaggatacagagtcgacgtcatcccagttaatttacctggagaacacggtcagcgactgcctattagcaggaatacctttgctgaggttaccggcctaagccccggcgtgacttattacttcaaagtgtttgctgtctcccatggaagggagtccaagccattaaccgcccagcagacgactaaactggacgccccgaccaacctccaattcgtcaatgagaccgattctacagtactggtcagatggacaccccctcgtgcccagattaccggatatcgcctcactgtcggcctgactcggcgggggcagcccagacagtacaacgtgggcccctccgtaagtaagtaccctctcaggaacctgcaacctgcatccgagtataccgtgtccctggtggccattaagggaaatcaggagtcccctaaagctacaggcgttttcacaacactacaacctgggtcttccatccctccctataacacagaggtaaccgaaaccacaatcgtgatcacttggacgcccgccccccgcattggtttcaagttaggagtgagacctagccaaggcggggaagctccgcgagaagttacttctgacagcgggtctatagtagtttctggcttgactccaggcgtggagtatgtttataccattcaggtcctgcgcgatgggcaagaacgagacgctccaatagtgaataaagttgtcacccccctgtctccccccacaaatcttcatctcgaggccaatcctgacacaggtgtattgacggtcagctgggaaaggtctacaacaccagacatcaccggctatagaattaccaccacccccactaatggacagcagggcaatagcttagaagaagttgttcatgcagatcagagctcttgcacattcgacaacttaagtccaggcctggaatacaatgtgtctgtctatacggtgaaggacgacaaagagagcgttccaatatctgacaccattatccccgaagtcccgcaactgacagaccttagtttcgttgacattaccgacagctctattggactgcgctggactcccctgaactcatccacaattattggttatcgaatcaccgtcgtggctgctggagaagggattcctattttcgaggacttcgtagattcctctgtcggatactatacagttaccggcttggagcctggaatcgactacgatattagtgtcattacgttaatcaatggcggagaaagtgcccctaccacgctcactcaacagaccgccgtacccccacccaccgatttacgtttcttctcagacatcacagcaaattcttttacagttcactggatcgcacccagagcgaccattactggctatcgaattaggcaccatcccgaacatttttcaggacgccctcgagaagaccgcgttccccatagtcgaaacagcatcacgctcacaaatctgactcccggcactgaatatgtggtcagcatagtggccctcaatggcagggaagaatccccacttctaattggtcaacaatctacggtctcagacgttccacgagatctcgaggtcgtggctgcgaccccaaccagccttctcatctcttgggatgccccggccgtgactgtccgatactacagaattacttacggagaaaccggaggcaattcccctgttcaagagttcaccgtacccggaagcaaatctacagcaactattagcggcctgaaacccggcgtcgattacactatcacagtctacgcagttacaggacggggggacagcccggcatcttcaaaacccattagcatcaactatagaaccgaaattgacaaaccatcccagatgcaagttacagacgttcaagataattcaatcagcgttaaatggctgccatcatccagcccagtcacaggctacagagtgactacaactcccaaaaatggacccggtccgaccaaaacgaaaactgccggcccagaccagactgagatgaccattgaaggcctacaaccaacagtcgaatacgtcgtcagcgtgtatgctcagaatccgtcaggagagtcgcaaccccttgtgcagacagcagttaccaacattgataggcccaaaggcttagcctttaccgacgtggacgtagactcgatcaagatcgcctgggaatcacctcagggacaagtttctcggtaccgtgtcacctatagttcaccggaagatggcatccatgagctgttcccagcccctgacggagaggaggacacagcagaattacagggattgcggcctggaagcgagtatacagtgtccgttgttgcacttcacgatgatatggagtctcaacccctcattggtactcagtccaccgccatacccgccccgaccgatcttaaatttacacaggtcacaccgacctcactgtccgctcaatggacccctccaaatgtccagctgaccgggtacagggtacgagttacgcctaaagaaaagacagggcctatgaaggaaatcaatctggctccagactcaagcagtgttgtagtcagtggactaatggtagctaccaagtacgaagtctccgtttacgctttgaaagacacgctcacctcacgaccggcccagggggtcgtaacgactcttgagaatgttagtccacccaggagagctcgggtgacagatgctacagagactacgatcacaatatcttggagaacaaaaacagaaaccattaccggctttcaggtcgatgctgttccagccaacgggcagactcctattcaacgcactatcaagcccgatgtacgcagctatacaattacaggacttcagccaggtaccgactacaagatatatctgtatacactgaacgataacgcacgcagctcccctgttgtgatagacgctagcaccgcaatcgacgcccccagcaacctgagattcctcgccactacgcccaacagcctattagttagctggcaaccacctcgagctagaattacgggttacataatcaaatacgagaagccaggttctccacctcgcgaagttgtcccccgacctagacctggagtgacagaagctaccataactggcctggagcccggcaccgagtatacaatttacgtgattgccctgaagaacaatcaaaaatccgaacccttgatcggtagaaagaagaccgatgaacttccgcagctagtgactctcccacaccccaatttgcatgggcccgagattctggacgttccctctacagttcaaaagacaccgttcgttactcatcccggttacgacaccggaaatggaatccagttacccggcacctctggccaacaacccagcgtaggacagcagatgatctttgaagagcacggctttcgaagaaccacacctcctaccaccgccacacctatacgacatagacccaggccctacccccctaacgtgggtgaagagattcaaattggccacatccccagagaagacgtggattatcacctctatccacatggaccaggcttgaaccccaacgccagcaccgggcaggaagccctcagccaaacaaccatctcatgggcccccttccaggatacgtcagaatacataatctcatgccaccctgttggtactgacgaagagcccctgcaattccgcgtgccaggcacttccactagtgccacgctgactggactcaccaggggggcgacctataacgttatcgtcgaagcactcaaagatcagcagagacacaaagtgagggaagaagtagtcacagtgggaaattccgttaacgaaggactgaatcagcctacagacgactcatgcttcgatccatacactgtgagccattacgcagtgggagacgaatgggaaagaatgtccgagagcggctttaagcttctgtgtcagtgcctcggttttggttccggtcatttcagatgcgatagcagtagatggtgccacgacaatggggttaactacaaaatcggagaaaaatgggacagacagggagagaacggccagatgatgtcatgtacatgcctcgggaatggtaagggcgaattcaaatgcgatcctcatgaggccacatgctatgacgacggtaaaacttaccatgtgggcgaacagtggcagaaggagtatttaggagcaatatgctcttgcacttgtttcggcggtcaacgaggttggagatgtgacaactgcaggcgtcctggcggtgaacctagccccgagggcactaccggccaaagctacaatcagtactcacagaggtaccatcagagaactaacaccaatgtaaattgtccgattgagtgttttatgccccttgacgtgcaggcagatagagaagactcaagagagtag

SEQ ID NO: 267185 - DNA, 7161 bp, Artificial Sequence
  derived and/or modified sequence
atgctgagagggcccggaccaggcctcctccttctcgccgtccagtgtctgggcaccgccgtgccctcaacgggagcctctaagtccaaacgccaggctcagcaaatggtgcagcctcagagccctgttgcagtttcccaaagcaaaccaggttgttacgacaacggaaagcactaccaaatcaaccagcagtgggaacggacttacctgggcaacgcactcgtatgtacatgctatggtggatctagaggatttaactgcgaatcgaagccagaagctgaagagacatgctttgataagtatactgggaatacttacagagttggagatacgtatgaacgccctaaggactctatgatctgggattgcacctgcattggagctggaagaggccgcatcagctgtaccatagctaaccgctgtcatgagggcggccagtcgtataagatcggagatacgtggagacgcccacacgaaactggtggatatatgctggagtgtgtctgtctggggaacggaaaaggggagtggacatgtaagccaatagccgagaaatgcttcgaccacgccgcaggtacttcgtatgttgtaggcgaaacttgggagaagccataccagggatggatgatggttgactgtacgtgcttaggtgagggcagtggccgaataacctgtacaagccgaaacaggtgcaacgaccaggacactcgtactagttataggattggtgatacatggagcaaaaaagataaccggggcaacctcctgcaatgtatctgtacaggcaacggacgtggcgagtggaaatgtgagagacatactagcgtgcagaccaccagtagcggttccggcccatttactgacgtaagagcagccgtgtatcagccccagccccacccccagcccccgccgtatggtcactgcgttaccgattccggtgtagtgtattcagttgggatgcaatggctaaaaacacaagggaataagcagatgttatgtacatgcctgggcaatggagtgtcttgtcaagaaaccgccgtgacccagacttacggcggtaactcaaatggtgaaccttgcgtgctgccattcacttataatgggaggacgttttacagctgcactaccgagggacgtcaggatggacatttatggtgctctacaacaagtaattacgaacaggatcagaagtatagcttttgtacagaccacaccgtactggttcagacaaggggggggaatagcaacggggcactctgccactttcccttcctctataataaccataattatactgattgcacaagcgagggcaggcgagacaatatgaaatggtgcggcaccacacagaactacgatgctgatcagaaatttggtttttgcccaatggctgcacacgaggaaatctgtaccactaatgagggagttatgtatagaatcggggaccagtgggacaagcaacatgatatgggccacatgatgaggtgtacttgcgtcgggaatggacgcggtgaatggacctgcatcgcctactcccagttgcgtgatcaatgcattgtcgacgacattacttacaacgtcaacgataccttccacaaaagacacgaagaagggcatatgcttaattgtacttgctttggtcagggaaggggaaggtggaagtgtgatcccgtggatcagtgtcaagatagcgaaaccggaaccttttatcaaatcggagattcttgggaaaaatacgtgcacggagtaaggtaccagtgctactgctatggcaggggaatcggcgaatggcattgccaacccttacagacatacccctcttcatcaggccccgtcgaagtcttcatcaccgaaacgcccagtcagcctaattctcacccaatccagtggaatgccccccagccatcacatatctcaaagtatatcctgcgctggaggcctaaaaacagcgttggccgctggaaggaagccaccataccaggacacctcaattcgtatacaattaaaggcttgaaacctggtgtcgtctacgaggggcagctcatctcaattcagcaatatggccatcaggaagtaactcggttcgatttcaccacgacctcaacatcaacacctgtaacgtcaaataccgtgactggcgaaacaaccccattcagccccctagtggccactagcgagtccgtgactgaaattaccgcaagcagctttgtagtgagctgggtgtccgcgtcagataccgttagcggatttagagtcgagtacgaactctcagaagaaggtgacgaaccccagtatctggacctcccctctactgctacatccgtgaacattcccgacctcctgcctggaagaaaatacatagtcaacgtgtatcagataagtgaggacggtgagcagagcttgattttatctacaagtcaaaccaccgcccctgacgcaccccccgacacaactgtggatcaagtcgacgatactagcattgttgtgagatggagcaggccacaggctcctattactggctacagaatcgtatactcgcctagcgttgagggatcctccacagaacttaatctaccggaaactgccaatagtgtaacattatccgatctgcagcctggcgtgcagtacaatatcaccatctatgccgtagaggagaatcaggaaagcacaccagtggtgattcagcaggaaacaaccggcactccccgttccgataccgtccccagccccagagatctacaatttgttgaggttaccgacgttaaagtgaccattatgtggacaccaccagagtcagccgtcactggctaccgcgtggacgtgatccctgtaaacctcccaggcgaacacggacagaggcttcccatctctcgaaacacatttgctgaggtgaccggccttagccccggggtcacctactatttcaaagtattcgccgtaagccacgggagagagagcaaacccctgactgcccaacaaaccaccaaattggatgcacctacaaatcttcaattcgtgaacgagaccgactcaaccgttttagtacgctggactcctccccgcgcacagattaccgggtacagactgacagttgggctcactaggaggggccagcctagacaatataatgtggggccaagtgtgtccaaatatcccttaagaaacctgcaaccggcttcagagtacaccgtgtcattagttgctataaagggcaaccaggaatcacctaaggcaaccggagtattcactaccctgcagccaggctcttccattcctccctacaatacagaagtgaccgaaaccacaatagtgattacatggaccccagctccaagaataggtttcaagttgggagtcaggcccagccagggaggcgaagcaccccgagaagtgacatctgattctggctcaatcgtcgtttcaggtctgactcccggcgtggagtacgtctacaccattcaggtattacgcgacggacaggaacgcgacgctccaattgtaaacaaggtagttacgccactatcaccgcctactaacctgcatctcgaagccaatcctgataccggcgtgctgactgtgtcctgggaaagaagtacaacgcccgacattacaggatatcgaatcaccaccactcccacgaacggacagcaaggaaatagtttagaagaagtggtgcacgccgatcaatcctcatgcactttcgataacctgagtcctggactggagtacaatgtctctgtctacactgtcaaggacgataaagaatcagttccaatttcagacaccataatccccgctgtgccaccccccactgacttgcgatttactaacattggccccgatacaatgagggtcacatgggctccaccccccagcattgatctgaccaatttcctcgttagatactcacccgtaaagaacgaggaagacgtcgccgagctgtcaatttccccatccgataacgctgtcgttctgaccaatctattacccggaaccgaatatgtggtcagcgtgtcttccgtctacgagcagcatgagtctacacctctgagaggcaggcagaagaccggcttagactccccgaccggcatcgattttagcgacataacggctaattcattcactgtacactggattgcaccaagagcaaccatcaccggctaccgcataaggcaccaccccgaacactttagtggacgtccaagggaagacagggtgccccactctcgcaatagcatcacactgactaatctgacaccggggactgaatacgtcgtgtctatagtggcgctaaatggtcgagaagagagtccattactcataggacagcaatcaacagtcagcgacgttccccgagatctcgaagtggtagccgctactcccacctccctgttgatctcctgggacgctccggctgttacagtgcgctactacaggattacctatggggaaacaggagggaacagcccagttcaagagttcaccgtaccaggaagcaagtcaactgccaccataagtgggctgaaaccgggagtcgactatacaatcacagtctatgccgttaccggccgaggcgattctccagcttcctccaagccgatcagtattaactataggacagaaattgacaaaccatctcagatgcaggttacagatgtgcaggacaattcaataagcgtgaaatggcttccttcatcctctcctgtgacaggctacagagttacaactactcctaaaaacggaccaggccctactaaaactaagaccgccggaccagatcagaccgagatgaccatcgagggacttcaaccaacagtcgagtacgttgtgtcagtgtatgcccagaacccaagtggggaaagtcaaccacttgtccagacagccgtgactaatattgatcgccccaaaggtctcgcttttactgatgtggatgtggattcaatcaaaattgcatgggaatccccccaagggcaggtgtctagatatcgggtcacatactcgtcccccgaagacggcattcatgaactttttccagctccagacggtgaggaggacaccgccgaacttcagggcctccgcccagggtcagagtatactgtgagcgtcgtcgccctccacgatgatatggaatctcaaccacttataggaacccagagcaccgccattccagcccccaccgacctcaagttcacacaagtaacccctactagtctgtctgcccaatggactcctcctaatgtccagctgacaggatatcgtgtgcgagttacgcccaaagagaagactggacctatgaaggaaatcaatctggcccctgattcttctagtgtggtagtcagcggactgatggtggctactaagtacgaagtgagcgtctatgccctgaaggacacactaacatcaaggccggctcagggcgtagtcactacactagaaaacgtatcccctcctcgccgagcaagagtgacagatgcaacagaaacaactatcacaatctcctggcggacaaagactgaaaccatcaccggattccaggtcgatgccgtgcccgcgaacggccagacgcctattcaacggactattaagccagacgtgcgcagctataccataaccggcctgcagcctggaacagattacaagatttacctctacacactcaacgataatgcaagatcttctcctgtggtcatcgatgcgagcacagcaattgatgccccatcaaatctgcgcttcctggcgacgacaccaaattccctgctagtcagttggcaacctccacgagcccgcatcacaggatatatcattaagtacgagaagcccggttctcctcccagagaggtggtacctagacctcggcctggcgtcacagaagcaaccattacaggcctcgagccggggacagaatacaccatctacgtgatcgcccttaagaataaccagaagagtgaaccccttatcggccgtaagaagactgatgaactcccgcagttggtcaccctcccccatcccaatctgcatggaccagagattctagatgtgccctcgactgttcaaaaaactccctttgttacccatccgggatatgacactggaaatggcatccagctgccaggcacctccggccagcagcccagcgtgggacaacagatgatctttgaagaacatggcttccgtcggacaacgcctcctaccaccgcaacccctattcgccatagaccaagaccctacccccctaacgtgggcgaggagatccaaatcggccatatcccaagagaggacgtggattaccacctgtatccccatggacccggcctcaatcctaacgccagcacagggcaagaagcactttcacagacaacgatctcttgggctccttttcaggacacaagcgaatacattataagctgccatcccgtgggtacagatgaagaacccctccagtttcgtgtacctggtacctcaacaagcgctactctgactggtctgactaggggggccacttacaacgtgattgtggaagccttgaaagatcagcagcgacacaaggtgagagaggaagttgttacagtcgggaatagcgtgaatgaaggtttgaaccagcctactgacgactcctgtttcgatccttacacggtgtcacattatgctgtcggagatgagtgggaaaggatgagcgagtcgggatttaagctactatgccagtgcctcggttttgggtcaggacatttccgctgcgattcaagtcgttggtgccacgacaatggggtaaattataagatcggcgaaaaatgggacaggcagggcgagaatggacagatgatgagctgtacttgcttaggaaacggtaaaggcgagttcaagtgtgatccacatgaagcaacgtgctacgatgacggtaaaacctatcatgtgggggagcaatggcaaaaagaatacctaggagctatctgcagttgtacttgctttggcgggcaacgtggatggagatgcgacaattgcagaagaccaggcggcgagccctccccagaaggcaccacaggtcagtcctacaatcagtactcgcagcgttaccatcagagaacaaatactaacgttaactgcccaattgagtgcttcatgccactcgatgtgcaggccgacagagaggacagtcgggaatag

SEQ ID NO: 267186 - RNA, 7164 nt, Artificial Sequence
  derived and/or modified sequence
auguugcguggcccuggcccuggcuugcugcuccuggcuguccagugcuugggcacagccgugcccaguaccggcgccagcaaguccaaaagacaagcccagcagauggugcagccccagucucccguggccgucucacaaucgaagccuggcugcuacgauaacggcaagcacuaucagauaaaccagcagugggagagaacguaccugggaaacgcccuggucugcaccugcuacggugguagcaggggauucaacugcgaaucgaagccggaggccgaggaaacuugcuuugacaaauacaccggcaacacguaccgcgucggagauacuuaugagcgaccuaaggacucaaugaucugggauugcaccugcaucggagccgggagggggcgaauuucauguacgauugcaaaccgcugucacgaggguggucagucuuauaagauuggcgacacauggcgacguccucacgagaccggcggcuacaugcuggaaugcgugugcuugggcaacgggaagggggaauggacuugcaagccaauugccgagaaauguuuugaccacgcagccgggaccagcuacguaguaggggagacaugggaaaagccauaucagggcuggaugauggucgacuguacaugucugggcgaaggaucaggacgcaucacuugcacgucccggaaucgcuguaaugaccaggacacccggacguccuaucgaaucggcgauacuuggucgaagaaggauaacagggggaaccugcuucaguguauuuguacaggaaacggucgcggcgaguggaaaugcgagagacacacguccguccagaccacauccagcggcucagguccguucacagacguuagggccgcugucuaccagccucaaccucacccacagcccccgcccuauggacacuguguuacagauucaggggugguguacagcgucgggaugcaguggcugaaaacucaaggaaauaaacaaaugcuguguaccugucucgguaacggcgucucuugccaggaaacggccgugacccagaccuaugguggcaauaguaauggggaaccuugcgucuuacccuucaccuauaaugggcggacuuuuuacucuuguaccaccgaaggacgucaggauggccauuugugguguagcacaacguccaacuaugagcaggaucagaaguacucauuuugcacugaccacaccguauuaguccagacccgggggggcaacucuaacggcgcacucugccauuuuccauucuuauacaacaaccauaauuacaccgacugcaccuccgagggccgcagagauaauaugaaguggugcggaacuacucagaacuaugaugcagaccagaaguucggauuuugccccauggcugcccaugaggaaaucugcaccaccaaugagggggucauguauaggaucggcgaucagugggacaaacagcaugauauggggcacaugaugcggugcacauguguugggaacggaaggggcgaguggacauguauugccuauagucagcugcgggaccaguguauaguggacgacauaacuuauaacguuaaugacaccuuccauaaacgacaugaggaaggacacaugcucaacuguacauguuucggccagggacguggacguuggaagugcgacccugucgaucagugccaggacucagagacugggacuuucuaucagaucggcgacucaugggaaaaauacguccacggggucagauaucaaugcuacugcuacgggagagggaucggagaguggcacugccagccucuccagaccuaucccucauccagugggccuguggagguuuuuaucaccgaaacccccagucagcccaacucucacccgauccaguggaacgccccacaacccucccacaucucgaaauacauccugcguuggcgccccaagaacuccguaggacgguggaaagaagccacuauuccaggccaccuuaacuccuacaccaucaagggacuuaagccaggaguaguguaugagggccagcugaucaguauucagcaauacgggcaccaagaaguuacaagguuugauuuuacaacuaccucuaccucaacaccaguuaccagcaauacagucaccggagagaccacaccuuucuccccacugguggcuaccucugagucugugacagaaauaacagcaucaucauuuguuguguccugggugagugccucagacacugugaguggguuccgcguggaauacgagcucucugaggagggagaugagccacaauaccuggaucugcccagcacggcaacaucagucaauauuccggauuugcugccagggcggaaguauauugucaauguguaccagauuuccgaagacggcgagcagagccugauacucuccacuagccagaccacagccccagacgcaccgccggacacaacugucgaucagguggacgauacuuccaucgucgugcguuggucccguccccaggcaccuaucaccggcuacagaaucguguauagcccgucagucgaagguucauccaccgagcugaaccugccggagaccgcgaauaguguuacacucuccgaccuacagcccggaguccaguacaauaucacaaucuaugcaguagaagaaaaccaggaaaguacuccagucgucauucaacaggaaacaacgggaaccccgcgguccgacaccgugccaucaccacgagaccuucaguucgucgaaguuacagauguuaaggucacaaucauguggacaccaccagaaagcgccgucacaggauacagagucgacgucaucccaguuaauuuaccuggagaacacggucagcgacugccuauuagcaggaauaccuuugcugagguuaccggccuaagccccggcgugacuuauuacuucaaaguguuugcugucucccauggaagggaguccaagccauuaaccgcccagcagacgacuaaacuggacgccccgacgaaucuccaguucgugaacgaaacugauuccaccguucucgugagauggacuccuccccgagcacaaaucacaggauacaggcucacagucggccucacccggagagggcagccucggcaauauaaugugggcccuucugugucuaaauauccacugcguaaucugcagcccgccuccgaguauaccgucucccuaguugcuauuaaaggaaaucaggaaagcccuaaggccaccggcguuuucaccacauugcagccagggucaucaaucccgccuuauaauaccgaagugaccgagacaacuaucgucaucacuuggaccccagcaccuagaaucggguucaagcucggcgugcgccccagucagggcggcgaggcccccagggaagugacaucggacagcgggagcaucguggugucaggucugacuccaggcguggaauacguguacacuauucagguccuaagggacggacaggagagagacgcucccauagugaacaaggugguaacaccccugaguccucccaccaacuuacaccucgaagcuaauccggauaccggcguucugacagugucuugggaacgcagcaccacucccgacaucacaggauacagaaucaccaccaccccuacaaacggucagcaggggaacucucucgaggaaguugugcaugccgaucaaucuagcuguacguucgacaaucugagcccaggacuugaauacaauguauccguguauacagucaaggaugauaaggagucaguaccuauuagcgacaccaucaucccagaggucccccaacugacugaucugagcuuugucgacaucaccgauagcuccauaggcuugagguggaccccacuaaauuccucaacuaucauaggguaccggaucaccgugguggcugcaggcgagggaauucccaucuuugaagauuuuguugacuccagcgugggcuacuacaccgugaccggucuggagcccggcaucgacuacgauaucucugugauuacccugauuaaugggggcgagucagccccgaccacauugacucaacagacagcuguucccccuccaacugaccuucgguucuuuucugauauuaccgcgaacucuuuuacagugcauuggaucgcgccucgggccacaaucaccggcuacagaaucagacaucacccagaacacuucucaggucggccccgggaagacagaguuccucacagcagaaacucuaucacacugacuaaccugacuccagggacggaauauguggugucgaucguggcccucaaugggcgggaagagagucccuuacugaucgggcagcaaaguacagugagcgaugugccaagggaccucgagguggucgcggcgacaccuacuagcuuauugauuucaugggaugcuccugcugugacuguacgguacuaucgcaucacauacggcgaaaccggcgguaacagcccggugcaagaauucaccguacccggcucaaaaagcaccgcuacgauauccggccugaaaccaggcguggacuacacaauuaccguauacgcagugaccggacggggugauagcccagcaagcuccaagccuauuucaaucaacuaucgaacagagauugauaaacccucccagaugcaaguuaccgaugugcaggacaacuccaucagugugaagugguugcccucauccucaccaguuaccggauaccgcgucacuacaaccccaaaaaacgguccaggcccaacaaaaacuaagacggcggggccagaccagacagagaugaccauugaaggauuacagcccaccguugaauacgucgugucaguguaugcacaaaauccaagcggcgaaucucagccuuugguccaaacagcggugacaaauaucgauaggcccaagggccuugccuucacggacguggacguagauucuauuaaaaucgcgugggagagcccccagggccagguuucaagauaucgcgugacauauagcucuccugaggacggaauacaugaacucuucccugcccccgacggugaggaggacaccgccgagcuccaaggcuuacggcccgggagcgaauacaccguaagcgucguggccuuacaugaugacauggaaucgcagccacuaaucggaacccaaucuacugccauuccagcgccaacagaccugaaguuuacacagguuacucccacaagcuuguccgcucaguggacaccaccuaaugugcagcucaccggguaccgagucagaguuacacccaaggaaaaaacuggacccaugaaggaaauaaaccuggcuccugacagcagcucgguaguggucagcggucugauggucgccaccaaauacgaggucucuguuuaugccuuaaaagacacauugacuaguaggccggcucaagguguugugacgacacuggaaaaugugagucccccucgcagggcgagaguuacggacgccacagaaaccacuaucacgaucaguuggcgcacgaagaccgagacaaucacuggauuucagguggacgccgugccugcuaacggccaaacuccgauacagcgcacuauuaagccagauguccgguccuauaccauuacuggauugcagccugggacagacuacaagaucuaccucuacacacugaacgauaacgcuaggagcucccccguggucaucgaugccagcacugcgauugaugcacccucuaaucugcgcuuucucgcaaccacccccaauagccugcuuguuuccuggcaaccgccccgcgccagaaucaccggcuauauuauuaaguaugagaaacccggaucucccccucgcgaaguggucccccguccacguccgggcguuacugaggcaacuauaaccggucuggaaccgggaaccgaguacaccauauaugucauagcauugaagaauaaccagaaaucggagccccugauugggcgcaagaagacagaugagcugccgcaguuagugacccugccccacccuaaucugcacgggccagaaauacuggauguccccucaacgguccagaaaacuccuuuugucacacaccccggauaugauacuggaaacgggauucaguuacccggcacaucagggcagcagccuucagucggacagcagaugaucuucgaggagcauggauuuagacgcaccaccccgccaacuaccgccaccccaauucgccauaggccacgcccauacccccccaacgugggggaggagauucagaucggacauauuccccgagaggacguagauuaucaccucuacccccauggaccuggauugaacccaaacgccucaaccggucaggaggcuuugagccaaacuacuauuucaugggcuccguuucaagauacaagugaauacauuauuucuugccacccagucgggacagacgaagagccccugcaguuccgggugccugguacauccaccuccgccacacugaccggccucacaaggggcgccaccuauaaugugaucgucgaggcucugaaagaccagcagaggcacaaagugcgggaggaaguugugacuguggggaauagcguaaaugaagggcuuaaucagccuacugacgacuccugcuucgacccauauacuguuucucacuacgccgugggcgaugagugggagcguaugucagaaaguggcuucaagcugcuuugucaaugucucgguuucggaagcggucacuucaggugcgauucaagcagguggugucaugauaacggggugaauuacaaaaucggggagaagugggacaggcagggcgagaacggacagaugaugucuuguacaugcuuagggaaugggaaaggugaguucaagugcgacccccacgaggcgacuugcuacgaugacgggaagaccuaccaugucggugagcaguggcagaaagaguaucugggagcuaucuguuccuguaccuguuucggagggcagcgcggauggcgaugugauaacugucgcaggccuggaggcgaaccuuccccagaggguacuacgggucaaaguuacaaccaauauagucaaagguaucaccaacgaaccaauacgaauguuaauugccccauagaauguuuuaugccccuggacgugcaggcagauagagaggauagucgagaguag

SEQ ID NO: 267187 - RNA, 7161 nt, Artificial Sequence
  derived and/or modified sequence
augcugagagggcccggaccaggccuccuccuucucgccguccagugucugggcaccgccgugcccucaacgggagccucuaaguccaaacgccaggcucagcaaauggugcagccucagagcccuguugcaguuucccaaagcaaaccagguuguuacgacaacggaaagcacuaccaaaucaaccagcagugggaacggacuuaccugggcaacgcacucguauguacaugcuaugguggaucuagaggauuuaacugcgaaucgaagccagaagcugaagagacaugcuuugauaaguauacaggcaauaccuaucgagucggcgauacguacgagagaccuaaggacagcaugaucugggacuguacuugcaucggugccggaagagggcguaucaguuguacuaucgccaauagaugccaugaaggcgggcaguccuacaagaucggagauacauggcgcagaccucacgaaacuggcggcuacaugcuggagugugucugccuugggaacgggaagggggaauggacauguaagcccaucgcagagaaauguuuugaucaugccgccgguacuucuuacgucgugggggagaccugggagaagccguaccagggguggaugauggucgacugcacaugucugggcgaaggcucuggcagaaucaccuguacuucucguaauagaugcaaugaccaggauacuagaacuuccuacagaaucggggacacuugguccaaaaaagacaaucgcggcaaccuccugcagugcauuuguacuggaaaugggcgaggggaauggaaaugcgagcggcacacuuccguucagaccaccucaagcgguucuggcccauucaccgaugugcgggccgcugucuaccagccacagccacauccgcagccuccgccuuacggccacugcguuacggacucaggugugguguacucuguuggcaugcagugguugaagacccaggggaacaagcagaugcugugcacaugccuugguaauggcgugaguugccaggaaacugccguuacccagacauauggggguaacagcaauggggaaccuugcgugcugccauucacauacaauggccgcaccuuuuacaguugcaccacagagggucggcaggauggccaccuaugguguagcaccacuuccaauuacgagcaggaccagaaauauucguucuguaccgaccauaccguccuagugcagacccgagggggcaacaguaauggagcccucugccauuucccuuuccuguacaauaaccacaacuauacugacuguacgagcgaagggcggcgagacaacaugaaguggugcggaacaacccagaauuaugacgcugaucagaaauucggauucugucccauggcugcacacgaagagaucuguacuacaaaugagggugucauguaccgaaucggagaccagugggauaaacaacacgacauggggcacaugaugagaugcacuuguguuggaaacgggaggggagaguggacuuguauugcuuauagccagcuuagagaucaauguauuguggacgauaucaccuauaauguuaacgauacauuccacaaaagacaugaggagggccacaugcucaacugcacaugcuuuggccaggggcgaggcagauggaagugcgacccaguugaccagugucaggacagugagaccgguacuuuuuaucagauuggugauaguugggagaaauauguccaugggguacgcuaccaauguuacugcuacggccgcgggaucggggaauggcauugccagccccuucagacuuaccccucuucauccggcccuguggagguguuuauuacagaaacucccucucagcccaacucccacccuauccaauggaaugccccucagccaucacauaucucuaaguacauccuucguuggagacccaaaaauagcgugggacgcuggaaggaagcgacaaucccggggcaccuuaacucuuauacgauuaagggccugaaacccggcgucguguaugaagggcaguugauaaguauccagcaauacggucaccaggagguaacacgguucgacuuuaccacaacaucuacaucuacacccgucaccagcaacacggucacaggagaaacaacccccuucuccccauugguagcuaccucagagagugugacagaaauuacagcuucauccuucgugguaaguugggucagugccucugauaccgugucugguuuucgaguggaguacgagcucagugaagagggugaugagccacaguaucuggaccugccuuccacugccaccucugugaauauacccgacuuacucccugggcggaaguauauugucaacgucuaccaaaucucugaagauggggagcagucucugauuuuaucuacuucccaaacuacggcaccugaugcaccaccagacaccacaguggaucaggucgacgacacauccaucguggugagauggucuagaccucaggcaccaauaacaggguaccgcaucguguacuccccguccguggaagguuccagcacagaauugaaucugccagaaaccgcuaauucagugacccugucagaccugcagcccggggugcaguacaacaucacaauauacgcaguagaagagaaucaagaauccacucccgucgugauucaacaagagacuaccgggacaccuagaagugacaccguuccaucuccacgugaucugcaauucguugagguaacagacgucaaaguaaccauuauguggacaccuccugagagugccgugaccggguaccggguggacguaauuccaguaaauuuacccggugagcauggacagcgucucccaaucucucguaacacuuucgcagaggugacagggcucucacccggagugaccuauuacuuuaaagucuuugcggugagccacgggagggagagcaaaccucuaacggcgcagcagacaaccaagcucgacgcccccaccaaccugcaguuugugaaugagacugacuccacagugcuuguucguuggacacccccucgcgcucaaauuacaggguauaggcucacaguuggacucacccgcaggggacagccaaggcaguacaauguaggccccucgguuucaaaguacccccugagaaaucuacagccagcuagcgaguauaccgucucccucgucgccauaaaaggcaaccaggagucucccaaagccacugggguguucaccacucuccagccgggcuccuccauuccaccguauaacaccgaaguuacugagaccacuaucgucauaaccuggaccccugccccucgcauuggcuuuaagcuaggugucaggcccucacagggcggggaagccccaagggaagugacuagugacucugggaguauuguggugagcggcuugacccccgguguggaauauguguacacaauccaggugcuccgggauggucaagaacgggacgcgccuaucguuaauaagguugugacaccacuuagcccccccacaaaucugcacuuagaggccaaucccgacacgggcgucuuaacaguaaguugggagcggagcacuacacccgauaucaccggauaccgaaucacuacgacuccuacaaauggucagcaagggaauucacuugaggaggugguucacgcugaccaauccagcuguacauucgacaaucuuucacccggacucgaauacaacguaucaguauauacuguuaaggacgacaaagagucggugccgauuucagacacuauuauccccgcugugccaccacccacagaccugcgauuuacaaacauuggacccgauaccaugcgcgugacuugggccccaccaccaagcauugaccuuaccaauuucuuaguaagguauaguccagugaagaaugaggaggacgucgccgagcuuaguauuucacccucugauaacgccguggugcucaccaaucugcugccaggaacagaauacguugucagcgugucuucgguguaugaacagcaugagucuacuccucuucgcggucggcagaagaccgggcuggacucaccuacuggcauagacuuuagcgacaucacugcaaacagcuuuacgguacauuggaucgcuccccgggcuacaauuaccggguaucgcauucgucaccacccugagcauuucucuggaagaccuagggaagaucgagugccucauuccaggaauucuauuacucugaccaaucuuacuccuggcacagaauacgugguauccaucguugcucuaaacggaagggaagaaaguccucuacuuaucggacagcaaucaacaguuucugauguuccacgagaccuggagguugucgccgcaacgccuacaagccugcugauaagcugggaugcuccggcagugacagugagguacuaccggaucaccuacggcgaaaccggagggaacucuccugugcaagaauucacggugccgggaucuaaaagcaccgccacgaucagcgggcugaaaccugggguggauuacaccaucacggucuacgcagugacaggacggggagacuccccugcuagcagcaaaccgauuucgaucaacuaucgcaccgagaucgauaaaccaucccaaaugcaggugaccgacgugcaggacaacagcauuucugugaaguggcugccgucaucuucucccgugaccggcuauagagugacgaccacaccgaagaacggcccaggaccuacaaaaaccaaaaccgccggaccagaucagacagagaugaccaucgagggccuucagccgaccguagaauacguggucagcguguacgcucaaaauccaucaggggagucacaaccacucguccagaccgccgugacgaacauagaucgaccaaaagggcuagcauuuaccgaugucgacguggauagcauuaagauugcuugggaauccccucagggccaggucagcagauacagagugaccuacagcucccccgaggacggcauccacgaacuuuuuccagcaccggacggugaagaggauacggccgaauugcagggccuccgucccgguagcgaguacaccguguccguuguugcucugcacgacgauauggagucucaaccccugauuggcacacagaguacugcaaucccugccccaacggaccuuaaguucacucaagugaccccuacuucucuuucagcacaguggacgcccccaaacgugcagcuuaccggcuauagaguacgugugacaccuaaggaaaaaacugggccuaugaaagagaucaaccuggccccagacagcaguuccguggucgucucaggccucauggucgcuacgaaguacgaaguuucggucuacgcccugaaggacacuuugacuucccgccccgcccagggagucgucacaacccuugaaaacgugagcccuccucggagggcucguguuacugaugccacagagacuacaauaaccauaagcuggcggaccaaaacagagacaauuaccggcuuucagguagacgcgguucccgcuaacgggcaaacgccuauccaaaggaccauuaagcccgacguucgauccuauacaauuaccgggcuccagccuggcacggacuauaagaucuaucuguacacucucaaugauaacgcuaggucaagcccaguugucaucgaugccagcaccgcuaucgacgcacccucaaacuugagguuccuagcuacuacuccaaauaguuugcugguguccuggcagcccccccgggcccgcauaaccggauacauuauuaaguaugagaagccuggcagcccuccgagagagguagugccccgcccccgucccggagucacagaagcuaccaucaccggacucgagccaggaaccgaauacacuauauacgugaucgcccugaaaaauaaucagaaguccgagccacucaucgggcgcaagaaaacagacgagcuuccccagcuggucacccugccgcauccgaaucuucauggucccgagauccuggaugugccgagcaccgugcagaaaacaccauuugugacccacccuggauacgauacaggaaauggaauacagcuuccugguaccucaggucaacagcccucaguuggacaacagaugaucuucgaagaacacggcuuucggcggaccaccccaccuaccacugcgacuccaauucggcaucgcccccggccguacccaccaaacgugggugaagagauccagauuggccacauuccaagggaagacguugacuaccacuuguauccucauggcccgggauuaaacccaaaugcuaguacaggccaggaagcccugucucagacaacuaucucuugggcaccauuucaagacacuagcgaauacaucaucuccugccauccugucggcacagaugaagaaccccugcaguuccgugugccagguaccagcaccucugcuacuuugaccgggcucacacguggggcaacuuacaacgugauugucgaggcacugaaggaccagcagagacacaaaguaagggaggagguggucacggucgggaacuccgugaacgaaggcuugaaucagccuaccgacgauucuugcuucgacccauauacggugucucauuacgccgugggcgaugagugggagcggauguccgagucggguuuuaaacugcugugccagugucucggguucggauccggacauuuccggugcgauucgucucgauggugccacgacaauggaguaaauuauaagaucggugaaaagugggacaggcagggggaaaaugggcagaugaugagcugcacaugccucggcaauggaaagggugaauuuaagugugauccccacgaagccacaugcuaugacgacgggaaaaccuaccaugugggagaacaguggcagaaagaguaccugggcgccaucuguagcugcacgugcuucggcggacagcggggcuggagaugcgauaauugccgaagaccuggcggagagccaucuccagaagggacuaccggccaaaguuacaaucaauacucucaaagauaucaccagaggaccaauaccaaugucaauuguccuaucgaauguuuuaugccccuggacgugcaggcugaucgcgaggauucaagagaauag

SEQ ID NO: 267188 - RNA, 7164 nt, Artificial Sequence
  derived and/or modified sequence
augcuaagagguccaggaccuggccuauugcuguuagcgguccaaugccuggggaccgcaguucccaguaccggcgcguccaaguccaagcgacaagcacagcagauggugcagccccaaucucccguugcagugucacagaguaagcccggaugcuaugauaacggcaaacacuaucagaucaaccagcagugggagcgcacauaccucgggaacgcauuaguaugcacuugcuauggaggcagucgcggguucaauugcgagucaaagccagaggcagaggagaccuguuuugauaaauacaccggaaacaccuauagagucggggauaccuacgagaggccgaaagauucuaugaucugggacuguacuugcauaggggcugggaggggucguaucucauguaccaucgccaauagaugccaugagggggggcagaguuacaaaaucggggacacuuggcggaggccacaugagaccggaggauacaugcuggagugcgucuguuugggaaaugguaaaggagaguggacuuguaaaccuaucgccgaaaaguguuuugaucaugccgcgggaacuucuuacgugguuggagagacaugggagaaaccauaccagggcuggaugaugguggacugcacuugucuaggagagggaucugggcggauuacuuguacaagcaggaaucgguguaaugaucaggauaccaggaccaguuaccggaucggggauacgugguccaagaaggauaacagaggaaaccucuuacaauguaucuguacagggaaugguaggggggaauggaaaugugagcggcauacuagcgugcagacgacuucaucuggcuccggacccuucacagacguucgagccgccgucuaccaaccacaaccgcacccucaaccaccccccuaugggcacugcgucaccgacagcggcgucguauacucagugggcaugcaaugguugaaaacgcagggcaacaaacagauguuauguacaugucuaggcaacggcgugucaugucaggagacagccgugacccaaacuuacggcgggaacagcaacggagagccaugcguccuucccuucacuuauaacggcaggacuuuuuacagcugcacuacagagggacggcaggauggccaccuuuggugcucgaccaccucuaacuacgagcaggaucagaaauauaguuucugcaccgaccauacagucuuagugcaaaccaggggggguaacagcaacggcgcacugugccacuuuccguuuuuauacaauaaucauaauuacacagauugcacuucggagggaaggcgcgacaauaugaaauggugcgguaccacacagaauuacgaugccgaccagaaauucggauuuugucccauggccgcgcacgaggagauauguacuacaaacgaaggaguaauguaucgcauaggagaucagugggauaagcagcacgacauggggcacaugaugagauguacauguguuggcaacggacgcggugaguggacauguaucgcuuauagccaacugagagaccaauguauuguggaugacauuacguacaauguaaacgauacuuuucauaaaagacacgaagaaggccacauguugaauuguacuuguuucggccagggccggggaagauggaagugugacccgguggaccaaugccaagacagugagacaggcaccuucuaccaaauuggugauagcugggagaaauauguccauggagugagauaucaguguuauuguuacgggaggggaauaggcgaguggcacugccagccacugcagacauacccuuccucaucaggaccaguggaaguauucauaaccgaaacaccaagccagcccaauagccauccaauucaguggaaugccccacagccaucacauauuuccaaguacauccugcgauggcggccuaaaaauagcgucggcagauggaaggaagcuacaaucccuggacauuugaauaguuauaccaucaaaggcuugaagccaggcgucguuuaugaaggacaacuuauaucuauccagcaguauggccaccaagaagucacccgguuugacuuuaccacuaccucuacaagcacaccggugaccagcaacacagugacaggcgaaaccacuccauucucaccucucguugcaacuuccgagagcguuacagaaaucacagcaucuuccuucgucguuucuuggguuuccgcuucagacacugucucaggcuuucgcgucgaguacgaacugagugaggagggagaugaaccccaguaucucgacuuaccauccacugcuacgucagucaacauccccgaucuccuacccggccguaaguauauuguuaacguguaucaaaucagcgaggauggcgaacagucucucauccucagcacuucccagacgacagcacccgaugccccaccggauaccaccguagaucagguagaugacacaucaaucguugugagguggucacgaccgcaagccccuauuacggguuacagaauuguguacucacccucuguagaagggucuagcaccgaacugaaccugccagaaaccgcaaacagcgugacucuuucggaucugcaaccuggagugcaguacaauaucaccauuuacgccguagaagagaaucaggaaucaaccccagucguaauucagcaagaaaccaccgguaccccgcgguccgacaccgugccaucaccacgagaccuucaguucgucgaaguuacagauguuaaggucacaaucauguggacaccaccagaaagcgccgucacaggauacagagucgacgucaucccaguuaauuuaccuggagaacacggucagcgacugccuauuagcaggaauaccuuugcugagguuaccggccuaagccccggcgugacuuauuacuucaaaguguuugcugucucccauggaagggaguccaagccauuaaccgcccagcagacgacuaaacuggacgccccgaccaaccuccaauucgucaaugagaccgauucuacaguacuggucagauggacacccccucgugcccagauuaccggauaucgccucacugucggccugacucggcgggggcagcccagacaguacaacgugggccccuccguaaguaaguacccucucaggaaccugcaaccugcauccgaguauaccgugucccugguggccauuaagggaaaucaggaguccccuaaagcuacaggcguuuucacaacacuacaaccugggucuuccaucccucccuauaacacagagguaaccgaaaccacaaucgugaucacuuggacgcccgccccccgcauugguuucaaguuaggagugagaccuagccaaggcggggaagcuccgcgagaaguuacuucugacagcgggucuauaguaguuucuggcuugacuccaggcguggaguauguuuauaccauucagguccugcgcgaugggcaagaacgagacgcuccaauagugaauaaaguugucaccccccugucuccccccacaaaucuucaucucgaggccaauccugacacagguguauugacggucagcugggaaaggucuacaacaccagacaucaccggcuauagaauuaccaccacccccacuaauggacagcagggcaauagcuuagaagaaguuguucaugcagaucagagcucuugcacauucgacaacuuaaguccaggccuggaauacaaugugucugucuauacggugaaggacgacaaagagagcguuccaauaucugacaccauuauccccgaagucccgcaacugacagaccuuaguuucguugacauuaccgacagcucuauuggacugcgcuggacuccccugaacucauccacaauuauugguuaucgaaucaccgucguggcugcuggagaagggauuccuauuuucgaggacuucguagauuccucugucggauacuauacaguuaccggcuuggagccuggaaucgacuacgauauuagugucauuacguuaaucaauggcggagaaagugccccuaccacgcucacucaacagaccgccguacccccacccaccgauuuacguuucuucucagacaucacagcaaauucuuuuacaguucacuggaucgcacccagagcgaccauuacuggcuaucgaauuaggcaccaucccgaacauuuuucaggacgcccucgagaagaccgcguuccccauagucgaaacagcaucacgcucacaaaucugacucccggcacugaauauguggucagcauaguggcccucaauggcagggaagaauccccacuucuaauuggucaacaaucuacggucucagacguuccacgagaucucgaggucguggcugcgaccccaaccagccuucucaucucuugggaugccccggccgugacuguccgauacuacagaauuacuuacggagaaaccggaggcaauuccccuguucaagaguucaccguacccggaagcaaaucuacagcaacuauuagcggccugaaacccggcgucgauuacacuaucacagucuacgcaguuacaggacggggggacagcccggcaucuucaaaacccauuagcaucaacuauagaaccgaaauugacaaaccaucccagaugcaaguuacagacguucaagauaauucaaucagcguuaaauggcugccaucauccagcccagucacaggcuacagagugacuacaacucccaaaaauggacccgguccgaccaaaacgaaaacugccggcccagaccagacugagaugaccauugaaggccuacaaccaacagucgaauacgucgucagcguguaugcucagaauccgucaggagagucgcaaccccuugugcagacagcaguuaccaacauugauaggcccaaaggcuuagccuuuaccgacguggacguagacucgaucaagaucgccugggaaucaccucagggacaaguuucucgguaccgugucaccuauaguucaccggaagauggcauccaugagcuguucccagccccugacggagaggaggacacagcagaauuacagggauugcggccuggaagcgaguauacaguguccguuguugcacuucacgaugauauggagucucaaccccucauugguacucaguccaccgccauacccgccccgaccgaucuuaaauuuacacaggucacaccgaccucacuguccgcucaauggaccccuccaaauguccagcugaccggguacaggguacgaguuacgccuaaagaaaagacagggccuaugaaggaaaucaaucuggcuccagacucaagcaguguuguagucaguggacuaaugguagcuaccaaguacgaagucuccguuuacgcuuugaaagacacgcucaccucacgaccggcccagggggucguaacgacucuugagaauguuaguccacccaggagagcucgggugacagaugcuacagagacuacgaucacaauaucuuggagaacaaaaacagaaaccauuaccggcuuucaggucgaugcuguuccagccaacgggcagacuccuauucaacgcacuaucaagcccgauguacgcagcuauacaauuacaggacuucagccagguaccgacuacaagauauaucuguauacacugaacgauaacgcacgcagcuccccuguugugauagacgcuagcaccgcaaucgacgcccccagcaaccugagauuccucgccacuacgcccaacagccuauuaguuagcuggcaaccaccucgagcuagaauuacggguuacauaaucaaauacgagaagccagguucuccaccucgcgaaguugucccccgaccuagaccuggagugacagaagcuaccauaacuggccuggagcccggcaccgaguauacaauuuacgugauugcccugaagaacaaucaaaaauccgaacccuugaucgguagaaagaagaccgaugaacuuccgcagcuagugacucucccacaccccaauuugcaugggcccgagauucuggacguucccucuacaguucaaaagacaccguucguuacucaucccgguuacgacaccggaaauggaauccaguuacccggcaccucuggccaacaacccagcguaggacagcagaugaucuuugaagagcacggcuuucgaagaaccacaccuccuaccaccgccacaccuauacgacauagacccaggcccuaccccccuaacgugggugaagagauucaaauuggccacauccccagagaagacguggauuaucaccucuauccacauggaccaggcuugaaccccaacgccagcaccgggcaggaagcccucagccaaacaaccaucucaugggcccccuuccaggauacgucagaauacauaaucucaugccacccuguugguacugacgaagagccccugcaauuccgcgugccaggcacuuccacuagugccacgcugacuggacucaccaggggggcgaccuauaacguuaucgucgaagcacucaaagaucagcagagacacaaagugagggaagaaguagucacagugggaaauuccguuaacgaaggacugaaucagccuacagacgacucaugcuucgauccauacacugugagccauuacgcagugggagacgaaugggaaagaauguccgagagcggcuuuaagcuucugugucagugccucgguuuugguuccggucauuucagaugcgauagcaguagauggugccacgacaaugggguuaacuacaaaaucggagaaaaaugggacagacagggagagaacggccagaugaugucauguacaugccucgggaaugguaagggcgaauucaaaugcgauccucaugaggccacaugcuaugacgacgguaaaacuuaccaugugggcgaacaguggcagaaggaguauuuaggagcaauaugcucuugcacuuguuucggcggucaacgagguuggagaugugacaacugcaggcguccuggcggugaaccuagccccgagggcacuaccggccaaagcuacaaucaguacucacagagguaccaucagagaacuaacaccaauguaaauuguccgauugaguguuuuaugccccuugacgugcaggcagauagagaagacucaagagaguag

SEQ ID NO: 267189 - RNA, 7161 nt, Artificial Sequence
  derived and/or modified sequence
augcugagagggcccggaccaggccuccuccuucucgccguccagugucugggcaccgccgugcccucaacgggagccucuaaguccaaacgccaggcucagcaaauggugcagccucagagcccuguugcaguuucccaaagcaaaccagguuguuacgacaacggaaagcacuaccaaaucaaccagcagugggaacggacuuaccugggcaacgcacucguauguacaugcuaugguggaucuagaggauuuaacugcgaaucgaagccagaagcugaagagacaugcuuugauaaguauacugggaauacuuacagaguuggagauacguaugaacgcccuaaggacucuaugaucugggauugcaccugcauuggagcuggaagaggccgcaucagcuguaccauagcuaaccgcugucaugagggcggccagucguauaagaucggagauacguggagacgcccacacgaaacugguggauauaugcuggagugugucugucuggggaacggaaaaggggaguggacauguaagccaauagccgagaaaugcuucgaccacgccgcagguacuucguauguuguaggcgaaacuugggagaagccauaccagggauggaugaugguugacuguacgugcuuaggugagggcaguggccgaauaaccuguacaagccgaaacaggugcaacgaccaggacacucguacuaguuauaggauuggugauacauggagcaaaaaagauaaccggggcaaccuccugcaauguaucuguacaggcaacggacguggcgaguggaaaugugagagacauacuagcgugcagaccaccaguagcgguuccggcccauuuacugacguaagagcagccguguaucagccccagccccacccccagcccccgccguauggucacugcguuaccgauuccgguguaguguauucaguugggaugcaauggcuaaaaacacaagggaauaagcagauguuauguacaugccugggcaauggagugucuugucaagaaaccgccgugacccagacuuacggcgguaacucaaauggugaaccuugcgugcugccauucacuuauaaugggaggacguuuuacagcugcacuaccgagggacgucaggauggacauuuauggugcucuacaacaaguaauuacgaacaggaucagaaguauagcuuuuguacagaccacaccguacugguucagacaaggggggggaauagcaacggggcacucugccacuuucccuuccucuauaauaaccauaauuauacugauugcacaagcgagggcaggcgagacaauaugaaauggugcggcaccacacagaacuacgaugcugaucagaaauuugguuuuugcccaauggcugcacacgaggaaaucuguaccacuaaugagggaguuauguauagaaucggggaccagugggacaagcaacaugauaugggccacaugaugagguguacuugcgucgggaauggacgcggugaauggaccugcaucgccuacucccaguugcgugaucaaugcauugucgacgacauuacuuacaacgucaacgauaccuuccacaaaagacacgaagaagggcauaugcuuaauuguacuugcuuuggucagggaaggggaagguggaagugugaucccguggaucagugucaagauagcgaaaccggaaccuuuuaucaaaucggagauucuugggaaaaauacgugcacggaguaagguaccagugcuacugcuauggcaggggaaucggcgaauggcauugccaacccuuacagacauaccccucuucaucaggccccgucgaagucuucaucaccgaaacgcccagucagccuaauucucacccaauccaguggaaugccccccagccaucacauaucucaaaguauauccugcgcuggaggccuaaaaacagcguuggccgcuggaaggaagccaccauaccaggacaccucaauucguauacaauuaaaggcuugaaaccuggugucgucuacgaggggcagcucaucucaauucagcaauauggccaucaggaaguaacucgguucgauuucaccacgaccucaacaucaacaccuguaacgucaaauaccgugacuggcgaaacaaccccauucagcccccuaguggccacuagcgaguccgugacugaaauuaccgcaagcagcuuuguagugagcuggguguccgcgucagauaccguuagcggauuuagagucgaguacgaacucucagaagaaggugacgaaccccaguaucuggaccuccccucuacugcuacauccgugaacauucccgaccuccugccuggaagaaaauacauagucaacguguaucagauaagugaggacggugagcagagcuugauuuuaucuacaagucaaaccaccgccccugacgcaccccccgacacaacuguggaucaagucgacgauacuagcauuguugugagauggagcaggccacaggcuccuauuacuggcuacagaaucguauacucgccuagcguugagggauccuccacagaacuuaaucuaccggaaacugccaauaguguaacauuauccgaucugcagccuggcgugcaguacaauaucaccaucuaugccguagaggagaaucaggaaagcacaccaguggugauucagcaggaaacaaccggcacuccccguuccgauaccguccccagccccagagaucuacaauuuguugagguuaccgacguuaaagugaccauuauguggacaccaccagagucagccgucacuggcuaccgcguggacgugaucccuguaaaccucccaggcgaacacggacagaggcuucccaucucucgaaacacauuugcugaggugaccggccuuagccccggggucaccuacuauuucaaaguauucgccguaagccacgggagagagagcaaaccccugacugcccaacaaaccaccaaauuggaugcaccuacaaaucuucaauucgugaacgagaccgacucaaccguuuuaguacgcuggacuccuccccgcgcacagauuaccggguacagacugacaguugggcucacuaggaggggccagccuagacaauauaauguggggccaaguguguccaaauaucccuuaagaaaccugcaaccggcuucagaguacaccgugucauuaguugcuauaaagggcaaccaggaaucaccuaaggcaaccggaguauucacuacccugcagccaggcucuuccauuccucccuacaauacagaagugaccgaaaccacaauagugauuacauggaccccagcuccaagaauagguuucaaguugggagucaggcccagccagggaggcgaagcaccccgagaagugacaucugauucuggcucaaucgucguuucaggucugacucccggcguggaguacgucuacaccauucagguauuacgcgacggacaggaacgcgacgcuccaauuguaaacaagguaguuacgccacuaucaccgccuacuaaccugcaucucgaagccaauccugauaccggcgugcugacuguguccugggaaagaaguacaacgcccgacauuacaggauaucgaaucaccaccacucccacgaacggacagcaaggaaauaguuuagaagaaguggugcacgccgaucaauccucaugcacuuucgauaaccugaguccuggacuggaguacaaugucucugucuacacugucaaggacgauaaagaaucaguuccaauuucagacaccauaauccccgcugugccaccccccacugacuugcgauuuacuaacauuggccccgauacaaugagggucacaugggcuccaccccccagcauugaucugaccaauuuccucguuagauacucacccguaaagaacgaggaagacgucgccgagcugucaauuuccccauccgauaacgcugucguucugaccaaucuauuacccggaaccgaauauguggucagcgugucuuccgucuacgagcagcaugagucuacaccucugagaggcaggcagaagaccggcuuagacuccccgaccggcaucgauuuuagcgacauaacggcuaauucauucacuguacacuggauugcaccaagagcaaccaucaccggcuaccgcauaaggcaccaccccgaacacuuuaguggacguccaagggaagacagggugccccacucucgcaauagcaucacacugacuaaucugacaccggggacugaauacgucgugucuauaguggcgcuaaauggucgagaagagaguccauuacucauaggacagcaaucaacagucagcgacguuccccgagaucucgaagugguagccgcuacucccaccucccuguugaucuccugggacgcuccggcuguuacagugcgcuacuacaggauuaccuauggggaaacaggagggaacagcccaguucaagaguucaccguaccaggaagcaagucaacugccaccauaagugggcugaaaccgggagucgacuauacaaucacagucuaugccguuaccggccgaggcgauucuccagcuuccuccaagccgaucaguauuaacuauaggacagaaauugacaaaccaucucagaugcagguuacagaugugcaggacaauucaauaagcgugaaauggcuuccuucauccucuccugugacaggcuacagaguuacaacuacuccuaaaaacggaccaggcccuacuaaaacuaagaccgccggaccagaucagaccgagaugaccaucgagggacuucaaccaacagucgaguacguugugucaguguaugcccagaacccaaguggggaaagucaaccacuuguccagacagccgugacuaauauugaucgccccaaaggucucgcuuuuacugauguggauguggauucaaucaaaauugcaugggaauccccccaagggcaggugucuagauaucgggucacauacucgucccccgaagacggcauucaugaacuuuuuccagcuccagacggugaggaggacaccgccgaacuucagggccuccgcccagggucagaguauacugugagcgucgucgcccuccacgaugauauggaaucucaaccacuuauaggaacccagagcaccgccauuccagcccccaccgaccucaaguucacacaaguaaccccuacuagucugucugcccaauggacuccuccuaauguccagcugacaggauaucgugugcgaguuacgcccaaagagaagacuggaccuaugaaggaaaucaaucuggccccugauucuucuagugugguagucagcggacugaugguggcuacuaaguacgaagugagcgucuaugcccugaaggacacacuaacaucaaggccggcucagggcguagucacuacacuagaaaacguauccccuccucgccgagcaagagugacagaugcaacagaaacaacuaucacaaucuccuggcggacaaagacugaaaccaucaccggauuccaggucgaugccgugcccgcgaacggccagacgccuauucaacggacuauuaagccagacgugcgcagcuauaccauaaccggccugcagccuggaacagauuacaagauuuaccucuacacacucaacgauaaugcaagaucuucuccuguggucaucgaugcgagcacagcaauugaugccccaucaaaucugcgcuuccuggcgacgacaccaaauucccugcuagucaguuggcaaccuccacgagcccgcaucacaggauauaucauuaaguacgagaagcccgguucuccucccagagaggugguaccuagaccucggccuggcgucacagaagcaaccauuacaggccucgagccggggacagaauacaccaucuacgugaucgcccuuaagaauaaccagaagagugaaccccuuaucggccguaagaagacugaugaacucccgcaguuggucacccucccccaucccaaucugcauggaccagagauucuagaugugcccucgacuguucaaaaaacucccuuuguuacccauccgggauaugacacuggaaauggcauccagcugccaggcaccuccggccagcagcccagcgugggacaacagaugaucuuugaagaacauggcuuccgucggacaacgccuccuaccaccgcaaccccuauucgccauagaccaagacccuaccccccuaacgugggcgaggagauccaaaucggccauaucccaagagaggacguggauuaccaccuguauccccauggacccggccucaauccuaacgccagcacagggcaagaagcacuuucacagacaacgaucucuugggcuccuuuucaggacacaagcgaauacauuauaagcugccaucccguggguacagaugaagaaccccuccaguuucguguaccugguaccucaacaagcgcuacucugacuggucugacuaggggggccacuuacaacgugauuguggaagccuugaaagaucagcagcgacacaaggugagagaggaaguuguuacagucgggaauagcgugaaugaagguuugaaccagccuacugacgacuccuguuucgauccuuacacggugucacauuaugcugucggagaugagugggaaaggaugagcgagucgggauuuaagcuacuaugccagugccucgguuuugggucaggacauuuccgcugcgauucaagucguuggugccacgacaaugggguaaauuauaagaucggcgaaaaaugggacaggcagggcgagaauggacagaugaugagcuguacuugcuuaggaaacgguaaaggcgaguucaagugugauccacaugaagcaacgugcuacgaugacgguaaaaccuaucaugugggggagcaauggcaaaaagaauaccuaggagcuaucugcaguuguacuugcuuuggcgggcaacguggauggagaugcgacaauugcagaagaccaggcggcgagcccuccccagaaggcaccacaggucaguccuacaaucaguacucgcagcguuaccaucagagaacaaauacuaacguuaacugcccaauugagugcuucaugccacucgaugugcaggccgacagagaggacagucgggaauag

SEQ ID NO: 267190 - protein, 657 aa, Artificial Sequence
  derived and/or modified sequence
MLRGPGPGLLLLAVQCLGTAVPSTGASKSKRQAQQMVQPQSPVAVSQSKPGCYDNGKHYQINQQWERTYLGNALVCTCYGGSRGFNCESKPEAEETCFDKYTGNTYRVGDTYERPKDSMIWDCTCIGAGRGRISCTIANRCHEGGQSYKIGDTWRRPHETGGYMLECVCLGNGKGEWTCKPIAEKCFDHAAGTSYVVGETWEKPYQGWMMVDCTCLGEGSGRITCTSRNRCNDQDTRTSYRIGDTWSKKDNRGNLLQCICTGNGRGEWKCERHTSVQTTSSGSGPFTDVRAAVYQPQPHPQPPPYGHCVTDSGVVYSVGMQWLKTQGNKQMLCTCLGNGVSCQETAVTQTYGGNSNGEPCVLPFTYNGRTFYSCTTEGRQDGHLWCSTTSNYEQDQKYSFCTDHTVLVQTRGGNSNGALCHFPFLYNNHNYTDCTSEGRRDNMKWCGTTQNYDADQKFGFCPMAAHEEICTTNEGVMYRIGDQWDKQHDMGHMMRCTCVGNGRGEWTCIAYSQLRDQCIVDDITYNVNDTFHKRHEEGHMLNCTCFGQGRGRWKCDPVDQCQDSETGTFYQIGDSWEKYVHGVRYQCYCYGRGIGEWHCQPLQTYPSSSGPVEVFITETPSQPNSHPIQWNAPQPSHISKYILRWRPVSIPPRNLGY

SEQ ID NO: 267191 - protein, 2184 aa, Artificial Sequence
  derived and/or modified sequence
MLRGPGPGLLLLAVQCLGTAVPSTGASKSKRQAQQMVQPQSPVAVSQSKPGCYDNGKHYQINQQWERTYLGNALVCTCYGGSRGFNCESKPEAEETCFDKYTGNTYRVGDTYERPKDSMIWDCTCIGAGRGRISCTIANRCHEGGQSYKIGDTWRRPHETGGYMLECVCLGNGKGEWTCKPIAEKCFDHAAGTSYVVGETWEKPYQGWMMVDCTCLGEGSGRITCTSRNRCNDQDTRTSYRIGDTWSKKDNRGNLLQCICTGNGRGEWKCERHTSVQTTSSGSGPFTDVRAAVYQPQPHPQPPPYGHCVTDSGVVYSVGMQWLKTQGNKQMLCTCLGNGVSCQETAVTQTYGGNSNGEPCVLPFTYNGRTFYSCTTEGRQDGHLWCSTTSNYEQDQKYSFCTDHTVLVQTRGGNSNGALCHFPFLYNNHNYTDCTSEGRRDNMKWCGTTQNYDADQKFGFCPMAAHEEICTTNEGVMYRIGDQWDKQHDMGHMMRCTCVGNGRGEWTCIAYSQLRDQCIVDDITYNVNDTFHKRHEEGHMLNCTCFGQGRGRWKCDPVDQCQDSETGTFYQIGDSWEKYVHGVRYQCYCYGRGIGEWHCQPLQTYPSSSGPVEVFITETPSQPNSHPIQWNAPQPSHISKYILRWRPKNSVGRWKEATIPGHLNSYTIKGLKPGVVYEGQLISIQQYGHQEVTRFDFTTTSTSTPVTSNTVTGETTPFSPLVATSESVTEITASSFVVSWVSASDTVSGFRVEYELSEEGDEPQYLDLPSTATSVNIPDLLPGRKYIVNVYQISEDGEQSLILSTSQTTAPDAPPDTTVDQVDDTSIVVRWSRPQAPITGYRIVYSPSVEGSSTELNLPETANSVTLSDLQPGVQYNITIYAVEENQESTPVVIQQETTGTPRSDTVPSPRDLQFVEVTDVKVTIMWTPPESAVTGYRVDVIPVNLPGEHGQRLPISRNTFAEVTGLSPGVTYYFKVFAVSHGRESKPLTAQQTTKLDAPTNLQFVNETDSTVLVRWTPPRAQITGYRLTVGLTRRGQPRQYNVGPSVSKYPLRNLQPASEYTVSLVAIKGNQESPKATGVFTTLQPGSSIPPYNTEVTETTIVITWTPAPRIGFKLGVRPSQGGEAPREVTSDSGSIVVSGLTPGVEYVYTIQVLRDGQERDAPIVNKVVTPLSPPTNLHLEANPDTGVLTVSWERSTTPDITGYRITTTPTNGQQGNSLEEVVHADQSSCTFDNLSPGLEYNVSVYTVKDDKESVPISDTIIPAVPPPTDLRFTNIGPDTMRVTWAPPPSIDLTNFLVRYSPVKNEEDVAELSISPSDNAVVLTNLLPGTEYVVSVSSVYEQHESTPLRGRQKTGLDSPTGIDFSDITANSFTVHWIAPRATITGYRIRHHPEHFSGRPREDRVPHSRNSITLTNLTPGTEYVVSIVALNGREESPLLIGQQSTVSDVPRDLEVVAATPTSLLISWDAPAVTVRYYRITYGETGGNSPVQEFTVPGSKSTATISGLKPGVDYTITVYAVTGRGDSPASSKPISINYRTEIDKPSQMQVTDVQDNSISVKWLPSSSPVTGYRVTTTPKNGPGPTKTKTAGPDQTEMTIEGLQPTVEYVVSVYAQNPSGESQPLVQTAVTNIDRPKGLAFTDVDVDSIKIAWESPQGQVSRYRVTYSSPEDGIHELFPAPDGEEDTAELQGLRPGSEYTVSVVALHDDMESQPLIGTQSTAIPAPTDLKFTQVTPTSLSAQWTPPNVQLTGYRVRVTPKEKTGPMKEINLAPDSSSVVVSGLMVATKYEVSVYALKDTLTSRPAQGVVTTLENVSPPRRARVTDATETTITISWRTKTETITGFQVDAVPANGQTPIQRTIKPDVRSYTITGLQPGTDYKIYLYTLNDNARSSPVVIDASTAIDAPSNLRFLATTPNSLLVSWQPPRARITGYIIKYEKPGSPPREVVPRPRPGVTEATITGLEPGTEYTIYVIALKNNQKSEPLIGRKKTVNEGLNQPTDDSCFDPYTVSHYAVGDEWERMSESGFKLLCQCLGFGSGHFRCDSSRWCHDNGVNYKIGEKWDRQGENGQMMSCTCLGNGKGEFKCDPHEATCYDDGKTYHVGEQWQKEYLGAICSCTCFGGQRGWRCDNCRRPGGEPSPEGTTGQSYNQYSQRYHQRTNTNVNCPIECFMPLDVQADREDSRE

SEQ ID NO: 267192 - protein, 2211 aa, Artificial Sequence
  derived and/or modified sequence
MLRGPGPGLLLLAVQCLGTAVPSTGASKSKRQAQQMVQPQSPVAVSQSKPGCYDNGKHYQINQQWERTYLGNALVCTCYGGSRGFNCESKPEAEETCFDKYTGNTYRVGDTYERPKDSMIWDCTCIGAGRGRISCTIANRCHEGGQSYKIGDTWRRPHETGGYMLECVCLGNGKGEWTCKPIAEKCFDHAAGTSYVVGETWEKPYQGWMMVDCTCLGEGSGRITCTSRNRCNDQDTRTSYRIGDTWSKKDNRGNLLQCICTGNGRGEWKCERHTSVQTTSSGSGPFTDVRAAVYQPQPHPQPPPYGHCVTDSGVVYSVGMQWLKTQGNKQMLCTCLGNGVSCQETAVTQTYGGNSNGEPCVLPFTYNGRTFYSCTTEGRQDGHLWCSTTSNYEQDQKYSFCTDHTVLVQTRGGNSNGALCHFPFLYNNHNYTDCTSEGRRDNMKWCGTTQNYDADQKFGFCPMAAHEEICTTNEGVMYRIGDQWDKQHDMGHMMRCTCVGNGRGEWTCIAYSQLRDQCIVDDITYNVNDTFHKRHEEGHMLNCTCFGQGRGRWKCDPVDQCQDSETGTFYQIGDSWEKYVHGVRYQCYCYGRGIGEWHCQPLQTYPSSSGPVEVFITETPSQPNSHPIQWNAPQPSHISKYILRWRPKNSVGRWKEATIPGHLNSYTIKGLKPGVVYEGQLISIQQYGHQEVTRFDFTTTSTSTPVTSNTVTGETTPFSPLVATSESVTEITASSFVVSWVSASDTVSGFRVEYELSEEGDEPQYLDLPSTATSVNIPDLLPGRKYIVNVYQISEDGEQSLILSTSQTTAPDAPPDTTVDQVDDTSIVVRWSRPQAPITGYRIVYSPSVEGSSTELNLPETANSVTLSDLQPGVQYNITIYAVEENQESTPVVIQQETTGTPRSDTVPSPRDLQFVEVTDVKVTIMWTPPESAVTGYRVDVIPVNLPGEHGQRLPISRNTFAEVTGLSPGVTYYFKVFAVSHGRESKPLTAQQTTKLDAPTNLQFVNETDSTVLVRWTPPRAQITGYRLTVGLTRRGQPRQYNVGPSVSKYPLRNLQPASEYTVSLVAIKGNQESPKATGVFTTLQPGSSIPPYNTEVTETTIVITWTPAPRIGFKLGVRPSQGGEAPREVTSDSGSIVVSGLTPGVEYVYTIQVLRDGQERDAPIVNKVVTPLSPPTNLHLEANPDTGVLTVSWERSTTPDITGYRITTTPTNGQQGNSLEEVVHADQSSCTFDNLSPGLEYNVSVYTVKDDKESVPISDTIIPAVPPPTDLRFTNIGPDTMRVTWAPPPSIDLTNFLVRYSPVKNEEDVAELSISPSDNAVVLTNLLPGTEYVVSVSSVYEQHESTPLRGRQKTGLDSPTGIDFSDITANSFTVHWIAPRATITGYRIRHHPEHFSGRPREDRVPHSRNSITLTNLTPGTEYVVSIVALNGREESPLLIGQQSTVSDVPRDLEVVAATPTSLLISWDAPAVTVRYYRITYGETGGNSPVQEFTVPGSKSTATISGLKPGVDYTITVYAVTGRGDSPASSKPISINYRTEIDKPSQMQVTDVQDNSISVKWLPSSSPVTGYRVTTTPKNGPGPTKTKTAGPDQTEMTIEGLQPTVEYVVSVYAQNPSGESQPLVQTAVTNIDRPKGLAFTDVDVDSIKIAWESPQGQVSRYRVTYSSPEDGIHELFPAPDGEEDTAELQGLRPGSEYTVSVVALHDDMESQPLIGTQSTAIPAPTDLKFTQVTPTSLSAQWTPPNVQLTGYRVRVTPKEKTGPMKEINLAPDSSSVVVSGLMVATKYEVSVYALKDTLTSRPAQGVVTTLENVSPPRRARVTDATETTITISWRTKTETITGFQVDAVPANGQTPIQRTIKPDVRSYTITGLQPGTDYKIYLYTLNDNARSSPVVIDASTAIDAPSNLRFLATTPNSLLVSWQPPRARITGYIIKYEKPGSPPREVVPRPRPGVTEATITGLEPGTEYTIYVIALKNNQKSEPLIGRKKTGQEALSQTTISWAPFQDTSEYIISCHPVGTDEEPLQFRVPGTSTSATLTGLTRGATYNVIVEALKDQQRHKVREEVVTVGNSGWCHDNGVNYKIGEKWDRQGENGQMMSCTCLGNGKGEFKCDPHEATCYDDGKTYHVGEQWQKEYLGAICSCTCFGGQRGWRCDNCRRPGGEPSPEGTTGQSYNQYSQRYHQRTNTNVNCPIECFMPLDVQADREDSRE

SEQ ID NO: 267193 - protein, 2031 aa, Artificial Sequence
  derived and/or modified sequence
MLRGPGPGLLLLAVQCLGTAVPSTGASKSKRQAQQMVQPQSPVAVSQSKPGCYDNGKHYQINQQWERTYLGNALVCTCYGGSRGFNCESKPEAEETCFDKYTGNTYRVGDTYERPKDSMIWDCTCIGAGRGRISCTIANRCHEGGQSYKIGDTWRRPHETGGYMLECVCLGNGKGEWTCKPIAEKCFDHAAGTSYVVGETWEKPYQGWMMVDCTCLGEGSGRITCTSRNRCNDQDTRTSYRIGDTWSKKDNRGNLLQCICTGNGRGEWKCERHTSVQTTSSGSGPFTDVRAAVYQPQPHPQPPPYGHCVTDSGVVYSVGMQWLKTQGNKQMLCTCLGNGVSCQETAVTQTYGGNSNGEPCVLPFTYNGRTFYSCTTEGRQDGHLWCSTTSNYEQDQKYSFCTDHTVLVQTRGGNSNGALCHFPFLYNNHNYTDCTSEGRRDNMKWCGTTQNYDADQKFGFCPMAAHEEICTTNEGVMYRIGDQWDKQHDMGHMMRCTCVGNGRGEWTCIAYSQLRDQCIVDDITYNVNDTFHKRHEEGHMLNCTCFGQGRGRWKCDPVDQCQDSETGTFYQIGDSWEKYVHGVRYQCYCYGRGIGEWHCQPLQTYPSSSGPVEVFITETPSQPNSHPIQWNAPQPSHISKYILRWRPKNSVGRWKEATIPGHLNSYTIKGLKPGVVYEGQLISIQQYGHQEVTRFDFTTTSTSTPVTSNTVTGETTPFSPLVATSESVTEITASSFVVSWVSASDTVSGFRVEYELSEEGDEPQYLDLPSTATSVNIPDLLPGRKYIVNVYQISEDGEQSLILSTSQTTAPDAPPDTTVDQVDDTSIVVRWSRPQAPITGYRIVYSPSVEGSSTELNLPETANSVTLSDLQPGVQYNITIYAVEENQESTPVVIQQETTGTPRSDTVPSPRDLQFVEVTDVKVTIMWTPPESAVTGYRVDVIPVNLPGEHGQRLPISRNTFAEVTGLSPGVTYYFKVFAVSHGRESKPLTAQQTTKLDAPTNLQFVNETDSTVLVRWTPPRAQITGYRLTVGLTRRGQPRQYNVGPSVSKYPLRNLQPASEYTVSLVAIKGNQESPKATGVFTTLQPGSSIPPYNTEVTETTIVITWTPAPRIGFKLGVRPSQGGEAPREVTSDSGSIVVSGLTPGVEYVYTIQVLRDGQERDAPIVNKVVTPLSPPTNLHLEANPDTGVLTVSWERSTTPDITGYRITTTPTNGQQGNSLEEVVHADQSSCTFDNLSPGLEYNVSVYTVKDDKESVPISDTIIPAVPPPTDLRFTNIGPDTMRVTWAPPPSIDLTNFLVRYSPVKNEEDVAELSISPSDNAVVLTNLLPGTEYVVSVSSVYEQHESTPLRGRQKTGLDSPTGIDFSDITANSFTVHWIAPRATITGYRIRHHPEHFSGRPREDRVPHSRNSITLTNLTPGTEYVVSIVALNGREESPLLIGQQSTVSDVPRDLEVVAATPTSLLISWDAPAVTVRYYRITYGETGGNSPVQEFTVPGSKSTATISGLKPGVDYTITVYAVTGRGDSPASSKPISINYRTEIDKPSQMQVTDVQDNSISVKWLPSSSPVTGYRVTTTPKNGPGPTKTKTAGPDQTEMTIEGLQPTVEYVVSVYAQNPSGESQPLVQTAVTNIDRPKGLAFTDVDVDSIKIAWESPQGQVSRYRVTYSSPEDGIHELFPAPDGEEDTAELQGLRPGSEYTVSVVALHDDMESQPLIGTQSTAIPAPTDLKFTQVTPTSLSAQWTPPNVQLTGYRVRVTPKEKTGPMKEINLAPDSSSVVVSGLMVATKYEVSVYALKDTLTSRPAQGVVTTLENVSPPRRARVTDATETTITISWRTKTETITGFQVDAVPANGQTPIQRTIKPDVRSYTITGLQPGTDYKIYLYTLNDNARSSPVVIDASTAIDAPSNLRFLATTPNSLLVSWQPPRARITGYIIKYEKPGSPPREVVPRPRPGVTEATITGLEPGTEYTIYVIALKNNQKSEPLIGRKKTGQEALSQTTISWAPFQDTSEYIISCHPVGTDEEPLQSTKA

SEQ ID NO: 267194 - DNA, 6555 bp, Artificial Sequence
  derived and/or modified sequence
atgctgagaggccccggccccggcctgctgctgctggccgtgcagtgcctgggcaccgccgtgcccagcaccggcgccagcaagagcaagagacaggcccagcagatggtgcagccccagagccccgtggccgtgagccagagcaagcccggctgctacgacaacggcaagcactaccagatcaaccagcagtgggagagaacctacctgggcaacgccctggtgtgcacctgctacggcggcagcagaggcttcaactgcgagagcaagcccgaggccgaggagacctgcttcgacaagtacaccggcaacacctacagagtgggcgacacctacgagagacccaaggacagcatgatctgggactgcacctgcatcggcgccggcagaggcagaatcagctgcaccatcgccaacagatgccacgagggcggccagagctacaagatcggcgacacctggagaagaccccacgagaccggcggctacatgctggagtgcgtgtgcctgggcaacggcaagggcgagtggacctgcaagcccatcgccgagaagtgcttcgaccacgccgccggcaccagctacgtggtgggcgagacctgggagaagccctaccagggctggatgatggtggactgcacctgcctgggcgagggcagcggcagaatcacctgcaccagcagaaacagatgcaacgaccaggacaccagaaccagctacagaatcggcgacacctggagcaagaaggacaacagaggcaacctgctgcagtgcatctgcaccggcaacggcagaggcgagtggaagtgcgagagacacaccagcgtgcagaccaccagcagcggcagcggccccttcaccgacgtgagagccgccgtgtaccagccccagccccacccccagccccccccctacggccactgcgtgaccgacagcggcgtggtgtacagcgtgggcatgcagtggctgaagacccagggcaacaagcagatgctgtgcacctgcctgggcaacggcgtgagctgccaggagaccgccgtgacccagacctacggcggcaacagcaacggcgagccctgcgtgctgcccttcacctacaacggcagaaccttctacagctgcaccaccgagggcagacaggacggccacctgtggtgcagcaccaccagcaactacgagcaggaccagaagtacagcttctgcaccgaccacaccgtgctggtgcagaccagaggcggcaacagcaacggcgccctgtgccacttccccttcctgtacaacaaccacaactacaccgactgcaccagcgagggcagaagagacaacatgaagtggtgcggcaccacccagaactacgacgccgaccagaagttcggcttctgccccatggccgcccacgaggagatctgcaccaccaacgagggcgtgatgtacagaatcggcgaccagtgggacaagcagcacgacatgggccacatgatgagatgcacctgcgtgggcaacggcagaggcgagtggacctgcatcgcctacagccagctgagagaccagtgcatcgtggacgacatcacctacaacgtgaacgacaccttccacaagagacacgaggagggccacatgctgaactgcacctgcttcggccagggcagaggcagatggaagtgcgaccccgtggaccagtgccaggacagcgagaccggcaccttctaccagatcggcgacagctgggagaagtacgtgcacggcgtgagataccagtgctactgctacggcagaggcatcggcgagtggcactgccagcccctgcagacctaccccagcagcagcggccccgtggaggtgttcatcaccgagacccccagccagcccaacagccaccccatccagtggaacgccccccagcccagccacatcagcaagtacatcctgagatggagacccaagaacagcgtgggcagatggaaggaggccaccatccccggccacctgaacagctacaccatcaagggcctgaagcccggcgtggtgtacgagggccagctgatcagcatccagcagtacggccaccaggaggtgaccagattcgacttcaccaccaccagcaccagcacccccgtgaccagcaacaccgtgaccggcgagaccacccccttcagccccctggtggccaccagcgagagcgtgaccgagatcaccgccagcagcttcgtggtgagctgggtgagcgccagcgacaccgtgagcggcttcagagtggagtacgagctgagcgaggagggcgacgagccccagtacctggacctgcccagcaccgccaccagcgtgaacatccccgacctgctgcccggcagaaagtacatcgtgaacgtgtaccagatcagcgaggacggcgagcagagcctgatcctgagcaccagccagaccaccgcccccgacgccccccccgacaccaccgtggaccaggtggacgacaccagcatcgtggtgagatggagcagaccccaggcccccatcaccggctacagaatcgtgtacagccccagcgtggagggcagcagcaccgagctgaacctgcccgagaccgccaacagcgtgaccctgagcgacctgcagcccggcgtgcagtacaacatcaccatctacgccgtggaggagaaccaggagagcacccccgtggtgatccagcaggagaccaccggcacccccagaagcgacaccgtgcccagccccagagacctgcagttcgtggaggtgaccgacgtgaaggtgaccatcatgtggaccccccccgagagcgccgtgaccggctacagagtggacgtgatccccgtgaacctgcccggcgagcacggccagagactgcccatcagcagaaacaccttcgccgaggtgaccggcctgagccccggcgtgacctactacttcaaggtgttcgccgtgagccacggcagagagagcaagcccctgaccgcccagcagaccaccaagctggacgcccccaccaacctgcagttcgtgaacgagaccgacagcaccgtgctggtgagatggaccccccccagagcccagatcaccggctacagactgaccgtgggcctgaccagaagaggccagcccagacagtacaacgtgggccccagcgtgagcaagtaccccctgagaaacctgcagcccgccagcgagtacaccgtgagcctggtggccatcaagggcaaccaggagagccccaaggccaccggcgtgttcaccaccctgcagcccggcagcagcatccccccctacaacaccgaggtgaccgagaccaccatcgtgatcacctggacccccgcccccagaatcggcttcaagctgggcgtgagacccagccagggcggcgaggcccccagagaggtgaccagcgacagcggcagcatcgtggtgagcggcctgacccccggcgtggagtacgtgtacaccatccaggtgctgagagacggccaggagagagacgcccccatcgtgaacaaggtggtgacccccctgagcccccccaccaacctgcacctggaggccaaccccgacaccggcgtgctgaccgtgagctgggagagaagcaccacccccgacatcaccggctacagaatcaccaccacccccaccaacggccagcagggcaacagcctggaggaggtggtgcacgccgaccagagcagctgcaccttcgacaacctgagccccggcctggagtacaacgtgagcgtgtacaccgtgaaggacgacaaggagagcgtgcccatcagcgacaccatcatccccgccgtgcccccccccaccgacctgagattcaccaacatcggccccgacaccatgagagtgacctgggcccccccccccagcatcgacctgaccaacttcctggtgagatacagccccgtgaagaacgaggaggacgtggccgagctgagcatcagccccagcgacaacgccgtggtgctgaccaacctgctgcccggcaccgagtacgtggtgagcgtgagcagcgtgtacgagcagcacgagagcacccccctgagaggcagacagaagaccggcctggacagccccaccggcatcgacttcagcgacatcaccgccaacagcttcaccgtgcactggatcgcccccagagccaccatcaccggctacagaatcagacaccaccccgagcacttcagcggcagacccagagaggacagagtgccccacagcagaaacagcatcaccctgaccaacctgacccccggcaccgagtacgtggtgagcatcgtggccctgaacggcagagaggagagccccctgctgatcggccagcagagcaccgtgagcgacgtgcccagagacctggaggtggtggccgccacccccaccagcctgctgatcagctgggacgcccccgccgtgaccgtgagatactacagaatcacctacggcgagaccggcggcaacagccccgtgcaggagttcaccgtgcccggcagcaagagcaccgccaccatcagcggcctgaagcccggcgtggactacaccatcaccgtgtacgccgtgaccggcagaggcgacagccccgccagcagcaagcccatcagcatcaactacagaaccgagatcgacaagcccagccagatgcaggtgaccgacgtgcaggacaacagcatcagcgtgaagtggctgcccagcagcagccccgtgaccggctacagagtgaccaccacccccaagaacggccccggccccaccaagaccaagaccgccggccccgaccagaccgagatgaccatcgagggcctgcagcccaccgtggagtacgtggtgagcgtgtacgcccagaaccccagcggcgagagccagcccctggtgcagaccgccgtgaccaacatcgacagacccaagggcctggccttcaccgacgtggacgtggacagcatcaagatcgcctgggagagcccccagggccaggtgagcagatacagagtgacctacagcagccccgaggacggcatccacgagctgttccccgcccccgacggcgaggaggacaccgccgagctgcagggcctgagacccggcagcgagtacaccgtgagcgtggtggccctgcacgacgacatggagagccagcccctgatcggcacccagagcaccgccatccccgcccccaccgacctgaagttcacccaggtgacccccaccagcctgagcgcccagtggaccccccccaacgtgcagctgaccggctacagagtgagagtgacccccaaggagaagaccggccccatgaaggagatcaacctggcccccgacagcagcagcgtggtggtgagcggcctgatggtggccaccaagtacgaggtgagcgtgtacgccctgaaggacaccctgaccagcagacccgcccagggcgtggtgaccaccctggagaacgtgagcccccccagaagagccagagtgaccgacgccaccgagaccaccatcaccatcagctggagaaccaagaccgagaccatcaccggcttccaggtggacgccgtgcccgccaacggccagacccccatccagagaaccatcaagcccgacgtgagaagctacaccatcaccggcctgcagcccggcaccgactacaagatctacctgtacaccctgaacgacaacgccagaagcagccccgtggtgatcgacgccagcaccgccatcgacgcccccagcaacctgagattcctggccaccacccccaacagcctgctggtgagctggcagccccccagagccagaatcaccggctacatcatcaagtacgagaagcccggcagcccccccagagaggtggtgcccagacccagacccggcgtgaccgaggccaccatcaccggcctggagcccggcaccgagtacaccatctacgtgatcgccctgaagaacaaccagaagagcgagcccctgatcggcagaaagaagaccgtgaacgagggcctgaaccagcccaccgacgacagctgcttcgacccctacaccgtgagccactacgccgtgggcgacgagtgggagagaatgagcgagagcggcttcaagctgctgtgccagtgcctgggcttcggcagcggccacttcagatgcgacagcagcagatggtgccacgacaacggcgtgaactacaagatcggcgagaagtgggacagacagggcgagaacggccagatgatgagctgcacctgcctgggcaacggcaagggcgagttcaagtgcgacccccacgaggccacctgctacgacgacggcaagacctaccacgtgggcgagcagtggcagaaggagtacctgggcgccatctgcagctgcacctgcttcggcggccagagaggctggagatgcgacaactgcagaagacccggcggcgagcccagccccgagggcaccaccggccagagctacaaccagtacagccagagataccaccagagaaccaacaccaacgtgaactgccccatcgagtgcttcatgcccctggacgtgcaggccgacagagaggacagcagagagtag

SEQ ID NO: 267195 - DNA, 6636 bp, Artificial Sequence
  derived and/or modified sequence
atgctgagaggccccggccccggcctgctgctgctggccgtgcagtgcctgggcaccgccgtgcccagcaccggcgccagcaagagcaagagacaggcccagcagatggtgcagccccagagccccgtggccgtgagccagagcaagcccggctgctacgacaacggcaagcactaccagatcaaccagcagtgggagagaacctacctgggcaacgccctggtgtgcacctgctacggcggcagcagaggcttcaactgcgagagcaagcccgaggccgaggagacctgcttcgacaagtacaccggcaacacctacagagtgggcgacacctacgagagacccaaggacagcatgatctgggactgcacctgcatcggcgccggcagaggcagaatcagctgcaccatcgccaacagatgccacgagggcggccagagctacaagatcggcgacacctggagaagaccccacgagaccggcggctacatgctggagtgcgtgtgcctgggcaacggcaagggcgagtggacctgcaagcccatcgccgagaagtgcttcgaccacgccgccggcaccagctacgtggtgggcgagacctgggagaagccctaccagggctggatgatggtggactgcacctgcctgggcgagggcagcggcagaatcacctgcaccagcagaaacagatgcaacgaccaggacaccagaaccagctacagaatcggcgacacctggagcaagaaggacaacagaggcaacctgctgcagtgcatctgcaccggcaacggcagaggcgagtggaagtgcgagagacacaccagcgtgcagaccaccagcagcggcagcggccccttcaccgacgtgagagccgccgtgtaccagccccagccccacccccagccccccccctacggccactgcgtgaccgacagcggcgtggtgtacagcgtgggcatgcagtggctgaagacccagggcaacaagcagatgctgtgcacctgcctgggcaacggcgtgagctgccaggagaccgccgtgacccagacctacggcggcaacagcaacggcgagccctgcgtgctgcccttcacctacaacggcagaaccttctacagctgcaccaccgagggcagacaggacggccacctgtggtgcagcaccaccagcaactacgagcaggaccagaagtacagcttctgcaccgaccacaccgtgctggtgcagaccagaggcggcaacagcaacggcgccctgtgccacttccccttcctgtacaacaaccacaactacaccgactgcaccagcgagggcagaagagacaacatgaagtggtgcggcaccacccagaactacgacgccgaccagaagttcggcttctgccccatggccgcccacgaggagatctgcaccaccaacgagggcgtgatgtacagaatcggcgaccagtgggacaagcagcacgacatgggccacatgatgagatgcacctgcgtgggcaacggcagaggcgagtggacctgcatcgcctacagccagctgagagaccagtgcatcgtggacgacatcacctacaacgtgaacgacaccttccacaagagacacgaggagggccacatgctgaactgcacctgcttcggccagggcagaggcagatggaagtgcgaccccgtggaccagtgccaggacagcgagaccggcaccttctaccagatcggcgacagctgggagaagtacgtgcacggcgtgagataccagtgctactgctacggcagaggcatcggcgagtggcactgccagcccctgcagacctaccccagcagcagcggccccgtggaggtgttcatcaccgagacccccagccagcccaacagccaccccatccagtggaacgccccccagcccagccacatcagcaagtacatcctgagatggagacccaagaacagcgtgggcagatggaaggaggccaccatccccggccacctgaacagctacaccatcaagggcctgaagcccggcgtggtgtacgagggccagctgatcagcatccagcagtacggccaccaggaggtgaccagattcgacttcaccaccaccagcaccagcacccccgtgaccagcaacaccgtgaccggcgagaccacccccttcagccccctggtggccaccagcgagagcgtgaccgagatcaccgccagcagcttcgtggtgagctgggtgagcgccagcgacaccgtgagcggcttcagagtggagtacgagctgagcgaggagggcgacgagccccagtacctggacctgcccagcaccgccaccagcgtgaacatccccgacctgctgcccggcagaaagtacatcgtgaacgtgtaccagatcagcgaggacggcgagcagagcctgatcctgagcaccagccagaccaccgcccccgacgccccccccgacaccaccgtggaccaggtggacgacaccagcatcgtggtgagatggagcagaccccaggcccccatcaccggctacagaatcgtgtacagccccagcgtggagggcagcagcaccgagctgaacctgcccgagaccgccaacagcgtgaccctgagcgacctgcagcccggcgtgcagtacaacatcaccatctacgccgtggaggagaaccaggagagcacccccgtggtgatccagcaggagaccaccggcacccccagaagcgacaccgtgcccagccccagagacctgcagttcgtggaggtgaccgacgtgaaggtgaccatcatgtggaccccccccgagagcgccgtgaccggctacagagtggacgtgatccccgtgaacctgcccggcgagcacggccagagactgcccatcagcagaaacaccttcgccgaggtgaccggcctgagccccggcgtgacctactacttcaaggtgttcgccgtgagccacggcagagagagcaagcccctgaccgcccagcagaccaccaagctggacgcccccaccaacctgcagttcgtgaacgagaccgacagcaccgtgctggtgagatggaccccccccagagcccagatcaccggctacagactgaccgtgggcctgaccagaagaggccagcccagacagtacaacgtgggccccagcgtgagcaagtaccccctgagaaacctgcagcccgccagcgagtacaccgtgagcctggtggccatcaagggcaaccaggagagccccaaggccaccggcgtgttcaccaccctgcagcccggcagcagcatccccccctacaacaccgaggtgaccgagaccaccatcgtgatcacctggacccccgcccccagaatcggcttcaagctgggcgtgagacccagccagggcggcgaggcccccagagaggtgaccagcgacagcggcagcatcgtggtgagcggcctgacccccggcgtggagtacgtgtacaccatccaggtgctgagagacggccaggagagagacgcccccatcgtgaacaaggtggtgacccccctgagcccccccaccaacctgcacctggaggccaaccccgacaccggcgtgctgaccgtgagctgggagagaagcaccacccccgacatcaccggctacagaatcaccaccacccccaccaacggccagcagggcaacagcctggaggaggtggtgcacgccgaccagagcagctgcaccttcgacaacctgagccccggcctggagtacaacgtgagcgtgtacaccgtgaaggacgacaaggagagcgtgcccatcagcgacaccatcatccccgccgtgcccccccccaccgacctgagattcaccaacatcggccccgacaccatgagagtgacctgggcccccccccccagcatcgacctgaccaacttcctggtgagatacagccccgtgaagaacgaggaggacgtggccgagctgagcatcagccccagcgacaacgccgtggtgctgaccaacctgctgcccggcaccgagtacgtggtgagcgtgagcagcgtgtacgagcagcacgagagcacccccctgagaggcagacagaagaccggcctggacagccccaccggcatcgacttcagcgacatcaccgccaacagcttcaccgtgcactggatcgcccccagagccaccatcaccggctacagaatcagacaccaccccgagcacttcagcggcagacccagagaggacagagtgccccacagcagaaacagcatcaccctgaccaacctgacccccggcaccgagtacgtggtgagcatcgtggccctgaacggcagagaggagagccccctgctgatcggccagcagagcaccgtgagcgacgtgcccagagacctggaggtggtggccgccacccccaccagcctgctgatcagctgggacgcccccgccgtgaccgtgagatactacagaatcacctacggcgagaccggcggcaacagccccgtgcaggagttcaccgtgcccggcagcaagagcaccgccaccatcagcggcctgaagcccggcgtggactacaccatcaccgtgtacgccgtgaccggcagaggcgacagccccgccagcagcaagcccatcagcatcaactacagaaccgagatcgacaagcccagccagatgcaggtgaccgacgtgcaggacaacagcatcagcgtgaagtggctgcccagcagcagccccgtgaccggctacagagtgaccaccacccccaagaacggccccggccccaccaagaccaagaccgccggccccgaccagaccgagatgaccatcgagggcctgcagcccaccgtggagtacgtggtgagcgtgtacgcccagaaccccagcggcgagagccagcccctggtgcagaccgccgtgaccaacatcgacagacccaagggcctggccttcaccgacgtggacgtggacagcatcaagatcgcctgggagagcccccagggccaggtgagcagatacagagtgacctacagcagccccgaggacggcatccacgagctgttccccgcccccgacggcgaggaggacaccgccgagctgcagggcctgagacccggcagcgagtacaccgtgagcgtggtggccctgcacgacgacatggagagccagcccctgatcggcacccagagcaccgccatccccgcccccaccgacctgaagttcacccaggtgacccccaccagcctgagcgcccagtggaccccccccaacgtgcagctgaccggctacagagtgagagtgacccccaaggagaagaccggccccatgaaggagatcaacctggcccccgacagcagcagcgtggtggtgagcggcctgatggtggccaccaagtacgaggtgagcgtgtacgccctgaaggacaccctgaccagcagacccgcccagggcgtggtgaccaccctggagaacgtgagcccccccagaagagccagagtgaccgacgccaccgagaccaccatcaccatcagctggagaaccaagaccgagaccatcaccggcttccaggtggacgccgtgcccgccaacggccagacccccatccagagaaccatcaagcccgacgtgagaagctacaccatcaccggcctgcagcccggcaccgactacaagatctacctgtacaccctgaacgacaacgccagaagcagccccgtggtgatcgacgccagcaccgccatcgacgcccccagcaacctgagattcctggccaccacccccaacagcctgctggtgagctggcagccccccagagccagaatcaccggctacatcatcaagtacgagaagcccggcagcccccccagagaggtggtgcccagacccagacccggcgtgaccgaggccaccatcaccggcctggagcccggcaccgagtacaccatctacgtgatcgccctgaagaacaaccagaagagcgagcccctgatcggcagaaagaagaccggccaggaggccctgagccagaccaccatcagctgggcccccttccaggacaccagcgagtacatcatcagctgccaccccgtgggcaccgacgaggagcccctgcagttcagagtgcccggcaccagcaccagcgccaccctgaccggcctgaccagaggcgccacctacaacgtgatcgtggaggccctgaaggaccagcagagacacaaggtgagagaggaggtggtgaccgtgggcaacagcggctggtgccacgacaacggcgtgaactacaagatcggcgagaagtgggacagacagggcgagaacggccagatgatgagctgcacctgcctgggcaacggcaagggcgagttcaagtgcgacccccacgaggccacctgctacgacgacggcaagacctaccacgtgggcgagcagtggcagaaggagtacctgggcgccatctgcagctgcacctgcttcggcggccagagaggctggagatgcgacaactgcagaagacccggcggcgagcccagccccgagggcaccaccggccagagctacaaccagtacagccagagataccaccagagaaccaacaccaacgtgaactgccccatcgagtgcttcatgcccctggacgtgcaggccgacagagaggacagcagagagtag

SEQ ID NO: 267196 - DNA, 6096 bp, Artificial Sequence
  derived and/or modified sequence
atgctgagaggccccggccccggcctgctgctgctggccgtgcagtgcctgggcaccgccgtgcccagcaccggcgccagcaagagcaagagacaggcccagcagatggtgcagccccagagccccgtggccgtgagccagagcaagcccggctgctacgacaacggcaagcactaccagatcaaccagcagtgggagagaacctacctgggcaacgccctggtgtgcacctgctacggcggcagcagaggcttcaactgcgagagcaagcccgaggccgaggagacctgcttcgacaagtacaccggcaacacctacagagtgggcgacacctacgagagacccaaggacagcatgatctgggactgcacctgcatcggcgccggcagaggcagaatcagctgcaccatcgccaacagatgccacgagggcggccagagctacaagatcggcgacacctggagaagaccccacgagaccggcggctacatgctggagtgcgtgtgcctgggcaacggcaagggcgagtggacctgcaagcccatcgccgagaagtgcttcgaccacgccgccggcaccagctacgtggtgggcgagacctgggagaagccctaccagggctggatgatggtggactgcacctgcctgggcgagggcagcggcagaatcacctgcaccagcagaaacagatgcaacgaccaggacaccagaaccagctacagaatcggcgacacctggagcaagaaggacaacagaggcaacctgctgcagtgcatctgcaccggcaacggcagaggcgagtggaagtgcgagagacacaccagcgtgcagaccaccagcagcggcagcggccccttcaccgacgtgagagccgccgtgtaccagccccagccccacccccagccccccccctacggccactgcgtgaccgacagcggcgtggtgtacagcgtgggcatgcagtggctgaagacccagggcaacaagcagatgctgtgcacctgcctgggcaacggcgtgagctgccaggagaccgccgtgacccagacctacggcggcaacagcaacggcgagccctgcgtgctgcccttcacctacaacggcagaaccttctacagctgcaccaccgagggcagacaggacggccacctgtggtgcagcaccaccagcaactacgagcaggaccagaagtacagcttctgcaccgaccacaccgtgctggtgcagaccagaggcggcaacagcaacggcgccctgtgccacttccccttcctgtacaacaaccacaactacaccgactgcaccagcgagggcagaagagacaacatgaagtggtgcggcaccacccagaactacgacgccgaccagaagttcggcttctgccccatggccgcccacgaggagatctgcaccaccaacgagggcgtgatgtacagaatcggcgaccagtgggacaagcagcacgacatgggccacatgatgagatgcacctgcgtgggcaacggcagaggcgagtggacctgcatcgcctacagccagctgagagaccagtgcatcgtggacgacatcacctacaacgtgaacgacaccttccacaagagacacgaggagggccacatgctgaactgcacctgcttcggccagggcagaggcagatggaagtgcgaccccgtggaccagtgccaggacagcgagaccggcaccttctaccagatcggcgacagctgggagaagtacgtgcacggcgtgagataccagtgctactgctacggcagaggcatcggcgagtggcactgccagcccctgcagacctaccccagcagcagcggccccgtggaggtgttcatcaccgagacccccagccagcccaacagccaccccatccagtggaacgccccccagcccagccacatcagcaagtacatcctgagatggagacccaagaacagcgtgggcagatggaaggaggccaccatccccggccacctgaacagctacaccatcaagggcctgaagcccggcgtggtgtacgagggccagctgatcagcatccagcagtacggccaccaggaggtgaccagattcgacttcaccaccaccagcaccagcacccccgtgaccagcaacaccgtgaccggcgagaccacccccttcagccccctggtggccaccagcgagagcgtgaccgagatcaccgccagcagcttcgtggtgagctgggtgagcgccagcgacaccgtgagcggcttcagagtggagtacgagctgagcgaggagggcgacgagccccagtacctggacctgcccagcaccgccaccagcgtgaacatccccgacctgctgcccggcagaaagtacatcgtgaacgtgtaccagatcagcgaggacggcgagcagagcctgatcctgagcaccagccagaccaccgcccccgacgccccccccgacaccaccgtggaccaggtggacgacaccagcatcgtggtgagatggagcagaccccaggcccccatcaccggctacagaatcgtgtacagccccagcgtggagggcagcagcaccgagctgaacctgcccgagaccgccaacagcgtgaccctgagcgacctgcagcccggcgtgcagtacaacatcaccatctacgccgtggaggagaaccaggagagcacccccgtggtgatccagcaggagaccaccggcacccccagaagcgacaccgtgcccagccccagagacctgcagttcgtggaggtgaccgacgtgaaggtgaccatcatgtggaccccccccgagagcgccgtgaccggctacagagtggacgtgatccccgtgaacctgcccggcgagcacggccagagactgcccatcagcagaaacaccttcgccgaggtgaccggcctgagccccggcgtgacctactacttcaaggtgttcgccgtgagccacggcagagagagcaagcccctgaccgcccagcagaccaccaagctggacgcccccaccaacctgcagttcgtgaacgagaccgacagcaccgtgctggtgagatggaccccccccagagcccagatcaccggctacagactgaccgtgggcctgaccagaagaggccagcccagacagtacaacgtgggccccagcgtgagcaagtaccccctgagaaacctgcagcccgccagcgagtacaccgtgagcctggtggccatcaagggcaaccaggagagccccaaggccaccggcgtgttcaccaccctgcagcccggcagcagcatccccccctacaacaccgaggtgaccgagaccaccatcgtgatcacctggacccccgcccccagaatcggcttcaagctgggcgtgagacccagccagggcggcgaggcccccagagaggtgaccagcgacagcggcagcatcgtggtgagcggcctgacccccggcgtggagtacgtgtacaccatccaggtgctgagagacggccaggagagagacgcccccatcgtgaacaaggtggtgacccccctgagcccccccaccaacctgcacctggaggccaaccccgacaccggcgtgctgaccgtgagctgggagagaagcaccacccccgacatcaccggctacagaatcaccaccacccccaccaacggccagcagggcaacagcctggaggaggtggtgcacgccgaccagagcagctgcaccttcgacaacctgagccccggcctggagtacaacgtgagcgtgtacaccgtgaaggacgacaaggagagcgtgcccatcagcgacaccatcatccccgccgtgcccccccccaccgacctgagattcaccaacatcggccccgacaccatgagagtgacctgggcccccccccccagcatcgacctgaccaacttcctggtgagatacagccccgtgaagaacgaggaggacgtggccgagctgagcatcagccccagcgacaacgccgtggtgctgaccaacctgctgcccggcaccgagtacgtggtgagcgtgagcagcgtgtacgagcagcacgagagcacccccctgagaggcagacagaagaccggcctggacagccccaccggcatcgacttcagcgacatcaccgccaacagcttcaccgtgcactggatcgcccccagagccaccatcaccggctacagaatcagacaccaccccgagcacttcagcggcagacccagagaggacagagtgccccacagcagaaacagcatcaccctgaccaacctgacccccggcaccgagtacgtggtgagcatcgtggccctgaacggcagagaggagagccccctgctgatcggccagcagagcaccgtgagcgacgtgcccagagacctggaggtggtggccgccacccccaccagcctgctgatcagctgggacgcccccgccgtgaccgtgagatactacagaatcacctacggcgagaccggcggcaacagccccgtgcaggagttcaccgtgcccggcagcaagagcaccgccaccatcagcggcctgaagcccggcgtggactacaccatcaccgtgtacgccgtgaccggcagaggcgacagccccgccagcagcaagcccatcagcatcaactacagaaccgagatcgacaagcccagccagatgcaggtgaccgacgtgcaggacaacagcatcagcgtgaagtggctgcccagcagcagccccgtgaccggctacagagtgaccaccacccccaagaacggccccggccccaccaagaccaagaccgccggccccgaccagaccgagatgaccatcgagggcctgcagcccaccgtggagtacgtggtgagcgtgtacgcccagaaccccagcggcgagagccagcccctggtgcagaccgccgtgaccaacatcgacagacccaagggcctggccttcaccgacgtggacgtggacagcatcaagatcgcctgggagagcccccagggccaggtgagcagatacagagtgacctacagcagccccgaggacggcatccacgagctgttccccgcccccgacggcgaggaggacaccgccgagctgcagggcctgagacccggcagcgagtacaccgtgagcgtggtggccctgcacgacgacatggagagccagcccctgatcggcacccagagcaccgccatccccgcccccaccgacctgaagttcacccaggtgacccccaccagcctgagcgcccagtggaccccccccaacgtgcagctgaccggctacagagtgagagtgacccccaaggagaagaccggccccatgaaggagatcaacctggcccccgacagcagcagcgtggtggtgagcggcctgatggtggccaccaagtacgaggtgagcgtgtacgccctgaaggacaccctgaccagcagacccgcccagggcgtggtgaccaccctggagaacgtgagcccccccagaagagccagagtgaccgacgccaccgagaccaccatcaccatcagctggagaaccaagaccgagaccatcaccggcttccaggtggacgccgtgcccgccaacggccagacccccatccagagaaccatcaagcccgacgtgagaagctacaccatcaccggcctgcagcccggcaccgactacaagatctacctgtacaccctgaacgacaacgccagaagcagccccgtggtgatcgacgccagcaccgccatcgacgcccccagcaacctgagattcctggccaccacccccaacagcctgctggtgagctggcagccccccagagccagaatcaccggctacatcatcaagtacgagaagcccggcagcccccccagagaggtggtgcccagacccagacccggcgtgaccgaggccaccatcaccggcctggagcccggcaccgagtacaccatctacgtgatcgccctgaagaacaaccagaagagcgagcccctgatcggcagaaagaagaccggccaggaggccctgagccagaccaccatcagctgggcccccttccaggacaccagcgagtacatcatcagctgccaccccgtgggcaccgacgaggagcccctgcagagcaccaaggcctag

SEQ ID NO: 267197 - DNA, 6555 bp, Artificial Sequence
  derived and/or modified sequence
atgcttcgtggaccaggccccggcttactcctgctggctgtgcagtgccttggtacggcagtgccatccactggcgctagcaaatcaaaacgtcaagcccaacaaatggtccaaccgcaatcccctgtcgccgtgagtcagtcaaaaccaggctgttatgataacggtaagcattatcaaatcaaccagcagtgggagcggacgtaccttgggaacgctctcgtctgtacttgttacggagggtcgcgcggctttaactgtgagtctaaaccagaggccgaagagacttgtttcgacaaatacacaggaaacacctatcgtgtgggcgacacgtacgaacgacccaaagattctatgatttgggattgtacatgcattggggcgggaaggggtcgcatttcatgcacgatagctaaccgatgccacgagggagggcagtcatacaagatcggagacacttggcgacgccctcacgaaacaggcggctacatgcttgagtgcgtgtgccttggcaacggcaaaggagagtggacctgcaaaccaatcgctgagaaatgtttcgatcatgccgcgggcacatcgtacgtggtgggagaaacttgggaaaaaccataccaggggtggatgatggtcgattgtacctgcctgggggaaggcagcgggagaatcacctgtactagcagaaaccggtgcaatgaccaagacaccaggacctcctatagaatcggagatacatggtccaagaaagacaaccgggggaatctcctacagtgcatttgtactggtaacgggcgaggggaatggaagtgcgagaggcatacgtctgtccagaccacaagcagcgggtccggacccttcaccgacgtccgcgccgccgtttatcaaccgcagccccatcctcagccacctccatatggtcactgtgttaccgactctggcgtggtgtacagtgttggtatgcagtggctcaagacccagggaaataaacagatgctatgcacgtgcctgggcaacggggtctcctgtcaggagactgcggtgacacagacctacggtggaaattcgaatggggagccctgcgttctgccctttacttataacggaaggaccttttactcttgtacaaccgaaggccgccaggacggacacctttggtgttcgacaacttcaaactacgaacaggatcagaaatacagtttctgcacagaccatacagttcttgtgcagaccagaggcgggaacagcaacggtgccctctgtcactttccttttctttataacaaccacaattatactgactgtacatcagaggggaggcgggataatatgaaatggtgtggcacaacccagaactatgatgctgaccagaagtttggtttctgtccaatggcagctcacgaggagatttgcacaactaatgaaggggtgatgtatcggattggggatcagtgggataagcaacacgatatgggacatatgatgcgatgcacatgcgttgggaatgggcgaggcgagtggacttgtattgcctatagtcagctgagagatcagtgcattgtggatgacatcacgtataacgtcaatgacacattccataaaaggcacgaggaaggccacatgctcaattgtacatgcttcgggcagggccgtggaaggtggaagtgcgatccagtcgaccaatgtcaagattctgagacaggcacattctatcagataggagactcttgggaaaagtacgtccacggcgtcaggtatcagtgttactgttatgggagggggattggggaatggcactgtcagcctcttcagacctacccgtccagttcgggtccagtggaagtattcattaccgagacgccaagccagccaaactcccatccaattcagtggaatgcaccacaacctagccacataagcaagtacatcctcagatggcgaccgaagaacagcgtagggcgttggaaggaagctacaatcccaggtcacctgaactcatatactatcaagggtctgaagcccggagttgtttatgaagggcagttaatttccatccagcagtacggacaccaagaggtgaccagattcgattttaccaccacatcaacttccaccccagttacgagtaacactgtaactggcgagactaccccatttagtccactcgtagctacctcagaatctgtgaccgagatcaccgcaagctctttcgtggtcagctgggtcagcgccagcgatactgtgtctggctttcgggttgagtatgagttgtccgaggaaggcgacgaaccccagtacctcgacctcccttctacggcgacaagcgtaaacattcctgaccttttgcctggcaggaagtacatcgtgaacgtgtaccagattagcgaggacggcgagcagagcctgatcctgagcacttcgcagaccaccgcccctgatgcgcctccagatacaacagtggaccaggttgacgacacctccattgtggtgaggtggagccggccacaggcccctattaccggctataggatcgtgtattctccatctgtggaagggtcaagtaccgagttaaatctcccggagacagccaacagcgtgaccttgagcgacctgcagcctggagtgcagtacaatatcactatttatgccgttgaagaaaaccaggaatctactcctgtcgtgatacagcaggagactaccggtacaccccgcagtgatacagtgccgagcccgcgagatctgcaattcgttgaggtaacagacgtgaaagtgacaattatgtggactccaccagagagcgctgtcactggttatcgtgtcgacgttattcctgtaaatcttcccggcgagcatgggcaacgcctgcccatctccagaaacactttcgccgaggtgaccggtctcagccctggcgtgacctactatttcaaggtattcgcagttagccatgggcgcgaatccaagcctcttactgctcagcagactaccaagcttgatgccccaaccaacctccagtttgtgaacgagaccgactcgacagtcctagtaaggtggaccccgcctcgtgcccagatcacgggttacagacttacggtggggctgacacggcgcggtcagcctcggcaatacaacgtgggtccttcagttagcaagtatcccctgcggaacttgcagccagcctctgaatataccgtgtcgctggtggccataaaggggaaccaagagtccccgaaagcaactggagtgttcacaactctccaacccggctccagcattccaccatacaacacagaagtgaccgagacgaccatcgtaatcacatggactccagctcctcggatcggcttcaagctgggagtgcgtccctctcagggcggggaagccccccgcgaggtcacgagtgactccggcagcattgttgtttcgggcctaacacctggcgttgagtatgtttataccatccaggtgctgagggacggccaggaaagagacgcccccatcgtgaataaggtcgtcacgccgttgagtccaccgaccaacctccacctcgaggctaatccagatacaggggttcttactgtcagctgggagcgatcaacaaccccagacatcacgggttaccgtatcaccacgactcctacaaatggccagcagggaaactccctggaggaggttgtgcacgccgaccagtctagttgcacctttgataacttgagtcctggtttagagtataatgtatccgtgtatacagtgaaagacgacaaggagtcggtgcctataagtgatactatcatacccgcggtgccacctccaactgacctgcggttcactaatattggacctgataccatgagagtcacatgggcaccgcccccctccatagacctcactaactttttggtccgctattctccagtcaaaaacgaggaggacgtcgcggaactgagcatatcaccttcagacaacgccgtggtcctcactaatctactgccaggaacggagtacgtcgtgagcgtgagtagcgtgtatgagcagcatgagagcactccattgcggggcaggcaaaaaacaggcctggactcccccacaggcatcgacttctcggacattaccgcaaattcctttacggtgcactggatcgctccaagagctactatcacgggataccgcatacgccatcatcctgagcacttctcaggaaggcccagggaggaccgcgtgccacatagcagaaactccataactctgacaaatctgactcctggaacggagtacgtggtctcaatagttgccctgaatggcagagaggagtctcctctgctgatcggacaacaaagtaccgtctcagatgtgcccagggacctagaagtggtagcggcaacacccacaagcctgttaatatcctgggacgcacccgccgtcactgtgagatattaccgtataacatatggcgaaactggcggaaatagccccgtgcaggaatttacagtgcccggcagtaaaagtactgcgaccatctctggactcaaacccggcgtcgattacaccatcactgtgtatgcagttaccggccggggcgattcacctgctagttctaaaccaatctcaatcaattaccgaacggaaattgacaaaccttctcagatgcaggtcacagatgtgcaggacaacagcatatccgtgaagtggctgccttcatcaagcccagtcacagggtacagggtaaccaccacaccgaagaatggtcccgggcctacaaaaacaaaaacggccggcccggaccagaccgaaatgaccattgaaggacttcaacctactgtagagtatgtagtgtctgtttacgcacagaatccaagcggtgaatctcagccccttgtgcagaccgccgtgaccaacattgaccgacccaagggactggcctttactgacgtcgatgtagatagtatcaagatcgcctgggagtctcctcaagggcaggtatcccgatatcgagtgacctactcctctccagaggacggtatccatgagctcttccccgccccagacggcgaagaggataccgctgaattacaggggctccgtcctgggagcgagtacaccgttagtgtagtcgctctgcacgacgatatggaaagccagcctctgattggaacgcaaagcacagccatacccgctccaacagacttgaagttcacccaggtgactcccacttccctgtcagctcagtggaccccaccaaatgtgcagctgacagggtatagggttcgcgtgacccccaaagaaaaaaccggtccaatgaaagaaatcaaccttgcgcccgactccagctccgtcgtcgtgagtgggctgatggtggcaaccaagtacgaggtgtcagtgtatgccttgaaggacaccctgactagtcgccctgctcagggagtggttaccactctggagaatgtcagcccgccaagaagagcgcgggtcaccgacgcgacagaaacaacaattaccatctcctggagaacaaagacagagaccataacaggctttcaggtcgacgcagtcccagcgaacggtcagacccccatccagcgcaccataaaacctgacgttcggagttacactataaccggcctacagccagggacagactataaaatctatctctatactctgaacgataatgcgcgctcttcccctgtggtgatagatgcaagcacagcaatcgatgcgcccagtaatctacgcttcctcgccaccaccccgaactcgctactcgtatcctggcaacctcctcgtgcgcgcatcacaggttacataatcaaatacgaaaagcccggttcacctcctagagaggtggtacctcggccccggccaggggttaccgaggccaccattaccggcctggagcctggaacagaatatacaatatacgtgatcgcactgaaaaataatcagaaatcagaaccattaattggcaggaaaaagaccgtgaacgaaggtcttaaccagccaaccgatgacagttgcttcgatccgtacacagtgagccattatgccgtgggagacgagtgggagcgaatgtctgagagtggattcaaactgctgtgtcagtgcctaggcttcggctctggacactttcgctgcgacagctctcgctggtgtcacgacaatggtgtcaactacaaaattggggagaagtgggatcgtcagggtgagaatggtcagatgatgtcctgtacttgcctgggcaacggaaaaggtgagtttaaatgtgacccccacgaggcaacatgctatgatgatggtaagacatatcatgtgggcgagcagtggcagaaagagtatctgggtgctatatgtagttgtacctgcttcggaggacagcgcgggtggcggtgcgataattgtagaaggcctggtggcgaaccatcaccggaagggactactggtcagtcgtataatcagtactcgcaaagatatcaccaacgaacgaatacaaacgtcaattgtccgatcgaatgcttcatgccccttgatgtgcaggccgatagggaggattcacgcgagtag

SEQ ID NO: 267198 - DNA, 6636 bp, Artificial Sequence
  derived and/or modified sequence
atgcttcgcggacccggaccaggactgttgctcttggcggtgcagtgcctgggcaccgcggtgccttctacgggcgcaagcaagtccaagcgtcaggctcaacagatggttcaaccacagtcacccgttgccgtaagtcagtcgaagccagggtgttacgacaatggaaaacactatcagataaaccaacagtgggagcgcacttaccttggtaatgccctcgtatgtacctgttatggtggcagcaggggattcaactgtgaatccaagcccgaggccgaggaaacgtgcttcgataagtacaccgggaatacatatagagtgggggacacatatgagcgaccaaaagacagcatgatctgggattgtacctgcataggggccggaagagggaggatcagttgcacaattgccaataggtgccacgaaggaggtcagagctataagattggagatacatggcggcggccccatgaaaccggaggctatatgttggagtgcgtgtgtcttggtaacggcaagggagagtggacttgtaagccgatcgccgaaaagtgtttcgatcatgctgctggcacgagctacgtcgtcggagaaacatgggagaagccctaccaaggatggatgatggttgactgcacgtgcttaggcgaaggaagtgggaggatcacatgtaccagtagaaacaggtgcaatgaccaagatacccgcacctcctaccggattggggatacatggtccaagaaggacaataggggcaatttgttgcagtgtatatgcacggggaacgggaggggcgaatggaaatgcgaaaggcacacgtctgtgcagacgacgagctccggttccggaccgtttaccgatgtgcgtgctgccgtgtatcaaccacagcctcacccgcagccgcccccctatggccactgtgtgaccgatagtggtgtggtgtactcggtaggtatgcagtggttgaagacacagggcaacaaacagatgctctgcacctgtcttgggaacggggtgtcttgccaggagactgccgtcacacagacttacggagggaacagcaacggtgagccatgcgtgctcccatttacttacaacggcaggacattttactcttgtactaccgagggtcggcaggacggccatctctggtgcagcaccacatctaactatgaacaagatcagaagtattccttctgtactgatcatacagtactggtacagaccagaggcggcaatagcaatggcgctctctgccatttccctttcctgtacaacaaccacaattacaccgattgcacatcggaaggacgaagagacaacatgaaatggtgtggcacaacccagaattacgatgcggaccagaaatttggtttttgccccatggccgcccatgaagagatatgcaccacaaacgaaggcgtgatgtaccgcatcggggaccagtgggataaacagcacgacatgggacatatgatgaggtgcacttgcgtgggtaacggacgtggcgagtggacgtgcatcgcatattctcagcttagagaccagtgcatcgtcgatgatattacttacaatgtaaacgatacctttcataaacggcacgaagagggacacatgctaaattgcacttgttttggacagggtcgtggccgatggaagtgtgatcctgtcgaccagtgccaagacagcgaaactgggacgttttatcaaatcggcgattcctgggagaaatacgttcacggggttcgttaccaatgttattgttacggacgaggaataggtgaatggcactgccagcctttacagacgtatcccagctcaagcggcccagtggaggtcttcattaccgagacacctagccagccgaactctcaccctatccaatggaatgcaccacagccatcccacatatcaaagtacatcctgagatggcgaccaaagaactctgtcggacggtggaaagaggccaccatcccagggcatctgaatagctacactatcaaaggccttaaacccggagttgtttacgagggtcaactgattagtattcagcagtacggtcaccaggaggtaaccaggttcgactttaccaccactagcacctctacgccagtgacttcaaacactgtcactggagagaccacaccttttagtcctcttgtcgctacttccgaatccgtaacagagatcacagctagctcgttcgttgtgagctgggtaagcgcatccgacaccgtcagcggctttcgagtggaatacgagctaagtgaagagggggacgagcctcagtacttagacctgccttccactgccacgtccgtgaatattcctgacttgttgcccggtaggaagtacatcgtaaacgtatatcagatttccgaggatggcgaacagtccttaatcctctccactagccagaccaccgcccccgacgcacccccagacacaacagtggaccaggtcgacgatacctcgatcgtggtccggtggtcccggccgcaggcacccatcaccggctatagaattgtttattctcccagcgttgagggctcatcaacggaactgaatctgccagaaaccgccaatagtgtgaccctgtccgatctccagccaggggtgcagtacaacattactatttacgccgttgaagagaaccaggagagcactcccgttgtcatccagcaagagaccacgggaacccctaggagcgacaccgtccccagtccacgggacctgcagttcgtcgaggtcacagacgtcaaggtcaccattatgtggacaccaccagagtcagccgtgactggctaccgagttgacgtcattccagtcaatttgccaggtgagcacggccagcgcctgccaatttccaggaacactttcgccgaagtcactgggctaagcccaggcgttacatattattttaaagtatttgccgtgagtcacgggagagagtccaagcctctgaccgcccaacaaaccactaagctggatgcgcctactaatctgcagttcgtcaatgaaaccgactcgaccgtgctggtgcgatggaccccccccagggcacagatcacggggtacagactgaccgtcgggctcacccgcagaggccagcccaggcaatacaatgtcgggccttccgtgtccaagtaccctttaagaaacttgcagcccgccagcgagtacactgtgtcactggtggccatcaagggcaaccaggaatcaccaaaggcaacgggagtcttcacaaccttgcagccaggttccagcattcccccctataatacggaagtgaccgagaccaccattgtgattacatggacacctgccccacgcatcggtttcaaactcggagtgagaccttcacagggtggggaggcacctagggaggtgacatcagacagtggcagcattgtggtgtccggactgacacccggggtcgaatacgtctacaccatccaggtgctgcgcgatgggcaggagagagatgcacccattgtcaataaggttgtaactccgctgagcccacccaccaacttgcatcttgaagctaatccagacacaggggtgctcacagtgagttgggagagaagtactacacctgacataaccggatatagaattacaaccactccgacaaacggtcaacagggtaatagcctcgaggaggttgtgcacgctgatcagtcaagctgcacgttcgacaacctgagtcccgggctggagtataacgtctccgtgtatacagtcaaggatgataaagagagtgtgcccatatccgataccatcataccagctgtcccaccaccgaccgacttgaggttcactaacatcgggcccgacaccatgagagtgacttgggcgccccctcccagtattgaccttactaattttctagtgcgctactcgcccgtaaagaacgaagaggatgttgctgagctgagcataagtcccagcgacaacgcagttgtcctgacgaatctgctgcccggtaccgagtatgttgtgagtgtgtcatctgtctacgagcaacacgaaagcacacccctcagaggacgccaaaaaacaggcctggatagccctaccggcatcgatttctccgatattaccgctaattcgtttaccgtgcactggattgcaccccgggccaccataacagggtatagaattcgtcatcatccggagcacttttctggacggcctagggaggaccgcgttccccattcccgcaattccataactcttaccaacctgacacccggtactgaatatgttgtctcaattgtggcactcaatggccgagaagaaagtccgttacttatcggccaacagtccacagtctcggacgttcctcgtgacctagaggtggtggccgcaacacccacatctctcctaatttcctgggacgcccccgcagtcaccgtccggtattaccgcatcacctacggggaaaccggtggcaattcacctgtgcaagaatttaccgtacccggaagtaagagcaccgctacaatatccgggctaaaaccaggggtcgactatacaatcaccgtctatgctgtaaccggaagaggtgattccccggcctcctccaagccgatctctatcaattataggactgagattgacaagccttctcagatgcaggtgacagacgtgcaggataatagtatctccgtcaagtggttaccatctagttcaccagttaccggatatcgagtgaccacaactcccaaaaacggtccaggacctacaaaaacaaagacagccggtccggaccagactgaaatgactattgaaggattgcaacctactgtggagtacgtggtgtctgtatacgcccagaacccgtctggagagagccagccgctcgtgcagactgctgttacaaacatcgataggccgaagggtttggcattcaccgacgtcgacgttgacagcatcaaaatagcttgggaatcacctcaaggccaagtttcccgttacagggttacctactcatctccagaggacggaatccacgagctgtttcccgcgcccgacggagaggaagacaccgctgagctgcagggcctccgccccgggtccgaatatacggtgtctgtggtggcactccacgacgatatggaatcacaacctctgatcggcacccagagcaccgccatcccagctcctaccgatctcaaattcactcaggttactccaacttccctttccgcccagtggaccccaccaaatgtccagctcaccggctatagggtgagggtgaccccgaaagagaagacagggccaatgaaggagatcaatctcgctcctgacagttcatccgtggttgtaagcggcttgatggtcgcaactaagtacgaagtttccgtctacgcactgaaagatacattaacatcgcgccctgcccagggagttgtgacaactcttgagaacgtttctccgccgcggagagcaagagtgacagacgctaccgaaactacaatcacgattagctggaggaccaagacagaaacgataacaggattccaggttgacgctgtgcccgcgaacggtcagacccccatccagcgtacaattaaaccggatgtgagatcttacaccatcacaggtttgcagccaggtacggattacaaaatttatctgtacacattgaatgacaatgcccgttctagccctgtggtgattgatgctagcacagccatcgatgcaccttccaatttgcggtttctcgctactaccccaaatagcctgctggtgtcatggcagcccccgagagctcggattacaggatacattattaagtacgaaaagcctggtagcccacccagggaagtggtaccccgcccccgacctggcgtcaccgaggctactattaccgggctggagcctgggacagagtataccatatacgtgatcgctcttaagaacaaccaaaaatcggagccgctcatcggcagaaaaaagaccggccaggaggccctctcacagacaactatctcctgggctcccttccaggacacatcagagtacatcatctcttgccaccccgtcggcacagacgaggagcctctccaatttcgcgttcctggaacttccaccagtgctacactgacaggcctgacacgtggcgcgacctataacgttattgtcgaagccctcaaggaccagcagcgacacaaggtgcgggaggaagttgtgacagtgggtaactcgggatggtgtcacgataacggcgttaactataaaatcggcgaaaaatgggataggcaaggtgaaaatgggcagatgatgagttgcacgtgtctggggaatgggaagggagaattcaaatgcgacccacatgaagcaacatgttacgacgacggcaagacttaccacgtgggtgaacagtggcaaaaggagtacttgggagccatctgcagttgtacttgcttcggtggtcagaggggctggcgctgcgacaattgtaggagaccagggggggaaccctctccagaggggactacaggacagagctataatcagtacagtcagcgctaccatcagcgcaccaacacaaatgtcaactgtcctatagagtgttttatgcccctggacgtgcaggccgatagggaggactcgcgagagtag

SEQ ID NO: 267199 - DNA, 6096 bp, Artificial Sequence
  derived and/or modified sequence
atgcttagaggaccgggacccggactactgctgctcgccgtccagtgtctcggaacggccgttccaagtacaggagcctccaagtcaaagcgtcaggctcaacagatggtgcagccccagtcccctgtggccgtgtcacagtccaaaccaggctgctacgataatggcaaacattaccaaattaaccagcagtgggaaaggacctatctggggaacgccctagtgtgcacatgctatggcggcagccgtggattcaactgcgaaagcaagccagaggccgaggagacctgctttgacaagtacacaggaaatacttacagggtcggtgatacctacgagagaccgaaggatagcatgatctgggattgcacttgtattggcgccggcaggggacggatttcttgcaccattgccaacaggtgccacgagggtggccagtcctacaagattggagacacatggcggaggccccatgagacagggggctacatgttagagtgcgtgtgtctgggcaatggaaagggcgaatggacctgtaagccgattgcggagaagtgctttgatcatgccgccggcactagctacgtagttggtgagacctgggagaagccttatcagggctggatgatggttgactgcacctgtctgggggaaggttcaggtagaatcacctgtacttctagaaatagatgcaacgaccaggacacccgaaccagctaccggattggagatacttggtccaaaaaggacaatagaggcaatctcctacagtgtatctgcactgggaatggcaggggcgagtggaagtgcgaacgtcatacatccgtgcagactacgtccagcggcagcggtccattcaccgatgttagggccgcagtctatcagccgcaaccacaccctcaaccaccgccgtatggtcattgtgtgacagactcaggggttgtgtattccgtaggcatgcagtggctaaaaacccaggggaacaaacagatgttgtgcacctgtctgggaaacggggtgtcctgtcaggaaacggccgtgacacagacctacggtggcaactccaacggtgaaccatgtgtccttcctttcacctataacggacggacgttctatagctgcacaactgaagggcgccaggatggccacctttggtgttctaccacatcaaattacgagcaagaccaaaagtatagcttctgcacggaccacactgtgttggtgcaaacacggggcggcaattctaatggggccctctgtcatttccccttcttgtataacaatcataactatacagactgtacatcggaaggtcggagggacaacatgaagtggtgtggcactacacagaattatgatgccgatcagaagttcggcttctgccctatggcagcccatgaggaaatctgcactactaacgagggcgtcatgtatcgtatcggagaccagtgggataagcagcacgatatgggccatatgatgagatgcacctgtgtggggaatggcaggggcgagtggacctgtatcgcctactcacagttgagggaccagtgcattgttgacgatattacatacaatgtcaacgatactttccataagcggcacgaagaagggcacatgttaaactgcacttgtttcggacaaggaaggggcagatggaaatgtgatccagtcgaccagtgccaggatagcgagacagggaccttttatcagataggggattcctgggagaagtatgtgcacggggtgagatatcagtgttattgctatggtcggggcataggtgagtggcactgccagcccctgcaaacctatccctcaagttccggaccagtggaagtattcatcaccgagacaccttcgcaacctaacagtcatccaattcagtggaacgcaccccaaccgagccatatctctaaatatatcctgagatggcgacccaagaattctgtcggtaggtggaaggaagcaactatccctggtcacctcaattcctataccataaaggggcttaagcctggggtggtctatgaagggcaactgatctccattcagcagtacgggcatcaggaggtcacccgattcgactttaccacgacatccacctccacacccgtgacgtcaaacaccgttacaggggaaaccacgccatttagccctttggtggcaacatctgagtccgtcaccgaaatcaccgcgagttcctttgtggtgtcttgggtatcggcctccgacaccgtctctggcttccgagtggaatatgagctgtcagaggagggagatgaaccacagtatctcgatctgccctccacagctacctcagtgaatatcccggatttactgcctggcaggaagtacattgtgaatgtgtaccagatcagcgaggacggtgaacaatcgctgatcctgagtacatcccagaccaccgctccggacgcccctccagatacaacagttgaccaggtagacgataccagcatcgtagttagatggagccggcctcaggctcccatcactgggtacagaattgtctatagcccatcggtcgaaggcagctctactgagctaaacctgcccgaaactgcaaattccgtgaccctgtccgacctgcaaccgggcgtacagtacaacatcactatatatgccgtagaggaaaatcaggaaagtacacccgtcgtgatacagcaagaaacaaccggcactcccagatccgacacagtacctagtccacgtgatttacaattcgtggaggtgacagatgtgaaggtaactataatgtggaccccacccgagtcggccgtgacaggatatcgcgtggacgtaatacccgtgaatctccctggggaacatggacagcgactgcctatctcaaggaacaccttcgcagaagtgacaggtctgtcaccaggggtaacgtattactttaaagtgttcgccgtgagtcacggtcgcgagtcgaagccactgacggcccagcaaaccaccaaactagatgcacccacaaatctgcagtttgtgaacgagaccgacagcaccgtacttgttcggtggactccaccaagggcccagattaccggatatcgactaactgttggtcttacacgccggggacagccacgccagtataacgtgggaccttcagtttccaagtatcctttgcgcaacctgcaacccgctagcgaatatactgtgtccctggtggcgattaagggtaatcaggagagcccgaaggctactggggtgtttaccactctccagccggggtcctccatccccccttacaatactgaggtgactgagacaacaatcgtgatcacctggactcctgccccacgcataggcttcaagcttggagtgagaccatctcagggaggcgaggctcccagggaggttacttctgattcaggaagcatcgtcgttagcggactgacacccggagtggagtacgtgtacacaatccaggttttgagagatggacaggagagagacgctccaattgtgaataaggtggtgactcccctcagcccacccacaaacctacacctggaggccaaccccgacacaggtgtgttgaccgtgagttgggaacgaagcaccacaccagacatcacggggtatagaataacaaccactcctaccaacgggcagcaaggtaacagcttggaggaggtggttcacgctgaccagtcttcatgtacattcgataacctttctcctgggttggagtataatgttagtgtgtacacagtgaaagatgataaagagtccgtaccaatttcggatactattatccctgcagtgcctcctccaaccgacttgcgcttcacaaatatcggcccagacactatgagggttacgtgggctcctcctccttcaatcgatctgaccaattttctggtgaggtactccccagttaagaatgaggaggacgtggcggagctctcgatcagcccctctgacaacgctgtggtgctcactaacctgctgcctggaaccgaatacgtagtgagcgtaagctcagtctatgaacagcatgaatccacgccactgaggggaagacagaaaaccgggttagattcacccactggaatagactttagtgacataaccgcaaactcttttaccgtgcattggatagcgccccgggctaccataactggttatagaataagacaccacccggagcacttctccggtcgtcctcgcgaggatcgagtgccacactccaggaactcaatcacgttgacaaatctgactccaggtaccgaatatgtggtttccatagttgcccttaatgggcgggaagaatcccccctgctgatcggacagcagtcgaccgtgagcgatgtgcctcgggacttggaggtggtggccgctaccccaaccagccttctaatctcgtgggacgcacctgcagtgaccgtgaggtattacagaatcacctacggagaaacaggcgggaacagtccggtacaagaattcaccgtgcccggaagtaaaagtactgcaacaatttcaggattgaagcctggagttgactacaccatcacagtgtatgccgtgacaggccggggagatagcccggccagtagtaagccaattagcataaattataggaccgagatcgataaaccttcccagatgcaagtgacggatgttcaggacaactctataagtgtgaagtggttaccatccagctccccagtgaccggctatagggttaccaccactcctaagaacggtcctgggccaacgaagactaagacagcgggaccagatcaaactgagatgactattgaaggcctacagccgacagtggaatacgtggttagtgtctacgcccaaaacccatccggagagtctcaacctcttgttcagacagcagtgacaaacattgaccgccccaagggtctggccttcaccgacgtggatgtggactccatcaagattgcatgggagtctccgcagggacaagtgtcccgttacagggttacctactcaagcccagaggatgggattcatgagctcttccctgctccagatggcgaagaagacacagcagagctgcaagggttgcggccaggtagtgaatatactgtgagcgtcgtggcactacatgacgatatggagtcacagccactgataggcacccagagcacagccatacctgcaccaaccgatcttaagtttactcaggtaacaccaacgagcctctccgcccagtggacccctcctaatgtacagctaactggatacagagttcgcgtgaccccaaaggaaaagactggtccgatgaaggagatcaacttggcccccgattcgtcatctgtcgttgtgagcgggcttatggtggcaacaaagtacgaggttagtgtctatgcccttaaagacaccctgacatctcgccccgcgcagggcgtggtcactaccctggagaacgtctccccaccgcggcgcgcgagggttaccgatgcaaccgagacaacaattaccataagttggcggacaaagacagaaaccattacagggttccaggtggatgcagtacctgctaatgggcagacccctatccaacggactatcaagccagatgttagatcctatactataactggtcttcagcctggcacagattacaaaatctatctttatacattgaatgataacgctcgctcaagtcccgtcgtcatcgatgcgtctacagctattgacgctcccagcaacctaaggtttctcgccactactccaaactccctcctggtttcctggcagccccctcgcgctaggatcaccggatacataataaaatacgaaaagcccggctcccccccccgggaggtggtgcccaggccaagaccaggtgtaacagaggctacgatcacaggccttgaacctgggactgaatataccatttatgttattgctctgaagaataaccagaagtctgagcctctgattggacggaagaaaactggccaggaggcactgtcacagactacaatctcttgggctcctttccaagatacatccgaatatatcattagttgtcatcccgtgggtacggacgaagagcctctccaatcaactaaggcctag

SEQ ID NO: 267200 - DNA, 7918 bp, Artificial Sequence
  derived and/or modified sequence
gcccgcgccggctgtgctgcacagggggaggagagggaaccccaggcgcgagcgggaagaggggacctgcagccacaacttctctggtcctctgcatcccttctgtccctccacccgtccccttccccaccctctggcccccaccttcttggaggcgacaacccccgggaggcattagaagggatttttcccgcaggttgcgaagggaagcaaacttggtggcaacttgcctcccggtgcgggcgtctctcccccaccgtctcaacatgcttaggggtccggggcccgggctgctgctgctggccgtccagtgcctggggacagcggtgccctccacgggagcctcgaagagcaagaggcaggctcagcaaatggttcagccccagtccccggtggctgtcagtcaaagcaagcccggttgttatgacaatggaaaacactatcagataaatcaacagtgggagcggacctacctaggcaatgcgttggtttgtacttgttatggaggaagccgaggttttaactgcgagagtaaacctgaagctgaagagacttgctttgacaagtacactgggaacacttaccgagtgggtgacacttatgagcgtcctaaagactccatgatctgggactgtacctgcatcggggctgggcgagggagaataagctgtaccatcgcaaaccgctgccatgaagggggtcagtcctacaagattggtgacacctggaggagaccacatgagactggtggttacatgttagagtgtgtgtgtcttggtaatggaaaaggagaatggacctgcaagcccatagctgagaagtgttttgatcatgctgctgggacttcctatgtggtcggagaaacgtgggagaagccctaccaaggctggatgatggtagattgtacttgcctgggagaaggcagcggacgcatcacttgcacttctagaaatagatgcaacgatcaggacacaaggacatcctatagaattggagacacctggagcaagaaggataatcgaggaaacctgctccagtgcatctgcacaggcaacggccgaggagagtggaagtgtgagaggcacacctctgtgcagaccacatcgagcggatctggccccttcaccgatgttcgtgcagctgtttaccaaccgcagcctcacccccagcctcctccctatggccactgtgtcacagacagtggtgtggtctactctgtggggatgcagtggctgaagacacaaggaaataagcaaatgctttgcacgtgcctgggcaacggagtcagctgccaagagacagctgtaacccagacttacggtggcaactcaaatggagagccatgtgtcttaccattcacctacaatggcaggacgttctactcctgcaccacagaagggcgacaggacggacatctttggtgcagcacaacttcgaattatgagcaggaccagaaatactctttctgcacagaccacactgttttggttcagactcgaggaggaaattccaatggtgccttgtgccacttccccttcctatacaacaaccacaattacactgattgcacttctgagggcagaagagacaacatgaagtggtgtgggaccacacagaactatgatgccgaccagaagtttgggttctgccccatggctgcccacgaggaaatctgcacaaccaatgaaggggtcatgtaccgcattggagatcagtgggataagcagcatgacatgggtcacatgatgaggtgcacgtgtgttgggaatggtcgtggggaatggacatgcattgcctactcgcagcttcgagatcagtgcattgttgatgacatcacttacaatgtgaacgacacattccacaagcgtcatgaagaggggcacatgctgaactgtacatgcttcggtcagggtcggggcaggtggaagtgtgatcccgtcgaccaatgccaggattcagagactgggacgttttatcaaattggagattcatgggagaagtatgtgcatggtgtcagataccagtgctactgctatggccgtggcattggggagtggcattgccaacctttacagacctatccaagctcaagtggtcctgtcgaagtatttatcactgagactccgagtcagcccaactcccaccccatccagtggaatgcaccacagccatctcacatttccaagtacattctcaggtggagacctaaaaattctgtaggccgttggaaggaagctaccataccaggccacttaaactcctacaccatcaaaggcctgaagcctggtgtggtatacgagggccagctcatcagcatccagcagtacggccaccaagaagtgactcgctttgacttcaccaccaccagcaccagcacacctgtgaccagcaacaccgtgacaggagagacgactcccttttctcctcttgtggccacttctgaatctgtgaccgaaatcacagccagtagctttgtggtctcctgggtctcagcttccgacaccgtgtcgggattccgggtggaatatgagctgagtgaggagggagatgagccacagtacctggatcttccaagcacagccacttctgtgaacatccctgacctgcttcctggccgaaaatacattgtaaatgtctatcagatatctgaggatggggagcagagtttgatcctgtctacttcacaaacaacagcgcctgatgcccctcctgacacgactgtggaccaagttgatgacacctcaattgttgttcgctggagcagaccccaggctcccatcacagggtacagaatagtctattcgccatcagtagaaggtagcagcacagaactcaaccttcctgaaactgcaaactccgtcaccctcagtgacttgcaacctggtgttcagtataacatcactatctatgctgtggaagaaaatcaagaaagtacacctgttgtcattcaacaagaaaccactggcaccccacgctcagatacagtgccctctcccagggacctgcagtttgtggaagtgacagacgtgaaggtcaccatcatgtggacaccgcctgagagtgcagtgaccggctaccgtgtggatgtgatccccgtcaacctgcctggcgagcacgggcagaggctgcccatcagcaggaacacctttgcagaagtcaccgggctgtcccctggggtcacctattacttcaaagtctttgcagtgagccatgggagggagagcaagcctctgactgctcaacagacaaccaaactggatgctcccactaacctccagtttgtcaatgaaactgattctactgtcctggtgagatggactccacctcgggcccagataacaggataccgactgaccgtgggccttacccgaagaggacagcccaggcagtacaatgtgggtccctctgtctccaagtacccactgaggaatctgcagcctgcatctgagtacaccgtatccctcgtggccataaagggcaaccaagagagccccaaagccactggagtctttaccacactgcagcctgggagctctattccaccttacaacaccgaggtgactgagaccaccattgtgatcacatggacgcctgctccaagaattggttttaagctgggtgtacgaccaagccagggaggagaggcaccacgagaagtgacttcagactcaggaagcatcgttgtgtccggcttgactccaggagtagaatacgtctacaccatccaagtcctgagagatggacaggaaagagatgcgccaattgtaaacaaagtggtgacaccattgtctccaccaacaaacttgcatctggaggcaaaccctgacactggagtgctcacagtctcctgggagaggagcaccaccccagacattactggttatagaattaccacaacccctacaaacggccagcagggaaattctttggaagaagtggtccatgctgatcagagctcctgcacttttgataacctgagtcccggcctggagtacaatgtcagtgtttacactgtcaaggatgacaaggaaagtgtccctatctctgataccatcatcccagctgttcctcctcccactgacctgcgattcaccaacattggtccagacaccatgcgtgtcacctgggctccacccccatccattgatttaaccaacttcctggtgcgttactcacctgtgaaaaatgaggaagatgttgcagagttgtcaatttctccttcagacaatgcagtggtcttaacaaatctcctgcctggtacagaatatgtagtgagtgtctccagtgtctacgaacaacatgagagcacacctcttagaggaagacagaaaacaggtcttgattccccaactggcattgacttttctgatattactgccaactcttttactgtgcactggattgctcctcgagccaccatcactggctacaggatccgccatcatcccgagcacttcagtgggagacctcgagaagatcgggtgccccactctcggaattccatcaccctcaccaacctcactccaggcacagagtatgtggtcagcatcgttgctcttaatggcagagaggaaagtcccttattgattggccaacaatcaacagtttctgatgttccgagggacctggaagttgttgctgcgacccccaccagcctactgatcagctgggatgctcctgctgtcacagtgagatattacaggatcacttacggagagacaggaggaaatagccctgtccaggagttcactgtgcctgggagcaagtctacagctaccatcagcggccttaaacctggagttgattataccatcactgtgtatgctgtcactggccgtggagacagccccgcaagcagcaagccaatttccattaattaccgaacagaaattgacaaaccatcccagatgcaagtgaccgatgttcaggacaacagcattagtgtcaagtggctgccttcaagttcccctgttactggttacagagtaaccaccactcccaaaaatggaccaggaccaacaaaaactaaaactgcaggtccagatcaaacagaaatgactattgaaggcttgcagcccacagtggagtatgtggttagtgtctatgctcagaatccaagcggagagagtcagcctctggttcagactgcagtaaccaacattgatcgccctaaaggactggcattcactgatgtggatgtcgattccatcaaaattgcttgggaaagcccacaggggcaagtttccaggtacagggtgacctactcgagccctgaggatggaatccatgagctattccctgcacctgatggtgaagaagacactgcagagctgcaaggcctcagaccgggttctgagtacacagtcagtgtggttgccttgcacgatgatatggagagccagcccctgattggaacccagtccacagctattcctgcaccaactgacctgaagttcactcaggtcacacccacaagcctgagcgcccagtggacaccacccaatgttcagctcactggatatcgagtgcgggtgacccccaaggagaagaccggaccaatgaaagaaatcaaccttgctcctgacagctcatccgtggttgtatcaggacttatggtggccaccaaatatgaagtgagtgtctatgctcttaaggacactttgacaagcagaccagctcagggagttgtcaccactctggagaatgtcagcccaccaagaagggctcgtgtgacagatgctactgagaccaccatcaccattagctggagaaccaagactgagacgatcactggcttccaagttgatgccgttccagccaatggccagactccaatccagagaaccatcaagccagatgtcagaagctacaccatcacaggtttacaaccaggcactgactacaagatctacctgtacaccttgaatgacaatgctcggagctcccctgtggtcatcgacgcctccactgccattgatgcaccatccaacctgcgtttcctggccaccacacccaattccttgctggtatcatggcagccgccacgtgccaggattaccggctacatcatcaagtatgagaagcctgggtctcctcccagagaagtggtccctcggccccgccctggtgtcacagaggctactattactggcctggaaccgggaaccgaatatacaatttatgtcattgccctgaagaataatcagaagagcgagcccctgattggaaggaaaaagacagtcaacgaaggcttgaaccaacctacggatgactcgtgctttgacccctacacagtttcccattatgccgttggagatgagtgggaacgaatgtctgaatcaggctttaaactgttgtgccagtgcttaggctttggaagtggtcatttcagatgtgattcatctagatggtgccatgacaatggtgtgaactacaagattggagagaagtgggaccgtcagggagaaaatggccagatgatgagctgcacatgtcttgggaacggaaaaggagaattcaagtgtgaccctcatgaggcaacgtgttatgatgatgggaagacataccacgtaggagaacagtggcagaaggaatatctcggtgccatttgctcctgcacatgctttggaggccagcggggctggcgctgtgacaactgccgcagacctgggggtgaacccagtcccgaaggcactactggccagtcctacaaccagtattctcagagataccatcagagaacaaacactaatgttaattgcccaattgagtgcttcatgcctttagatgtacaggctgacagagaagattcccgagagtaaatcatctttccaatccagaggaacaagcatgtctctctgccaagatccatctaaactggagtgatgttagcagacccagcttagagttcttctttctttcttaagccctttgctctggaggaagttctccagcttcagctcaactcacagcttctccaagcatcaccctgggagtttcctgagggttttctcataaatgagggctgcacattgcctgttctgcttcgaagtattcaataccgctcagtattttaaatgaagtgattctaagatttggtttgggatcaataggaaagcatatgcagccaaccaagatgcaaatgttttgaaatgatatgaccaaaattttaagtaggaaagtcacccaaacacttctgctttcacttaagtgtctggcccgcaatactgtaggaacaagcatgatcttgttactgtgatattttaaatatccacagtactcactttttccaaatgatcctagtaattgcctagaaatatctttctcttacctgttatttatcaatttttcccagtatttttatacggaaaaaattgtattgaaaacacttagtatgcagttgataagaggaatttggtataattatggtgggtgattattttttatactgtatgtgccaaagctttactactgtggaaagacaactgttttaataaaagatttacattccacaacttgaagttcatctatttgatataagacaccttcgggggaaataattcctgtgaatattctttttcaattcagcaaacatttgaaaatctatgatgtgcaagtctaattgttgatttcagtacaagattttctaaatcagttgctacaaaaactgattggtttttgtcacttcatctcttcactaatggagatagctttacactttctgctttaatagatttaagtggaccccaatatttattaaaattgctagtttaccgttcagaagtataatagaaataatctttagttgctcttttctaaccattgtaattcttcccttcttccctccacctttccttcattgaataaacctctgttcaaagagattgcctgcaagggaaataaaaatgactaagatatt

SEQ ID NO: 267201 - DNA, 7999 bp, Artificial Sequence
  derived and/or modified sequence
gcccgcgccggctgtgctgcacagggggaggagagggaaccccaggcgcgagcgggaagaggggacctgcagccacaacttctctggtcctctgcatcccttctgtccctccacccgtccccttccccaccctctggcccccaccttcttggaggcgacaacccccgggaggcattagaagggatttttcccgcaggttgcgaagggaagcaaacttggtggcaacttgcctcccggtgcgggcgtctctcccccaccgtctcaacatgcttaggggtccggggcccgggctgctgctgctggccgtccagtgcctggggacagcggtgccctccacgggagcctcgaagagcaagaggcaggctcagcaaatggttcagccccagtccccggtggctgtcagtcaaagcaagcccggttgttatgacaatggaaaacactatcagataaatcaacagtgggagcggacctacctaggcaatgcgttggtttgtacttgttatggaggaagccgaggttttaactgcgagagtaaacctgaagctgaagagacttgctttgacaagtacactgggaacacttaccgagtgggtgacacttatgagcgtcctaaagactccatgatctgggactgtacctgcatcggggctgggcgagggagaataagctgtaccatcgcaaaccgctgccatgaagggggtcagtcctacaagattggtgacacctggaggagaccacatgagactggtggttacatgttagagtgtgtgtgtcttggtaatggaaaaggagaatggacctgcaagcccatagctgagaagtgttttgatcatgctgctgggacttcctatgtggtcggagaaacgtgggagaagccctaccaaggctggatgatggtagattgtacttgcctgggagaaggcagcggacgcatcacttgcacttctagaaatagatgcaacgatcaggacacaaggacatcctatagaattggagacacctggagcaagaaggataatcgaggaaacctgctccagtgcatctgcacaggcaacggccgaggagagtggaagtgtgagaggcacacctctgtgcagaccacatcgagcggatctggccccttcaccgatgttcgtgcagctgtttaccaaccgcagcctcacccccagcctcctccctatggccactgtgtcacagacagtggtgtggtctactctgtggggatgcagtggctgaagacacaaggaaataagcaaatgctttgcacgtgcctgggcaacggagtcagctgccaagagacagctgtaacccagacttacggtggcaactcaaatggagagccatgtgtcttaccattcacctacaatggcaggacgttctactcctgcaccacagaagggcgacaggacggacatctttggtgcagcacaacttcgaattatgagcaggaccagaaatactctttctgcacagaccacactgttttggttcagactcgaggaggaaattccaatggtgccttgtgccacttccccttcctatacaacaaccacaattacactgattgcacttctgagggcagaagagacaacatgaagtggtgtgggaccacacagaactatgatgccgaccagaagtttgggttctgccccatggctgcccacgaggaaatctgcacaaccaatgaaggggtcatgtaccgcattggagatcagtgggataagcagcatgacatgggtcacatgatgaggtgcacgtgtgttgggaatggtcgtggggaatggacatgcattgcctactcgcagcttcgagatcagtgcattgttgatgacatcacttacaatgtgaacgacacattccacaagcgtcatgaagaggggcacatgctgaactgtacatgcttcggtcagggtcggggcaggtggaagtgtgatcccgtcgaccaatgccaggattcagagactgggacgttttatcaaattggagattcatgggagaagtatgtgcatggtgtcagataccagtgctactgctatggccgtggcattggggagtggcattgccaacctttacagacctatccaagctcaagtggtcctgtcgaagtatttatcactgagactccgagtcagcccaactcccaccccatccagtggaatgcaccacagccatctcacatttccaagtacattctcaggtggagacctaaaaattctgtaggccgttggaaggaagctaccataccaggccacttaaactcctacaccatcaaaggcctgaagcctggtgtggtatacgagggccagctcatcagcatccagcagtacggccaccaagaagtgactcgctttgacttcaccaccaccagcaccagcacacctgtgaccagcaacaccgtgacaggagagacgactcccttttctcctcttgtggccacttctgaatctgtgaccgaaatcacagccagtagctttgtggtctcctgggtctcagcttccgacaccgtgtcgggattccgggtggaatatgagctgagtgaggagggagatgagccacagtacctggatcttccaagcacagccacttctgtgaacatccctgacctgcttcctggccgaaaatacattgtaaatgtctatcagatatctgaggatggggagcagagtttgatcctgtctacttcacaaacaacagcgcctgatgcccctcctgacacgactgtggaccaagttgatgacacctcaattgttgttcgctggagcagaccccaggctcccatcacagggtacagaatagtctattcgccatcagtagaaggtagcagcacagaactcaaccttcctgaaactgcaaactccgtcaccctcagtgacttgcaacctggtgttcagtataacatcactatctatgctgtggaagaaaatcaagaaagtacacctgttgtcattcaacaagaaaccactggcaccccacgctcagatacagtgccctctcccagggacctgcagtttgtggaagtgacagacgtgaaggtcaccatcatgtggacaccgcctgagagtgcagtgaccggctaccgtgtggatgtgatccccgtcaacctgcctggcgagcacgggcagaggctgcccatcagcaggaacacctttgcagaagtcaccgggctgtcccctggggtcacctattacttcaaagtctttgcagtgagccatgggagggagagcaagcctctgactgctcaacagacaaccaaactggatgctcccactaacctccagtttgtcaatgaaactgattctactgtcctggtgagatggactccacctcgggcccagataacaggataccgactgaccgtgggccttacccgaagaggacagcccaggcagtacaatgtgggtccctctgtctccaagtacccactgaggaatctgcagcctgcatctgagtacaccgtatccctcgtggccataaagggcaaccaagagagccccaaagccactggagtctttaccacactgcagcctgggagctctattccaccttacaacaccgaggtgactgagaccaccattgtgatcacatggacgcctgctccaagaattggttttaagctgggtgtacgaccaagccagggaggagaggcaccacgagaagtgacttcagactcaggaagcatcgttgtgtccggcttgactccaggagtagaatacgtctacaccatccaagtcctgagagatggacaggaaagagatgcgccaattgtaaacaaagtggtgacaccattgtctccaccaacaaacttgcatctggaggcaaaccctgacactggagtgctcacagtctcctgggagaggagcaccaccccagacattactggttatagaattaccacaacccctacaaacggccagcagggaaattctttggaagaagtggtccatgctgatcagagctcctgcacttttgataacctgagtcccggcctggagtacaatgtcagtgtttacactgtcaaggatgacaaggaaagtgtccctatctctgataccatcatcccagctgttcctcctcccactgacctgcgattcaccaacattggtccagacaccatgcgtgtcacctgggctccacccccatccattgatttaaccaacttcctggtgcgttactcacctgtgaaaaatgaggaagatgttgcagagttgtcaatttctccttcagacaatgcagtggtcttaacaaatctcctgcctggtacagaatatgtagtgagtgtctccagtgtctacgaacaacatgagagcacacctcttagaggaagacagaaaacaggtcttgattccccaactggcattgacttttctgatattactgccaactcttttactgtgcactggattgctcctcgagccaccatcactggctacaggatccgccatcatcccgagcacttcagtgggagacctcgagaagatcgggtgccccactctcggaattccatcaccctcaccaacctcactccaggcacagagtatgtggtcagcatcgttgctcttaatggcagagaggaaagtcccttattgattggccaacaatcaacagtttctgatgttccgagggacctggaagttgttgctgcgacccccaccagcctactgatcagctgggatgctcctgctgtcacagtgagatattacaggatcacttacggagagacaggaggaaatagccctgtccaggagttcactgtgcctgggagcaagtctacagctaccatcagcggccttaaacctggagttgattataccatcactgtgtatgctgtcactggccgtggagacagccccgcaagcagcaagccaatttccattaattaccgaacagaaattgacaaaccatcccagatgcaagtgaccgatgttcaggacaacagcattagtgtcaagtggctgccttcaagttcccctgttactggttacagagtaaccaccactcccaaaaatggaccaggaccaacaaaaactaaaactgcaggtccagatcaaacagaaatgactattgaaggcttgcagcccacagtggagtatgtggttagtgtctatgctcagaatccaagcggagagagtcagcctctggttcagactgcagtaaccaacattgatcgccctaaaggactggcattcactgatgtggatgtcgattccatcaaaattgcttgggaaagcccacaggggcaagtttccaggtacagggtgacctactcgagccctgaggatggaatccatgagctattccctgcacctgatggtgaagaagacactgcagagctgcaaggcctcagaccgggttctgagtacacagtcagtgtggttgccttgcacgatgatatggagagccagcccctgattggaacccagtccacagctattcctgcaccaactgacctgaagttcactcaggtcacacccacaagcctgagcgcccagtggacaccacccaatgttcagctcactggatatcgagtgcgggtgacccccaaggagaagaccggaccaatgaaagaaatcaaccttgctcctgacagctcatccgtggttgtatcaggacttatggtggccaccaaatatgaagtgagtgtctatgctcttaaggacactttgacaagcagaccagctcagggagttgtcaccactctggagaatgtcagcccaccaagaagggctcgtgtgacagatgctactgagaccaccatcaccattagctggagaaccaagactgagacgatcactggcttccaagttgatgccgttccagccaatggccagactccaatccagagaaccatcaagccagatgtcagaagctacaccatcacaggtttacaaccaggcactgactacaagatctacctgtacaccttgaatgacaatgctcggagctcccctgtggtcatcgacgcctccactgccattgatgcaccatccaacctgcgtttcctggccaccacacccaattccttgctggtatcatggcagccgccacgtgccaggattaccggctacatcatcaagtatgagaagcctgggtctcctcccagagaagtggtccctcggccccgccctggtgtcacagaggctactattactggcctggaaccgggaaccgaatatacaatttatgtcattgccctgaagaataatcagaagagcgagcccctgattggaaggaaaaagacaggacaagaagctctctctcagacaaccatctcatgggccccattccaggacacttctgagtacatcatttcatgtcatcctgttggcactgatgaagaacccttacagttcagggttcctggaacttctaccagtgccactctgacaggcctcaccagaggtgccacctacaacgtcatagtggaggcactgaaagaccagcagaggcataaggttcgggaagaggttgttaccgtgggcaactctggatggtgccatgacaatggtgtgaactacaagattggagagaagtgggaccgtcagggagaaaatggccagatgatgagctgcacatgtcttgggaacggaaaaggagaattcaagtgtgaccctcatgaggcaacgtgttatgatgatgggaagacataccacgtaggagaacagtggcagaaggaatatctcggtgccatttgctcctgcacatgctttggaggccagcggggctggcgctgtgacaactgccgcagacctgggggtgaacccagtcccgaaggcactactggccagtcctacaaccagtattctcagagataccatcagagaacaaacactaatgttaattgcccaattgagtgcttcatgcctttagatgtacaggctgacagagaagattcccgagagtaaatcatctttccaatccagaggaacaagcatgtctctctgccaagatccatctaaactggagtgatgttagcagacccagcttagagttcttctttctttcttaagccctttgctctggaggaagttctccagcttcagctcaactcacagcttctccaagcatcaccctgggagtttcctgagggttttctcataaatgagggctgcacattgcctgttctgcttcgaagtattcaataccgctcagtattttaaatgaagtgattctaagatttggtttgggatcaataggaaagcatatgcagccaaccaagatgcaaatgttttgaaatgatatgaccaaaattttaagtaggaaagtcacccaaacacttctgctttcacttaagtgtctggcccgcaatactgtaggaacaagcatgatcttgttactgtgatattttaaatatccacagtactcactttttccaaatgatcctagtaattgcctagaaatatctttctcttacctgttatttatcaatttttcccagtatttttatacggaaaaaattgtattgaaaacacttagtatgcagttgataagaggaatttggtataattatggtgggtgattattttttatactgtatgtgccaaagctttactactgtggaaagacaactgttttaataaaagatttacattccacaacttgaagttcatctatttgatataagacaccttcgggggaaataattcctgtgaatattctttttcaattcagcaaacatttgaaaatctatgatgtgcaagtctaattgttgatttcagtacaagattttctaaatcagttgctacaaaaactgattggtttttgtcacttcatctcttcactaatggagatagctttacactttctgctttaatagatttaagtggaccccaatatttattaaaattgctagtttaccgttcagaagtataatagaaataatctttagttgctcttttctaaccattgtaattcttcccttcttccctccacctttccttcattgaataaacctctgttcaaagagattgcctgcaagggaaataaaaatgactaagatatt

SEQ ID NO: 267202 - DNA, 8025 bp, Artificial Sequence
  derived and/or modified sequence
gcccgcgccggctgtgctgcacagggggaggagagggaaccccaggcgcgagcgggaagaggggacctgcagccacaacttctctggtcctctgcatcccttctgtccctccacccgtccccttccccaccctctggcccccaccttcttggaggcgacaacccccgggaggcattagaagggatttttcccgcaggttgcgaagggaagcaaacttggtggcaacttgcctcccggtgcgggcgtctctcccccaccgtctcaacatgcttaggggtccggggcccgggctgctgctgctggccgtccagtgcctggggacagcggtgccctccacgggagcctcgaagagcaagaggcaggctcagcaaatggttcagccccagtccccggtggctgtcagtcaaagcaagcccggttgttatgacaatggaaaacactatcagataaatcaacagtgggagcggacctacctaggcaatgcgttggtttgtacttgttatggaggaagccgaggttttaactgcgagagtaaacctgaagctgaagagacttgctttgacaagtacactgggaacacttaccgagtgggtgacacttatgagcgtcctaaagactccatgatctgggactgtacctgcatcggggctgggcgagggagaataagctgtaccatcgcaaaccgctgccatgaagggggtcagtcctacaagattggtgacacctggaggagaccacatgagactggtggttacatgttagagtgtgtgtgtcttggtaatggaaaaggagaatggacctgcaagcccatagctgagaagtgttttgatcatgctgctgggacttcctatgtggtcggagaaacgtgggagaagccctaccaaggctggatgatggtagattgtacttgcctgggagaaggcagcggacgcatcacttgcacttctagaaatagatgcaacgatcaggacacaaggacatcctatagaattggagacacctggagcaagaaggataatcgaggaaacctgctccagtgcatctgcacaggcaacggccgaggagagtggaagtgtgagaggcacacctctgtgcagaccacatcgagcggatctggccccttcaccgatgttcgtgcagctgtttaccaaccgcagcctcacccccagcctcctccctatggccactgtgtcacagacagtggtgtggtctactctgtggggatgcagtggctgaagacacaaggaaataagcaaatgctttgcacgtgcctgggcaacggagtcagctgccaagagacagctgtaacccagacttacggtggcaactcaaatggagagccatgtgtcttaccattcacctacaatggcaggacgttctactcctgcaccacagaagggcgacaggacggacatctttggtgcagcacaacttcgaattatgagcaggaccagaaatactctttctgcacagaccacactgttttggttcagactcgaggaggaaattccaatggtgccttgtgccacttccccttcctatacaacaaccacaattacactgattgcacttctgagggcagaagagacaacatgaagtggtgtgggaccacacagaactatgatgccgaccagaagtttgggttctgccccatggctgcccacgaggaaatctgcacaaccaatgaaggggtcatgtaccgcattggagatcagtgggataagcagcatgacatgggtcacatgatgaggtgcacgtgtgttgggaatggtcgtggggaatggacatgcattgcctactcgcagcttcgagatcagtgcattgttgatgacatcacttacaatgtgaacgacacattccacaagcgtcatgaagaggggcacatgctgaactgtacatgcttcggtcagggtcggggcaggtggaagtgtgatcccgtcgaccaatgccaggattcagagactgggacgttttatcaaattggagattcatgggagaagtatgtgcatggtgtcagataccagtgctactgctatggccgtggcattggggagtggcattgccaacctttacagacctatccaagctcaagtggtcctgtcgaagtatttatcactgagactccgagtcagcccaactcccaccccatccagtggaatgcaccacagccatctcacatttccaagtacattctcaggtggagacctaaaaattctgtaggccgttggaaggaagctaccataccaggccacttaaactcctacaccatcaaaggcctgaagcctggtgtggtatacgagggccagctcatcagcatccagcagtacggccaccaagaagtgactcgctttgacttcaccaccaccagcaccagcacacctgtgaccagcaacaccgtgacaggagagacgactcccttttctcctcttgtggccacttctgaatctgtgaccgaaatcacagccagtagctttgtggtctcctgggtctcagcttccgacaccgtgtcgggattccgggtggaatatgagctgagtgaggagggagatgagccacagtacctggatcttccaagcacagccacttctgtgaacatccctgacctgcttcctggccgaaaatacattgtaaatgtctatcagatatctgaggatggggagcagagtttgatcctgtctacttcacaaacaacagcgcctgatgcccctcctgacacgactgtggaccaagttgatgacacctcaattgttgttcgctggagcagaccccaggctcccatcacagggtacagaatagtctattcgccatcagtagaaggtagcagcacagaactcaaccttcctgaaactgcaaactccgtcaccctcagtgacttgcaacctggtgttcagtataacatcactatctatgctgtggaagaaaatcaagaaagtacacctgttgtcattcaacaagaaaccactggcaccccacgctcagatacagtgccctctcccagggacctgcagtttgtggaagtgacagacgtgaaggtcaccatcatgtggacaccgcctgagagtgcagtgaccggctaccgtgtggatgtgatccccgtcaacctgcctggcgagcacgggcagaggctgcccatcagcaggaacacctttgcagaagtcaccgggctgtcccctggggtcacctattacttcaaagtctttgcagtgagccatgggagggagagcaagcctctgactgctcaacagacaaccaaactggatgctcccactaacctccagtttgtcaatgaaactgattctactgtcctggtgagatggactccacctcgggcccagataacaggataccgactgaccgtgggccttacccgaagaggacagcccaggcagtacaatgtgggtccctctgtctccaagtacccactgaggaatctgcagcctgcatctgagtacaccgtatccctcgtggccataaagggcaaccaagagagccccaaagccactggagtctttaccacactgcagcctgggagctctattccaccttacaacaccgaggtgactgagaccaccattgtgatcacatggacgcctgctccaagaattggttttaagctgggtgtacgaccaagccagggaggagaggcaccacgagaagtgacttcagactcaggaagcatcgttgtgtccggcttgactccaggagtagaatacgtctacaccatccaagtcctgagagatggacaggaaagagatgcgccaattgtaaacaaagtggtgacaccattgtctccaccaacaaacttgcatctggaggcaaaccctgacactggagtgctcacagtctcctgggagaggagcaccaccccagacattactggttatagaattaccacaacccctacaaacggccagcagggaaattctttggaagaagtggtccatgctgatcagagctcctgcacttttgataacctgagtcccggcctggagtacaatgtcagtgtttacactgtcaaggatgacaaggaaagtgtccctatctctgataccatcatcccagctgttcctcctcccactgacctgcgattcaccaacattggtccagacaccatgcgtgtcacctgggctccacccccatccattgatttaaccaacttcctggtgcgttactcacctgtgaaaaatgaggaagatgttgcagagttgtcaatttctccttcagacaatgcagtggtcttaacaaatctcctgcctggtacagaatatgtagtgagtgtctccagtgtctacgaacaacatgagagcacacctcttagaggaagacagaaaacaggtcttgattccccaactggcattgacttttctgatattactgccaactcttttactgtgcactggattgctcctcgagccaccatcactggctacaggatccgccatcatcccgagcacttcagtgggagacctcgagaagatcgggtgccccactctcggaattccatcaccctcaccaacctcactccaggcacagagtatgtggtcagcatcgttgctcttaatggcagagaggaaagtcccttattgattggccaacaatcaacagtttctgatgttccgagggacctggaagttgttgctgcgacccccaccagcctactgatcagctgggatgctcctgctgtcacagtgagatattacaggatcacttacggagagacaggaggaaatagccctgtccaggagttcactgtgcctgggagcaagtctacagctaccatcagcggccttaaacctggagttgattataccatcactgtgtatgctgtcactggccgtggagacagccccgcaagcagcaagccaatttccattaattaccgaacagaaattgacaaaccatcccagatgcaagtgaccgatgttcaggacaacagcattagtgtcaagtggctgccttcaagttcccctgttactggttacagagtaaccaccactcccaaaaatggaccaggaccaacaaaaactaaaactgcaggtccagatcaaacagaaatgactattgaaggcttgcagcccacagtggagtatgtggttagtgtctatgctcagaatccaagcggagagagtcagcctctggttcagactgcagtaaccaacattgatcgccctaaaggactggcattcactgatgtggatgtcgattccatcaaaattgcttgggaaagcccacaggggcaagtttccaggtacagggtgacctactcgagccctgaggatggaatccatgagctattccctgcacctgatggtgaagaagacactgcagagctgcaaggcctcagaccgggttctgagtacacagtcagtgtggttgccttgcacgatgatatggagagccagcccctgattggaacccagtccacagctattcctgcaccaactgacctgaagttcactcaggtcacacccacaagcctgagcgcccagtggacaccacccaatgttcagctcactggatatcgagtgcgggtgacccccaaggagaagaccggaccaatgaaagaaatcaaccttgctcctgacagctcatccgtggttgtatcaggacttatggtggccaccaaatatgaagtgagtgtctatgctcttaaggacactttgacaagcagaccagctcagggagttgtcaccactctggagaatgtcagcccaccaagaagggctcgtgtgacagatgctactgagaccaccatcaccattagctggagaaccaagactgagacgatcactggcttccaagttgatgccgttccagccaatggccagactccaatccagagaaccatcaagccagatgtcagaagctacaccatcacaggtttacaaccaggcactgactacaagatctacctgtacaccttgaatgacaatgctcggagctcccctgtggtcatcgacgcctccactgccattgatgcaccatccaacctgcgtttcctggccaccacacccaattccttgctggtatcatggcagccgccacgtgccaggattaccggctacatcatcaagtatgagaagcctgggtctcctcccagagaagtggtccctcggccccgccctggtgtcacagaggctactattactggcctggaaccgggaaccgaatatacaatttatgtcattgccctgaagaataatcagaagagcgagcccctgattggaaggaaaaagacaggacaagaagctctctctcagacaaccatctcatgggccccattccaggacacttctgagtacatcatttcatgtcatcctgttggcactgatgaagaacccttacagtcaacgaaggcttgaaccaacctacggatgactcgtgctttgacccctacacagtttcccattatgccgttggagatgagtgggaacgaatgtctgaatcaggctttaaactgttgtgccagtgcttaggctttggaagtggtcatttcagatgtgattcatctagatggtgccatgacaatggtgtgaactacaagattggagagaagtgggaccgtcagggagaaaatggccagatgatgagctgcacatgtcttgggaacggaaaaggagaattcaagtgtgaccctcatgaggcaacgtgttatgatgatgggaagacataccacgtaggagaacagtggcagaaggaatatctcggtgccatttgctcctgcacatgctttggaggccagcggggctggcgctgtgacaactgccgcagacctgggggtgaacccagtcccgaaggcactactggccagtcctacaaccagtattctcagagataccatcagagaacaaacactaatgttaattgcccaattgagtgcttcatgcctttagatgtacaggctgacagagaagattcccgagagtaaatcatctttccaatccagaggaacaagcatgtctctctgccaagatccatctaaactggagtgatgttagcagacccagcttagagttcttctttctttcttaagccctttgctctggaggaagttctccagcttcagctcaactcacagcttctccaagcatcaccctgggagtttcctgagggttttctcataaatgagggctgcacattgcctgttctgcttcgaagtattcaataccgctcagtattttaaatgaagtgattctaagatttggtttgggatcaataggaaagcatatgcagccaaccaagatgcaaatgttttgaaatgatatgaccaaaattttaagtaggaaagtcacccaaacacttctgctttcacttaagtgtctggcccgcaatactgtaggaacaagcatgatcttgttactgtgatattttaaatatccacagtactcactttttccaaatgatcctagtaattgcctagaaatatctttctcttacctgttatttatcaatttttcccagtatttttatacggaaaaaattgtattgaaaacacttagtatgcagttgataagaggaatttggtataattatggtgggtgattattttttatactgtatgtgccaaagctttactactgtggaaagacaactgttttaataaaagatttacattccacaacttgaagttcatctatttgatataagacaccttcgggggaaataattcctgtgaatattctttttcaattcagcaaacatttgaaaatctatgatgtgcaagtctaattgttgatttcagtacaagattttctaaatcagttgctacaaaaactgattggtttttgtcacttcatctcttcactaatggagatagctttacactttctgctttaatagatttaagtggaccccaatatttattaaaattgctagtttaccgttcagaagtataatagaaataatctttagttgctcttttctaaccattgtaattcttcccttcttccctccacctttccttcattgaataaacctctgttcaaagagattgcctgcaagggaaataaaaatgactaagatatt

SEQ ID NO: 267203 - DNA, 6555 bp, Artificial Sequence
  derived and/or modified sequence
atgctgcggggccctggccctggcctgctgctgctggccgtgcagtgcctgggcacagctgtgcccagcactggagccagcaagagcaagaggcaggcccagcagatggtgcagccccagagccctgtggccgtgtcccagagcaagccaggctgctatgacaatggcaagcactaccagatcaaccagcagtgggagaggacctacctgggcaatgccctggtgtgcacctgctatggaggcagccggggcttcaactgtgagagcaagccagaggccgaggagacctgctttgacaagtacacaggcaacacctacagagtgggggacacctatgaaagacccaaggacagcatgatctgggactgcacctgcatcggggccggccggggccgcatcagctgcaccatcgccaaccgctgccacgagggcggccagagctacaagatcggggacacctggaggcggccccatgagaccggcggctacatgctggagtgtgtgtgcctgggcaatggcaagggggagtggacctgcaagcccatcgccgagaagtgctttgaccacgccgccggcaccagctatgtggtgggggagacctgggagaagccctaccagggctggatgatggtggactgcacctgcctgggggagggcagcggccgcatcacctgcaccagcaggaaccgctgcaatgaccaggacaccaggaccagctaccgcatcggggacacctggagcaagaaggacaacagaggcaacctgctgcagtgcatctgcacaggaaatggccgcggggagtggaagtgtgagcggcacacctctgtgcagaccaccagcagcggcagcggccccttcacagatgtgcgggctgctgtgtaccagccccagccccacccccagcccccaccctacggccactgtgtgacagacagcggcgtggtgtacagcgtgggcatgcagtggctgaagacccagggcaacaagcagatgctgtgcacctgcctgggcaatggagtgtcctgccaggagacagctgtgacccagacctatggaggcaacagcaatggagagccctgtgtgctgcccttcacctacaatggaagaaccttctacagctgcaccacagagggccggcaggacggccacctgtggtgcagcaccaccagcaactatgagcaggaccagaagtacagcttctgcacagaccacacagtgctggtgcagacccggggcggcaacagcaatggagccctgtgccacttccccttcctgtacaacaaccacaactacacagactgcaccagcgagggcagaagagacaacatgaagtggtgtggcaccacccagaactatgatgctgaccagaagtttggcttctgccccatggccgcccacgaggagatctgcaccaccaatgaaggagtgatgtaccgcatcggggaccagtgggacaagcagcacgacatgggccacatgatgcgctgcacctgtgtgggcaatggccgcggggagtggacctgcatcgcctacagccagctgcgggaccagtgcatcgtggatgacatcacctacaacgtgaatgacaccttccacaagagacatgaggagggccacatgctgaactgcacctgcttcggccagggccggggccgctggaagtgtgaccctgtggaccagtgccaggacagcgagaccggcaccttctaccagatcggggacagctgggagaagtatgtgcatggagtgcgctaccagtgctactgctacggccggggcatcggggagtggcactgccagcccctgcagacctaccccagcagcagcggccctgtggaggtgttcatcacagagacccccagccagcccaacagccaccccatccagtggaatgccccccagcccagccacatcagcaagtacatcctgcgctggaggcccaagaacagcgtgggccgctggaaggaggccaccatccctggccacctgaacagctacaccatcaagggcctgaagccaggagtggtgtatgagggccagctgatcagcatccagcagtatggccaccaggaggtgaccaggtttgacttcaccaccaccagcaccagcacccctgtgaccagcaacacagtgactggagagaccacccccttcagccccctggtggccaccagcgagagcgtgacagagatcacagccagcagctttgtggtgtcctgggtgtctgccagtgacacagtgtctggcttccgggtggagtatgagctgtctgaggagggagatgagccccagtacctggacctgcccagcacagccacctctgtgaacatcccagacctgctgcccggcaggaagtacatcgtgaatgtgtaccagatcagtgaagatggagagcagagcctcatcctgagcaccagccagaccacagccccagatgcccccccagacaccaccgtggaccaggtggatgacaccagcatcgtggtgcgctggagccggccccaggcccccatcaccggctacagaattgtgtacagccccagcgtggagggcagcagcacagagctgaacctgcctgagacagccaacagcgtgaccctgagtgacctgcagcccggggtgcagtacaacatcaccatctatgctgtggaggagaaccaggagagcacccctgtggtgatccagcaggagaccaccggcacccccaggagtgacacagtgcccagcccccgggacctgcagtttgtggaggtgacagatgtgaaggtgaccatcatgtggaccccacctgagagcgctgtgacaggctacagagtggatgtgattcctgtgaacctgcctggagagcacggccagaggctgcccatcagcaggaacacctttgctgaggtgacaggcctgagccctggggtgacctactacttcaaggtgtttgctgtgagccacggccgggagagcaagcccctgacagcccagcagaccaccaagctggatgcccccaccaacctgcagtttgtgaatgaaacagacagcacagtgctggtgcgctggaccccaccccgggcccagatcaccggctaccgcctgactgtgggcctgacccggcggggccagccccggcagtacaacgtgggccccagcgtgtccaagtaccccctgaggaacctgcagcctgccagcgagtacacagtgtccctggtggccatcaagggcaaccaggagagccccaaggccactggagtcttcaccaccctgcagcccggcagcagcatccccccctacaacacagaggtgacagagaccaccatcgtcatcacctggaccccagcccccagaattggcttcaagctgggcgtgcggcccagccagggcggggaggccccccgggaggtgaccagtgacagcggcagcatcgtggtgtctggcctgaccccaggagtggagtatgtgtacaccatccaggtgctgagagatggccaggagagagatgcccccatcgtgaacaaggtggtgacccccctgagcccccccaccaacctgcacctggaggccaacccagacaccggggtgctgactgtgtcctgggagaggagcaccaccccagacatcaccggctaccgcatcaccaccacccccaccaacggccagcagggcaacagcctggaggaggtggtgcatgctgaccagagcagctgcacctttgacaacctgagccctggcctggagtacaacgtgtctgtgtacacagtgaaggatgacaaggagagcgtgcccatcagtgacaccatcatcccagctgtgcccccacccacagacctgcgcttcaccaacatcggccctgacaccatgagggtgacctgggcccccccacccagcattgacctgaccaacttcctggtgcgctacagccctgtgaagaatgaagaagatgtggccgagctgagcatcagccccagcgacaatgctgtggtgctgaccaacctgctgcccggcacagaatatgtggtgtctgtgtcctctgtgtatgagcagcacgagagcacccccctgcggggccggcagaagacaggcctggacagccccaccggcatcgacttcagtgacatcacagccaacagcttcaccgtgcactggatcgccccccgggccaccatcaccggctaccgcatccgccaccaccctgagcacttcagcggccggcccagagaagatagagtgccccacagcaggaacagcatcaccctgaccaacctgaccccaggcacagaatatgtggtgtccatcgtggccctgaatggccgggaggagagccccctgctgattggccagcagagcacagtgtctgatgtgccccgggacctggaggtggtggccgccacccccaccagcctgctgatctcctgggatgccccagctgtgacagtgcgctactaccgcatcacctacggggagactggaggcaacagccctgtgcaggagttcaccgtgcccggcagcaagagcacagccaccatcagcggcctgaagccaggagtggactacaccatcaccgtgtatgctgtgacaggccgcggggacagccctgccagcagcaagcccatcagcatcaactacagaacagaaattgacaagcccagccagatgcaggtgacagatgtgcaggacaacagcatctctgtgaagtggctgcccagcagcagccctgtgacaggctacagagtgaccaccacccccaagaatggacctggccccaccaagaccaagacagctggccctgaccagacagagatgaccatcgagggcctgcagcccaccgtggagtatgtggtgtctgtgtatgcccagaaccccagcggggagagccagcccctggtgcagacagctgtgaccaacatcgaccggcccaagggcctggccttcacagatgtggatgtggacagcatcaagatcgcctgggagagcccccagggccaggtgagccgctacagagtgacctacagcagcccagaagatggcatccacgagctgtttcctgccccagatggagaggaggacacagctgagctgcagggcctgcggcccggcagcgagtacacagtgtctgtggtggccctgcatgatgacatggagagccagcccctgattggcacccagagcacagccatcccagcccccacagacctgaagttcacccaggtgacccccaccagcctgagcgcccagtggaccccacccaacgtgcagctgaccggctacagagtgcgggtgacccccaaggagaagacaggccccatgaaggagatcaacctggccccagacagcagctctgtggtggtgtctggcctgatggtggccaccaagtatgaggtgtctgtgtatgccctgaaggacaccctgaccagcaggcctgcccagggcgtggtgaccaccctggagaatgtgagccccccccggcgggcccgggtgacagatgccacagagaccaccatcaccatctcctggaggaccaagacagagaccatcaccggcttccaggtggatgctgtgcctgccaacggccagacccccatccagaggaccatcaagccagatgtgcgcagctacaccatcaccggcctgcagcctggaacagactacaagatctacctgtacaccctgaatgacaatgcccggagcagccctgtggtgattgatgccagcacagccattgatgcccccagcaacctgcgcttcctggccaccacccccaacagcctgctggtgtcctggcagcccccccgggcccgcatcaccggctacatcatcaagtatgagaagccaggcagccccccccgggaggtggtgccccggcccaggcctggggtgacagaggccaccatcaccggcctggagcctggaacagagtacaccatctacgtgattgccctgaagaacaaccagaagtctgagcccctcatcggcaggaagaagacagtgaatgaaggcctgaaccagcccacagatgacagctgctttgacccctacacagtgagccactatgctgtgggagatgagtgggagaggatgtctgagagcggcttcaagctgctgtgccagtgcctgggcttcggcagcggccacttccgctgtgacagcagccgctggtgccacgacaacggggtgaactacaagatcggggagaagtgggaccggcagggagaaaatggccagatgatgagctgcacctgcctgggcaatggaaaaggagagttcaagtgtgacccccatgaggccacctgctatgatgatggcaagacctaccacgtgggggagcagtggcagaaggagtacctgggcgccatctgcagctgcacctgcttcggcggccagaggggctggaggtgtgacaactgccggcggcctggaggagagcccagccctgagggcaccaccggccagagctacaaccagtacagccagcgctaccaccagaggaccaacaccaacgtgaactgccccatcgagtgcttcatgcccctggatgtgcaggccgaccgggaggacagccgggagtag

SEQ ID NO: 267204 - DNA, 6636 bp, Artificial Sequence
  derived and/or modified sequence
atgctgcggggccctggccctggcctgctgctgctggccgtgcagtgcctgggcacagctgtgcccagcactggagccagcaagagcaagaggcaggcccagcagatggtgcagccccagagccctgtggccgtgtcccagagcaagccaggctgctatgacaatggcaagcactaccagatcaaccagcagtgggagaggacctacctgggcaatgccctggtgtgcacctgctatggaggcagccggggcttcaactgtgagagcaagccagaggccgaggagacctgctttgacaagtacacaggcaacacctacagagtgggggacacctatgaaagacccaaggacagcatgatctgggactgcacctgcatcggggccggccggggccgcatcagctgcaccatcgccaaccgctgccacgagggcggccagagctacaagatcggggacacctggaggcggccccatgagaccggcggctacatgctggagtgtgtgtgcctgggcaatggcaagggggagtggacctgcaagcccatcgccgagaagtgctttgaccacgccgccggcaccagctatgtggtgggggagacctgggagaagccctaccagggctggatgatggtggactgcacctgcctgggggagggcagcggccgcatcacctgcaccagcaggaaccgctgcaatgaccaggacaccaggaccagctaccgcatcggggacacctggagcaagaaggacaacagaggcaacctgctgcagtgcatctgcacaggaaatggccgcggggagtggaagtgtgagcggcacacctctgtgcagaccaccagcagcggcagcggccccttcacagatgtgcgggctgctgtgtaccagccccagccccacccccagcccccaccctacggccactgtgtgacagacagcggcgtggtgtacagcgtgggcatgcagtggctgaagacccagggcaacaagcagatgctgtgcacctgcctgggcaatggagtgtcctgccaggagacagctgtgacccagacctatggaggcaacagcaatggagagccctgtgtgctgcccttcacctacaatggaagaaccttctacagctgcaccacagagggccggcaggacggccacctgtggtgcagcaccaccagcaactatgagcaggaccagaagtacagcttctgcacagaccacacagtgctggtgcagacccggggcggcaacagcaatggagccctgtgccacttccccttcctgtacaacaaccacaactacacagactgcaccagcgagggcagaagagacaacatgaagtggtgtggcaccacccagaactatgatgctgaccagaagtttggcttctgccccatggccgcccacgaggagatctgcaccaccaatgaaggagtgatgtaccgcatcggggaccagtgggacaagcagcacgacatgggccacatgatgcgctgcacctgtgtgggcaatggccgcggggagtggacctgcatcgcctacagccagctgcgggaccagtgcatcgtggatgacatcacctacaacgtgaatgacaccttccacaagagacatgaggagggccacatgctgaactgcacctgcttcggccagggccggggccgctggaagtgtgaccctgtggaccagtgccaggacagcgagaccggcaccttctaccagatcggggacagctgggagaagtatgtgcatggagtgcgctaccagtgctactgctacggccggggcatcggggagtggcactgccagcccctgcagacctaccccagcagcagcggccctgtggaggtgttcatcacagagacccccagccagcccaacagccaccccatccagtggaatgccccccagcccagccacatcagcaagtacatcctgcgctggaggcccaagaacagcgtgggccgctggaaggaggccaccatccctggccacctgaacagctacaccatcaagggcctgaagccaggagtggtgtatgagggccagctgatcagcatccagcagtatggccaccaggaggtgaccaggtttgacttcaccaccaccagcaccagcacccctgtgaccagcaacacagtgactggagagaccacccccttcagccccctggtggccaccagcgagagcgtgacagagatcacagccagcagctttgtggtgtcctgggtgtctgccagtgacacagtgtctggcttccgggtggagtatgagctgtctgaggagggagatgagccccagtacctggacctgcccagcacagccacctctgtgaacatcccagacctgctgcccggcaggaagtacatcgtgaatgtgtaccagatcagtgaagatggagagcagagcctcatcctgagcaccagccagaccacagccccagatgcccccccagacaccaccgtggaccaggtggatgacaccagcatcgtggtgcgctggagccggccccaggcccccatcaccggctacagaattgtgtacagccccagcgtggagggcagcagcacagagctgaacctgcctgagacagccaacagcgtgaccctgagtgacctgcagcccggggtgcagtacaacatcaccatctatgctgtggaggagaaccaggagagcacccctgtggtgatccagcaggagaccaccggcacccccaggagtgacacagtgcccagcccccgggacctgcagtttgtggaggtgacagatgtgaaggtgaccatcatgtggaccccacctgagagcgctgtgacaggctacagagtggatgtgattcctgtgaacctgcctggagagcacggccagaggctgcccatcagcaggaacacctttgctgaggtgacaggcctgagccctggggtgacctactacttcaaggtgtttgctgtgagccacggccgggagagcaagcccctgacagcccagcagaccaccaagctggatgcccccaccaacctgcagtttgtgaatgaaacagacagcacagtgctggtgcgctggaccccaccccgggcccagatcaccggctaccgcctgactgtgggcctgacccggcggggccagccccggcagtacaacgtgggccccagcgtgtccaagtaccccctgaggaacctgcagcctgccagcgagtacacagtgtccctggtggccatcaagggcaaccaggagagccccaaggccactggagtcttcaccaccctgcagcccggcagcagcatccccccctacaacacagaggtgacagagaccaccatcgtcatcacctggaccccagcccccagaattggcttcaagctgggcgtgcggcccagccagggcggggaggccccccgggaggtgaccagtgacagcggcagcatcgtggtgtctggcctgaccccaggagtggagtatgtgtacaccatccaggtgctgagagatggccaggagagagatgcccccatcgtgaacaaggtggtgacccccctgagcccccccaccaacctgcacctggaggccaacccagacaccggggtgctgactgtgtcctgggagaggagcaccaccccagacatcaccggctaccgcatcaccaccacccccaccaacggccagcagggcaacagcctggaggaggtggtgcatgctgaccagagcagctgcacctttgacaacctgagccctggcctggagtacaacgtgtctgtgtacacagtgaaggatgacaaggagagcgtgcccatcagtgacaccatcatcccagctgtgcccccacccacagacctgcgcttcaccaacatcggccctgacaccatgagggtgacctgggcccccccacccagcattgacctgaccaacttcctggtgcgctacagccctgtgaagaatgaagaagatgtggccgagctgagcatcagccccagcgacaatgctgtggtgctgaccaacctgctgcccggcacagaatatgtggtgtctgtgtcctctgtgtatgagcagcacgagagcacccccctgcggggccggcagaagacaggcctggacagccccaccggcatcgacttcagtgacatcacagccaacagcttcaccgtgcactggatcgccccccgggccaccatcaccggctaccgcatccgccaccaccctgagcacttcagcggccggcccagagaagatagagtgccccacagcaggaacagcatcaccctgaccaacctgaccccaggcacagaatatgtggtgtccatcgtggccctgaatggccgggaggagagccccctgctgattggccagcagagcacagtgtctgatgtgccccgggacctggaggtggtggccgccacccccaccagcctgctgatctcctgggatgccccagctgtgacagtgcgctactaccgcatcacctacggggagactggaggcaacagccctgtgcaggagttcaccgtgcccggcagcaagagcacagccaccatcagcggcctgaagccaggagtggactacaccatcaccgtgtatgctgtgacaggccgcggggacagccctgccagcagcaagcccatcagcatcaactacagaacagaaattgacaagcccagccagatgcaggtgacagatgtgcaggacaacagcatctctgtgaagtggctgcccagcagcagccctgtgacaggctacagagtgaccaccacccccaagaatggacctggccccaccaagaccaagacagctggccctgaccagacagagatgaccatcgagggcctgcagcccaccgtggagtatgtggtgtctgtgtatgcccagaaccccagcggggagagccagcccctggtgcagacagctgtgaccaacatcgaccggcccaagggcctggccttcacagatgtggatgtggacagcatcaagatcgcctgggagagcccccagggccaggtgagccgctacagagtgacctacagcagcccagaagatggcatccacgagctgtttcctgccccagatggagaggaggacacagctgagctgcagggcctgcggcccggcagcgagtacacagtgtctgtggtggccctgcatgatgacatggagagccagcccctgattggcacccagagcacagccatcccagcccccacagacctgaagttcacccaggtgacccccaccagcctgagcgcccagtggaccccacccaacgtgcagctgaccggctacagagtgcgggtgacccccaaggagaagacaggccccatgaaggagatcaacctggccccagacagcagctctgtggtggtgtctggcctgatggtggccaccaagtatgaggtgtctgtgtatgccctgaaggacaccctgaccagcaggcctgcccagggcgtggtgaccaccctggagaatgtgagccccccccggcgggcccgggtgacagatgccacagagaccaccatcaccatctcctggaggaccaagacagagaccatcaccggcttccaggtggatgctgtgcctgccaacggccagacccccatccagaggaccatcaagccagatgtgcgcagctacaccatcaccggcctgcagcctggaacagactacaagatctacctgtacaccctgaatgacaatgcccggagcagccctgtggtgattgatgccagcacagccattgatgcccccagcaacctgcgcttcctggccaccacccccaacagcctgctggtgtcctggcagcccccccgggcccgcatcaccggctacatcatcaagtatgagaagccaggcagccccccccgggaggtggtgccccggcccaggcctggggtgacagaggccaccatcaccggcctggagcctggaacagagtacaccatctacgtgattgccctgaagaacaaccagaagtctgagcccctcatcggcaggaagaagacaggccaggaggccctgagccagaccaccatctcctgggcccccttccaggacaccagcgagtacatcatcagctgccaccctgtgggcacagatgaggagcccctgcagttccgggtgcccggcaccagcaccagcgccaccctgaccggcctgaccaggggggccacctacaacgtgattgtggaggccctgaaggaccagcagaggcacaaggtgcgggaggaggtggtgacagtgggcaacagcggctggtgccacgacaatggagtgaactacaagattggagagaagtgggaccggcagggagaaaatggccagatgatgagctgcacctgcctgggcaatggcaagggggagttcaagtgtgacccccatgaggccacctgctatgatgatggcaagacctaccacgtgggggagcagtggcagaaggagtacctgggcgccatctgcagctgcacctgctttggaggccagaggggctggaggtgtgacaactgcagaagacctggaggagagcccagccctgagggcaccaccggccagagctacaaccagtacagccagcgctaccaccagaggaccaacaccaacgtgaactgccccatcgagtgcttcatgcccctggatgtgcaggccgaccgggaggacagccgggagtag

SEQ ID NO: 267205 - DNA, 6096 bp, Artificial Sequence
  derived and/or modified sequence
atgctgcggggccctggccctggcctgctgctgctggccgtgcagtgcctgggcacagctgtgcccagcactggagccagcaagagcaagaggcaggcccagcagatggtgcagccccagagccctgtggccgtgtcccagagcaagccaggctgctatgacaatggcaagcactaccagatcaaccagcagtgggagaggacctacctgggcaatgccctggtgtgcacctgctatggaggcagccggggcttcaactgtgagagcaagccagaggccgaggagacctgctttgacaagtacacaggcaacacctacagagtgggggacacctatgaaagacccaaggacagcatgatctgggactgcacctgcatcggggccggccggggccgcatcagctgcaccatcgccaaccgctgccacgagggcggccagagctacaagatcggggacacctggaggcggccccatgagaccggcggctacatgctggagtgtgtgtgcctgggcaatggcaagggggagtggacctgcaagcccatcgccgagaagtgctttgaccacgccgccggcaccagctatgtggtgggggagacctgggagaagccctaccagggctggatgatggtggactgcacctgcctgggggagggcagcggccgcatcacctgcaccagcaggaaccgctgcaatgaccaggacaccaggaccagctaccgcatcggggacacctggagcaagaaggacaacagaggcaacctgctgcagtgcatctgcacaggaaatggccgcggggagtggaagtgtgagcggcacacctctgtgcagaccaccagcagcggcagcggccccttcacagatgtgcgggctgctgtgtaccagccccagccccacccccagcccccaccctacggccactgtgtgacagacagcggcgtggtgtacagcgtgggcatgcagtggctgaagacccagggcaacaagcagatgctgtgcacctgcctgggcaatggagtgtcctgccaggagacagctgtgacccagacctatggaggcaacagcaatggagagccctgtgtgctgcccttcacctacaatggaagaaccttctacagctgcaccacagagggccggcaggacggccacctgtggtgcagcaccaccagcaactatgagcaggaccagaagtacagcttctgcacagaccacacagtgctggtgcagacccggggcggcaacagcaatggagccctgtgccacttccccttcctgtacaacaaccacaactacacagactgcaccagcgagggcagaagagacaacatgaagtggtgtggcaccacccagaactatgatgctgaccagaagtttggcttctgccccatggccgcccacgaggagatctgcaccaccaatgaaggagtgatgtaccgcatcggggaccagtgggacaagcagcacgacatgggccacatgatgcgctgcacctgtgtgggcaatggccgcggggagtggacctgcatcgcctacagccagctgcgggaccagtgcatcgtggatgacatcacctacaacgtgaatgacaccttccacaagagacatgaggagggccacatgctgaactgcacctgcttcggccagggccggggccgctggaagtgtgaccctgtggaccagtgccaggacagcgagaccggcaccttctaccagatcggggacagctgggagaagtatgtgcatggagtgcgctaccagtgctactgctacggccggggcatcggggagtggcactgccagcccctgcagacctaccccagcagcagcggccctgtggaggtgttcatcacagagacccccagccagcccaacagccaccccatccagtggaatgccccccagcccagccacatcagcaagtacatcctgcgctggaggcccaagaacagcgtgggccgctggaaggaggccaccatccctggccacctgaacagctacaccatcaagggcctgaagccaggagtggtgtatgagggccagctgatcagcatccagcagtatggccaccaggaggtgaccaggtttgacttcaccaccaccagcaccagcacccctgtgaccagcaacacagtgactggagagaccacccccttcagccccctggtggccaccagcgagagcgtgacagagatcacagccagcagctttgtggtgtcctgggtgtctgccagtgacacagtgtctggcttccgggtggagtatgagctgtctgaggagggagatgagccccagtacctggacctgcccagcacagccacctctgtgaacatcccagacctgctgcccggcaggaagtacatcgtgaatgtgtaccagatcagtgaagatggagagcagagcctcatcctgagcaccagccagaccacagccccagatgcccccccagacaccaccgtggaccaggtggatgacaccagcatcgtggtgcgctggagccggccccaggcccccatcaccggctacagaattgtgtacagccccagcgtggagggcagcagcacagagctgaacctgcctgagacagccaacagcgtgaccctgagtgacctgcagcccggggtgcagtacaacatcaccatctatgctgtggaggagaaccaggagagcacccctgtggtgatccagcaggagaccaccggcacccccaggagtgacacagtgcccagcccccgggacctgcagtttgtggaggtgacagatgtgaaggtgaccatcatgtggaccccacctgagagcgctgtgacaggctacagagtggatgtgattcctgtgaacctgcctggagagcacggccagaggctgcccatcagcaggaacacctttgctgaggtgacaggcctgagccctggggtgacctactacttcaaggtgtttgctgtgagccacggccgggagagcaagcccctgacagcccagcagaccaccaagctggatgcccccaccaacctgcagtttgtgaatgaaacagacagcacagtgctggtgcgctggaccccaccccgggcccagatcaccggctaccgcctgactgtgggcctgacccggcggggccagccccggcagtacaacgtgggccccagcgtgtccaagtaccccctgaggaacctgcagcctgccagcgagtacacagtgtccctggtggccatcaagggcaaccaggagagccccaaggccactggagtcttcaccaccctgcagcccggcagcagcatccccccctacaacacagaggtgacagagaccaccatcgtcatcacctggaccccagcccccagaattggcttcaagctgggcgtgcggcccagccagggcggggaggccccccgggaggtgaccagtgacagcggcagcatcgtggtgtctggcctgaccccaggagtggagtatgtgtacaccatccaggtgctgagagatggccaggagagagatgcccccatcgtgaacaaggtggtgacccccctgagcccccccaccaacctgcacctggaggccaacccagacaccggggtgctgactgtgtcctgggagaggagcaccaccccagacatcaccggctaccgcatcaccaccacccccaccaacggccagcagggcaacagcctggaggaggtggtgcatgctgaccagagcagctgcacctttgacaacctgagccctggcctggagtacaacgtgtctgtgtacacagtgaaggatgacaaggagagcgtgcccatcagtgacaccatcatcccagctgtgcccccacccacagacctgcgcttcaccaacatcggccctgacaccatgagggtgacctgggcccccccacccagcattgacctgaccaacttcctggtgcgctacagccctgtgaagaatgaagaagatgtggccgagctgagcatcagccccagcgacaatgctgtggtgctgaccaacctgctgcccggcacagaatatgtggtgtctgtgtcctctgtgtatgagcagcacgagagcacccccctgcggggccggcagaagacaggcctggacagccccaccggcatcgacttcagtgacatcacagccaacagcttcaccgtgcactggatcgccccccgggccaccatcaccggctaccgcatccgccaccaccctgagcacttcagcggccggcccagagaagatagagtgccccacagcaggaacagcatcaccctgaccaacctgaccccaggcacagaatatgtggtgtccatcgtggccctgaatggccgggaggagagccccctgctgattggccagcagagcacagtgtctgatgtgccccgggacctggaggtggtggccgccacccccaccagcctgctgatctcctgggatgccccagctgtgacagtgcgctactaccgcatcacctacggggagactggaggcaacagccctgtgcaggagttcaccgtgcccggcagcaagagcacagccaccatcagcggcctgaagccaggagtggactacaccatcaccgtgtatgctgtgacaggccgcggggacagccctgccagcagcaagcccatcagcatcaactacagaacagaaattgacaagcccagccagatgcaggtgacagatgtgcaggacaacagcatctctgtgaagtggctgcccagcagcagccctgtgacaggctacagagtgaccaccacccccaagaatggacctggccccaccaagaccaagacagctggccctgaccagacagagatgaccatcgagggcctgcagcccaccgtggagtatgtggtgtctgtgtatgcccagaaccccagcggggagagccagcccctggtgcagacagctgtgaccaacatcgaccggcccaagggcctggccttcacagatgtggatgtggacagcatcaagatcgcctgggagagcccccagggccaggtgagccgctacagagtgacctacagcagcccagaagatggcatccacgagctgtttcctgccccagatggagaggaggacacagctgagctgcagggcctgcggcccggcagcgagtacacagtgtctgtggtggccctgcatgatgacatggagagccagcccctgattggcacccagagcacagccatcccagcccccacagacctgaagttcacccaggtgacccccaccagcctgagcgcccagtggaccccacccaacgtgcagctgaccggctacagagtgcgggtgacccccaaggagaagacaggccccatgaaggagatcaacctggccccagacagcagctctgtggtggtgtctggcctgatggtggccaccaagtatgaggtgtctgtgtatgccctgaaggacaccctgaccagcaggcctgcccagggcgtggtgaccaccctggagaatgtgagccccccccggcgggcccgggtgacagatgccacagagaccaccatcaccatctcctggaggaccaagacagagaccatcaccggcttccaggtggatgctgtgcctgccaacggccagacccccatccagaggaccatcaagccagatgtgcgcagctacaccatcaccggcctgcagcctggaacagactacaagatctacctgtacaccctgaatgacaatgcccggagcagccctgtggtgattgatgccagcacagccattgatgcccccagcaacctgcgcttcctggccaccacccccaacagcctgctggtgtcctggcagcccccccgggcccgcatcaccggctacatcatcaagtatgagaagccaggcagccccccccgggaggtggtgccccggcccaggcctggggtgacagaggccaccatcaccggcctggagcctggaacagagtacaccatctacgtgattgccctgaagaacaaccagaagtctgagcccctcatcggcaggaagaagacaggccaggaggccctgagccagaccaccatctcctgggcccccttccaggacaccagcgagtacatcatcagctgccaccctgtgggcacagatgaggagcccctgcagagcaccaaggcctag

SEQ ID NO: 267206 - DNA, 6555 bp, Artificial Sequence
  derived and/or modified sequence
atgctgcggggccccggccccggcctgctgctgctggccgtgcagtgcctggggaccgccgttccttctactggagcctcaaaatccaaacggcaagcacagcagatggtgcaaccccagtccccagtggctgtaagtcagagcaaacctggatgttacgacaatggcaagcactaccagataaatcaacagtgggagaggacctacttgggaaatgcacttgtctgcacgtgttacggcggctcacggggtttcaactgtgaatctaagccggaggcggaggaaacttgttttgataaatacactgggaatacctatcgggtcggagacacatatgagcgccctaaagactccatgatttgggattgtacctgtatcggagctggacgaggccggatcagctgcacgattgccaaccggtgtcatgagggcggtcagtcctacaagattggggacacctggcgtcggcctcacgaaaccggaggctatatgcttgaatgcgtgtgtttggggaatggcaaaggagaatggacctgtaaacctattgccgagaaatgtttcgaccacgcggctggaacatcctacgtggtgggtgagacctgggagaagccctaccaaggttggatgatggtggactgtacctgcttgggcgaggggagcggtaggatcacatgtactagccgcaaccgctgcaacgaccaggatacccgaacatcctaccggataggtgatacttggtctaagaaagacaatcgggggaacctcctgcagtgtatctgtaccgggaacgggcgtggtgaatggaagtgtgaaaggcacacctccgttcaaaccacatctagtgggtccgggcctttcaccgacgtccgcgctgccgtataccagcctcagccgcatccccagcccccgccttacggccactgtgtgactgattcaggggtggtgtacagcgttggtatgcagtggctcaagacccagggcaataaacagatgctttgcacatgtttagggaatggagtaagttgccaagagacagcagtaacgcagacctacggtggcaattctaatggggagccatgtgttctgcctttcacctacaatggtcggactttctacagctgtaccacagaggggagacaggacggccatctgtggtgcagtactacatccaactatgagcaagaccagaaatattctttctgtacagatcataccgttttagtccaaacccggggggggaacagcaatggtgccctgtgccatttcccgtttctgtacaacaaccacaactataccgattgcacaagtgaaggtaggcgtgacaatatgaagtggtgcggtacaactcagaactacgatgcggaccagaagttcggtttctgccctatggccgctcacgaggagatttgcactaccaacgagggcgtgatgtatcgcatcggtgatcagtgggacaagcaacacgatatgggccatatgatgcgatgtacttgtgtgggcaatgggcggggggagtggacatgcatcgcctactctcagctgcgggatcagtgcattgtagacgatataacatacaacgtcaatgatacttttcacaagaggcacgaggaaggccacatgcttaactgtacttgcttcggccagggacgggggcgatggaagtgcgaccctgttgaccagtgccaagactctgagaccggtacattctatcaaatcggagattcatgggagaagtatgtgcacggagtgcggtatcaatgctattgttacggtcgcggtatcggagaatggcactgtcagcctttacagacctatccgagcagctctgggcctgtggaggtgtttatcacggaaacgccctcccagccgaatagccaccccatccaatggaacgcaccccaaccgtctcatattagcaagtatattctccggtggcgcccaaaaaacagcgtcggacgctggaaggaggcaacaattcctggccacctcaatagttatacaataaagggtcttaagcctggtgtggtatacgaggggcagctcatttccattcaacagtacggccaccaggaggtcactcgcttcgatttcaccactacttcgacctcaactccagtaacaagcaatacagtaaccggagagaccactcctttttctcccctggtggctacaagtgaatccgtgacagagatcactgcgagctcatttgttgtctcctgggtcagcgctagtgacaccgtgtcaggcttccgagttgagtatgaactctccgaggagggcgatgagccgcagtacctcgatctgccctcaaccgccactagcgtcaatatccctgatctcctgcccggacgaaaatatattgtgaatgtatatcaaatttccgaggatggagagcaatcgcttatcttgtccacttctcagaccaccgcaccggacgctccaccggacactacagtcgaccaggtagatgacaccagcattgtggtgaggtggtccaggccgcaggccccaatcactgggtatcgtattgtgtatagcccttcagtcgaaggatccagcaccgaactaaatttaccagagacagctaatagcgtgacactgtcggatctccagccaggtgtgcagtataatatcactatctatgctgttgaggaaaaccaagagtcaacgcctgtagtcattcagcaagaaacaacgggcaccccccggagcgatacggtgccgagcccgagggaccttcagttcgtggaagttaccgacgttaaggtgacgatcatgtggactcctcctgagtcagctgtgactgggtatcgtgtagatgtgattccagtcaatctgccgggggaacatgggcaaagactcccaatttctaggaatacgttcgcggaagtgactggtctgtctcccggagtcacttactattttaaggtgttcgctgtttcacatggccgcgaatcaaagcctttgaccgcccagcagacaactaagctggacgctccaaccaatttgcagttcgtaaatgaaacagactccactgtgctggttcggtggacaccgccaagggcccaaatcacaggttatcgactgaccgttgggctgactcggcgggggcaacctaggcagtataacgtgggaccatccgtttctaaatatcctttgcgaaatctccagcctgctagtgaatacactgtaagtcttgtggccattaagggtaatcaggagagccccaaggccacaggggtgtttacgacactgcaaccaggatccagtatccctccgtacaataccgaggtgaccgaaacaactattgtaatcacatggacacccgccccccgtatcgggttcaagttgggcgtcagacccagccagggcggggaggccccacgcgaggtcacaagcgattctggatctattgtggtgtccggtttaacacctggggtcgaatacgtgtacaccatacaagttctgcgggacggtcaggaacgtgatgcacctatagttaataaagtcgtgacaccactgagcccccctaccaatctccatcttgaagccaatcccgatacaggagtgcttaccgtgtcatgggagagaagtactactcctgatataaccggctatagaattacaactacccccacaaacggccagcaagggaattccctcgaagaagtggtgcacgcagaccagagctcttgtacattcgacaacctatcccccggtttggagtacaacgtgagtgtgtatactgtgaaagacgataaggagtctgtgcccatctctgatacaatcatcccagccgtcccgcctcctacagacctccgcttcactaatatagggcctgatacaatgagggtgacatgggccccgccccctagcatcgatctgacgaacttcctggtccgctattcacctgtcaagaatgaagaggacgtagcagagctcagtatttcacctagtgataacgcagtggttctgaccaatctgttacccggaacagagtacgtcgtctctgtgtcttcggtttacgagcagcacgaatctactcccctgaggggcagacagaaaaccggcctggattcccctaccggcatcgacttctccgatatcactgcaaacagtttcaccgtgcattggattgcccccagggcgactattactgggtatcggatccgccatcatcctgaacatttctctggcagacctcgggaggaccgtgttccccactcacgcaatagcatcaccctgactaatctgaccccgggcaccgaatacgtcgtgagtatcgtggctctgaacggcagggaagaaagtcctttacttattggtcagcaatccaccgtgagcgacgttccacgcgatctggaggtggttgccgctacccccacgtcacttcttatctcttgggatgcgccagccgttacagtgagatattatcgcatcacgtacggagaaaccggtggcaactcacctgttcaggagttcactgtgccggggagcaaatcaacagctacaatctccggcctcaagccaggcgtggactatactataactgtgtatgctgtcacggggaggggggactcaccagcttcctcgaagcctatttccattaattatcgcaccgaaatagacaagccttcccagatgcaagtgacagatgtgcaggacaacagtattagtgtcaaatggctcccctccagttcgcctgtgacgggctatagagtgaccactacgcccaaaaacggacctgggcccaccaagacaaagacagccgggccagaccagactgaaatgacaatcgagggcttgcaacccaccgtggaatatgtggtctctgtctacgcacaaaacccgtccggagagtcccagcccctggtacagactgcggtgactaacatcgatcgccctaaaggacttgccttcaccgatgttgatgtcgactctattaagatcgcttgggaatccccacaaggccaggttagtcgatatcgggtaacttacagttcacccgaggacggaattcacgagctctttcccgcccccgatggggaagaggacacggctgaacttcaggggctccgccccggtagcgagtatactgtgagtgtggtcgcactgcatgatgacatggagtctcaacctttgatcgggactcagtctaccgccattcctgccccgacggacctgaagttcacgcaggttacccctacctcattgtcagcacaatggaccccccccaatgttcagttaactgggtatcgcgtgcgggtcactcccaaagagaaaactggtcctatgaaggaaattaacctggcccctgactccagcagcgtagtcgtgagcgggcttatggtcgccacaaagtacgaggtgagtgtgtatgcactgaaagacactctgaccagtcggcccgctcagggagtggtgaccacactggagaatgtgagcccacctcgcagggcccgggtgactgatgctactgaaaccaccattacgatctcctggcggaccaagactgaaaccatcacaggattccaggtcgacgccgtgcctgccaatggccagacccctatccagaggaccatcaagccagacgtgagatcatacacaatcaccggattgcaacccggcacggactacaaaatatatttatataccctcaatgataatgctaggagctcccccgtcgtaatcgacgccagtactgccatagatgctccgtctaacctgagatttttggccaccaccccaaatagcctgctggtgagctggcagcctcccagggcgaggatcaccggctacatcatcaaatacgaaaaaccagggtcccctccccgggaagtcgtgccaaggcctcgtcctggtgtgactgaggccactatcaccggcctagaacccggtacagagtatactatttatgtcatcgccctgaagaacaaccagaaatccgaaccgcttattggtcgcaagaaaaccgttaacgagggactcaaccaacctaccgatgacagctgcttcgatccttataccgtttcccactacgccgttggcgacgaatgggagaggatgtccgaatccggttttaaattactgtgccaatgtctaggatttggatcagggcatttccggtgcgactcttcacgctggtgccacgacaacggcgtgaactataagatcggtgaaaagtgggacaggcagggtgaaaacggacagatgatgtcctgcacctgcctcggaaacggaaaaggggaattcaaatgcgacccccacgaggccacatgttatgacgacggaaagacatatcatgtgggcgaacagtggcagaaggaatacctgggtgcaatctgtagctgcacgtgcttcggaggacagagggggtggcgctgtgataattgtagaagacccggcggggaaccgtccccagaaggtacaaccggccagtcctacaatcagtatagccaaaggtaccatcagcgtaccaacacgaatgttaactgtcccatcgaatgtttcatgccgctggatgtgcaggcagatcgggaggattcacgcgaatag

SEQ ID NO: 267207 - DNA, 6636 bp, Artificial Sequence
  derived and/or modified sequence
atgctgcggggccccggccccggcctgctgctgctggccgtgcagtgcctgggaaccgccgtaccatctacgggtgcatccaaaagtaagcgccaggcccagcagatggtgcagcctcagtcacctgtggcggtgtctcaaagtaaacctggatgttatgacaatggcaagcactaccaaatcaatcagcagtgggagcggacgtatctcggtaatgccctcgtttgcacttgctacgggggatcaaggggctttaactgtgagtccaagcctgaagctgaggagacttgtttcgacaagtacactgggaacacctatagagtgggcgacacgtatgagaggccaaaggacagcatgatatgggattgcacatgtatcggggcgggccggggtaggatctcctgcacaattgcaaataggtgccatgaggggggccagtcttacaagattggtgacacttggcgcaggccccatgagaccggcggttatatgttggagtgcgtctgcctgggaaatggtaagggcgaatggacatgtaagcccattgccgaaaagtgcttcgaccacgccgccggcacgtcctatgtggttggtgagacctgggaaaagccctaccaggggtggatgatggttgattgcacctgcctcggcgaagggtctggtcggatcacctgtacgtcccgtaatcgatgtaacgatcaggacacaagaacctcctaccgtatcggggatacctggtctaaaaaagacaacagagggaacctgctgcaatgtatctgcacaggcaatgggagaggtgaatggaaatgtgagcgacataccagcgtgcagacaaccagcagcggatcaggaccattcacggacgtgagggccgctgtataccagcctcagcctcatccacagcctcctccatatggacattgcgttactgacagtggggtagtttactccgtggggatgcagtggcttaagacacagggcaataaacagatgctatgcacatgtctagggaatggagtcagttgtcaggagaccgccgtgacccagacttatggcgggaactccaatggcgaaccttgcgttttgccatttacatacaatggtcgtaccttttactcttgcactaccgaggggcgtcaggatggacacctgtggtgtagcactacaagcaactatgagcaagatcaaaagtattccttctgtactgaccacaccgtgctagtccagacacgcggaggcaacagtaacggggcgctctgccatttccccttcctctataacaatcataactacacagattgcacctcagaaggaaggcgagacaacatgaaatggtgtgggaccacccaaaactacgacgccgaccagaagttcgggttctgtcctatggccgcacatgaggagatctgtaccaccaacgagggagtaatgtatcgaatcggagatcaatgggataaacagcacgatatggggcatatgatgagatgtacttgtgtgggtaatgggcgcggtgagtggacatgtattgcctattcccagctgcgcgaccagtgtatcgtggacgacatcacatacaatgtcaatgacacatttcacaagagacacgaggagggccacatgctgaactgcacatgttttggtcaggggcggggtcgctggaaatgcgatcctgtcgatcagtgtcaagactctgagactgggacgttttatcaaataggagactcatgggaaaagtacgtgcacggagtgcggtatcaatgctattgctatggacgaggaataggcgagtggcactgtcaacccttgcagacatacccatcctcctcgggccccgtggaagtgttcatcaccgaaacacctagtcagcccaattctcaccctatccagtggaacgctccacagccttcgcacatctccaagtacatactcaggtggcggcccaaaaattccgtcggccggtggaaggaagcgacaatcccagggcatctcaactcctatacaattaaaggactgaaaccaggagtagtgtacgagggccagctgatctccattcagcagtatgggcatcaggaagtgacacgcttcgacttcactaccacctctacatccactcctgtgacctcgaataccgtcaccggcgaaactacccctttctcgccactggtggccacttcagaaagtgtcaccgaaattaccgctagctcattcgtagtaagctgggtgagcgcctctgataccgttagtggatttagagtggagtacgagttgagcgaagaaggggatgagccccagtacttggacctgccatctacagcaacatctgtgaacatcccagatcttctgcccggtcgcaagtatattgtaaacgtgtaccagatttcagaagatggagaacagtctctgattttatccacctcccagacaactgctccagatgcacctcccgacaccacagtcgaccaggtcgacgacacatcgatcgtcgtgagatggtcccgaccacaagctccaatcactggctatagaattgtgtatagtccatctgttgagggaagctccacagaactcaacctcccagaaaccgccaactctgtgactctttctgaccttcagcctggcgtacaatataatatcacaatatacgcagtcgaagaaaaccaagagtctacccccgtcgtgatacagcaggaaaccactggcaccccgcggagcgatactgtgccatcccccagagacctgcagttcgtggaggtgactgatgtcaaggtaactatcatgtggaccccacccgagtccgcggtcacgggataccgggtcgatgtcattcctgtgaatctgccgggagagcacggtcagcggctgccaatcagccgcaatacttttgccgaggtgacagggttgtctccgggcgttacctactattttaaggtgttcgccgtctcccacggcagggagtctaagcccctgacagcgcagcagactactaagctagatgcaccaacaaatcttcagttcgtgaacgagacggattctacggtgttggttcgctggacaccgcctcgcgctcagattacgggctatagactcaccgtggggctgactcgcagaggccaacccagacaatataacgtaggtccatctgtatccaagtatccactgcggaatctccaacccgcgagtgagtacaccgtttccctggtggctattaagggtaatcaggagtcccccaaggcaaccggggtatttactactctccaaccaggaagcagtatcccaccatacaacaccgaagtgaccgagacaaccatcgtgattacgtggaccccagcgccaaggataggctttaagctcggtgtgcgcccttctcagggcggggaggccccccgtgaggtgacatctgactccggaagcattgttgttagcggcctcacaccgggggtggaatatgtctacactatccaggtgttacgtgatgggcaggaacgggatgcacctatcgttaataaggtggtgacgcctctgagtccacccactaacctgcacctagaagctaatcccgacaccggcgtgctcactgtctcttgggagagatctactaccccagatatcactggctaccggatcacaactacacccacaaatgggcaacagggcaactcacttgaggaggtggtacacgcagatcagagttcctgcaccttcgacaatctgagtcccgggctcgaatataacgtgtccgtgtatacagtaaaagatgacaaagagagtgtgcctatcagcgacaccataattcctgctgtgcccccacccaccgacttgcgcttcaccaacattgggcccgatactatgcgtgtgacatgggcacctcccccttccatcgacctcactaacttcctcgtgcgatactcgcctgtgaaaaatgaggaggacgtagccgaactctctatcagtccttccgataacgcggttgtgttgaccaatctgcttcctggaactgagtacgtagtctctgtgagcagcgtgtacgaacagcacgagtctaccccactgcgcgggcgacagaagaccgggctcgacagtccaactgggattgactttagtgacattaccgccaactccttcacagtccactggatcgcgccacgggcgactatcactggatataggattagacaccaccctgaacatttctccggaagacctagggaggaccgagtccctcactccagaaatagcattacacttacgaatctcacacccggtaccgaatacgtagtgtcgatcgtggcgcttaacggcagggaggaaagcccccttttaatcgggcagcagtctaccgtttcggacgtacctcgtgatttagaggtcgtcgcggctacgcccacatctttgttgatcagctgggatgcacctgcagtcaccgtgcgctactaccgcattacatacggcgagacgggcggaaactctcccgtgcaggagtttacggtgcccggcagcaagtccaccgcgactattagtggcctcaaaccaggcgtggactatacgataacagtttacgccgtgaccggcaggggagattcccctgcgagtagcaaaccgatcagtatcaattaccggacagagattgacaagccatcccagatgcaggtgacagatgtgcaagacaattccatctccgtcaaatggctgccaagcagctctcctgtgaccggctacagggtaaccactaccccaaaaaatggccctggccctaccaagacaaagacagcagggccggaccagaccgagatgactattgaaggacttcagcccacggtggagtacgtggtcagtgtgtacgcccagaacccatccggagaaagccagcccctcgtccaaaccgccgtgaccaacatagacaggccgaaggggctggcattcaccgacgtggacgttgatagtataaaaatcgcgtgggagagtccacaggggcaggtctctagataccgggtaacctactcttctcccgaggacgggatccacgaattgttccccgcccctgatggcgaagaagatacggccgaacttcaaggactccgccccgggtctgaatacaccgttagtgtcgtggcactccatgatgacatggagtcccaaccactgatcggcacccaatccacagcaatcccagcccccaccgatctgaaattcacccaggtaactcccacttccctgtccgcgcaatggaccccccctaatgtgcagctgacgggttacagggtcagagtaacgccgaaggagaagactgggccaatgaaagaaataaacctggctcccgatagcagctccgttgtagtgagtggcctgatggtcgccactaagtacgaggtgtccgtgtacgctctaaaggacaccctcacgtcccgtcctgcccagggtgtggtgacaaccctcgagaacgtctccccaccacgccgagcgcgggtgaccgatgctactgagaccactatcactatttcctggcggacaaaaacggaaaccataacaggttttcaggttgatgccgtcccagctaatgggcaaaccccaattcaacgcacgattaaaccagatgtgcgttcatacactataaccgggctgcagcccgggaccgattacaaaatttatctgtacacactgaacgacaacgcccggtcctccccggtcgtgatcgacgccagcaccgccatcgacgcccccagtaacctgcgcttcctcgcaacgacgcctaacagcctgctggtaagttggcaacctcctcgggcacgtatcacagggtatattattaagtacgaaaaaccagggagccccccccgggaggtagtgccaagacccagacccggcgttaccgaggccacaatcacaggactggagccaggcacagagtataccatttacgttatagccctgaagaacaaccagaagtctgagccactaatcggtcgaaaaaagaccgggcaagaggctctttctcagactacaattagttgggcaccttttcaggacacgtccgagtatatcatttcttgccaccctgttgggaccgacgaagagcctcttcagtttagagtccccggaacctctacaagcgcaaccctgacaggattgaccagaggcgccacatacaatgtgatcgtagaggcactgaaggatcagcaacggcataaagtgcgtgaggaagtagtgaccgtgggcaattcgggatggtgccatgataacggagtgaactacaaaatcggcgaaaagtgggaccgccagggggaaaacggtcagatgatgtcatgtacttgtctgggaaacggcaagggcgagttcaagtgcgaccctcacgaggcgacgtgttacgatgacggcaaaacttatcatgtgggtgaacagtggcaaaaggagtacctcggggccatttgttcttgtacctgctttggcggccagcgcggatggcgatgcgataattgccggcgccccgggggcgagccaagtcccgaggggacaacaggccagtcttacaaccagtatagccagcgctatcaccagcgtaccaacacaaatgtgaactgtcctatcgagtgttttatgccacttgatgtccaagccgacagggaagattcccgcgaatag

SEQ ID NO: 267208 - DNA, 6096 bp, Artificial Sequence
  derived and/or modified sequence
atgctgcggggccccggccccggcctgctgctgctggccgtgcagtgcctgggaaccgcagttcccagtactggcgcctcgaaatctaagaggcaggctcagcaaatggtgcaacctcagagccctgtggccgtgagtcagtctaaacccgggtgctacgataatggcaaacattaccagatcaatcaacagtgggagcgcacttaccttgggaacgccctggtctgtacctgctatggaggcagccgggggttcaattgcgagagcaagccagaggctgaagaaacgtgcttcgacaagtatactggcaatacataccgcgtgggtgatacctatgagagacccaaagactctatgatctgggactgcacttgtattggagccggccggggtagaatttcctgcaccatcgcaaaccggtgtcacgagggcggccaaagctacaagatcggagacacctggagacgtcctcatgagacaggaggctatatgttagagtgcgtttgcttagggaatggtaaaggcgagtggacttgcaagcccatagccgaaaagtgcttcgaccatgccgccggcacaagctatgtggtgggcgaaacatgggagaagccttatcagggttggatgatggtggactgtacttgtttaggtgaaggatctgggaggatcacatgcacatcccgaaataggtgtaacgatcaagacacaagaaccagctatagaatcggggatacttggagcaagaaggataaccgtggaaacctcctgcagtgtatatgcaccggtaacgggagaggtgagtggaaatgtgagaggcacacgtctgtccagaccacttcgagtgggtctgggcccttcactgatgtgcgcgctgctgtctaccagccgcagccacatccccagccccctccatacggtcactgtgtcaccgacagtggggtcgtgtactcagtggggatgcagtggttgaagacacagggcaataaacagatgttatgtacatgtctgggaaacggggtgtcttgtcaggagacggctgtgacccagacctacggcggaaattctaatggtgaaccttgtgttttaccatttacctataacggccgaaccttctactcctgcacaaccgagggacgtcaggatggacacctgtggtgttccaccacctctaactacgaacaggaccaaaagtactcattctgtaccgatcataccgtgttggtgcaaactcggggagggaatagcaatggagccctatgtcactttccgttcttgtataacaaccataactacaccgattgcacaagcgagggcaggagggataacatgaagtggtgcggcaccacccagaactacgacgctgatcagaaattcggtttttgccctatggcagcccatgaagagatttgcaccactaatgagggcgttatgtaccgcattggcgaccagtgggacaaacagcacgacatgggtcacatgatgcggtgcacatgtgtgggtaatggaaggggcgaatggacatgcatagcatattcccagctgcgggatcagtgcatcgttgacgatatcacatataacgttaacgataccttccataagcggcacgaggagggacacatgctgaattgtacttgcttcggacaggggaggggccgctggaaatgtgatcctgttgaccagtgtcaggatagtgaaactgggaccttctatcaaattggggactcatgggagaagtacgtgcatggagtgcgctatcaatgctattgctacggccggggaatcggagagtggcattgccaacctctgcagacttacccatcatctagcggacccgtggaagtattcattacagagacccctagccagccaaattctcatcccatccaatggaatgcccctcagcctagtcatatctctaagtatattttgcggtggaggccgaaaaattccgtgggcaggtggaaggaggcaaccatcccaggccatttaaatagctacacaattaaagggcttaaacccggagttgtttatgagggacagctgatttcaattcagcagtacggacatcaggaggttactaggttcgacttcactactactagtacaagtacgcctgtgacctctaatacggtgaccggagaaacgacaccatttagccctttggtcgctactagcgagtctgtgacagagatcacagcgagttcttttgttgtcagttgggtgtcagctagcgacaccgtgagtgggttcagagtcgagtatgaactctctgaggaaggggatgagccacagtatctcgacttgccttcgacagcgacgagcgtgaatattcccgaccttctgccaggacgaaaatacatagttaatgtctaccaaatttcagaggatggagagcagtccttaattctaagtacctctcaaactaccgcccccgacgccccacccgatacgacagtggaccaggttgacgacactagcatcgtggtgaggtggtctcggccacaggccccaatcacaggttatcggattgtctacagtcctagcgtggagggcagctcaactgaactgaatttgcctgaaactgccaacagcgtaaccctgtccgaccttcaacctggggtgcaatacaacatcactatttacgcagtagaggaaaatcaggaatcaaccccagtggtaatacaacaggaaactactgggaccccccgttcagacacggtacctagcccacgcgacctccagtttgttgaggttaccgacgtcaaggtgacaataatgtggaccccccctgagtctgctgttactggctaccgggtcgatgtgatccctgttaacctgccaggagagcatgggcagaggttgcctatctcccgaaatactttcgccgaggtcacgggtctgtctccaggggtcacctactattttaaggtttttgctgtatcccatggccgcgagtccaagccactgacagctcagcagaccaccaagctggatgcgccaaccaacttgcagttcgtcaatgaaactgacagcaccgttctcgtccgatggacccctcctcgggcacaaatcacaggatatcgcctgactgtcggcctgaccaggcgtggccagccccgacaatacaacgtcggcccttccgtcagtaaataccccttacggaacctgcagccagcatccgagtacacagtttctctcgtcgctattaaggggaaccaggaatcccctaaggcaaccggcgtcttcactaccttacagcctggctcctcgatccccccttataatactgaggtcactgaaaccactatcgtcatcacgtggaccccagcgccccggattggcttcaaactgggcgtgcggccatctcagggtggtgaggcgcctagagaagtgacgtcggattccgggtcaatcgtggtgtccggactcacgcccggagtcgagtatgtgtataccatccaggtattacgtgatggccaggagagggacgctccaattgtgaacaaggtcgtgacacctctcagcccccccacgaacctccatctcgaagcaaacccggataccggcgtgcttacagtgagctgggagcgctccaccactccagatatcaccggataccgcattacgactaccccgaccaacgggcagcaagggaacagcttggaagaggtggtccatgctgaccagagtagttgtacttttgacaatttgtctccagggttggagtacaacgtctcggtctatactgtcaaggacgacaaggaaagcgtgcccatcagcgacacaataatcccggcagtccctccgccgaccgatctgaggttcacaaatatcggacccgatacaatgcgagtgacctgggccccaccaccgtccattgacctgacgaattttttggtccggtatagtcccgttaagaatgaagaagatgtggccgaactgtctatcagcccgagtgacaatgccgttgtactgaccaaccttcttcctggtacagagtacgtggttagtgtctcctcagtatatgaacaacatgaatcaactccacttcgaggccggcagaaaaccggtctcgattccccaaccggtatcgacttctcggacattacagcaaattcatttaccgtgcattggattgctccccgcgcgaccatcacgggatatagaattcggcaccaccctgagcatttttccggccgcccccgggaagaccgggtgccccacagtaggaattcaatcactctgacaaacttaactcctggtactgagtacgtggttagcattgtagctctaaatggccgtgaggaatctccactccttatcggacagcagagcactgtcagcgacgttccccgcgaccttgaggtggtggcagcgactccaactagtctgcttatttcatgggatgctccagcagtgaccgtgcggtattaccgtataacttacggggaaaccggagggaattcacctgtgcaggagttcacagtccccggaagtaaatcaacagcaacaatctccggactgaagcccggagttgactacaccatcactgtctatgcggtgactggcagaggcgactctcccgcaagcagcaaaccaattagtatcaactaccgtacggagattgataaaccgtcccagatgcaggtgactgacgtacaggacaacagcatctccgttaagtggcttccttcctcatcgccggtcacaggataccgggtaaccactacacccaagaacggtcccgggcccaccaaaaccaaaactgccggtcccgaccaaacagagatgacgatcgagggactgcagcccaccgtagagtacgtagtgagtgtctatgctcagaacccaagtggcgagagtcagcctctggtgcagaccgctgtcacaaacatcgatagaccaaaaggcctggcatttacggacgtagatgttgattccattaaaattgcctgggaatctccacaagggcaggtgtctcgataccgagtcacttattcgagcccggaggacgggattcatgaactcttccccgctcctgacggcgaggaggacactgcagagttgcaggggctgcggccaggcagtgagtatacagtgtccgttgttgctctccatgacgatatggaatcacaacctctcattgggactcagtctactgccatcccagccccaactgacctgaaatttacacaagtaactcccacttcgctgtctgcccaatggactccacccaatgtccagctcacagggtacagagtgcgcgtgactccaaaagaaaagaccggccccatgaaggaaattaacctggctccagactcctcgagtgtggtggtatcaggccttatggtggctactaagtatgaggtctccgtgtatgcacttaaagatacactgacatcacgccccgcccaaggagtcgtgaccactcttgagaatgtgagccctccccggcgagctagagttaccgatgccacagagaccaccatcactatatcttggagaacaaaaaccgagaccatcactgggtttcaagttgacgcagtgcctgccaatgggcagacccccattcagcggacgatcaaaccagacgtgaggtcctacaccataaccggcttacagcctggaaccgactataaaatatatctctacacactcaacgacaacgctcgctctagccccgtcgtcatcgatgcatcaacagcaattgacgctccttccaaccttcggtttctggcgactactccaaactctctccttgtgtcatggcaacccccaagagcgagaattacaggctacatcattaagtacgaaaaacctgggtcccccccccgggaggtggtcccacgtcctagaccaggtgtgactgaggccaccatcacaggcctagaacccgggaccgagtacactatatacgtgattgcattaaaaaacaaccagaagtctgaaccccttattggtcggaaaaagacaggacaggaggcgttgagccaaaccacaatctcttgggctccattccaggacacgtcagaatatataatcagctgtcatccagtcggcaccgatgaggaacccttacagtctacaaaagcatag

SEQ ID NO: 267209 - DNA, 6555 bp, Artificial Sequence
  derived and/or modified sequence
atgctgcgtggcccaggaccgggtctcctgctgctagccgtgcaatgtctggggacagcagtgcctagtacaggagccagtaaaagtaaacggcaggcgcagcaaatggttcaaccccagtccccagtggccgtgtctcagagtaaacccggatgttacgacaacggaaaacactatcagattaatcagcaatgggagaggacatacctgggaaacgccctggtgtgcacgtgttacgggggtagtcgtggcttcaactgtgagagcaaaccggaagccgaggaaacctgttttgacaagtacaccggcaacacgtaccgggttggcgacacctatgagagacccaaagactccatgatatgggactgcacttgcattggggcaggacgcggtcgaatttcttgcacaatcgccaatcgatgccacgagggaggacagtcttataaaataggtgatacatggagaaggccccatgagaccggagggtacatgcttgagtgcgtatgtctgggcaatggtaagggagaatggacatgcaaacctatcgccgaaaaatgcttcgaccacgctgcaggcacctcatatgtagtcggcgaaacgtgggagaagccctaccagggctggatgatggtggactgtacatgtcttggggagggatctggtagaattacatgcactagccgcaacagatgcaatgatcaagacactcgcacttcctatcgcattggggacacttggtctaagaaagacaacagaggaaacctgctgcaatgtatttgcacaggaaatggcaggggcgagtggaagtgtgaacgccatacatccgtgcagacgaccagctcgggcagtggtcccttcaccgacgtgagggccgctgtgtaccagccccagcctcatccacagccaccaccttatggccactgtgtaacagactccggggtggtttattccgtggggatgcagtggcttaaaactcaagggaacaagcagatgctttgtacttgtttaggaaatggggtatcttgtcaagaaaccgcagtcacgcaaacatatggagggaatagtaatggagaaccatgcgtcctcccctttacttataacgggagaacattttacagttgtacaacggaaggccgacaggatggccatttgtggtgtagtaccacctccaactatgagcaggatcagaagtattctttctgtacagaccacacggtcttagttcaaacccgaggcggaaacagcaacggagcactctgccattttccttttctgtacaataatcacaattacaccgactgcacatctgaagggagaagagacaatatgaagtggtgtggtacgacgcagaattacgatgcagaccagaagtttggattctgtcctatggccgctcacgaggaaatttgcactaccaacgagggagtcatgtaccgtatcggtgatcagtgggataagcagcacgatatgggacatatgatgagatgtacgtgcgtggggaatggccgaggcgaatggacctgtattgcgtacagccagttgagagaccagtgtattgttgacgacataacatataacgtgaacgacacattccacaaaaggcacgaggagggacacatgcttaattgtacttgttttggccagggcaggggcagatggaaatgtgacccagttgatcagtgtcaggactctgagacagggactttttatcaaatcggagactcttgggagaaatatgtgcatggagtgagataccaatgctactgctacggacgcggaatcggggaatggcactgtcagcccctgcagacttatccaagttcttctggccctgtagaggtttttattactgaaacaccatctcagcccaattcccacccaattcagtggaatgcgcctcagccttcccatatatcaaagtacattttaaggtggcgtcctaaaaactcagtcggacgctggaaagaagccaccattcctggccacctgaattcctatacaattaaggggctgaagccaggtgttgtttacgaaggccaactaatatcgatccagcagtacggacaccaagaagtgacgagattcgatttcaccactacatctacgagcactccagtgacctcaaataccgtcacaggcgagacgacacccttctctcctctggtcgccactagtgagtccgtgacagagattaccgcgagttctttcgtcgtgagttgggtgtccgccagcgacactgttagtggcttcagggtggagtacgagctgtccgaggagggagacgagccccagtatcttgacctgccctcaacagccacttcagttaatatccccgacctgctgccaggtcgaaagtacatagtcaacgtgtaccagatttctgaggacggtgagcaatcactgattctcagcacgagccagacaacagcccctgacgcaccacctgacacgacagttgaccaggttgacgacacgagtatcgtggtgcgatggtccaggccccaggccccaatcaccgggtaccgcatagtttactctccttctgtggaagggtcttccacagaacttaacctgcctgagacagcaaatagcgttaccctgagcgacttacagcctggtgttcagtataatattacaatctatgcagtcgaggaaaaccaagaaagtacgcctgtggtaatccagcaggagacaaccggcacgccgaggtccgacactgtccctagtccaagggatctgcagtttgtagaggtgacggatgtgaaggtgactataatgtggacacctcctgagtcagccgtaaccggctatcgggtggacgtaattccagttaacctgcccggagaacacggtcagcggttgcctatttcccgaaatacctttgcagaggttactggactgtctcccggagttacctactacttcaaagtctttgccgtctctcatgggagggaatcgaagcccctgacagcccagcaaaccactaagctcgacgcgcctaccaatctgcagtttgtgaacgaaacggattccacagtgttggtgcggtggactcctccacgcgcacagattacaggttacaggctgactgttggacttacccgtcggggacaaccgcgacagtacaacgtgggcccttcagtcagtaaataccccctgaggaacctccagcccgctagcgaatacaccgtttctcttgtggccatcaaaggcaaccaggagagtccaaaggctacgggcgtattcaccacattgcagcccggatcctcaattcccccatacaatacggaggtaaccgagaccactattgtgatcacctggacaccagcaccacgcattggttttaaactgggggtgcgtccatctcaaggaggggaagctcccagggaggtgacctctgatagcggatcaatcgtcgtcagcggcttgacgcccggagtggaatacgtttacactatacaagtgttgcgggatgggcaagagagagatgccccaattgtcaataaggtggtcactcccctgagcccgcctaccaacctccacctcgaggcgaacccagatacaggcgtgctgaccgtgtcatgggaaaggagcacaactccagacattactgggtatagaatcacaactactccgactaacgggcaacaggggaatagtttagaggaggtagtccatgcagatcagtcaagttgcaccttcgacaatttgtccccaggactggagtacaacgtttccgtttacaccgtgaaggacgacaaagagagcgttcctataagcgataccatcataccggcagtgccgccacctaccgacttgcggttcaccaatattggccctgacactatgcgagtgacatgggctccaccccctagcatcgacctaaccaatttcctggtgcggtatagccccgtgaaaaatgaagaagacgtggctgaactgtccatttcaccaagtgacaacgccgtcgttttgaccaacctgctgcctggcacagagtatgtagtgagtgtgtcaagtgtgtacgagcagcacgaatcaacacctctgaggggcaggcagaaaactggactggactcgcccacaggcattgatttctctgacattaccgcaaatagtttcacagtgcactggattgcacctagagctaccatcactggctaccgtatacggcaccatcccgagcactttagcggaagaccaagggaagatagagttccccatagccgaaactctattacgctcacaaatctgactcctggcactgaatacgtggtgtccatcgtggctcttaatggacgggaagaaagtccactacttatcggtcaacagagcacagtgagcgacgtcccccgagatctggaagtcgtagctgcgactcctaccagtttactcatctcttgggacgccccagcagtcacagtcagatactaccgcatcacttatggcgaaactggaggaaactcacctgtgcaggagtttacagtcccaggcagtaagtccaccgctaccatttccgggttgaaaccaggggtggattacactatcaccgtgtacgctgtgacggggagaggcgattctccggcttcctcaaagcccatctctatcaattatcggacagagattgataagccttctcagatgcaggtcacagacgtacaggataactccattagcgttaaatggttgccctcgagctccccggttaccggctaccgggtaaccacaacccctaaaaacgggcctgggcctaccaagacgaaaacagcaggtccagatcagaccgagatgaccatagagggcctgcagcccacggtggagtacgttgttagtgtttatgcccagaatcctagcggcgagagtcagccattagtgcaaacagctgtgacgaacatcgacagacccaagggactggcttttaccgacgtcgatgttgattcaatcaagatcgcatgggaatcacctcaggggcaggtctccagataccgcgtaacctactcatctcctgaggatgggattcatgaactctttcctgcccctgacggcgaagaggacaccgctgagctgcagggcttgagaccaggttccgaatataccgtttcagtcgtggcactgcacgatgatatggagagccagccactgattggcacgcaatcaactgcaataccagcccctactgatctgaagttcactcaggttacaccaacctctctgtctgcccagtggacacccccaaatgtgcagttgacggggtacagagtgcgagtcactcctaaggaaaagaccgggcctatgaaggaaatcaacctggctcctgacagttcaagcgtggtggttagcggcttgatggtggcaacaaagtatgaagtgtccgtctatgcactgaaggatactttgacaagtcggcctgctcagggagtggtgactacactggagaatgttagccccccaagacgcgcacgtgtcacggatgccaccgagaccaccatcaccatttcatggcggacaaagactgagaccatcacaggatttcaagttgatgccgtcccagctaacggtcaaacgcctattcagcggaccattaaacccgacgtgagaagctatactatcactggcctgcagcctggcacagattacaagatctacctctacactctgaacgacaatgcacggagcagccccgtggtgatcgacgcctccaccgcaatcgatgcccctagcaaccttagatttctcgctacaacaccaaactcccttctggtcagctggcaaccacctcgggcaagaatcactggctatatcattaaatacgagaagccaggcagcccaccaagggaagtggtgcctcggcctcgcccaggcgtcaccgaagccaccatcacgggcctggagccgggtactgagtatacaatctatgtcattgcacttaagaacaaccagaagtctgaaccactgatcggcagaaagaagaccgtcaacgagggactgaaccagcccactgatgattcctgtttcgatccttataccgtatctcactatgctgttggggatgaatgggagcggatgtcggaatcaggattcaaacttctgtgccagtgcctgggattcggaagcgggcacttccgctgtgacagtagcagatggtgccacgacaacggcgtcaattacaaaattggggagaaatgggacaggcagggtgagaacggccaaatgatgtcgtgcacatgtctcggaaacggaaagggtgaattcaagtgcgatccccatgaggctacctgttatgatgatggcaaaacctaccatgtaggggagcagtggcagaaggaatacctaggggcaatttgcagttgtacatgctttggcggtcagaggggatggcggtgtgataactgcagacgtcctggtggtgagccttctcctgaagggacaaccggtcaatcgtataatcagtatagtcagaggtaccaccagaggaccaatacaaacgtgaattgcccaatcgagtgttttatgccgctcgatgtgcaggccgacagggaagattccagggagtat

SEQ ID NO: 267210 - DNA, 6636 bp, Artificial Sequence
  derived and/or modified sequence
atgttgagagggcctggtccaggacttttactcctcgctgtgcaatgccttggcaccgccgttccctctactggagcctcaaagagtaaaagacaggcacagcaaatggtgcaaccacaaagcccagtggctgtcagccaaagtaaacctggatgttatgacaacggcaagcactaccagattaaccaacaatgggaaagaacatatctcggcaatgcgctcgtctgcacttgttacgggggatcccgcggatttaattgtgagtcaaaacccgaggccgaggagacttgcttcgacaagtataccgggaatacctatcgagtcggggatacctacgagaggcctaaagacagtatgatttgggattgtacttgtattggggctggcagaggccgaataagttgtactattgctaaccgctgccatgaagggggacagagctataagatcggagatacgtggagaagaccccacgagactgggggatatatgctcgaatgcgtgtgcctaggcaacggcaagggtgaatggacttgtaagcctattgctgaaaaatgctttgaccacgccgcaggcacctcgtatgtcgttggcgaaacttgggaaaagccgtaccagggctggatgatggttgactgcacatgtcttggagaaggcagcgggaggatcacatgtacatcccgaaaccgctgcaacgatcaggacacaagaacttcctaccgcattggagatacctggagcaagaaggacaaccgcggaaatctgctgcagtgtatctgtacaggcaacgggagaggagagtggaagtgcgaaagacacacaagcgttcaaacaacctcatcagggagcgggccttttactgacgtgcgcgctgccgtgtatcagccccagcctcacccgcagccaccgccttacggccattgcgtcactgattctggtgtggtttattccgtcggcatgcagtggttgaaaacccagggtaataagcagatgctgtgcacctgcctgggtaacggggtcagctgccaggaaactgctgtgacacaaacctatgggggaaatagcaatggagaaccttgtgtgctgcctttcacctataacgggaggaccttttattcctgcaccaccgagggccgtcaggatggacatctctggtgttccacaacttctaactacgagcaggatcagaaatactctttctgcaccgaccatacagtcctcgtccagacccggggtggaaatagtaacggcgcattgtgccacttcccatttctgtataacaatcacaattacacggactgtacttctgaaggacgcagggacaatatgaagtggtgtggaaccacgcagaactacgatgctgaccagaaattcggcttctgccctatggcagctcacgaggagatttgcaccaccaatgagggcgtgatgtatcgcattggggaccagtgggataagcagcatgacatgggccacatgatgcggtgcacatgcgtgggaaacggcaggggagaatggacctgtattgcttattcacaactcagggatcagtgcatcgtggacgacatcacttacaatgtcaacgatactttccataagcggcatgaagagggccacatgttaaactgtacctgctttggacagggtcgcggacggtggaaatgtgatcctgtcgatcagtgccaggatagcgaaaccggcacgttctatcaaatcggcgattcctgggaaaaatacgtacatggcgtgagatatcagtgctattgttatggacgcggtatcggtgaatggcactgccagccgctgcagacctacccatctagttccggtcccgttgaggtgttcattacagagactccttcccagccaaatagtcatccaatccagtggaacgctccacagccatcccatatttctaaatacatcttgagatggcgccctaagaatagtgtcggacgatggaaagaagctacaatccccggtcacctgaattcatacaccattaagggactgaagcctggcgtagtgtacgaggggcaactgatctcaatacagcagtatggccatcaagaggtgacaagattcgattttactactacaagtacgagcactcctgtgacatctaacaccgtgacaggagaaaccacgcccttctctccactggtcgcgacatcagaaagcgttactgagattacggccagcagctttgttgtgtcctgggtctccgccagcgacaccgtgagcggattcagagtggagtacgagttatcagaggagggtgatgaaccacagtatctggatttgcctagcacagccacatcggtgaacatccccgatctactccccggaagaaagtacatcgttaacgtgtatcagatctctgaagacggggagcagagcttaatcctgtcgaccagccagactaccgctcccgacgctccacccgacaccactgtggaccaggtagatgacacatccatcgtagttcgttggtccaggcctcaggctccaattacagggtaccgaatcgtctattccccttccgtcgagggatcaagcactgaactgaatttaccagagaccgctaattcggtcaccctaagcgacctgcagccaggagtgcagtacaatataactatttacgccgtagaagagaaccaggagagcacaccagtcgtcatccagcaggagacaacaggcactccgcgaagcgataccgtcccgagccccagggacttgcaattcgtagaagtcaccgatgtgaaagtgacgatcatgtggacacctcctgagagtgcagttaccggttatcgcgtggatgtgatacctgtgaatctaccgggagaacatggtcagagattgcctatcagcaggaatacctttgctgaagtcaccggtttatcccctggcgttacctattactttaaagtcttcgcggtgagccatgggagggagagcaagcctctgactgcgcagcaaactacaaagttggatgctccaactaacctgcagttcgtaaacgaaaccgacagcaccgtacttgtgaggtggaccccaccaagggcacagatcacaggctatcggctgactgtgggactgaccaggcgtggccagccgaggcagtacaacgtaggacctagcgtgagcaaatatccactccggaacctccagccagcttcagagtacacagtttcactggttgcaatcaaggggaatcaggagagccctaaggcgaccggagttttcaccactctccagcctggatccagcatacccccttacaataccgaggtgactgaaaccaccatcgtgattacttggacaccagcaccccgaattggattcaagttgggcgtgagaccgagccaaggtggcgaagccccacgagaagtgacatccgattcaggaagtattgtagtgtcgggcctgacaccgggtgttgagtacgtgtacaccatccaggtgttaagggacgggcaggaacgggatgcacccatcgtcaacaaggtggtgactcctctgtcaccccctaccaacctgcacttagaggctaatcctgatacgggagtgcttacggtcagttgggagcggagcacaacacccgacattacaggctacaggattacaacaactcctacaaatggccaacagggaaattctctggaagaggtggtgcacgcagatcagtcttcctgtacctttgataacctctcgcctggtctcgaatacaatgtcagtgtgtatacagtcaaggatgacaaggagtctgtgcctatatccgatacaatcatccccgctgtgccacctcccaccgaccttcgcttcaccaatattggaccagatactatgagggtgacttgggccccaccacccagtattgacttgaccaattttctggtcaggtattcacccgtaaagaacgaagaagacgtggccgagctgtcaatatctccctccgacaatgccgtggtgcttaccaacctgctgcctggtaccgaatacgtagtctctgtgagctctgtgtatgaacagcatgagtcaacaccattgcggggacgtcaaaagaccgggttggacagccccaccggaatcgatttttcagatataaccgctaatagcttcaccgtccattggatcgccccacgcgctaccatcacaggctataggatccgccatcacccagaacacttttcaggacggccacgagaggatagagtgccacactccagaaactcaatcacactcaccaacctgactccaggcactgaatatgtggtgagcatcgttgccctaaacggtagagaagagagtccattgctcattggtcaacagagcaccgtgtccgatgtgccaagggacctcgaggtcgtcgctgcgacgcctacctcattactgatttcctgggacgccccagccgtcacggtccgttactaccggataacttatggagagaccggaggcaattctcctgtgcaggagtttactgtgcccggatctaagtcaactgccacaatcagtggcctcaaaccaggggtcgactacacgattacagtgtacgcagtgactggtagaggcgatagtcccgcaagtagcaagcccatttctataaattatcggaccgagattgacaagccttcccagatgcaggtgacagacgttcaggataatagcatctccgttaagtggttgccatcatctagccccgtgacaggatatagagtgactacaacgccgaaaaacgggcctggccctacgaaaaccaagacagcaggaccagatcaaacagagatgacgatcgaaggcctccagcccacagttgagtatgtggtcagtgtctacgcacagaatccctctggggagtcgcagccccttgttcagaccgcagtgacaaacatcgatcgtcctaaagggctggctttcactgacgtagatgttgattctataaaaatcgcctgggagagccctcagggacaagtaagccgttacagagtgacatacagctctcccgaggatggaatacacgaactattcccagcaccagacggagaggaagatacagccgaacttcaagggcttaggccagggtcagaatataccgtctctgtggtggcactgcatgatgatatggagagtcagcctctgatcgggacccaatctaccgcgatcccagctcccaccgacctgaagttcacacaggtgacccccacgagcttaagcgcacagtggaccccccctaacgttcagctgacaggttacagggtacgtgtgacccccaaggagaaaacgggccctatgaaagaaattaacctggcccctgacagctcgtctgttgtcgtgtcggggttgatggtggccaccaagtatgaagtgagtgtttacgcgttgaaagatacactgacctcacgacccgctcagggcgtggtgacaacacttgaaaacgtgtccccacctcgcagggccagagtgacggatgccacagaaactacaattacaatcagctggcggacaaaaacggagacaattaccggatttcaggtcgacgccgtcccggctaacgggcagacaccaatacagcggactattaagcccgacgtccgctcatacaccatcacaggcctgcagccaggaacggattacaagatctatctctacactctaaatgacaacgccagatcaagtcctgtggtcattgacgcttccactgcaatcgatgccccaagcaatctgcgtttcctggcgaccacaccaaactccttactggtctcttggcaaccacctagggcgagaattaccggctatatcattaagtacgaaaagcccggtagtcccccacgggaggtggtaccacgccctaggcccggagttactgaggccacaattaccggattggagccgggtacagaatataccatctacgtgatagccctgaagaacaaccaaaagtcagaaccactgattggtagaaagaaaactggtcaggaggccttgagccagactactatatcctgggctcccttccaggacacatcggagtacattattagctgccatcctgttggaactgacgaggaaccacttcagtttcgagtgccagggacgagtacctccgcgactttaacgggcctgacaagaggcgcaacctataatgtcattgtcgaggccttaaaggaccagcagcgtcataaagttcgcgaggaggttgtgactgtgggtaatagcggctggtgccatgacaatggagtgaactacaagatcggtgagaaatgggaccgccagggcgagaacggacagatgatgtcttgcacatgcctggggaatgggaagggggaatttaagtgtgatcctcatgaggctacgtgctacgatgatgggaagacttatcacgttggagagcagtggcaaaaggaatacctgggcgctatctgttcttgcacatgctttggtggacagagaggctggcgttgtgacaattgtcgacgtcctggaggcgagccatcccctgaaggaaccacggggcagagttataatcagtatagccaaaggtaccatcagaggaccaataccaatgtgaactgccccatcgagtgttttatgcctctggatgtgcaggcagaccgggaggattctcgagagtac

SEQ ID NO: 267211 - DNA, 6095 bp, Artificial Sequence
  derived and/or modified sequence
atgctgcgagggcctggacctggcctgctactgcttgcagtccagtgtctcggcacagccgtccccagcacaggcgcatcgaaatccaagcgccaagcccaacagatggtgcagccccagtccccagttgcagtcagtcaaagcaagccagggtgttatgacaatggaaagcactatcaaattaatcagcaatgggaaaggacctaccttggcaatgccctcgtatgtacgtgctacgggggttctagagggttcaactgtgagagcaagccggaggccgaagagacctgcttcgataagtacaccggcaatacttaccgtgtgggggacacttacgaaagaccaaaggattcaatgatctgggactgtacgtgcatcggcgcaggcagaggtcggatcagttgcacaatagccaaccggtgtcacgaaggtggccaatcctataaaatcggtgacacatggaggaggccccacgaaactggaggttacatgctcgagtgcgtgtgtctgggaaacggaaaaggcgaatggacctgtaaaccaatagcagagaaatgttttgatcacgccgctggaacgtcctacgtggtgggagagacatgggaaaagccttaccagggctggatgatggtagattgcacttgcttgggggaaggatccgggcgtatcacatgcacctcccgcaacagatgtaatgaccaggacaccaggacatcttaccgaattggtgacacttggagcaagaaggataatcggggtaatctgctccaatgtatctgcactggcaatggacgcggagagtggaaatgcgagaggcatacctccgtgcagacaacaagctcaggatcgggcccttttacagatgtgagagctgcagtatatcaaccgcaaccccatccgcagccgcctccatatggacattgtgtcacagactccggcgttgtatatagcgtcggaatgcagtggctgaagactcaggggaacaagcaaatgttatgcacatgtctggggaacggtgtctcatgccaagagactgccgtgacacagacctacggcggtaacagcaatggcgagccatgtgtgttgccattcacttacaacgggaggaccttctattcctgcactactgaggggaggcaggacggacacctgtggtgttctactacctcaaactatgagcaagatcagaaatacagcttctgtaccgatcacaccgtgctggtacagacacggggtggtaattctaatggtgccctctgccattttccttttctctataacaaccataattataccgactgtacaagcgaggggaggcgcgacaatatgaagtggtgcggtacgacacaaaactatgatgccgatcagaagttcggattttgccctatggccgctcatgaggaaatttgcaccacaaacgagggcgttatgtacaggatcggagaccagtgggacaagcaacacgacatgggccatatgatgagatgcacctgcgtgggtaacggaagaggggagtggacgtgcatcgcctactcccagctgcgcgatcagtgcatcgttgacgatatcacttacaatgtgaacgatacgttccataaaaggcacgaggagggacacatgctcaattgcacttgctttggacagggcagagggagatggaaatgcgaccccgtggatcagtgtcaggattcggaaacaggcactttttaccagatcggcgattcctgggaaaagtacgtgcacggagttagatatcagtgttactgttatgggcgtggaataggagagtggcactgtcagcccttgcaaacgtacccctcaagtagcggacccgtcgaggtttttatcacagaaacaccaagtcaaccgaacagccatcccatccaatggaatgcccctcaaccgagccacatatcaaagtatattttgaggtggcgcccaaagaatagcgtgggcagatggaaagaggccaccattcctgggcacctgaattcttacaccatcaaagggctcaagccaggcgtcgtgtacgaggggcagctcatctccatccagcagtacggacaccaggaagtgacccgctttgattttaccaccacgtcgacatcaacccccgttacctcaaataccgtcactggtgagactaccccgttttcgcccctagttgctacatccgagagcgtgacagagattactgcaagttcattcgtggtttcgtgggtgagcgccagcgacacagtttcgggatttcgtgttgaatatgagctcagcgaggaaggggacgagccccagtacctggatctgccctcaaccgcaactagtgtcaacattcctgacctgctcccaggcagaaagtacatcgtcaacgtgtaccaaatctctgaagatggtgaacaatcactcatactgagtacaagccaaaccacagccccagacgcacctccggatacaactgtggatcaagtcgatgacacgtcaattgtggttagatggtctcgtccccaggccccaatcacaggctaccggatcgtctattccccctctgtggaaggctctagtactgagttaaacttacctgagactgccaatagtgtcaccctgtctgacctccagcccggagtgcagtacaatattaccatctacgcggtggaggagaaccaggagagcacacctgttgtgatccaacaggagaccaccggaactccgaggagcgatactgtgccttctcccagggatttgcagtttgtggaagtaactgacgtaaaggtgacaattatgtggacaccacccgagtccgccgtaacaggttatcgagtggatgttattcctgtgaacctccctggggaacatgggcagaggttgccgatcagtcggaatacctttgctgaagtaaccgggttatctcccggtgtgacttactactttaaagtgttcgcagtgtctcacggcagagaatcgaagccacttacagcacagcaaaccaccaaacttgatgcacctactaatctgcaatttgtaaatgagaccgactcaaccgtattagtacggtggacgccaccacgtgcacagatcaccgggtaccgactcactgtcggcctgacacggagagggcagcctcgccagtacaacgttggcccatcagtctccaagtacccactccgcaatcttcagcccgcatcggaatacactgtgagccttgtggcgattaaaggcaatcaagagtcgccaaaagccacaggggtgtttacaacccttcaacctggatctagtatacccccttataacactgaggtgactgaaactaccatagtgattacatggacgccagcacccaggattggtttcaagcttggtgtgagaccgtcccagggaggcgaagcccctcgggaggtgaccagcgattccggatctattgtagtgagcgggcttacacctggggtggaatatgtttacactatacaggtgctgcgcgacggccaggagagagacgctcctattgtgaataaagtggttaccccgctgagtcctccgaccaacctccacctagaggccaaccctgatactggagtgcttacggtatcctgggagcgcagtactactcctgacattaccggatacagaattaccaccactccgactaacggccagcaggggaactctctggaggaggtcgtgcacgcagatcagtccagctgcacctttgacaacctaagccccggacttgaatacaacgtgtctgtgtatactgtgaaggatgataaagaatccgtgcccatctcagacaccattatacctgctgtgccccctccaacggacctcagatttacaaatataggacccgataccatgcgggtgacctgggctccgccaccaagcattgacttaactaatttcctcgtaagatattcccctgtgaaaaacgaggaggatgttgccgaactctcaatctctccctccgataacgccgtcgtgttgactaacctcctgcctgggactgagtacgtggttagcgttagctctgtctatgagcagcacgaatctacgcccctcaggggtcggcagaaaaccggcttggattcacctactgggatcgatttctcagacattactgctaattctttcaccgtgcactggattgcccctcgtgccaccatcactggataccgcatccggcaccaccccgaacatttttctggtcgacccagggaggaccgcgtgccacacagccgtaacagtatcactctgacaaacttgaccccagggacagaatatgtggtgtctatagtagccctgaatgggcgagaagaatcacccttactgatcgggcagcaatcaactgtgtccgatgttccaagggacctggaggtagtggctgcaactccaacatcgctcttaatttcttgggatgctcctgctgtcacagttaggtactatagaatcacctatggtgagacagggggaaactctccggtccaggaattcacagttccaggatctaaatctaccgcaacaatcagcggactcaaacccggtgtggactacacaataacggtctacgccgttaccggcagaggggactcaccggctagcagcaaaccaatctcaattaattaccggactgagatcgacaagccatctcagatgcaggtgaccgacgtgcaggataatagcatcagtgttaaatggctgcctagctcgtcccctgtgactggttaccgcgttacaacaactccaaaaaatggacccggtcctacaaaaacaaagacagctggcccagatcaaaccgaaatgacgatcgaaggcctgcagcctacagtagagtatgtggttagcgtctacgcacagaacccttcaggcgaatcgcagccacttgttcagactgctgtgacaaatattgatcggccaaagggcctggccttcaccgacgtagacgtggattccattaagattgcatgggaaagtccccaaggacaggtgagcagataccgggttacttactccagtccggaagatggaatccacgaactatttcccgctccagacggagaagaagatacagcggagctgcaggggcttcgaccaggtagcgagtacaccgtgtcagtggtcgctctgcatgatgatatggaatcgcaacctcttataggtacccagtccaccgccatccctgccccaaccgatctcaagtttactcaggttacaccgacaagcctctctgcccagtggacccctcccaacgttcagctcaccggttatcgagtgagggtgacccccaaagagaagaccggccctatgaaggaaattaatctagcccctgacagctcgtctgtagttgtcagcggcttgatggttgccaccaaatatgaggtgagtgtgtatgcgctgaaagacaccttgaccagccgcccagcacagggcgtagtgacaactttggagaacgtgtcccctccgaggcgagccagagtgacagacgcaacagaaactactattacgatctcctggagaaccaagacagagactatcacgggcttccaagtggatgctgtgccggctaatggtcagacaccgatccagcggacaattaaacctgatgttcggtcctacacaattaccgggctacagccaggtacagattataagatctacctttatactttgaatgataatgctcgctcatctcctgtggtgattgatgcgagcaccgctattgacgctccgagcaacctgcggttcttggcaaccaccccgaactccctgctggtgtcatggcaacctccacgcgctaggataacaggatacatcatcaagtacgagaagcccggatctcctccgcgagaagttgtacctcgccctcgcccaggagtcaccgaagctacaatcactggacttgagccaggcacagaatacaccatctatgtgattgctctgaagaataaccagaaatcagaacccttgattgggaggaaaaagacaggtcaggaggccctttctcaaacaacaataagctgggcaccctttcaggatacgtccgaatatattattagctgccatccggtgggcactgatgaggaacctttgcagagtaccaaggccta

SEQ ID NO: 267212 - DNA, 6555 bp, Artificial Sequence
  derived and/or modified sequence
atgctgcggggccccggtcctggcttgttgctcttggccgtgcaatgtctcgggacagcagtaccatctacaggtgcctccaagtctaagcgccaggctcagcagatggtgcagccgcagagtcctgttgccgtgtcccaatcgaaaccaggctgctatgacaacggcaagcactatcaaatcaaccaacagtgggagcggacctacctgggcaacgcactagtgtgcacatgctacggaggttccagagggttcaactgtgagtctaaacccgaagctgaagaaacgtgcttcgacaagtacactggtaatacctatagagtgggtgatacctatgaacgacccaaagattctatgatctgggattgtacctgcatcggagccgggaggggccgtatatcttgtactatcgccaaccgttgccacgagggaggtcaaagctacaagataggggacacatggcggaggccacatgagacaggtggatacatgctcgagtgtgtgtgcctgggtaacgggaagggcgagtggacctgcaagccaatcgcagagaagtgttttgaccacgctgctggcacaagctatgtggtaggagagacatgggagaagccataccaaggctggatgatggttgactgtacgtgcctaggcgaaggctccggtcgtattacctgtaccagtagaaatcggtgcaatgaccaagatacccgcacatcttatcgcattggggatacgtggtctaaaaaggataataggggtaacttacttcaatgtatctgcaccggcaacggccgcggcgagtggaagtgtgaacgacacacctcagtgcagactaccagctctggatctggacccttcaccgacgtacgcgctgccgtataccagccacaacctcatcctcagcctcccccctatgggcattgtgtgacagactcaggtgtagtgtacagcgtggggatgcagtggctcaaaacccaggggaacaagcagatgctgtgcacctgcctggggaacggcgtgtcctgtcaggaaacagcagtgacacagacatatggtggcaactctaacggtgagccatgtgtgttaccttttacctacaacggacgaacgttttattcctgtaccactgagggcaggcaagacggccatctctggtgtagtaccacttcaaattacgaacaagatcaaaaatacagtttttgcacggaccacactgtgcttgtccagacacggggcgggaatagtaacggggccttgtgccactttccctttctctataacaatcacaactataccgactgtacctctgaaggccgtagagacaacatgaagtggtgtggaaccacacagaattacgacgcagatcagaagttcggtttctgtccaatggccgctcacgaagagatctgtacaacaaacgagggcgttatgtaccgaattggggatcaatgggataaacagcacgatatgggacacatgatgcggtgtacatgcgttggcaacggaaggggcgagtggacatgtatcgcctactcacagcttagggaccagtgcatcgtagacgatattacgtacaatgtcaacgatactttccataagcgccatgaagaggggcacatgctgaattgtacttgcttcggccagggacgcggtcgatggaagtgtgaccccgtggaccaatgccaagattccgagactgggacattctaccagattggcgatagctgggagaaatacgtgcatggtgtgcgatatcagtgctactgctatgggcgtggcatcggcgagtggcattgccagcctctgcagacctacccgtccagctccgggccagtggaagtgtttattacagagactcccagtcaaccaaatagccacccaattcaatggaatgcacctcaacccagtcacattagtaagtacatcttaaggtggcgtcccaaaaactccgttggacgatggaaggaggccaccatccccggccacctgaacagctacaccataaagggcctgaaacccggtgtagtgtacgaaggccagctcatatccatacagcagtatggacaccaagaagtgacgcggtttgactttacaacaacttccacgtctacccccgtcacttccaacactgtgactggagaaacgaccccattttcacccttggtcgccaccagtgagtctgtgacagagattacagcttcctcattcgtggtttcttgggtgagtgcctccgacactgtttccggtttccgggttgaatatgaactgtcagaggaaggtgacgagccccagtatctagatttgccctcaaccgcaacctctgtgaatatccctgatcttttgcccggacggaaatatattgtaaacgtgtaccaaatatcagaagatggagagcaaagcctgattttgtcgacctcccaaacgaccgcacccgacgctcccccagacactaccgtggatcaggtggatgatacttcaatagttgtccgatggtcccggcctcaagcccccatcaccggttatcgtatagtttactcacctagtgtcgaaggttcttcaacagaactcaatctgccagaaacggcgaattcggtgaccctgtctgaccttcaaccgggagtgcagtacaacattaccatatacgccgtggaggagaatcaggagagcacaccagtagttatccagcaggaaaccacaggcactcctaggtctgataccgtaccatcccctcgagatctacagttcgtagaagttaccgacgtgaaggtgaccatcatgtggacaccgccagagagcgccgtgacgggctatagagtggacgtcatccccgtgaatttgcccggagaacacggccagcggttgcccatttcgaggaacacatttgctgaggtcactggactgtcccctggggtgacgtattatttcaaggtgttcgctgtgtctcatgggagggaatccaagcctctgactgcccagcaaactactaaattagacgctcctactaacttgcagtttgtcaatgaaactgacagcaccgtgctggtgcgatggacacctccacgtgctcagattaccgggtatcggttaacagtaggactcacccgccgcggtcaaccacgccagtataatgttggtccatctgtaagtaagtaccccttaagaaacctacagcctgcctcagagtataccgtctccctcgtcgctatcaaagggaatcaagagtcccccaaggcaaccggagtgttcaccacattgcagccaggctcctctatcccaccctataacacagaagttactgaaacaactatagtaataacttggacccctgcgccacgcattggctttaagctgggggtaagacccagtcagggaggggaagcacctagggaagtgaccagtgactcaggctccatagtcgtgtccgggcttactcccggagtagagtacgtttacactatacaggtgctcagagacggacaggaacgagatgcaccgatagtaaataaggtcgtcactcctctttcccctcccacaaacctccacctcgaggctaatccagatactggtgtccttaccgtcagctgggagagaagcaccacccctgacatcacaggttatcggatcaccacaactcccactaacggacagcagggcaatagtctggaggaggtcgttcatgcggaccagtcttcttgcacgttcgacaatctgagccctggcctcgaatacaatgttagtgtgtatacagtgaaggacgacaaagagagcgtgcccatctcagataccatcatccccgccgtgccaccacccactgacctgagatttacaaacatcggtcccgataccatgcgggtaacttgggcgcccccaccgagcatcgacctaactaatttcctcgtgaggtactcccctgtcaagaacgaggaggacgtggctgaactgagtatctccccgagtgacaacgccgtggtcttgaccaacctgctacctggcacggagtacgtggtgtctgtctctagcgtttacgagcaacacgagagcactcctttgcgaggccggcagaagacaggcctcgactcaccgactggcattgattttagcgatattacagccaacagcttcaccgtgcactggattgccccccgggccactattacaggataccgcatcagacaccatccagaacacttctcgggtaggccccgcgaggaccgggtaccccactcaagaaattcaatcacccttaccaacttaactcccggcactgagtatgttgtgagtattgttgctctcaacgggcgcgaggaatctcccctcctcatcggccagcagtccacagtaagcgacgtgccacgcgacttagaagtggtcgcagccactccgacatcactcttaatttcctgggatgctcctgcggtgacagtgagatactatagaattacctacggcgagaccggtggaaatagccccgtacaggagttcacagtgcctgggtccaaatcaacagctactatctccggcctcaaacccggagttgactataccatcaccgtgtatgccgtgactgggcggggcgattcaccggcatcaagcaaacctatctccatcaactaccgcaccgaaatcgataaaccgagccagatgcaagtgaccgacgtgcaggacaattccatcagtgtgaagtggctgccttcgagtagccctgtcacaggttatcgcgtaaccaccactcccaaaaatggtcccggtccaactaaaacaaaaacagccgggccagaccagaccgaaatgactatcgaaggtttacagcctaccgtcgaatacgtggtgagcgtctacgcccagaatccgagcggcgagtctcagccactggttcagaccgctgttaccaacatcgacaggcccaaaggattggcttttaccgacgttgatgtggatagcattaagatcgcatgggagagtccacaaggccaggtgagtagataccgcgtgacttacagctccccagaggatgggattcatgaattatttccagcacctgatggagaggaagacacagcggaacttcaaggcctgcgaccaggaagcgaatacaccgtatctgttgtcgcccttcatgacgacatggagagtcagcctctaatcgggacccagagtaccgcaatccccgcacctacagatctaaaatttactcaggttactcctacttccctcagcgcccagtggactccccccaatgtgcagctgactgggtatcgagttagggtaacaccgaaggagaaaaccggaccgatgaaagagatcaacctggctcccgactcatcgtccgtagtggtcagcggccttatggtcgcaaccaaatacgaggtcagtgtgtacgcattgaaggacaccctcacctcaagaccagcccagggcgtggtgacaacgctggagaacgtctcaccccccagaagagcccgcgtgactgacgccacagaaacaaccattaccattagctggcggactaaaacagagactatcactggcttccaggtggatgctgtgcccgccaatggccagacccccatccagcgcacgattaagccagacgttcggagttataccataactgggttacagcccggaaccgattacaagatctacctttacactctgaacgacaacgcccggagcagtccagtggtcatcgacgcctctacagcgatcgacgccccatccaatcttaggttcctcgcaaccacgccgaactctttactggttagctggcaacccccacgggctcgcataactggctacattatcaagtacgagaagccaggatctcccccccgcgaagtcgtcccgcgccctcgccctggcgtgaccgaggctaccattacagggctcgagcctggcaccgaatacactatttacgtgattgccttgaagaataaccagaaaagcgagcccttaataggaaggaagaagacagtcaatgaggggttaaatcagcccacagatgattcttgtttcgacccctacacagtatcccattacgcagttggagacgaatgggaacgaatgagtgagtccggctttaagctcctgtgccagtgcctcggctttggctctggccactttaggtgtgattcctccagatggtgccacgataatggagtgaactataagatcggcgaaaagtgggacaggcagggggaaaacggccagatgatgtcgtgtacctgtctcggaaatggcaaaggcgagttcaaatgcgacccgcatgaagccacatgttatgacgacggtaagacatatcatgtcggagagcaatggcagaaagaatacctgggcgcaatctgttcctgtacatgttttggcgggcagcgcggatggaggtgtgacaattgcaggcgacctggaggtgaaccgagcccggagggcacgacaggccaatcctataatcagtattctcagcgctaccaccaaaggaccaacacgaacgtcaattgtccaatagagtgtttcatgccgctcgacgtccaggccgatagagaggattcacgcgaatag

SEQ ID NO: 267213 - DNA, 6636 bp, Artificial Sequence
  derived and/or modified sequence
atgctcagaggacccggaccaggcttactactcctggccgtccaatgtctaggaaccgcagtgccaagcacaggcgcaagcaaaagcaaaaggcaggcgcagcaaatggtgcaaccccagtcgccagtggccgtatcacagagcaaaccgggctgttacgacaatggtaaacattaccagattaatcaacagtgggagcgtacgtatctgggcaacgctctggtgtgcacatgctatggaggcagccggggattcaactgtgagagtaagcccgaagcagaagagacctgttttgataaatacacgggcaacacctacagggtgggcgacacctacgagaggcccaaggactccatgatatgggattgcacctgcatcggggccggcagggggcggatttcatgtaccattgccaacaggtgccatgaggggggacagtcatataagatcggggatacgtggcgccgtcctcacgagacagggggttacatgttagaatgcgtctgtctggggaacgggaaaggagaatggacctgcaagccaatcgctgagaagtgctttgaccatgccgccggcacttcgtacgtcgtgggcgaaacatgggaaaaaccataccaaggatggatgatggtcgattgtacctgtcttggagaaggctcaggcagaattacgtgtacaagcaggaatcgttgcaatgatcaagacacacggacctcgtacaggataggagatacatggagtaaaaaagacaataggggtaacctgctgcagtgtatatgtacgggcaatggtcgcggagagtggaaatgcgagcggcacacctccgtgcagaccactagcagtgggtcaggccccttcacggatgtccgggctgcagtttaccagccacaaccgcaccctcagccccctccctacgggcactgcgtgacggactctggtgtggtttactcggttggcatgcagtggctgaagacccaaggaaataaacagatgctctgtacgtgtcttggcaatggtgtgtcttgccaagagacagctgtaacacagacatatggcggcaatagcaacggagagccctgcgtgcttcctttcacctacaatggaaggaccttttattcctgcaccactgagggccgacaggacggacacctgtggtgttcaacgacttccaactacgagcaagatcagaagtactcgttttgtacagatcatacagtcctggttcagacacgcggcgggaacagtaatggggccttgtgccatttcccatttctctacaataaccacaattacaccgactgcaccagtgagggccggcgggacaacatgaaatggtgcgggacgactcagaactacgatgcggatcaaaaattcggattctgcccaatggctgctcatgaagaaatttgtaccaccaatgaaggtgtgatgtatcgtatcggggatcaatgggacaaacagcatgacatgggacacatgatgaggtgcacttgtgtcggcaacggccgcggtgagtggacctgtatcgcctattcgcagctaagagaccaatgcattgtcgacgatatcacatataatgtcaacgatacttttcacaagcgacacgaagaaggccatatgcttaactgcacttgttttggacaaggccgcgggaggtggaaatgcgacccagttgatcaatgccaagacagtgaaaccggcaccttctaccagattggtgattcctgggaaaagtacgtgcacggagttaggtaccagtgctattgctatggtagaggaataggcgagtggcattgccagcccctacaaacttacccctcctcgtcaggtcccgtggaggtatttataacggagactccgtcacaacctaatagccaccctatacagtggaatgccccccagccatcacatatctcaaagtatattctgagatggaggccaaagaatagcgtgggaaggtggaaggaggccacaatccctggccatttgaactcttatactataaaaggtctgaaaccaggagtggtgtacgagggacagcttataagcatccaacaatatggacaccaggaggtcaccaggttcgactttactacaaccagtactagtacccctgtaacttcaaacactgtaaccggggaaacaacaccattttctccccttgttgctacaagcgagtcagttacagaaatcaccgcatcatccttcgtcgtcagttgggtgagcgccagcgatacagtaagtgggttccgtgtggagtacgagttatctgaagagggggacgaaccccagtacttggacttacctagcacagccactagcgtcaacattccggatctcctgccaggtagaaagtacatagtgaacgtttatcaaatttcggaagacggggagcagtctctgattctctctacatctcaaacaacagcccccgacgcacctccagacactactgtcgaccaggtcgacgacacatcaattgtggtaagatggtcccgacctcaggcccctattactgggtatcggatcgtgtatagcccaagcgtggagggatcgagcacggagcttaatttaccggagaccgcaaactcagtgactttaagcgacctacagccaggcgtccagtacaatattactatttacgctgtggaagagaaccaggaaagcaccccagtcgtgattcaacaggagaccactggcacacccagaagtgacaccgttccgagtcccagggatctgcagttcgtggaggttacagacgtgaaggtcaccattatgtggacaccacctgagtcagcggttaccggatatcgggtggacgtgatccccgtaaacctgcccggcgagcatggtcagcggcttcccatatcacgaaatacattcgctgaggtgactggcctgagtcctggcgttacctactatttcaaggtctttgccgtcagtcacggccgggaatcgaaacctctgaccgctcagcaaactaccaaattggacgcccccaccaacctgcagtttgtcaatgagaccgacagcaccgttttagttcgctggacgccgccccgggctcagatcaccggctataggctgaccgtcgggctcacccgcaggggtcagcctagacaatataacgttggtccaagtgtgagcaaatacccccttcgtaacttgcaacctgctagcgagtacactgtaagcttagtcgcaatcaaaggcaatcaggaatctcccaaagcgaccggcgtatttacgacactgcagcccggctcctcgattcccccatacaacactgaagtcactgagacgactatagtcattacatggacccctgcccctcgaattggattcaagttgggcgtgcgcccctcccagggaggagaagcccccagagaggtgacctctgacagcggtagcattgtggtgagcggcctcacgccaggcgtggaatatgtctatactatccaggtgttaagggatgggcaggagagggatgcccccatcgtcaataaagtagtaacacctctaagcccacccacgaacttacatctcgaagcaaacccagataccggggtgctgaccgttagttgggagcggtcgactaccccagacattaccggttaccggatcactactacacccaccaatggccagcagggaaactccctagaggaggttgttcacgctgaccagtcctcttgcacgtttgataacctctcccctggcctggagtataacgttagtgtgtacacagtcaaggatgataaagaatctgtcccaatttctgatactatcattcccgccgtcccccccccaactgatttgagatttacaaacattggaccagataccatgcgagtcacatgggctccacctccgtccattgatctcaccaattttcttgtcagatatagcccggtaaagaacgaagaggacgtcgccgagttgtctatttccccttcagataacgccgtggttctcaccaaccttctgccaggcacagagtacgtggtgtccgtgagcagcgtctacgagcagcatgaatccaccccgctgagagggcgtcaaaagactgggttagacagcccaacaggcattgattttagcgatattactgccaattccttcacggttcactggattgcgcctagagcaactattaccgggtatcgcattagacatcacccagagcatttctccggcagaccgagggaagatcgggtaccccattcccgcaatagcataacgcttaccaacctgacccccggcacagagtatgtggtctccattgtcgccctcaacggacgggaggaaagtccattgctgatcgggcagcagagtaccgtgtccgacgtacccagagaccttgaggtagttgctgctactccgacatccctgctgattagttgggatgctcccgcagtgacagtgcggtactaccggatcacgtacggtgagaccggaggaaactctcctgtccaggagtttacggtgcccggctccaagagcaccgctacgatttcaggactgaaacccggggtggactataccatcactgtctacgctgtaacaggaagaggcgatagtcctgccagttcaaaacctatctccattaattacagaaccgaaattgacaagccatcacaaatgcaagtaacagacgtgcaagacaatagcatatctgtgaagtggcttccctcttcatcacctgtgactgggtaccgcgtcaccacaactcccaagaacggccccggacctactaaaacaaaaactgccgggcccgaccaaaccgagatgaccatcgagggactgcagcccacagttgaatatgtggttagcgtatatgcacaaaacccctcgggcgagtctcagcctctggtgcagactgccgttaccaacatcgaccgtccgaaagggctggctttcaccgatgtggatgtggactcaataaaaattgcatgggagtctccccagggccaggtgagccggtatcgcgtcacctactctagcccagaagatggcatccacgagctttttcccgcacctgacggcgaggaagacaccgccgagttacagggcttgagaccaggcagcgagtataccgtttctgtggtggcactgcatgacgacatggaatcccagccgctcatcggaactcagtcgacggctattcccgcacccacagatttgaagtttacacaggtgacacccacctcactgtcagcgcagtggacaccgcccaacgtccagctgacaggatatcgcgttagagttacccccaaggagaagaccggacccatgaaggagattaatctggccccagacagcagttccgtggtggtcagcggccttatggtggctactaaatatgaagtgagcgtgtacgcgctgaaggatactctgacgtcccgtccggctcagggcgtagtgactactttggaaaatgtgtcccctcctagacgcgcacgcgtaaccgatgctaccgaaactaccatcaccatcagttggagaaccaagacagagactattacaggcttccaagtcgatgcagttcccgcaaatggacagacacctattcagcgcacgattaagcccgacgtgcgatcttatacaatcactgggctgcagcctgggactgattataagatctacttatacacattgaacgacaacgcaagatcctcccccgtcgttatcgacgcttcgactgcaattgatgcgccatcaaatctgcgattccttgcaaccacacctaattccctactcgtgtcgtggcaaccaccacgcgcacgtataacaggatatatcatcaagtacgagaaaccaggctcccctcccagagaggtggtcccacggcctagaccaggggtcacagaagcaaccattacaggcctggaaccaggaaccgagtatactatctatgtaattgccttgaaaaacaaccagaaatccgagccattgattggacggaagaaaaccgggcaggaagctctgtctcagacaacaataagttgggctccctttcaagatacctcagaatacatcatttcttgtcaccctgttggaacagatgaagagccgctgcagttccgcgtacccggcacatcaacatcggccacactgactggcctcacgcgtggcgccacttacaacgtaatagtagaagccctcaaagatcagcagaggcacaaggtacgtgaggaagtcgtcacagtaggtaatagcggctggtgtcacgacaacggagtgaattacaagattggggagaagtgggaccgacagggagagaatggtcagatgatgagctgcacatgcctcggaaatgggaagggagagttcaaatgtgacccgcacgaagcgacatgctatgatgacggtaagacgtaccacgtcggcgagcagtggcagaaagagtatctgggagcgatctgcagttgcacctgttttggaggtcagcgtgggtggcggtgtgacaattgtagacggccgggcggcgagccctcccccgaaggcacgactgggcagtcttataatcaatattcccagaggtaccaccagagaacgaacaccaacgtcaattgcccaatagagtgctttatgccattggatgtgcaggcagacagagaggacagccgtgaatag

SEQ ID NO: 267214 - DNA, 6096 bp, Artificial Sequence
  derived and/or modified sequence
atgctgagagggccaggaccgggcctgctgttgctcgccgtgcaatgcctaggaactgccgtgccatccaccggtgccagcaagagcaagagacaagcccagcaaatggtgcaaccccaatccccggttgccgtcagccagtctaaaccggggtgctatgataatggaaaacactatcagatcaaccaacagtgggaaagaacctacttaggaaatgccctggtgtgcacatgttacggcgggtcccggggctttaattgcgaaagcaaaccagaggcagaggagacatgcttcgacaagtacacagggaatacgtatcgcgtcggagatacatatgaacgaccaaaggactctatgatctgggattgtacatgcataggcgccggaaggggaaggatttcgtgcactatcgctaaccgatgtcacgagggaggccagagttacaagatcggtgacacgtggaggcgaccgcacgagacaggaggctacatgctggaatgtgtgtgcctgggaaacggcaagggggaatggacctgtaagcctatagccgagaaatgtttcgatcacgcagctggaacgtcctatgtggtgggcgagacatgggagaaaccttaccagggctggatgatggttgactgtacctgtctgggagaggggtctggaaggattacttgtacatctcgtaatcgctgtaatgatcaagacacgaggacttcgtacagaattggagatacctggtccaagaaggataatcgaggcaacctgctgcaatgcatttgcactgggaatgggcgcggcgaatggaagtgcgagaggcacactagcgttcagaccacgagcagtggatctggcccttttacggacgtccgtgcagctgtctatcagccacaacctcacccacagcctcccccctatggtcactgtgttactgactccggtgtagtctatagcgtaggaatgcagtggctgaaaacccagggaaataaacagatgctgtgcacttgtctgggcaacggcgtatcatgccaggagaccgcagtgactcagacctacggcggcaactctaatggagagccatgtgttctgcccttcacatacaacggccggactttctattcgtgtacgactgaaggccgacaagacggccacttgtggtgttccacaacttccaactacgagcaggaccaaaaatactctttctgcactgatcataccgtgctggtccaaactagaggaggcaatagcaacggggccctgtgccatttcccctttctgtacaacaatcacaactacaccgactgcacatcagaggggaggagagacaacatgaagtggtgtggtaccactcagaactatgatgcagatcaaaagttcggcttctgtccgatggcagcgcacgaagagatttgtactactaacgaaggagttatgtacaggatcggggatcagtgggacaaacagcacgacatgggacacatgatgagatgcacttgtgtgggaaacggtcggggggaatggacgtgtatagcatattcacaactgagggatcagtgcatcgtagacgacataacatataacgtgaatgacacattccacaagagacacgaagaaggtcatatgttgaactgcacgtgttttgggcagggcagaggccgttggaaatgtgaccctgtcgatcagtgtcaggatagcgaaactggcaccttttaccagattggagatagctgggagaagtacgtgcatggagtacgctatcaatgctactgttacggaaggggcatcggggaatggcattgccagccactacagacctacccgagttcgagcgggcccgtggaggtgttcattaccgagacgccaagtcagccaaacagccatcctatccaatggaatgccccgcagcctagtcatatttccaaatatattctcagatggcgtccaaagaattcagtgggccgctggaaggaggccactatccctgggcatttgaacagttatacgattaaggggcttaagcctggtgttgtctacgagggccagctaatttctatccagcaatatggccatcaggaagtaacgaggttcgactttacaacaacctctacctcaacccctgtcaccagtaataccgtaactggtgagacaacaccgttctcaccactcgtggcaaccagtgagagcgtcacagagatcacagcgtcttcctttgtggtctcttgggtttccgctagcgacactgtgagcggatttagagtggaatacgaactttccgaggagggagatgaaccccagtacctcgatctgccatccaccgccacctccgtgaatatccccgacctgctgcccggtcgaaaatacattgtgaacgtgtaccaaattagtgaggatggggagcaaagcctcatactgtccacatcacagacgaccgcaccggacgcacctccagacacaacagtggatcaagtagacgatacctctatagtagttcgatggtcccgtcctcaggcccctatcacaggttaccgcattgtttattccccgtcagtcgagggttcttccaccgaactcaacctgcccgaaactgctaacagtgtcaccttgtctgacctccagccgggagttcagtataatatcacgatatacgccgtagaagagaatcaggaatctactcctgtcgtgattcagcaggagacaacaggaacgccgcggtcggatacagtgcccagccctcgggatttgcagttcgtcgaagttactgatgttaaggtgaccattatgtggaccccccccgagagcgccgttaccggctatcgcgttgacgtcattccagttaatctgcccggagagcatggccagcgcttgccaatctcacgcaatacttttgccgaagttacgggtttatcacccggagtgacctactatttcaaggtattcgccgtatcgcatgggcgtgagagcaagcccttgactgcccagcagaccacaaagctcgatgccccaaccaacctccagtttgtcaacgagaccgattcaacagtactcgtgaggtggacgccacccagggcccagattaccggatatcggttgactgttggcctcacgcggaggggccagccccgccagtataacgtgggcccctcggtttccaaatatcccttgcgaaacttgcagccggcttctgaatacacagtttcgctcgtggcaattaaggggaaccaggagtcaccaaaggctaccggcgtgttcaccacccttcaaccgggctcctctattccaccatataacactgaagtgacagagactaccatcgtgataacttggacacctgcccctagaattggtttcaagctgggagtacgcccatcccaaggaggtgaagcccctcgcgaggttacgtccgatagcgggtctatagtagtctctggtctgactcctggggtggagtacgtgtacaccatacaggttctgcgggacggacaagagcgagacgcaccaattgtgaacaaggtcgtgaccccattaagcccaccaaccaacctgcaccttgaggcgaatcctgataccggcgtgttgactgtttcctgggaacgatcaacaacacccgatattacaggctatcgcatcaccacgacaccgacgaatggccagcaaggcaatagcctcgaagaggtggtccatgctgatcaaagtagctgtacctttgacaacttgtctccaggactcgagtataatgtttcagtgtatacagtgaaggacgataaagagtctgtccccatctccgacactattattccagcagtcccccctccgaccgacctgagattcaccaacatcggcccagacaccatgcgcgttacatgggctccaccccctagcatagatttaactaactttctcgtccgctacagcccagttaaaaatgaagaagatgtggccgagctgtccatttctccctcagacaacgcagtagtgcttactaacctgttaccgggaactgaatatgtcgtttcggtgagttctgtctacgaacagcatgagtctacccctcttcgaggccgtcaaaagactggattagactcaccaacaggcattgacttctctgacattactgctaattcttttacagttcattggattgcccccagggcgacaatcactggctacagaattcggcaccaccctgagcatttttccggcagaccccgggaggatcgagtgccccactctcggaactctattacgctgaccaacctaacacctggaaccgagtatgtggtctccatcgtcgcactgaacggccgggaagaatccccccttcttatcggtcaacaatctaccgtgtccgatgtccctcgggatctagaagtcgttgccgctacaccaacatcactgttaatttcctgggatgcaccagcagtgaccgtgcggtattaccggattacctatggcgaaactggagggaatagtcccgtgcaggagtttacagttcctggttctaagtcaactgctacaatctcaggcctgaagcctggggtggactacaccattacagtctacgccgtaaccggcagaggcgattcaccggcctccagcaagccgataagcatcaactatagaaccgagatcgacaagccgtcccagatgcaagtgacagacgtgcaggacaactccattagtgttaagtggctgccttcgtcctcccccgttactgggtacagggtgactacaacaccgaagaacggaccaggtccaacgaagacaaagactgctgggcccgatcagactgaaatgactatcgagggcttgcagcctacagtcgaatacgtggtaagcgtgtacgctcaaaatccatctggtgagagccaacctctcgtgcaaaccgctgtgaccaacatagacaggcctaaggggctcgcatttacagatgtcgacgttgacagcatcaagatcgcatgggagtcaccccagggacaggtttcccgttaccgtgtgacttacagttccccagaggacggtatccacgagttattcccagcccccgacggtgaggaggacaccgctgaactgcaaggcctgcgcccaggtagtgaatacactgtgagcgtcgtcgcactgcacgacgatatggagagccaacctttgataggaacccagagtacggctatcccagcacccaccgaccttaaatttacacaggttacccctacatctctgtccgctcagtggactcccccaaatgtgcagttgaccggttacagggtccgagtaacccccaaagaaaagacggggcctatgaaagagattaatctggctcctgactcaagtagtgtagtggtgagcggtctgatggtggctaccaaatatgaggtgtccgtctatgctctgaaggacaccctaaccagtaggccggcccagggagtggttaccaccctggagaacgttagccccccccggcgggctcgggtgaccgacgctaccgagactacgattaccatctcttggagaacgaagactgagacaattacgggatttcaggtcgacgctgttccggccaatggtcagactcctattcaaagaacaattaaaccagacgtacgttcttacactatcacgggtctgcagcctggcacagattataagatttacctgtacactctgaatgataacgcccgcagttcccctgtagtaatagatgcctccaccgcaattgacgccccatctaatctccggtttctggccactacacccaattctctcctcgtgtcttggcaaccacccagagcgcgaattacaggctacatcatcaagtacgaaaaaccagggagcccacccagagaggtcgtccctcgcccccggcctggtgttacagaagccactatcaccggcttggagcccgggaccgagtataccatctacgtcatcgcgttgaagaacaatcagaagagcgaacccctaataggcagaaaaaagaccgggcaggaagccctatcccaaacgactattagctgggcacctttccaagatacctctgagtacatcatctcatgccatcccgtgggcaccgacgaggagccgcttcagtctaccaaggcgtag

SEQ ID NO: 267215 - DNA, 6555 bp, Artificial Sequence
  derived and/or modified sequence
atgttgagggggcctggccccggtctcttgttgcttgccgttcagtgtttagggactgccgtgccaagtaccggagcatccaagtctaaacgtcaggcccagcagatggtgcaaccccaatcaccagtcgcggtatctcaaagtaagcccggctgctacgacaacggaaagcattatcagattaaccagcaatgggaaagaacttaccttggcaatgcattagtgtgcacctgctatggagggtccagaggatttaactgtgagagcaagccagaagctgaagaaacctgcttcgacaagtatactggaaacacctatcgggtgggcgacacatatgagcgcccaaaagattctatgatatgggattgtacctgtattggagccggaagaggccggatcagttgcacgatagccaatcgttgtcatgaaggcggacagtcatataagattggtgatacttggagaagacctcacgagaccggtggctatatgctggaatgtgtctgtctgggtaatggaaagggagagtggacttgtaaacctatagctgagaaatgcttcgaccacgctgcaggaaccagttacgttgtgggcgagacctgggagaagccgtatcaagggtggatgatggtagactgtacatgcctaggggaaggctcaggaagaataacatgcacaagcaggaatcggtgcaatgaccaggatactcgaacctcatacagaataggcgacacgtggagtaaaaaagataatagaggtaatctactgcaatgtatctgtactggtaatggtcgcggagaatggaaatgcgaaagacatacctcagtgcagaccacctcaagtggaagcggccctttcaccgacgtgcgcgctgcagtgtaccagccacagccccatcctcagccccccccttatggacactgcgtgaccgattccggcgtggtctattcagtaggtatgcagtggctgaaaacccagggcaataagcagatgctgtgtacatgccttgggaatggcgtttcatgtcaggagactgccgtgactcaaacttatggcggtaactctaatggcgaaccgtgcgtgctccctttcacttacaatgggagaaccttctattcttgtaccactgaaggacgtcaagatgggcacctctggtgcagtactactagcaattatgaacaggatcaaaaatacagtttctgcacagaccacacggtgctcgtacaaacgcggggaggtaacagcaatggtgcactatgtcattttcccttcctctacaacaaccacaattacactgactgtacctccgaaggaagacgggacaatatgaaatggtgcgggacgacacagaattacgacgcagaccagaagtttggattctgtccaatggcagctcatgaagaaatatgcacaacaaacgagggtgttatgtacagaatcggagatcagtgggacaaacaacatgatatgggccacatgatgagatgtacctgtgtgggaaatgggaggggtgaatggacatgtattgcctacagccagttgagagaccagtgtatcgtggacgacattacgtataatgtgaatgacaccttccacaaacggcacgaagaagggcatatgctaaattgtacctgtttcggccagggaagagggaggtggaaatgcgatcctgtagaccagtgccaggatagcgagacagggacattctatcagattggggactcctgggaaaaatacgttcatggggttaggtatcaatgttactgttatggaagaggaatcggggaatggcactgtcagcctctgcagacctacccttcctcctctgggccagtcgaggtcttcatcacagagacaccaagccagcctaacagccaccccatccaatggaatgccccacaacccagtcatatttcaaaatacatcctgagatggcgtccgaagaatagtgtcggtagatggaaagaggctacaatacctgggcacctgaatagctacacaattaaaggtctaaaacccggggttgtttatgaaggccaactcatcagtattcagcagtacggtcaccaggaagtaactagatttgactttactacaacttcaaccagtaccccagtaaccagtaatacggtaacaggcgagaccactcctttcagccctcttgtggccaccagcgagtcagttactgagatcactgcctctagcttcgtggtgtcttgggtttcagcatccgacacagtgtctggatttagagtcgaatatgagctgagcgaagaaggcgacgagccacagtacctggacctcccttcaaccgccacctctgtgaatattcctgatcttcttcctggtcgtaaatacattgtgaacgtctaccagataagcgaggacggcgaacagtccctcattctttccacttcacagaccaccgctcctgatgcaccacccgacactaccgttgaccaggttgatgacacttccatagttgtccgatggtcacgccctcaggcacctatcaccgggtaccgcatagtgtatagcccctctgttgaaggaagttccactgaactgaatctgccagagacagccaactccgtgactctctccgatctgcagccgggcgtgcaatataacatcaccatctacgcagttgaggaaaaccaggaatctactcccgttgtgattcaacaggagacaactggcactccgcgaagtgataccgttccctcacctagggacctgcaattcgttgaagtcacagacgttaaagtgacgatcatgtggaccccgcctgaatctgcagtcacaggatatcgtgtggacgtgataccagtgaatttgcccggagaacatggacagcgcctaccgatctctaggaacactttcgccgaagtaactggtcttagccccggtgtgacgtactatttcaaagtgtttgccgtttctcacggcagagagtctaaacccctcactgcgcagcaaacaactaaactcgatgcgcctactaacttgcagtttgtcaatgaaactgacagcaccgtgctggtgcgatggacacctccacgtgctcagattaccgggtatcggttaacagtaggactcacccgccgcggtcaaccacgccagtataatgttggtccatctgtaagtaagtaccccttaagaaacctacagcctgcctcagagtataccgtctccctcgtcgctatcaaagggaatcaagagtcccccaaggcaaccggagtgttcaccacattgcagccaggctcctctatcccaccctataacacagaagttactgaaaccacgattgttattacctggacccctgccccaagaatcggcttcaaactcggcgttcgtcctagtcagggtggagaggcaccccgtgaggtcacatcagattcggggagtatcgtcgtaagtggattgacaccgggggtggagtacgtatatactattcaggtgctgcgggatggtcaggagagagatgccccgattgtcaataaagttgtgacacccctaagccctcccacgaacttgcatttggaagctaaccccgacacaggtgtgctgaccgtgtcctgggaaagatccaccacccctgacattactggatatagaatcaccacgacaccaaccaatgggcaacaaggaaattcgctcgaagaagtggtgcacgccgaccaatctagctgcacattcgataacttgagtccaggccttgaatataacgtgtccgtgtatactgttaaggacgacaaagaaagcgtgccaatttccgatacaatcatcccagccgtgccccctcccacggacttaaggtttaccaatatcggccctgacaccatgcgcgttacttgggcaccacccccatccattgatctgacaaatttcttagtgcgatattcacccgtcaagaacgaggaagacgtggcagagttgtcaatctccccttcagacaatgccgttgtactcaccaacctcttaccaggtaccgaatacgtagtgagcgtgtcctctgtgtacgaacagcacgagtctacgcctctcagaggtaggcagaaaacaggccttgattcgccaactggtattgacttttcggatatcactgctaactccttcaccgtccattggatcgctcctagggccaccattactggctatcgaatccgtcaccaccctgagcatttctccggcagacccagagaggaccgggtgccacacagtcgaaattccatcacgctaacgaatttaactccaggtaccgaatatgttgtgagtatcgtagccctaaacggaagggaagaatccccattacttatcggccagcagagtaccgtcagtgatgtacctcgtgatcttgaggtcgtggctgctacaccaacgtccctgttgatctcttgggacgctcccgccgtgaccgtgcggtactatcgaattacatatggagagaccggcggcaactctcccgtccaggagtttaccgtaccaggatcaaagtcaacagccacgatatccggactgaagcccggagtagattacaccataacagtttatgccgttacaggacgtggagactctccggcttctagcaaacctatctccatcaactatagaacagaaatcgacaagccttcccagatgcaggtgaccgacgtccaggacaactctatatctgtcaagtggcttccgtcaagtagtcccgttaccggctatagagttacaactaccccaaagaacggccccggtcctaccaaaaccaaaacagccgggcctgaccagacagagatgacgatcgaaggactccagccaactgtagagtacgttgtgtcggtctacgctcagaatccctccggagaaagccagccactggttcaaactgctgttacaaatatcgaccgccccaaaggcctggctttcacagacgtggacgtcgattctataaaaatcgcttgggaaagtcctcagggccaggtgtcccgctatcgagttacctacagttctcccgaggatggcatccatgaactgttccccgcaccagacggagaggaagatacagctgaacttcaagggctcagaccaggatccgagtacacagtcagcgttgtggcactgcatgatgatatggaaagccagcctctcataggaacccagtcaacagctattcccgctccaactgacctcaagtttacacaggtgaccccaacctccctgagcgcccagtggacaccacccaacgtacagttaaccggctaccgcgtaagggttacacccaaagagaagaccggacctatgaaagagattaatttggccccagactccagctccgtagtggtcagtgggttaatggtggcaacgaagtatgaggtgtccgtgtatgccctgaaagatactctcacctccagaccagcccagggagttgtgacgactctggaaaacgtctcccctccacgtagggcaagggttactgatgccaccgagacaactattaccataagttggcgcaccaaaaccgaaacaatcaccggtttccaggtggacgctgtccccgcaaatgggcaaactccaatccaaagaactattaagcctgacgtcaggagctataccatcactggactccagccaggaaccgattacaagatttacctgtatacccttaacgataatgcacgctcatcacccgtggtgatcgacgcaagcactgctatcgatgctccctctaacctccgattcctcgctactacccccaacagcctgctggtttcttggcagccccccagagccagaattactggatatattattaagtatgagaagcccggatctcccccacgcgaagtcgtcccacgaccgagacctggcgttactgaggcaactattacaggcctggaaccaggcacagaatacaccatatacgtgattgccttgaagaataatcaaaagtccgagccactgattggaaggaagaaaacggttaatgaaggcctgaaccaacctacagacgattcatgctttgatccttacactgtttcccactacgccgtaggggacgaatgggagcgcatgagcgaaagtggcttcaaacttttatgtcagtgcctgggattcggatccggccatttcagatgcgactcatctcgctggtgccacgataatggagtgaattataagattggggaaaaatgggatagacagggtgagaatgggcaaatgatgagctgtacatgtttgggcaatggaaaaggcgagttcaaatgcgatcctcacgaagccacatgttatgatgatggcaagacgtaccacgtcggtgaacagtggcaaaaggagtatctgggcgctatctgctcctgcacctgctttggagggcagcgagggtggaggtgcgataactgtagaagacccggaggtgaaccctcacctgaaggaaccacgggccagtcctacaaccagtattctcagcggtaccatcagaggaccaataccaacgtcaattgccccatcgaatgttttatgccccttgatgtgcaggcagacagagaagactctcgcgaatag

SEQ ID NO: 267216 - DNA, 6636 bp, Artificial Sequence
  derived and/or modified sequence
atgctccgcgggccaggcccagggttgctcctgcttgccgttcagtgtctgggcaccgcggttccgtcaacaggggctagcaaatcaaagagacaggcacagcaaatggtccaaccccaatcgccagtggccgtgagtcaaagtaagccgggatgttatgacaacggcaaacactatcagataaaccagcagtgggaaagaacttatctgggtaacgcactcgtctgtacatgctatgggggatcacgtggatttaattgtgaatctaaacccgaagcagaagaaacttgtttcgacaagtacacagggaacacctatagagtaggcgacacatatgaaagaccaaaggattctatgatctgggattgtacctgcataggcgcagggcgcggaaggatatcatgtacgattgctaacagatgccacgagggggggcagagttataaaattggggatacatggagaagaccgcacgaaaccggagggtacatgttagagtgtgtgtgtttgggtaacgggaagggggagtggacctgcaaaccaatcgctgaaaagtgcttcgaccacgccgccgggacctcgtacgtagttggcgagacctgggaaaagccttaccagggatggatgatggtcgactgtacatgtctgggagaggggtcagggcggattacctgtacttctcgaaacagatgtaatgatcaagatacacgaacaagttatcgcatcggagacacttggagcaagaaggacaacagaggaaacttactacagtgcatatgcactggcaatggaagaggggaatggaagtgcgaacgacacactagtgtccagactacatcatccgggtcaggaccgttcacagatgtgcgtgctgccgtgtaccaaccacagcctcatccacagcctcccccttacggtcactgcgtgactgactccggcgtcgtgtattctgttggcatgcaatggctaaagactcaaggcaataaacaaatgctctgcacctgcttgggaaatggcgtgtcatgtcaggagacagcagtgacacaaacatatggcggtaactcgaatggagaaccttgtgtgcttcccttcacatacaacggccgaacattttactcatgcaccaccgaaggcaggcaggacggccacctgtggtgtagcactacaagtaattatgaacaggaccaaaagtattcattctgtacagatcacacagtgcttgtgcagaccagaggaggaaattctaacggcgctttgtgtcatttcccatttctctataacaatcacaactacaccgattgcacttctgaaggtagacgggacaatatgaaatggtgtggaactacccagaattacgacgctgaccagaagtttgggttttgccctatggctgcccatgaggagatttgtaccactaatgaaggcgtgatgtaccgcataggagatcaatgggacaaacaacatgatatgggacacatgatgaggtgtacttgtgtgggaaacggcagaggcgagtggacctgtatagcctatagtcaactacgcgaccagtgtatcgtggatgacatcacctacaatgtgaacgatacctttcacaagcggcacgaggaaggacacatgttgaactgtacatgttttggtcagggaagaggaaggtggaaatgcgaccccgtggatcagtgtcaagactccgaaaccggcacgttctatcagatcggggactcttgggaaaagtatgtacacggcgtgagatatcaatgttattgctacggcaggggaatcggtgagtggcactgtcagcctctgcaaacatacccttcctcatctggaccagtcgaggttttcatcaccgagacacccagtcagcctaacagccaccctattcaatggaatgctcctcagccatcacacatctccaaatacatcctgcgatggaggcctaaaaattccgtagggcgatggaaggaagcaacaattccagggcatcttaatagctatacaatcaaaggccttaaacccggagtggtatatgaaggacagcttatttcaatccagcagtacgggcatcaggaagtgacacggtttgatttcaccacaacctctacatctaccccagtgacctctaataccgttaccggtgaaacaacccctttttcccctctagtcgcgacatctgaaagtgtcacagaaatcactgcctcctctttcgtcgtgtcctgggtctcagcttctgacacggtgtccggatttcgtgttgaatatgaactttcagaggaaggtgacgagcctcagtatctagaccttccttctaccgccacaagcgtgaatatccctgatcttttaccaggtagaaagtacattgtaaatgtttatcagatctccgaagatggcgaacagtcactcatcttatcaacctcccagaccacagcacccgacgcgccaccagacacgactgtggaccaagtcgacgacacttctattgttgtgagatggagtagacctcaggcccctattaccggctatcgcattgtttattcaccttccgttgaaggtagctctaccgagcttaatctgccagagacagcgaattccgttaccttgtccgacctgcagcccggtgtgcagtacaacattaccatctatgccgtggaggaaaaccaggagagcacacccgtggtaatccagcaagagacgaccggcacccccagatctgacaccgttccctcgcctcgggacctgcaattcgtagaagtgactgatgtcaaggtgactataatgtggacccctcctgaaagtgccgtaactgggtacagagtcgacgtgatccccgtaaacctgcctggcgaacatgggcagagattgcctatctctagaaatacctttgccgaagtgactggactttcaccgggcgtgacatactacttcaaggttttcgcagtaagccacggaagggaatcgaaaccattaactgctcagcagacaaccaagttggacgcccccaccaacctgcagtttgtaaacgagacggactccaccgtgcttgttagatggacacctccaagagcccaaatcactggctataggctcaccgtcggtctcactcggcgaggacagcctagacagtacaatgtcggcccctccgtaagcaagtatcctctgcgcaatctccagccagcgtccgaatacactgtctctcttgtggcaattaagggcaatcaggaatccccaaaggctactggggtcttcaccaccttacaacccgggtcatcgatacccccctacaacactgaagtcaccgagactacaatagtgatcacgtggacacctgccccaagaataggctttaagctcggcgtgcgcccctcccaaggaggcgaggccccaagagaggtcacatccgactctggatcgattgtcgtgtctgggctgacccctggagtcgagtacgtctatactatacaggtcttaagagacggtcaagaaagggatgccccaatcgtgaataaggtcgtgacacctctgagcccccccactaatctacatcttgaggcaaatcctgacacaggcgtgctgaccgtttcatgggagcgatccacaactccagacataaccggctaccgtattacaacgacccctaccaacggtcagcagggcaattcgctagaggaagtggttcacgcagatcagtcttcctgtacctttgataacctaagcccaggacttgagtataatgtcagtgtatatacagtgaaagatgataaggaaagcgtcccgataagtgacacaatcatccccgccgtcccgccgcccacagatctgagatttactaatatcggtcccgacaccatgcgcgttacttgggctccacccccatcgattgacctgactaattttttggtgaggtattctccagtaaagaacgaagaggacgtcgccgaactgtccatcagcccaagtgataacgctgtagtgcttacgaatctgctgccaggcactgaatatgtggtttctgtgagctccgtgtatgagcaacatgaatcaacccctctgagaggccgacagaaaactgggctcgactcccccacaggcattgacttcagtgatataactgccaattctttcaccgtgcactggatcgccccgcgcgccactatcaccggctatagaatcagacatcaccctgagcacttctccggtcgtccccgcgaagaccgcgtgcctcacagtcgcaatagtattacattaactaatctcacacccggtacagagtacgtggtctccattgttgccctgaatggacgggaggaatcccctttgctaattggccagcagagcactgtttcagatgtgccacgagatctggaggtggtcgcagcaaccccaacaagtttattgatatcctgggacgcacctgcggtgaccgtgaggtactaccgaataacgtacggagagaccggaggaaattcgccagttcaagagtttacggtgcccggcagtaaaagcaccgctacgatttcaggactgaaacccggggtggactataccatcactgtctacgctgtaacaggaagaggcgatagtcctgccagttcaaaacctatctccattaattacagaaccgaaattgacaagccatcacaaatgcaagtaacagacgtgcaagacaatagcatatctgtgaagtggcttccctcttcatcacctgtgactgggtaccgcgtcaccacaactcccaagaacggccccggacctactaaaacaaaaactgccgggcccgaccaaaccgagatgaccatcgagggcttgcagccgactgtcgaatatgtcgtttccgtatatgctcagaatccaagcggggagagtcaaccgttggttcagacagccgttaccaatatcgataggcccaaaggactcgcttttactgatgttgatgtggactccattaagattgcctgggagagcccacaagggcaagtgtcgcggtatagagtgacttatagcagtccagaagacggtatacacgaactttttccagcaccggatggagaggaggatacagccgagctccagggtctcaggcccgggtctgaatacaccgtgagcgtggttgccctgcacgacgatatggaatctcagcctcttataggaacccagtcgaccgctatcccagcacctaccgacctgaaattcacccaggtcacgcctacctcattaagcgcccaatggactccacccaacgtacagcttaccggataccgcgtgcgtgtgacaccaaaagagaagaccggcccaatgaaggagatcaatcttgcacctgacagctcaagtgtggtggtatctggtctgatggtggctacaaaatatgaagtttcagtttacgctttgaaggacaccctgacgtccaggccagcccaaggcgtggtcacgacactcgaaaatgtgagtcccccccggagagctagggtgacagacgctactgagaccacaatcacaatttcatggcggacaaaaacagagacaattactggcttccaagtagatgcagtccccgcaaatgggcagacccccatccaaagaacaataaaacctgacgtgcgcagctataccatcaccggactccagcctggtacagattacaagatttacctctatactcttaatgacaacgcacgttccagtcctgtagttattgacgcgagcactgcaatagacgctccctccaatctgcgctttcttgcaactacacctaactctcttctcgtctcatggcagcctccaagggccagaattaccggctatattattaaatacgagaaacctgggtcaccaccaagagaagtcgtgcctcgaccccgacctggggtgacagaggcaactattacaggtctggaacctggaacagagtacaccatttacgtcatagctcttaaaaacaaccagaaaagtgaacccttgataggacgaaagaaaaccggtcaggaagccctctctcagactactatctcctgggctccctttcaggatacaagcgagtatattatctcatgtcatcccgtgggaaccgatgaggagccgcttcaattcagagtgcctggaacctccactagtgcgacgcttaccggccttacccgaggagcaacctataatgtaatagtagaagcactgaaagaccagcagagacataaggtgagggaagaggtagtgacggtaggaaattcaggttggtgtcacgacaatggggtgaattacaaaattggcgagaaatgggacaggcagggggagaatggccagatgatgagctgtacctgcctgggtaatgggaagggcgaatttaaatgtgaccctcacgaggcgacatgttacgatgacggcaaaacatatcatgtgggcgaacagtggcagaaagaatacctgggcgcaatctgtagttgcacgtgctttgggggtcagcgagggtggagatgcgacaattgcagacgaccagggggagaacctagtcccgagggaacgactgggcagtcctacaatcagtatagccaaaggtaccaccagagaacaaacactaacgttaattgccccatcgaatgtttcatgcccctcgatgttcaagctgatagagaggattcaagggagtag

SEQ ID NO: 267217 - DNA, 6096 bp, Artificial Sequence
  derived and/or modified sequence
atgctccgcggacctggacctgggctcctgttactggccgtccagtgcctaggcaccgccgtcccgtctaccggcgcgtccaagtccaaaaggcaagcccagcagatggtgcagccacagtcgcccgttgccgtgtctcaatctaagccaggctgctatgataatggaaaacactatcagatcaatcaacaatgggaaagaacctaccttggcaacgctctggtgtgtacctgttacggggggtctagagggtttaattgtgagtctaagcctgaggcagaagaaacctgctttgataaatatacaggaaatacttacagggtgggagacacgtacgagcgccccaaagactcaatgatttgggattgtacttgcattggagccgggagaggcagaatctcatgtactatcgcaaacaggtgtcacgaaggagggcagagttacaagatcggcgacacatggagacgccctcacgagacaggaggttacatgctggaatgtgtgtgtctgggaaatggaaagggcgaatggacttgtaaacccatcgccgaaaagtgcttcgatcacgccgcgggcactagctacgtagtcggtgaaacttgggaaaaaccatatcaaggttggatgatggtcgattgtacgtgcttaggcgaaggcagtggtaggattacatgtacctcaagaaatcgctgcaatgaccaggatacacgtacttcataccgcatcggggacacatggtcaaagaaggataaccggggaaacctgctgcaatgtatatgtaccgggaatggtagaggagagtggaaatgtgaacggcataccagcgtacagaccacatcatccggtagcggaccttttaccgacgtgcgagccgctgtataccaaccacaacctcatcctcagcccccaccatatggccactgcgtgactgattccggtgtagtgtatagtgtcggaatgcagtggctgaagactcaagggaataaacaaatgctgtgtacatgcttgggtaacggagtgagctgtcaggaaaccgcagtgacacaaacctatggcggcaattctaatggcgagccctgcgtgctcccattcacatataatgggcgaaccttctatagctgtactaccgagggcagacaggacgggcatctctggtgtagcacaacttctaattatgagcaggatcagaagtatagtttttgtaccgatcacaccgtgctagtgcagacaagggggggcaattccaacggggcactgtgtcactttccgtttctctacaataaccataattacacagattgcacctccgaaggaagacgcgacaacatgaaatggtgcggcacaacccaaaattatgacgccgatcaaaaattcggattttgcccgatggctgcacacgaagaaatctgcaccactaacgagggcgtcatgtacagaattggtgaccaatgggataagcaacacgacatgggccatatgatgagatgcacttgtgttgggaatggacgcggagaatggacttgtatcgcctatagccaattgagggatcaatgtatcgttgatgacatcacatacaacgtaaatgatacgtttcataaaagacacgaagagggccacatgttaaattgtacttgttttggacagggaaggggaagatggaaatgcgatccagttgaccaatgccaggactccgagacgggcaccttctaccagatcggcgactcttgggagaaatatgtacacggcgtcagatatcaatgctactgctatggccgaggcattggggagtggcattgtcagcccctgcaaacctacccatcctccagcggaccagtcgaagtatttatcaccgaaaccccatctcagcctaacagtcaccccatccagtggaacgctccccagcctagtcatatctccaaatacattctgcgatggcgacctaaaaacagcgtagggagatggaaggaggccacaattccagggcaccttaattcctatacaattaaaggcctgaaacccggagtagtgtacgaaggacaactgatctcaatccagcagtacgggcaccaagaggtgacacgctttgactttactacaacttccacttccacccccgttacttccaatactgtaactggcgagacgaccccatttagcccacttgtggccacctcagagagcgtgaccgaaatcaccgcatcttccttcgtggtaagctgggtgtccgccagtgacactgtgtcaggttttagagtggaatatgagctcagcgaagaaggtgatgaaccacagtatttagatcttccctccacagcaacatccgtcaatatccccgacctcctgcctggcagaaagtatatcgtgaatgtgtatcaaatcagtgaagatggagagcagtcactaattctttctacatcacagacgactgctcctgatgctcccccagatacaacggtggatcaggtcgacgatactagcattgtagtacggtggtctagaccccaggccccaattactggctaccgtatcgtatattcacccagcgttgaaggatcttcaacagaactcaatcttccagagaccgctaacagtgtaaccctctccgaccttcagcccggcgttcagtataatattacaatttatgccgtcgaagaaaatcaagagtccacacccgtcgttattcagcaggaaactaccggtacccctcgatcggatactgttcctagcccacgagatcttcaatttgtagaggtgacagacgttaaagtcactatcatgtggacccctccagaaagcgcagtgaccggttacagagtggacgttatccctgtcaacttgccaggagaacatggccagaggcttcctatttccagaaatactttcgccgaggtgaccggtctgagtccaggcgttacatattattttaaagtctttgccgtttcccatggccgcgaaagcaagccactgacagcacagcaaacaacgaaactggacgcaccgacaaatctccagtttgtgaatgagacagatagcaccgtgctggttagatggacacctccgcgggcacagattaccggataccggctgaccgtcggcttaacacgacgtggacagcctcgccagtataatgttggaccatccgtctcaaaatatccgttgcgaaacctgcagccagcatcagaatatactgtgtccctcgtagccatcaagggaaatcaggaatcacctaaagccacaggcgtatttaccaccctccaacccggcagttcgattccaccttacaataccgaagtgaccgaaactacaattgttatcacttggactcctgctccacggatcggttttaagctgggtgtgcggccctcccaaggaggtgaggctccacgcgaggtcacatcagactctggctccatcgtggtgtcgggtttaactccaggcgtggaatatgtgtacacaatccaagtactcagagacggccaagagagagatgcccctattgtgaataaagtggtgacaccactaagccccccgacaaatcttcatctggaggccaaccccgataccggagtattaacagttagctgggaaaggtcgaccacacccgacataaccgggtacagaatcacaacaacgccaaccaatggccaacaaggaaattctctggaagaggttgttcacgcagatcagagcagctgtactttcgacaatctgagtcccgggctggagtataacgtttcagtttacacagtgaaggatgataaggagtctgtccccatctctgatactattatccctgccgttcctcctcctactgacctccgcttcaccaacatcggtcctgatacaatgcgcgtcacctgggcccccccgccctccatcgacctaacaaactttttagtgcgatactcccctgtgaaaaatgaggaggacgttgctgagttaagtatcagcccaagcgacaatgcagttgttttgacaaacctgctcccaggcaccgaatatgttgtgtctgtttcgtccgtgtacgaacaacatgaatcgacccccttgagaggacgccagaagacaggcctggacagccctacaggcattgatttttctgatatcaccgctaactccttcaccgtccattggattgcccctagagcgactattaccggctatcggattcgccatcaccccgaacacttcagcggccgacctagagaggaccgcgtgccccattccagaaactctattactctcactaacctgacgcctggcactgagtatgttgtgtctatagtcgcccttaatggacgcgaagagtcacctctcttaataggacagcagtctacggtgagcgatgttccccgtgatctggaggtggtggcagcaacgcctacatccttgcttatctcctgggatgctccagccgtgaccgtcagatactacagaatcacatacggagaaacaggaggaaattctcccgttcaggaatttactgtgcccggaagtaaatcgaccgcaaccatctccggattaaaacctggggttgactacacaatcacagtctacgccgtgactggaagaggcgactcccccgctagctccaaacccatctcgataaactataggaccgagattgacaagccatcacagatgcaagtgacagacgttcaggataattccatctcagttaagtggctgccttcctccagccccgtgaccggctaccgggtgactacgactcctaagaacggcccaggtcctactaaaaccaaaaccgcaggccccgaccaaacggaaatgaccattgaggggctgcagccgaccgtcgaatatgtggtaagcgtgtatgcgcaaaatccatccggagagagccagccactcgttcagacagccgtgacaaacatcgatcgccctaaaggtctagcattcactgatgtggacgtggacagtataaagatcgcctgggagtctccacaagggcaagtcagccgatatagagtgacctactcaagtcccgaagatggtatccatgagctgtttccagcccctgatggggaagaagacactgctgagctgcaaggcttacgtccaggtagcgaatacacagtttctgtcgtcgcactccatgacgatatggagtctcaacccctgattggtacgcagagtacggccattcctgcccctacagacctgaaatttacacaagtcacacccacctcgctgtcagctcaatggacacctccgaacgtgcagcttactggataccgcgtacgggttacaccgaaggagaaaaccgggcctatgaaagaaattaatcttgctcccgattcctcctcagtggtagttagcggtctgatggtcgccacaaagtatgaggtcagcgtgtacgcactgaaagataccttaacttcccgccccgcacagggcgtcgtcacaactcttgaaaatgtgtccccacccaggcgcgcccgagttaccgatgccacagagaccaccatcaccatctcatggcggactaagacagaaaccattacaggcttccaggttgatgccgtgccagcaaatggacaaaccccaatccagaggaccattaagccagatgtgagatcatacacaataactggacttcagccagggactgactacaagatttatctatacacattgaatgataatgcaagaagtagcccggtggttattgacgctagcacagccattgacgccccctcaaatcttaggttcttagcaacaaccccaaacagcctcttagtgagctggcagcccccaagagctagaattactggctacattatcaagtatgaaaaacctggatccccccctcgagaggtcgtgcctcgacctaggcctggtgtgacggaagctactatcacagggctggagcccggaacagaatacaccatatacgtgatcgccttgaaaaacaaccagaagtcggaacccttaatagggagaaagaagaccgggcaggaagcacttagtcagactactatcagctgggcacccttccaggacacctcagaatacataatttcatgccacccggtcggaactgatgaagaacccttacaaagcacaaaagcttag

SEQ ID NO: 267218 - RNA, 6555 nt, Artificial Sequence
  derived and/or modified sequence
augcugcggggccccgguccuggcuuguugcucuuggccgugcaaugucucgggacagcaguaccaucuacaggugccuccaagucuaagcgccaggcucagcagauggugcagccgcagaguccuguugccgugucccaaucgaaaccaggcugcuaugacaacggcaagcacuaucaaaucaaccaacagugggagcggaccuaccugggcaacgcacuagugugcacaugcuacggagguuccagaggguucaacugugagucuaaacccgaagcugaagaaacgugcuucgacaaguacacugguaauaccuauagagugggugauaccuaugaacgacccaaagauucuaugaucugggauuguaccugcaucggagccgggaggggccguauaucuuguacuaucgccaaccguugccacgagggaggucaaagcuacaagauaggggacacauggcggaggccacaugagacagguggauacaugcucgagugugugugccuggguaacgggaagggcgaguggaccugcaagccaaucgcagagaaguguuuugaccacgcugcuggcacaagcuaugugguaggagagacaugggagaagccauaccaaggcuggaugaugguugacuguacgugccuaggcgaaggcuccggucguauuaccuguaccaguagaaaucggugcaaugaccaagauacccgcacaucuuaucgcauuggggauacguggucuaaaaaggauaauagggguaacuuacuucaauguaucugcaccggcaacggccgcggcgaguggaagugugaacgacacaccucagugcagacuaccagcucuggaucuggacccuucaccgacguacgcgcugccguauaccagccacaaccucauccucagccuccccccuaugggcauugugugacagacucagguguaguguacagcguggggaugcaguggcucaaaacccaggggaacaagcagaugcugugcaccugccuggggaacggcguguccugucaggaaacagcagugacacagacauaugguggcaacucuaacggugagccauguguguuaccuuuuaccuacaacggacgaacguuuuauuccuguaccacugagggcaggcaagacggccaucucugguguaguaccacuucaaauuacgaacaagaucaaaaauacaguuuuugcacggaccacacugugcuuguccagacacggggcgggaauaguaacggggccuugugccacuuucccuuucucuauaacaaucacaacuauaccgacuguaccucugaaggccguagagacaacaugaagugguguggaaccacacagaauuacgacgcagaucagaaguucgguuucuguccaauggccgcucacgaagagaucuguacaacaaacgagggcguuauguaccgaauuggggaucaaugggauaaacagcacgauaugggacacaugaugcgguguacaugcguuggcaacggaaggggcgaguggacauguaucgccuacucacagcuuagggaccagugcaucguagacgauauuacguacaaugucaacgauacuuuccauaagcgccaugaagaggggcacaugcugaauuguacuugcuucggccagggacgcggucgauggaagugugaccccguggaccaaugccaagauuccgagacugggacauucuaccagauuggcgauagcugggagaaauacgugcauggugugcgauaucagugcuacugcuaugggcguggcaucggcgaguggcauugccagccucugcagaccuacccguccagcuccgggccaguggaaguguuuauuacagagacucccagucaaccaaauagccacccaauucaauggaaugcaccucaacccagucacauuaguaaguacaucuuaagguggcgucccaaaaacuccguuggacgauggaaggaggccaccauccccggccaccugaacagcuacaccauaaagggccugaaacccgguguaguguacgaaggccagcucauauccauacagcaguauggacaccaagaagugacgcgguuugacuuuacaacaacuuccacgucuacccccgucacuuccaacacugugacuggagaaacgaccccauuuucacccuuggucgccaccagugagucugugacagagauuacagcuuccucauucgugguuucuugggugagugccuccgacacuguuuccgguuuccggguugaauaugaacugucagaggaaggugacgagccccaguaucuagauuugcccucaaccgcaaccucugugaauaucccugaucuuuugcccggacggaaauauauuguaaacguguaccaaauaucagaagauggagagcaaagccugauuuugucgaccucccaaacgaccgcacccgacgcucccccagacacuaccguggaucagguggaugauacuucaauaguuguccgauggucccggccucaagcccccaucaccgguuaucguauaguuuacucaccuagugucgaagguucuucaacagaacucaaucugccagaaacggcgaauucggugacccugucugaccuucaaccgggagugcaguacaacauuaccauauacgccguggaggagaaucaggagagcacaccaguaguuauccagcaggaaaccacaggcacuccuaggucugauaccguaccauccccucgagaucuacaguucguagaaguuaccgacgugaaggugaccaucauguggacaccgccagagagcgccgugacgggcuauagaguggacgucauccccgugaauuugcccggagaacacggccagcgguugcccauuucgaggaacacauuugcugaggucacuggacuguccccuggggugacguauuauuucaagguguucgcugugucucaugggagggaauccaagccucugacugcccagcaaacuacuaaauuagacgcuccuacuaacuugcaguuugucaaugaaacugacagcaccgugcuggugcgauggacaccuccacgugcucagauuaccggguaucgguuaacaguaggacucacccgccgcggucaaccacgccaguauaauguugguccaucuguaaguaaguaccccuuaagaaaccuacagccugccucagaguauaccgucucccucgucgcuaucaaagggaaucaagagucccccaaggcaaccggaguguucaccacauugcagccaggcuccucuaucccacccuauaacacagaaguuacugaaacaacuauaguaauaacuuggaccccugcgccacgcauuggcuuuaagcuggggguaagacccagucagggaggggaagcaccuagggaagugaccagugacucaggcuccauagucguguccgggcuuacucccggaguagaguacguuuacacuauacaggugcucagagacggacaggaacgagaugcaccgauaguaaauaaggucgucacuccucuuuccccucccacaaaccuccaccucgaggcuaauccagauacugguguccuuaccgucagcugggagagaagcaccaccccugacaucacagguuaucggaucaccacaacucccacuaacggacagcagggcaauagucuggaggaggucguucaugcggaccagucuucuugcacguucgacaaucugagcccuggccucgaauacaauguuaguguguauacagugaaggacgacaaagagagcgugcccaucucagauaccaucauccccgccgugccaccacccacugaccugagauuuacaaacaucggucccgauaccaugcggguaacuugggcgcccccaccgagcaucgaccuaacuaauuuccucgugagguacuccccugucaagaacgaggaggacguggcugaacugaguaucuccccgagugacaacgccguggucuugaccaaccugcuaccuggcacggaguacguggugucugucucuagcguuuacgagcaacacgagagcacuccuuugcgaggccggcagaagacaggccucgacucaccgacuggcauugauuuuagcgauauuacagccaacagcuucaccgugcacuggauugccccccgggccacuauuacaggauaccgcaucagacaccauccagaacacuucucggguaggccccgcgaggaccggguaccccacucaagaaauucaaucacccuuaccaacuuaacucccggcacugaguauguugugaguauuguugcucucaacgggcgcgaggaaucuccccuccucaucggccagcaguccacaguaagcgacgugccacgcgacuuagaaguggucgcagccacuccgacaucacucuuaauuuccugggaugcuccugcggugacagugagauacuauagaauuaccuacggcgagaccgguggaaauagccccguacaggaguucacagugccuggguccaaaucaacagcuacuaucuccggccucaaacccggaguugacuauaccaucaccguguaugccgugacugggcggggcgauucaccggcaucaagcaaaccuaucuccaucaacuaccgcaccgaaaucgauaaaccgagccagaugcaagugaccgacgugcaggacaauuccaucagugugaaguggcugccuucgaguagcccugucacagguuaucgcguaaccaccacucccaaaaauggucccgguccaacuaaaacaaaaacagccgggccagaccagaccgaaaugacuaucgaagguuuacagccuaccgucgaauacguggugagcgucuacgcccagaauccgagcggcgagucucagccacugguucagaccgcuguuaccaacaucgacaggcccaaaggauuggcuuuuaccgacguugauguggauagcauuaagaucgcaugggagaguccacaaggccaggugaguagauaccgcgugacuuacagcuccccagaggaugggauucaugaauuauuuccagcaccugauggagaggaagacacagcggaacuucaaggccugcgaccaggaagcgaauacaccguaucuguugucgcccuucaugacgacauggagagucagccucuaaucgggacccagaguaccgcaauccccgcaccuacagaucuaaaauuuacucagguuacuccuacuucccucagcgcccaguggacuccccccaaugugcagcugacuggguaucgaguuaggguaacaccgaaggagaaaaccggaccgaugaaagagaucaaccuggcucccgacucaucguccguaguggucagcggccuuauggucgcaaccaaauacgaggucaguguguacgcauugaaggacacccucaccucaagaccagcccagggcguggugacaacgcuggagaacgucucaccccccagaagagcccgcgugacugacgccacagaaacaaccauuaccauuagcuggcggacuaaaacagagacuaucacuggcuuccagguggaugcugugcccgccaauggccagacccccauccagcgcacgauuaagccagacguucggaguuauaccauaacuggguuacagcccggaaccgauuacaagaucuaccuuuacacucugaacgacaacgcccggagcaguccaguggucaucgacgccucuacagcgaucgacgccccauccaaucuuagguuccucgcaaccacgccgaacucuuuacugguuagcuggcaacccccacgggcucgcauaacuggcuacauuaucaaguacgagaagccaggaucucccccccgcgaagucgucccgcgcccucgcccuggcgugaccgaggcuaccauuacagggcucgagccuggcaccgaauacacuauuuacgugauugccuugaagaauaaccagaaaagcgagcccuuaauaggaaggaagaagacagucaaugagggguuaaaucagcccacagaugauucuuguuucgaccccuacacaguaucccauuacgcaguuggagacgaaugggaacgaaugagugaguccggcuuuaagcuccugugccagugccucggcuuuggcucuggccacuuuaggugugauuccuccagauggugccacgauaauggagugaacuauaagaucggcgaaaagugggacaggcagggggaaaacggccagaugaugucguguaccugucucggaaauggcaaaggcgaguucaaaugcgacccgcaugaagccacauguuaugacgacgguaagacauaucaugucggagagcaauggcagaaagaauaccugggcgcaaucuguuccuguacauguuuuggcgggcagcgcggauggaggugugacaauugcaggcgaccuggaggugaaccgagcccggagggcacgacaggccaauccuauaaucaguauucucagcgcuaccaccaaaggaccaacacgaacgucaauuguccaauagaguguuucaugccgcucgacguccaggccgauagagaggauucacgcgaauag

SEQ ID NO: 267219 - RNA, 6636 nt, Artificial Sequence
  derived and/or modified sequence
augcucagaggacccggaccaggcuuacuacuccuggccguccaaugucuaggaaccgcagugccaagcacaggcgcaagcaaaagcaaaaggcaggcgcagcaaauggugcaaccccagucgccaguggccguaucacagagcaaaccgggcuguuacgacaaugguaaacauuaccagauuaaucaacagugggagcguacguaucugggcaacgcucuggugugcacaugcuauggaggcagccggggauucaacugugagaguaagcccgaagcagaagagaccuguuuugauaaauacacgggcaacaccuacagggugggcgacaccuacgagaggcccaaggacuccaugauaugggauugcaccugcaucggggccggcagggggcggauuucauguaccauugccaacaggugccaugaggggggacagucauauaagaucggggauacguggcgccguccucacgagacaggggguuacauguuagaaugcgucugucuggggaacgggaaaggagaauggaccugcaagccaaucgcugagaagugcuuugaccaugccgccggcacuucguacgucgugggcgaaacaugggaaaaaccauaccaaggauggaugauggucgauuguaccugucuuggagaaggcucaggcagaauuacguguacaagcaggaaucguugcaaugaucaagacacacggaccucguacaggauaggagauacauggaguaaaaaagacaauagggguaaccugcugcaguguauauguacgggcaauggucgcggagaguggaaaugcgagcggcacaccuccgugcagaccacuagcagugggucaggccccuucacggauguccgggcugcaguuuaccagccacaaccgcacccucagcccccucccuacgggcacugcgugacggacucuggugugguuuacucgguuggcaugcaguggcugaagacccaaggaaauaaacagaugcucuguacgugucuuggcaauggugugucuugccaagagacagcuguaacacagacauauggcggcaauagcaacggagagcccugcgugcuuccuuucaccuacaauggaaggaccuuuuauuccugcaccacugagggccgacaggacggacaccugugguguucaacgacuuccaacuacgagcaagaucagaaguacucguuuuguacagaucauacaguccugguucagacacgcggcgggaacaguaauggggccuugugccauuucccauuucucuacaauaaccacaauuacaccgacugcaccagugagggccggcgggacaacaugaaauggugcgggacgacucagaacuacgaugcggaucaaaaauucggauucugcccaauggcugcucaugaagaaauuuguaccaccaaugaaggugugauguaucguaucggggaucaaugggacaaacagcaugacaugggacacaugaugaggugcacuugugucggcaacggccgcggugaguggaccuguaucgccuauucgcagcuaagagaccaaugcauugucgacgauaucacauauaaugucaacgauacuuuucacaagcgacacgaagaaggccauaugcuuaacugcacuuguuuuggacaaggccgcgggagguggaaaugcgacccaguugaucaaugccaagacagugaaaccggcaccuucuaccagauuggugauuccugggaaaaguacgugcacggaguuagguaccagugcuauugcuaugguagaggaauaggcgaguggcauugccagccccuacaaacuuaccccuccucgucaggucccguggagguauuuauaacggagacuccgucacaaccuaauagccacccuauacaguggaaugccccccagccaucacauaucucaaaguauauucugagauggaggccaaagaauagcgugggaagguggaaggaggccacaaucccuggccauuugaacucuuauacuauaaaaggucugaaaccaggagugguguacgagggacagcuuauaagcauccaacaauauggacaccaggaggucaccagguucgacuuuacuacaaccaguacuaguaccccuguaacuucaaacacuguaaccggggaaacaacaccauuuucuccccuuguugcuacaagcgagucaguuacagaaaucaccgcaucauccuucgucgucaguugggugagcgccagcgauacaguaaguggguuccguguggaguacgaguuaucugaagagggggacgaaccccaguacuuggacuuaccuagcacagccacuagcgucaacauuccggaucuccugccagguagaaaguacauagugaacguuuaucaaauuucggaagacggggagcagucucugauucucucuacaucucaaacaacagcccccgacgcaccuccagacacuacugucgaccaggucgacgacacaucaauugugguaagauggucccgaccucaggccccuauuacuggguaucggaucguguauagcccaagcguggagggaucgagcacggagcuuaauuuaccggagaccgcaaacucagugacuuuaagcgaccuacagccaggcguccaguacaauauuacuauuuacgcuguggaagagaaccaggaaagcaccccagucgugauucaacaggagaccacuggcacacccagaagugacaccguuccgagucccagggaucugcaguucguggagguuacagacgugaaggucaccauuauguggacaccaccugagucagcgguuaccggauaucggguggacgugauccccguaaaccugcccggcgagcauggucagcggcuucccauaucacgaaauacauucgcugaggugacuggccugaguccuggcguuaccuacuauuucaaggucuuugccgucagucacggccgggaaucgaaaccucugaccgcucagcaaacuaccaaauuggacgcccccaccaaccugcaguuugucaaugagaccgacagcaccguuuuaguucgcuggacgccgccccgggcucagaucaccggcuauaggcugaccgucgggcucacccgcaggggucagccuagacaauauaacguugguccaagugugagcaaauacccccuucguaacuugcaaccugcuagcgaguacacuguaagcuuagucgcaaucaaaggcaaucaggaaucucccaaagcgaccggcguauuuacgacacugcagcccggcuccucgauucccccauacaacacugaagucacugagacgacuauagucauuacauggaccccugccccucgaauuggauucaaguugggcgugcgccccucccagggaggagaagcccccagagaggugaccucugacagcgguagcauuguggugagcggccucacgccaggcguggaauaugucuauacuauccagguguuaagggaugggcaggagagggaugcccccaucgucaauaaaguaguaacaccucuaagcccacccacgaacuuacaucucgaagcaaacccagauaccggggugcugaccguuaguugggagcggucgacuaccccagacauuaccgguuaccggaucacuacuacacccaccaauggccagcagggaaacucccuagaggagguuguucacgcugaccaguccucuugcacguuugauaaccucuccccuggccuggaguauaacguuaguguguacacagucaaggaugauaaagaaucugucccaauuucugauacuaucauucccgccgucccccccccaacugauuugagauuuacaaacauuggaccagauaccaugcgagucacaugggcuccaccuccguccauugaucucaccaauuuucuugucagauauagcccgguaaagaacgaagaggacgucgccgaguugucuauuuccccuucagauaacgccgugguucucaccaaccuucugccaggcacagaguacgugguguccgugagcagcgucuacgagcagcaugaauccaccccgcugagagggcgucaaaagacuggguuagacagcccaacaggcauugauuuuagcgauauuacugccaauuccuucacgguucacuggauugcgccuagagcaacuauuaccggguaucgcauuagacaucacccagagcauuucuccggcagaccgagggaagaucggguaccccauucccgcaauagcauaacgcuuaccaaccugacccccggcacagaguauguggucuccauugucgcccucaacggacgggaggaaaguccauugcugaucgggcagcagaguaccguguccgacguacccagagaccuugagguaguugcugcuacuccgacaucccugcugauuaguugggaugcucccgcagugacagugcgguacuaccggaucacguacggugagaccggaggaaacucuccuguccaggaguuuacggugcccggcuccaagagcaccgcuacgauuucaggacugaaacccgggguggacuauaccaucacugucuacgcuguaacaggaagaggcgauaguccugccaguucaaaaccuaucuccauuaauuacagaaccgaaauugacaagccaucacaaaugcaaguaacagacgugcaagacaauagcauaucugugaaguggcuucccucuucaucaccugugacuggguaccgcgucaccacaacucccaagaacggccccggaccuacuaaaacaaaaacugccgggcccgaccaaaccgagaugaccaucgagggacugcagcccacaguugaauaugugguuagcguauaugcacaaaaccccucgggcgagucucagccucuggugcagacugccguuaccaacaucgaccguccgaaagggcuggcuuucaccgauguggauguggacucaauaaaaauugcaugggagucuccccagggccaggugagccgguaucgcgucaccuacucuagcccagaagauggcauccacgagcuuuuucccgcaccugacggcgaggaagacaccgccgaguuacagggcuugagaccaggcagcgaguauaccguuucugugguggcacugcaugacgacauggaaucccagccgcucaucggaacucagucgacggcuauucccgcacccacagauuugaaguuuacacaggugacacccaccucacugucagcgcaguggacaccgcccaacguccagcugacaggauaucgcguuagaguuacccccaaggagaagaccggacccaugaaggagauuaaucuggccccagacagcaguuccgugguggucagcggccuuaugguggcuacuaaauaugaagugagcguguacgcgcugaaggauacucugacgucccguccggcucagggcguagugacuacuuuggaaaauguguccccuccuagacgcgcacgcguaaccgaugcuaccgaaacuaccaucaccaucaguuggagaaccaagacagagacuauuacaggcuuccaagucgaugcaguucccgcaaauggacagacaccuauucagcgcacgauuaagcccgacgugcgaucuuauacaaucacugggcugcagccugggacugauuauaagaucuacuuauacacauugaacgacaacgcaagauccucccccgucguuaucgacgcuucgacugcaauugaugcgccaucaaaucugcgauuccuugcaaccacaccuaauucccuacucgugucguggcaaccaccacgcgcacguauaacaggauauaucaucaaguacgagaaaccaggcuccccucccagagagguggucccacggccuagaccaggggucacagaagcaaccauuacaggccuggaaccaggaaccgaguauacuaucuauguaauugccuugaaaaacaaccagaaauccgagccauugauuggacggaagaaaaccgggcaggaagcucugucucagacaacaauaaguugggcucccuuucaagauaccucagaauacaucauuucuugucacccuguuggaacagaugaagagccgcugcaguuccgcguacccggcacaucaacaucggccacacugacuggccucacgcguggcgccacuuacaacguaauaguagaagcccucaaagaucagcagaggcacaagguacgugaggaagucgucacaguagguaauagcggcuggugucacgacaacggagugaauuacaagauuggggagaagugggaccgacagggagagaauggucagaugaugagcugcacaugccucggaaaugggaagggagaguucaaaugugacccgcacgaagcgacaugcuaugaugacgguaagacguaccacgucggcgagcaguggcagaaagaguaucugggagcgaucugcaguugcaccuguuuuggaggucagcguggguggcggugugacaauuguagacggccgggcggcgagcccucccccgaaggcacgacugggcagucuuauaaucaauauucccagagguaccaccagagaacgaacaccaacgucaauugcccaauagagugcuuuaugccauuggaugugcaggcagacagagaggacagccgugaauag

SEQ ID NO: 267220 - RNA, 6096 nt, Artificial Sequence
  derived and/or modified sequence
augcugagagggccaggaccgggccugcuguugcucgccgugcaaugccuaggaacugccgugccauccaccggugccagcaagagcaagagacaagcccagcaaauggugcaaccccaauccccgguugccgucagccagucuaaaccggggugcuaugauaauggaaaacacuaucagaucaaccaacagugggaaagaaccuacuuaggaaaugcccuggugugcacauguuacggcgggucccggggcuuuaauugcgaaagcaaaccagaggcagaggagacaugcuucgacaaguacacagggaauacguaucgcgucggagauacauaugaacgaccaaaggacucuaugaucugggauuguacaugcauaggcgccggaaggggaaggauuucgugcacuaucgcuaaccgaugucacgagggaggccagaguuacaagaucggugacacguggaggcgaccgcacgagacaggaggcuacaugcuggaaugugugugccugggaaacggcaagggggaauggaccuguaagccuauagccgagaaauguuucgaucacgcagcuggaacguccuauguggugggcgagacaugggagaaaccuuaccagggcuggaugaugguugacuguaccugucugggagaggggucuggaaggauuacuuguacaucucguaaucgcuguaaugaucaagacacgaggacuucguacagaauuggagauaccugguccaagaaggauaaucgaggcaaccugcugcaaugcauuugcacugggaaugggcgcggcgaauggaagugcgagaggcacacuagcguucagaccacgagcaguggaucuggcccuuuuacggacguccgugcagcugucuaucagccacaaccucacccacagccuccccccuauggucacuguguuacugacuccgguguagucuauagcguaggaaugcaguggcugaaaacccagggaaauaaacagaugcugugcacuugucugggcaacggcguaucaugccaggagaccgcagugacucagaccuacggcggcaacucuaauggagagccauguguucugcccuucacauacaacggccggacuuucuauucguguacgacugaaggccgacaagacggccacuugugguguuccacaacuuccaacuacgagcaggaccaaaaauacucuuucugcacugaucauaccgugcugguccaaacuagaggaggcaauagcaacggggcccugugccauuuccccuuucuguacaacaaucacaacuacaccgacugcacaucagaggggaggagagacaacaugaaguggugugguaccacucagaacuaugaugcagaucaaaaguucggcuucuguccgauggcagcgcacgaagagauuuguacuacuaacgaaggaguuauguacaggaucggggaucagugggacaaacagcacgacaugggacacaugaugagaugcacuugugugggaaacggucggggggaauggacguguauagcauauucacaacugagggaucagugcaucguagacgacauaacauauaacgugaaugacacauuccacaagagacacgaagaaggucauauguugaacugcacguguuuugggcagggcagaggccguuggaaaugugacccugucgaucagugucaggauagcgaaacuggcaccuuuuaccagauuggagauagcugggagaaguacgugcauggaguacgcuaucaaugcuacuguuacggaaggggcaucggggaauggcauugccagccacuacagaccuacccgaguucgagcgggcccguggagguguucauuaccgagacgccaagucagccaaacagccauccuauccaauggaaugccccgcagccuagucauauuuccaaauauauucucagauggcguccaaagaauucagugggccgcuggaaggaggccacuaucccugggcauuugaacaguuauacgauuaaggggcuuaagccugguguugucuacgagggccagcuaauuucuauccagcaauauggccaucaggaaguaacgagguucgacuuuacaacaaccucuaccucaaccccugucaccaguaauaccguaacuggugagacaacaccguucucaccacucguggcaaccagugagagcgucacagagaucacagcgucuuccuuuguggucucuuggguuuccgcuagcgacacugugagcggauuuagaguggaauacgaacuuuccgaggagggagaugaaccccaguaccucgaucugccauccaccgccaccuccgugaauauccccgaccugcugcccggucgaaaauacauugugaacguguaccaaauuagugaggauggggagcaaagccucauacuguccacaucacagacgaccgcaccggacgcaccuccagacacaacaguggaucaaguagacgauaccucuauaguaguucgauggucccguccucaggccccuaucacagguuaccgcauuguuuauuccccgucagucgaggguucuuccaccgaacucaaccugcccgaaacugcuaacagugucaccuugucugaccuccagccgggaguucaguauaauaucacgauauacgccguagaagagaaucaggaaucuacuccugucgugauucagcaggagacaacaggaacgccgcggucggauacagugcccagcccucgggauuugcaguucgucgaaguuacugauguuaaggugaccauuauguggaccccccccgagagcgccguuaccggcuaucgcguugacgucauuccaguuaaucugcccggagagcauggccagcgcuugccaaucucacgcaauacuuuugccgaaguuacggguuuaucacccggagugaccuacuauuucaagguauucgccguaucgcaugggcgugagagcaagcccuugacugcccagcagaccacaaagcucgaugccccaaccaaccuccaguuugucaacgagaccgauucaacaguacucgugagguggacgccacccagggcccagauuaccggauaucgguugacuguuggccucacgcggaggggccagccccgccaguauaacgugggccccucgguuuccaaauaucccuugcgaaacuugcagccggcuucugaauacacaguuucgcucguggcaauuaaggggaaccaggagucaccaaaggcuaccggcguguucaccacccuucaaccgggcuccucuauuccaccauauaacacugaagugacagagacuaccaucgugauaacuuggacaccugccccuagaauugguuucaagcugggaguacgcccaucccaaggaggugaagccccucgcgagguuacguccgauagcgggucuauaguagucucuggucugacuccugggguggaguacguguacaccauacagguucugcgggacggacaagagcgagacgcaccaauugugaacaaggucgugaccccauuaagcccaccaaccaaccugcaccuugaggcgaauccugauaccggcguguugacuguuuccugggaacgaucaacaacacccgauauuacaggcuaucgcaucaccacgacaccgacgaauggccagcaaggcaauagccucgaagaggugguccaugcugaucaaaguagcuguaccuuugacaacuugucuccaggacucgaguauaauguuucaguguauacagugaaggacgauaaagagucuguccccaucuccgacacuauuauuccagcaguccccccuccgaccgaccugagauucaccaacaucggcccagacaccaugcgcguuacaugggcuccacccccuagcauagauuuaacuaacuuucucguccgcuacagcccaguuaaaaaugaagaagauguggccgagcuguccauuucucccucagacaacgcaguagugcuuacuaaccuguuaccgggaacugaauaugucguuucggugaguucugucuacgaacagcaugagucuaccccucuucgaggccgucaaaagacuggauuagacucaccaacaggcauugacuucucugacauuacugcuaauucuuuuacaguucauuggauugcccccagggcgacaaucacuggcuacagaauucggcaccacccugagcauuuuuccggcagaccccgggaggaucgagugccccacucucggaacucuauuacgcugaccaaccuaacaccuggaaccgaguauguggucuccaucgucgcacugaacggccgggaagaauccccccuucuuaucggucaacaaucuaccguguccgaugucccucgggaucuagaagucguugccgcuacaccaacaucacuguuaauuuccugggaugcaccagcagugaccgugcgguauuaccggauuaccuauggcgaaacuggagggaauagucccgugcaggaguuuacaguuccugguucuaagucaacugcuacaaucucaggccugaagccugggguggacuacaccauuacagucuacgccguaaccggcagaggcgauucaccggccuccagcaagccgauaagcaucaacuauagaaccgagaucgacaagccgucccagaugcaagugacagacgugcaggacaacuccauuaguguuaaguggcugccuucguccucccccguuacuggguacagggugacuacaacaccgaagaacggaccagguccaacgaagacaaagacugcugggcccgaucagacugaaaugacuaucgagggcuugcagccuacagucgaauacgugguaagcguguacgcucaaaauccaucuggugagagccaaccucucgugcaaaccgcugugaccaacauagacaggccuaaggggcucgcauuuacagaugucgacguugacagcaucaagaucgcaugggagucaccccagggacagguuucccguuaccgugugacuuacaguuccccagaggacgguauccacgaguuauucccagcccccgacggugaggaggacaccgcugaacugcaaggccugcgcccagguagugaauacacugugagcgucgucgcacugcacgacgauauggagagccaaccuuugauaggaacccagaguacggcuaucccagcacccaccgaccuuaaauuuacacagguuaccccuacaucucuguccgcucaguggacucccccaaaugugcaguugaccgguuacaggguccgaguaacccccaaagaaaagacggggccuaugaaagagauuaaucuggcuccugacucaaguaguguaguggugagcggucugaugguggcuaccaaauaugagguguccgucuaugcucugaaggacacccuaaccaguaggccggcccagggagugguuaccacccuggagaacguuagccccccccggcgggcucgggugaccgacgcuaccgagacuacgauuaccaucucuuggagaacgaagacugagacaauuacgggauuucaggucgacgcuguuccggccaauggucagacuccuauucaaagaacaauuaaaccagacguacguucuuacacuaucacgggucugcagccuggcacagauuauaagauuuaccuguacacucugaaugauaacgcccgcaguuccccuguaguaauagaugccuccaccgcaauugacgccccaucuaaucuccgguuucuggccacuacacccaauucucuccucgugucuuggcaaccacccagagcgcgaauuacaggcuacaucaucaaguacgaaaaaccagggagcccacccagagaggucgucccucgcccccggccugguguuacagaagccacuaucaccggcuuggagcccgggaccgaguauaccaucuacgucaucgcguugaagaacaaucagaagagcgaaccccuaauaggcagaaaaaagaccgggcaggaagcccuaucccaaacgacuauuagcugggcaccuuuccaagauaccucugaguacaucaucucaugccaucccgugggcaccgacgaggagccgcuucagucuaccaaggcguag

SEQ ID NO: 267221 - RNA, 6555 nt, Artificial Sequence
  derived and/or modified sequence
auguugagggggccuggccccggucucuuguugcuugccguucaguguuuagggacugccgugccaaguaccggagcauccaagucuaaacgucaggcccagcagauggugcaaccccaaucaccagucgcgguaucucaaaguaagcccggcugcuacgacaacggaaagcauuaucagauuaaccagcaaugggaaagaacuuaccuuggcaaugcauuagugugcaccugcuauggaggguccagaggauuuaacugugagagcaagccagaagcugaagaaaccugcuucgacaaguauacuggaaacaccuaucgggugggcgacacauaugagcgcccaaaagauucuaugauaugggauuguaccuguauuggagccggaagaggccggaucaguugcacgauagccaaucguugucaugaaggcggacagucauauaagauuggugauacuuggagaagaccucacgagaccgguggcuauaugcuggaaugugucugucuggguaauggaaagggagaguggacuuguaaaccuauagcugagaaaugcuucgaccacgcugcaggaaccaguuacguugugggcgagaccugggagaagccguaucaaggguggaugaugguagacuguacaugccuaggggaaggcucaggaagaauaacaugcacaagcaggaaucggugcaaugaccaggauacucgaaccucauacagaauaggcgacacguggaguaaaaaagauaauagagguaaucuacugcaauguaucuguacugguaauggucgcggagaauggaaaugcgaaagacauaccucagugcagaccaccucaaguggaagcggcccuuucaccgacgugcgcgcugcaguguaccagccacagccccauccucagccccccccuuauggacacugcgugaccgauuccggcguggucuauucaguagguaugcaguggcugaaaacccagggcaauaagcagaugcuguguacaugccuugggaauggcguuucaugucaggagacugccgugacucaaacuuauggcgguaacucuaauggcgaaccgugcgugcucccuuucacuuacaaugggagaaccuucuauucuuguaccacugaaggacgucaagaugggcaccucuggugcaguacuacuagcaauuaugaacaggaucaaaaauacaguuucugcacagaccacacggugcucguacaaacgcggggagguaacagcaauggugcacuaugucauuuucccuuccucuacaacaaccacaauuacacugacuguaccuccgaaggaagacgggacaauaugaaauggugcgggacgacacagaauuacgacgcagaccagaaguuuggauucuguccaauggcagcucaugaagaaauaugcacaacaaacgaggguguuauguacagaaucggagaucagugggacaaacaacaugauaugggccacaugaugagauguaccugugugggaaaugggaggggugaauggacauguauugccuacagccaguugagagaccaguguaucguggacgacauuacguauaaugugaaugacaccuuccacaaacggcacgaagaagggcauaugcuaaauuguaccuguuucggccagggaagagggagguggaaaugcgauccuguagaccagugccaggauagcgagacagggacauucuaucagauuggggacuccugggaaaaauacguucaugggguuagguaucaauguuacuguuauggaagaggaaucggggaauggcacugucagccucugcagaccuacccuuccuccucugggccagucgaggucuucaucacagagacaccaagccagccuaacagccaccccauccaauggaaugccccacaacccagucauauuucaaaauacauccugagauggcguccgaagaauagugucgguagauggaaagaggcuacaauaccugggcaccugaauagcuacacaauuaaaggucuaaaacccgggguuguuuaugaaggccaacucaucaguauucagcaguacggucaccaggaaguaacuagauuugacuuuacuacaacuucaaccaguaccccaguaaccaguaauacgguaacaggcgagaccacuccuuucagcccucuuguggccaccagcgagucaguuacugagaucacugccucuagcuucguggugucuuggguuucagcauccgacacagugucuggauuuagagucgaauaugagcugagcgaagaaggcgacgagccacaguaccuggaccucccuucaaccgccaccucugugaauauuccugaucuucuuccuggucguaaauacauugugaacgucuaccagauaagcgaggacggcgaacagucccucauucuuuccacuucacagaccaccgcuccugaugcaccacccgacacuaccguugaccagguugaugacacuuccauaguuguccgauggucacgcccucaggcaccuaucaccggguaccgcauaguguauagccccucuguugaaggaaguuccacugaacugaaucugccagagacagccaacuccgugacucucuccgaucugcagccgggcgugcaauauaacaucaccaucuacgcaguugaggaaaaccaggaaucuacucccguugugauucaacaggagacaacuggcacuccgcgaagugauaccguucccucaccuagggaccugcaauucguugaagucacagacguuaaagugacgaucauguggaccccgccugaaucugcagucacaggauaucguguggacgugauaccagugaauuugcccggagaacauggacagcgccuaccgaucucuaggaacacuuucgccgaaguaacuggucuuagccccggugugacguacuauuucaaaguguuugccguuucucacggcagagagucuaaaccccucacugcgcagcaaacaacuaaacucgaugcgccuacuaacuugcaguuugucaaugaaacugacagcaccgugcuggugcgauggacaccuccacgugcucagauuaccggguaucgguuaacaguaggacucacccgccgcggucaaccacgccaguauaauguugguccaucuguaaguaaguaccccuuaagaaaccuacagccugccucagaguauaccgucucccucgucgcuaucaaagggaaucaagagucccccaaggcaaccggaguguucaccacauugcagccaggcuccucuaucccacccuauaacacagaaguuacugaaaccacgauuguuauuaccuggaccccugccccaagaaucggcuucaaacucggcguucguccuagucaggguggagaggcaccccgugaggucacaucagauucggggaguaucgucguaaguggauugacaccggggguggaguacguauauacuauucaggugcugcgggauggucaggagagagaugccccgauugucaauaaaguugugacaccccuaagcccucccacgaacuugcauuuggaagcuaaccccgacacaggugugcugaccguguccugggaaagauccaccaccccugacauuacuggauauagaaucaccacgacaccaaccaaugggcaacaaggaaauucgcucgaagaaguggugcacgccgaccaaucuagcugcacauucgauaacuugaguccaggccuugaauauaacguguccguguauacuguuaaggacgacaaagaaagcgugccaauuuccgauacaaucaucccagccgugcccccucccacggacuuaagguuuaccaauaucggcccugacaccaugcgcguuacuugggcaccacccccauccauugaucugacaaauuucuuagugcgauauucacccgucaagaacgaggaagacguggcagaguugucaaucuccccuucagacaaugccguuguacucaccaaccucuuaccagguaccgaauacguagugagcguguccucuguguacgaacagcacgagucuacgccucucagagguaggcagaaaacaggccuugauucgccaacugguauugacuuuucggauaucacugcuaacuccuucaccguccauuggaucgcuccuagggccaccauuacuggcuaucgaauccgucaccacccugagcauuucuccggcagacccagagaggaccgggugccacacagucgaaauuccaucacgcuaacgaauuuaacuccagguaccgaauauguugugaguaucguagcccuaaacggaagggaagaauccccauuacuuaucggccagcagaguaccgucagugauguaccucgugaucuugaggucguggcugcuacaccaacgucccuguugaucucuugggacgcucccgccgugaccgugcgguacuaucgaauuacauauggagagaccggcggcaacucucccguccaggaguuuaccguaccaggaucaaagucaacagccacgauauccggacugaagcccggaguagauuacaccauaacaguuuaugccguuacaggacguggagacucuccggcuucuagcaaaccuaucuccaucaacuauagaacagaaaucgacaagccuucccagaugcaggugaccgacguccaggacaacucuauaucugucaaguggcuuccgucaaguagucccguuaccggcuauagaguuacaacuaccccaaagaacggccccgguccuaccaaaaccaaaacagccgggccugaccagacagagaugacgaucgaaggacuccagccaacuguagaguacguugugucggucuacgcucagaaucccuccggagaaagccagccacugguucaaacugcuguuacaaauaucgaccgccccaaaggccuggcuuucacagacguggacgucgauucuauaaaaaucgcuugggaaaguccucagggccaggugucccgcuaucgaguuaccuacaguucucccgaggauggcauccaugaacuguuccccgcaccagacggagaggaagauacagcugaacuucaagggcucagaccaggauccgaguacacagucagcguuguggcacugcaugaugauauggaaagccagccucucauaggaacccagucaacagcuauucccgcuccaacugaccucaaguuuacacaggugaccccaaccucccugagcgcccaguggacaccacccaacguacaguuaaccggcuaccgcguaaggguuacacccaaagagaagaccggaccuaugaaagagauuaauuuggccccagacuccagcuccguaguggucaguggguuaaugguggcaacgaaguaugagguguccguguaugcccugaaagauacucucaccuccagaccagcccagggaguugugacgacucuggaaaacgucuccccuccacguagggcaaggguuacugaugccaccgagacaacuauuaccauaaguuggcgcaccaaaaccgaaacaaucaccgguuuccagguggacgcuguccccgcaaaugggcaaacuccaauccaaagaacuauuaagccugacgucaggagcuauaccaucacuggacuccagccaggaaccgauuacaagauuuaccuguauacccuuaacgauaaugcacgcucaucacccguggugaucgacgcaagcacugcuaucgaugcucccucuaaccuccgauuccucgcuacuacccccaacagccugcugguuucuuggcagccccccagagccagaauuacuggauauauuauuaaguaugagaagcccggaucucccccacgcgaagucgucccacgaccgagaccuggcguuacugaggcaacuauuacaggccuggaaccaggcacagaauacaccauauacgugauugccuugaagaauaaucaaaaguccgagccacugauuggaaggaagaaaacgguuaaugaaggccugaaccaaccuacagacgauucaugcuuugauccuuacacuguuucccacuacgccguaggggacgaaugggagcgcaugagcgaaaguggcuucaaacuuuuaugucagugccugggauucggauccggccauuucagaugcgacucaucucgcuggugccacgauaauggagugaauuauaagauuggggaaaaaugggauagacagggugagaaugggcaaaugaugagcuguacauguuugggcaauggaaaaggcgaguucaaaugcgauccucacgaagccacauguuaugaugauggcaagacguaccacgucggugaacaguggcaaaaggaguaucugggcgcuaucugcuccugcaccugcuuuggagggcagcgaggguggaggugcgauaacuguagaagacccggaggugaacccucaccugaaggaaccacgggccaguccuacaaccaguauucucagcgguaccaucagaggaccaauaccaacgucaauugccccaucgaauguuuuaugccccuugaugugcaggcagacagagaagacucucgcgaauag

SEQ ID NO: 267222 - RNA, 6636 nt, Artificial Sequence
  derived and/or modified sequence
augcuccgcgggccaggcccaggguugcuccugcuugccguucagugucugggcaccgcgguuccgucaacaggggcuagcaaaucaaagagacaggcacagcaaaugguccaaccccaaucgccaguggccgugagucaaaguaagccgggauguuaugacaacggcaaacacuaucagauaaaccagcagugggaaagaacuuaucuggguaacgcacucgucuguacaugcuaugggggaucacguggauuuaauugugaaucuaaacccgaagcagaagaaacuuguuucgacaaguacacagggaacaccuauagaguaggcgacacauaugaaagaccaaaggauucuaugaucugggauuguaccugcauaggcgcagggcgcggaaggauaucauguacgauugcuaacagaugccacgagggggggcagaguuauaaaauuggggauacauggagaagaccgcacgaaaccggaggguacauguuagaguguguguguuuggguaacgggaagggggaguggaccugcaaaccaaucgcugaaaagugcuucgaccacgccgccgggaccucguacguaguuggcgagaccugggaaaagccuuaccagggauggaugauggucgacuguacaugucugggagaggggucagggcggauuaccuguacuucucgaaacagauguaaugaucaagauacacgaacaaguuaucgcaucggagacacuuggagcaagaaggacaacagaggaaacuuacuacagugcauaugcacuggcaauggaagaggggaauggaagugcgaacgacacacuaguguccagacuacaucauccgggucaggaccguucacagaugugcgugcugccguguaccaaccacagccucauccacagccucccccuuacggucacugcgugacugacuccggcgucguguauucuguuggcaugcaauggcuaaagacucaaggcaauaaacaaaugcucugcaccugcuugggaaauggcgugucaugucaggagacagcagugacacaaacauauggcgguaacucgaauggagaaccuugugugcuucccuucacauacaacggccgaacauuuuacucaugcaccaccgaaggcaggcaggacggccaccugugguguagcacuacaaguaauuaugaacaggaccaaaaguauucauucuguacagaucacacagugcuugugcagaccagaggaggaaauucuaacggcgcuuugugucauuucccauuucucuauaacaaucacaacuacaccgauugcacuucugaagguagacgggacaauaugaaaugguguggaacuacccagaauuacgacgcugaccagaaguuuggguuuugcccuauggcugcccaugaggagauuuguaccacuaaugaaggcgugauguaccgcauaggagaucaaugggacaaacaacaugauaugggacacaugaugagguguacuugugugggaaacggcagaggcgaguggaccuguauagccuauagucaacuacgcgaccaguguaucguggaugacaucaccuacaaugugaacgauaccuuucacaagcggcacgaggaaggacacauguugaacuguacauguuuuggucagggaagaggaagguggaaaugcgaccccguggaucagugucaagacuccgaaaccggcacguucuaucagaucggggacucuugggaaaaguauguacacggcgugagauaucaauguuauugcuacggcaggggaaucggugaguggcacugucagccucugcaaacauacccuuccucaucuggaccagucgagguuuucaucaccgagacacccagucagccuaacagccacccuauucaauggaaugcuccucagccaucacacaucuccaaauacauccugcgauggaggccuaaaaauuccguagggcgauggaaggaagcaacaauuccagggcaucuuaauagcuauacaaucaaaggccuuaaacccggagugguauaugaaggacagcuuauuucaauccagcaguacgggcaucaggaagugacacgguuugauuucaccacaaccucuacaucuaccccagugaccucuaauaccguuaccggugaaacaaccccuuuuuccccucuagucgcgacaucugaaagugucacagaaaucacugccuccucuuucgucguguccugggucucagcuucugacacgguguccggauuucguguugaauaugaacuuucagaggaaggugacgagccucaguaucuagaccuuccuucuaccgccacaagcgugaauaucccugaucuuuuaccagguagaaaguacauuguaaauguuuaucagaucuccgaagauggcgaacagucacucaucuuaucaaccucccagaccacagcacccgacgcgccaccagacacgacuguggaccaagucgacgacacuucuauuguugugagauggaguagaccucaggccccuauuaccggcuaucgcauuguuuauucaccuuccguugaagguagcucuaccgagcuuaaucugccagagacagcgaauuccguuaccuuguccgaccugcagcccggugugcaguacaacauuaccaucuaugccguggaggaaaaccaggagagcacacccgugguaauccagcaagagacgaccggcacccccagaucugacaccguucccucgccucgggaccugcaauucguagaagugacugaugucaaggugacuauaauguggaccccuccugaaagugccguaacuggguacagagucgacgugauccccguaaaccugccuggcgaacaugggcagagauugccuaucucuagaaauaccuuugccgaagugacuggacuuucaccgggcgugacauacuacuucaagguuuucgcaguaagccacggaagggaaucgaaaccauuaacugcucagcagacaaccaaguuggacgcccccaccaaccugcaguuuguaaacgagacggacuccaccgugcuuguuagauggacaccuccaagagcccaaaucacuggcuauaggcucaccgucggucucacucggcgaggacagccuagacaguacaaugucggccccuccguaagcaaguauccucugcgcaaucuccagccagcguccgaauacacugucucucuuguggcaauuaagggcaaucaggaauccccaaaggcuacuggggucuucaccaccuuacaacccgggucaucgauaccccccuacaacacugaagucaccgagacuacaauagugaucacguggacaccugccccaagaauaggcuuuaagcucggcgugcgccccucccaaggaggcgaggccccaagagaggucacauccgacucuggaucgauugucgugucugggcugaccccuggagucgaguacgucuauacuauacaggucuuaagagacggucaagaaagggaugccccaaucgugaauaaggucgugacaccucugagcccccccacuaaucuacaucuugaggcaaauccugacacaggcgugcugaccguuucaugggagcgauccacaacuccagacauaaccggcuaccguauuacaacgaccccuaccaacggucagcagggcaauucgcuagaggaagugguucacgcagaucagucuuccuguaccuuugauaaccuaagcccaggacuugaguauaaugucaguguauauacagugaaagaugauaaggaaagcgucccgauaagugacacaaucauccccgccgucccgccgcccacagaucugagauuuacuaauaucggucccgacaccaugcgcguuacuugggcuccacccccaucgauugaccugacuaauuuuuuggugagguauucuccaguaaagaacgaagaggacgucgccgaacuguccaucagcccaagugauaacgcuguagugcuuacgaaucugcugccaggcacugaauaugugguuucugugagcuccguguaugagcaacaugaaucaaccccucugagaggccgacagaaaacugggcucgacucccccacaggcauugacuucagugauauaacugccaauucuuucaccgugcacuggaucgccccgcgcgccacuaucaccggcuauagaaucagacaucacccugagcacuucuccggucguccccgcgaagaccgcgugccucacagucgcaauaguauuacauuaacuaaucucacacccgguacagaguacguggucuccauuguugcccugaauggacgggaggaauccccuuugcuaauuggccagcagagcacuguuucagaugugccacgagaucuggagguggucgcagcaaccccaacaaguuuauugauauccugggacgcaccugcggugaccgugagguacuaccgaauaacguacggagagaccggaggaaauucgccaguucaagaguuuacggugcccggcaguaaaagcaccgcuacgauuucaggacugaaacccgggguggacuauaccaucacugucuacgcuguaacaggaagaggcgauaguccugccaguucaaaaccuaucuccauuaauuacagaaccgaaauugacaagccaucacaaaugcaaguaacagacgugcaagacaauagcauaucugugaaguggcuucccucuucaucaccugugacuggguaccgcgucaccacaacucccaagaacggccccggaccuacuaaaacaaaaacugccgggcccgaccaaaccgagaugaccaucgagggcuugcagccgacugucgaauaugucguuuccguauaugcucagaauccaagcggggagagucaaccguugguucagacagccguuaccaauaucgauaggcccaaaggacucgcuuuuacugauguugauguggacuccauuaagauugccugggagagcccacaagggcaagugucgcgguauagagugacuuauagcaguccagaagacgguauacacgaacuuuuuccagcaccggauggagaggaggauacagccgagcuccagggucucaggcccgggucugaauacaccgugagcgugguugcccugcacgacgauauggaaucucagccucuuauaggaacccagucgaccgcuaucccagcaccuaccgaccugaaauucacccaggucacgccuaccucauuaagcgcccaauggacuccacccaacguacagcuuaccggauaccgcgugcgugugacaccaaaagagaagaccggcccaaugaaggagaucaaucuugcaccugacagcucaaguguggugguaucuggucugaugguggcuacaaaauaugaaguuucaguuuacgcuuugaaggacacccugacguccaggccagcccaaggcguggucacgacacucgaaaaugugagucccccccggagagcuagggugacagacgcuacugagaccacaaucacaauuucauggcggacaaaaacagagacaauuacuggcuuccaaguagaugcaguccccgcaaaugggcagacccccauccaaagaacaauaaaaccugacgugcgcagcuauaccaucaccggacuccagccugguacagauuacaagauuuaccucuauacucuuaaugacaacgcacguuccaguccuguaguuauugacgcgagcacugcaauagacgcucccuccaaucugcgcuuucuugcaacuacaccuaacucucuucucgucucauggcagccuccaagggccagaauuaccggcuauauuauuaaauacgagaaaccugggucaccaccaagagaagucgugccucgaccccgaccuggggugacagaggcaacuauuacaggucuggaaccuggaacagaguacaccauuuacgucauagcucuuaaaaacaaccagaaaagugaacccuugauaggacgaaagaaaaccggucaggaagcccucucucagacuacuaucuccugggcucccuuucaggauacaagcgaguauauuaucucaugucaucccgugggaaccgaugaggagccgcuucaauucagagugccuggaaccuccacuagugcgacgcuuaccggccuuacccgaggagcaaccuauaauguaauaguagaagcacugaaagaccagcagagacauaaggugagggaagagguagugacgguaggaaauucagguuggugucacgacaauggggugaauuacaaaauuggcgagaaaugggacaggcagggggagaauggccagaugaugagcuguaccugccuggguaaugggaagggcgaauuuaaaugugacccucacgaggcgacauguuacgaugacggcaaaacauaucaugugggcgaacaguggcagaaagaauaccugggcgcaaucuguaguugcacgugcuuugggggucagcgaggguggagaugcgacaauugcagacgaccagggggagaaccuagucccgagggaacgacugggcaguccuacaaucaguauagccaaagguaccaccagagaacaaacacuaacguuaauugccccaucgaauguuucaugccccucgauguucaagcugauagagaggauucaagggaguag

SEQ ID NO: 267223 - RNA, 6096 nt, Artificial Sequence
  derived and/or modified sequence
augcuccgcggaccuggaccugggcuccuguuacuggccguccagugccuaggcaccgccgucccgucuaccggcgcguccaaguccaaaaggcaagcccagcagauggugcagccacagucgcccguugccgugucucaaucuaagccaggcugcuaugauaauggaaaacacuaucagaucaaucaacaaugggaaagaaccuaccuuggcaacgcucugguguguaccuguuacggggggucuagaggguuuaauugugagucuaagccugaggcagaagaaaccugcuuugauaaauauacaggaaauacuuacagggugggagacacguacgagcgccccaaagacucaaugauuugggauuguacuugcauuggagccgggagaggcagaaucucauguacuaucgcaaacaggugucacgaaggagggcagaguuacaagaucggcgacacauggagacgcccucacgagacaggagguuacaugcuggaaugugugugucugggaaauggaaagggcgaauggacuuguaaacccaucgccgaaaagugcuucgaucacgccgcgggcacuagcuacguagucggugaaacuugggaaaaaccauaucaagguuggaugauggucgauuguacgugcuuaggcgaaggcagugguaggauuacauguaccucaagaaaucgcugcaaugaccaggauacacguacuucauaccgcaucggggacacauggucaaagaaggauaaccggggaaaccugcugcaauguauauguaccgggaaugguagaggagaguggaaaugugaacggcauaccagcguacagaccacaucauccgguagcggaccuuuuaccgacgugcgagccgcuguauaccaaccacaaccucauccucagcccccaccauauggccacugcgugacugauuccgguguaguguauagugucggaaugcaguggcugaagacucaagggaauaaacaaaugcuguguacaugcuuggguaacggagugagcugucaggaaaccgcagugacacaaaccuauggcggcaauucuaauggcgagcccugcgugcucccauucacauauaaugggcgaaccuucuauagcuguacuaccgagggcagacaggacgggcaucucugguguagcacaacuucuaauuaugagcaggaucagaaguauaguuuuuguaccgaucacaccgugcuagugcagacaagggggggcaauuccaacggggcacugugucacuuuccguuucucuacaauaaccauaauuacacagauugcaccuccgaaggaagacgcgacaacaugaaauggugcggcacaacccaaaauuaugacgccgaucaaaaauucggauuuugcccgauggcugcacacgaagaaaucugcaccacuaacgagggcgucauguacagaauuggugaccaaugggauaagcaacacgacaugggccauaugaugagaugcacuuguguugggaauggacgcggagaauggacuuguaucgccuauagccaauugagggaucaauguaucguugaugacaucacauacaacguaaaugauacguuucauaaaagacacgaagagggccacauguuaaauuguacuuguuuuggacagggaaggggaagauggaaaugcgauccaguugaccaaugccaggacuccgagacgggcaccuucuaccagaucggcgacucuugggagaaauauguacacggcgucagauaucaaugcuacugcuauggccgaggcauuggggaguggcauugucagccccugcaaaccuacccauccuccagcggaccagucgaaguauuuaucaccgaaaccccaucucagccuaacagucaccccauccaguggaacgcuccccagccuagucauaucuccaaauacauucugcgauggcgaccuaaaaacagcguagggagauggaaggaggccacaauuccagggcaccuuaauuccuauacaauuaaaggccugaaacccggaguaguguacgaaggacaacugaucucaauccagcaguacgggcaccaagaggugacacgcuuugacuuuacuacaacuuccacuuccacccccguuacuuccaauacuguaacuggcgagacgaccccauuuagcccacuuguggccaccucagagagcgugaccgaaaucaccgcaucuuccuucgugguaagcuggguguccgccagugacacugugucagguuuuagaguggaauaugagcucagcgaagaaggugaugaaccacaguauuuagaucuucccuccacagcaacauccgucaauauccccgaccuccugccuggcagaaaguauaucgugaauguguaucaaaucagugaagauggagagcagucacuaauucuuucuacaucacagacgacugcuccugaugcucccccagauacaacgguggaucaggucgacgauacuagcauuguaguacgguggucuagaccccaggccccaauuacuggcuaccguaucguauauucacccagcguugaaggaucuucaacagaacucaaucuuccagagaccgcuaacaguguaacccucuccgaccuucagcccggcguucaguauaauauuacaauuuaugccgucgaagaaaaucaagaguccacacccgucguuauucagcaggaaacuaccgguaccccucgaucggauacuguuccuagcccacgagaucuucaauuuguagaggugacagacguuaaagucacuaucauguggaccccuccagaaagcgcagugaccgguuacagaguggacguuaucccugucaacuugccaggagaacauggccagaggcuuccuauuuccagaaauacuuucgccgaggugaccggucugaguccaggcguuacauauuauuuuaaagucuuugccguuucccauggccgcgaaagcaagccacugacagcacagcaaacaacgaaacuggacgcaccgacaaaucuccaguuugugaaugagacagauagcaccgugcugguuagauggacaccuccgcgggcacagauuaccggauaccggcugaccgucggcuuaacacgacguggacagccucgccaguauaauguuggaccauccgucucaaaauauccguugcgaaaccugcagccagcaucagaauauacugugucccucguagccaucaagggaaaucaggaaucaccuaaagccacaggcguauuuaccacccuccaacccggcaguucgauuccaccuuacaauaccgaagugaccgaaacuacaauuguuaucacuuggacuccugcuccacggaucgguuuuaagcugggugugcggcccucccaaggaggugaggcuccacgcgaggucacaucagacucuggcuccaucguggugucggguuuaacuccaggcguggaauauguguacacaauccaaguacucagagacggccaagagagagaugccccuauugugaauaaaguggugacaccacuaagccccccgacaaaucuucaucuggaggccaaccccgauaccggaguauuaacaguuagcugggaaaggucgaccacacccgacauaaccggguacagaaucacaacaacgccaaccaauggccaacaaggaaauucucuggaagagguuguucacgcagaucagagcagcuguacuuucgacaaucugagucccgggcuggaguauaacguuucaguuuacacagugaaggaugauaaggagucuguccccaucucugauacuauuaucccugccguuccuccuccuacugaccuccgcuucaccaacaucgguccugauacaaugcgcgucaccugggcccccccgcccuccaucgaccuaacaaacuuuuuagugcgauacuccccugugaaaaaugaggaggacguugcugaguuaaguaucagcccaagcgacaaugcaguuguuuugacaaaccugcucccaggcaccgaauauguugugucuguuucguccguguacgaacaacaugaaucgacccccuugagaggacgccagaagacaggccuggacagcccuacaggcauugauuuuucugauaucaccgcuaacuccuucaccguccauuggauugccccuagagcgacuauuaccggcuaucggauucgccaucaccccgaacacuucagcggccgaccuagagaggaccgcgugccccauuccagaaacucuauuacucucacuaaccugacgccuggcacugaguauguugugucuauagucgcccuuaauggacgcgaagagucaccucucuuaauaggacagcagucuacggugagcgauguuccccgugaucuggaggugguggcagcaacgccuacauccuugcuuaucuccugggaugcuccagccgugaccgucagauacuacagaaucacauacggagaaacaggaggaaauucucccguucaggaauuuacugugcccggaaguaaaucgaccgcaaccaucuccggauuaaaaccugggguugacuacacaaucacagucuacgccgugacuggaagaggcgacucccccgcuagcuccaaacccaucucgauaaacuauaggaccgagauugacaagccaucacagaugcaagugacagacguucaggauaauuccaucucaguuaaguggcugccuuccuccagccccgugaccggcuaccgggugacuacgacuccuaagaacggcccagguccuacuaaaaccaaaaccgcaggccccgaccaaacggaaaugaccauugaggggcugcagccgaccgucgaauaugugguaagcguguaugcgcaaaauccauccggagagagccagccacucguucagacagccgugacaaacaucgaucgcccuaaaggucuagcauucacugauguggacguggacaguauaaagaucgccugggagucuccacaagggcaagucagccgauauagagugaccuacucaagucccgaagaugguauccaugagcuguuuccagccccugauggggaagaagacacugcugagcugcaaggcuuacguccagguagcgaauacacaguuucugucgucgcacuccaugacgauauggagucucaaccccugauugguacgcagaguacggccauuccugccccuacagaccugaaauuuacacaagucacacccaccucgcugucagcucaauggacaccuccgaacgugcagcuuacuggauaccgcguacggguuacaccgaaggagaaaaccgggccuaugaaagaaauuaaucuugcucccgauuccuccucagugguaguuagcggucugauggucgccacaaaguaugaggucagcguguacgcacugaaagauaccuuaacuucccgccccgcacagggcgucgucacaacucuugaaaauguguccccacccaggcgcgcccgaguuaccgaugccacagagaccaccaucaccaucucauggcggacuaagacagaaaccauuacaggcuuccagguugaugccgugccagcaaauggacaaaccccaauccagaggaccauuaagccagaugugagaucauacacaauaacuggacuucagccagggacugacuacaagauuuaucuauacacauugaaugauaaugcaagaaguagcccggugguuauugacgcuagcacagccauugacgcccccucaaaucuuagguucuuagcaacaaccccaaacagccucuuagugagcuggcagcccccaagagcuagaauuacuggcuacauuaucaaguaugaaaaaccuggaucccccccucgagaggucgugccucgaccuaggccuggugugacggaagcuacuaucacagggcuggagcccggaacagaauacaccauauacgugaucgccuugaaaaacaaccagaagucggaacccuuaauagggagaaagaagaccgggcaggaagcacuuagucagacuacuaucagcugggcacccuuccaggacaccucagaauacauaauuucaugccacccggucggaacugaugaagaacccuuacaaagcacaaaagcuuag

SEQ ID NO: 267224 - DNA, 1329 bp, Artificial Sequence
  derived and/or modified sequence
atgtgcgaactgagccgggaagatgcaccggtgagatggtacaaggacggacttgaagtggaagagagcgaagccctcgtccttgagcgagatgggccaaggtgccggcttgtcttaccagcagcgcaacccgaagatggtggtgaatttgtgtgtgatgcaggcgacgacagcgcctttttcacagtcactgtgacggcacctcctgaacggatagtgcaccccgcagctaggtccctggatcttcacttcggtgcccccggccgagtagagctccggtgtgaagttgcacccgccgggtcccaggtgcgctggtataaggatggactggaggtcgaggcaagcgacgctctgcagctaggggcagaggggcccacgagaacccttacactgccccatgctcagccagaagatgctggcgagtacgtttgtgaaactcggcatgaagccatcaccttcaatgtaatcctggccgaaccccccgtgcaattcttggcccttgagaccacgccaagtcctctatgtgtcgcacccggtgagcccgtggtcctaagttgcgaattgtcacgggccggcgcccctgtggtgtggagccacaacggccgccctgtgcaagagggggagggtctagaactccacgccgagggtcctagacgggttttgtgcatacaggccgccggcccagcacatgcaggcttgtatacttgtcaaagtggcgcagcacctggggccccctcactatccttcactgtgcaggtggctgagccccttcttgttaagctggtgagtgaactcacccctctgactgtccacgagggagatgacgcgacgtttaggtgtgaggtgtctccacccgacgccgacgtgacatggctccggaacggagcggtagttaccccggggccccaagtggaaatggctcagaacgggtcaagccgcatcttgacactcagaggatgccagcttggggacgctgggactgtgactttgcgggctggatcaacagctacatctgcccggctacacgtgcgggagacagagttgctgttcctgcgtcgcctgcaggatgtgcgggctgaagaaggccaagatgtttgtcttgaagtggaaacgggtcgggtgggcgccgctggtgctgttcgctgggtccgcggcggtcagcccttaccacatgacagccggttgtccatggcccaggacggccacatccacaggctctttatacatggagttatacttgccgaccagggaacctacggctgtgagagtcatcacgaccgtaccctggctaggctaagtgttcgtcgggaatgcccagtcctgagctag

SEQ ID NO: 267225 - DNA, 1329 bp, Artificial Sequence
  derived and/or modified sequence
atgtgtgagctgagcagagaagatgcccctgtgcgctggtacaaggatggcctggaggtggaggagagcgaggccctggtgctggagagagatggcccccgctgccgcctggtgctgcctgctgcccagccagaagatggaggagaatttgtgtgtgatgctggagatgacagcgccttcttcaccgtgacagtgacagcccctcctgagcgcatcgtgcaccctgctgcccggagcctggacctgcactttggagcccctggccgggtggagctgcgctgtgaggtggccccagctggcagccaggtgcgctggtacaaggatggcctggaggtggaggccagtgatgccctgcagctgggcgctgagggccccaccaggaccctgaccctgccccacgcccagccagaagatgctggggagtatgtgtgtgagaccaggcatgaggccatcaccttcaacgtcatcctggccgagccccctgtgcagttcctggccctggagaccacccccagccccctgtgtgtggcccctggagagcctgtggtgctgagctgtgagctgagcagagctggggcccctgtggtgtggagccacaacggccggcctgtgcaggagggggagggcctggagctgcacgccgagggcccccggcgggtgctgtgcatccaggccgccggccctgcccatgctggcctgtacacctgccagagcggggccgcccctggggcccccagcctgtccttcaccgtgcaggtggccgagcccctgctggtgaagctggtgtctgagctgacccccctgactgtgcatgaaggagatgatgccaccttccgctgtgaggtgagccccccagatgctgatgtgacctggctgagaaatggagctgtggtgaccccaggcccccaggtggagatggcccagaatggcagcagccgcatcctgaccctgcggggctgccagctgggagatgctggcaccgtgaccctgcgggccggcagcacagccaccagcgcccggctgcacgtgcgggagacagagctgctcttcctgcggcggctgcaggatgtgcgggcagaggagggccaggatgtgtgcctggaggtggagaccggccgggtgggcgctgctggagctgtgcgctgggtgcggggcggccagcccctgccccatgacagccggctgtccatggcccaggacggccacatccacaggctcttcatccatggagtcatcctggccgaccagggcacctacggctgtgagagccaccacgacaggaccctggcccggctgtctgtgagaagagaatgtcctgtgctgtcctag

SEQ ID NO: 267226 - DNA, 1329 bp, Artificial Sequence
  derived and/or modified sequence
atgtgcgagctgagccgggaggacgcccccgtgcggtggtacaaggacgggctcgaagttgaggagagtgaggctttagtgttggaaagagacggccctagatgtaggctggtcctacccgccgcccaacccgaggacggaggagaatttgtatgcgacgcaggagacgactctgctttttttacagtgaccgtgaccgctcctcctgagagaattgttcatccggcagcccgtagcctagatctgcatttcggcgcacctggtcgagtcgagttgcgctgtgaagtcgcccccgccggtagtcaggtgagatggtataaggatggtctggaagtggaggcttccgatgccctacaactcggagcagaaggccccacccgcacccttacattaccgcacgctcagccggaggatgccggtgagtacgtctgtgagacaagacatgaggcgataacattcaacgttatcttggctgaacctcccgtccagttcttggcccttgagaccaccccttctcccctgtgcgttgcccctggcgagccagtagtcctgagctgtgagctcagccgcgccggagcccctgtggtgtggtcacacaacggtagaccagtccaagaaggagagggcctcgagctgcatgcagagggcccccgacgcgtcctttgcatccaggctgcgggtccggcccacgcaggcctgtacacttgtcagagcggcgccgccccaggcgcaccctccctcagttttactgtacaagtcgccgagcctttgttagtgaagctggtgagtgaactgactcccttgaccgtgcacgaaggtgatgatgctaccttcaggtgtgaggtttccccacctgacgcagacgtcacatggttacggaatggtgccgtcgtgaccccagggccgcaggtcgaaatggcccagaacggttcctctcgcattcttactctaagaggctgtcagctgggggacgccggtacagttacgcttagggccggatccacagctacgagtgcacggctgcacgtacgagaaacggaactgctttttctgcggcgcctgcaggatgtgagggccgaggaggggcaggacgtttgtctggaggtggagaccgggagggttggtgctgccggagcagtgagatgggtgagggggggacagcccctgccccacgacagccgtctgtcaatggcccaagatggacatatccatagactgttcattcatggggttattctggccgaccagggaacctacggatgcgagtctcaccacgatcgaacactggctcgcctgtcagttagacgggagtgccctgtactgagctag

SEQ ID NO: 267227 - DNA, 2184 bp, Artificial Sequence
  derived and/or modified sequence
tggtgctgatgtgtgaactgtctcgggaggatgcccctgtgcgctggtacaaggatgggctggaagtggaggagagcgaggccctggtgctggagagggatgggccacgctgccgcctggtgctacctgctgctcagcccgaggacgggggcgagtttgtatgtgatgctggagatgactcggccttcttcactgtcactgtcacagccccaccagagaggattgtgcacccggcagcccgctccctggatctgcattttggggctccagggcgcgtggagctgcgctgtgaggtggccccagctgggtctcaggtgcgctggtacaaggacgggctggaagtggaggcatcagatgccctgcagctgggtgccgaggggcccacccgcaccctgaccctgccccacgcccagcctgaggacgccggggagtatgtgtgtgagacccggcatgaggccatcaccttcaatgtcatcctggctgagcctccagtgcagttccttgctctagagacaactccaagcccgctctgtgtggcccctggggagccagtggtgctgagctgtgaactgtcccgggctggcgcccccgtggtctggagccacaatgggaggcccgtgcaggagggcgagggcctagagctccatgccgagggcccccgccgagtcctctgcatccaggctgcaggcccagcccatgcagggctctacacctgccagtctggagcagcccccggagccccaagcctcagcttcaccgtccaggtggctgagccactgctggtgaagctggtctcggagctgacaccactcactgtccacgagggcgatgatgccacgttccggtgtgaagtctccccaccagatgccgatgtcacctggctgcgcaatggggccgtcgtcactccagggccccaggtggagatggcccagaatggttcaagccgcatcttaaccttgcgaggctgccaactgggggatgcagggaccgtgactttgcgggcagggagcacggccacaagtgcccggctccatgttcgagagacagagctgctgttcctacggcggttgcaggatgtgcgggcagaggaaggccaggatgtgtgtctcgaagtggagacaggccgagtgggtgcagcgggggccgtgcgctgggtgcgaggtgggcagcccctgccccacgactctcgcctgtccatggcccaggatgggcacatccaccgcctcttcatccatggtgtcatactggccgaccagggcacctacggctgcgagagccaccacgatcgcaccctggccaggctcagcgtgaggcgtgagtgccccgtcctctcttaatgcattacccaccctacaccacagccttttctggctgtcctggagtccctcaggcccccaccaaagtgcccctcatcgctgagaaaagtcacccatggccgtcccagcagcagcttgcccaaagcaaaacttttctttttctaatattttttatttaccttagaagtccatgtggattttgcattccattgcatatttccaagtcggctttgctataaacacaaatattctccagaaagacttgccatgggcatccttcaggcatgtattctagggatacacatacccacttaagtagcagggatggctgtcaaacagcaccccacacctcccacccaaagctggagccctctgtttcctatgtgacctcatgcaagttaacctctttgagccaagtctccttaaaaatggggctgagaccaggtgcagtggctcacgcctataatcctaacactttgggaggccaaggcaggaggatcccttgaggccaggagttcgaggccatcctgggcaacatagcaagaacccatctccacaaaaaaaaataaaaattagccgggcatggtagttactagggaggctgaggcagaaggattgcttgaacccaggaggttgaggctatagtgagctatgatcatgtcacggcattccagcctgggtgacagcaagaccctgtctcaaattttaaaaatggggttgatccccgtctcaagtgtctctgggaacattaactgagataacatgaaaattcttacacagagcttggtgaatggttgtcatttgtgacacatctcttctaacttatttcattcaagaaatcatcacaataaacctgtgtcccaatgtt

SEQ ID NO: 267228 - DNA, 1329 bp, Artificial Sequence
  derived and/or modified sequence
atgtgtgagctttctcgcgaagacgctccagtcagatggtacaaagatggcctggaggtagaggaaagcgaggccctggtgctggagcgggacggccctcggtgtcggctcgtgttgccggcagctcaaccagaggatggcggtgagttcgtctgtgacgctggagatgacagcgcattctttactgtcaccgtgacagctccgcctgaacgcatagtccacccagcggcacggagtctcgatctgcatttcggcgctcccggaagagttgaattgcgatgcgaagtggcccctgcgggatcacaagtgcgttggtataaggacggactcgaggttgaagctagcgacgcactccagttgggggcagaaggcccaaccagaacattgacgcttcctcacgcccagcccgaagacgctggcgagtacgtgtgcgagaccagacatgaagccattacttttaacgtgatcctggccgaaccgcctgtgcagttcttggcgctagagacaaccccttcgcccctttgtgtggctcccggagaacccgtcgttttaagctgtgaacttagtcgagctggagctccagtcgtgtggtcacataatggacgccctgtgcaagagggcgaaggcttagagctgcacgcagaaggccctagaagagtgctgtgcatccaggctgccggaccggctcacgccggtctctacacatgtcagagcggcgcagctcccggagcacccagcctgagcttcactgtgcaggttgccgaacccctactggtgaagctggtaagtgaactgacgccactgacagttcacgagggtgacgatgccacattcagatgcgaagtctcccccccagatgcagacgtgacatggctcaggaacggcgcagtggttactccaggaccacaggtggagatggcccagaacggtagcagtcggattctcacacttcgaggctgccagctgggtgacgcgggaaccgttaccctccgcgctgggagtacagccacttctgcccgactccatgtgagggagaccgaactactcttcctgcgcagacttcaggacgtgagagccgaagagggtcaagatgtatgtctcgaggttgagactggccgagtgggagccgctggcgctgtaagatgggtgagaggtgggcagcccctgccccacgacagccgcctgtctatggcccaagacgggcacatccacagactgttcattcatggggtaatccttgctgaccaagggacatacgggtgcgaaagccaccacgaccgcaccctggcaagactctccgttcgacgtgagtgccccgttctgtcatag

SEQ ID NO: 267229 - DNA, 1329 bp, Artificial Sequence
  derived and/or modified sequence
atgtgcgagctgagcagagaggacgcccccgtgagatggtacaaggacggcctggaggtggaggagagcgaggccctggtgctggagagagacggccccagatgcagactggtgctgcccgccgcccagcccgaggacggcggcgagttcgtgtgcgacgccggcgacgacagcgccttcttcaccgtgaccgtgaccgccccccccgagagaatcgtgcaccccgccgccagaagcctggacctgcacttcggcgcccccggcagagtggagctgagatgcgaggtggcccccgccggcagccaggtgagatggtacaaggacggcctggaggtggaggccagcgacgccctgcagctgggcgccgagggccccaccagaaccctgaccctgccccacgcccagcccgaggacgccggcgagtacgtgtgcgagaccagacacgaggccatcaccttcaacgtgatcctggccgagccccccgtgcagttcctggccctggagaccacccccagccccctgtgcgtggcccccggcgagcccgtggtgctgagctgcgagctgagcagagccggcgcccccgtggtgtggagccacaacggcagacccgtgcaggagggcgagggcctggagctgcacgccgagggccccagaagagtgctgtgcatccaggccgccggccccgcccacgccggcctgtacacctgccagagcggcgccgcccccggcgcccccagcctgagcttcaccgtgcaggtggccgagcccctgctggtgaagctggtgagcgagctgacccccctgaccgtgcacgagggcgacgacgccaccttcagatgcgaggtgagcccccccgacgccgacgtgacctggctgagaaacggcgccgtggtgacccccggcccccaggtggagatggcccagaacggcagcagcagaatcctgaccctgagaggctgccagctgggcgacgccggcaccgtgaccctgagagccggcagcaccgccaccagcgccagactgcacgtgagagagaccgagctgctgttcctgagaagactgcaggacgtgagagccgaggagggccaggacgtgtgcctggaggtggagaccggcagagtgggcgccgccggcgccgtgagatgggtgagaggcggccagcccctgccccacgacagcagactgagcatggcccaggacggccacatccacagactgttcatccacggcgtgatcctggccgaccagggcacctacggctgcgagagccaccacgacagaaccctggccagactgagcgtgagaagagagtgccccgtgctgagctag

SEQ ID NO: 267230 - protein, 167 aa, Artificial Sequence [sequence omitted]

SEQ ID NO: 267231 - DNA, 504 bp, Artificial Sequence
  derived and/or modified sequence
atgggcgtgaaggacagcaacatccacgagctggagcacgagcaggagcccacctgcgccagccagatggccgagcccttcagaaccttcagagacggctgggtgagctactacaaccagcccgtgttcctggccggcatgggcctggccttcctgtacatgaccgtgctgggcttcgactgcatcaccaccggctacgcctacacccagggcctgagcggcagcatcctgagcatcctgatgggcgccagcgccatcaccggcatcatgggcaccgtggccttcacctggctgagaagaaagtgcggcctggtgagaaccggcctgatcagcggcctggcccagctgagctgcctgatcctgtgcgtgatcagcgtgttcatgcccggcagccccctggacctgagcgtgagccccttcgaggacatcagaagcagattcatccagggcgagagcatcacccccaccaagatccccgagatcaccaccgagatccacgtgtag

SEQ ID NO: 267232 - DNA, 504 bp, Artificial Sequence
  derived and/or modified sequence
atgggcgtgaaggattcaaatatccacgagcttgaacatgagcaggaacccacatgcgctagccagatggccgagccttttagaaccttcagagatggctgggtgagctattacaaccagccagttttccttgctggtatggggctcgcattcctttacatgacggtgctggggttcgattgtataacaacaggatacgcttatacacaaggcctgtcaggttcaatactctcaattctgatgggcgccagtgccattaccggtattatgggcacagtggcttttacatggcttcgacgcaagtgtgggctggtgagaaccggattaatctccggtttagctcaactgagctgtttgattttgtgtgttatatccgtgtttatgcccggctcccccttagacctgtctgtgtcaccatttgaggatattcgctcacggtttatacagggcgaatcaattacccccactaagattccggagatcaccaccgaaatccacgtgtag

SEQ ID NO: 267233 - DNA, 504 bp, Artificial Sequence
  derived and/or modified sequence
atgggcgtgaaggacagcaacatccacgagctggagcacgagcaggagcccacctgtgccagccagatggccgagcccttccgcaccttcagagatggctgggtgtcctactacaaccagcctgtgttcctggccggcatgggcctggccttcctgtacatgacagtgctgggctttgactgcatcaccaccggctacgcctacacccagggcctgagcggcagcatcctgagcatcctgatgggcgccagcgccatcaccggcatcatgggcaccgtggccttcacctggctgcggaggaaatgtggcctggtgaggacaggcctcatcagcggcctggcccagctgagctgcctgatcctgtgtgtgatctctgtgttcatgcctggcagccccctggacctgtctgtgagcccctttgaggacatccgcagccgcttcatccagggcgagagcatcacccccaccaagatccctgagatcaccacagagatccacgtgtag

SEQ ID NO: 267234 - DNA, 504 bp, Artificial Sequence
  derived and/or modified sequence
atgggcgtgaaggacagcaacatccacgagctggagcacgagcaggagcctacctgcgctagccaaatggccgagcccttcaggacatttcgcgatggctgggttagctactacaaccaacctgtctttttggctggaatggggctggccttcctctacatgacagtcctggggtttgattgtatcaccaccggctacgcatacacacaaggactgagtggaagcatcttgagtatactgatgggggccagtgcaatcacaggcattatgggcaccgtggcgtttacttggctgcgccgtaaatgcgggctggtccggactggcctgatatccggcttggcccagctctcatgcctgatactgtgtgtaattagcgtgttcatgccaggaagccctctggacctatccgttagcccatttgaggatatccgctcacggttcattcagggggaatcaatcacccccacgaaaattccagagatcaccactgagattcatgtttag

SEQ ID NO: 267235 - DNA, 504 bp, Artificial Sequence
  derived and/or modified sequence
atgggcgtgaaggatagtaatatccacgagctggagcatgagcaagaacccacttgcgctagccagatggcggagccatttaggacatttcgcgatggctgggtctcttattacaatcagcctgtgttccttgccggtatgggactcgctttcctgtacatgacagtcctgggtttcgactgcattactactggctatgcctatacccagggcctgagtggctccattttgtccattctgatgggcgcatccgccattacaggcattatgggaactgtcgccttcacgtggcttcggaggaagtgtggtctggtcaggactggcctgatcagcggcctcgcacagctcagctgtctgatactgtgtgtgatctctgtttttatgcccggatcaccactggatctgtccgtgagtccatttgaggacataagatcccggtttatccagggggagtcaattacccctacaaagataccggagatcactacagagattcacgtatag

SEQ ID NO: 267236 - protein, 209 aa, Artificial Sequence
  derived and/or modified sequence
LERAARVERAGGAAQTAAVLLSLCPAPYSGPGLRPHLAFAPGRPRAAVRTASGRAPVRAVHPGGGLRTWCRTCRGSWGRGLRLPGVRAGVRLPGRAGAGGPFPACLKASADGHPGAFQTASPAPGTYPKSVSPASGLPAAFSTFEWMKVKRNASKKDSGLGFVEETRSRANSMESASSTDSENVPGIEKISGRSSPWNFSWQTRRVWGR

SEQ ID NO: 267237 - DNA, 630 bp, Artificial Sequence
  derived and/or modified sequence
ctcgagcgtgcagccagagtcgagagagccggtggggcagcacagacagccgctgtcctcttgagcctctgccctgcaccgtactccggacccggattgaggccccacctggcctttgcccccggtcgcccacgggcagcagtgagaactgcttcagggcgcgcgcccgtgcgcgctgtccatccagggggcggcctccgaacctggtgtcgcacatgccgcgggagctggggaagaggcctgaggctcccgggggtcagagccggtgtgaggctacctggcagggctggggccggcggaccattccctgcctgcttgaaggcctccgctgacggacatccgggggcattccagactgcctctccagcacctggtacgtatcccaagtcagtgtctcctgcttcaggcctgccagcggcgttctccacatttgaatggatgaaagttaaacggaatgcctccaagaaagacagcggattggggttcgtagaagagacccgcagtcgggccaatagcatggaaagtgctagctctaccgattccgagaatgtgccaggaatcgagaagataagcggaagaagcagcccctggaactttagttggcagacccgccgggtgtgggggcggtag

SEQ ID NO: 267238 - DNA, 1702 bp, Artificial Sequence
  derived and/or modified sequence
ttggagagggcagctcgggtagagagggctggcggagcggcgcagacggcggcagtcctgctcagcctctgcccggctccgtactccggccccggcctgcgccctcacctcgccttcgcccccggccgcccccgcgcggccgtccgtaccgcctccggccgcgccccagtacgcgcagtgcaccctggagggggcctacgaacctggtgccgcacctgccgcggcagctgggggcgcggactacggcttcctggggtccgggccggcgtacgacttcccgggcgtgctggggcgggcggcccttttccggcttgtctcaaagcgtcagccgacggccaccctggtgctttccagaccgcatccccggccccaggcacctaccccaagtccgtctctcccgcctccggcctccctgccgccttcagcacgttcgagtggatgaaagtgaagaggaatgcctctaagaaagacagcggtttgggttttgtggaggagacgcgttcccgggcgaattccatggagtctgcctcgagtacagattcggaaaatgtgccaggcattgagaaaatttcaggaaggagctctccgtggaacttctcctggcaaactcgccgagtatggggccgctagcccctccagcgcgatccgcacgaatttcagcaccaagcaactgacagaactggaaaaagagtttcatttcaataagtacttaactcgagcccggcgcatcgagatagccaactgcttgcacctgaatgacacgcaagtcaaaatctggttccagaaccgcaggatgaaacagaagaaaagggaacgagaagggcttctggccacggccattcctgtggctcccctccaacttcccctctctggaacaacccccactaagtttatcaagaaccccggcagcccttctcagtcccaagagccttcgtgaggccggtacttggggccgaaaaactgtggcctgcagaagtcccaggcgacccccatccctatctagacttaggagctcagtttgggatggaggtgggagaacaaaaatgaatagggatttcacttgggaaatgaagtactttagttggcttccgagttccagactatatgtccagatattaattgactgtcttgtaagccacttgtttggttatgatttgtgtcttatcagggaaaaggtgcccagctgccagcccagctccgctgctatctttgcctcacttagtcatgtgcaattcgcgttgcagagtggcagaccattagttgctgagttctgtcagcactctgatgtgctcagaagagcacctgcccaaagtttttctggttttaatttaaaggacaaggctacatatattcagctttttgagatgaccaaagctagttagggtctccttgatgtagctaagctgcttcagtgatcttcacatttgcactccagtttttttttctttaaaaaagcggtttctacctctctatgtgcctgagtgatgatacaatcgctgtttagttactagatgaacaaatccacagaatgggtaaagagtagaatctgaactatatcttgacaaatattattcaaacttgaatgtaaatatatacagtatgtatattttttaaaaagatttgcttgcaatgaccttataagtgacatttaatgtcatagcatgtaaagggttttttttgtaataaaaattatagaatctgc

SEQ ID NO: 267239 - DNA, 630 bp, Artificial Sequence
  derived and/or modified sequence
ctggagcgggccgcccgggtggagcgggccggcggggccgcccagacagctgctgtgctgctgagcctgtgcccagccccctacagcggccctggcctgcggccccacctggcctttgcccctggccggcccagggctgctgtgaggacagccagcggccgggcccctgtgcgggctgtgcaccctgggggcggcctgcggacctggtgcaggacctgccggggctcctggggccggggcctgcggctgcccggggtgcgggccggcgtgcggctgcccggccgggccggggccggcggccccttccctgcctgcctgaaggccagcgcagatggccaccctggggccttccagacagccagccctgcccctggcacctaccccaagtctgtgtccccagccagcggcctgcctgctgccttcagcacctttgagtggatgaaggtgaagagaaatgccagcaagaaggacagcggcctgggctttgtggaggagaccaggagccgggccaacagcatggagagcgccagcagcacagattctgaaaatgtgcccggcatcgagaagatcagcggccgcagcagcccctggaacttctcctggcagacccggcgggtgtggggccgctag

SEQ ID NO: 267240 - DNA, 630 bp, Artificial Sequence
  derived and/or modified sequence
ctggagcgggccgcccgggtggagcgggccggcggcgccgcccagacagccgcagtccttctatccctttgtccagccccttactcgggaccgggattgaggccacacttagcttttgccccaggcagaccccgtgccgccgtgaggactgctagcggtagggcacccgtcagggctgttcacccagggggaggcttgcggacctggtgccggacctgccgggggagctggggccgcggactgcgacttcctggtgtgcgtgcaggagtaaggctccccgggagggcaggggctggcggaccattcccagcctgtctgaaagctagtgcggatgggcaccctggagccttccagacggcttccccagctcccggcacatacccaaaatccgtgagtcctgcttctggtctccccgctgctttctcaacgtttgagtggatgaaggtgaaacggaatgcaagtaaaaaagatagcgggttagggtttgtggaggaaacccggtctagagctaatagcatggagtctgcgtcaagcaccgactctgaaaacgtgccaggcatcgagaaaatcagcgggaggtcctcaccctggaacttttcgtggcagaccaggcgggtgtggggaaggtag

SEQ ID NO: 267241 - DNA, 630 bp, Artificial Sequence
  derived and/or modified sequence
ctggaaagggccgctcgcgtggagagggccggtggggctgcacaaacagccgctgtgcttctctccctttgtcccgctccctattctgggccaggactcagaccccacctggcattcgcccctgggcgaccccgagcagctgtccgtacagcgagcggacgggctcccgttcgggctgtgcatccaggaggtgggctgcgtacttggtgccgtacttgtcgcggttcttgggggagaggccttcgcctgcccggtgttcgagctggggtccgactccctgggagagccggagccggagggccatttcccgcttgcctgaaagcctctgctgacggccatcctggtgcgtttcagacagcaagtcctgccccaggcacctatcccaagagcgtgagtccggcatctggtcttcctgctgccttctcaacatttgaatggatgaaagtgaagagaaacgctagcaaaaaggacagcggtttggggtttgttgaggagacccggagccgagcgaatagtatggagagtgcatcctccacagatagcgaaaatgtgcccggaattgaaaagatatccggcagaagttctccctggaatttctcgtggcagacccgcagagtgtggggcaggtag

SEQ ID NO: 267242 - DNA, 630 bp, Artificial Sequence
  derived and/or modified sequence
ctggagagagccgccagagtggagagagccggcggcgccgcccagaccgccgccgtgctgctgagcctgtgccccgccccctacagcggccccggcctgagaccccacctggccttcgcccccggcagacccagagccgccgtgagaaccgccagcggcagagcccccgtgagagccgtgcaccccggcggcggcctgagaacctggtgcagaacctgcagaggcagctggggcagaggcctgagactgcccggcgtgagagccggcgtgagactgcccggcagagccggcgccggcggccccttccccgcctgcctgaaggccagcgccgacggccaccccggcgccttccagaccgccagccccgcccccggcacctaccccaagagcgtgagccccgccagcggcctgcccgccgccttcagcaccttcgagtggatgaaggtgaagagaaacgccagcaagaaggacagcggcctgggcttcgtggaggagaccagaagcagagccaacagcatggagagcgccagcagcaccgacagcgagaacgtgcccggcatcgagaagatcagcggcagaagcagcccctggaacttcagctggcagaccagaagagtgtggggcagatag

SEQ ID NO: 267243 - DNA, 1245 bp, Artificial Sequence
  derived and/or modified sequence
atggctctctcttacagagtgtctgaacttcaaagcacaattcctgagcacattttgcagagcacctttgttcacgttatctcttctaactggtctggattacagacagaatcaataccagaggaaatgaaacagattgttgaggaacagggaaataaactgcactgggcagctcttctgatactcatggtgataatacccacaattggtggaaatacccttgttattctggctgtttcactggagaagaagctgcagtatgctactaattactttctaatgtccttggcggtggctgatttgctggttggattgtttgtgatgccaattgccctcttgacaataatgtttggcattgccattccagtccctattaaagggatagagactgatgtggacaacccaaacaatatcacttgtgtgctgacaaaggaacgttttggcgatttcatgctctttggctcactggctgccttcttcacacctcttgcaattatgattgtcacctactttctcactatccatgctttacagaagaaggcttacttagtcaaaaacaagccacctcaacgcctaacatggttgactgtgtctacagttttccaaagggatgaaacaccttgctcgtcaccggaaaaggtggcaatgctggatggttctcgaaaggacaaggctctgcccaactcaggtgatgaaacacttatgcgaagaacatccacaattgggaaaaagtcagtgcagaccatttccaacgaacagagagcctcaaaggtcctagggattgtgtttttcctctttttgcttatgtggtgtcccttctttattacaaatataactttagttttatgtgattcctgtaaccaaactactctccaaatgctcctggagatatttgtgtggataggctatgtttcctcaggagtgaatcctttggtctacaccctcttcaataagacatttcgggatgcatttggccgatatatcacctgcaattaccgggccacaaagtcagtaaaaactctcagaaaacgctccagtaagatctacttccggaatccaatggcagagaactctaagtttttcaagaaacatggaattcgaaatgggattaaccctgccatgtaccagagtccaatgaggctccgaagttcaaccattcagtcttcatcaatcattctactagatacgcttctcctcactgaaaatgaaggtgacaaaactgaagagcaagttagttatgtatag

SEQ ID NO: 267244 - protein, 713 aa, Artificial Sequence
  derived and/or modified sequence
MFTMTRAMEEALFQHFMHQKLGIAYAIHKPFPFFEGLLDNSIITKRMYMESLEACRNLIPVSRVVHNILTQLERTFNLSLLVTLFSQINLREYPNLVTIYRSFKRVGASYEWQSRDTPILLEAPTGLAEGSSLHTPLALPPPQPPQPSCSPCAPRVSEPGTSSQQSDEILSESPSPSDPVLPLPALIQEGRSTSVTNDKLTSKMNAEEDSEEMPSLLTSTVQVASDNLIPQIRDKEDPQEMPHSPLGSMPEIRDNSPEPNDPEEPQEVSSTPSDKKGKKRKRCIWSTPKRRHKKKSLPGGTASSRHGIQKKLKRVDQVPQKKDDSTCNSTVETRAQKARTECARKSRSEEIIDGTSEMNEGKRSQKTPSTPRRVTQGAASPGHGIQEKLQVVDKVTQRKDDSTWNSEVMMRVQKARTKCARKSRLKEKKKEKDICSSSKRRFQKNIHRRGKPKSDTVDFHCSKLPVTCGEAKGILYKKKMKHGSSVKCIRNEDGTWLTPNEFEVEGKGRNAKNWKRNIRCEGMTLGELLKRKNSDECEVCCQGGQLLCCGTCPRVFHEDCHIPPVEAKRMLWSCTFCRMKRSSGSQQCHHVSKTLERQMQPQDQLKCEFLLLKAYCHPQSSFFTGIPFNIRDYGEPFQEAMWLDLVKERLITEMYTVAWFVRDMRLMFRNHKTFYKASDFGQVGLDLEAEFEKDLKDVLGFHEANDGGFWTLP

SEQ ID NO: 267245 - DNA, 2142 bp, Artificial Sequence
  derived and/or modified sequence
atgttcaccatgaccagagccatggaggaggccctgttccagcacttcatgcaccagaagctgggcatcgcctacgccatccacaagcccttccccttcttcgagggcctgctggacaacagcatcatcaccaagagaatgtacatggagagcctggaggcctgcagaaacctgatccccgtgagcagagtggtgcacaacatcctgacccagctggagagaaccttcaacctgagcctgctggtgaccctgttcagccagatcaacctgagagagtaccccaacctggtgaccatctacagaagcttcaagagagtgggcgccagctacgagtggcagagcagagacacccccatcctgctggaggcccccaccggcctggccgagggcagcagcctgcacacccccctggccctgccccccccccagcccccccagcccagctgcagcccctgcgcccccagagtgagcgagcccggcaccagcagccagcagagcgacgagatcctgagcgagagccccagccccagcgaccccgtgctgcccctgcccgccctgatccaggagggcagaagcaccagcgtgaccaacgacaagctgaccagcaagatgaacgccgaggaggacagcgaggagatgcccagcctgctgaccagcaccgtgcaggtggccagcgacaacctgatcccccagatcagagacaaggaggacccccaggagatgccccacagccccctgggcagcatgcccgagatcagagacaacagccccgagcccaacgaccccgaggagccccaggaggtgagcagcacccccagcgacaagaagggcaagaagagaaagagatgcatctggagcacccccaagagaagacacaagaagaagagcctgcccggcggcaccgccagcagcagacacggcatccagaagaagctgaagagagtggaccaggtgccccagaagaaggacgacagcacctgcaacagcaccgtggagaccagagcccagaaggccagaaccgagtgcgccagaaagagcagaagcgaggagatcatcgacggcaccagcgagatgaacgagggcaagagaagccagaagacccccagcacccccagaagagtgacccagggcgccgccagccccggccacggcatccaggagaagctgcaggtggtggacaaggtgacccagagaaaggacgacagcacctggaacagcgaggtgatgatgagagtgcagaaggccagaaccaagtgcgccagaaagagcagactgaaggagaagaagaaggagaaggacatctgcagcagcagcaagagaagattccagaagaacatccacagaagaggcaagcccaagagcgacaccgtggacttccactgcagcaagctgcccgtgacctgcggcgaggccaagggcatcctgtacaagaagaagatgaagcacggcagcagcgtgaagtgcatcagaaacgaggacggcacctggctgacccccaacgagttcgaggtggagggcaagggcagaaacgccaagaactggaagagaaacatcagatgcgagggcatgaccctgggcgagctgctgaagagaaagaacagcgacgagtgcgaggtgtgctgccagggcggccagctgctgtgctgcggcacctgccccagagtgttccacgaggactgccacatcccccccgtggaggccaagagaatgctgtggagctgcaccttctgcagaatgaagagaagcagcggcagccagcagtgccaccacgtgagcaagaccctggagagacagatgcagccccaggaccagctgaagtgcgagttcctgctgctgaaggcctactgccacccccagagcagcttcttcaccggcatccccttcaacatcagagactacggcgagcccttccaggaggccatgtggctggacctggtgaaggagagactgatcaccgagatgtacaccgtggcctggttcgtgagagacatgagactgatgttcagaaaccacaagaccttctacaaggccagcgacttcggccaggtgggcctggacctggaggccgagttcgagaaggacctgaaggacgtgctgggcttccacgaggccaacgacggcggcttctggaccctgccctag

SEQ ID NO: 267246 - DNA, 2142 bp, Artificial Sequence
  derived and/or modified sequence
atgttcaccatgacacgggccatggaagaggctttgttccaacatttcatgcatcaaaagctggggatcgcctatgccatacataaacctttcccattctttgaagggctgctggataactccatcattacaaagcgaatgtatatggaaagtctggaagcttgccgcaacctgatccctgtgtctagagttgttcacaatatccttactcaactggagcgaacattcaacctcagtttgctcgtcaccctattctcccagatcaatctacgagaatatcccaaccttgtcacgatttatagatcctttaagcgagtgggagcttcctacgaatggcaatccagagacacccctatcctactggaagcgccaaccggcctagctgagggttcctctctccatactcccctcgccctaccgcccccacagcctcctcagcccagctgctcaccatgcgctccccgcgttagcgagcctggcaccagtagccagcagtcagacgaaattctctcggaatccccatcgcccagcgaccctgttttaccacttcctgcgttgattcaggagggaagatcaacaagcgtgaccaacgacaagctcacttctaagatgaacgctgaagaagattctgaggagatgccctcacttctgacctccaccgttcaggtggcctctgacaatttgatcccccaaattagggacaaggaggatccccaggagatgcctcactcccctttaggctccatgccagagattcgcgacaatagcccagagcccaatgacccggaagaaccgcaggaggtgagcagtactcctagcgataaaaaagggaaaaagaggaaacgttgcatatggtccacaccaaagaggcggcacaaaaagaaatccctgccaggcggaactgcatcctctcggcacggaatccagaagaaactgaagcgggtggatcaggtgccacaaaaaaaagatgattcgacatgtaacagtactgtggagacacgggcacaaaaggcgaggaccgaatgcgctaggaaaagtcgcagcgaggagattatcgatggaacctccgagatgaacgaaggaaagcgttcccagaaaacacccagcacacccaggagagttacgcaaggcgcagcatcccccgggcacggaatacaagaaaagctgcaggtagttgataaggttactcagcggaaagatgacagcacatggaattctgaggtcatgatgcgggtgcaaaaggcgcggaccaagtgtgccagaaagtctcgcctgaaggagaaaaagaaggaaaaggatatttgttcttcttctaaacgtcggttccagaaaaacattcacaggaggggcaagcctaaaagtgacactgtcgacttccactgctccaagcttccagtcacttgtggcgaagcaaagggcattctctataagaagaaaatgaaacatggcagctccgtgaagtgcattcgtaacgaagatggaacttggctgacaccaaacgaatttgaggtcgaggggaagggacgaaatgcgaagaattggaagcgcaacatcaggtgcgaaggcatgaccctgggagaactactgaagcgaaagaactccgacgagtgcgaagtgtgctgtcaaggcggacagctcttgtgttgcggcacttgtccacgggtgtttcacgaagattgtcacatcccgcctgtggaagccaagaggatgctgtggagctgcacattctgcagaatgaaacgttctagtggctctcaacaatgccatcatgtgagtaaaacactcgaaaggcagatgcagccgcaagaccaactgaaatgcgaatttttgctactgaaggcatactgccatccgcagagctctttcttcactggaataccgttcaatatacgggattatggcgagcccttccaggaggctatgtggctcgatctggtcaaggagcgcctaatcacagagatgtatacggtagcgtggtttgttcgggatatgcgcctcatgtttcgtaaccacaagaccttctacaaggcctccgacttcggacaggtggggctcgacctggaagcagagttcgagaaagacctgaaggatgtcctcggtttccatgaggctaatgatggggggttctggacactcccctag

SEQ ID NO: 267247 - DNA, 2142 bp, Artificial Sequence
  derived and/or modified sequence
atgttcaccatgacccgggccatggaggaggccctcttccagcacttcatgcaccagaagctgggcatcgcctatgccatccacaagcccttccccttctttgagggcctgctggacaacagcatcatcaccaagaggatgtacatggagagcctggaggcctgcaggaacctgatccctgtgtcccgggtggtgcacaacatcctgacccagctggagaggaccttcaacctgagcctgctggtgaccctcttcagccagatcaacctgcgggagtaccccaacctggtgaccatctaccgctccttcaagagggtgggcgccagctatgagtggcagagccgggacacccccatcctgctggaggcccccaccggcctggccgagggcagcagcctgcacacccccctggccctgcccccaccccagcccccccagcccagctgcagcccctgtgccccccgggtgtctgagcccggcaccagcagccagcagagtgatgagatcctgtctgagagccccagccccagcgaccctgtgctgcccctgcctgccctgatccaggagggccgcagcacctctgtgaccaatgacaagctgaccagcaagatgaatgctgaggaggacagcgaggagatgcccagcctgctgaccagcacagtgcaggtggccagtgacaacctgatcccccagatccgggacaaggaggacccccaggagatgccccacagccccctgggctccatgcctgagatccgggacaacagccctgagcccaatgaccctgaggagccccaggaggtgagcagcacccccagcgacaagaagggcaagaagaggaagcgctgcatctggagcacccccaagaggaggcacaagaagaagagcctgcccggcggcacagccagcagccgccacggcatccagaagaagctgaagagggtggaccaggtgccccagaagaaggatgacagcacctgcaacagcacagtggagacccgggcccagaaggccaggacagaatgtgccaggaagagccgctctgaggagatcattgatggcaccagcgagatgaatgaaggcaagaggagccagaagacccccagcaccccccggcgggtgacccagggcgccgccagccctggccacggcatccaggagaagctgcaggtggtggacaaggtgacccagaggaaggatgacagcacctggaacagcgaggtgatgatgagggtgcagaaggcccggaccaagtgtgccaggaagagccggctgaaggagaagaagaaggagaaggacatctgcagcagcagcaagaggcgcttccagaagaacatccaccggcggggcaagcccaagagtgacacagtggacttccactgcagcaagctgcctgtgacctgtggggaggccaagggcatcctgtacaagaagaagatgaagcacggcagctctgtgaagtgcatcagaaatgaagatggcacctggctgaccccaaatgaatttgaggtggagggcaaaggaagaaatgccaagaactggaagaggaacatccgctgtgagggcatgaccctgggggagctgctgaagaggaagaacagtgatgaatgtgaggtgtgctgccagggcggccagctgctgtgctgcggcacctgccccagggtcttccacgaggactgccacatcccccctgtggaggccaagaggatgctgtggagctgcaccttctgcaggatgaagaggagcagcggcagccagcagtgccaccacgtgtccaagaccctggagcggcagatgcagccccaggaccagctgaagtgtgagttcctgctgctgaaggcctactgccacccccagagcagcttcttcaccggcatccccttcaacatccgggactatggagagcccttccaggaggccatgtggctggacctggtgaaggagcggctcatcacagagatgtacacagtggcctggtttgtgcgggacatgaggctgatgttcaggaaccacaagaccttctacaaggccagtgactttggccaggtgggcctggacctggaggccgagtttgagaaggacctgaaggatgtgctgggcttccacgaggccaatgatggcggcttctggaccctgccctag

SEQ ID NO: 267248 - DNA, 2142 bp, Artificial Sequence
  derived and/or modified sequence
atgttcaccatgacccgggccatggaggaggccctgttccagcacttcatgcaccagaagttaggcattgcgtatgctatccacaagccctttccattctttgaggggttgctggacaattctattataacaaagcggatgtacatggagagcttggaggcatgcagaaacctgatcccagtatcacgagtagttcataacatacttacccagctggagcgcacctttaatctgtccctacttgtcacactgtttagtcaaatcaatctccgcgagtaccctaatctggtgaccatctaccgttcgttcaagagggtgggcgcaagttatgagtggcagtctagagatactcctattctgttggaagccccaacaggattggccgaggggagcagtctccatacacccctcgcacttccccccccacagcctccccaacctagctgttccccgtgtgctcctcgggttagtgaaccaggcactagctcgcagcaaagtgacgagatactgagcgagagccccagcccctccgatcctgtgctgcctctcccagccttaatccaggagggcagatccaccagcgtaactaatgataaactcacatcaaaaatgaacgctgaagaagatagcgaggaaatgccctcactcctgactagcacagtacaggtggccagcgacaatctgatcccccaaatccgggataaagaagacccacaggaaatgccacattctcccctgggaagcatgcccgaaatccgtgataattcccccgagcctaatgatcctgaggaacctcaggaggtaagttcaacgcccagcgacaaaaagggcaagaagaggaaacggtgtatctggagcactccgaagcggcggcataagaagaaatcactgcctggggggactgcctcgagtagacacgggatacagaagaagctgaagagagtagatcaggtgccgcagaaaaaagatgatagcacatgtaattcaaccgttgaaactcgggcgcagaaggcacgaaccgagtgcgctcgcaaatcgcgatccgaggaaattattgatggaacgtcagagatgaacgagggtaaacgctcacagaagaccccttccacgcctaggcgagtgactcagggcgcggcgagccctgggcacggcatccaagagaagttgcaggtcgttgataaggttacacagcgtaaggacgatagcacatggaactccgaggtgatgatgcgtgtccaaaaggcccgtacgaagtgtgccagaaagtctaggctgaaagaaaaaaagaaagaaaaggacatttgctcatcaagcaaacgacgctttcagaagaacatccaccgccgtggcaagcccaagtccgacactgtcgactttcactgctccaagctgcccgtcacctgtggggaggcaaaaggcattctatataagaaaaaaatgaagcatggctcttccgtcaagtgtattaggaatgaggatggaacttggctgactccgaatgagttcgaagttgagggtaaaggtcgtaacgccaagaattggaagcgtaatattaggtgtgaaggcatgacgcttggcgaactactgaagcggaaaaatagcgacgaatgcgaggtgtgttgtcagggaggacaattactttgctgcggcacatgtccccgcgtgtttcatgaagattgccacataccccctgtcgaagccaaacggatgttatggagctgcactttttgtagaatgaaacggagttctggatcacagcagtgtcaccacgtgagcaagacacttgaaagacaaatgcagccacaagaccaactgaagtgcgaatttctgctgctcaaagcttactgtcatcctcaatcttctttctttaccgggatcccgttcaacatacgagactacggggagccgttccaggaggctatgtggctagacttggtgaaggaacgactcatcactgaaatgtacaccgtagcttggtttgtgcgtgacatgcggctcatgtttaggaaccacaagacgttttacaaagcaagcgattttggtcaggtgggattagatctagaggcggaatttgagaaagaccttaaagacgtactaggttttcatgaggctaacgatggggggttttggactttgccttag

SEQ ID NO: 267249 - DNA, 2142 bp, Artificial Sequence
  derived and/or modified sequence
atgttcaccatgacccgtgccatggaagaggctctgttccagcattttatgcaccagaagctgggtattgcttacgccatccacaagccttttccatttttcgaggggctacttgataattcaatcatcaccaagcggatgtacatggaaagcttggaggcatgtcgcaatctgatcccagttagccgggtcgtgcataatatcctcacccagctggagcggacatttaacctgtctcttctagtgaccttgttttcccaaattaatctgagagagtatcccaatctggttaccatctatcggagtttcaagcgtgttggggcatcttatgaatggcagtcacgcgacacccctatcttactggaggcgccaactggtctcgccgagggatcctcgcttcatacgccgctggctcttccaccccctcaacctccacaaccttcttgtagcccctgtgcgccacgcgtgtccgaacccggaacttctagccaacagtccgacgagattctgagcgagagcccttcaccaagcgacccagttctgcctttgccagcattgatacaagaaggaagatctactagcgtgactaatgataaacttacctcaaagatgaatgcggaggaggactctgaggagatgccttcccttctaacatccaccgttcaagtcgcttctgacaatctgataccccaaatccgggacaaagaagatcctcaggaaatgccccacagtcctctgggttcaatgcctgaaattcgagacaattctcccgagcctaacgacccggaagagccccaggaggttagctccacaccaagcgataaaaaaggcaagaaaaggaagcggtgcatctggagcacgccaaagcgaagacacaagaaaaagtcactgcccggtggaacagccagctcccgccacggaatccaaaaaaagctaaagcgtgttgaccaggtgccacagaagaaagacgatagcacttgcaactccacagtggagactcgagcccagaaagcccgaaccgaatgcgcgcgaaagagtcgatccgaggaaatcatcgatggcacatcagaaatgaacgaaggtaaacggtctcagaagacaccatctactcccaggcgagtgactcagggcgctgctagtcctggccatggcattcaggagaaactgcaagtggttgacaaagttacgcagagaaaggacgatagcacgtggaatagcgaggtgatgatgagggtccagaaggccagaacaaagtgtgcccgtaaaagccggttaaaggaaaagaagaaagagaaggatatatgcagcagctctaaaagacgatttcaaaagaatatccaccgccgtgggaaacctaagtctgacactgtggacttccattgctcaaaactgcccgtgacatgcggtgaggctaaagggatactgtacaagaaaaaaatgaagcacggatcttccgtcaagtgcatccgtaatgaagatggcacctggctgacccccaacgagttcgaagtcgaaggtaaagggcgaaatgccaaaaactggaagcgcaatatacgatgtgaggggatgacactgggggagctccttaagcgcaagaactctgacgagtgcgaagtttgctgtcaaggcggacaacttctgtgttgcggcacttgcccgagagtttttcacgaggactgccacatacccccagtggaggcgaagaggatgctctggagctgcacattttgtcggatgaagcgttcctctggatctcaacaatgtcatcatgttagcaaaaccctggaaagacagatgcagccccaggaccagctgaaatgtgaattcctgctcctgaaagcctactgccacccccagtcatcctttttcactggcatcccttttaatattcgggattacggcgagccatttcaagaagctatgtggttggatctggttaaggaacgcctcatcaccgagatgtataccgtcgcctggtttgtcagagacatgagattgatgtttaggaaccacaagacgttctataaggcatcagatttcggccaggttggccttgacctcgaagcagagttcgagaaggatctgaaggatgtattagggtttcatgaggccaacgacggaggcttctggaccctgccttag

SEQ ID NO: 267250 - DNA, 2426 bp, Artificial Sequence
  derived and/or modified sequence
gtaactctcccaatcttgaggagtgatccctgtcccagcccctggaaaggggcaggaacgacaaactcaaagtccaggatgttcaccatgacaagagccatggaagaggctctttttcagcacttcatgcaccagaagctggggatcgcctatgccatacacaagccatttcccttctttgaaggcctcctagacaactccatcatcactaagagaatgtacatggaatctctggaagcctgtagaaatttgatccctgtatccagagtggtgcacaacattctcacccaactggagaggacttttaacctgtctcttctggtgacattgttcagtcaaattaacctgcgtgaatatcccaatctggtgacgatttacagaagcttcaaacgtgttggtgcttcctatgaatggcagagcagagacacaccaatcctacttgaagccccaactggcctagcagaaggaagctccctccataccccactggcgctgcccccaccacaaccccctcaaccaagctgttcaccctgtgcgccaagagtcagtgagcctggaacatcctcccagcaaagcgatgagatcctgagtgagtcgcccagcccatctgaccctgtcctgcctctccctgcactcatccaggaaggaagaagcacttcagtgaccaatgacaagttaacatccaaaatgaatgcggaagaagactcagaagagatgcccagcctcctcactagcactgtgcaagtggccagtgacaacctgatcccccaaataagagataaagaagaccctcaagagatgccccactctcccttgggctctatgccagagataagagataattctccagaaccaaatgacccagaagagccccaggaggtgtccagcacaccttcagacaagaaaggaaagaaaagaaaaagatgtatctggtcaactccaaaaaggagacataagaaaaaaagcctcccaggagggacagcctcatctagacacggaatccaaaagaagctcaaaagggtggatcaggttcctcaaaagaaagatgactcaacttgtaactccacggtagagacaagggcccaaaaggcgagaactgaatgtgcccgaaagtcgagatcagaggagatcattgatggcacttcagaaatgaatgaaggaaagaggtcccagaagacgcctagtacaccacgaagggtcacacaaggggcagcctcacctgggcatggcatccaagagaagctccaagtggtggataaggtgactcaaaggaaagacgactcaacctggaactcagaggtcatgatgagggtccaaaaggcaagaactaaatgtgcccgaaagtccagattgaaagaaaagaaaaaggagaaagatatctgttcaagctcaaaaaggagatttcagaaaaatattcaccgaagaggaaaacccaaaagtgacactgtggattttcactgttctaagctccccgtgacctgtggtgaggcgaaagggattttatataagaagaaaatgaaacacggatcctcagtgaagtgcattcggaatgaggatggaacttggttaacaccaaatgaatttgaagtcgaaggaaaaggaaggaacgcaaagaactggaaacggaatatacgttgtgaaggaatgaccctaggagagctgctgaagcggaaaaactcggatgaatgcgaggtgtgctgtcaagggggacaacttctctgctgcggtacttgtccacgagtcttccatgaggactgtcacatcccccctgtggaagccaagaggatgctgtggagttgcaccttctgcaggatgaagaggtcttcaggaagccaacagtgccatcatgtatctaagaccctggagaggcagatgcagcctcaggaccagctgaaatgtgagttcctcctcttgaaggcctactgtcatccacaaagctccttttttacgggcatcccatttaatattcgagattacggtgagccctttcaggaagcaatgtggttggacctggttaaggaaaggctgattacggaaatgtacacggtggcatggtttgtgcgagacatgcgcctgatgtttcgcaaccataaaacattttacaaggcttctgactttggccaggtaggacttgacttagaggcagaatttgaaaaagatctcaaagacgtgctcggttttcatgaagccaatgacggcggtttctggactcttccttgaccctgttctgtaaagactgaagcatccccacctcaggattcagctgatgggaccctggcttggactgttgattgccagtgagtctgggatgtaattggctgccctcaggacccaaacccagacacttcataggattatcacaccctccatctttattctttctttttacctttaaaagtctatatctacactaaaaaaaaaaaaaa

SEQ ID NO: 267251 - protein, 486 aa, Artificial Sequence
  derived and/or modified sequence
MAAALPRTLGELQLYRILQKANLLSYFDAFIQQGGDDVQQLCEAGEEEFLEIMALVGMASKPLHVRRLQKALRDWVTNPGLFNQPLTSLPVSSIPIYKLPEGSPTWLGISCSSYERSSNAREPHLKIPKCAATTCVQSLGQGKSDVVGSLALQSVGESRLWQGHHATESEHSLSPADLGSPASPKESSEALDAAAALSVAECVERMAPTLPKSDLNEVKELLKTNKKLAKMIGHIFEMNDDDPHKEEEIRKYSAIYGRFDSKRKDGKHLTLHELTVNEAAAQLCVKDNALLTRRDELFALARQISREVTYKYTYRTTKSKCGERDELSPKRIKVEDGFPDFQDSVQTLFQQARAKSEELAALSSQPEKVMAKQMEFLCNQAGYERLQHAERRLSAGLYRQSSEEHSPNGLTSDNSDGQGERPLNLRMPNLQNRQPHHFVVDGELSRLYPSEAKSHSSESLGILKDYPHSAFTLEKKVIKTEPEDSR

SEQ ID NO: 267252 - protein, 100 aa, Artificial Sequence
  derived and/or modified sequence
MAAALPRTLGELQLYRILQKANLLSYFDAFIQQGGDDVQQLCEAGEEEFLEIMALVGMASKPLHVRRLQKALRDWVTNPGLFNQPLTSLPVSSIPIYKLP

SEQ ID NO: 267253 - DNA, 1461 bp, Artificial Sequence
  derived and/or modified sequence
atggccgccgccctaccaagaactttgggcgagttacagctgtaccgaatattacagaaggctaacctgctcagttattttgatgccttcattcagcaggggggtgatgacgtccaacagctgtgtgaggccggagaggaagagttccttgagatcatggctctggttggaatggccagcaagccactccatgtgaggaggttgcagaaagctctccgcgattgggtgactaaccctgggctcttcaaccagcctctgacatcgcttcctgtgtcctcaatccccatttataagttgcccgaaggatcaccaacatggttaggcatatcctgttcttcatatgagaggtcctctaacgcacgagaacctcacctcaagattcccaagtgcgccgcaactacatgtgtacaaagcctgggtcaaggaaaatctgacgtagtcggcagcctggctctgcaatctgtcggtgagtcccggctttggcaaggtcaccacgctacagagagcgaacactctctgagtccagccgatctaggaagtcctgcgtcccctaaggagtcatcggaggccttggatgctgccgccgcgctgagcgtagctgagtgtgtcgagcgtatggctcctaccctcccgaaaagcgacctgaatgaagtgaaggaactacttaaaaccaacaagaagctcgccaagatgattggccacatctttgagatgaatgacgatgatcctcataaagaggaagagatccgtaagtattctgcaatctatggccgatttgacagtaagagaaaggatggaaaacaccttaccctccatgagcttactgtgaacgaagccgccgctcagctgtgcgtaaaggataacgcgctcctgactaggcgggacgaactcttcgcgctggcccggcaaatatctcgcgaggtaacctataagtacacctaccgaacgaccaaatccaaatgcggagagagggatgagctttcaccgaaaaggattaaagtggaggacggattccctgacttccaggattccgtccagacattgttccagcaagcccgcgccaagtccgaggagctggctgctcttagcagtcagccagagaaggtgatggccaaacaaatggagttcctgtgcaatcaggctggttacgagcggctgcaacatgcagagagaaggctctccgccggcctgtatcggcagtcttccgaggagcacagccctaatgggctgactagcgacaactcagatggacaaggagaacgccccctgaatttgagaatgccaaatctacaaaatcgccagccccatcacttcgtggttgacggggagttgtctagactgtatccgagcgaagcaaaatcccattcctccgagtcccttggtattttgaaggactacccacactcagcctttacattggagaagaaagtaatcaagaccgaacccgaggacagcaggtag

SEQ ID NO: 267254 - DNA, 1461 bp, Artificial Sequence
  derived and/or modified sequence
atggctgctgccctgcccaggaccctgggggagctgcagctgtaccgcatcctgcagaaggccaacctgctgagctactttgatgccttcatccagcagggcggagatgatgtgcagcagctgtgtgaggccggggaggaggagttcctggagatcatggccctggtgggcatggccagcaagcccctgcacgtgcggcggctgcagaaggccctgcgggactgggtgaccaaccctggcctcttcaaccagcccctgaccagcctgcctgtgagcagcatccccatctacaagctgcctgagggcagccccacctggctgggcatcagctgcagcagctatgaaagaagcagcaatgcccgggagccccacctgaagatccccaagtgtgccgccaccacctgtgtgcagagcctgggccagggcaagagtgatgtggtgggcagcctggccctgcagagcgtgggggagagccggctgtggcagggccaccacgccacagaaagtgagcacagcctgagccctgctgacctgggcagccctgccagccccaaggagagcagcgaggccctggatgctgctgctgccctgtctgtggctgaatgtgtggagaggatggcccccaccctgcccaagagtgacctgaatgaggtgaaggagctgctgaagaccaacaagaagctggccaagatgattggccacatctttgagatgaatgatgatgacccccacaaggaggaggagatcaggaagtacagcgccatctacggccgctttgacagcaagaggaaggatggcaagcacctgaccctgcacgagctgactgtgaatgaagctgctgcccagctgtgtgtgaaggacaatgccctgctgaccaggagagatgagctgtttgccctggcccggcagatcagccgggaggtgacctacaagtacacctaccgcaccaccaagagcaaatgtggggagagagatgagctgagccccaagaggatcaaggtggaggatggcttcccagacttccaggacagcgtgcagaccctcttccagcaggcccgggccaagtctgaggagctggccgccctgagcagccagcctgagaaggtgatggccaagcagatggagttcctgtgcaaccaggccggctatgagcggctgcagcacgccgagcggcggctgtctgctggcctgtaccggcagagcagcgaggagcacagccccaacggcctgaccagtgacaacagtgatggccagggcgagcggcccctgaacctgaggatgcccaacctgcagaaccggcagccccaccactttgtggtggatggagagctgagccggctgtaccccagcgaggccaagagccacagcagcgagagcctgggcatcctgaaggactacccccacagcgccttcaccctggagaagaaggtgatcaagacagagcctgaggacagcaggtag

SEQ ID NO: 267255 - DNA, 1461 bp, Artificial Sequence
  derived and/or modified sequence
atggccgccgccctgccccggaccctgggcgagctgcagctgtaccgcatcctgcaaaaagcaaatctgctgtcatatttcgacgctttcatccagcagggcggggacgacgtgcagcagctgtgcgaagctggagaagaggaattcttggagatcatggccttagtggggatggcctccaagcccctgcacgttagaagactccagaaggcgttgagggattgggtgactaaccctgggctattcaaccaaccccttaccagccttcccgtcagtagtatccccatttataagctgcccgaggggagccccacatggctcgggatttcatgctcatcttatgaaaggagcagcaatgcccgggaacctcatctgaaaattccaaaatgtgcagcgacaacgtgcgtacagtctctcggtcagggcaaaagcgacgtcgtgggatcactggctctccaatcagttggagaaagccgcctgtggcagggacatcacgccacagagagcgaacactccctgagccccgctgatctaggttctcccgcttccccaaaggaatcttcagaagccctcgatgctgcagccgccctgtcagtagcagagtgtgtggaacgcatggcaccgaccctgcccaaaagtgatttgaatgaagttaaggaattattgaagaccaacaagaagttggccaagatgatcggccatattttcgagatgaatgacgatgacccgcataaggaagaagaaatccgtaagtactccgccatatatgggagattcgactccaaaagaaaagatggaaagcatctgacacttcacgaactgaccgtcaacgaagcggcagcccagctctgcgtgaaagataacgcacttcttacacggagggacgagctcttcgcgcttgcacgccagatctcccgcgaggtcacatataaatatacctaccgcaccacaaaaagcaaatgtggagagcgggatgaactcagcccaaagcggattaaagtagaggacggctttcctgactttcaggattccgtgcagacattatttcagcaggcgcgtgctaaaagtgaagagctggccgccctttcatcccaacccgagaaggttatggctaaacagatggaattcctgtgtaaccaggctggctatgaacgcctgcagcacgccgaaaggcgactctcagccggtttatatagacagtcctctgaagagcatagccccaacggcttgactagtgacaactccgacggccaaggcgaacgaccgttaaacctgcggatgcccaatctccagaataggcagccacaccatttcgtcgtcgatggagagctgagtagactgtatccctccgaagctaaatcacattccagtgagtctctcggaattttgaaggattatccacactctgcctttacacttgagaagaaagtcataaaaactgagcccgaagacagtcgctag

SEQ ID NO: 267256 - DNA, 2472 bp, Artificial Sequence
  derived and/or modified sequence
ttctcgtttttgttcttaaaacctgtagtgtaacctatttggtgtaaggagtttgaagcaagtatgatgagtttttacttttttttttttttttggcaggttaaacccatccagagtaatggctgcggccttacccaggaccctgggggagttgcagctgtatagaatattacaaaaagccaatctactttcttattttgatgcctttatccaacaaggtggtgatgatgtccagcaactctgtgaagcaggagaagaggagtttttggaaatcatggcactcgtgggcatggctagcaagccccttcatgttagaaggctgcagaaggctttgagagactgggtcacaaaccctgggcttttcaatcagccactgacttcccttcctgtcagtagcatacccatctataaattaccagagggatcaccaacatggctgggaatatcctgcagtagttatgaaaggagtagcaatgcccgggaacctcatttaaaaatccccaaatgtgctgccaccacctgtgtgcagagcttgggacaggggaagtcagatgtggttgggagcctagcactgcagagtgttggtgagtccagactctggcaaggccaccatgccactgagagcgagcacagcctctccccagcagacctgggctcccccgcgtccccaaaggagagcagtgaggcgctggatgctgctgctgcgctctctgtggctgagtgtgtggagcggatggcccccacactgccaaaaagtgacttgaatgaagtgaaagagctgctaaaaaccaacaagaagttggccaaaatgattggtcacatctttgagatgaacgatgatgatccacacaaagaggaggaaattcggaaatacagtgcaatatatggcagatttgactcaaagaggaaggatgggaaacatctcacacttcatgagctcactgttaatgaagcggctgctcaactctgtgtgaaggataatgccctgctgacaagaagagatgagctttttgccttggctcgacagatttctcgagaagtcacctataaatatacttacagaaccaccaagtcaaaatgtggagaaagagatgaattatccccaaagagaattaaagtggaggatgggtttccagatttccaggattctgtgcaaacactcttccagcaggctagagctaagagtgaagaacttgcagctcttagttcacagcctgaaaaggtgatggcaaagcagatggagttcctttgcaaccaagctggctatgagagactgcagcatgccgagaggaggttgtctgcagggctttacaggcagagctcagaagagcacagtcctaacggcttgacttccgataactcagatggacaaggagaaagacctttgaatctccgaatgcctaatttacagaacagacaaccccatcattttgtggtggatggggagctgagcagactttaccccagtgaggcaaagtcccactcatcagagagccttgggattttaaaagactaccctcattcagcttttaccttagaaaagaaagtcatcaaaacagagcctgaagattcaagatagctgtgatttctctcaccgttctctggaaatggcatcagatttaaggataatactccatcatagaaataagccttaataaccagtgttgcctcattcagctcaaacagatttcatagccaaagcaaaaggactggtacggtagtctgtggaaaccaggaagataaaacaacagccacaaaagagaaaatcaagagtgttgcaatctataacagtaatattgattcattcacattcctgtgttaagtcattttatatggaaaggcttacaaatcaatattgtaagcattcattatttaagaatgtacaatgtatttgtgtaatttatagaagtaaaatctagatgttgagacctgtttggtctaatagatgtggatacagtttattttacttgaaattttgttgtctactttgtgtgtttaacgtaaatatatgtcagagtttagaatctgcctgcagttgtgaaaaagaaagcttaagtgatgcagttattggcaagattgcaatgattatggaaaaatagaaagcgaatactcagtttaagccaaggaaaatattgtggatttaatatttgataaaactgattttgtttaacaggaaatttttagcattcagtcatataacatctggttatcaatgcacgtttacacaataaatacttgagtggaggaaagttaaaaagatgagcaatagagtagaaaatatatcttaaactagttgacctagattgtattaatagctacttaagatgtttcaaagataggaagctattgcttggacagagaacttgaaataagtggacccatgtataaaagctttgacttaaacattgatatttcagaatgtgttaaatagattaagacacagtaagttaaccctacatgttataaagatgg

SEQ ID NO: 267257 - DNA, 1461 bp, Artificial Sequence
  derived and/or modified sequence
atggccgcagctttaccaagaacactgggtgagctgcagttgtaccgcatcctgcagaaagcaaatcttctgtcctacttcgatgcatttattcagcagggtggagatgacgtccaacagctttgtgaggcaggagaggaagagttcttagagattatggccctagtgggcatggcaagtaagcctcttcatgtcaggcgcctccaaaaagctctcagggattgggttacaaatcccggactgttcaaccaaccactgacctcattgccagtcagttcaattcctatttacaaactgcccgagggtagcccgacgtggctcgggatcagctgtagtagctacgagcgtagttcaaatgccagagagccacacctgaagattccaaagtgcgcggctactacatgcgtacagtctctcggccagggcaagtctgatgtggttgggagtttagccttacaaagcgtgggagagagtcgtctgtggcagggccatcatgccacggagtccgagcatagtctgagccctgctgacttgggttctcctgcatcgcccaaagagtcttcagaagccttagacgcagctgcagccctctctgttgctgaatgcgtcgagaggatggcccctacactcccaaaatctgacttaaacgaagtgaaagagcttttgaagactaacaagaagcttgccaagatgattggtcatatattcgagatgaatgatgacgatccgcataaagaggaagaaatccggaagtatagtgccatctacgggagattcgactctaagcgaaaagatggaaaacatttaacactgcatgagttgactgtcaatgaggccgcagcccagctgtgcgtgaaagacaacgctttgctcaccaggcgcgacgaacttttcgcattagctcgacagatctccagggaagtcacctacaagtacacctacagaacaactaaaagtaagtgcggcgaacgggatgagttatctccgaagagaatcaaggttgaggacggattcccagattttcaggatagcgtgcagaccctgtttcagcaggctcgcgcaaagtccgaagagctggcagctctgagctcccagccggaaaaggttatggcaaaacagatggaattcctgtgcaaccaggccggatatgaacggctgcagcatgccgagcggcgtctgagcgcgggtctctatcgccaatccagcgaggagcactcacccaatggtttaactagcgataactccgacggtcagggtgagcgccctctcaatctgaggatgcccaacctccagaatagacagccccaccactttgttgtggatggggagctatcaagactttacccctcagaggctaagtcgcactcctccgagtccctggggatcttgaaggactatccccactcagcatttaccctggaaaaaaaagtgataaaaacagagcccgaagactcccggtag

SEQ ID NO: 267258 - DNA, 1461 bp, Artificial Sequence
  derived and/or modified sequence
atggccgccgccctgcccagaaccctgggcgagctgcagctgtacagaatcctgcagaaggccaacctgctgagctacttcgacgccttcatccagcagggcggcgacgacgtgcagcagctgtgcgaggccggcgaggaggagttcctggagatcatggccctggtgggcatggccagcaagcccctgcacgtgagaagactgcagaaggccctgagagactgggtgaccaaccccggcctgttcaaccagcccctgaccagcctgcccgtgagcagcatccccatctacaagctgcccgagggcagccccacctggctgggcatcagctgcagcagctacgagagaagcagcaacgccagagagccccacctgaagatccccaagtgcgccgccaccacctgcgtgcagagcctgggccagggcaagagcgacgtggtgggcagcctggccctgcagagcgtgggcgagagcagactgtggcagggccaccacgccaccgagagcgagcacagcctgagccccgccgacctgggcagccccgccagccccaaggagagcagcgaggccctggacgccgccgccgccctgagcgtggccgagtgcgtggagagaatggcccccaccctgcccaagagcgacctgaacgaggtgaaggagctgctgaagaccaacaagaagctggccaagatgatcggccacatcttcgagatgaacgacgacgacccccacaaggaggaggagatcagaaagtacagcgccatctacggcagattcgacagcaagagaaaggacggcaagcacctgaccctgcacgagctgaccgtgaacgaggccgccgcccagctgtgcgtgaaggacaacgccctgctgaccagaagagacgagctgttcgccctggccagacagatcagcagagaggtgacctacaagtacacctacagaaccaccaagagcaagtgcggcgagagagacgagctgagccccaagagaatcaaggtggaggacggcttccccgacttccaggacagcgtgcagaccctgttccagcaggccagagccaagagcgaggagctggccgccctgagcagccagcccgagaaggtgatggccaagcagatggagttcctgtgcaaccaggccggctacgagagactgcagcacgccgagagaagactgagcgccggcctgtacagacagagcagcgaggagcacagccccaacggcctgaccagcgacaacagcgacggccagggcgagagacccctgaacctgagaatgcccaacctgcagaacagacagccccaccacttcgtggtggacggcgagctgagcagactgtaccccagcgaggccaagagccacagcagcgagagcctgggcatcctgaaggactacccccacagcgccttcaccctggagaagaaggtgatcaagaccgagcccgaggacagcagatag

SEQ ID NO: 267259 - protein, 458 aa, Artificial Sequence
  derived and/or modified sequence
MAAALPRTLGELQLYRILQKANLLSYFDAFIQQGGDDVQQLCEAGEEEFLEIMALVGMASKPLHVRRLQKALRDWVTNPGLFNQPLTSLPVSSIPIYKLPEGSPTWLGISCSSYERSSNAREPHLKIPKCAATTCVQSLGQGKSDVVGSLALQSVGESRLWQGHHATESEHSLSPADLGSPASPKESSEALDAAAALSVAECVERMAPTLPKSDLNEVKELLKTNKKLAKMIGHIFEMNDDDPHKEEEIRKYSAIYGRFDSKRKDGKHLTLHELTVNEAAAQLCVKDNALLTRRDELFALARQISREVTYKYTYRTTKSKCGERDELSPKRIKVEDQPEKVMAKQMEFLCNQAGYERLQHAERRLSAGLYRQSSEEHSPNGLTSDNSDGQGERPLNLRMPNLQNRQPHHFVVDGELSRLYPSEAKSHSSESLGILKDYPHSAFTLEKKVIKTEPEDSR

SEQ ID NO: 267260 - protein, 240 aa, Artificial Sequence
  derived and/or modified sequence
  misc_feature (1)..(1): Xaa can be any naturally occurring amino acid
XKELLKTNKKLAKMIGHIFEMNDDDPHKEEEIRKYSAIYGRFDSKRKDGKHLTLHELTVNEAAAQLCVKDNALLTRRDELFALARQISREVTYKYTYRTTKSKCGERDELSPKRIKVEQPEKVMAKQMEFLCNQAGYERLQHAERRLSAGLYRQSSEEHSPNGLTSDNSDGQGERPLNLRMPNLQNRQPHHFVVDGELSRLYPSEAKSHSSESLGILKDYPHSAFTLEKKVIKTEPEDSR

SEQ ID NO: 267261 - protein, 227 aa, Artificial Sequence
  derived and/or modified sequence
MIGHIFEMNDDDPHKEEEIRKYSAIYGRFDSKRKDGKHLTLHELTVNEAAAQLCVKDNALLTRRDELFALARQISREVTYKYTYRTTKSKCGERDELSPKRIKVEQPEKVMAKQMEFLCNQAGYERLQHAERRLSAGLYRQSSEEHSPNGLTSDNSDGQGERPLNLRMPNLQNRQPHHFVVDGELSRLYPSEAKSHSSESLGILKDYPHSAFTLEKKVIKTEPEDSR

SEQ ID NO: 267262 - DNA, 1377 bp, Artificial Sequence
  derived and/or modified sequence
atggcagccgccctgcctcggacccttggcgagctgcagctctaccgaattctgcagaaggccaacctgctgagctacttcgatgcattcattcagcaaggtggggatgatgtgcagcagttgtgtgaagccggtgaagaagagttcctggagattatggcgctcgtaggcatggcaagcaaaccactacatgtaagacggctgcaaaaagccctgagagactgggttactaatcccggcctattcaaccaacctttgaccagcctgccggtcagctctatcccaatttacaaattgcccgaagggtctcccacatggttaggcatcagctgttcatcctacgaaagatccagtaacgcaagggagccacacctcaaaataccaaaatgcgccgcaaccacgtgcgtgcagagcctagggcaggggaaatcagatgtggtgggcagccttgccctccagagcgtgggggagagcagactgtggcaaggacaccatgctactgaatctgaacactctctgtccccagctgatctgggctctccagcgtcccctaaggagtctagtgaggcactggacgcggctgccgccctatctgtggccgagtgcgtggagaggatggcacccaccctgcccaagagcgatttaaacgaagtgaaagaactgttgaagacaaataaaaagctggcaaagatgattggccacatttttgaaatgaatgacgacgatccgcacaaggaagaagagattaggaagtattctgccatttacggaaggttcgatagtaaacgcaaagatgggaaacacctgactctccacgaactgactgtgaatgaggctgcagctcagctgtgcgtgaaggacaacgcgctattgacaagaagagacgagttgtttgccttggcccggcagatcagtcgcgaagtaacctataaatatacctatcggaccaccaaatcaaaatgtggggaaagagatgagctgtcccccaagcggatcaaagtcgaggatcagccagagaaagtgatggccaagcaaatggagttcctctgtaatcaggcgggctacgagagattgcagcacgctgagcgcaggctgagtgccgggctgtatcggcaaagctccgaagaacactctcccaacggcctgacgtccgacaactccgacggacagggagaacgccccctgaacctgagaatgccaaatctacagaaccgccaaccacaccactttgttgttgatggagaactgtcacgtctgtatcccagcgaagcgaagagtcattcctccgagtccctgggcatcttaaaagactacccacacagcgccttcacccttgagaagaaagttataaagaccgagcccgaggactctagatag

SEQ ID NO: 267263 - DNA, 474 bp, Artificial Sequence
  derived and/or modified sequence
atggcagctgccctgccacgaactctcggcgaactccaattgtaccgtattctgcagaaggccaatctcctgtcttactttgatgcctttatccagcagggaggcgacgatgtccaacagctgtgcgaggctggggaagaagaattcctcgagatcatggctctcgtcggaatggcatcgaaaccattacacgttaggcggctgcagaaggcccttcgtgattgggtaaccaacccgggactgttcaatcagcccttgacctctctccccgtttctagtattcctatatacaaacttccagagggctcaccaacttggctgggtatctcgtgctcctcctacgaacgctcaagcaacgcaagggagccacacctgaaaatccccaaatgcgcggccacgacctgtgtccagtccctggggcagggaaagtccgacgtagtggggtctcttgctttacagtcggtaggagagtag

SEQ ID NO: 267264 - DNA, 189 bp, Artificial Sequence
  derived and/or modified sequence
atggccgctgcgttgcccagaacccttggcgagcttcagctttataggatcttgcaaaaagccaatttattgagctacttcgatgcctttatccagcagggaggcgacgatgtgcagcagctctgcgaggccggggaggaggagttcctggagataatggctctggtaggtatggctagtaaaccttag

SEQ ID NO: 267265 - DNA, 303 bp, Artificial Sequence
  derived and/or modified sequence
atggcagccgccctgcctcggactctgggggaattgcaactgtaccggattctccagaaggcaaatctcctctcctacttcgatgcatttattcaacagggtggtgatgacgtgcagcagttgtgtgaagctggggaggaagaattcctggagatcatggcattagtcggcatggcctctaaaccactccacgtccggcgactccaaaaggctctgcgggactgggtgactaacccaggtctgtttaatcagcctctgacgtcactcccagtctcctctatccctatttacaaactaccttag

SEQ ID NO: 267266 - DNA, 723 bp, Artificial Sequence
  derived and/or modified sequence
tagaaggaattgttgaaaacaaacaagaaactggccaaaatgatcggacatatctttgaaatgaatgatgacgacccacataaagaggaggagattcgaaagtactccgccatttatggtagattcgatagcaagcgtaaggacggcaaacatttgacgcttcacgagctgaccgttaacgaggcagccgcccagctctgtgttaaagacaacgccttgctgacgaggagagacgaattgttcgcactcgccaggcaaatctccagggaagttacctacaagtacacatatagaacaactaaatcgaagtgtggtgagcgggatgagctcagccccaaacggatcaaggttgaacagcctgaaaaagtcatggcgaaacagatggaattcctgtgtaatcaagccggttacgagaggctacagcacgccgaaagacgactctctgccgggctataccgtcagtcatccgaagaacacagccccaatggcttgaccagtgataacagcgatggacagggagagcggcccttaaatctgagaatgcctaacctccagaacagacagccccatcacttcgtcgtagacggcgagctgagtcgcctgtacccctctgaggctaaaagccacagttctgaaagccttggaatcctgaaggactacccccacagcgcgttcactctggagaagaaagtaattaaaaccgaacctgaagatagtagatag

SEQ ID NO: 267267 - DNA, 459 bp, Artificial Sequence
  derived and/or modified sequence
atggcagccgcactcccacgtactctgggagagctacagctctaccgaattctccaaaaagcgaatctgttgtcctacttcgatgcttttattcaacaaggtggggacgatgtgcagcaactctgtgaagctggggaggaggagtttctagaaatcatggccctcgtgggtatggcctctaaacctcttcacgttagacggctgcagaaggcactgcgtgactgggtgactaacccaggtctgttcaaccagccactgacatcgctcccggtgagtagcattcccatctacaagcttcctgaaggaagccccacatggctaggtattagctgcagttcctacgagcgctcctccaatgcgcgggaacctcacctgaaaataccaaagtgtgcggccactacctgtgttcagtcactgggccaggggaagtcagacgtggtggggagcttggccctgtag

SEQ ID NO: 267268 - DNA, 684 bp, Artificial Sequence
  derived and/or modified sequence
atgatcggccacatctttgagatgaacgatgacgatccccacaaggaggaagaaattaggaagtacagtgcaatctatggcagatttgattccaagcgcaaagatggcaagcacctgacccttcacgagttaacggtgaacgaagctgctgctcagttgtgcgtcaaggacaacgccctcttgaccagaagggacgaactatttgcacttgcgagacagatatcaagggaggtgacttataagtacacttaccgcaccacgaaaagcaaatgtggggagagagacgagttgagtcccaagcgtatcaaagtcgagcagccagaaaaggttatggctaagcagatggagttcctgtgtaaccaggcaggatacgaaaggcttcaacacgccgagagaagactctctgctgggctgtaccggcaaagtagcgaggagcattcacctaacggattaactagtgataacagtgatggtcagggagaacggccccttaatctacgtatgccgaacctgcagaatcgccaaccacaccactttgtggtggatggggaactgtcacggctctaccctagcgaggccaagagccactcatctgaatccttgggcattctaaaggactaccctcactccgcattcaccctggagaaaaaggtcataaagacggaaccggaagactcaagatag

SEQ ID NO: 267269 - DNA, 1377 bp, Artificial Sequence
  derived and/or modified sequence
atggctgctgccctgcccaggaccctgggggagctgcagctgtaccgcatcctgcagaaggccaacctgctgagctactttgatgccttcatccagcagggcggagatgatgtgcagcagctgtgtgaggccggggaggaggagttcctggagatcatggccctggtgggcatggccagcaagcccctgcacgtgcggcggctgcagaaggccctgcgggactgggtgaccaaccctggcctcttcaaccagcccctgaccagcctgcctgtgagcagcatccccatctacaagctgcctgagggcagccccacctggctgggcatcagctgcagcagctatgaaagaagcagcaatgcccgggagccccacctgaagatccccaagtgtgccgccaccacctgtgtgcagagcctgggccagggcaagagtgatgtggtgggcagcctggccctgcagagcgtgggggagagccggctgtggcagggccaccacgccacagaaagtgagcacagcctgagccctgctgacctgggcagccctgccagccccaaggagagcagcgaggccctggatgctgctgctgccctgtctgtggctgaatgtgtggagaggatggcccccaccctgcccaagagtgacctgaatgaggtgaaggagctgctgaagaccaacaagaagctggccaagatgattggccacatctttgagatgaatgatgatgacccccacaaggaggaggagatcaggaagtacagcgccatctacggccgctttgacagcaagaggaaggatggcaagcacctgaccctgcacgagctgactgtgaatgaagctgctgcccagctgtgtgtgaaggacaatgccctgctgaccaggagagatgagctgtttgccctggcccggcagatcagccgggaggtgacctacaagtacacctaccgcaccaccaagagcaaatgtggggagagagatgagctgagccccaagaggatcaaggtggaggaccagcctgagaaggtgatggccaagcagatggagttcctgtgcaaccaggccggctatgagcggctgcagcacgccgagcggcggctgtctgctggcctgtaccggcagagcagcgaggagcacagccccaacggcctgaccagtgacaacagtgatggccagggcgagcggcccctgaacctgaggatgcccaacctgcagaaccggcagccccaccactttgtggtggatggagagctgagccggctgtaccccagcgaggccaagagccacagcagcgagagcctgggcatcctgaaggactacccccacagcgccttcaccctggagaagaaggtgatcaagacagagcctgaggacagcaggtag

SEQ ID NO: 267270 - DNA, 474 bp, Artificial Sequence
  derived and/or modified sequence
atggctgctgccctgcccaggaccctgggggagctgcagctgtaccgcatcctgcagaaggccaacctgctgagctactttgatgccttcatccagcagggcggagatgatgtgcagcagctgtgtgaggccggggaggaggagttcctggagatcatggccctggtgggcatggccagcaagcccctgcacgtgcggcggctgcagaaggccctgcgggactgggtgaccaaccctggcctcttcaaccagcccctgaccagcctgcctgtgagcagcatccccatctacaagctgcctgagggcagccccacctggctgggcatcagctgcagcagctatgaaagaagcagcaatgcccgggagccccacctgaagatccccaagtgtgccgccaccacctgtgtgcagagcctgggccagggcaagagtgatgtggtgggcagcctggccctgcagagcgtgggggagtag

SEQ ID NO: 267271 - DNA, 189 bp, Artificial Sequence
  derived and/or modified sequence
atggctgctgccctgcccaggaccctgggggagctgcagctgtaccgcatcctgcagaaggccaacctgctgagctactttgatgccttcatccagcagggcggagatgatgtgcagcagctgtgtgaggccggggaggaggagttcctggagatcatggccctggtgggcatggccagcaagccctag

SEQ ID NO: 267272 - DNA, 303 bp, Artificial Sequence
  derived and/or modified sequence
atggctgctgccctgcccaggaccctgggggagctgcagctgtaccgcatcctgcagaaggccaacctgctgagctactttgatgccttcatccagcagggcggagatgatgtgcagcagctgtgtgaggccggggaggaggagttcctggagatcatggccctggtgggcatggccagcaagcccctgcacgtgcggcggctgcagaaggccctgcgggactgggtgaccaaccctggcctcttcaaccagcccctgaccagcctgcctgtgagcagcatccccatctacaagctgccctag

SEQ ID NO: 267273 - DNA, 723 bp, Artificial Sequence
  derived and/or modified sequence
tgaaaggagctgctgaagaccaacaagaagctggccaagatgattggccacatctttgagatgaatgatgatgacccccacaaggaggaggagatcaggaagtacagcgccatctacggccgctttgacagcaagaggaaggatggcaagcacctgaccctgcacgagctgactgtgaatgaggccgccgcccagctgtgtgtgaaggacaatgccctgctgaccaggagagatgagctgtttgccctggcccggcagatcagccgggaggtgacctacaagtacacctaccgcaccaccaagagcaaatgtggggagagagatgagctgagccccaagaggatcaaggtggagcagcctgagaaggtgatggccaagcagatggagttcctgtgcaaccaggccggctatgagcggctgcagcacgccgagcggcggctgtctgctggcctgtaccggcagagcagcgaggagcacagccccaacggcctgaccagtgacaacagtgatggccagggcgagcggcccctgaacctgaggatgcccaacctgcagaaccggcagccccaccactttgtggtggatggagagctgagccggctgtaccccagcgaggccaagagccacagcagcgagagcctgggcatcctgaaggactacccccacagcgccttcaccctggagaagaaggtgatcaagacagagcctgaggacagcaggtag

SEQ ID NO: 267274 - DNA, 459 bp, Artificial Sequence
  derived and/or modified sequence
atggctgctgccctgcccaggaccctgggggagctgcagctgtaccgcatcctgcagaaggccaacctgctgagctactttgatgccttcatccagcagggcggagatgatgtgcagcagctgtgtgaggccggggaggaggagttcctggagatcatggccctggtgggcatggccagcaagcccctgcacgtgcggcggctgcagaaggccctgcgggactgggtgaccaaccctggcctcttcaaccagcccctgaccagcctgcctgtgagcagcatccccatctacaagctgcctgagggcagccccacctggctgggcatcagctgcagcagctatgaaagaagcagcaatgcccgggagccccacctgaagatccccaagtgtgccgccaccacctgtgtgcagagcctgggccagggcaagagtgatgtggtgggcagcctggccctgtag

SEQ ID NO: 267275 - DNA, 684 bp, Artificial Sequence
  derived and/or modified sequence
atgattggccacatctttgagatgaatgatgatgacccccacaaggaggaggagatcaggaagtacagcgccatctacggccgctttgacagcaagaggaaggatggcaagcacctgaccctgcacgagctgactgtgaatgaagctgctgcccagctgtgtgtgaaggacaatgccctgctgaccaggagagatgagctgtttgccctggcccggcagatcagccgggaggtgacctacaagtacacctaccgcaccaccaagagcaaatgtggggagagagatgagctgagccccaagaggatcaaggtggagcagcctgagaaggtgatggccaagcagatggagttcctgtgcaaccaggccggctatgaaaggctgcagcacgccgagcggcggctgtctgctggcctgtaccggcagagcagcgaggagcacagccccaacggcctgaccagtgacaacagtgatggccagggcgagcggcccctgaacctgaggatgcccaacctgcagaaccggcagccccaccactttgtggtggatggagagctgagccggctgtaccccagcgaggccaagagccacagcagcgagagcctgggcatcctgaaggactacccccacagcgccttcaccctggagaagaaggtgatcaagacagagcctgaggacagcaggtag

SEQ ID NO: 267276 - DNA, 1377 bp, Artificial Sequence
  derived and/or modified sequence
atggccgccgccctgccccggaccctgggcgagctgcagctgtacaggatcctccagaaagcaaatctcctgtcttatttcgatgcttttatccagcagggcggtgacgatgtgcagcaactgtgtgaagccggggaagaggaattcctggagatcatggcactcgtcggaatggcaagtaaacccctgcatgtgagaagactgcaaaaagcactgagagactgggtgactaaccctggactttttaaccaacccctgacatccctccccgtgagcagtatcccgatctacaaattgccagaaggtagccctacctggctgggaatcagctgctctagttacgaacggtcgagcaatgctcgggagccccacctcaaaatcccgaaatgcgccgctactacctgcgtacagtccttagggcagggcaagagtgacgtagttggcagccttgcccttcaatccgtgggcgaatcccgattgtggcagggtcaccacgcgacggagtctgagcatagtctctccccggcagacttaggttctcctgcctccccaaaagagagttccgaggcacttgacgctgcagccgccctgagtgtcgctgaatgcgtggaaagaatggcacctaccctcccaaagagcgatctgaacgaagtcaaagagcttctgaaaaccaacaaaaagttggctaagatgattggccatatatttgaaatgaacgacgatgatccacacaaggaagaagaaatcagaaagtacagcgccatctatggacgtttcgactccaagcgcaaggatggaaagcacctgaccctccacgaactgaccgtcaacgaagccgctgcccaactctgcgttaaggacaacgccttactaactcgtcgcgacgagctgttcgccctcgccaggcagataagcagagaggtgacatacaaatatacctatcgcactaccaaatccaaatgcggggaaagggacgagttgtctcctaaaagaatcaaggtggaagatcagccagaaaaggttatggcgaagcagatggaatttctgtgcaatcaagcgggatatgagcgcctgcagcatgccgaaaggcgtctcagcgcaggcctctatcgtcagagcagcgaagaacattcccctaatggtctgacgtcagacaatagcgacggacagggggagcgccctctgaatctgaggatgcctaatctgcaaaatcgtcaaccacaccacttcgtcgtggatggtgaactgtctcgactatatcccagcgaagctaagagccacagcagtgagtcactggggattctgaaggactatcctcactccgcattcacactggaaaagaaggtaattaagactgaacccgaggactctcgctag

SEQ ID NO: 267277 - DNA, 474 bp, Artificial Sequence
  derived and/or modified sequence
atggccgccgccctgccccggaccctgggcgagctgcagctgtaccgaatccttcagaaagcaaatctcttaagttactttgatgcttttattcaacagggcggagacgacgttcagcaactgtgtgaggctggagaagaagagttcctggaaatcatggccctggtgggaatggcttcgaagcccctgcacgtacgacgtttgcagaaggctctccgcgattgggtgactaacccaggccttttcaatcagcctctgacaagtctccctgtttcatcgattccaatctataagctgcccgagggaagccccacctggctgggaatttcttgttccagctatgagcgtagctctaacgctagagaaccccatcttaaaatccccaagtgcgcagctaccacatgtgtccagtcactgggccagggcaagagtgacgtggtggggagcctggctctgcagagtgtaggagagtag

SEQ ID NO: 267278 - DNA, 189 bp, Artificial Sequence
  derived and/or modified sequence
atggccgccgccctgccccggaccctgggcgagctgcagctgtacaggatcctgcagaaagcgaacctcctcagctacttcgatgcgttcattcagcagggcggggacgatgtgcagcaattgtgcgaggccggcgaagaggagtttctcgaaattatggccctcgtcggtatggcgagcaagccatag

SEQ ID NO: 267279 - DNA, 303 bp, Artificial Sequence
  derived and/or modified sequence
atggccgccgccctgccccggaccctgggcgagctgcagctgtaccgcattctccagaaggcaaatctactgagctatttcgatgccttcatccagcagggaggcgatgatgtgcaacagctttgtgaggcaggagaggaggagtttctcgagattatggccctcgtggggatggcctccaagcccctgcacgttaggcgtctgcagaaggcgttgagagattgggtgactaacccaggtttatttaaccagccactgacaagccttccggtcagcagcataccgatctacaagctgccatag

SEQ ID NO: 267280 - DNA, 723 bp, Artificial Sequence
  derived and/or modified sequence
tgaaaggagctgctgaagaccaacaagaagctggccaagatgatcggccatatctttgagatgaacgatgacgatcctcataaagaagaagaaatccggaaatattcagcaatctacggccggttcgactctaagagaaaggacggtaaacacctgacccttcatgaactgaccgttaacgaagccgctgctcagttgtgcgtgaaagacaatgctctgctgactcgacgggatgaattatttgcgcttgcgcgccagatttccagagaagtgacctacaaatacacgtaccgtacaacgaaaagtaaatgtggggagagggacgaactctctcctaaaaggatcaaagtcgagcagcccgaaaaggtgatggccaagcagatggagttcctgtgcaatcaagccgggtacgagagacttcagcatgctgaacggagactatcagccggtctttatcggcagagctccgaggagcactcgccgaatgggctcaccagcgataattccgatggacagggggaacgaccactcaacctgcgtatgcctaaccttcagaaccgacaacctcatcacttcgtagtcgacggggaactttccagactttacccttctgaggccaaatcgcacagcagtgagtccctgggtattctcaaggactaccctcattcagcgttcacattagaaaaaaaggtaattaagacggaacctgaggacagtaggtag

SEQ ID NO: 267281 - DNA, 459 bp, Artificial Sequence
  derived and/or modified sequence
atggccgccgccctgccccggaccctgggcgagctgcagctgtacagaattttacagaaagccaatttgctgtcatactttgacgccttcatccagcagggtggcgatgatgtacagcagctgtgcgaagccggggaggaagagtttctcgagattatggctttagtggggatggccagcaaaccactccacgtacggaggctccagaaagcccttagagactgggtgaccaacccagggctattcaatcagcccctaacatccctacctgtgtcttcaattccaatctataagctgcctgagggctctccaacttggctcggaatctcgtgcagctcctacgagcggtcctctaacgccagagagccgcatttgaaaatccccaaatgtgccgccaccacatgcgtccagagtttggggcaaggaaaatccgacgtcgtgggcagtctggcattatag

SEQ ID NO: 267282 - DNA, 684 bp, Artificial Sequence
  derived and/or modified sequence
atgatcggccacatcttcgagatgaacgacgacgacccccacaaggaggaagagattcggaagtactcggcaatctatggaagattcgactctaaaagaaaggatggcaaacatcttacactacacgaactgaccgtgaacgaagcagccgcacagctgtgtgttaaagataacgcactgctgacgcgcagggacgagctgttcgcactggctcggcagatcagtcgcgaagtcacgtacaaatatacctaccgaactaccaagtccaagtgtggggaaagggacgagctgagccccaaaaggatcaaagtggagcagcctgaaaaggtgatggccaagcagatggaattcctttgcaatcaggctggttacgaacgcctacagcacgccgaacggcgcctaagcgctgggttatatcgccagtcttcagaagagcactcccccaacggcctgacctcagacaactcagacggtcagggtgaaaggccactcaatctgagaatgcccaacctgcaaaatagacagcctcaccacttcgttgtcgacggggaattaagccggttgtatcctagtgaggccaagagtcattcatctgagagcctcggcatcctgaaagactatcctcactctgcattcaccctggagaaaaaggttatcaagacagagccagaggattctcgctag

SEQ ID NO: 267283 - DNA, 2073 bp, Artificial Sequence
  derived and/or modified sequence
agaggagggagagccgggggccgtcgcttcggagttggggctgagcagtcctcggggagagcgcgccaagaccgctgcagccgctggctgagttaaacccatccagagtaatggctgcggccttacccaggaccctgggggagttgcagctgtatagaatattacaaaaagccaatctactttcttattttgatgcctttatccaacaaggtggtgatgatgtccagcaactctgtgaagcaggagaagaggagtttttggaaatcatggcactcgtgggcatggctagcaagccccttcatgttagaaggctgcagaaggctttgagagactgggtcacaaaccctgggcttttcaatcagccactgacttcccttcctgtcagtagcatacccatctataaattaccagagggatcaccaacatggctgggaatatcctgcagtagttatgaaaggagtagcaatgcccgggaacctcatttaaaaatccccaaatgtgctgccaccacctgtgtgcagagcttgggacaggggaagtcagatgtggttgggagcctagcactgcagagtgttggtgagtccagactctggcaaggccaccatgccactgagagcgagcacagcctctccccagcagacctgggctcccccgcgtccccaaaggagagcagtgaggcgctggatgctgctgctgcgctctctgtggctgagtgtgtggagcggatggcccccacactgccaaaaagtgacttgaatgaagtgaaagagctgctaaaaaccaacaagaagttggccaaaatgattggtcacatctttgagatgaacgatgatgatccacacaaagaggaggaaattcggaaatacagtgcaatatatggcagatttgactcaaagaggaaggatgggaaacatctcacacttcatgagctcactgttaatgaagcggctgctcaactctgtgtgaaggataatgccctgctgacaagaagagatgagctttttgccttggctcgacagatttctcgagaagtcacctataaatatacttacagaaccaccaagtcaaaatgtggagaaagagatgaattatccccaaagagaattaaagtggaggatcaacctgaaaaggtgatggcaaagcagatggagttcctttgcaaccaagctggctatgagagactgcagcatgccgagaggaggttgtctgcagggctttacaggcagagctcagaagagcacagtcctaacggcttgacttccgataactcagatggacaaggagaaagacctttgaatctccgaatgcctaatttacagaacagacaaccccatcattttgtggtggatggggagctgagcagactttaccccagtgaggcaaagtcccactcatcagagagccttgggattttaaaagactaccctcattcagcttttaccttagaaaagaaagtcatcaaaacagagcctgaagattcaagatagctgtgatttctctcaccgttctctggaaatggcatcagatttaaggataatactccatcatagaaataagccttaataaccagtgttgcctcattcagctcaaacagatttcatagccaaagcaaaaggactggtacggtagtctgtggaaaccaggaagataaaacaacagccacaaaagagaaaatcaagagtgttgcaatctataacagtaatattgattcattcacattcctgtgttaagtcattttatatggaaaggcttacaaatcaatattgtaagcattcattatttaagaatgtacaatgtatttgtgtaatttatagaagtaaaatctagatgttgagacctgtttggtctaatagatgtggatacagtttattttacttgaaattttgttgtctactttgtgtgtttaacgtaaatatatgtcagagtttagaatctgcctgcagttgtgaaaaagaaagcttaagtgatgcagttattggcaagattgcaatgattatggaaaaatagaaagcgaatactcagtttaagccaaggaaaatattgtggatttaatatttgataaaactgattttg

SEQ ID NO: 267284 - DNA, 568 bp, Artificial Sequence
  derived and/or modified sequence
gtcactcggccgcgcgtgggcgggagccggagcggcgaatgtagcaagagcggaatctcccaatgtgacagcgcggggttaaacccatccagagtaatggctgcggccttacccaggaccctgggggagttgcagctgtatagaatattacaaaaagccaatctactttcttattttgatgcctttatccaacaaggtggtgatgatgtccagcaactctgtgaagcaggagaagaggagtttttggaaatcatggcactcgtgggcatggctagcaagccccttcatgttagaaggctgcagaaggctttgagagactgggtcacaaaccctgggcttttcaatcagccactgacttcccttcctgtcagtagcatacccatctataaattaccagagggatcaccaacatggctgggaatatcctgcagtagttatgaaaggagtagcaatgcccgggaacctcatttaaaaatccccaaatgtgctgccaccacctgtgtgcagagcttgggacaggggaagtcagatgtggttgggagcctagcactgcagagtgttggtgagt

SEQ ID NO: 267285 - DNA, 438 bp, Artificial Sequence
  derived and/or modified sequence
aggaacagagaagaaaaagacctaggatctcatgactgaacttgaattcttaaaaggactgagcagggggaggaacatttaagctgatggaagtggaagtggaagttgctgtacattggcagcaaggcctccgagttagcttttgaatgcagttaactggtttctcttaactgtggaattcattgaaaagtcagactccgagtggtcgttccaggatatcttgaaaagcccaggttaaacccatccagagtaatggctgcggccttacccaggaccctgggggagttgcagctgtatagaatattacaaaaagccaatctactttcttattttgatgcctttatccaacaaggtggtgatgatgtccagcaactctgtgaagcaggagaagaggagtttttggaaatcatggcactcgtgggcatggctagcaagccc

SEQ ID NO: 267286 - DNA, 545 bp, Artificial Sequence
  derived and/or modified sequence
actcggccgcgcgtgggcgggagccggagcggcgaatgtagcaagagcggaatctcccaatgtgacagcgcgggttttctttttaaaagcggaaggagagttttacatggaagtggcttacagaaacttggcgctgaggtgcagggaagccagaaactctttgtgtctctaaggccgatgaggaatttggaaacacatgtgggacatacaagcgttggatatagaggttaaacccatccagagtaatggctgcggccttacccaggaccctgggggagttgcagctgtatagaatattacaaaaagccaatctactttcttattttgatgcctttatccaacaaggtggtgatgatgtccagcaactctgtgaagcaggagaagaggagtttttggaaatcatggcactcgtgggcatggctagcaagccccttcatgttagaaggctgcagaaggctttgagagactgggtcacaaaccctgggcttttcaatcagccactgacttcccttcctgtcagtagcatacccatctataaattacca

SEQ ID NO: 267287 - DNA, 1661 bp, Artificial Sequence
  derived and/or modified sequence
gaaagagctgctaaaaaccaacaagaagttggccaaaatgattggtcacatctttgagatgaacgatgatgatccacacaaagaggaggaaattcggaaatacagtgcaatatatggcagatttgactcaaagaggaaggatgggaaacatctcacacttcatgagctcactgttaatgaagcggctgctcaactctgtgtgaaggataatgccctgctgacaagaagagatgagctttttgccttggctcgacagatttctcgagaagtcacctataaatatacttacagaaccaccaagtcaaaatgtggagaaagagatgaattatccccaaagagaattaaagtggagcagcctgaaaaggtgatggcaaagcagatggagttcctttgcaaccaagctggctatgagagactgcagcatgccgagaggaggttgtctgcagggctttacaggcagagctcagaagagcacagtcctaacggcttgacttccgataactcagatggacaaggagaaagacctttgaatctccgaatgcctaatttacagaacagacaaccccatcattttgtggtggatggggagctgagcagactttaccccagtgaggcaaagtcccactcatcagagagccttgggattttaaaagactaccctcattcagcttttaccttagaaaagaaagtcatcaaaacagagcctgaagattcaagatagctgtgatttctctcaccgttctctggaaatggcatcagatttaaggataatactccatcatagaaataagccttaataaccagtgttgcctcattcagctcaaacagatttcatagccaaagcaaaaggactggtacggtagtctgtggaaaccaggaagataaaacaacagccacaaaagagaaaatcaagagtgttgcaatctataacagtaatattgattcattcacattcctgtgttaagtcattttatatggaaaggcttacaaatcaatattgtaagcattcattatttaagaatgtacaatgtatttgtgtaatttatagaagtaaaatctagatgttgagacctgtttggtctaatagatgtggatacagtttattttacttgaaattttgttgtctactttgtgtgtttaacgtaaatatatgtcagagtttagaatctgcctgcagttgtgaaaaagaaagcttaagtgatgcagttattggcaagattgcaatgattatggaaaaatagaaagcgaatactcagtttaagccaaggaaaatattgtggatttaatatttgataaaactgattttgtttaacaggaaatttttagcattcagtcatataacatctggttatcaatgcacgtttacacaataaatacttgagtggaggaaagttaaaaagatgagcaatagagtagaaaatatatcttaaactagttgacctagattgtattaatagctacttaagatgtttcaaagataggaagctattgcttggacagagaacttgaaataagtggacccatgtataaaagctttgacttaaacattgatatttcagaatgtgttaaatagattaagacacagtaagttaaccctacatgttataaagatggcgactgttaacaaaggctgtaacagattaagtactattttatatcca

SEQ ID NO: 267288 - DNA, 590 bp, Artificial Sequence
  derived and/or modified sequence
acatttccttttcagcatcatgttcagccagacacagacaagcttgggaagaggatttaatgttgtttcttccaactctggaaacaattccactagaaggctcaatagttcaggttaaacccatccagagtaatggctgcggccttacccaggaccctgggggagttgcagctgtatagaatattacaaaaagccaatctactttcttattttgatgcctttatccaacaaggtggtgatgatgtccagcaactctgtgaagcaggagaagaggagtttttggaaatcatggcactcgtgggcatggctagcaagccccttcatgttagaaggctgcagaaggctttgagagactgggtcacaaaccctgggcttttcaatcagccactgacttcccttcctgtcagtagcatacccatctataaattaccagagggatcaccaacatggctgggaatatcctgcagtagttatgaaaggagtagcaatgcccgggaacctcatttaaaaatccccaaatgtgctgccaccacctgtgtgcagagcttgggacaggggaagtcagatgtggttgggagcctagcactgca

SEQ ID NO: 267289 - DNA, 1377 bp, Artificial Sequence
  derived and/or modified sequence
atggctgccgcactgccgagaacccttggagagctccaactttataggatcctgcagaaggcgaacctgttatcctacttcgatgcctttatccaacagggcggagacgatgtgcaacagctttgcgaggctggcgaagaagaattcctggagatcatggcattagtaggcatggcaagcaagccactgcatgtgcggaggttgcagaaagccctgcgcgattgggttacgaatcctggcctattcaaccagccacttacaagtctacccgtatcctccattcctatttacaagctgcctgaagggagccccacttggcttggcatctcttgttcatcttatgaaagatcttcaaacgctcgagagccacacctaaagatcccgaagtgtgcagctaccacttgcgtgcagtcactggggcagggtaagagcgacgtggtgggctcccttgcgctgcagtctgtcggggagagcagattatggcagggacatcacgccactgagagcgagcatagtctgagtcctgccgacctcggctcacccgcatcccccaaggagagttccgaagctctggacgccgcagcagcgctgtcagtggctgagtgcgttgaacggatggccccaaccctgccaaagtccgatttgaatgaggtaaaagaactccttaaaacgaacaagaagctggcgaaaatgatcggacatatctttgagatgaatgatgacgaccctcataaggaagaggaaattagaaaatatagtgcaatctatggtaggttcgatagcaaacgcaaggacggcaagcacctgacactgcacgagcttaccgtcaatgaggccgcagcccagctttgcgttaaggacaacgcgctgttgacccgccgtgatgagctttttgctctggcaaggcagatttctcgggaggtgacatacaaatacacttaccgcacaaccaagagtaagtgtggcgagcgtgatgaactaagtcccaagcgtatcaaagttgaggatcagccggagaaggtcatggccaaacaaatggagtttctgtgtaatcaggcaggctacgagagactgcagcatgcagaacgtaggctaagcgccggtttgtatagacagtcatcagaggaacactctcctaacggcctgacaagtgataatagcgacggccagggagaaagaccattgaacttacgcatgcccaacctccaaaacagacagccccaccacttcgtagttgatggggagttgtcacggctgtacccaagcgaggccaagtcccatagtagcgaaagtctgggcatacttaaggactaccctcatagtgccttcacacttgagaagaaggtgattaagacagagcccgaagattccagatag

SEQ ID NO: 267290 - DNA, 474 bp, Artificial Sequence
  derived and/or modified sequence
atggccgcagcactgcctcggaccttaggcgaactccagctgtaccgtattcttcaaaaggcaaacttgctgtcctattttgatgcgtttatacagcaagggggagacgacgtccagcagctctgcgaggccggagaggaggaatttcttgagattatggcccttgtaggaatggccagcaaacctctgcacgtgcgcaggctccaaaaagctctgcgcgactgggtcactaatcccggtttatttaatcaaccgctaaccagccttcctgtgtcgtccattccaatttataagttgccagaggggagcccaacctggctgggcatttcctgctcaagctatgagcgttcttcgaatgctcgtgaaccccatttgaagataccaaaatgtgccgctaccacatgtgtgcagagcttaggacagggtaaatcagacgtggtgggctccctggcattacaatcagtcggcgaatag

SEQ ID NO: 267291 - DNA, 189 bp, Artificial Sequence
  derived and/or modified sequence
atggccgctgcactaccacggacactgggtgaactgcaactctaccggatcctgcaaaaagccaatttacttagctactttgacgcgttcattcagcaaggaggggacgacgtgcagcagctctgtgaggccggtgaagaagagttcttggagataatggcactcgtgggaatggcatctaagccctag

SEQ ID NO: 267292 - DNA, 303 bp, Artificial Sequence
  derived and/or modified sequence
atggctgctgccttgcctagaaccttgggggagctgcagctgtatagaatcctgcagaaagccaacctactatcctatttcgatgctttcatccaacagggtggcgatgatgtacagcagttgtgtgaggccggagaagaggagtttttggagatcatggcgctggtgggcatggccagcaagccgctgcatgtgagaaggctccaaaaggccctgcgggattgggtaaccaaccctggactgtttaatcagccccttacctctctccctgtcagctccatacctatctacaaactaccatag

SEQ ID NO: 267293 - DNA, 723 bp, Artificial Sequence
  derived and/or modified sequence
tgaaaggaactgttgaaaactaataagaaactggcaaagatgatcgggcacatcttcgaaatgaacgacgatgatcctcacaaggaagaagaaatcaggaaatactctgccatttatggtaggtttgacagcaagaggaaggatggtaaacatctcacactccatgaactaaccgtgaacgaagccgcagcacagctgtgcgtgaaagacaacgctctcctcacacggcgagacgaactgtttgccctggcgcgacagatttcaagagaggtgacatacaaatacacttaccggaccacaaagtcaaaatgcggcgaaagagacgagctatctcccaaaaggatcaaagtggagcaacctgagaaggtgatggccaagcagatggaatttctatgcaatcaggcagggtacgaacgccttcagcatgctgagaggcgcctctcagctggactgtaccgccagagcagtgaggagcactcgccgaacggtctaactagtgacaatagcgatggacagggagagcgcccactgaatctcagaatgcctaatcttcaaaatcgacaaccccaccatttcgtggttgacggcgagctatcccgtctttatcccagtgaggcgaagagccatagtagcgagagtctcggcatactgaaggactacccgcatagcgctttcaccctggagaagaaggtgatcaagactgaaccagaggacagtcgttag

SEQ ID NO: 267294 - DNA, 459 bp, Artificial Sequence
  derived and/or modified sequence
atggctgccgcattgcccagaacactgggcgagttacaactctatagaattctccagaaggccaatctgctgtcttacttcgatgcgtttatccagcaagggggagatgatgtgcagcaactgtgcgaggccggagaagaagaatttctagagatcatggcccttgtcggtatggcttccaagcccctgcatgtgcggagactgcagaaagccctccgcgactgggtgactaacccgggtttgttcaatcagcctctaacgtcattgccagtctcctctattcctatttacaaactgccggaggggtcgcctacttggctggggatcagctgcagcagttacgaacgatctagcaatgccagagagccccacttgaaaatccccaagtgtgcagcaactacatgcgttcaatcccttggacagggaaagagtgatgttgtgggctccctggctctgtag

SEQ ID NO: 267295 - DNA, 684 bp, Artificial Sequence
  derived and/or modified sequence
atgataggacacatattcgaaatgaacgatgatgatccccataaggaggaagagataaggaagtattcagcgatatatggacggttcgactcgaagagaaaggatggcaagcaccttaccctgcatgagttgactgttaacgaagctgcggcacaactttgcgtgaaagataatgccctgctcacgcgcagggacgaactcttcgcactggcacgacagatttcccgagaggtgacatacaaatacacttacaggacaaccaagtctaagtgtggagaacgagatgaactttctcccaagcgaattaaggtggagcaacccgagaaagtgatggccaaacagatggagtttctgtgcaaccaagctggatacgagaggctacagcatgctgagcgccgtctatctgccggactataccgtcagtccagtgaagaacacagtccaaacggactaacttcggacaacagcgatggacagggcgagcgtcctctgaacctccgcatgccgaatttgcagaataggcaaccacaccacttcgttgtagacggtgaactgtctcgcctctatcccagtgaggccaaaagtcacagtagcgagtctctcggtattttgaaagattatccccattccgcgtttaccttagagaaaaaagtgatcaagacagagcctgaagacagccgctag

SEQ ID NO: 267296 - DNA, 1377 bp, Artificial Sequence
  derived and/or modified sequence
atggccgccgccctgcccagaaccctgggcgagctgcagctgtacagaatcctgcagaaggccaacctgctgagctacttcgacgccttcatccagcagggcggcgacgacgtgcagcagctgtgcgaggccggcgaggaggagttcctggagatcatggccctggtgggcatggccagcaagcccctgcacgtgagaagactgcagaaggccctgagagactgggtgaccaaccccggcctgttcaaccagcccctgaccagcctgcccgtgagcagcatccccatctacaagctgcccgagggcagccccacctggctgggcatcagctgcagcagctacgagagaagcagcaacgccagagagccccacctgaagatccccaagtgcgccgccaccacctgcgtgcagagcctgggccagggcaagagcgacgtggtgggcagcctggccctgcagagcgtgggcgagagcagactgtggcagggccaccacgccaccgagagcgagcacagcctgagccccgccgacctgggcagccccgccagccccaaggagagcagcgaggccctggacgccgccgccgccctgagcgtggccgagtgcgtggagagaatggcccccaccctgcccaagagcgacctgaacgaggtgaaggagctgctgaagaccaacaagaagctggccaagatgatcggccacatcttcgagatgaacgacgacgacccccacaaggaggaggagatcagaaagtacagcgccatctacggcagattcgacagcaagagaaaggacggcaagcacctgaccctgcacgagctgaccgtgaacgaggccgccgcccagctgtgcgtgaaggacaacgccctgctgaccagaagagacgagctgttcgccctggccagacagatcagcagagaggtgacctacaagtacacctacagaaccaccaagagcaagtgcggcgagagagacgagctgagccccaagagaatcaaggtggaggaccagcccgagaaggtgatggccaagcagatggagttcctgtgcaaccaggccggctacgagagactgcagcacgccgagagaagactgagcgccggcctgtacagacagagcagcgaggagcacagccccaacggcctgaccagcgacaacagcgacggccagggcgagagacccctgaacctgagaatgcccaacctgcagaacagacagccccaccacttcgtggtggacggcgagctgagcagactgtaccccagcgaggccaagagccacagcagcgagagcctgggcatcctgaaggactacccccacagcgccttcaccctggagaagaaggtgatcaagaccgagcccgaggacagcagatag

SEQ ID NO: 267297 - DNA, 474 bp, Artificial Sequence
  derived and/or modified sequence
atggccgccgccctgcccagaaccctgggcgagctgcagctgtacagaatcctgcagaaggccaacctgctgagctacttcgacgccttcatccagcagggcggcgacgacgtgcagcagctgtgcgaggccggcgaggaggagttcctggagatcatggccctggtgggcatggccagcaagcccctgcacgtgagaagactgcagaaggccctgagagactgggtgaccaaccccggcctgttcaaccagcccctgaccagcctgcccgtgagcagcatccccatctacaagctgcccgagggcagccccacctggctgggcatcagctgcagcagctacgagagaagcagcaacgccagagagccccacctgaagatccccaagtgcgccgccaccacctgcgtgcagagcctgggccagggcaagagcgacgtggtgggcagcctggccctgcagagcgtgggcgagtag

SEQ ID NO: 267298 - DNA, 189 bp, Artificial Sequence
  derived and/or modified sequence
atggccgccgccctgcccagaaccctgggcgagctgcagctgtacagaatcctgcagaaggccaacctgctgagctacttcgacgccttcatccagcagggcggcgacgacgtgcagcagctgtgcgaggccggcgaggaggagttcctggagatcatggccctggtgggcatggccagcaagccctag

SEQ ID NO: 267299 - DNA, 303 bp, Artificial Sequence
  derived and/or modified sequence
atggccgccgccctgcccagaaccctgggcgagctgcagctgtacagaatcctgcagaaggccaacctgctgagctacttcgacgccttcatccagcagggcggcgacgacgtgcagcagctgtgcgaggccggcgaggaggagttcctggagatcatggccctggtgggcatggccagcaagcccctgcacgtgagaagactgcagaaggccctgagagactgggtgaccaaccccggcctgttcaaccagcccctgaccagcctgcccgtgagcagcatccccatctacaagctgccctag

SEQ ID NO: 267300 - DNA, 723 bp, Artificial Sequence
  derived and/or modified sequence
tgaaaggagctgctgaagaccaacaagaagctggccaagatgatcggccacatcttcgagatgaacgacgacgacccccacaaggaggaggagatcagaaagtacagcgccatctacggcagattcgacagcaagagaaaggacggcaagcacctgaccctgcacgagctgaccgtgaacgaggccgccgcccagctgtgcgtgaaggacaacgccctgctgaccagaagagacgagctgttcgccctggccagacagatcagcagagaggtgacctacaagtacacctacagaaccaccaagagcaagtgcggcgagagagacgagctgagccccaagagaatcaaggtggagcagcccgagaaggtgatggccaagcagatggagttcctgtgcaaccaggccggctacgagagactgcagcacgccgagagaagactgagcgccggcctgtacagacagagcagcgaggagcacagccccaacggcctgaccagcgacaacagcgacggccagggcgagagacccctgaacctgagaatgcccaacctgcagaacagacagccccaccacttcgtggtggacggcgagctgagcagactgtaccccagcgaggccaagagccacagcagcgagagcctgggcatcctgaaggactacccccacagcgccttcaccctggagaagaaggtgatcaagaccgagcccgaggacagcagatag

SEQ ID NO: 267301 - DNA, 459 bp, Artificial Sequence
  derived and/or modified sequence
atggccgccgccctgcccagaaccctgggcgagctgcagctgtacagaatcctgcagaaggccaacctgctgagctacttcgacgccttcatccagcagggcggcgacgacgtgcagcagctgtgcgaggccggcgaggaggagttcctggagatcatggccctggtgggcatggccagcaagcccctgcacgtgagaagactgcagaaggccctgagagactgggtgaccaaccccggcctgttcaaccagcccctgaccagcctgcccgtgagcagcatccccatctacaagctgcccgagggcagccccacctggctgggcatcagctgcagcagctacgagagaagcagcaacgccagagagccccacctgaagatccccaagtgcgccgccaccacctgcgtgcagagcctgggccagggcaagagcgacgtggtgggcagcctggccctgtag

SEQ ID NO: 267302 - DNA, 684 bp, Artificial Sequence
  derived and/or modified sequence
atgatcggccacatcttcgagatgaacgacgacgacccccacaaggaggaggagatcagaaagtacagcgccatctacggcagattcgacagcaagagaaaggacggcaagcacctgaccctgcacgagctgaccgtgaacgaggccgccgcccagctgtgcgtgaaggacaacgccctgctgaccagaagagacgagctgttcgccctggccagacagatcagcagagaggtgacctacaagtacacctacagaaccaccaagagcaagtgcggcgagagagacgagctgagccccaagagaatcaaggtggagcagcccgagaaggtgatggccaagcagatggagttcctgtgcaaccaggccggctacgagagactgcagcacgccgagagaagactgagcgccggcctgtacagacagagcagcgaggagcacagccccaacggcctgaccagcgacaacagcgacggccagggcgagagacccctgaacctgagaatgcccaacctgcagaacagacagccccaccacttcgtggtggacggcgagctgagcagactgtaccccagcgaggccaagagccacagcagcgagagcctgggcatcctgaaggactacccccacagcgccttcaccctggagaagaaggtgatcaagaccgagcccgaggacagcagatag

SEQ ID NO: 267303 - protein, 500 aa, Artificial Sequence
  derived and/or modified sequence
MERVKRNQENFSSVLYKENLGTGIPIPITPEMQRVKHNQENLSSVLYKENMGKGTPLPVTPEMERVKHNQENISSVLYKENMGKGTPLPVTPEMERVKHNQENISSVLYKENMGKGTPLAVTPEMERVKHNQENISSVLYKENVGKATATPVTPEMQRVKRNQENISSVLYKENLGKATPTPFTPEMERVKRNQENFSSVLYKENMRKATPTPVTPEMERAKRNQENISSVLYSDSFRKQIQGKAAYVLDTPEMRRVRETQRHISTVKYHEDFEKHKGCFTPVVTDPITERVKKNMQDFSDINYRGIQRKVVEMEQKRNDQDQETITGLRVWRTNPGSVFDYDPAEDNIQSRSLHMINVQAQRRSREQSRSASALSISGGEEKSEHSEAPDHHLSTYSDGGVFAVSTAYKHAKTTELPQQRSSSVATQQTTVSSIPSHPSTAGKIFRAMYDYMAADADEVSFKDGDAIINVQAIDEGWMYGTVQRTGRTGMLPANYVEAI

SEQ ID NO: 267304 - DNA, 1503 bp, Artificial Sequence
  derived and/or modified sequence
atggagagggtgaagcgcaatcaggagaactttagctccgtgctttacaaggaaaatttgggcaccggaattcccatccctatcacccccgagatgcagagggttaaacataaccaggaaaatctcagctccgttctatacaaggagaatatgggcaaggggactcccctgcccgtcacccccgagatggagcgggttaagcacaaccaggaaaatatttcctctgtcctctacaaggagaacatggggaagggcacgcctctgcctgtcacaccagagatggaacgagttaagcataatcaggaaaatatcagcagtgttctgtacaaagagaatatgggtaagggtacccctctggcggtgacccccgaaatggagcgagtgaaacataaccaggaaaacatttctagtgtgctgtacaaagagaacgttggcaaggccactgcaacacctgtgactcccgaaatgcagcgggttaaacggaaccaagaaaacatcagctccgttttgtacaaggagaacctcggaaaagccactcctacgccttttacacctgaaatggagagagtaaagagaaaccaagaaaatttctctagcgtcctgtacaaagagaatatgcgcaaggcgactcccactcccgtgacgcctgaaatggagcgagcaaaacgcaaccaggagaacatctcttcagttctctacagcgactcattcaggaaacagatccaagggaaggccgcatatgttttggatacacctgaaatgcggcgcgtccgagaaacacaacgacacatatcaactgtgaagtaccatgaagacttcgagaagcacaaaggatgtttcacccccgtggtcaccgacccaattaccgagagagtgaaaaaaaatatgcaggattttagtgatatcaattatcgagggatacagcgcaaagttgtggaaatggagcagaaaagaaacgatcaggatcaggagactattacaggcctgagagtgtggcgcaccaatcccggcagtgtgtttgactacgaccccgctgaggacaatatacagtcaaggagcctacacatgatcaacgttcaggcccaaagacgcagtcgagagcagagtagatctgccagcgcactctctattagtggtggcgaggagaagtctgagcactctgaggctccggatcaccatttaagcacatactccgatggcggggttttcgcagtttcaacagcgtacaaacacgcgaagactaccgagctcccccagcagcgatcctcctcagttgcaacacagcagactaccgtgtcttcaattccatcccacccaagcaccgcaggaaaaatctttcgcgcaatgtatgattacatggcagcagacgctgatgaagtcagtttcaaagatggcgacgccatcatcaatgttcaagcgatcgatgaaggatggatgtatggcacagtacagcggactgggaggactggcatgttgcccgcaaattacgtggaggcgatctag

SEQ ID NO: 267305 - DNA, 1503 bp, Artificial Sequence
  derived and/or modified sequence
atggagcgggtgaagaggaaccaggagaacttcagctctgtgctgtacaaggagaacctgggcaccggcatccccatccccatcaccccagagatgcagagggtgaagcacaaccaggagaacctgagctctgtgctgtacaaggagaacatgggcaagggcacccccctgcctgtgaccccagagatggagcgggtgaagcacaaccaggagaacatcagctctgtgctgtacaaggagaacatgggcaagggcacccccctgcctgtgaccccagagatggagcgggtgaagcacaaccaggagaacatcagctctgtgctgtacaaggagaacatgggcaagggcacccccctggccgtgaccccagagatggagcgggtgaagcacaaccaggagaacatcagctctgtgctgtacaaggaaaatgtgggcaaggccacagccacccctgtgaccccagagatgcagagggtgaagaggaaccaggagaacatcagctctgtgctgtacaaggagaacctgggcaaggccacccccacccccttcaccccagagatggagcgggtgaagaggaaccaggagaacttcagctctgtgctgtacaaggagaacatgaggaaggccacccccacccctgtgaccccagagatggagcgggccaagaggaaccaggagaacatcagctctgtgctgtacagcgacagcttcaggaagcagatccagggcaaggccgcctacgtgctggacaccccagagatgagaagagtgcgggagacccagaggcacatcagcacagtgaagtaccatgaagattttgagaagcacaagggctgcttcacccctgtggtgacagaccccatcacagagcgggtgaagaagaacatgcaggacttcagtgacatcaactaccggggcatccagaggaaggtggtggagatggagcagaagagaaatgaccaggaccaggagaccatcaccggcctgcgggtgtggaggaccaaccctggctctgtgtttgattatgaccctgctgaggacaacatccagagccgcagcctgcacatgatcaacgtgcaggcccagaggaggagccgggagcagagccgcagcgccagcgccctgagcatcagcggcggggaggagaagtctgagcacagcgaggccccagaccaccacctgagcacctacagtgatggaggagtgtttgctgtgtccacagcctacaagcacgccaagaccacagagctgccccagcagaggagcagctctgtggccacccagcagaccaccgtgagcagcatccccagccaccccagcacagctgggaagatcttccgggccatgtatgactacatggctgctgatgctgatgaggtgtccttcaaggatggagatgccatcatcaacgtgcaggccattgatgagggctggatgtatggcaccgtgcagaggacaggccgcacaggcatgctgcctgccaactacgtggaggccatctag

SEQ ID NO: 267306 - DNA, 1503 bp, Artificial Sequence
  derived and/or modified sequence
atggagcgggtgaagcggaaccaggagaacttcagcagcgtgctgtataaagaaaacctgggcacgggaatccccatcccgatcactccagaaatgcagcgcgtaaaacacaatcaggaaaatctgtcttccgttctttataaggagaacatgggaaaggggacaccactgcccgtgaccccagagatggagagggtgaagcataaccaggagaacatctctagtgtcttgtataaggaaaatatgggcaagggaaccccgttgcccgttaccccagaaatggagcgcgtcaaacataaccaggagaatatctccagcgtcttgtacaaagaaaatatggggaaaggtacacctttggccgtcacacctgagatggagagagtgaagcacaaccaggaaaatatttcctctgtcctttataaggaaaatgtcggcaaggcgaccgctactccagtcacaccagagatgcagagagtgaaacgcaaccaggaaaatatctcttctgtgctgtataaggaaaacttgggaaaagccacacccaccccatttaccccagagatggaaagggtgaagaggaatcaggagaacttcagctccgtgctatataaagaaaacatgaggaaagccacccccacccccgttactccagaaatggaacgcgctaaacggaaccaggagaacatcagctccgttttgtactcagactctttccgcaagcagattcagggaaaggctgcttacgtactggacactcccgagatgcgtcgcgtgagagagacccagcgacacatctcaactgtgaagtatcatgaggacttcgagaagcacaaaggatgcttcacaccggtggtaactgacccaataactgagagagtgaagaaaaatatgcaggacttttctgatatcaattatcgcggcatccagcggaaagtggtggagatggagcaaaagcgcaacgaccaggaccaggaaactataaccggtctccgcgtgtggcggacaaaccccggctccgtgttcgattacgatccagctgaggacaacatccagagccggtcccttcatatgatcaacgtgcaagcccaacgacgatccagggagcagagcaggagcgccagcgccctttccattagtggtggagaagagaagtcagaacacagcgaggccccagaccaccatctgtccacgtatagcgacggaggagtatttgccgtgtctaccgcatataagcacgctaaaaccaccgaattaccacaacagcgatcttctagtgtggctacccagcaaactacagtgtcaagtatccccagccaccctagcaccgccggaaagatttttagagccatgtacgactatatggccgcagacgccgacgaagttagcttcaaggacggggatgccatcatcaatgtccaagcaatcgacgaaggatggatgtacggaaccgtgcaacgcaccggcagaacggggatgcttccggccaactatgtagaggctatttag

SEQ ID NO: 267307 - DNA, 2057 bp, Artificial Sequence
  derived and/or modified sequence
gaaaacttgggaacaggcattccaaccactgtgactccagagattgagagagtcaaacgcaatcaagagaactttagctcggttttgtacaaagaaaatttggggaaaggaatcccaacacctatcactccagagatggagagagtcaaacgcaatcaagagaactttagctcggtgctatacaaagaaaacctggggacaggaattccaatccccatcactcctgagatgcagagagtcaaacacaatcaagaaaaccttagctcggtgttatacaaagaaaacatgggcaagggaacccctttacctgtcactcccgagatggaaagagtcaaacacaatcaagaaaatattagctcggtgttatacaaagaaaacatgggcaagggaacccctctacctgtcactcctgagatggagagagtcaaacacaatcaagaaaatattagctcggtgttatacaaagaaaacatgggcaagggaactcctttagctgtcactcccgagatggagcgagtcaaacacaatcaagaaaatattagctcggttttgtacaaagaaaatgtggggaaagccaccgcaacccctgtcactcctgagatgcagagagtcaaacgcaatcaagaaaacattagctcggtgttatacaaagagaacctggggaaagcaacccccacaccctttactcctgagatggaaagagtgaaacgcaatcaagaaaactttagctcggtattgtacaaagagaacatgagaaaagcaactccgacacctgttactccagagatggagagagctaagcgcaaccaagaaaacattagctcggttctttattctgatagtttccggaaacaaatacaaggcaaagctgcctatgtattggatacccccgagatgagacgggtgagggagacccaacggcacatctcaacggtgaaatatcatgaagactttgagaaacacaagggttgcttcacaccagtggtgacagatcctatcactgaacgagtaaagaagaacatgcaggacttcagtgacattaactaccgaggtattcagaggaaagtggtagaaatggaacaaaaacggaatgaccaagatcaggagactattacaggtttacgtgtctggcgtactaatcctggttcggtttttgactatgatccagcagaagacaacatccagtcccgaagcttacacatgattaatgtccaagctcagcgccggagccgggagcagtcacgatctgccagtgcactaagcatcagtgggggtgaggagaagtctgagcattcagaagcaccagaccaccacctttcgacttacagcgacgggggtgtctttgcagtctcaacagcttacaaacatgcaaaaaccacagagctcccacaacaacgatcatcttcagttgctacccaacagacaacggtatcttccatcccatctcatccatctactgctggaaaaatcttccgtgccatgtatgactatatggctgctgatgcagatgaggtgtccttcaaggatggagatgccatcataaatgttcaagcaattgatgaaggctggatgtatggcactgtgcagaggactggcaggaccggaatgctcccagccaactacgttgaagctatttaggcatttcaaagcatcacacttgtctgcaggacttacagatcctgcagtcaatgtttcggtttagactctccactgttacctaagttctcaagctgcctatggtttttctgtgtcaatgtgatttatggtagtaccatcctttctcctttgggttttaaaataagttgcagaacagacactttaaaagcttctgcaatattatttctgtgcctagagtctttctccattataaacatgttttaacattatttcttttctaaaacagggattttgaatatgccaaacacattaaaggaaaaatagcagagatgttcaccttttccttgctgattgctaatgcttattatttctaattcagttctgaagttataaacttataatcaatacaaaccagcaactaataaaacctctaattctgc

SEQ ID NO: 267308 - DNA, 1503 bp, Artificial Sequence
  derived and/or modified sequence
atggagcgagttaaacgaaatcaggaaaatttttcatcggtcctctataaagaaaatttaggcacggggatccccatccccatcactccagagatgcagagggtgaaacataaccaggagaatctcagttccgttctatataaggagaacatgggaaagggaacccccctacccgtaacacccgagatggagagagtcaaacataatcaagaaaatatatcatccgttctctacaaagaaaacatgggcaaaggcaccccgttacccgttacacccgaaatggaaagagtcaagcacaatcaggagaacatttcaagcgtactgtacaaagaaaacatgggcaaggggaccccactcgctgtgacccctgagatggaaagagtaaagcacaaccaagagaacattagtagtgttctttataaagagaacgtgggaaaggccaccgccacaccagttactcccgagatgcaaagggttaagcggaaccaggaaaacatctccagcgtcctgtataaagaaaacctgggtaaggctacgcctactccctttaccccagaaatggaacgcgtgaagcggaaccaggagaacttctcctctgtcttgtataaagaaaatatgcgaaaagctaccccgacccccgtgacacctgagatggaaagggctaaaaggaaccaggagaacatcagcagcgttttgtattcggactctttcagaaagcaaatccagggcaaggctgcctacgtgcttgacaccccggaaatgcgccgagtccgagaaacccagcgacatatctccactgtcaagtaccacgaggactttgaaaagcataaggggtgttttacccccgtcgtcaccgatcccatcacagaacgagttaagaagaatatgcaggatttttcagacattaactatagagggatccagaggaaagtggtggagatggagcagaagcgcaatgatcaggatcaggaaactataaccggcctgagggtctggcggacaaacccgggatctgtgtttgactacgatcctgccgaagacaatatccagtctcgcagtcttcatatgatcaatgttcaggctcaaagacgttcccgtgaacagagcaggagtgcatccgcgctgtcaatctctggaggtgaggaaaagtccgagcactcagaagctccggatcatcatctaagcacgtattctgacggtggggtctttgccgtgtctaccgcttataaacatgcaaagaccaccgaactgccccagcaacgctcctctagcgtcgcaacccagcaaaccaccgtctcttcgattccttctcatccaagtacagccggaaagattttccgggctatgtacgactacatggcagcagacgccgatgaagtgagtttcaaagatggggacgcaatcatcaatgtgcaggctatcgatgaggggtggatgtacgggactgtacaacgcactggacgaactggtatgctgcccgctaattatgtcgaggccatttag

SEQ ID NO: 267309 - DNA, 1503 bp, Artificial Sequence
  derived and/or modified sequence
atggagagagtgaagagaaaccaggagaacttcagcagcgtgctgtacaaggagaacctgggcaccggcatccccatccccatcacccccgagatgcagagagtgaagcacaaccaggagaacctgagcagcgtgctgtacaaggagaacatgggcaagggcacccccctgcccgtgacccccgagatggagagagtgaagcacaaccaggagaacatcagcagcgtgctgtacaaggagaacatgggcaagggcacccccctgcccgtgacccccgagatggagagagtgaagcacaaccaggagaacatcagcagcgtgctgtacaaggagaacatgggcaagggcacccccctggccgtgacccccgagatggagagagtgaagcacaaccaggagaacatcagcagcgtgctgtacaaggagaacgtgggcaaggccaccgccacccccgtgacccccgagatgcagagagtgaagagaaaccaggagaacatcagcagcgtgctgtacaaggagaacctgggcaaggccacccccacccccttcacccccgagatggagagagtgaagagaaaccaggagaacttcagcagcgtgctgtacaaggagaacatgagaaaggccacccccacccccgtgacccccgagatggagagagccaagagaaaccaggagaacatcagcagcgtgctgtacagcgacagcttcagaaagcagatccagggcaaggccgcctacgtgctggacacccccgagatgagaagagtgagagagacccagagacacatcagcaccgtgaagtaccacgaggacttcgagaagcacaagggctgcttcacccccgtggtgaccgaccccatcaccgagagagtgaagaagaacatgcaggacttcagcgacatcaactacagaggcatccagagaaaggtggtggagatggagcagaagagaaacgaccaggaccaggagaccatcaccggcctgagagtgtggagaaccaaccccggcagcgtgttcgactacgaccccgccgaggacaacatccagagcagaagcctgcacatgatcaacgtgcaggcccagagaagaagcagagagcagagcagaagcgccagcgccctgagcatcagcggcggcgaggagaagagcgagcacagcgaggcccccgaccaccacctgagcacctacagcgacggcggcgtgttcgccgtgagcaccgcctacaagcacgccaagaccaccgagctgccccagcagagaagcagcagcgtggccacccagcagaccaccgtgagcagcatccccagccaccccagcaccgccggcaagatcttcagagccatgtacgactacatggccgccgacgccgacgaggtgagcttcaaggacggcgacgccatcatcaacgtgcaggccatcgacgagggctggatgtacggcaccgtgcagagaaccggcagaaccggcatgctgcccgccaactacgtggaggccatctag

SEQ ID NO: 267310 - protein, 287 aa, Artificial Sequence
  derived and/or modified sequence
MADDEDYEEVVEYYTEEVVYEEVPGETITKIYETTTTRTSDYEQSETSKPALAQPALAQPASAKPVERRKVIRKKVDPSKFMTPYIAHSQKMQDLFSPNKYKEKFEKTKGQPYASTTDTPELRRIKKVQDQLSEVKYRMDGDVAKTICHVDEKAKDIEHAKKVSQQVSKVLYKQNWEDTKDKYLLPPDAPELVQAVKNTAMFSKKLYTEDWEADKSLFYPYNDSPELRRVAQAQKALSDVAYKKGLAEQQAQFTPLADPPDIEFAKKVTNQVSKQKEKKRKKKRKKV

SEQ ID NO: 267311 - protein, 438 aa, Artificial Sequence
  derived and/or modified sequence
MMRVKQTQDHISSVKYKEAIGQGTPIPDLPEVKRVKETQKHISSVMYKENLGTGIPTTVTPEIERVKRNQENFSSVLYKENMGKGTPLAVTPEMERVKHNQENISSVLYKENVGKATATPVTPEMQRVKRNQENISSVLYKENMRKATPTPVTPEMERAKRNQENISSVLYSDSFRKQIQGKAAYVLDTPEMRRVRETQRHISTVKYHEDFEKHKGCFTPVVTDPITERVKKNMQDFSDINYRGIQRKVVEMEQKRNDQDQETITGLRVWRTNPGSVFDYDPAEDNIQSRSLHMINVQAQRRSREQSRSASALSISGGEEKSEHSEAPDHHLSTYSDGGVFAVSTAYKHAKTTELPQQRSSSVATQQTTVSSIPSHPSTAGKIFRAMYDYMAADADEVSFKDGDAIINVQAIDEGWMYGTVQRTGRTGMLPANYVEAI

SEQ ID NO: 267312 - DNA, 1317 bp, Artificial Sequence
  derived and/or modified sequence
atgatgcgggtcaagcagacacaggaccacatttccagcgtgaaatacaaggaagccatcggtcaagggaccccaatccctgatttgccggaggtaaaaagggtgaaggagactcagaaacatatcagctcggtaatgtataaggagaacttgggcacagggattccgaccactgtgacgcccgagatagaaagggtaaagcgaaaccaggaaaacttctctagtgtcctgtataaagaaaacatgggcaaaggtactcccctcgcagtaactcccgaaatggagagggtcaaacataaccaggagaatatctcatcggtgctttacaaggagaacgtgggaaaggcaactgccactcctgtgacaccagagatgcaacgcgtgaagaggaaccaggagaatatcagttctgtcttatacaaagagaacatgcggaaagccacgccaacccctgtaacccctgaaatggagcgtgccaaaaggaaccaggagaatatatcgtccgtcctttactcagactcatttaggaagcagatccaggggaaggcagcttacgttctcgacactccagaaatgagacgggtgcgtgagactcagcgacacatctcaaccgttaagtatcacgaggatttcgagaagcataaagggtgttttaccccagtggtcacagatccaatcaccgagcgcgtcaaaaaaaacatgcaagactttagtgatatcaattatagaggcatccagagaaaggtggtggagatggagcagaagcggaatgaccaggaccaggagactatcacaggactgcgcgtttggaggacgaaccccggcagcgtttttgactacgaccccgctgaggacaatatacagagtcgctccctgcatatgataaacgtgcaagcgcagagacgctcccgcgaacagtctcgctccgccagcgctctcagcatcagcggtggtgaagagaagagtgaacactccgaggcccctgatcaccatctcagcacatactccgacggcggcgtattcgccgtgtcaaccgcttataagcacgctaagactacagaactgccacaacaacggtcatcatcagtggccacacagcagaccacagtaagcagcatcccctctcaccccagcactgctggcaagatatttagggccatgtacgactacatggcagctgatgctgatgaagtctccttcaaggatggcgatgcaatcattaatgtgcaagccattgacgaagggtggatgtacggaactgttcagcgcactggcaggaccggcatgttgcccgctaactacgtcgaagccatttag

SEQ ID NO: 267313 - DNA, 1317 bp, Artificial Sequence
  derived and/or modified sequence
atgatgagggtgaagcagacccaggaccacatcagctctgtgaagtacaaggaggccatcggccagggcacccccatcccagacctgcctgaggtgaagagggtgaaggagacccagaagcacatcagctctgtgatgtacaaggagaacctgggcaccggcatccccaccaccgtgaccccagaaattgagcgggtgaagaggaaccaggagaacttcagctctgtgctgtacaaggagaacatgggcaagggcacccccctggccgtgaccccagagatggagcgggtgaagcacaaccaggagaacatcagctctgtgctgtacaaggaaaatgtgggcaaggccacagccacccctgtgaccccagagatgcagagggtgaagaggaaccaggagaacatcagctctgtgctgtacaaggagaacatgaggaaggccacccccacccctgtgaccccagagatggagcgggccaagaggaaccaggagaacatcagctctgtgctgtacagcgacagcttcaggaagcagatccagggcaaggccgcctacgtgctggacaccccagagatgagaagagtgcgggagacccagaggcacatcagcacagtgaagtaccatgaagattttgagaagcacaagggctgcttcacccctgtggtgacagaccccatcacagagcgggtgaagaagaacatgcaggacttcagtgacatcaactaccggggcatccagaggaaggtggtggagatggagcagaagagaaatgaccaggaccaggagaccatcaccggcctgcgggtgtggaggaccaaccctggctctgtgtttgattatgaccctgctgaggacaacatccagagccgcagcctgcacatgatcaacgtgcaggcccagaggaggagccgggagcagagccgcagcgccagcgccctgagcatcagcggcggggaggagaagtctgagcacagcgaggccccagaccaccacctgagcacctacagtgatggaggagtgtttgctgtgtccacagcctacaagcacgccaagaccacagagctgccccagcagaggagcagctctgtggccacccagcagaccaccgtgagcagcatccccagccaccccagcacagctgggaagatcttccgggccatgtatgactacatggctgctgatgctgatgaggtgtccttcaaggatggagatgccatcatcaacgtgcaggccattgatgagggctggatgtatggcaccgtgcagaggacaggccgcacaggcatgctgcctgccaactacgtggaggccatctag

SEQ ID NO: 267314 - DNA, 1317 bp, Artificial Sequence
  derived and/or modified sequence
atgatgcgggtgaagcagacccaggaccacatcagcagcgtgaagtacaaagaagccatcgggcagggtacccccatacccgacctgcccgaggtaaaacgcgtgaaggagacccagaagcacattagcagcgtgatgtataaggagaacctcgggacgggaataccgactacagttaccccagagattgaaagagtgaagaggaaccaggagaacttctcctccgtcctctataaggagaacatgggtaaaggtacaccactggccgtcacacctgagatggaacgagtcaaacataatcaagaaaacatatcctcagtgttatacaaagaaaatgtcggcaaggccacagctacccccgtgacccctgagatgcagagggtaaagcgaaaccaggagaacatctcttccgtgctgtataaagaaaacatgcgcaaagctacccccactcccgtcactccagagatggagagggccaagcgcaatcaggaaaacatctcatccgtgctctattccgactcatttcgcaaacagatccaaggcaaggccgcatatgttcttgacacccctgagatgaggcgggtgagagagacccagcgacacatttccaccgtgaagtatcacgaagactttgagaaacacaagggatgtttcacacccgtggttaccgaccccattacagagcgggttaagaagaacatgcaggatttctcggatatcaactacagagggatacagagaaaagttgtggaaatggagcaaaagcggaacgatcaggaccaggagacgatcaccggcttgcgcgtctggaggaccaatccaggctccgtctttgactacgatcctgcagaagataacatccagagccggtctctccacatgattaatgtgcaggcccagcggcggagtcgggaacagagtcgatccgcttcggccctttcaatatctggcggggaagaaaagtccgagcattccgaagcacccgaccaccaccttagtacctactctgatggaggggtctttgcagtatcaaccgcatacaaacatgctaaaacaactgaactgccccagcagcggagctcatcagtggctacccagcagaccacagtctcctccatcccctcgcacccctcaaccgcgggaaagatttttcgagccatgtacgactatatggccgccgatgcagacgaagtcagctttaaggacggagatgctataattaacgtgcaagctatcgatgagggttggatgtacggcaccgtgcaaagaacagggagaactgggatgctccccgccaattatgtagaggctatttag

SEQ ID NO: 267315 - DNA, 1557 bp, Artificial Sequence
  derived and/or modified sequence
aagacacgccagaaatactgcgtgtaaaagaaaatcagaagaatttcagctcggttttatataaagaggatgtctcaccaggaacggctatcggaaagacacctgagatgatgagagtgaaacaaacacaggaccacattagctcggtgaagtataaggaagcaataggacaaggaactccaatccctgacctgcctgaagtgaaacgtgtgaaggagacgcagaagcacattagctcggttatgtacaaagaaaacttgggaacaggcattccaaccactgtgactccagagattgagagagtcaaacgcaatcaagagaactttagctcggtgttatacaaagaaaacatgggcaagggaactcctttagctgtcactcccgagatggagcgagtcaaacacaatcaagaaaatattagctcggttttgtacaaagaaaatgtggggaaagccaccgcaacccctgtcactcctgagatgcagagagtcaaacgcaatcaagaaaacattagctcggtattgtacaaagagaacatgagaaaagcaactccgacacctgttactccagagatggagagagctaagcgcaaccaagaaaacattagctcggttctttattctgatagtttccggaaacaaatacaaggcaaagctgcctatgtattggatacccccgagatgagacgggtgagggagacccaacggcacatctcaacggtgaaatatcatgaagactttgagaaacacaagggttgcttcacaccagtggtgacagatcctatcactgaacgagtaaagaagaacatgcaggacttcagtgacattaactaccgaggtattcagaggaaagtggtagaaatggaacaaaaacggaatgaccaagatcaggagactattacaggtttacgtgtctggcgtactaatcctggttcggtttttgactatgatccagcagaagacaacatccagtcccgaagcttacacatgattaatgtccaagctcagcgccggagccgggagcagtcacgatctgccagtgcactaagcatcagtgggggtgaggagaagtctgagcattcagaagcaccagaccaccacctttcgacttacagcgacgggggtgtctttgcagtctcaacagcttacaaacatgcaaaaaccacagagctcccacaacaacgatcatcttcagttgctacccaacagacaacggtatcttccatcccatctcatccatctactgctggaaaaatcttccgtgccatgtatgactatatggctgctgatgcagatgaggtgtccttcaaggatggagatgccatcataaatgttcaagcaattgatgaaggctggatgtatggcactgtgcagaggactggcaggaccggaatgctcccagccaactacgttgaagctatttaggcatttcaaagcatcacacttgtctgcaggacttacagatcctgcagtcaatgtttcggtttagactctccactgttacctaagttctcaagctgcctatggtttttctgtgtcaatgtgatttatggtagta

SEQ ID NO: 267316 - DNA, 1317 bp, Artificial Sequence
  derived and/or modified sequence
atgatgagggtcaagcaaacacaggatcatattagctccgtcaagtacaaagaggctattgggcaggggactcccattccggatcttccggaagttaagcgtgtgaaggagactcagaaacacatctcctccgtgatgtataaggagaacctgggcactgggatcccaacgacagtgacccctgagatcgagagagtgaaacgcaatcaggaaaatttctccagcgtgctgtacaaggagaatatgggcaagggaacgccactggctgtgacacctgagatggagcgggtgaagcataaccaggagaatatttcctcagttctgtacaaggagaacgtggggaaagcaactgctaccccagtgacacctgagatgcagcgcgtgaaaagaaatcaggagaacataagcagcgtgctgtacaaggaaaacatgcgaaaggccacacctacccccgtgacacccgagatggaaagagccaagcggaaccaggagaacatcagctccgtcctctacagcgactcgttcaggaagcagattcaggggaaagccgcttacgttctggatacaccagaaatgcggagggttcgggaaacgcaacggcacatctcaacagttaaatatcacgaggatttcgaaaaacataaagggtgcttcacaccagtagttacggatcctataaccgagcgagtgaaaaagaatatgcaggacttctcagatatcaactacagaggcatccagaggaaagttgtggagatggaacaaaaaaggaatgatcaggatcaggaaacgataacagggctgcgcgtgtggcgcaccaatcccggtagcgtcttcgactatgatcccgctgaagacaatatccaatcgaggtcactgcatatgataaacgtgcaagctcagcgacgcagccgcgagcagtcaagaagtgcatccgcgctctccatatccgggggagaagaaaagtctgaacactctgaggctcctgaccaccatctttctacctactctgacggcggtgtcttcgccgtaagcaccgcctataaacatgctaaaacaacagaactgcctcaacagcggagtagctccgtggctacccagcaaacaaccgtgtctagcattccatcccatccctccaccgcaggtaaaatcttccgcgctatgtacgattacatggcagcagatgccgacgaagtgagctttaaggatggagatgccataatcaacgtccaggcaatcgatgagggctggatgtacggaaccgtccagcgaacagggaggacagggatgctgccagcaaattacgtggaggctatttag

SEQ ID NO: 267317 - DNA, 1317 bp, Artificial Sequence
  derived and/or modified sequence
atgatgagagtgaagcagacccaggaccacatcagcagcgtgaagtacaaggaggccatcggccagggcacccccatccccgacctgcccgaggtgaagagagtgaaggagacccagaagcacatcagcagcgtgatgtacaaggagaacctgggcaccggcatccccaccaccgtgacccccgagatcgagagagtgaagagaaaccaggagaacttcagcagcgtgctgtacaaggagaacatgggcaagggcacccccctggccgtgacccccgagatggagagagtgaagcacaaccaggagaacatcagcagcgtgctgtacaaggagaacgtgggcaaggccaccgccacccccgtgacccccgagatgcagagagtgaagagaaaccaggagaacatcagcagcgtgctgtacaaggagaacatgagaaaggccacccccacccccgtgacccccgagatggagagagccaagagaaaccaggagaacatcagcagcgtgctgtacagcgacagcttcagaaagcagatccagggcaaggccgcctacgtgctggacacccccgagatgagaagagtgagagagacccagagacacatcagcaccgtgaagtaccacgaggacttcgagaagcacaagggctgcttcacccccgtggtgaccgaccccatcaccgagagagtgaagaagaacatgcaggacttcagcgacatcaactacagaggcatccagagaaaggtggtggagatggagcagaagagaaacgaccaggaccaggagaccatcaccggcctgagagtgtggagaaccaaccccggcagcgtgttcgactacgaccccgccgaggacaacatccagagcagaagcctgcacatgatcaacgtgcaggcccagagaagaagcagagagcagagcagaagcgccagcgccctgagcatcagcggcggcgaggagaagagcgagcacagcgaggcccccgaccaccacctgagcacctacagcgacggcggcgtgttcgccgtgagcaccgcctacaagcacgccaagaccaccgagctgccccagcagagaagcagcagcgtggccacccagcagaccaccgtgagcagcatccccagccaccccagcaccgccggcaagatcttcagagccatgtacgactacatggccgccgacgccgacgaggtgagcttcaaggacggcgacgccatcatcaacgtgcaggccatcgacgagggctggatgtacggcaccgtgcagagaaccggcagaaccggcatgctgcccgccaactacgtggaggccatctag

SEQ ID NO: 267318 - protein, 337 aa, Artificial Sequence
  derived and/or modified sequence
QKYKEDYENKIKGKWSETPCFEVANARMNADNISTRKYQEDFENMKDQIYFMQTETPEYKMNKKAGVAASKVKYKEDYEKNKGKADYNVLPASENPQLRQLKAAGDALSDKLYKENYEKTKAKSINYCETPKFKLDTVLQNFSSDKKYKDSYLKDILGHYVGSFEDPYHSHCMKVTAQNSDKNYKAEYEEDRGKGFFPQTITQEYEAIKKLDQCKDHTYKVHPDKTKFTQVTDSPVLLQAQVNSKQLSDLNYKAKHESEKFKCHIPPDTPAFIQHKVNAYNLSDNLYKQDWEKSKAKKFDIKVDAIPLLAAKANTKNTSDVMYKKDYEKNKVKVQQR

SEQ ID NO: 267319 - protein, 2625 aa, Artificial Sequence
  derived and/or modified sequence
MPDTPEINLARANALNVSNKLYREGWDEMKAGCDVRLDAIPIQAAKASREIASDYKYKLDHEKQKGHYVGTLTARDDNKIRWALIADKLQNEREYRLDWAKWKAKIQSPVDMLSILHSKNSQALVSDMDYRNYLHQWTCMPDQNDVIQAKKAYELQSDNVYKADLEWLRGIGWMPNDSVSVNHAKHAADIFSEKKYRTKIETLNFTPVDDRVDYVTAKQSGEILDDIKYRKDWNATKSKYTLTETPLLHTAQEAARILDQYLYKEGWERQKATGYILPPDAVPFVHAHHCNDVQSELKYKAEHVKQKGHYVGVPTMRDDPKLVWFEHAGQIQNERLYKEDYHKTKAKINIPADMVSVLAAKQGQTLVSDIDYRNYLHQWMCHPDQNDVIQARKAYDLQSDNVYRADLEWLRGIGWIPLDSVDHVRVTKNQEMMSQIKYKKNALENYPNFRSVVDPPEIVLAKINSVNQSDVKYKETFNKAKGKYTFSPDTPHISHSKDMGKLYSTILYKGAWEGTKAYGYTLDERYIPIVGAKHADLVNSELKYKETYEKQKGHYLAGKVIGEFPGVVHCLDFQKMRSALNYRKHYEDTKANVHIPNDMMNHVLAKRCQYILSDLEYRHYFHQWTSLLEEPNVIRVRNAQEILSDNVYKDDLNWLKGIGCYVWDTPQILHAKKSYDLQSQLQYTAAGKENLQNYNLVTDTPLYVTAVQSGINASEVKYKENYHQIKDKYTTVLETVDYDRTRNLKNLYSSNLYKEAWDRVKATSYILPSSTLSLTHAKNQKHLASHIKYREEYEKFKALYTLPRSVDDDPNTARCLRVGKLNIDRLYRSVYEKNKMKIHIVPDMVEMVTAKDSQKKVSEIDYRLRLHEWICHPDLQVNDHVRKVTDQISDIVYKDDLNWLKGIGCYVWDTPEILHAKHAYDLRDDIKYKAHMLKTRNDYKLVTDTPVYVQAVKSGKQLSDAVYHYDYVHSVRGKVAPTTKTVDLDRALHAYKLQSSNLYKTSLRTLPTGYRLPGDTPHFKHIKDTRYMSSYFKYKEAYEHTKAYGYTLGPKDVPFVHVRRVNNVTSERLYRELYHKLKDKIHTTPDTPEIRQVKKTQEAVSELIYKSDFFKMQGHMISLPYTPQVIHCRYVGDITSDIKYKEDLQVLKGFGCFLYDTPDMVRSRHLRKLWSNYLYTDKARKMRDKYKVVLDTPEYRKVQELKTHLSELVYRAAGKKQKSIFTSVPDTPDLLRAKRGQKLQSQYLYVELATKERPHHHAGNQTTALKHAKDVKDMVSEKKYKIQYEKMKDKYTPVPDTPILIRAKRAYWNASDLRYKETFQKTKGKYHTVKDALDIVYHRKVTDDISKIKYKENYMSQLGIWRSIPDRPEHFHHRAVTDTVSDVKYKEDLTWLKGIGCYAYDTPDFTLAEKNKTLYSKYKYKEVFERTKSDFKYVADSPINRHFKYATQLMNEKKYRADYEQRKDKYHLVVDEPRHLLAKTAGDQISQIKYRKNYEKSKDKFTSIVDTPEHLRTTKVNKQISDILYKLEYNKAKPRGYTTIHDTPMLLHVRKVKDEVSDLKYKEVYQRNKSNCTIEPDAVHIKAAKDAYKVNTNLDYKKQYEANKAHWKWTPDRPDFLQAAKSSLQQSDFEYKLDREFLKGCKLSVTDDKNTVLALRNTLIESDLKYKEKHVKERGTCHAVPDTPQILLAKTVSNLVSENKYKDHVKKHLAQGSYTTLPETRDTVHVKEVTKHVSDTNYKKKFVKEKGKSNYSIMLEPPEVKHAMEVAKKQSDVAYRKDAKENLHYTTVADRPDIKKATQAAKQASEVEYRAKHRKEGSHGLSMLGRPDIEMAKKAAKLSSQVKYRENFDKEKGKTPKYNPKDSQLYKVMKDANNLASEVKYKADLKKLHKPVTDMKESLIMNHVLNTSQLASSYQYKKKYEKSKGHYHTIPDNLEQLHLKEATELQSIVKYKEKYEKERGKPMLDFETPTYITAKESQQMQSGKEYRKDYEESIKGRNLTGLEVTPALLHVKYATKIASEKEYRKDLEESIRGKGLTEMEDTPDMLRAKNATQILNEKEYKRDLELEVKGRGLNAMANETPDFMRARNATDIASQIKYKQSAEMEKANFTSVVDTPEIIHAQQVKNLSSQKKYKEDAEKSMSYYETVLDTPEIQRVRENQKNFSLLQYQCDLKNSKGKITVVQDTPEILRVKENQKNFSSVLYKEDVSPGTAIGKTPEMMRVKQTQDHISSVKYKEAIGQGTPIPDLPEVKRVKETQKHISSVMYKENLGTGIPTTVTPEIERVKRNQENFSSVLYKENMGKGTPLPVTPEMERVKHNQENISSVLYKENVGKATATPVTPEMQRVKRNQENISSVLYSDSFRKQIQGKAAYVLDTPEMRRVRETQRHISTVKYHEDFEKHKGCFTPVVTDPITERVKKNMQDFSDINYRGIQRKVVEMEQKRNDQDQETITGLRVWRTNPGSVFDYDPAEDNIQSRSLHMINVQAQRRSREQSRSASALSISGGEEKSEHSEAPDHHLSTYSDGGVFAVSTAYKHAKTTELPQQRSSSVATQQTTVSSIPSHPSTAGKIFRAMYDYMAADADEVSFKDGDAIINVQAIDEGWMYGTVQRTGRTGMLPANYVEAI

SEQ ID NO: 267320 - DNA, 7878 bp, Artificial Sequence
  derived and/or modified sequence
atgcccgacactcccgagatcaatctggcacgtgcgaatgcactgaatgtgtccaacaagctgtatcgcgaggggtgggacgaaatgaaggcaggatgtgacgtgaggctagatgccatccctattcaagcagctaaagcctcgcgggagattgcttccgattacaagtacaaactggaccatgagaagcagaaggggcactacgtcggaaccctcacagcccgggatgataataagatcagatgggctttgatcgccgacaaactacaaaatgaaagggagtaccgcctcgattgggcaaaatggaaggcaaagatacagagcccagtggacatgctgtctattctccacagcaagaattcccaggcactggtttcagacatggactaccgtaactaccttcatcagtggacgtgtatgcctgaccagaacgacgtgatccaggcaaagaaggcatatgagctgcagagcgacaacgtatacaaagctgatctggagtggcttcggggcattgggtggatgcctaacgattctgtgagcgtgaaccatgccaagcacgccgctgatatcttttccgagaagaaatatagaaccaagatagagactctaaatttcactccggtggacgaccgggtcgactatgttactgccaaacagtccggggagatcctggacgatatcaagtatcggaaggattggaacgctactaaatccaaatatacattgacagagactcctctcctgcatactgcacaggaggccgcccggatactggaccagtacctgtacaaggaggggtgggagcgacaaaaggctactggctatattctgccccctgatgccgtcccattcgtccatgcacaccactgcaacgatgtgcagtccgagctgaagtataaggcggaacacgtgaagcaaaagggacactacgttggcgttcccaccatgcgtgacgacccaaagctggtgtggtttgagcatgccggccagattcagaatgaaaggctttacaaagaagattaccataagactaaggctaagataaacatcccagctgatatggtctccgttctggcggccaagcagggccagacactcgtttccgatattgattatcggaactaccttcaccaatggatgtgtcatcccgaccagaatgacgtgatccaggctcgcaaagcatatgacctgcagagcgataatgtgtacagagccgacctcgagtggctgcgcggcatcgggtggatccctttagattcagtggaccatgtgcgagtgaccaagaaccaggagatgatgtctcagattaagtacaagaagaacgccctggaaaactaccccaacttccgctccgttgtggatcctcctgagattgtgctggccaaaatcaacagcgtgaatcagagtgacgtaaagtacaaggagacgtttaataaagccaagggaaagtataccttctcacccgatacaccacacattagccattcaaaggacatgggcaaattgtactctaccatactgtataagggggcctgggaaggcaccaaggcttatggatacactctggacgagcgctacatccctatcgtgggtgcaaaacatgccgacctggtcaatagcgagctaaagtacaaggagacgtatgagaagcagaagggtcactacttagctggaaaggtgatcggcgagtttcccggggtggtgcactgcctcgacttccagaagatgcggtccgcacttaattatcgcaagcactacgaggacacaaaggctaatgtgcacatccccaacgacatgatgaatcacgtgctcgccaagaggtgccaatacattctgtcggatctggaatatcgacattactttcaccagtggacctctctcttagaagaaccaaacgtgatacgagtgagaaacgcccaggaaatactaagtgacaacgtgtataaagatgacctcaattggctgaaggggatcggctgttacgtctgggacaccccacagatcctccacgctaaaaagtcctacgacttgcaatcccagttgcagtacaccgctgctggaaaggagaaccttcagaattataacctcgtgacagatacacccttatatgtgactgccgtgcagtccggaataaacgcctctgaagtgaaatacaaagaaaactaccaccagatcaaggataagtacaccactgttctagaaaccgtggattacgacaggacccgcaacctgaagaacctttattcgtcaaatctatataaggaagcatgggaccgagttaaggcaacatcatatattcttccctctagcactttatctctgacgcatgccaaaaaccagaagcacctggccagccacataaagtatcgagaggagtatgagaaattcaaggcactgtacacactcccgaggtccgttgacgacgaccctaatactgcacgctgcctgcgcgttggcaaactgaacattgatcgtctctatcggagcgtatacgagaagaataagatgaaaattcacatcgtgccggacatggttgaaatggtaactgcaaaggactctcagaaaaaggtttcagagatcgactatcgactccgcctgcacgagtggatctgtcatcctgatctgcaggtcaacgatcacgtgagaaaggtcacagatcagatctccgacatcgtttataaggacgacttgaattggctcaagggcatcggttgctacgtttgggacactcccgaaatcttgcatgctaaacatgcatacgatctgagggatgatatcaaatataaggcgcatatgctcaaaacccggaacgactacaagctggtgacagacacacctgtttatgtgcaggccgtgaaaagcggcaaacaactcagcgatgccgtataccactacgattatgtgcatagtgtcagagggaaggtggctccgaccactaaaactgttgatttagatagagctctacatgcctataagcttcagtcgagtaacctgtataagacctctttacgcactttgcctaccggttaccgcctccctggagatacccctcacttcaaacacatcaaagatacacggtatatgtcctcttattttaagtataaagaggcatacgaacacactaaggcttacgggtacactctgggacccaaggacgtccctttcgtccatgttcgtagagttaacaatgttacctctgagcgactctaccgtgagctgtaccataaactgaaagacaagatccatacgacgccagacaccccagagatccgacaggtgaaaaagacacaagaggccgtttctgaactgatatacaaaagcgacttcttcaaaatgcaaggtcacatgatctctcttccctacactccgcaggtaatccattgcaggtacgtcggagatataacgtctgacattaagtacaaggaagatctgcaggtactcaagggctttggttgcttcttatatgatacacccgatatggttaggtcgcggcatctgcgcaagctatggagtaattacttatacacagacaaggcccgcaagatgagagataaatacaaggtcgttctcgatactccagaataccggaaggtgcaagaactgaaaacacacctctcagagcttgtataccgcgctgccgggaagaagcaaaagtcgatcttcacaagcgtgccagacacacccgacctacttagggcaaaaagaggtcagaagttgcagtctcagtacttgtacgtggagctcgcaaccaaagagaggccacatcatcacgctggaaatcaaactactgcattaaagcacgccaaggatgttaaagacatggtgtctgaaaagaagtacaagattcagtacgagaagatgaaagacaagtataccccagtgccagacacccccattctgattcgggcaaaaagggcctactggaatgcatctgacctccgttacaaggagacattccagaaaactaaggggaagtaccataccgtaaaagacgcactggacattgtgtaccacagaaaggtgacggacgacatatcgaaaattaagtataaagagaactacatgagtcagttgggtatttggagatcgatcccagatcgcccagagcatttccaccatcgagcagtgacagacaccgtcagtgacgtaaagtacaaggaagatttgacgtggttgaaggggattggttgttacgcttacgataccccagattttaccctggctgaaaagaataagaccctgtacagtaagtacaaatacaaggaggtgttcgagaggactaaaagtgatttcaaatacgtcgccgactcaccaatcaaccgccacttcaaatatgctacccagctaatgaacgaaaagaaatatagagctgattatgaacaaaggaaagacaaataccatctcgtggtagatgaacccaggcatctgttagccaagacagcgggagatcagatttctcaaatcaagtaccgcaagaattacgagaagtctaaggacaaattcacttccatcgtggacacgccggaacacctgagaaccacaaaggtcaataagcagattagtgatattttgtataaacttgagtacaataaagccaagccgaggggatacaccacaatacatgataccccgatgctcctccatgtgaggaaagtaaaagacgaggttagcgacctcaagtacaaagaggtctaccaacgaaataaatccaattgcaccattgaacctgatgctgtgcacattaaagctgcaaaagacgcttataaagtcaataccaacctcgactataaaaaacaatatgaggccaacaaggctcactggaaatggacgcctgacagacccgactttctgcaggccgccaaatcctctcttcagcagtcagatttcgagtacaagctcgaccgcgagttcctgaaggggtgcaaactgtcggtgacagacgacaagaacacagtcctggctcttcgtaacactctcattgaatcagatctaaagtacaaagaaaaacatgtgaaagagaggggcacatgccacgctgtgccggatactccgcaaatcctgcttgccaagaccgtcagcaaccttgtctccgaaaacaagtataaagatcatgtgaagaaacacctcgcacagggatcctacaccactttgccagaaaccagggacaccgtgcatgtgaaagaagtaactaagcacgtttctgatacaaattacaagaagaagttcgtgaaggaaaaagggaaatctaactactctatcatgttggaaccaccagaggttaaacatgccatggaggtggccaagaagcagtcagatgtcgcctaccgcaaggatgccaaggagaatctccattatactaccgtcgctgaccgtccggatattaagaaagccactcaggccgcaaaacaggccagcgaagtggagtatcgagccaagcatcggaaggaaggcagccacggtctgagtatgcttggaagacccgacatcgagatggcaaagaaagctgctaagctcagctcgcaggttaagtaccgtgaaaacttcgacaaagagaaaggcaagacaccgaagtacaaccctaaggattcccagctttacaaagttatgaaagacgccaacaatctggctagcgaggtgaaatacaaggccgacctgaagaagttgcacaaaccggtgacagatatgaaggagagccttattatgaatcatgtcttgaatacgtctcagctggcctcctcctaccagtacaaaaaaaagtacgaaaaatctaagggccactaccacactattccagacaacctagagcagttacatcttaaggaggctacggagctacaatctattgtgaaatataaggaaaagtatgaaaaggagcgcggcaagccaatgttggactttgagaccccaacatatattacggccaaagagagccagcagatgcagagcggcaaagaatataggaaggactacgaggaaagcatcaaggggcgcaatttgacagggttggaagtcactcctgctctcttgcatgtgaagtacgctaccaagatcgcaagtgagaaagaataccgtaaggacctggaggagtcaatccgaggaaagggcctaaccgagatggaagacacccctgatatgctcagggctaaaaacgccacgcagatattgaacgagaaggaatataagcgtgatttagaattagaggtgaaaggcagaggtctcaacgcaatggccaacgagacaccggatttcatgcgagccaggaacgccactgacattgccagtcaaattaagtataagcaatctgccgagatggagaaggcgaactttacatcggttgtggatacacccgaaatcatccacgcccaacaggtcaagaacctgagctctcagaaaaaatataaggaggatgcagaaaaatctatgtcttactatgaaaccgtgctggacacgcctgaaattcagagggtccgggagaatcagaagaatttctccctgcttcaatatcagtgcgatttgaagaacagtaaaggcaagattacggtggtgcaagacactcccgaaatactacgggtaaaggaaaaccagaaaaacttcagcagtgtgctctataaggaggatgtatctcccgggaccgcgatcggtaaaacgccagaaatgatgcgcgtcaaacagacccaggatcacatctcctccgttaaatacaaagaagccattggccaagggacccctattcctgatttgcccgaggtgaagcgggtaaaggagacccaaaagcacatcagcagcgtgatgtacaaggagaacctgggaaccggaatacctaccaccgtcactcccgaaatagaacgtgtgaagcgcaatcaagagaacttctcctcagtgttatacaaggagaatatgggtaagggtacgccactgcctgtcacccctgaaatggaacgcgtaaagcacaaccaggagaatatctccagcgtgctctataaggaaaacgtggggaaggccacagctacaccagttacacctgagatgcagcgagttaaaagaaaccaggaaaatattagctccgtgctgtacagcgattcatttcgcaagcaaatccaggggaaagccgcgtatgtgcttgatactcctgagatgcggagagtgcgcgagacacaaaggcacatttcgaccgtgaaataccatgaggattttgaaaaacacaaaggctgcttcacccctgtagtcaccgaccccattactgaacgggttaagaaaaatatgcaggatttttccgacattaactaccgtgggattcagaggaaggtcgtcgagatggagcagaaacgcaatgaccaagatcaagagacaatcaccgggctgagggtgtggcgcacaaaccctggttcagtgttcgactatgatcccgccgaagataatatacagtctcgatctctgcacatgatcaacgtgcaagcccagcggcgatccagggagcagtcgcgttcagcaagcgccttgagcatctccggcggcgaagaaaagagtgaacatagcgaggctcctgatcaccatctctccacgtacagcgatggaggagtgttcgcggtgagtacagcctacaagcacgctaagacaacagagttgccacagcagcgctcatcgtccgtcgccactcagcagaccacagtgtcatccattccaagccacccctctaccgccggaaagatctttcgagccatgtacgattacatggccgctgatgcagatgaggtcagtttcaaagatggtgacgccattatcaacgttcaggcgatagacgaaggatggatgtatgggaccgtacaacgaaccggacgcactggcatgctgccagctaactacgttgaggcaatttag

SEQ ID NO: 267321 - DNA, 7878 bp, Artificial Sequence
  derived and/or modified sequence
atgccagacaccccagagatcaacctggcccgggccaatgccctgaatgtgagcaacaagctgtaccgggagggctgggatgagatgaaggccggctgtgatgtgcggctggatgccatccccatccaggccgccaaggccagccgggagatcgccagtgactacaagtacaagctggaccacgagaagcagaagggccactacgtgggcaccctgacagccagagatgacaacaagatccgctgggccctgattgctgacaagctgcagaatgaaagagagtaccgcctggactgggccaagtggaaggccaagatccagagccctgtggacatgctgagcatcctgcacagcaagaacagccaggccctggtgtctgacatggactacagaaactacctgcaccagtggacctgcatgccagaccagaatgatgtgatccaggccaagaaggcctatgagctgcagagcgacaacgtgtacaaggctgacctggagtggctgcggggcatcggctggatgcccaatgacagcgtgtctgtgaaccacgccaagcatgctgctgacatcttcagcgagaagaagtaccgcaccaagattgagaccctgaacttcacccctgtggatgacagagtggactatgtgacagccaagcagagcggggagatcctggatgacatcaagtacaggaaggactggaatgccaccaagagcaagtacaccctgacagagacccccctgctgcacacagcccaggaggccgcccgcatcctggaccagtacctgtacaaggagggctgggagcggcagaaggccaccggctacatcctgcccccagatgctgtgccctttgtgcacgcccaccactgcaatgatgtgcagagcgagctgaagtacaaggccgagcacgtgaagcagaagggccactacgtgggcgtgcccaccatgagagatgaccccaagctggtgtggtttgaacatgctggccagatccagaatgaaaggctgtacaaggaggactaccacaagaccaaggccaagatcaacatcccagctgacatggtgtctgtgctggccgccaagcagggccagaccctggtgtctgacatcgactacagaaactacctgcaccagtggatgtgccacccagaccagaatgatgtgatccaggccaggaaggcctatgacctgcagagcgacaacgtgtacagagctgacctggagtggctgcggggcatcggctggatccccctggacagcgtggaccacgtgcgggtgaccaagaaccaggagatgatgagccagatcaagtacaagaagaatgccctggagaactaccccaacttccgctctgtggtggaccccccagagatcgtgctggccaagatcaacagcgtgaaccagagtgatgtgaagtacaaggagaccttcaacaaggccaagggcaagtacaccttctccccagacaccccccacatcagccacagcaaggacatgggcaagctgtacagcaccatcctgtacaagggggcctgggagggcaccaaggcctacggctacaccctggatgagcgctacatccccatcgtgggcgccaagcatgctgacctggtgaacagcgagctgaagtacaaggagacctatgagaagcagaagggccactacctggccggcaaggtgattggagagttccctggggtggtgcactgcctggacttccagaagatgaggtctgccctgaactacaggaagcactatgaggacaccaaggccaacgtgcacatccccaatgacatgatgaaccacgtgctggccaagcgctgccagtacatcctgagtgacctggagtaccgccactacttccaccagtggaccagcctgctggaggagcccaacgtcatccgggtgagaaatgcccaggagatcctgagtgacaacgtgtacaaggatgacctgaactggctgaagggcatcggctgctacgtgtgggacaccccccagatcctgcacgccaagaagagctatgacctgcagagccagctgcagtacacagctgctgggaaggagaacctgcagaactacaacctggtgacagacacccccctgtatgtgacagctgtgcagagcggcatcaatgccagcgaggtgaagtacaaggagaactaccaccagatcaaggacaagtacaccaccgtgctggagaccgtggactatgacaggaccaggaacctgaagaacctgtacagcagcaacctgtacaaggaggcctgggacagagtgaaggccaccagctacatcctgcccagcagcaccctgagcctgacccacgccaagaaccagaagcacctggccagccacatcaagtaccgggaggagtatgagaagttcaaggccctgtacaccctgcccaggtctgtggatgatgaccccaacacagcccgctgcctgcgggtgggcaagctgaacatcgaccggctgtacagatctgtgtatgagaagaacaagatgaagatccacatcgtgcctgacatggtggagatggtgacagccaaggacagccagaagaaggtgtctgaaattgactaccgcctgcggctgcacgagtggatctgccacccagacctgcaggtgaatgaccacgtgaggaaggtgacagaccagatcagtgacatcgtgtacaaggatgacctgaactggctgaagggcatcggctgctacgtgtgggacaccccagagatcctgcacgccaagcacgcctatgacctgagagatgacatcaagtacaaggcccacatgctgaagaccagaaatgactacaagctggtgacagacacccctgtgtatgtgcaggccgtgaagagcggcaagcagctgagtgatgctgtgtaccactatgactatgtgcacagcgtgcggggcaaggtggcccccaccaccaagacagtggacctggaccgggccctgcacgcctacaagctgcagagcagcaacctgtacaagaccagcctgcggaccctgcccaccggctaccgcctgcccggggacaccccccacttcaagcacatcaaggacacccgctacatgagcagctacttcaagtacaaggaggcctatgagcacaccaaggcctacggctacaccctgggccccaaggatgtgccctttgtgcacgtgagaagagtgaacaacgtgaccagcgagcggctgtaccgggagctgtaccacaagctgaaggacaagatccacaccaccccagacaccccagagatccggcaggtgaagaagacccaggaggccgtgtctgagctgatctacaagagtgacttcttcaagatgcagggccacatgatcagcctgccctacaccccccaggtgatccactgccgctacgtgggggacatcaccagtgacatcaagtacaaggaggacctgcaggtgctgaagggcttcggctgcttcctgtatgacaccccagacatggtgcgcagccgccacctgaggaagctgtggagcaactacctgtacacagacaaggccaggaagatgagggacaagtacaaggtggtgctggacaccccagagtacaggaaggtgcaggagctgaagacccacctgtctgagctggtgtacagagctgctgggaagaagcagaagagcatcttcacctctgtgcctgacaccccagacctgctgcgggccaagaggggccagaagctgcagagccagtacctgtatgtggagctggccaccaaggagcggccccaccaccacgccggcaaccagaccacagccctgaagcacgccaaggatgtgaaggacatggtgtctgagaagaagtacaagatccagtatgagaagatgaaggacaagtacacccctgtgcctgacacccccatcctgatccgggccaagagggcctactggaatgccagtgacctgcgctacaaggagaccttccagaagaccaagggcaagtaccacacagtgaaggatgccctggacatcgtgtaccacaggaaggtgacagatgacatcagcaagatcaagtacaaggagaactacatgagccagctgggcatctggaggagcatcccagacaggcctgagcacttccaccacagagctgtgacagacacagtgtctgatgtgaagtacaaggaggacctgacctggctgaagggcatcggctgctacgcctatgacaccccagacttcaccctggccgagaagaacaagaccctgtacagcaagtacaagtacaaggaggtgtttgagaggaccaagagtgacttcaagtatgtggccgacagccccatcaacagacacttcaagtatgccacccagctgatgaatgagaagaagtacagagctgactatgagcagaggaaggacaagtaccacctggtggtggatgagcccaggcacctgctggccaagacagctggggaccagatcagccagatcaagtacaggaagaactatgagaagagcaaggacaagttcaccagcatcgtggacaccccagagcacctgcggaccaccaaggtgaacaagcagatcagtgacatcctgtacaagctggagtacaacaaggccaagccccggggctacaccaccatccatgacacccccatgctgctgcacgtgaggaaggtgaaggatgaggtgtctgacctgaagtacaaggaggtgtaccagaggaacaagagcaactgcaccatcgagccagatgctgtgcacatcaaggccgccaaggatgcctacaaggtgaacaccaacctggactacaagaagcagtatgaggccaacaaggcccactggaagtggaccccagacagaccagacttcctgcaggccgccaagagcagcctgcagcagagcgactttgagtacaagctggaccgggagttcctgaagggctgcaagctgtctgtgacagatgacaagaacacagtgctggccctgaggaacaccctcatcgagagtgacctgaagtacaaggagaagcacgtgaaggagcggggcacctgccacgctgtgcctgacaccccccagatcctgctggccaagacagtgagcaacctggtgtctgagaacaagtacaaggaccacgtgaagaagcacctggcccagggcagctacaccaccctgcctgagacccgggacacagtgcacgtgaaggaggtgaccaagcacgtgtctgacaccaactacaagaagaagtttgtgaaggagaagggcaagagcaactacagcatcatgctggagcccccagaggtgaagcacgccatggaggtggccaagaagcagagtgatgtggcctacaggaaggatgccaaggagaacctgcactacaccaccgtggccgacagaccagacatcaagaaggccacccaggccgccaagcaggccagcgaggtggagtaccgggccaagcacaggaaggagggcagccacggcctgtccatgctgggccgcccagacatcgagatggccaagaaggccgccaagctgagcagccaggtgaagtaccgggagaactttgacaaggagaagggcaagacccccaagtacaaccccaaggacagccagctgtacaaggtgatgaaggatgccaacaacctggccagcgaggtgaagtacaaggctgacctgaagaagctgcacaagcctgtgacagacatgaaggagagcctcatcatgaaccacgtgctgaacaccagccagctggccagcagctaccagtacaagaagaagtatgagaagagcaagggccactaccacaccatcccagacaacctggagcagctgcacctgaaggaggccacagagctgcagagcatcgtgaagtacaaggagaagtatgagaaggagcggggcaagcccatgctggactttgagacccccacctacatcacagccaaggagagccagcagatgcagagcggcaaggagtacaggaaggactatgaggagagcatcaagggcaggaacctgaccggcctggaggtgaccccagccctgctgcacgtgaagtatgccaccaagatcgccagcgagaaggagtacaggaaggacctggaggagagcatccggggcaagggcctgacagagatggaggacaccccagacatgctgcgggccaagaatgccacccagatcctgaatgagaaggagtacaagagggacctggagctggaggtgaagggccggggcctgaatgccatggccaatgagaccccagacttcatgagggccagaaatgccacagacatcgccagccagatcaagtacaagcagagcgctgagatggagaaggccaacttcacctctgtggtggacaccccagagatcatccacgcccagcaggtgaagaacctgagcagccagaagaagtacaaggaggatgctgagaagtccatgagctactatgagaccgtgctggacaccccagagatccagagggtgcgggagaaccagaagaacttcagcctgctgcagtaccagtgtgacctgaagaacagcaagggcaagatcaccgtggtgcaggacaccccagagatcctgcgggtgaaggagaaccagaagaacttcagctctgtgctgtacaaggaggatgtgtccccaggcacagccatcggcaagaccccagagatgatgagggtgaagcagacccaggaccacatcagctctgtgaagtacaaggaggccatcggccagggcacccccatcccagacctgcctgaggtgaagagggtgaaggagacccagaagcacatcagctctgtgatgtacaaggagaacctgggcaccggcatccccaccaccgtgaccccagaaattgagcgggtgaagaggaaccaggagaacttcagctctgtgctgtacaaggagaacatgggcaagggcacccccctgcctgtgaccccagagatggagcgggtgaagcacaaccaggagaacatcagctctgtgctgtacaaggaaaatgtgggcaaggccacagccacccctgtgaccccagagatgcagagggtgaagaggaaccaggagaacatcagctctgtgctgtacagcgacagcttcaggaagcagatccagggcaaggccgcctacgtgctggacaccccagagatgagaagagtgcgggagacccagaggcacatcagcacagtgaagtaccacgaggactttgagaagcacaagggctgcttcacccctgtggtgacagaccccatcacagagcgggtgaagaagaacatgcaggacttcagtgacatcaactaccggggcatccagaggaaggtggtggagatggagcagaagagaaatgaccaggaccaggagaccatcaccggcctgcgggtgtggaggaccaaccctggctctgtgtttgattatgaccctgctgaggacaacatccagagccgcagcctgcacatgatcaacgtgcaggcccagaggaggagccgggagcagagccgcagcgccagcgccctgagcatctctggaggagaggagaagtctgagcacagcgaggccccagaccaccacctgagcacctacagtgatggcggcgtgtttgctgtgtccacagcctacaagcacgccaagaccacagagctgccccagcagaggagcagctctgtggccacccagcagaccaccgtgagcagcatccccagccaccccagcacagctgggaagatcttccgggccatgtatgactacatggccgcagatgctgatgaggtgtccttcaaggatggagatgccatcatcaacgtgcaggccattgatgagggctggatgtatggaacagtgcagaggactggaagaacaggcatgctgcctgccaactacgtggaggccatctag

SEQ ID NO: 267322 - DNA, 7878 bp, Artificial Sequence
  derived and/or modified sequence
atgcccgacacccccgagatcaacctggcccgggccaacgccctgaacgtgagtaataagttatacagagaaggatgggatgagatgaaggctggatgtgatgttaggctggatgccatcccaatacaggcagctaaagctagccgtgaaatcgccagtgactataaatataagttggaccacgagaaacagaaaggacattatgttggcaccctgacggcccgagacgacaataagattcgatgggccctgatcgcagataaactgcagaacgagcgagagtaccgactggactgggcaaaatggaaggccaagatccagagtcccgttgacatgctcagcatacttcactcaaaaaacagccaggccctggtgagcgacatggactacaggaattatcttcaccaatggacatgtatgcctgaccagaatgacgttattcaggccaaaaaggcatatgagctgcagtcggataacgtgtataaggcagatcttgaatggctcagaggtatcgggtggatgcctaatgactctgtttcagtcaaccacgccaaacacgccgccgatatcttttccgaaaaaaagtataggaccaagatagagactttgaactttacacctgttgacgaccgagttgactacgtgacagccaagcaatctggtgaaattttagatgacattaagtaccgcaaagattggaatgccaccaagagtaaatacactctgacagaaacacccctgctgcacaccgctcaggaagccgcccgcatccttgatcagtacctctataaggagggttgggaacgacaaaaagctaccggttacatactccctcctgacgcagtcccttttgtccacgcgcatcattgtaacgacgtgcaatcagaactaaagtataaagcagaacatgtcaaacagaagggacactatgttggtgtgccgactatgagagacgatccaaagcttgtgtggttcgaacatgcagggcaaattcaaaacgagaggctgtataaggaagattaccacaagaccaaggctaaaatcaacattcccgccgacatggtcagtgttctcgcagctaagcagggacagaccctggtttcagacatcgactatcggaactatctccatcagtggatgtgccatccagatcagaacgatgtgattcaggcgcggaaagcctacgaccttcagagcgacaatgtgtatagagccgacttagagtggctgaggggcatcggttggattcccctggactcggttgaccatgtgcgcgtgacaaaaaaccaggagatgatgagccaaattaaatacaagaagaacgcccttgagaattatccgaacttccgttcagtcgtggatccccccgagattgtactggcgaagattaatagcgtcaatcagagcgatgtgaaatataaggaaacttttaacaaggctaaggggaaatacacgttctctcccgacaccccccacatcagccatagcaaggatatgggcaagctgtatagcaccatcctctacaagggggcgtgggaggggactaaagcttacggctatactctggacgaacggtacattcctattgtgggtgctaagcacgctgatctcgtaaactctgagctgaagtacaaagaaacttacgaaaaacagaaagggcattacctggccgggaaggttattggggaatttccaggggtcgtccactgccttgattttcaaaagatgagatcagccctaaactatagaaagcactatgaggatactaaggctaacgtccatattcccaacgatatgatgaaccacgttctggcgaaacggtgtcagtacatcctaagtgatcttgaatacaggcactactttcaccagtggacctcgttattagaagaaccaaatgttataagggtccggaatgcccaggagatcctttctgataatgtctacaaggacgacctcaattggctgaagggcatcggttgctacgtttgggatacacctcagattttgcacgccaagaaaagttatgacctgcagagccagttacagtatacagctgcaggcaaagagaacctgcagaactataacctcgtgacagacacccctctatatgtgactgccgtgcaatctgggatcaatgcctcagaggtgaaatacaaggagaattatcatcaaatcaaagacaagtacactacggtgcttgaaacggtggactatgatcgcacacgcaatctgaaaaatctgtatagctccaacctctataaagaggcgtgggaccgggtgaaagcaacctcatatattctgcctagtagtaccctgtccctaacacacgctaaaaaccaaaagcacttagcttcccacatcaaatatcgggaagaatacgaaaaattcaaggctctgtatacactccctcggtcagtcgacgacgatcctaacactgccaggtgtctccgagtgggtaagttaaatattgacaggctttatagaagtgtttacgagaaaaacaagatgaaaattcatatcgtgccagatatggttgaaatggtcacagccaaggattcccagaagaaggtgagtgagattgactatcgccttagactgcatgaatggatctgccatccagacctgcaagtgaacgaccacgtgcgcaaggtgacagaccaaatcagcgacattgtctataaagacgacttgaactggctcaaagggatcggctgttatgtttgggatacacctgagatcctgcacgccaagcacgcctacgacctgcgcgacgatatcaaatataaggctcacatgctgaagacaagaaatgattacaaattggtcacagatacacccgtctacgtgcaggccgtgaagtccggcaaacagctgtctgatgctgtgtaccactacgattacgtgcactctgtccggggaaaggtggctcctactactaagacggttgaccttgatcgtgccctgcatgcttacaagttgcagtctagtaatttgtacaagacgagcttgcgaaccctcccgactggctaccgcttgcccggcgacactccacacttcaagcacatcaaggatacgaggtatatgagctcttacttcaagtacaaggaagcctacgagcacactaaggcatatggttacacactggggcctaaggatgtgccctttgtgcacgtgcgacgggtgaataatgttacaagtgagcgactttatcgcgaactgtaccacaagctcaaggataaaatacacaccacccctgatacgcccgagatcagacaggtgaagaaaacgcaggaggccgtgagcgaattaatctataagtccgatttctttaagatgcaggggcacatgataagtttgccatacacaccccaggtcatccactgtcggtacgtgggagacattacatctgatattaagtataaggaggaccttcaagtgctcaaggggttcggctgcttcttgtacgacactcctgatatggtgcgcagccggcatcttcgcaaactctggtcgaattatttgtatacagataaggccaggaagatgcgagataaatacaaggttgtgctcgatactcctgagtacagaaaagttcaggaactcaagacccacttatctgaactggtctatcgagccgcaggaaaaaaacagaaatcaatcttcacatcagtccccgatacccctgatctgttgagggccaagcgcggacagaaactgcagtctcaatacctctacgtggaactggccacaaaggaaaggccacatcatcacgcagggaaccagaccaccgctctgaaacacgccaaagatgttaaggatatggtctcagagaaaaaatacaaaatccagtatgagaaaatgaaggataagtataccccagtgcccgacactcctattctgattagggctaaacgggcatattggaatgcctccgacctgaggtacaaggagacattccagaagacaaagggtaagtatcacacagtgaaagacgccctagacatagtgtatcatagaaaagtcacagatgacatttcaaagatcaaatacaaggagaactacatgtcccagctggggatctggcgctccataccggacagaccggaacactttcaccaccgcgctgtcacagacaccgttagtgatgtgaaatacaaagaagaccttacctggttgaagggcataggatgttacgcctacgacacgcccgattttacactggctgagaagaataaaactctttatagtaaatacaaatacaaggaagtgtttgaacggaccaaaagtgatttcaagtacgtggcagactctcctataaatagacacttcaaatatgcaacgcagctaatgaatgaaaaaaagtatagggccgattacgaacagagaaaagataaatatcatcttgttgtcgacgagccccggcatctgcttgctaagacagcgggggatcagatatctcagatcaagtaccgcaaaaattacgaaaagtctaaggacaagttcacctcgattgtggatacacccgagcatctcaggaccaccaaggtgaataagcagatcagtgatatcctgtataaactggagtacaataaggccaagccacgcgggtatacaactattcacgatactccgatgctgctgcatgtgaggaaagtcaaggatgaggtgtcagacctcaagtataaagaagtgtatcaaagaaacaaaagcaattgtacgatcgaaccggacgccgtccacataaaagcagccaaggacgcctacaaggtgaacaccaacctggactataaaaagcaatacgaagccaataaagcccattggaagtggaccccggaccggccagacttcctgcaagctgccaagagtagcctccagcaaagcgattttgaatacaagttggacagagaattcttaaagggctgcaagctgagcgttaccgatgataagaacaccgtgctcgccctgagaaatacactcatagagagcgatctgaagtataaagagaaacacgtgaaagaacgaggtacttgccacgccgtcccagacaccccccagatcctcctcgctaagaccgtatctaacctggttagtgaaaacaagtataaggatcacgtgaagaagcacctagcacagggctcctacaccaccctgcccgagaccagagacaccgttcacgtgaaagaggttactaagcacgtaagcgatactaattataagaagaaattcgtgaaagaaaagggcaagagcaactactcaatcatgttagagcccccagaagtgaaacatgcaatggaagtcgccaaaaaacagagtgacgtggcttatcgcaaggatgcaaaggagaatctacattatacaaccgtcgctgaccgacccgacataaagaaagctacacaggccgctaaacaggcatccgaagttgaataccgagctaagcaccgaaaggagggtagccacggcctgtccatgttgggccgcccagatatcgaaatggccaagaaggccgcaaaactgtctagccaagtcaagtaccgcgagaacttcgacaaagagaaaggaaaaaccccaaaatacaaccctaaagattcccaactctacaaggttatgaaggatgcgaataatttggcgtcagaagtcaagtataaggcggacctgaagaagttacacaaaccagtcaccgatatgaaagagtcactgatcatgaaccacgtactaaatacgtcccagctcgcgtctagctatcaatacaagaagaaatacgaaaagtctaagggccactatcacaccatccccgataacctcgaacagcttcatctgaaggaggcaacagagctgcagtcaattgtgaaatataaagaaaagtacgagaaggagagaggaaaacccatgctcgacttcgagacacccacctacataacagcaaaagagtctcaacagatgcaatccgggaaggaatatcgcaaggactacgaggaaagcatcaaaggacgaaatctgaccggacttgaagttacaccggccctgctgcacgtgaaatatgccaccaagatcgcctctgagaaggaataccggaaggatctggaggagtctatcaggggaaaggggctgacagagatggaggacacccccgatatgttgcgggcaaagaacgccacccagattctgaacgagaaggagtacaagcgtgaccttgaattagaagtcaagggtcgcggcctgaatgcaatggctaacgaaaccccagattttatgcgggcacgaaacgcaactgacatagcttcacaaattaagtataaacaaagcgctgaaatggagaaggctaatttcacaagcgtcgtggacacaccggaaatcatccatgctcagcaagtcaagaatctttcatctcagaaaaaatataaggaagacgccgaaaagtccatgagctactacgagactgtgcttgacacccctgagatacagagggtaagagagaatcagaagaatttcagcctgctgcagtaccagtgtgacctcaagaatagcaagggcaaaatcacagtagtgcaggatacgccagagatcctgcgagtcaaggaaaaccaaaagaatttcagctccgtgttgtataaagaggatgtgtcacctggcacggccattgggaaaacgccagagatgatgagggtgaagcagactcaagatcatatcagctctgtgaagtacaaagaggccattgggcaggggaccccaatccctgatctgccagaggtcaaaagagttaaggaaacacaaaagcacatctcatcagtaatgtacaaagaaaacctcggcacaggcatccctacaactgtgacaccagagatcgagcgcgtgaaacggaatcaagaaaacttctcctctgtcctgtataaagaaaatatggggaaaggtacaccactgcctgtaacccctgaaatggagagggttaagcacaatcaagaaaacatctcctctgtcctctataaggagaacgtgggcaaggcgaccgcgacccctgtgacacccgagatgcagcgtgtgaagcgaaatcaggagaatatttctagcgtgctatactcagattcttttcggaagcagatccagggcaaagctgcttatgtgctcgatactcccgagatgcgcagggtgagggaaacacagaggcacatttccactgtgaaatatcatgaggattttgagaagcataaaggctgcttcacccccgtggtcaccgatccaattacagaaagggtaaagaaaaatatgcaagacttttctgacattaactatcggggtattcagcgcaaagtcgttgagatggaacagaaacgcaacgaccaggatcaggagactatcaccggacttagggtttggcggactaatcccggctccgtgttcgactatgatccagccgaagacaatatccagtcccggagtctccatatgattaacgttcaggcccagagaaggagccgcgaacagagccggagtgcatccgcattgtcaatcagtgggggcgaggaaaagagcgaacattcagaagcccctgatcatcacctcagcacctatagcgatggcggtgtattcgctgtgtcaaccgcgtacaaacacgccaagacgacagagctcccccaacagcgatccagcagcgtggccacgcagcaaacgactgtcagctccattccctcacacccaagcacagctggaaagatctttcgagccatgtacgactacatggcagcagatgctgatgaggtgtcatttaaggacggagacgctattattaacgtgcaggccattgacgaaggatggatgtatgggacggttcagagaaccggtcgtaccgggatgctgcccgcaaactacgtggaggccatctag

SEQ ID NO: 267323 - DNA, 25458 bp, Artificial Sequence
  derived and/or modified sequence
aggcatcacgctggcttttgcctggggttctcaggaggggagagttgggagaggctttgctgctgaggaaatttatttggtagattgaaggtttgaacgagagctacagaaacgaaagaaaaagtctgtataagccaatggtgttcgggaagaaaataaccccattgccttgagtttgtaggtgccactactactctggaaaaatggcagatgacgaagactatgaggaggtggtggagtactacacagaagaagtggtttacgaagaggtgccgggagagacaataacaaaaatttatgagactacgacaacaaggacatctgactatgagcaatcagaaacttccaaaccagctctggcacagccagcactggcacagccagcatcagcaaagccggtggagaggaggaaggtcatccggaagaaagtggatccttcaaagttcatgaccccctacattgcacacagtcagaaaatgcaggatctttttagcccaaataaatacaaggagaagtttgagaaaacaaaaggacagccatacgccagcacaacagatactccagaacttcgcagaatcaaaaaagtacaagatcaactcagtgaggttaagtatcgaatggatggtgatgttgctaagactatatgtcacgtagatgaaaaagcaaaggatattgaacatgcaaagaaagtgtcgcagcaagtcagtaaggttttatacaagcagaactgggaagacaccaaggataagtacctgcttcctcctgatgcccctgaacttgtccaggccgttaagaacaccgccatgttcagcaagaaactgtacactgaagactgggaagcagacaaaagtttgttttacccctataatgatagcccggaactgaggagagttgcccaggcccagaaagctctcagtgatgttgcctacaaaaaaggtctcgctgaacagcaagctcaattcacgcctctggctgatcctccagatatagaatttgccaagaaagtaaccaatcaagtgagcaagcaaaaatacaaagaagactatgaaaataaaatcaaaggcaaatggagtgagacaccttgctttgaagttgcaaatgccagaatgaatgctgataacattagcacaaggaaataccaggaagattttgaaaacatgaaagaccagatctacttcatgcagaccgaaacaccagagtataaaatgaataaaaaagctggtgtggcagctagcaaggtaaaatacaaagaagactatgaaaagaataaaggaaaagcagattataatgtgcttcctgcttcagagaacccacagcttaggcagctgaaggcagcaggagatgccctaagtgacaaactatacaaggaaaactatgaaaagacaaaagcaaagagcataaattactgcgagacccccaaattcaagctcgatactgttctgcagaacttcagtagtgataaaaaatataaagattcctacttaaaagatattttgggacattatgtaggcagcttcgaggatccataccattcacactgcatgaaagtcacagctcaaaacagtgataaaaactacaaagcagaatacgaagaagacagaggcaaaggcttcttccctcagaccataactcaagaatatgaagcaattaagaaactagatcagtgtaaagaccacacctacaaagtccatccagataagacaaaattcacccaagttacagactctcctgttctgctacaagcccaagtcaattccaaacaactgagtgacttaaattacaaagcaaaacatgaaagtgaaaagttcaagtgccatatcccccctgatactcctgcttttatccagcacaaagtcaatgcctataacttgagtgataatctttataagcaagactgggagaagagcaaagccaaaaagtttgacattaaagtggatgccattcccctgctggcagccaaagccaacaccaagaacaccagcgatgtgatgtacaagaaagactatgaaaaaaacaaagggaaaatgattggagtcctcagcattaatgacgatcccaagatgctgcactccttgaaggtggccaaaaaccagagtgatagattatacaaggaaaactatgagaagacaaaggcaaagagtatgaattactgtgagaccccaaaatatcaacttgatactcagctgaagaacttcagtgaggctagatataaagacttatatgtaaaggatgttttgggacattatgtaggcagcatggaggacccatatcacacacactgcatgaaagttgcagctcaaaacagtgataaaagttacaaagcagaatatgaagaagataaaggaaaatgctatttccctcagacaataacacaagaatatgaagcaatcaagaagctggaccagtgtaaagatcatacctacaaagttcatccagataagaccaaattcacggcagtcactgattctcctgtactgttgcaagcccagctcaacacgaaacagcttagtgatctgaattacaaagcaaaacatgaaggtgagaagttcaagtgccatataccagcagatgctccacagtttatccaacacagagtcaatgcctataatctgagtgataatgtttataagcaagactgggagaagagcaaagccaagaagtttgacattaaagtggacgccattcccctgttggcagccaaagccaacaccaagaacaccagcgatgtgatgtacaagaaagactatgaaaagagcaaagggaaaatgattggagccctcagcattaatgacgatccaaagatgctgcactccttgaagacagccaaaaaccagagtgatcgcgaatatcgaaaagattatgaaaagtcaaaaactatctacacggcacctcttgatatgctccaagtcactcaagctaagaaatctcaggcaattgccagcgacgttgattataagcacatcttacacagttacagctacccccctgatagcatcaatgtggaccttgccaagaaggcatatgcgctgcagagcgatgttgaatacaaagctgactacaatagctggatgaaaggttgtggctgggtgccttttgggtccttagaaatggaaaaggcaaagcgagcttcagacatcctcaatgagaaaaaatatcgccaacatccagacaccctcaagtttacctcgattgaagatgctccaattacagtacagtctaaaattaaccaggcccagaggagtgatatcgcttacaaagccaaaggagaggaaattattcacaaatacaacctgccaccagacctgccccagttcatccaggctaaagttaatgcctacaatatcagtgagaatatgtacaaagcagacttgaaagacttgagcaagaagggatatgacctgagaactgatgcgattcccatcagagctgccaaagctgccaggcaggcggcgagtgacgttcagtacaaaaaagactatgaaaaggctaaagggaaaatggttggcttccaaagtcttcaagatgaccctaaactggttcattatatgaacgtggccaagatacaatcagatcgggagtataaaaaagactatgagaagacaaagtccaaatacaacacgccccatgatatgttcaatgtcgtggcggctaagaaagcccaggatgtggtcagcaatgtcaactataagcattctctccatcattacacctacttgcctgacgccatggacctggagctgtctaagaacatgatgcagatacagagtgataacgtctacaaggaagactacaacaactggatgaaaggcattggctggattcctattggcagtctcgacgtcgaaaaagttaaaaaggccggtgatgctctgaatgaaaagaagtacaggcaacatccagacaccctcaaatttaccagcattgtggactccccagttatggtccaggcaaaacagaacacgaagcaagtcagtgatatcttatacaaggctaaaggagaagatgtgaaacataaatacaccatgagtcctgatcttcctcagtttctccaggccaagtgcaatgcttacaatataagtgacgtctgttataaacgggattggtatgacttaatagccaagggcaacaatgtgctgggcgatgctattcccatcactgcagccaaggcatcgagaaacattgccagtgattataaatacaaggaagcttatgagaagtcaaagggaaagcatgtgggtttcagaagcctccaggatgatcccaagctggtccactatatgaatgtggcaaagctgcagtctgatcgtgaatacaagaagaactatgagaacaccaaaaccagctaccatacccctggggacatggttagcatcacagctgcaaagatggcccaggatgtcgctaccaatgtcaactacaaacagccattgcatcattacacatacctacctgacgccatgagtcttgagcatacgaggaatgtcaatcaaattcagagtgataatgtgtataaagacgagtataacagcttcttgaagggcatcggatggatccctattggttccctggaggtggagaaggtcaagaaagcaggcgatgcattaaatgagaggaagtatcgacagcacccagataccgtcaagttcacaagtgtgcctgattccatgggcatggtgttggctcagcataacacaaagcagctaagtgatttgaactacaaggtagagggagagaaactgaagcacaagtatactattgaccctgaattgcctcagtttattcaagccaaagtcaacgccctcaacatgagtgatgctcattataaagcagattggaagaaaaccattgccaagggctatgatttgagaccagatgccatcccaattgttgctgcaaaaagttcaaggaatattgctagtgattgcaaatataaggaggcctacgagaaagccaaaggcaagcaagttggatttctcagtcttcaggatgatcctaaactggttcactacatgaatgtggccaaaatccagtctgatcgtgagtacaaaaagggctatgaagccagcaagaccaagtaccacacacctctggatatggtcagtgtgacagctgcaaagaaatctcaggaggttgccaccaacgccaactacagacagtcataccaccactacactctcctgcccgatgccttgaatgtggagcactccaggaatgccatgcagattcagagtgataatctgtacaaatctgacttcaccaattggatgaaagggatcggctgggtgcccatagagtccctggaggtggagaaggcaaagaaagcaggagagattcttagtgagaagaagtatcgccagcaccccgagaagctgaagttcacttacgccatggacacaatggaacaggcacttaacaagagtaacaaactgaacatggacaagaggctctacactgaaaaatggaacaaggacaagaccaccattcatgtcatgcctgacacaccggatattttactctccagagtaaaccaaatcaccatgagtgataaactgtacaaagctggctgggaagaggaaaagaagaaaggatatgacctgaggcctgatgccattgcaataaaggctgcaagagcctctagagacattgccagtgattacaaatacaagaaagcctatgaacaagccaaagggaaacacattggcttccggagcctggaagatgaccccaagctggtgcacttcatgcaagtggccaagatgcagtcagaccgggaatacaagaagggatatgagaaatccaagacctccttccacaccccggtggacatgctcagtgtggtggcagccaagaagtctcaggaagtggccaccaatgccaactacaggaacgtgatccatacctacaacatgcttcctgatgccatgagctttgaattggccaaaaatatgatgcagattcaaagtgataatcagtacaaggctgactatgctgacttcatgaagggcattggatggctccctctgggctccctggaagcagagaaaaacaagaaagccatggagattattagtgaaaagaagtaccgccagcacccagacactttgaagtattccacactcatggactcgatgaacatggttttggcccagaataatgcaaaaattatgaacgaacatctctacaaacaagcatgggaggctgacaaaaccaaagtccacatcatgcctgatatcccccagattattttggcaaaggcaaatgcaattaatatgagtgataaactctacaaactttccttggaagagtctaaaaagaaaggctatgatctcagacctgatgcaattcctatcaaagctgccaaggcttccagagatattgcaagtgattataaatacaagtacaattatgaaaaagggaaggggaaaatggttggtttccgcagtctcgaggatgatcccaaattagtccattccatgcaagtggctaagatgcaatctgatcgggagtacaagaaaaactatgagaacacaaagaccagctaccacacccctgccgacatgctcagtgtcacggctgcaaaggatgcccaagccaacatcaccaacactaactacaagcacctgattcacaagtacatcctccttccagatgcaatgaacattgagctgaccaggaatatgaatcgcatacagagtgataatgaatataagcaagattacaatgaatggtacaaagggcttggctggagtccagcaggttctctggaagtggagaaggccaagaaagcaactgaatatgccagtgatcagaaataccgccagcacccgagcaacttccagtttaagaagctgactgattccatggacatggtgcttgccaagcagaatgcacataccatgaacaagcatttatacaccattgattggaataaagataagaccaagattcatgtgatgcctgatacaccagatattttacaagccaagcagaatcaaacactgtatagtcagaaactctataaacttggatgggaagaagctttgaagaaaggctatgatctcccagttgatgcaatttctgtacagctagctaaagcttcaagagacattgctagtgattataaatacaaacaaggctaccgaaagcaacttggccaccatgttggattccggagtctgcaagatgacccaaaacttgtgttgtccatgaatgtagccaaaatgcagagtgaaagagaatacaagaaggactttgagaagtggaaaactaagttctccagcccagtggacatgttgggagtggtactggccaagaagtgtcaggagttggttagtgacgtggactacaagaactacctgcatcagtggacatgtctgcctgatcagaacgatgttgtgcaagctaagaaagtttatgaactgcaaagtgagaatctatataaatctgaccttgagtggctgagaggcataggatggagtcccttgggttctttagaggcagaaaagaacaagcgggcttcggaaatcatcagtgagaagaaatatcgtcagcctccagacagaaacaagttcaccagcattcctgatgccatggatatagttctggcaaagacaaatgccaaaaataggagtgatagactttatagagaagcttgggacaaagacaagactcagatccacatcatgcctgatacacctgacattgttctggctaaagcaaacttaatcaacacaagtgataaactctaccgaatgggttatgaggagctgaagagaaaaggttacgatcttcctgttgatgccataccaatcaaagcagcaaaagcctcccgggaaattgccagtgaatacaagtacaaggaaggctttcgcaagcagctcggccaccacattggtgcccggaacattgaagatgaccccaagatgatgtggtccatgcatgtggccaagatccagagtgacagggagtacaagaaggactttgagaagtggaagaccaagttcagcagcccagtggacatgctgggggtggtgttggccaagaagtgccagaccttagtcagcgacgtggactacaagaactacctgcaccagtggacatgcctgcccgaccagagcgatgtcatccatgctcggcaggcctatgacctccagagcgataatttgtacaagtcagaccttcagtggctaaaaggcattggctggatgactagtggttctctcgaggatgagaaaaataaacgagccacccagattttgagtgaccatgtttaccgtcagcacccagatcaatttaagttttccagccttatggattccataccaatggttttggcaaaaaacaatgctattaccatgaatcatcgcctctatacagaagcttgggataaagataaaaccactgtccacattatgccagatacccctgaagttttattagctaaacaaaacaaagtaaattacagtgagaaattgtataagcttggcctagaagaagccaagaggaaaggttatgacatgcgggtagatgccattcctatcaaggcagccaaggcctccagagatattgcaagtgaattcaagtacaaagaaggctatcgtaagcagctcggccaccacattggtgcccgagctatacgtgatgaccccaagatgatgtggtccatgcacgtggccaagatccagagtgacagggagtacaagaaggactttgagaagtggaagaccaagttcagcagcccagtggacatgctgggggtggtgctggccaagaagtgccagaccttagtcagcgatgtggactacaagaactacctgcaccagtggacatgcctgcccgaccagagcgacgtcatccatgctcggcaggcctatgacctccagagcgataatatgtacaagtctgatctccagtggatgagaggcattggctgggtgtccattggctctttggatgtggaaaaatgcaaaagggcaactgaaattttgagtgataaaatctatcgccagcctccagacagattcaaatttaccagtgtgactgactctctggaacaagtgttggccaaaaataatgccatcactatgaacaagcgtttatacacagaagcctgggacaaagacaagactcagatccacataatgccagacacaccagaaattatgttggcaagaatgaacaaaatcaactacagtgagagtctgtacaaacttgctaatgaagaagcaaagaagaaaggctatgacttgcgaagcgacgccatccccatcgtggcggccaaggcctccagggacatcatcagtgactacaaatataaagatggttactgcaagcaacttggccaccatattggagcccggaacattgaagatgaccccaagatgatgtggtccatgcacgtagccaagatccagagtgacagggagtacaaaaaggactttgagaagtggaagaccaagttcagcagcccagtggacatgctgggggtggtgctggccaagaagtgccagaccttagtcagtgacgtggactataagaactacctgcacgagtggacatgcctgcctgaccagagcgatgtcatccatgctcggcaggcctatgacctccagagtgacaatatttacaagtcagatctccagtggctgagaggcattggctgggtccccattgggtctatggatgtggtcaagtgcaagagagctaccgaaatactgagtgataacatctaccgccagcctccggacaagctgaaatttaccagtgtgactgattctctagagcaggtgctggccaagaacaatgctctcaacatgaataagcgtttatacacagaggcctgggacaaagacaagactcaaattcacataatgcctgatacaccagagattatgttggcaaggcagaacaaaatcaactacagtgagactctatacaaacttgccaatgaagaagcaaaaaagaaaggctacgacttgcgaagtgacgccatccccatcgtggctgccaaggcctccagggacgttatcagtgattacaaatacaaagatggttaccgcaagcagctcggccaccacattggagcccggaacattgaagatgaccccaagatgatgtggtccatgcatgtggccaagatccagagtgacagggagtataagaaggactttgagaagtggaagaccaagttcagcagcccagtggacatgctgggagtggtgttagccaagaagtgccagaccttagtcagcgatgtggactacaagaactacctgcacgagtggacgtgcctgcccgaccagaatgatgtcatccatgctcggcaggcctatgacctccagagcgataacatttacaaatctgatctccagtggctgagaggcattggctgggtccccattgggtctatggatgtggtcaagtgcaagagagctgctgaaatactgagtgataacatctaccgccagcctccggacaagctgaaatttaccagtgtgactgactctctagagcaggtgctggccaagaacaatgctctcaatatgaacaagcgcttatacacagaagcctgggacaaagacaagacccaagtccatattatgcctgatacacctgaaatcatgttggcaagacaaaataaaataaattatagtgagagcctctatcgtcaggccatggaagaagccaagaaagaaggctatgacttgagaagtgatgccattcccattgtggctgccaaggcctctcgggatattgccagtgattacaaatacaaagaagcatatcgtaaacagttgggtcaccacattggcgcccgagcagtacacgatgaccccaagataatgtggtccctccacattgccaaagtgcagagtgaccgtgagtacaagaaagattttgagaaatacaagacaaggtacagcagcccagtggacatgcttggtatcgttttggccaagaagtgtcagaccttggtcagcgatgtggactataaacatcctctgcatgaatggatctgcctgcccgaccagaatgacatcattcatgcacggaaagcctatgacctccagagtgacaatttgtataagtcagaccttgaatggatgaaaggcattggctgggttccgattgattccttggaagttgttagggccaagagagctggagaattacttagtgatactatctaccgtcagcgtccagaaacgctgaaatttaccagtataacggacactccggagcaggtgctggcaaaaaacaatgctttaaacatgaataagcgcttatatactgaagcctgggacaatgacaagaaaactattcatgtcatgcctgatacaccagaaatcatgttagccaaactcaaccgaataaactacagtgataaactctataaacttgctttggaagagtccaagaaggaaggctatgacttgcgtctggatgccattccaatccaagcagccaaggcttcaagagatattgctagtgattacaagtacaaggaaggctaccgcaaacagcttggccaccatattggggcccggaacattaaggatgacccgaagatgatgtggtccatccatgtggccaagatccagagtgacagggagtacaagaaggagtttgagaagtggaagaccaagttcagcagcccagtggacatgctgggggtggtgctggccaagaagtgtcagatccttgtaagcgacatagactacaagcatcccctgcatgaatggacctgcctgcctgatcagaatgacgtcattcaggctcggaaggcctatgacctgcagagtgatgctatttacaaatctgatcttgagtggctgagaggcataggatgggttcccattggctctgtagaggtcgagaaagtgaagagagctggagaaatcctgagtgacaggaagtatcgccagcctgcagaccagctcaaattcacatgcattaccgacactccggaaattgtcctagcaaagaataatgccctgacaatgagcaagcatttatacacagaagcttgggatgctgacaaaacctccatccacgtgatgccagacaccccagatatcctgctggccaagagtaattctgccaatatcagccaaaaactttacaccaagggatgggatgaatcaaagatgaaggactatgatctgagagcagatgctatttccatcaaaagtgccaaggcctccagggacatcgccagtgactacaaatacaaggaagcctatgagaaacagaaaggccaccacattggagcccagagcattgaagatgatcccaagattatgtgtgccatacatgcaggaaaaattcaaagtgaaagggagtacaagaaggaattccaaaagtggaaaaccaagttctctagcccagtggacatgttaagcatcttgctggccaagaaatgtcagactttggtcactgacattgattatcgcaattacctgcatgaatggacatgcatgccggatcaaaacgacattatccaagcaaaaaaggcctatgacctgcagagtgatagtgtgtataaggcagacctggagtggctgcgtggcatcggctggatgccagaaggctcagtggaaatgaacagagtgaaggttgctcaagacctcgtgaatgaaagactctataggacacgtccagaagctttgtcattcaccagcattgtcgacactccagaagttgtcttggcaaaagccaattctctgcaaataagtgagaaactgtatcaggaagcctggaataaagataaaagcaacatcaccattccttctgatactccggagatgctgcaggcccacatcaatgccttgcaaatcagcaataaactctaccaaaaagactggaatgacgccaagcagaaaggctatgacataagggcagatgccattgaaatcaagcacgccaaggcctccagagaaattgccagtgagtacaaatacaaagaaggttaccgtaagcaactgggccaccacatgggtttccgcaccctacaagatgaccccaagtcagtatgggctatacatgctgccaagatccagagtgacagagaatataagaaagcttatgagaagtctaaaggaattcacaacacaccgttggacatgatgtcaattgttcaagccaagaaatgccaggtcctggttagcgacattgattatcgcaattatctgcaccagtggacgtgtctgccagatcagaacgatgtgatccaggccaagaaagcctacgacctgcagagcgataacttgtacaagtcagacctggaatggctgaagggtattggatggctgccagagggttctgtggaagtgatgagagtgaagaatgcccagaatctcttgaatgaaaggctgtatcgtataaagcctgaggccctcaaattcaccagcattgttgacaccccggaagtaatccaggcaaagatcaatgctgtacagatcagtgagccattgtatcgcgatgcctgggagaaagagaaggctaatgtgaacgtgccagctgacactcccctgatgctgcaatccaaaatcaatgccctgcagatcagcaataaacgctatcagcaagcttgggaagatgtcaagatgactggttatgacctgcgagcagatgccattgggatccagcatgccaaggcttccagggatattgccagtgactatctgtacaaaactgcttatgagaaacagaaaggccattacattggctgtcgcagcgccaaggaagaccctaaactggtttgggcagcaaatgtgttgaagatgcagaatgacaggctgtacaaaaaggcctacaacgaccacaaagccaagatctccatccctgtggacatggtgtccatcagcgctgccaaagaaggtcaggcactggcaagtgatgtggactatcgccattacctgcaccactggtcttgctttcccgaccagaatgatgtgatccaagccaggaaagcctacgacctacagagcgacagtgtgtataaggcagacctggagtggctgcgtggcatcggctggatgccagaaggctcagtggaaatgaacagagtgaaggttgctcaagacctcgtgaatgaaagactctataggacacgtccagaagctttgtcattcaccagcattgtcgacactccagaagttgtcttggcaaaagccaattctctgcaaataagtgagaaactgtatcaggaagcctggaataaagataaaagcaacatcaccattccttctgatactccggagatgctgcaggcccacatcaatgccttgcaaatcagcaataaactctaccaaaaagactggaatgacaccaagcagaaaggctatgacataagggcagatgccattgaaatcaagcacgccaaggcctccagagaaattgccagtgagtacaaatacaaagaaggttaccgtaagcaactgggccaccacatgggtttccgcaccctacaagatgaccccaagtcagtatgggctatacatgctgccaagatccagagtgacagagaatataagaaagcttatgagaagtctaaaggaattcacaacacaccgttggacatgatgtcaattgttcaagccaagaaatgccaggtcctggttagcgacattgattatcgcaattatctgcaccagtggacgtgtctgccagatcagaacgatgtgatccaggccaagaaagcctacgacctgcagagcgataacttgtacaagtcagacctggaatggctgaagggtattggatggttgccagagggttctgtggaagtgatgagagtgaagaatgcccagaatctcttgaatgaaaggctgtatcgtataaagcctgaggccctcaaattcaccagcattgttgacaccccggaagtaatccaggcaaagatcaatgctgtacagatcagtgagccattgtatcgcaatgcctgggagaaagagaaggctaatgtgaacgtgccagctgacactcccctgatgctgcaatccaaaatcaatgctctgcagatcagcaataaacgctatcagcaagcttgggaagatgtcaagatgactggttatgacctgcgagcagatgccattgggatccagcatgccaaggcttccagggatattgccagtgattatctgtacaaaactgcttatgagaaacagaaaggccattacattggctgtcgcagcgccaaggaagaccctaaactggtttgggcagcaaatgtgttgaagatgcagaatgacaggctgtacaaaaaggcctacaacgaccacaaagccaagatctccatccctgtggacatggtgtccatcagcgctgccaaagaaggtcaggcactggcaagtgatgtggactatcgccattacctgcaccactggtcttgctttcccgaccagaatgatgtgatccaagccaggaaagcctacgacctacagagcgacagtgtgtataaggcagacctggagtggctgcgtggcatcggctggatgccagaaggctcagtggaaatgaacagagtgaaggttgctcaagacctcgtgaatgaaagactctataggacacgtccagaagctttgtcattcaccagcattgtcgacactccagaagttgtcttggcaaaagccaattctctgcaaataagtgagaaactgtatcaggaagcctggaataaagataaaagcaacatcaccattccttctgatactccggagatgctgcaggcccacatcaatgccttgcaaatcagcaataaactctaccaaaaagactggaatgacaccaagcagaaaggctatgacataagggcagatgccattgaaatcaagcacgccaaggcctccagagaaattgccagtgagtacaaatacaaagaaggttaccgtaagcaactgggccaccacatgggtttccgcaccctacaagatgaccccaagtcagtatgggctatacatgctgccaagatccagagtgacagagaatataagaaagcttatgagaagtctaaaggaattcacaacacaccgttggacatgatgtcaattgttcaagccaagaaatgccaggtcctggttagcgacattgattatcgcaattatctgcaccagtggacgtgtctgccagatcagaacgatgtgatccaggccaagaaagcctacgacctgcagagcgataacttgtacaagtcagacctggaatggctgaagggtattggatggttgccagagggttctgtggaagtgatgagagtgaagaatgcccagaatctcttgaatgaaaggctgtatcgtataaagcctgaggccctcaaattcaccagcattgttgacaccccggaagtaatccaggcaaagatcaatgctgtacagatcagtgagccattgtatcgcgatgcctgggagaaagagaaggctaatgtgaacgtgccagctgacactcccctgatgctgcaatccaaaatcaatgccctgcagatcagcaataaacgctatcagcaagcttgggaagatgtcaagatgactggttatgacctgcgagcagatgccattgggatccagcatgccaaggcttccagggatattgccagtgactatctgtacaaaactgcttatgagaaacagaaaggccattacattggctgtcgcagcgccaaggaagaccctaaactggtttgggcagcaaatgtgttgaagatgcagaatgacaggctgtacaaaaaggcctacaacgaccacaaagccaagatctccatccctgtggacatggtgtccatcagcgctgccaaagaaggtcaggcactggcaagtgatgtggactatcgccattacctgcaccgctggtcttgctttcccgaccagaatgatgtgatccaagccaggaaagcctacgacctacagagcgacgccctctacaaggctgacttggagtggttgcgtggcattggctggatgccccaagggtctcctgaagtgttgagagtcaaaaacgcccagaatatcttttgtgacagtgtctatcggacgcctgtggtgaaccttaagtacacaagcattgttgacacacctgaagtggtccttgctaaatcaaatgctgaaaatattagtattccaaagtacagagaggtttgggacaaggataaaacttcaatacacataatgccagatactccagaaattaatctcgctagagcaaatgctcttaatgtgagcaataaactttaccgtgagggctgggatgaaatgaaggcgggctgtgatgtccggctggatgccatccccatccaggctgccaaggcctccagggagattgccagtgactataaatataagcttgaccatgagaagcagaagggacactacgtgggcaccctcacagccagggatgacaacaagatccgctgggccctcatagctgacaagctccagaatgaacgagagtaccggctggactgggccaaatggaaggccaagatccagagccctgtggacatgctttccatcctgcactctaaaaattcccaggctctggtcagtgacatggattaccgcaattacctgcaccagtggacctgcatgcccgaccagaacgatgtgattcaggccaagaaggcctacgaactgcagagcgataatgtttacaaggctgacttggaatggttgcgtggaattgggtggatgccaaatgactccgtgtccgtcaatcatgccaaacatgccgcggacatcttcagtgagaaaaaatatcgcacaaaaatagaaactctcaactttacgcctgtggatgacagagttgattatgtgacagcgaaacaaagtggcgagatcctcgatgatattaaataccggaaagactggaatgccaccaaatcaaagtacaccctcacagaaacccccctgctgcacactgcccaggaggctgctaggatactggaccagtatctctacaaggaaggctgggagagacaaaaagccacaggttacattttgcctccagatgctgtgccatttgttcatgcccatcactgcaatgacgttcagagtgagctgaaatacaaagctgaacatgtgaagcaaaaaggtcattatgttggtgtcccgacgatgagagatgatcctaagctggtttggtttgagcatgcaggccagattcagaatgagagactatacaaagaggactatcacaaaacaaaggccaaaatcaatatacctgctgatatggtgtcagtcttggccgccaagcaggggcagacccttgtcagtgatattgattatcgtaattacttgcaccaatggatgtgtcatcctgaccagaacgatgttattcaggcaagaaaggcctatgacctacagagtgataatgtctacagagctgacctggagtggctccgaggcattggctggatcccactggattctgtggaccatgtaagggttactaagaaccaggaaatgatgagtcagatcaaatataagaaaaatgcccttgaaaactatcctaactttagaagtgtggtggatcctccagagattgttttagccaagattaattctgtcaatcaaagtgatgtaaaatataaagaaacatttaataaagcaaagggcaaatatacgttttcaccagatacaccacatatctcccactccaaagacatgggaaaactctacagtactatactgtataaaggggcgtgggagggcaccaaggcctatggctacaccctggatgagcgctacattcccattgttggagccaagcatgctgatctggtgaacagtgagcttaaatacaaagagacatatgagaagcagaaaggtcactacctggctggaaaagtgatcggtgaattccctggtgtggttcactgtctggatttccaaaagatgaggagtgcgttgaactacagaaaacattatgaggataccaaagcaaatgttcatatccccaatgacatgatgaatcacgtgctggctaaaaggtgccagtacatcctcagtgacctggagtatcgacactatttccaccagtggacgtctcttctggaagaacccaatgttatacgcgtccgaaacgcccaggagatcttgagtgataatgtgtataaagatgacctgaattggttgaaaggcattggttgctacgtttgggatacaccccaaatcctccatgccaagaaatcatacgaccttcagagtcagctacaatatacagcagcaggtaaagaaaatctacaaaactataatctggtcacagacacgcccctctatgtgactgctgttcagagtggcattaatgccagtgaggtaaaatataaagaaaattatcatcagattaaggacaaatacacaacagttctagaaacagtggattatgacagaaccagaaacctgaagaatctttacagcagtaacctgtacaaggaggcctgggatagagtgaaagccaccagctacatcctgccttccagcaccttgtccctgacacacgccaagaaccagaagcatctggccagccatatcaaatatcgggaagaatatgaaaagttcaaagctctttatacgttaccaagaagtgttgacgatgatccgaacacagcacggtgcctccgagttggcaagcttaacatcgatcgcctgtacagatcagtttatgaaaagaacaagatgaaaatccacatcgtgcccgacatggtagagatggttactgccaaggattcccagaagaaagtcagtgagattgattaccgcctgcgcctccacgaatggatttgccaccccgacttgcaagtcaatgatcacgtcaggaaagtcacagatcagatcagcgatattgtatacaaggatgacctcaactggctgaaaggcattggttgctacgtctgggacactcctgaaatcctccatgccaagcatgcttatgatctacgtgatgatatcaagtataaagctcacatgttgaaaacaaggaatgactacaagcttgtcacagatacaccagtctacgtgcaggctgtcaaaagtgggaaacagctaagtgacgctgtctaccactatgactatgtgcacagtgtcagaggcaaagtggctccaactaccaaaaccgtggatctggaccgggcccttcatgcatacaagctccagagttcgaatctatacaaaaccagcctgcgcaccctgcccactggatatagacttccaggtgacactcctcacttcaaacacatcaaggacacccgttacatgagcagttatttcaagtacaaagaagcctatgaacacaccaaggcatatgggtatacacttggccccaaagatgttccatttgtccacgtccggagagtcaacaatgttaccagcgagagactgtatcgggaattgtaccacaaactgaaagacaagatccatacaactcccgatacccctgagatccgccaagtcaagaagacacaagaggctgtcagtgagttgatctacaaatcagacttcttcaagatgcagggccacatgatctctctgccatacacaccccaagtgatccattgccgctatgtgggagacatcaccagtgatattaaatacaaagaggacttgcaggtcctgaagggatttggctgcttcctgtatgacactcctgacatggtccgctcccggcacctgcggaagctctggtctaattacctatacactgataaggcaaggaagatgcgagacaaatacaaagtggtgcttgacactccagaatacagaaaagtgcaagaactgaagacacatctgagtgagctggtctacagagctgcaggcaagaagcagaagtcaatctttacttcagttcctgatactcctgatcttttaagagccaagcgagggcagaagcttcagagtcagtatctgtatgttgaacttgccaccaaagagagaccccatcatcacgctggaaaccagaccacagccttgaagcatgctaaagacgtgaaggacatggtcagtgagaaaaagtacaagattcaatatgaaaagatgaaagacaagtacactccggttccagatacgccaatcctcatcagagccaagagggcttactggaatgccagtgatctacgctacaaagaaacatttcaaaagaccaaagggaaataccacacggtgaaagatgccctagacattgtctatcatcgcaaagtcacagatgacatcagtaaaataaaatacaaggagaactacatgagccagttgggtatctggaggtccattcctgatcgtccagagcatttccaccaccgagcagtcactgacacagtcagtgatgtaaaatataaagaagacttgacttggcttaaaggcattggttgctatgcctatgatacccctgatttcactctggctgaaaagaacaagactctctacagcaagtataagtataaagaagtatttgaaaggacaaagtcagatttcaagtatgttgccgactctccgatcaataggcatttcaagtatgcaactcaattgatgaatgagaaaaaatacagagctgattatgagcagcggaaagataaataccacctggtagtcgatgagcctagacatctgctggctaagaccgcaggcgaccagatcagtcagatcaaatacaggaaaaactatgaaaaatcaaaggacaaatttacctcaattgtggatactccagaacacctgcgtactacaaaagtcaacaaacaaatcagcgatatcctttataaattggaatacaacaaggccaaacccagaggctacaccacaatccacgacacacccatgttgctgcatgtccgcaaggttaaagatgaagtcagtgatctgaaatacaaagaagtataccaaagaaataaatccaactgcaccattgagccagatgctgttcatatcaaagcagccaaggacgcctacaaagtcaacaccaatctggactataagaaacagtacgaagccaacaaagcccactggaagtggactcctgaccgaccggacttcctccaggctgccaagtcatccctgcagcaaagcgattttgaatataagctggaccgggagttcctcaagggttgcaagctttctgtcactgatgacaaaaacacggtgctcgccctcaggaatactttaatagaaagtgatctgaaatacaaagagaaacatgtcaaggaaagaggaacctgccatgccgtacctgacacgcctcagatcctgctggcgaagactgtcagcaacctggtgtctgagaacaagtacaaggaccatgtcaagaagcacttggcacagggctcatacacaacactaccagagacccgggacactgttcacgtcaaggaagtgaccaagcatgtcagtgatacaaattacaaaaagaagtttgtcaaggagaaaggaaaatccaactactccatcatgctggagccaccagaggtgaaacatgctatggaagtggccaagaagcaaagtgatgtcgcttacagaaaagatgccaaagagaacctgcattacaccacagtggctgatcgaccagacatcaagaaggccacacaggcagccaaacaggccagtgaggtggagtacagagccaagcaccgcaaggaaggcagccatggcttaagcatgctcggtcgcccagacatagaaatggccaagaaggcagccaagctgagcagccaggttaaataccgagaaaatttcgataaagaaaagggcaagacaccaaaatacaatccaaaagacagccagctctacaaagtcatgaaagatgctaataatcttgcaagtgaggttaaatacaaggctgacctgaagaaacttcacaaacccgtgactgacatgaaggagtctctgatcatgaatcatgtcctgaatacaagccaacttgccagttcttaccagtacaagaagaagtatgagaagagtaaaggccactaccacaccatacccgataatctggagcagcttcacctaaaagaggccacagaattacagagtatagtgaaatacaaagaaaagtatgaaaaggaacgaggaaaacccatgctggactttgaaacaccaacgtacatcactgccaaagagtctcagcagatgcagagtgggaaagaatataggaaagattatgaagagtccattaaaggcagaaacctgactggcctggaggtcacgccagctttgttacatgtcaaatatgcaactaaaatagcaagcgagaaagagtacaggaaagatctagaggaaagcatccgtgggaagggcctcactgaaatggaagatacacctgacatgctaagagcaaagaatgccactcaaatcctcaatgagaaagaatataagcgagacctggaactggaagtcaaaggaagaggcctgaatgccatggccaatgaaactccggattttatgagggccaggaatgctactgatattgccagtcagattaagtataagcaatcagcagaaatggagaaagccaatttcacttctgtggttgatactccagagatcattcatgcccaacaagtcaagaatctttcaagccagaaaaagtacaaggaagatgctgagaagtccatgtcgtattatgagactgttttggacaccccagagatacagagagtccgggagaaccaaaagaacttcagccttctccaataccagtgtgaccttaaaaacagtaaaggaaaaattacagttgttcaagacacgccagaaatactgcgtgtaaaagaaaatcagaagaatttcagctcggttttatataaagaggatgtctcaccaggaacggctatcggaaagacacctgagatgatgagagtgaaacaaacacaggaccacattagctcggtgaagtataaggaagcaataggacaaggaactccaatccctgacctgcctgaagtgaaacgtgtgaaggagacgcagaagcacattagctcggttatgtacaaagaaaacttgggaacaggcattccaaccactgtgactccagagattgagagagtcaaacgcaatcaagagaactttagctcggtgttatacaaagaaaacatgggcaagggaacccctctacctgtcactcctgagatggagagagtcaaacacaatcaagaaaatattagctcggttttgtacaaagaaaatgtggggaaagccaccgcaacccctgtcactcctgagatgcagagagtcaaacgcaatcaagaaaacattagctcggttctttattctgatagtttccggaaacaaatacaaggcaaagctgcctatgtattggatacccccgagatgagacgggtgagggagacccaacggcacatctcaacggtgaaatatcatgaagactttgagaaacacaagggttgcttcacaccagtggtgacagatcctatcactgaacgagtaaagaagaacatgcaggacttcagtgacattaactaccgaggtattcagaggaaagtggtagaaatggaacaaaaacggaatgaccaagatcaggagactattacaggtttacgtgtctggcgtactaatcctggttcggtttttgactatgatccagcagaagacaacatccagtcccgaagcttacacatgattaatgtccaagctcagcgccggagccgggagcagtcacgatctgccagtgcactaagcatcagtgggggtgaggagaagtctgagcattcagaagcaccagaccaccacctttcgacttacagcgacgggggtgtctttgcagtctcaacagcttacaaacatgcaaaaaccacagagctcccacaacaacgatcatcttcagttgctacccaacagacaacggtatcttccatcccatctcatccatctactgctggaaaaatcttccgtgccatgtatgactatatggctgctgatgcagatgaggtgtccttcaaggatggagatgccatcataaatgttcaagcaattgatgaaggctggatgtatggcactgtgcagaggactggcaggaccggaatgctcccagccaactacgttgaagctatttaggcatttcaaagcatcacacttgtctgcaggacttacagatcctgcagtcaatgtttcggtttagactctccactgttacctaagttctcaagctgcctatggtttttctgtgtcaatgtgatttatggtagtaccatcctttctcctttgggttttaaaataagttgcagaacagacactttaaaagcttctgcaatattatttctgtgcctagagtctttctccattataaacatgttttaacattatttcttttctaaaacagggattttgaatatgccaaacacattaaaggaaaaatagcagagatgttcaccttttccttgctgattgctaatgcttattatttctaattcagttctgaagttataaacttataatcaatacaaaccagcaactaataaaacctctaattctgcaa

SEQ ID NO: 267324 - DNA, 7878 bp, Artificial Sequence
  derived and/or modified sequence
atgcccgatacacctgagataaacttggcacgtgctaatgcactcaatgtgtcgaacaagttgtaccgggaaggttgggatgagatgaaggccggatgtgacgttcgcttagacgccatcccaatccaagcagccaaagctagcagagagatcgcgtccgactataagtataaattggatcacgaaaaacaaaaaggccattatgttggaacattgacagctcgagatgataataagatcagatgggcattgattgccgacaagctccagaacgagcgtgagtacaggctagactgggcaaagtggaaagccaagatccagagcccggtggatatgctgtccatcctccacagcaaaaattctcaggcactggtgtccgacatggactaccgaaactatctccaccaatggacctgcatgcccgaccagaacgacgtgattcaagccaaaaaggcatacgagcttcagtccgataacgtctacaaggctgaccttgagtggcttcgcggtattggctggatgccgaatgattcggtgagcgtcaatcatgcgaaacacgcagccgatattttcagcgaaaagaaataccggaccaagattgagaccctaaattttaccccggtggatgatcgcgtcgactacgtgactgccaaacagtctggagagattctggatgacattaaatataggaaggattggaatgcaaccaaaagcaaatacaccctgactgagactcccctgctgcacaccgcccaggaggctgcccgaatccttgaccaatacctgtacaaggagggctgggagcgacagaaggccacaggttatattctaccacccgacgccgtaccatttgtgcatgctcaccactgcaatgacgttcaaagcgagctcaagtataaggcagagcacgtgaaacagaaaggccattatgtaggcgtcccgactatgagggatgaccccaagttggtctggttcgagcacgccggtcagattcagaacgagcgcctgtacaaagaagactaccataaaactaaggctaaaattaacatcccagctgacatggtgtccgttctggcagccaagcagggtcagacattggttagcgacattgattacagaaattatcttcatcagtggatgtgccaccccgaccagaatgacgtgattcaggccaggaaagcctatgatctgcaatccgataacgtgtacagggccgacctggagtggctcagaggtattggttggatccctttggattcagtggaccacgtaagagtgaccaagaatcaggagatgatgtctcagattaagtataagaagaatgctcttgaaaactatccaaacttccgatcagtcgtggatccccctgaaatcgtgctcgccaagattaatagcgtgaaccagagtgatgtgaaatataaggagaccttcaataaggctaagggaaagtacaccttttcaccggacacacctcatatttcccactccaaggacatgggcaaactgtattccaccattctgtacaaaggggcttgggaggggacaaaggcatatggttacaccttggatgagcgctatattccaattgttggggcaaaacacgctgacctagttaatagtgaattaaaatataaggaaacctacgaaaagcagaagggacattacttagcaggcaaagtaattggcgaatttcccggagtagtgcattgcctagatttccaaaagatgagatcagctcttaattaccggaagcattatgaggataccaaagccaacgtgcacatacctaacgacatgatgaaccatgtgttagccaaacggtgccagtacattcttagtgacctcgaatatcggcattacttccaccagtggacgtctctcctggaagaacctaatgtgatccgggtgaggaatgcccaggagatattgagtgataatgtgtataaggacgatctgaattggctcaaggggatcggctgctacgtttgggacacgcctcaaattttgcatgccaagaagtcctatgacctgcagagtcaacttcaatacacggctgcaggaaaggagaacctccagaattataacctggtgacagacacccccttatacgtaactgctgtacagtccggaattaacgcctcagaggtgaagtataaggaaaattaccatcagatcaaggacaaatatacaactgtgctggagaccgttgattatgaccgcactagaaacctgaaaaatctgtacagtagcaatttgtataaagaggcttgggatcgagttaaagctacatcctatatcctcccatcgagcactttatctctgacacatgctaaaaatcagaagcacctcgcctcgcatattaagtatagagaagagtatgaaaagttcaaagctctatatactctgcccaggtccgtcgatgacgaccctaacacagctcggtgtctgagagtgggaaaactgaatatagaccgcctctatcggagtgtgtacgaaaagaacaagatgaagatccacatcgtgcctgatatggtggagatggtaaccgccaaggacagccagaagaaagtctcagagattgactaccggctgaggctccacgaatggatctgccatccggaccttcaagttaatgaccacgtcagaaaagtaaccgaccagatctctgacattgtgtacaaggatgacttgaactggctgaagggaattggctgttacgtgtgggatacacctgagatcctgcacgcaaaacatgcctatgacctccgtgacgatatcaagtataaggctcacatgttgaagacaaggaacgactacaagctggtaaccgacacacctgtgtacgtgcaggccgtcaaatctggcaagcagttgagcgatgctgtgtaccattatgactatgtgcactcggtgaggggtaaggtggcgccaacaactaaaactgtggatctcgatcgggcactgcacgcatacaaattgcaatcttccaatctgtacaagaccagcctgagaacactgccgaccggttatcggctgcctggagacactcctcactttaagcatatcaaggacacccgatacatgtcttcctattttaagtacaaagaagcatacgaacacaccaaggcttacgggtatacattggggccaaaggacgtccccttcgtgcacgtgagaagggttaacaacgtcacttccgagcggctttacagggaactctatcacaaactgaaagacaagattcatacaacacctgacactccagaaattcgacaagtgaagaagacccaggaagccgtgtccgagcttatctataagagtgacttcttcaagatgcaaggccacatgatttcactgccctatactcctcaggtgattcattgcaggtatgttggcgatatcacgtccgacatcaaatacaaagaagacctccaggtgttgaagggttttgggtgctttctgtacgatacccctgacatggtcaggtctcgccacctgagaaaattatggtccaattacctttacactgacaaagctcggaagatgcgagacaagtataaggtcgtgctggacacacccgaataccgcaaggttcaggagctgaaaacccacctcagcgaactggtgtatcgagccgctggaaagaagcaaaaatcaatttttacttctgtgcccgataccccagacctgttaagggccaaaagaggacaaaagctgcagtcccagtacctgtatgtcgaactcgccactaaggagagaccccatcaccatgctggtaatcagacaaccgctctgaagcatgccaaggacgtaaaagacatggtgtccgagaagaaatacaaaatccagtatgaaaagatgaaagacaagtatacgcctgtgcccgacacccccattctgataagagccaaacgggcttattggaacgcatcagatcttagatataaggagacatttcaaaaaacaaaaggtaaataccacaccgtgaaggatgctctcgatattgtgtaccaccgtaaagtgacggacgatatcagcaaaatcaagtacaaagaaaactatatgtctcagctgggaatctggcgcagcatccctgacaggccggagcactttcaccaccgtgccgttaccgatactgtgagcgatgtaaaatacaaggaagatttaacctggctcaaaggcatcggctgttatgcctatgacacacctgacttcactctggccgaaaagaacaagaccctgtattccaaatacaaatataaagaagtgtttgaacgcacaaagagtgactttaaatacgtggctgattcgcctatcaaccgccacttcaagtatgccacacaactgatgaatgagaaaaagtatagggccgattacgagcagcgcaaggataagtaccacttggtagttgatgagcccagacacctactggcaaagacagccggagaccagatttcacagatcaagtatcgcaagaattatgaaaagagtaaggataagttcacaagtatcgtggacactccagagcacctgaggactacgaaagtaaataaacagatctcggatatcttatacaaactggagtacaataaggctaagccgcgtggctacacaactattcatgatacacctatgctcctgcatgtgaggaaggtgaaggatgaggtttctgacctaaagtataaggaggtgtatcaaaggaataaatcaaactgcaccatcgaacccgatgctgtgcacatcaaggcagcaaaggatgcctataaggttaataccaacctggactataagaaacagtatgaggcaaataaggcgcattggaagtggacaccagataggcccgatttcctgcaggccgctaagagctccttgcagcagtccgattttgaatataaactggatcgtgaattcctgaaaggatgcaagctgagcgttaccgatgataaaaacaccgttctcgccctgagaaatactcttattgagagcgatcttaagtacaaggaaaagcacgtgaaggagcggggaacctgtcacgctgtccctgacaccccccagatactgttggccaagaccgtctctaacctggtatccgagaacaaatacaaggatcatgtcaaaaaacacctagcccagggctcctacaccacactacctgaaactcgggacacagttcatgttaaggaggtgaccaagcacgtttccgataccaactataagaagaaattcgtgaaggagaagggcaagtctaactactctataatgctcgagccacccgaggttaagcacgcaatggaagtggctaaaaagcagtccgacgttgcctatcgcaaggatgccaaggagaatctgcattatactacagtggccgacagaccggatattaaaaaggctacccaggctgctaagcaggccagtgaggttgaatacagagctaagcaccgaaaggaaggctcccacgggctgtccatgctgggtagaccagacatcgagatggccaaaaaagctgctaagctctcatctcaggtcaagtacagagaaaactttgacaaggagaaagggaagacacccaagtataaccccaaagattcccaactctataaggtcatgaaggacgccaataacctcgcctctgaagtgaagtacaaagctgatctgaaaaagctgcataagcctgtgacagacatgaaagaaagccttattatgaatcatgtcctcaacacctctcagctggcctcttcttatcagtataagaaaaaatacgaaaaaagcaagggacactatcacaccattcctgacaacctggagcagctgcacttgaaggaagctactgaactgcagtccattgtgaaatacaaggagaaatatgagaaagaacgtggtaaacctatgttggattttgagactcctacttatatcacagctaaggaatcccaacagatgcaatccgggaaagaataccgcaaggattatgaagagtccataaaggggagaaacctaacaggccttgaggttacccccgcattgctacacgtgaagtatgccaccaagatcgcctcagagaaggagtatagaaaagacttggaagaatccattcgtgggaaagggttgaccgaaatggaggacacacccgacatgctgcgcgctaagaacgctacccagatcttgaatgagaaagagtacaagagggatctagagctggaagtgaagggacgtggcctcaatgccatggcaaatgaaacacctgactttatgcgggcacgaaacgccactgacattgcttctcagatcaagtataaacagagcgctgaaatggagaaggccaactttacttcggtggtcgacactccagagattatccatgctcagcaggtcaagaatctctcctcccaaaaaaaatataaggaagacgcagaaaaatctatgtcttactatgagacagtgcttgacacccccgagatccaaagagtacgggaaaatcagaagaatttcagcttgcttcagtaccagtgcgacttgaagaacagcaagggcaagattacagtggtgcaggacacacccgaaatcctgcgggtgaaagagaaccaaaagaatttctcaagcgttttatataaagaggatgtcagtcctgggaccgccatcggaaaaactccagaaatgatgcgagtcaaacagacacaggaccatatctcttccgtgaaatacaaggaagcaattggccaggggacaccaattcccgatctgcccgaagtaaagcgagtcaaggagacacagaagcacattagttcggtgatgtataaagagaatctgggaaccgggattccaacaacagttacacccgagattgagagggtgaagcgcaaccaggaaaatttttccagcgtgttatacaaggagaatatgggcaagggtaccccactgcctgtgactcctgagatggaaagggtgaaacacaaccaggagaacatttctagtgtcctgtataaggagaatgttggaaaagctaccgccacccccgtgacacccgagatgcagcgcgtcaaaaggaatcaggaaaacatctctagtgtcctctactctgacagcttccgcaaacagattcaagggaaagctgcctacgtgttggacaccccagagatgaggcgcgtccgtgaaactcagagacacataagcacagtgaaataccatgaggatttcgaaaagcataagggctgcttcacgcctgtggttactgacccaatcaccgaacgcgtgaagaaaaacatgcaggattttagcgatataaattaccggggtattcaaaggaaggtggtggaaatggagcagaagcgtaatgaccaggatcaggagactattacgggcctgcgcgtctggcgcaccaacccagggagcgtgttcgactatgatccagccgaggacaatatccaatcccggtctcttcacatgattaatgtgcaagcccagagaagaagtcgagagcagagtcgctcagcttctgctctgagcatctcgggcggagaggagaaatcagagcactcggaagcccctgatcatcacctgtcaacctattctgacggaggagtgtttgctgtgtcaacagcctataagcacgcaaagacaacggaactcccccagcaacggagttcatcagtagccacccagcagacaactgtgtcctcaattccatcccatccctctaccgccggtaaaatatttagggcaatgtatgattacatggcagccgacgccgacgaggtgtcttttaaggatggggatgctattatcaatgtgcaggccatcgacgaggggtggatgtacgggacagtccagagaaccggaagaacaggcatgctgcccgcaaactatgtggaggctatttac

SEQ ID NO: 267325 - DNA, 7878 bp, Artificial Sequence
  derived and/or modified sequence
atgcccgacacccccgagatcaacctggccagagccaacgccctgaacgtgagcaacaagctgtacagagagggctgggacgagatgaaggccggctgcgacgtgagactggacgccatccccatccaggccgccaaggccagcagagagatcgccagcgactacaagtacaagctggaccacgagaagcagaagggccactacgtgggcaccctgaccgccagagacgacaacaagatcagatgggccctgatcgccgacaagctgcagaacgagagagagtacagactggactgggccaagtggaaggccaagatccagagccccgtggacatgctgagcatcctgcacagcaagaacagccaggccctggtgagcgacatggactacagaaactacctgcaccagtggacctgcatgcccgaccagaacgacgtgatccaggccaagaaggcctacgagctgcagagcgacaacgtgtacaaggccgacctggagtggctgagaggcatcggctggatgcccaacgacagcgtgagcgtgaaccacgccaagcacgccgccgacatcttcagcgagaagaagtacagaaccaagatcgagaccctgaacttcacccccgtggacgacagagtggactacgtgaccgccaagcagagcggcgagatcctggacgacatcaagtacagaaaggactggaacgccaccaagagcaagtacaccctgaccgagacccccctgctgcacaccgcccaggaggccgccagaatcctggaccagtacctgtacaaggagggctgggagagacagaaggccaccggctacatcctgccccccgacgccgtgcccttcgtgcacgcccaccactgcaacgacgtgcagagcgagctgaagtacaaggccgagcacgtgaagcagaagggccactacgtgggcgtgcccaccatgagagacgaccccaagctggtgtggttcgagcacgccggccagatccagaacgagagactgtacaaggaggactaccacaagaccaaggccaagatcaacatccccgccgacatggtgagcgtgctggccgccaagcagggccagaccctggtgagcgacatcgactacagaaactacctgcaccagtggatgtgccaccccgaccagaacgacgtgatccaggccagaaaggcctacgacctgcagagcgacaacgtgtacagagccgacctggagtggctgagaggcatcggctggatccccctggacagcgtggaccacgtgagagtgaccaagaaccaggagatgatgagccagatcaagtacaagaagaacgccctggagaactaccccaacttcagaagcgtggtggacccccccgagatcgtgctggccaagatcaacagcgtgaaccagagcgacgtgaagtacaaggagaccttcaacaaggccaagggcaagtacaccttcagccccgacaccccccacatcagccacagcaaggacatgggcaagctgtacagcaccatcctgtacaagggcgcctgggagggcaccaaggcctacggctacaccctggacgagagatacatccccatcgtgggcgccaagcacgccgacctggtgaacagcgagctgaagtacaaggagacctacgagaagcagaagggccactacctggccggcaaggtgatcggcgagttccccggcgtggtgcactgcctggacttccagaagatgagaagcgccctgaactacagaaagcactacgaggacaccaaggccaacgtgcacatccccaacgacatgatgaaccacgtgctggccaagagatgccagtacatcctgagcgacctggagtacagacactacttccaccagtggaccagcctgctggaggagcccaacgtgatcagagtgagaaacgcccaggagatcctgagcgacaacgtgtacaaggacgacctgaactggctgaagggcatcggctgctacgtgtgggacaccccccagatcctgcacgccaagaagagctacgacctgcagagccagctgcagtacaccgccgccggcaaggagaacctgcagaactacaacctggtgaccgacacccccctgtacgtgaccgccgtgcagagcggcatcaacgccagcgaggtgaagtacaaggagaactaccaccagatcaaggacaagtacaccaccgtgctggagaccgtggactacgacagaaccagaaacctgaagaacctgtacagcagcaacctgtacaaggaggcctgggacagagtgaaggccaccagctacatcctgcccagcagcaccctgagcctgacccacgccaagaaccagaagcacctggccagccacatcaagtacagagaggagtacgagaagttcaaggccctgtacaccctgcccagaagcgtggacgacgaccccaacaccgccagatgcctgagagtgggcaagctgaacatcgacagactgtacagaagcgtgtacgagaagaacaagatgaagatccacatcgtgcccgacatggtggagatggtgaccgccaaggacagccagaagaaggtgagcgagatcgactacagactgagactgcacgagtggatctgccaccccgacctgcaggtgaacgaccacgtgagaaaggtgaccgaccagatcagcgacatcgtgtacaaggacgacctgaactggctgaagggcatcggctgctacgtgtgggacacccccgagatcctgcacgccaagcacgcctacgacctgagagacgacatcaagtacaaggcccacatgctgaagaccagaaacgactacaagctggtgaccgacacccccgtgtacgtgcaggccgtgaagagcggcaagcagctgagcgacgccgtgtaccactacgactacgtgcacagcgtgagaggcaaggtggcccccaccaccaagaccgtggacctggacagagccctgcacgcctacaagctgcagagcagcaacctgtacaagaccagcctgagaaccctgcccaccggctacagactgcccggcgacaccccccacttcaagcacatcaaggacaccagatacatgagcagctacttcaagtacaaggaggcctacgagcacaccaaggcctacggctacaccctgggccccaaggacgtgcccttcgtgcacgtgagaagagtgaacaacgtgaccagcgagagactgtacagagagctgtaccacaagctgaaggacaagatccacaccacccccgacacccccgagatcagacaggtgaagaagacccaggaggccgtgagcgagctgatctacaagagcgacttcttcaagatgcagggccacatgatcagcctgccctacaccccccaggtgatccactgcagatacgtgggcgacatcaccagcgacatcaagtacaaggaggacctgcaggtgctgaagggcttcggctgcttcctgtacgacacccccgacatggtgagaagcagacacctgagaaagctgtggagcaactacctgtacaccgacaaggccagaaagatgagagacaagtacaaggtggtgctggacacccccgagtacagaaaggtgcaggagctgaagacccacctgagcgagctggtgtacagagccgccggcaagaagcagaagagcatcttcaccagcgtgcccgacacccccgacctgctgagagccaagagaggccagaagctgcagagccagtacctgtacgtggagctggccaccaaggagagaccccaccaccacgccggcaaccagaccaccgccctgaagcacgccaaggacgtgaaggacatggtgagcgagaagaagtacaagatccagtacgagaagatgaaggacaagtacacccccgtgcccgacacccccatcctgatcagagccaagagagcctactggaacgccagcgacctgagatacaaggagaccttccagaagaccaagggcaagtaccacaccgtgaaggacgccctggacatcgtgtaccacagaaaggtgaccgacgacatcagcaagatcaagtacaaggagaactacatgagccagctgggcatctggagaagcatccccgacagacccgagcacttccaccacagagccgtgaccgacaccgtgagcgacgtgaagtacaaggaggacctgacctggctgaagggcatcggctgctacgcctacgacacccccgacttcaccctggccgagaagaacaagaccctgtacagcaagtacaagtacaaggaggtgttcgagagaaccaagagcgacttcaagtacgtggccgacagccccatcaacagacacttcaagtacgccacccagctgatgaacgagaagaagtacagagccgactacgagcagagaaaggacaagtaccacctggtggtggacgagcccagacacctgctggccaagaccgccggcgaccagatcagccagatcaagtacagaaagaactacgagaagagcaaggacaagttcaccagcatcgtggacacccccgagcacctgagaaccaccaaggtgaacaagcagatcagcgacatcctgtacaagctggagtacaacaaggccaagcccagaggctacaccaccatccacgacacccccatgctgctgcacgtgagaaaggtgaaggacgaggtgagcgacctgaagtacaaggaggtgtaccagagaaacaagagcaactgcaccatcgagcccgacgccgtgcacatcaaggccgccaaggacgcctacaaggtgaacaccaacctggactacaagaagcagtacgaggccaacaaggcccactggaagtggacccccgacagacccgacttcctgcaggccgccaagagcagcctgcagcagagcgacttcgagtacaagctggacagagagttcctgaagggctgcaagctgagcgtgaccgacgacaagaacaccgtgctggccctgagaaacaccctgatcgagagcgacctgaagtacaaggagaagcacgtgaaggagagaggcacctgccacgccgtgcccgacaccccccagatcctgctggccaagaccgtgagcaacctggtgagcgagaacaagtacaaggaccacgtgaagaagcacctggcccagggcagctacaccaccctgcccgagaccagagacaccgtgcacgtgaaggaggtgaccaagcacgtgagcgacaccaactacaagaagaagttcgtgaaggagaagggcaagagcaactacagcatcatgctggagccccccgaggtgaagcacgccatggaggtggccaagaagcagagcgacgtggcctacagaaaggacgccaaggagaacctgcactacaccaccgtggccgacagacccgacatcaagaaggccacccaggccgccaagcaggccagcgaggtggagtacagagccaagcacagaaaggagggcagccacggcctgagcatgctgggcagacccgacatcgagatggccaagaaggccgccaagctgagcagccaggtgaagtacagagagaacttcgacaaggagaagggcaagacccccaagtacaaccccaaggacagccagctgtacaaggtgatgaaggacgccaacaacctggccagcgaggtgaagtacaaggccgacctgaagaagctgcacaagcccgtgaccgacatgaaggagagcctgatcatgaaccacgtgctgaacaccagccagctggccagcagctaccagtacaagaagaagtacgagaagagcaagggccactaccacaccatccccgacaacctggagcagctgcacctgaaggaggccaccgagctgcagagcatcgtgaagtacaaggagaagtacgagaaggagagaggcaagcccatgctggacttcgagacccccacctacatcaccgccaaggagagccagcagatgcagagcggcaaggagtacagaaaggactacgaggagagcatcaagggcagaaacctgaccggcctggaggtgacccccgccctgctgcacgtgaagtacgccaccaagatcgccagcgagaaggagtacagaaaggacctggaggagagcatcagaggcaagggcctgaccgagatggaggacacccccgacatgctgagagccaagaacgccacccagatcctgaacgagaaggagtacaagagagacctggagctggaggtgaagggcagaggcctgaacgccatggccaacgagacccccgacttcatgagagccagaaacgccaccgacatcgccagccagatcaagtacaagcagagcgccgagatggagaaggccaacttcaccagcgtggtggacacccccgagatcatccacgcccagcaggtgaagaacctgagcagccagaagaagtacaaggaggacgccgagaagagcatgagctactacgagaccgtgctggacacccccgagatccagagagtgagagagaaccagaagaacttcagcctgctgcagtaccagtgcgacctgaagaacagcaagggcaagatcaccgtggtgcaggacacccccgagatcctgagagtgaaggagaaccagaagaacttcagcagcgtgctgtacaaggaggacgtgagccccggcaccgccatcggcaagacccccgagatgatgagagtgaagcagacccaggaccacatcagcagcgtgaagtacaaggaggccatcggccagggcacccccatccccgacctgcccgaggtgaagagagtgaaggagacccagaagcacatcagcagcgtgatgtacaaggagaacctgggcaccggcatccccaccaccgtgacccccgagatcgagagagtgaagagaaaccaggagaacttcagcagcgtgctgtacaaggagaacatgggcaagggcacccccctgcccgtgacccccgagatggagagagtgaagcacaaccaggagaacatcagcagcgtgctgtacaaggagaacgtgggcaaggccaccgccacccccgtgacccccgagatgcagagagtgaagagaaaccaggagaacatcagcagcgtgctgtacagcgacagcttcagaaagcagatccagggcaaggccgcctacgtgctggacacccccgagatgagaagagtgagagagacccagagacacatcagcaccgtgaagtaccacgaggacttcgagaagcacaagggctgcttcacccccgtggtgaccgaccccatcaccgagagagtgaagaagaacatgcaggacttcagcgacatcaactacagaggcatccagagaaaggtggtggagatggagcagaagagaaacgaccaggaccaggagaccatcaccggcctgagagtgtggagaaccaaccccggcagcgtgttcgactacgaccccgccgaggacaacatccagagcagaagcctgcacatgatcaacgtgcaggcccagagaagaagcagagagcagagcagaagcgccagcgccctgagcatcagcggcggcgaggagaagagcgagcacagcgaggcccccgaccaccacctgagcacctacagcgacggcggcgtgttcgccgtgagcaccgcctacaagcacgccaagaccaccgagctgccccagcagagaagcagcagcgtggccacccagcagaccaccgtgagcagcatccccagccaccccagcaccgccggcaagatcttcagagccatgtacgactacatggccgccgacgccgacgaggtgagcttcaaggacggcgacgccatcatcaacgtgcaggccatcgacgagggctggatgtacggcaccgtgcagagaaccggcagaaccggcatgctgcccgccaactacgtggaggccatctag

SEQ ID NO: 267326 - protein, 392 aa, Artificial Sequence
  derived and/or modified sequence
MDNYSTGYDVKPPCLYQMPLSGQQSSIKVEDIQMHNYQQHSHLPPQSEEMMPHSGSVYYKPSSPPTPTTPGFQVQHSPMWDDPGSLHNFHQNYVATTHMIEQRKTPVSRLSLFSFKQSPPGTPVSSCQMRFDGPLHVPMNPEPAGSHHVVDGQTFAVPNPIRKPASMGFPGLQIGHASQLLDTQVPSPPSRGSPSNEGLCAVCGDNAACQHYGVRTCEGCKGFFKRTVQKNAKYVCLANKNCPVDKRRRNRCQYCRFQKCLAVGMVKEVVRTDSLKGRRGRLPSKPKSPQEPSPPSPPVSLISALVRAHVDSNPAMTSLDYSRFQANPDYQMSGDDTQHIQQFYDLLTGSMEIIRGWAEKIPGFADLPKADQDLLFESAFLELFVLRLAYRI

SEQ ID NO: 267327 - protein, 609 aa, Artificial Sequence
  derived and/or modified sequence
MNEDRRGELLTMPCVQAQYGSSPQGASPASQSYSYHSSGEYSSDFLTPEFVKFSMDLTNTEITATTSLPSFSTFMDNYSTGYDVKPPCLYQMPLSGQQSSIKVEDIQMHNYQQHSHLPPQSEEMMPHSGSVYYKPSSPPTPTTPGFQVQHSPMWDDPGSLHNFHQNYVATTHMIEQRKTPVSRLSLFSFKQSPPGTPVSSCQMRFDGPLHVPMNPEPAGSHHVVDGQTFAVPNPIRKPASMGFPGLQIGHASQLLDTQVPSPPSRGSPSNEGLCAVCGDNAACQHYGVRTCEGCKGFFKRTVQKNAKYVCLANKNCPVDKRRRNRCQYCRFQKCLAVGMVKEVVRTDSLKGRRGRLPSKPKSPQEPSPPSPPVSLISALVRAHVDSNPAMTSLDYSRFQANPDYQMSGDDTQHIQQFYDLLTGSMEIIRGWAEKIPGFADLPKADQDLLFESAFLELFVLRLAYRSNPVEGKLIFCNGVVLHRLQCVRGFGEWIDSIVEFSSNLQNMNIDISAFSCIAALAMVTERHGLKEPKRVEELQNKIVNCLKDHVTFNNGGLNRPNYLSKLLGKLPELRTLCTQGLQRIFYLKLEDLVPPPAIIDKLFLDTLPF

SEQ ID NO: 267328 - DNA, 1830 bp, Artificial Sequence
  derived and/or modified sequence
atgaacgaagaccggcgaggggagctgttgacaatgccctgtgtccaggcccagtatggatcctcaccacaaggggcgtctcccgccagccagtcctactcctatcatagctcaggcgaatactcttcggactttctgacccctgaattcgtgaagttttccatggacctaaccaataccgaaatcacggcgacgacatcactgccctctttcagtacattcatggataactacagcacggggtatgatgtgaaacctccttgcctctaccaaatgcctctcagcggccagcaaagttctattaaggtcgaagatatacagatgcacaactatcagcaacactcccacttacccccacagagtgaagagatgatgccgcactccgggtccgtctactacaagccttcttctccacctactcccacaactcctgggtttcaggtccaacacagccctatgtgggacgatccgggaagtctgcacaattttcaccaaaactacgttgctacaacccatatgattgaacagagaaagactcctgtgtcacgtctaagcctgttttccttcaagcagtcccctcccggcactcccgttagttcctgccagatgagatttgacggccccctccacgtgccaatgaatcccgagcccgcgggctctcaccacgttgtagacggacagacatttgcagttcctaaccccataaggaaaccagcctcgatggggttccccggattgcagatcggacacgcctctcagttgctcgacacacaggtgccctctcctccctccaggggaagtcctagcaatgaggggctatgcgcggtgtgcggggacaacgcagcttgtcagcactacggcgtaaggacatgtgagggatgcaaaggcttctttaaaagaactgtccagaagaatgccaagtacgtctgcctggcaaacaaaaattgtcctgtggataaacgaagaagaaataggtgtcaatattgcaggtttcagaaatgtctcgcagtaggcatggtaaaggaggtggtgcggactgactcattgaaagggcggcgcggcagactgcctagtaagccaaagagcccacaggagccgagcccccctagccccccggtaagtctcataagcgcgttagttcgggcacacgtggattctaaccccgcaatgacttctttagactactccaggtttcaggcaaacccggactatcagatgtccggggacgacactcagcatatacaacagttctatgacctcctcactggcagcatggagatcatccgaggttgggccgagaaaattccaggattcgccgatttgccgaaggctgaccaggatttgctctttgagtctgcgtttcttgagttgtttgtgctccgcctagcttacaggtccaaccctgtcgagggcaagctgattttctgtaatggggtggtgcttcatcgtctccaatgtgtgcgaggttttggagaatggattgattcaatcgtcgaattctcttctaatctgcagaatatgaacatagatatcagcgctttctcctgtattgctgccctcgctatggttaccgagcgccatggactcaaagagcccaaacgtgtggaggagctgcagaataaaattgtgaattgcctgaaagaccatgtaacgttcaacaacggcgggctaaaccgccctaattacctcagtaagcttcttggcaagctgccagaactgcggactctttgtacacaagggcttcaaaggattttctacctaaagttagaggatttggtgccgcccccagctatcatcgataagctgtttcttgatacacttccgttttag

SEQ ID NO: 267329 - DNA, 1830 bp, Artificial Sequence
  derived and/or modified sequence
atgaatgaagatagaagaggagagctgctgaccatgccctgtgtgcaggcccagtatggcagcagcccccagggcgccagccctgccagccagagctacagctaccacagcagcggggagtacagcagtgacttcctgaccccagagtttgtgaagttctccatggacctgaccaacacagagatcacagccaccaccagcctgcccagcttcagcaccttcatggacaactacagcacaggctatgatgtgaagccaccctgcctgtaccagatgcccctgagcggccagcagagcagcatcaaggtggaggacatccagatgcacaactaccagcagcacagccacctgcccccccagagcgaggagatgatgccccacagcggctctgtgtactacaagcccagcagcccccccacccccaccaccccaggcttccaggtgcagcacagccccatgtgggatgatcctggcagcctgcacaacttccaccagaactacgtggccaccacccacatgattgagcagaggaagacccctgtgtcccggctgagcctcttctccttcaagcagagccccccaggcacccctgtgagcagctgccagatgagatttgatggccccctgcacgtgcccatgaaccctgagcccgccggcagccaccacgtggtggatggccagacctttgctgtgcccaaccccatcaggaagccagcctccatgggcttccctggcctgcagatcggccacgccagccagctgctggacacccaggtgcccagcccccccagccggggcagccccagcaatgaaggcctgtgtgctgtgtgtggggacaatgctgcctgccagcactacggcgtgaggacctgtgagggctgcaagggcttcttcaagaggacagtgcagaagaatgccaagtatgtgtgcctggccaacaagaactgccctgtggacaagagaagaagaaaccgctgccagtactgccgcttccagaagtgcctggccgtgggcatggtgaaggaggtggtgaggacagacagcctgaagggccggcggggccgcctgcccagcaagcccaagagcccccaggagcccagcccccccagcccccctgtgtccctcatcagcgccctggtgcgggcccacgtggacagcaacccagccatgaccagcctggactacagccgcttccaggccaacccagactaccagatgtctggagatgacacccagcacatccagcagttctatgacctgctgaccggctccatggagatcatccggggctgggccgagaagatccctggctttgctgacctgcccaaggctgaccaggacctgctgtttgagagcgccttcctggagctgtttgtgctgcggctggcctaccgcagcaaccctgtggagggcaagctgatcttctgcaatggagtggtgctgcaccggctgcagtgtgtgcggggctttggagagtggattgacagcatcgtggagttcagcagcaacctgcagaacatgaacatcgacatcagcgccttcagctgcatcgccgccctggccatggtgacagaaagacatggcctgaaggagcccaagagggtggaggagctgcagaacaagatcgtgaactgcctgaaggaccacgtgaccttcaacaacggcggcctgaaccggcccaactacctgagcaagctgctgggcaagctgcctgagctgcggaccctgtgcacccagggcctgcagaggatcttctacctgaagctggaggacctggtgcccccaccagccatcatcgacaagctgttcctggacaccctgcccttctag

SEQ ID NO: 267330 - DNA, 1830 bp, Artificial Sequence
  derived and/or modified sequence
atgaacgaggaccggcggggcgagctgctgaccatgccctgcgtgcaagctcagtatggctcatccccccagggagcttcgccggcatctcaatcttactcttatcattccagtggtgagtactcctccgactttctgaccccagagtttgtcaagttctccatggacctgactaatacagagatcacagcaaccacatccctgcccagttttagcacttttatggataactattctactgggtacgacgtgaagcctccatgtttgtaccagatgccactgagcgggcagcagtcaagtatcaaagtggaggacatccagatgcacaactaccagcagcacagccacctgcctccccaatctgaagagatgatgccccactcgggttcagtttactacaagcctagcagcccaccaactccgactacccctgggttccaggtgcagcactctccaatgtgggatgacccaggctccctccacaatttccaccagaactacgtggcaacaacccacatgattgaacaacgcaagacaccagtgtcccggttatccctattctctttcaagcagagccctcccgggacaccggtgagctcttgtcagatgcgattcgatggtccgctccacgttcccatgaacccggagccagcaggatcacaccatgtagtggacggccaaacgttcgccgtgcctaatcccatccgcaagccagcctccatggggtttcctgggttgcaaattggacatgcaagccagctgttagatacacaggtgccttcgcccccctcaaggggcagccccagcaatgagggcttatgcgccgtgtgcggcgacaacgctgcttgccagcattacggggtacgcacgtgcgagggctgtaaggggtttttcaagcggaccgtccagaaaaacgcaaagtatgtgtgcctggcaaacaagaattgtccagtagacaagcgtcgccgaaacagatgtcagtactgtagatttcaaaaatgcctcgcggtggggatggtaaaggaggtggtcaggacagattcgttgaagggacgacgtgggcggttgcctagtaagcccaaatctccccaagagccaagcccccctagcccacctgtgagtctcatatctgcactggtgcgtgcccacgtggattcaaatcccgccatgacctctctcgattatagtcggtttcaggcgaaccctgattatcagatgtccggtgatgacacgcagcacatccagcaattctacgatttacttaccggctccatggaaatcatccgaggatgggccgagaagatccccggatttgccgacctcccaaaagcagaccaggatctcttatttgagtctgcattcctggagctgtttgtgttgaggctggcttaccgcagtaatcctgtcgagggaaagctcattttttgtaacggcgttgtgctccacaggcttcaatgtgtgcgcggatttggtgaatggattgacagcatcgttgagttttccagcaaccttcagaacatgaacatcgacatttctgccttttcttgcattgcagcgctggcgatggtgacggagcggcacggcctgaaggaaccaaagcgcgtggaagaactgcagaacaagattgtaaattgcttgaaggatcacgttacatttaacaatggcggactgaaccgccctaactacctttcaaagttgttgggcaagcttcccgaactccgtacactatgtacgcagggcctccagaggatcttttatctcaagctagaggacctggtgcctcctcccgctataatcgacaagttgttccttgacactctgccattctag

SEQ ID NO: 267331 - DNA, 2465 bp, Artificial Sequence
  derived and/or modified sequence
aaacaaaggcacattggcggccagggccagtccgcccggcggctcgcgcacggctccgcggtcccttttgcctgtccagccggccgcctgtccctgctccctccctccgtgaggtgtccgggttcccttcgcccagctctcccacccctacccgaccccggcgcccgggctcccagagggaactgcacttcggcagagttgaatgaatgaagacagacgcggagaactcctaaccatgccttgtgttcaggcgcagtatgggtcctcgcctcaaggagccagccccgcttctcagagctacagttaccactcttcgggagaatacagctccgatttcttaactccagagtttgtcaagtttagcatggacctcaccaacactgaaatcactgccaccacttctctccccagcttcagtacctttatggacaactacagcacaggctacgacgtcaagccaccttgcttgtaccaaatgcccctgtccggacagcagtcctccattaaggtagaagacattcagatgcacaactaccagcaacacagccacctgcccccccagtctgaggagatgatgccgcactccgggtcggtttactacaagccctcctcgcccccgacgcccaccaccccgggcttccaggtgcagcacagccccatgtgggacgacccgggatctctccacaacttccaccagaactacgtggccactacgcacatgatcgagcagaggaaaacgccagtctcccgcctctccctcttctcctttaagcaatcgccccctggcaccccggtgtctagttgccagatgcgcttcgacgggcccctgcacgtccccatgaacccggagcccgccggcagccaccacgtggtggacgggcagaccttcgctgtgcccaaccccattcgcaagcccgcgtccatgggcttcccgggcctgcagatcggccacgcgtctcagctgctcgacacgcaggtgccctcaccgccgtcgcggggctccccctccaacgaggggctgtgcgctgtgtgtggggacaacgcggcctgccaacactacggcgtgcgcacctgtgagggctgcaaaggcttctttaagcgcacagtgcaaaaaaatgcaaaatacgtgtgtttagcaaataaaaactgcccagtggacaagcgtcgccggaatcgctgtcagtactgccgatttcagaagtgcctggctgttgggatggtcaaagaagtggttcgcacagacagtttaaaaggccggagaggtcgtttgccctcgaaaccgaagagcccacaggagccctctcccccttcgcccccggtgagtctgatcagtgccctcgtcagggcccatgtcgactccaacccggctatgaccagcctggactattccaggttccaggcgaaccctgactatcaaatgagtggagatgacacccagcatatccagcaattctatgatctcctgactggctccatggagatcatccggggctgggcagagaagatccctggcttcgcagacctgcccaaagccgaccaagacctgctttttgaatcagctttcttagaactgtttgtccttcgattagcatacaggtccaacccagtggagggtaaactcatcttttgcaatggggtggtcttgcacaggttgcaatgcgttcgtggctttggggaatggattgattccattgttgaattctcctccaacttgcagaatatgaacatcgacatttctgccttctcctgcattgctgccctggctatggtcacagagagacacgggctcaaggaacccaagagagtggaagaactgcaaaacaagattgtaaattgtctcaaagaccacgtgactttcaacaatggggggttgaaccgccccaattatttgtccaaactgttggggaagctcccagaacttcgtaccctttgcacacaggggctacagcgcattttctacctgaaattggaagacttggtgccaccgccagcaataattgacaaacttttcctggacactttacctttctaagacctcctcccaagcacttcaaaggaactggaatgataatggaaactgtcaagagggggcaagtcacatgggcagagatagccgtgtgagcagtctcagctcaagctgccccccatttctgtaaccctcctagcccccttgatccctaaagaaaacaaacaaacaaacaaaaactgttgctatttcctaacctgcaggcagaacctgaaagggcattttggctccggggcatcctggatttagaacatggactacacacaatacagtggtataaactttttattctcagtttaaaaatcagtttgttgttcagaagaaagattgctataatgtataatgggaaatgtttggccatgcttggttgttgcagttcagacaaatgtaacacacacacacatacacacacacacacacacacagagacacatcttaa

SEQ ID NO: 267332 - DNA, 1830 bp, Artificial Sequence
  derived and/or modified sequence
atgaacgaggacaggcggggagagctcctgacaatgccttgtgttcaggctcagtacggctcgtctccccagggcgctagccctgcgagccagtcatactcctaccactcttctggagaatactcctccgacttcctgactccagaattcgtgaaattttcaatggatctgactaacaccgaaattactgctaccactagcctgccttccttctcgactttcatggataactactccacaggttatgatgtgaagcccccatgtctgtaccagatgcctctgtctgggcagcagtcatctatcaaggttgaggatatccaaatgcacaattaccagcaacacagccacctgcctccacagagcgaggagatgatgccccactctggctccgtgtactataaacccagttcaccccctactcccacaacaccaggctttcaggtgcaacatagcccaatgtgggacgaccccggatccctgcacaacttccatcagaactacgttgctacaacgcacatgatcgaacagcgtaagacacctgtgtcacgcttgtccttgttttcttttaaacagtctccccctggcacacccgtttcctcctgtcagatgaggtttgacggacctctgcacgtgcccatgaatcccgagccagccggaagtcatcacgttgtggacggacagaccttcgccgtgcccaaccctatccgaaaacccgcatcaatgggatttcccggactgcagatcgggcatgcgtcacagttactggatacacaggtgccatccccccctagtcggggatcccctagtaacgaaggactgtgcgccgtttgcggggacaacgccgcatgccagcactacggggtccgcacctgcgaaggatgtaaaggtttctttaagcgcaccgtgcaaaaaaacgccaaatatgtctgtctcgcaaacaaaaactgcccagtggataaaaggcgcagaaatcgatgccagtattgtaggtttcaaaagtgtctagccgtcggtatggtcaaagaagtcgtccggaccgactcccttaagggccgtaggggcaggcttccatccaagcccaagagcccccaagagccctcccccccatctccccctgtttccctcatttccgccctcgtcagggcccacgtggatagcaatcccgcaatgacctccctggactatagccgctttcaggcgaaccccgactaccagatgagcggagatgacacacaacacatccaacaattttacgacttgctgaccggatccatggaaatcattaggggctgggccgaaaagatccctgggtttgccgatctcccaaaggcggaccaggacctactattcgagagcgcttttctggagctttttgtgctgcgattggcctatcgctccaaccctgttgaaggaaagctgatcttctgcaatggtgtagtcctgcaccggctgcagtgcgtgagaggtttcggcgagtggatcgactctatcgtagagttctcctcaaacctccaaaatatgaacatcgatatcagcgccttctcatgcatcgctgctcttgcgatggtgaccgagagacacgggttgaaagaacctaagagagtggaggagctgcagaacaaaatcgttaattgcctgaaagaccacgtgactttcaacaacggtggcttgaataggcctaattacctgagcaaattattggggaagctgcctgaactccgtaccctatgcactcagggcctgcagcgaattttctatcttaagctggaggacttggttccccctcctgccatcatagacaaactgttcctggatacattgcccttttag

SEQ ID NO: 267333 - DNA, 1830 bp, Artificial Sequence
  derived and/or modified sequence
atgaacgaggacagaagaggcgagctgctgaccatgccctgcgtgcaggcccagtacggcagcagcccccagggcgccagccccgccagccagagctacagctaccacagcagcggcgagtacagcagcgacttcctgacccccgagttcgtgaagttcagcatggacctgaccaacaccgagatcaccgccaccaccagcctgcccagcttcagcaccttcatggacaactacagcaccggctacgacgtgaagcccccctgcctgtaccagatgcccctgagcggccagcagagcagcatcaaggtggaggacatccagatgcacaactaccagcagcacagccacctgcccccccagagcgaggagatgatgccccacagcggcagcgtgtactacaagcccagcagcccccccacccccaccacccccggcttccaggtgcagcacagccccatgtgggacgaccccggcagcctgcacaacttccaccagaactacgtggccaccacccacatgatcgagcagagaaagacccccgtgagcagactgagcctgttcagcttcaagcagagcccccccggcacccccgtgagcagctgccagatgagattcgacggccccctgcacgtgcccatgaaccccgagcccgccggcagccaccacgtggtggacggccagaccttcgccgtgcccaaccccatcagaaagcccgccagcatgggcttccccggcctgcagatcggccacgccagccagctgctggacacccaggtgcccagcccccccagcagaggcagccccagcaacgagggcctgtgcgccgtgtgcggcgacaacgccgcctgccagcactacggcgtgagaacctgcgagggctgcaagggcttcttcaagagaaccgtgcagaagaacgccaagtacgtgtgcctggccaacaagaactgccccgtggacaagagaagaagaaacagatgccagtactgcagattccagaagtgcctggccgtgggcatggtgaaggaggtggtgagaaccgacagcctgaagggcagaagaggcagactgcccagcaagcccaagagcccccaggagcccagcccccccagcccccccgtgagcctgatcagcgccctggtgagagcccacgtggacagcaaccccgccatgaccagcctggactacagcagattccaggccaaccccgactaccagatgagcggcgacgacacccagcacatccagcagttctacgacctgctgaccggcagcatggagatcatcagaggctgggccgagaagatccccggcttcgccgacctgcccaaggccgaccaggacctgctgttcgagagcgccttcctggagctgttcgtgctgagactggcctacagaagcaaccccgtggagggcaagctgatcttctgcaacggcgtggtgctgcacagactgcagtgcgtgagaggcttcggcgagtggatcgacagcatcgtggagttcagcagcaacctgcagaacatgaacatcgacatcagcgccttcagctgcatcgccgccctggccatggtgaccgagagacacggcctgaaggagcccaagagagtggaggagctgcagaacaagatcgtgaactgcctgaaggaccacgtgaccttcaacaacggcggcctgaacagacccaactacctgagcaagctgctgggcaagctgcccgagctgagaaccctgtgcacccagggcctgcagagaatcttctacctgaagctggaggacctggtgcccccccccgccatcatcgacaagctgttcctggacaccctgcccttctag

SEQ ID NO: 267334 - DNA, 1179 bp, Artificial Sequence
  derived and/or modified sequence
atggataattacagcactggttacgatgtaaagccaccatgcctctaccaaatgccattgtctggccaacagtcatcaattaaggtggaagacatccagatgcataactatcaacaacactcacacctgccaccccagtcagaagaaatgatgccacactctggctcagtatactacaaacctagtagcccacctacacccaccacaccaggttttcaggtacagcattcaccgatgtgggatgacccaggctccctgcataacttccaccagaattatgttgctaccactcacatgatagagcagcgtaagactcccgtctctcgcttatcattattctccttcaagcaatcaccccccggtacccctgtatcctcatgtcagatgcggttcgatggtccactacacgtgccaatgaaccccgagcccgcgggctcacatcacgtcgtggacggtcagacgttcgccgtgcctaaccctattcgaaagccagccagtatggggttccccggccttcagattggacacgcttcccagctcttggatactcaagttcccagccccccctctcgagggtctccctcaaatgaagggttatgtgccgtttgcggcgacaatgcagcatgccaacactacggtgtgaggacgtgtgaaggctgcaaggggttttttaaacgaactgtccaaaagaacgcaaagtacgtctgcctagccaataaaaattgtccggtggacaagcgtcgtaggaacagatgccaatactgccggtttcagaaatgtcttgcggtcggcatggtgaaggaggtggtcagaaccgactccctgaaggggagaagggggagactcccctctaaacccaagagcccgcaggagccttcacctccttctccccccgtttctctcatcagtgccctagtccgggcccacgttgattccaatccagcaatgacatccctcgattacagccggtttcaggcaaacccggactaccaaatgagtggcgacgacactcaacatatccagcaattctatgatctgttaaccggtagcatggagatcatccgcggatgggccgaaaaaattccagggtttgccgatttgcccaaggcggatcaggacctgcttttcgagagcgccttcctggaactgttcgttctgcggcttgcctataggatctag

SEQ ID NO: 267335 - DNA, 1179 bp, Artificial Sequence
  derived and/or modified sequence
atggataactactcaactggctacgacgtaaaacccccctgtctgtaccaaatgcctctctccggccagcaatcgtctattaaagttgaggatatccagatgcacaattatcaacagcactcccatctgcccccccagtccgaggagatgatgccccactccgggtcggtttattataagccttcctccccccctacaccgactactccaggctttcaggtgcagcactcccccatgtgggatgaccctggctccctgcacaatttccaccagaactatgtagccactacccatatgatcgaacaacggaaaacaccagtgtcacgcttaagcctattttccttcaagcagagtccccccggcactccagtgtcaagctgccagatgagattcgatgggcccctgcatgtgccgatgaatcccgaacccgctggaagccaccatgttgtcgatgggcagacttttgcagtacctaatccaatccgaaagcctgcttccatgggctttcccgggctgcagataggacatgcatcacagctgctggacactcaggtgccctctccaccttccaggggctcacccagcaacgagggactgtgtgccgtctgcggcgacaatgcggcgtgtcagcattacggtgtgagaacctgcgagggctgcaaaggcttctttaaacgtactgtgcagaaaaatgcaaagtacgtctgcctagctaataaaaactgtcccgttgacaagagacgtaggaacaggtgtcagtactgtaggttccaaaaatgccttgcagttggcatggtgaaggaggttgtacgcactgattctcttaaagggcggagaggacgtctcccaagcaagccgaagtcccctcaagagccatccccaccgagcccaccagtcagcctaatctctgcgcttgtccgggctcatgtggactcgaatccagccatgacatctctggactattccagattccaggccaatcccgactaccagatgtccggagacgacacacagcatattcagcagttctacgacctgttaaccggttctatggagattattcgaggatgggcagaaaagatcccaggtttcgcagacctgccaaaggcagatcaggacctcctcttcgagagtgcctttttggaactgtttgtacttaggttggcatataggatttag

SEQ ID NO: 267336 - DNA, 1179 bp, Artificial Sequence
  derived and/or modified sequence
atggacaactacagcacaggctatgatgtgaagccaccctgcctgtaccagatgcccctgagcggccagcagagcagcatcaaggtggaggacatccagatgcacaactaccagcagcacagccacctgcccccccagagcgaggagatgatgccccacagcggctctgtgtactacaagcccagcagcccccccacccccaccaccccaggcttccaggtgcagcacagccccatgtgggatgatcctggcagcctgcacaacttccaccagaactacgtggccaccacccacatgattgagcagaggaagacccctgtgtcccggctgagcctcttctccttcaagcagagccccccaggcacccctgtgagcagctgccagatgagatttgatggccccctgcacgtgcccatgaaccctgagcccgccggcagccaccacgtggtggatggccagacctttgctgtgcccaaccccatcaggaagccagcctccatgggcttccctggcctgcagatcggccacgccagccagctgctggacacccaggtgcccagcccccccagccggggcagccccagcaatgaaggcctgtgtgctgtgtgtggggacaatgctgcctgccagcactacggcgtgaggacctgtgagggctgcaagggcttcttcaagaggacagtgcagaagaatgccaagtatgtgtgcctggccaacaagaactgccctgtggacaagagaagaagaaaccgctgccagtactgccgcttccagaagtgcctggccgtgggcatggtgaaggaggtggtgaggacagacagcctgaagggccggcggggccgcctgcccagcaagcccaagagcccccaggagcccagcccccccagcccccctgtgtccctcatcagcgccctggtgcgggcccacgtggacagcaacccagccatgaccagcctggactacagccgcttccaggccaacccagactaccagatgtctggagatgacacccagcacatccagcagttctatgacctgctgaccggctccatggagatcatccggggctgggccgagaagatccctggctttgctgacctgcccaaggctgaccaggacctgctgtttgagagcgccttcctggagctgtttgtgctgcggctggcctaccgcatctag

SEQ ID NO: 267337 - DNA, 1179 bp, Artificial Sequence
  derived and/or modified sequence
atggacaactacagcaccggctacgacgtgaagcccccctgcctgtaccagatgcctctcagtggtcagcagtcaagtatcaaagtggaagacatccagatgcacaactaccagcaacacagccatctgccaccacagtcagaagagatgatgccccactctggaagcgtctactataaaccatcctcaccacccacacccactacacccggattccaggttcagcatagcccaatgtgggatgatccggggagcttacataactttcaccaaaactatgtagctactacccacatgatagaacagaggaagacgcctgtgtcccgtctttcattgttctcatttaaacagtccccgcctggcacacctgtgagctcctgccagatgcggttcgacggccctctgcacgtcccaatgaatccagagcctgctggttctcaccacgtcgtagatgggcagacttttgcagttcctaatccaatcaggaagcctgcttcaatgggattccctggtttgcagattggacatgccagccaactgttggatacacaggtgcctagtcccccctcgaggggcagcccctccaacgaaggactgtgcgcagtctgcggggacaacgccgcctgccaacattacggcgttaggacctgtgaagggtgcaaaggcttcttcaaacggacagtccaaaagaacgcgaagtatgtttgtctcgcgaataagaattgcccagtggacaaaagacgacgcaaccggtgccagtactgccgcttccaaaagtgccttgcagtcggtatggtcaaggaagtggtccgcactgatagtctcaaagggaggcggggcaggcttccctcaaaaccaaaatcaccccaggagcccagtcctccttctccacctgtgagtttgatctccgcactcgtgcgggcccacgtggattctaatcctgctatgacatctttggactactctcggttccaggccaaccccgactaccaaatgtccggtgacgacactcagcacatacaacagttttatgacttacttactgggtcaatggaaattattcgcggctgggctgagaagatacccggattcgccgaccttccaaaggcagatcaggacctgctgttcgagtctgcctttttagaattatttgtgttgagactcgcctacagaatatag

SEQ ID NO: 267338 - DNA, 1179 bp, Artificial Sequence
  derived and/or modified sequence
atggacaactacagcaccggctacgacgtgaagcccccctgcctgtaccaaatgccgttgagcgggcagcagagctcgattaaagtcgaggacattcagatgcataattaccaacagcactctcacttacctccacagtccgaggaaatgatgcctcattccggaagcgtgtactacaaaccaagctccccaccaaccccgacaactccgggtttccaggtgcagcatagccctatgtgggatgaccctgggtccctgcacaattttcatcaaaactacgttgcgacgacccacatgattgaacagcgtaagacacctgtctcccggctgagtctcttcagtttcaagcagtcgccgcctgggactcccgtcagctcctgtcagatgagattcgatggcccactgcacgtcccaatgaacccagaacctgctggtagtcaccacgtggtggacggtcagactttcgcagtcccaaaccctatcagaaagccggcttccatgggcttcccaggcctgcagatcggacatgcaagtcagctactggacacacaggttccaagcccacccagccgaggatcgccgtccaatgaaggcttatgcgcggtctgcggagataacgctgcctgccagcattacggcgttcgaacgtgcgaaggctgcaaaggattcttcaagcggactgttcagaagaatgccaaatatgtctgcctcgcaaataaaaactgtcctgtggacaagagacgaaggaatagatgtcagtattgtaggttccaaaaatgcttagccgtcggaatggtgaaggaggttgtgaggaccgattctttaaaaggcagaaggggtcgactcccttctaagcctaagtcaccacaggagccgtctccacctagtccgccggtgtccttgatcagcgctcttgttagggctcacgtagatagcaatccagcaatgaccagcctggactacagcaggtttcaggccaacccggattaccagatgtccggagacgatacacagcacattcaacagttttatgacctcctgactggatcaatggaaatcattcggggttgggccgagaagatccctggctttgctgacctgccaaaagccgaccaggacttgctgtttgagtcagcctttctggagcttttcgtgctgcgcctggcttaccgcatttag

SEQ ID NO: 267339 - DNA, 1179 bp, Artificial Sequence
  derived and/or modified sequence
atggacaattattcaaccgggtacgatgtgaagcccccttgcctgtatcagatgcctctatccgggcagcagtccagtatcaaggtggaagatattcagatgcacaattaccaacagcacagccacctgccccctcaaagcgaagaaatgatgcctcactctggttctgtctactacaagcctagctctccgccaaccccaactactccaggcttccaagtgcaacatagccctatgtgggatgatcccggatccctgcacaacttccatcagaattacgtggctacgacccatatgatcgagcaacgcaagacacctgtctcacgactctccctattttcttttaaacagagccccccaggcacccctgtatcgtcttgtcagatgcgtttcgacggaccattgcatgttcccatgaaccctgaaccagccggttctcatcacgtggtggatggccagacattcgctgtccctaatcccatacgaaaacccgcatctatggggttcccaggcctgcaaatcggccatgcttcccaactcctggacactcaggtaccctcccccccttctagaggaagcccttctaacgaaggactgtgtgccgtctgcggcgacaacgctgcttgtcaacactatggagtgcggacctgtgagggctgcaaaggcttttttaagagaacggtgcaaaagaatgccaagtacgtgtgcttggcaaacaagaactgtccagtggacaagcgacggaggaaccgctgtcagtactgcaggtttcagaaatgcctggctgtgggtatggtgaaggaggtggtacgaacagattctttaaagggacgcagaggcaggctgcccagtaagcccaagagcccgcaggagcccagtcccccaagtccccctgtttctctgattagcgctctggttcgtgcccacgtagactcgaatccagcgatgacttctctcgattactcacggtttcaggccaatcctgattatcagatgtccggagatgacacacaacacatccagcaattctacgatctgctaaccgggtctatggagatcatacggggatgggcagaaaagatccccggatttgctgaccttcctaaagccgaccaggacctgctcttcgaaagtgcatttcttgagctgtttgtcctgcgtctggcatatagaatctag

SEQ ID NO: 267340 - DNA, 1179 bp, Artificial Sequence
  derived and/or modified sequence
atggataattactcaactggatacgacgtaaaacctccctgcctctaccagatgcccctgagcggtcagcagagttccataaaggtggaggacatccagatgcataattatcaacaacactctcacctgccacctcaatctgaggaaatgatgcctcattccggatccgtctactataagcctagttcccccccaacacccaccacacctggattccaggtgcagcatagccccatgtgggacgaccctgggtctttgcacaactttcaccagaactatgttgcgacaacccacatgattgagcagagaaaaacgccagtaagtcgacttagtttgttttctttcaagcagtctccacctggcaccccagtgtcttcctgtcagatgcgcttcgacggacctctgcacgtgccgatgaacccagagcctgcaggatctcaccatgtggttgatgggcagaccttcgccgtgccaaatcccattagaaagccagcaagtatgggatttcctgggctgcagattggccatgccagccagctgctagatacacaggtgccatcacccccaagccgtggcagcccgtctaatgagggactttgcgccgtctgcggagacaatgccgcatgtcagcattacggcgtcaggacatgcgaaggttgtaagggttttttcaaacggactgtgcaaaaaaatgccaaatacgtgtgtctggcgaacaagaattgtcccgtcgataaaagacgacggaatcgctgtcagtactgtcgcttccaaaaatgcctcgccgtgggcatggtaaaggaggtcgtccgaacggactctctgaaagggcgtcggggaagattaccatccaaaccaaaatctcctcaggaaccttcacctcctagcccccctgtgagcttaattagcgcactggtaagggcccacgttgactccaaccctgcaatgacctctcttgactactcacgcttccaggcgaatcccgattaccaaatgtcaggcgatgatactcagcacattcagcagttctatgacttgttgacagggtctatggaaattatcaggggctgggccgaaaagatcccgggatttgccgacctgcccaaagcggatcaggacctgctttttgaaagcgcctttctggaactgttcgtcctgcgtctggcataccggatatag

SEQ ID NO: 267341 - DNA, 1179 bp, Artificial Sequence
  derived and/or modified sequence
atggacaactacagcaccggctacgacgtgaagcccccctgcctgtaccagatgcccctgagcggccagcagagcagcatcaaggtggaggacatccagatgcacaactaccagcagcacagccacctgcccccccagagcgaggagatgatgccccacagcggcagcgtgtactacaagcccagcagcccccccacccccaccacccccggcttccaggtgcagcacagccccatgtgggacgaccccggcagcctgcacaacttccaccagaactacgtggccaccacccacatgatcgagcagagaaagacccccgtgagcagactgagcctgttcagcttcaagcagagcccccccggcacccccgtgagcagctgccagatgagattcgacggccccctgcacgtgcccatgaaccccgagcccgccggcagccaccacgtggtggacggccagaccttcgccgtgcccaaccccatcagaaagcccgccagcatgggcttccccggcctgcagatcggccacgccagccagctgctggacacccaggtgcccagcccccccagcagaggcagccccagcaacgagggcctgtgcgccgtgtgcggcgacaacgccgcctgccagcactacggcgtgagaacctgcgagggctgcaagggcttcttcaagagaaccgtgcagaagaacgccaagtacgtgtgcctggccaacaagaactgccccgtggacaagagaagaagaaacagatgccagtactgcagattccagaagtgcctggccgtgggcatggtgaaggaggtggtgagaaccgacagcctgaagggcagaagaggcagactgcccagcaagcccaagagcccccaggagcccagcccccccagcccccccgtgagcctgatcagcgccctggtgagagcccacgtggacagcaaccccgccatgaccagcctggactacagcagattccaggccaaccccgactaccagatgagcggcgacgacacccagcacatccagcagttctacgacctgctgaccggcagcatggagatcatcagaggctgggccgagaagatccccggcttcgccgacctgcccaaggccgaccaggacctgctgttcgagagcgccttcctggagctgttcgtgctgagactggcctacagaatctag

SEQ ID NO: 267342 - protein, 954 aa, Artificial Sequence
  derived and/or modified sequence
MSLPLTEEQRKKIEENRQKALARRAEKLLAEQHQRTSSGTSIAGNPFQAKQGPSQNFPRESCKPVSHGVIFKQQNLSSSSNADQRPHDSHSFQAKGIWKKPEEMPTACPGHSPRSQMALTGISPPLAQSPPEVPKQQLLSYELGQGHAQASPEIRFTPFANPTHKPLAKPKSSQETPAHSSGQPPRDAKLEAKTAKASPSGQNISYIHSSSESVTPRTEGRLQQKSGSSVQKGVNSQKGKCVRNGDRFQVLIGYNAELIAVFKTLPSKNYDPDTKTWNFSMNDYSALMKAAQSLPTVNLQPLEWAYGSSESPSTSSEGQAGLPSAPSLSFVKGRCMLISRAYFEADISYSQDLIALFKQMDSRRYDVKTRKWSFLLEEHSKLIAKVRCLPQVQLDPLPTTLTLAFASQLKKTSLSLTPDVPEADLSEVDPKLVSNLMPFQRAGVNFAIAKGGRLLLADDMGLGKTIQAICIAAFYRKEWPLLVVVPSSVRFTWEQAFLRWLPSLSPDCINVVVTGKDRLTAGLINIVSFDLLSKLEKQLKTPFKVVIIDESHFLKNSRTARCRAAMPVLKVAKRVILLSGTPAMSRPAELYTQIIAVKPTFFPQFHAFGLRYCDAKRMPWGWDYSGSSNLGELKLLLEEAVMLRRLKSDVLSQLPAKQRKIVVIAPGRINARTRAALDAAAKEMTTKDKTKQQQKDALILFFNRTAEAKIPSVIEYILDLLESGREKFLVFAHHKVVLDAITQELERKHVQHIRIDGSTSSAEREDLCQQFQLSERHAVAVLSITAANMGLTFSSADLVVFAELFWNPGVLIQAEDRVHRIGQTSSVGIHYLVAKGTADDYLWPLIQEKIKVLAEAGLSETNFSEMTESTDYLYKDPKQQKIYDLFQKSFEKEGSDMELLEAAESFDPGSASGTSGSSSQNMGDTLDESSLTASPQKKRRFEFFDNWDSFTSPL

SEQ ID NO: 267343 - DNA, 76 bp, Artificial Sequence
  derived and/or modified sequence
tgaacggaatcgaatggaatcatcatcggatggaaacgaatggaatcatcatcgaatggaaatgaaaggagtcatc

SEQ ID NO: 267344 - DNA, 86 bp, Artificial Sequence
  derived and/or modified sequence
gaataatcattgaacggaatcgaatggaatcatcttcggatggaaacgaatggaatcatcatcgaatggaaatgaaaggagtcatc

SEQ ID NO: 267345 - DNA, 2865 bp, Artificial Sequence
  derived and/or modified sequence
atgagcctgcccctgaccgaggagcagagaaagaagatcgaggagaacagacagaaggccctggccagaagagccgagaagctgctggccgagcagcaccagagaaccagcagcggcaccagcatcgccggcaaccccttccaggccaagcagggccccagccagaacttccccagagagagctgcaagcccgtgagccacggcgtgatcttcaagcagcagaacctgagcagcagcagcaacgccgaccagagaccccacgacagccacagcttccaggccaagggcatctggaagaagcccgaggagatgcccaccgcctgccccggccacagccccagaagccagatggccctgaccggcatcagcccccccctggcccagagcccccccgaggtgcccaagcagcagctgctgagctacgagctgggccagggccacgcccaggccagccccgagatcagattcacccccttcgccaaccccacccacaagcccctggccaagcccaagagcagccaggagacccccgcccacagcagcggccagccccccagagacgccaagctggaggccaagaccgccaaggccagccccagcggccagaacatcagctacatccacagcagcagcgagagcgtgacccccagaaccgagggcagactgcagcagaagagcggcagcagcgtgcagaagggcgtgaacagccagaagggcaagtgcgtgagaaacggcgacagattccaggtgctgatcggctacaacgccgagctgatcgccgtgttcaagaccctgcccagcaagaactacgaccccgacaccaagacctggaacttcagcatgaacgactacagcgccctgatgaaggccgcccagagcctgcccaccgtgaacctgcagcccctggagtgggcctacggcagcagcgagagccccagcaccagcagcgagggccaggccggcctgcccagcgcccccagcctgagcttcgtgaagggcagatgcatgctgatcagcagagcctacttcgaggccgacatcagctacagccaggacctgatcgccctgttcaagcagatggacagcagaagatacgacgtgaagaccagaaagtggagcttcctgctggaggagcacagcaagctgatcgccaaggtgagatgcctgccccaggtgcagctggaccccctgcccaccaccctgaccctggccttcgccagccagctgaagaagaccagcctgagcctgacccccgacgtgcccgaggccgacctgagcgaggtggaccccaagctggtgagcaacctgatgcccttccagagagccggcgtgaacttcgccatcgccaagggcggcagactgctgctggccgacgacatgggcctgggcaagaccatccaggccatctgcatcgccgccttctacagaaaggagtggcccctgctggtggtggtgcccagcagcgtgagattcacctgggagcaggccttcctgagatggctgcccagcctgagccccgactgcatcaacgtggtggtgaccggcaaggacagactgaccgccggcctgatcaacatcgtgagcttcgacctgctgagcaagctggagaagcagctgaagacccccttcaaggtggtgatcatcgacgagagccacttcctgaagaacagcagaaccgccagatgcagagccgccatgcccgtgctgaaggtggccaagagagtgatcctgctgagcggcacccccgccatgagcagacccgccgagctgtacacccagatcatcgccgtgaagcccaccttcttcccccagttccacgccttcggcctgagatactgcgacgccaagagaatgccctggggctgggactacagcggcagcagcaacctgggcgagctgaagctgctgctggaggaggccgtgatgctgagaagactgaagagcgacgtgctgagccagctgcccgccaagcagagaaagatcgtggtgatcgcccccggcagaatcaacgccagaaccagagccgccctggacgccgccgccaaggagatgaccaccaaggacaagaccaagcagcagcagaaggacgccctgatcctgttcttcaacagaaccgccgaggccaagatccccagcgtgatcgagtacatcctggacctgctggagagcggcagagagaagttcctggtgttcgcccaccacaaggtggtgctggacgccatcacccaggagctggagagaaagcacgtgcagcacatcagaatcgacggcagcaccagcagcgccgagagagaggacctgtgccagcagttccagctgagcgagagacacgccgtggccgtgctgagcatcaccgccgccaacatgggcctgaccttcagcagcgccgacctggtggtgttcgccgagctgttctggaaccccggcgtgctgatccaggccgaggacagagtgcacagaatcggccagaccagcagcgtgggcatccactacctggtggccaagggcaccgccgacgactacctgtggcccctgatccaggagaagatcaaggtgctggccgaggccggcctgagcgagaccaacttcagcgagatgaccgagagcaccgactacctgtacaaggaccccaagcagcagaagatctacgacctgttccagaagagcttcgagaaggagggcagcgacatggagctgctggaggccgccgagagcttcgaccccggcagcgccagcggcaccagcggcagcagcagccagaacatgggcgacaccctggacgagagcagcctgaccgccagcccccagaagaagagaagattcgagttcttcgacaactgggacagcttcaccagccccctgtag

SEQ ID NO: 267346 - DNA, 60 bp, Artificial Sequence
  derived and/or modified sequence
atgagcctgcccctgaccgaggagcagagaaagaagatcgaggagaacagacagaagtag

SEQ ID NO: 267347 - DNA, 2865 bp, Artificial Sequence
  derived and/or modified sequence
atgagcctccccttgaccgaggagcagcgcaaaaagatcgaagaaaatcggcagaaggccttagcgagacgcgcagagaagcttcttgctgagcagcatcagcgcacgagctctgggactagcatcgcaggtaatccttttcaagctaaacagggccctagccaaaattttcccagggagagttgcaagcctgtgagccatggcgtgatctttaaacagcagaatttatctagttcatctaatgcagatcagcggcctcacgatagccacagtttccaggctaaaggcatctggaaaaagcccgaggaaatgccaaccgcttgccccggccacagtcccaggagccagatggctttaaccggtatctcaccccccctggcacaatcaccgcccgaagtcccaaaacaacagctgctgagttatgagctgggacagggccatgctcaggccagccccgagatccgcttcactcccttcgcaaaccctacccataaacccctcgcgaagccgaaatctagccaggaaactccggctcactcctctgggcaaccaccccgcgacgccaagctggaggctaaaacagccaaggcctctccttccggccagaatatatcatacatacatagtagctcggaatcagtgaccccgaggactgaaggacgattgcagcaaaagagtgggagttcagttcagaagggagttaacagccagaagggcaagtgtgtccggaatggggacagattccaggtgctcatcggttataacgccgaactaatcgcggtgttcaagactctgcctagtaagaattacgatcccgacaccaaaacttggaacttttcaatgaatgattactctgccctcatgaaagccgctcagtccctacctacggtgaacctgcaaccactcgagtgggcatacgggtcatccgaatctccttcaacaagttccgaggggcaagcaggcctgcctagtgctcccagcctcagcttcgttaaggggcgctgcatgctgatcagtagggcctatttcgaagccgacatcagctattcgcaggacctcatcgccctgtttaaacaaatggactctagacgatacgatgtcaaaacaagaaagtggtcctttctcctggaggagcactcaaagttgattgccaaggtgaggtgtctcccccaggtccaattagaccctctgcccaccacattgacactggcctttgcatcacagctgaaaaagacaagcctctccctgactcccgatgtccccgaggctgatctaagcgaagtggaccctaaactggtctctaatctgatgccgttccagagagcaggcgtgaatttcgctatcgccaaaggcggacggctcttgctggccgatgacatggggttaggtaaaaccattcaggcaatttgtatcgcagcgttctaccgcaaagaatggccactcctggttgtggtcccttcctcagtaagattcacatgggaacaggcatttctccgctggttaccatcattgtcccccgactgcattaatgtcgtggtcacgggaaaagaccggttaacagcaggcctgattaacatcgtatcttttgatttgttgagcaagctggaaaaacagctgaaaactccttttaaagtcgtcatcatcgacgagagccactttcttaaaaatagcaggacagctaggtgtcgcgcggcaatgcctgttctcaaggtcgcgaaacgcgtgatcttgctctcgggcacacccgctatgagccgccctgcagaattgtatacacagatcattgccgtgaagccgacgttcttcccccaatttcatgcctttggtctgagatattgcgacgccaagcgcatgccctggggctgggattactcgggctcatctaacctgggcgagctcaaactcctccttgaggaagccgtgatgttgaggagacttaagagtgacgtgctatctcaactgccagccaaacagaggaaaattgtagtgatcgcgcctgggcgtattaacgctagaaccagggcagccctcgatgccgcggcgaaggagatgaccaccaaggataagaccaagcaacagcagaaggacgctctgattttgttttttaaccggaccgccgaggccaagattcctagcgtgattgagtacatccttgatctgctggagtctgggagagaaaaattcttagtatttgcccatcacaaggttgtgctcgacgcgatcacccaagagctcgaaaggaagcatgtgcagcacatacgcattgatggctccacaagttccgccgagcgtgaagatctttgccagcagttccaactctccgaaaggcatgctgtggccgtattatccataaccgcagccaatatggggttaacctttagcagtgccgacctggtagtcttcgcagagttattttggaatcctggtgtgttgatccaggctgaggatcgcgtccatcgcattggtcagacgtcctcggtggggatccattatctggtggctaaaggaactgcagacgattacttgtggccgctaatccaggaaaagattaaggtgctggctgaagccgggctctctgagactaacttctcagaaatgaccgaatccaccgactacctgtacaaggaccccaaacaacagaaaatatacgatctgtttcagaaaagctttgagaaggaaggatccgacatggagttgctcgaagccgctgagagctttgatccaggctcagccagcggcaccagtggtagcagctctcagaatatgggcgacactttggacgaatcttccttgactgcaagcccccagaagaaacgcaggttcgagttctttgacaactgggattccttcacgtcacctctttag

SEQ ID NO: 267348 - DNA, 2865 bp, Artificial Sequence
  derived and/or modified sequence
atgtcccttcccctcactgaagaacaacggaaaaagatagaggagaataggcaaaaggctctcgcccggagggcagagaaattgctggcggagcagcaccaaagaactagttccggcacctccatcgctggcaacccctttcaggctaaacaaggcccttcacaaaattttccaagagaatcctgtaagcccgtctcccatggcgtgattttcaagcagcagaacctgagcagctcaagcaatgcggaccaacgcccacacgattcgcactcctttcaggctaaagggatctggaaaaagcctgaagagatgcctactgcgtgccctggtcacagtccacgctcgcagatggccctaaccggaatatcccctccactggctcagagtccacccgaggtgcccaaacagcagctcctatcttacgagttagggcagggccatgctcaggcctcccctgagatcagatttacgccctttgcaaatccgacacacaaaccactcgctaaaccaaagagttcccaagagacgcctgcacacagttcgggccagcccccaagggacgcaaaattggaggctaaaacagccaaggcctccccttctggtcagaatatatcatacatccacagttccagtgaaagtgtgactcccaggactgaggggcggttgcagcaaaagtccggaagcagcgtacagaagggagttaactcacagaaggggaagtgcgtgcggaacggcgataggtttcaggttttgattggatacaatgccgagctcatcgcggtgttcaaaaccctcccttcgaaaaattatgatccggatactaagacctggaatttctctatgaatgattattctgccttgatgaaagcagcccagagtcttcccaccgtgaacctccaacccctggaatgggcgtatggctctagcgagtctccatcaacctcgagcgaaggacaggccggactgccaagcgcaccatcattatctttcgtcaagggccgctgtatgctcatctctcgcgcgtactttgaggccgacatctcatactcacaggaccttatcgccctcttcaagcagatggattcccgcagatatgacgttaagacaagaaaatggtctttcctgctggaagagcactccaagcttatcgccaaggttcggtgtctcccccaggttcagttggatcccctgcctacgacactgaccctcgctttcgcctctcagctgaaaaagacttccctaagcctcactccggacgtgccagaagcagatctgagtgaagtggatccgaagcttgtctctaatttgatgccgttccagagagctggcgtaaattttgctatcgctaaagggggacgtcttctgttagcagacgatatgggcctcggcaaaacaattcaggctatctgcatagctgcattttatagaaaagagtggccactgcttgtggttgtgccatcgtctgtccgatttacttgggaacaggcgtttctccgatggctgccctcactgtcccccgattgtatcaacgtggtggtcaccggaaaggatcggctgacggcaggcttgataaacatcgtgtctttcgatctgttgtccaagctggagaagcagctaaaaacgccctttaaagtagttatcatagacgaaagtcactttctgaaaaattcacgaaccgccagatgcagggccgccatgccagtccttaaggtagctaaacgagtaatattgctctccgggacgccggccatgagcaggcccgcagaactttacacacagattatagccgtgaagcctaccttcttcccccagttccatgcattcggtctccgctactgcgatgccaaaagaatgccttggggatgggactattcaggatcgtctaatctcggcgaactaaaattactcctagaagaggctgttatgcttcgtcgactcaaatcagacgtgctgtcacagctcccagccaaacaaagaaagatcgtagtaatcgcccctggaagaatcaacgcccggaccagagccgctctggacgccgcagcaaaagaaatgactacgaaggataagaccaagcagcaacagaaggatgcgctaattctattttttaaccgaaccgcggaagctaaaatacctagtgtcatcgaatacatcctggacttattggagagcggacgcgagaagtttctggtgtttgcccaccacaaggtcgtgttggacgccattactcaggaattggagaggaagcatgtgcagcacatccggatcgatgggtccacttctagcgcggagcgggaggatctgtgccagcagttccagctgtcagaacgccacgctgtcgcggtactgtcaattacggcagccaacatgggactcacgttttcttccgccgacttggtggtctttgcggagctgttttggaatcctggagtgttgattcaggctgaagatcgggttcatagaattggacagactagctcagtgggcatacactacctggtcgctaagggaacggcagacgattacctatggccactgatacaagagaaaatcaaggtgcttgctgaggctggactgagtgaaaccaatttctcagaaatgacggaatccacggattatctctacaaagatcccaaacaacaaaagatttatgatctgtttcagaagagttttgagaaggaaggttccgacatggagctgctagaggcagcggagagctttgatcctggatcagccagcggaacctccgggtcctcttcccagaatatgggagatacgttggatgaatcctccctgacggcatcgccccagaaaaaaagacgcttcgagttttttgacaattgggattcatttacatcccccctctag

SEQ ID NO: 267349 - DNA, 60 bp, Artificial Sequence
  derived and/or modified sequence
atgtcactacctttgactgaggagcagcgcaaaaagatcgaggagaataggcagaaatag

SEQ ID NO: 267350 - DNA, 2865 bp, Artificial Sequence
  derived and/or modified sequence
atgagcctgcccctgacagaggagcagaggaagaagattgaagaaaatcggcagaaggccctggccaggagagctgagaagctgctggccgagcagcaccagaggaccagcagcggcaccagcattgctggcaaccccttccaggccaagcagggccccagccagaacttcccccgggagagctgcaagcctgtgtcccatggagtcatcttcaagcagcagaacctgagcagcagcagcaatgctgaccagaggcctcatgacagccacagcttccaggccaagggcatctggaagaagccagaggagatgcccacagcctgccccggccacagccccaggagccagatggccctgaccggcatcagcccccccctggcccagagccccccagaggtgcccaagcagcagctgctgtcctatgagctgggccagggccacgcccaggccagccctgagatccgcttcaccccatttgccaaccccacccacaagcccctggccaagcccaagagcagccaggagaccccagcccacagcagcggccagcccccaagagatgccaagctggaggccaagacagccaaggccagccccagcggccagaacatctcctacatccacagcagcagcgagagcgtgacccccaggacagagggccgcctgcagcagaagagcggcagctctgtgcagaagggcgtgaacagccagaagggcaaatgtgtgagaaatggagaccgcttccaggtgctgattggctacaatgctgagctgattgctgtgttcaagaccctgcccagcaagaactatgaccctgacaccaagacctggaacttctccatgaatgactacagcgccctgatgaaggccgcccagagcctgcccaccgtgaacctgcagcccctggagtgggcctacggcagcagcgagagccccagcaccagcagcgagggccaggccggcctgcccagcgcccccagcctgagctttgtgaagggccgctgcatgctgatcagccgggcctactttgaagctgacatctcctacagccaggacctgattgccctcttcaagcagatggacagcagaagatatgatgtgaagaccaggaagtggagcttcctgctggaggagcacagcaagctgattgccaaggtgcgctgcctgccccaggtgcagctggaccccctgcccaccaccctgaccctggcctttgccagccagctgaagaagaccagcctgagcctgaccccagatgtgcctgaggccgacctgtctgaggtggaccccaagctggtgagcaacctgatgcccttccagagagctggggtgaactttgccatcgccaagggcggccgcctgctgctggctgatgacatgggcctgggcaagaccatccaggccatctgcatcgccgccttctacaggaaggagtggcccctgctggtggtggtgcccagctctgtgcgcttcacctgggagcaggccttcctgcgctggctgcccagcctgagcccagactgcatcaacgtggtggtgacaggcaaggaccggctgacagctggcctcatcaacatcgtgtcctttgacctgctgagcaagctggagaagcagctgaagacccccttcaaggtggtgatcattgatgagagccacttcctgaagaacagcaggacagcccgctgccgggccgccatgcctgtgctgaaggtggccaagagggtcatcctgctgagcggcaccccagccatgagcaggcctgctgagctgtacacccagatcatcgctgtgaagcccaccttcttcccccagttccacgccttcggcctgcgctactgtgatgccaagaggatgccctggggctgggactacagcggcagcagcaacctgggggagctgaagctgctgctggaggaggccgtgatgctgcggcggctgaagagtgatgtgctgagccagctgcctgccaagcagaggaagatcgtggtgattgcccctggccgcatcaatgcccggaccagggctgccctggatgctgctgccaaggagatgaccaccaaggacaagaccaagcagcagcagaaggatgccctgatcctcttcttcaacagaacagctgaggccaagatccccagcgtcatcgagtacatcctggacctgctggagagcggccgggagaagttcctggtgtttgcccaccacaaggtggtgctggatgccatcacccaggagctggagaggaagcacgtgcagcacatcagaattgatggcagcaccagcagcgctgagcgggaggacctgtgccagcagttccagctgtctgaaagacatgctgtggccgtgctgagcatcacagctgccaacatgggcctgaccttcagcagcgctgacctggtggtgtttgctgagctgttctggaaccctggggtgctgatccaggctgaagatagagtgcacagaattggccagaccagctctgtgggcatccactacctggtggccaagggcacagcagatgactacctgtggcccctcatccaggagaagatcaaggtgctggccgaggccggcctgtctgagaccaacttcagcgagatgacagagagcacagactacctgtacaaggaccccaagcagcagaagatctatgacctcttccagaagagctttgagaaggagggcagtgacatggagctgctggaggccgctgagagctttgaccccggcagcgccagcggcaccagcggcagcagcagccagaacatgggagacaccctggatgagagcagcctgacagccagcccccagaagaagagaagatttgagttctttgacaactgggacagcttcaccagccccctgtag

SEQ ID NO: 267351 - DNA, 60 bp, Artificial Sequence
  derived and/or modified sequence
atgagcctgcccctgacagaggagcagaggaagaagattgaagaaaatcggcagaagtag

SEQ ID NO: 267352 - DNA, 2865 bp, Artificial Sequence
  derived and/or modified sequence
atgagcctgcccctgaccgaggagcagcggaagaagatcgaggagaatcgccaaaaggccttggcccgtcgcgcagagaaactgcttgctgagcaacatcaacgcacaagttctggcacctccatcgccgggaatcctttccaagccaaacagggaccttctcagaattttccgcgggaatcttgcaagcctgtgtcccatggtgtgatttttaaacagcagaatctgagctcttcttccaacgcagatcaacgcccacatgattctcactcctttcaggccaaggggatctggaagaaacccgaggagatgccaactgcatgccccggccatagcccccgtagccagatggccctcaccggaatcagtcccccacttgcccagtcaccccctgaagtgcccaaacagcaactgctgagttatgagctaggtcaaggccacgctcaggcttcaccagaaatccggtttacacccttcgctaatccaacccacaagccgctggccaaacccaaatccagccaggagacgcccgcccacagttcagggcagccgccacgtgacgcaaagctcgaggccaagacagccaaagcgagtcctagtgggcagaatatttcctatattcactccagttcagagagcgttacaccgaggaccgaaggccggctgcaacagaagagtggctcttccgtgcagaaaggagtgaacagtcagaaggggaagtgcgtccgaaatggtgaccgattccaggtgctgataggctataatgcagaattgatagcagtcttcaagaccctgcctagcaagaactacgaccctgatacaaaaacctggaacttttcgatgaacgactactctgcccttatgaaggccgcacagagcctgccaacggtgaacttgcagccacttgagtgggcttatggcagcagcgaatccccctccacctcctccgaaggtcaagctggcttaccttcggcgccttccctgagcttcgtgaaaggcagatgtatgctcatttcaagggcatacttcgaggcggacatttcatacagtcaggacctgatagccctctttaaacagatggactcgcggcgttacgacgtgaaaacccgcaagtggtcctttctactggaagaacatagcaaacttatcgctaaggttaggtgcttacctcaggtccagctggatcctttgcccacaacactcactttggcattcgcaagccagctcaaaaagacaagcttatcactgacacctgatgtgccagaagccgacttgtccgaggtggacccaaagttggtatccaatttaatgcccttccagcgagctggagtgaactttgccatcgccaagggaggccgcttgctgctcgccgacgatatgggcttgggcaaaactattcaggccatatgtattgcagccttctatcgaaaggaatggccccttttagtcgtcgtccccagctccgtgcgtttcacctgggaacaagccttcttacgctggctgccaagcttgagcccagattgtattaatgtggttgtcaccggtaaggaccggcttacagcgggtcttatcaacattgtcagttttgacctgctttctaaactggaaaaacaattaaagactccctttaaggtcgtgatcatcgacgaatcccacttcctgaagaattcacgcaccgctaggtgtagagcggccatgccagtcctgaaggttgcaaagcgggttatcctcctctcagggaccccggctatgagccggcctgctgaattgtatacccaaataatcgcagtcaaacctacattttttccccagttccacgcgtttgggctcagatactgcgacgctaaacgaatgccttggggatgggattactcaggctcctccaatctaggcgaactcaaactcctgctggaggaagccgtaatgttgcggagattgaagagtgatgtcctgagccaattacctgctaaacaaagaaaaatcgttgtgatcgcgccagggcggattaacgccaggactcgcgccgccctggacgcagccgccaaggagatgactactaaggacaagaccaaacagcagcaaaaggacgcactcatcctcttttttaatcgcactgccgaggctaagattcctagtgtgatcgagtacattctggatttgcttgaaagcggacgggaaaagttcttagtctttgcgcaccataaagtcgtgctggatgccatcacccaggagctggaacgaaagcacgtccagcacattcgcatcgacgggagcactagcagcgcggagcgggaagatctgtgtcagcagtttcagctgtccgagcggcatgccgttgctgtgctttcaattacggccgctaatatggggttgacgttctcatctgcggacttagtagtgttcgccgaattgttttggaatccgggcgttctgatccaggctgaggaccgggtgcataggattgggcagacctcaagcgtggggatccattatttagtggcaaaagggactgctgacgactatctgtggcccctgatacaggagaagataaaagttctggctgaagcagggctgtctgagacaaacttcagcgaaatgacagagtccaccgactatctctataaagatcccaagcaacagaagatctatgacttgtttcagaagtccttcgagaaagagggtagcgatatggagctactggaagcggctgaaagttttgaccctgggtcagcgagtgggacatctgggagcagctctcagaatatgggtgatacccttgacgaatcctctctaaccgcttcaccacagaaaaagagacggtttgaattttttgataactgggactcatttacctcgccactgtag

SEQ ID NO: 267353 - DNA, 2865 bp, Artificial Sequence
  derived and/or modified sequence
atgagcctgcccctgaccgaggagcagcggaagaagatcgaggagaacagacagaaggccctcgccagacgtgcggagaagctcctggcagaacagcatcaaagaacttccagcggtacctcaatcgccggcaaccccttccaagcaaagcagggaccctcacagaacttcccacgggagagctgtaaacctgtatcgcacggggttatcttcaagcaacagaatctgtcatcttcctctaacgctgatcaaagacctcatgattcccactcgtttcaggctaagggcatctggaaaaagccagaggagatgcctacagcctgccctggccattcccccagatcccagatggcccttactggcatctcgccgcctctagcacaatctcctcctgaagttccaaagcagcagttgttgagctatgaacttggacaaggtcacgcacaggctagcccagaaattagattcactccttttgctaatccgacacacaagcccctcgctaagcctaagtcttcccaggaaacacccgcccattcgtcgggacagccccctcgcgacgcaaagctcgaagctaagacagccaaagcttccccctctggccagaacattagctacattcacagttccagtgagagtgtcacacctcggacagaagggagattacagcagaaaagcggttcttctgttcagaaaggggtgaactcccagaaggggaaatgtgtaagaaacggagataggttccaggtactgataggatacaatgccgaactgattgccgttttcaaaactttaccctccaaaaactacgaccctgataccaagacctggaattttagcatgaacgactattccgcactgatgaaggcagctcagtcactgccgacggtcaacctgcaaccattagagtgggcctacggctcctcagagtcgccctccacttccagcgaaggtcaggccgggttacccagcgccccgtccctctcgtttgttaaggggaggtgtatgctgattagccgggcgtactttgaagcagatatctcatatagccaggacttaatagcactgtttaagcagatggacagcaggaggtatgacgtgaagaccagaaagtggagtttcctgctggaagagcacagcaaactgatcgctaaggtccggtgcctgccacaggtccagctggatccgctgcccaccaccttgactctggcttttgcgagccagctcaaaaaaacaagtctcagtctcaccccagatgtccccgaggccgatctctccgaggtcgaccctaaactggtctcgaacctcatgcctttccagagagccggggtgaacttcgctatagccaaagggggccgcctgctgttagctgacgacatgggattgggtaaaaccatccaagccatttgcatcgccgccttctaccgaaaagaatggccacttctggtggttgtgccgtccagcgttagattcacctgggagcaggccttcctgaggtggttgccgtcactctctcccgactgcataaatgtggtagtcaccggtaaggaccgcttgacagctggtctgatcaacatcgtgtcctttgatctgctgtccaagctcgaaaaacaactgaaaacgccatttaaggtggtgatcatcgacgaatcacatttcctgaaaaatagtagaactgcgcgctgccgcgctgccatgccagtattaaaggtggcaaaacgtgtcatcctgctgtcaggcaccccagccatgtctcggcccgctgaactgtacacccagataatcgccgtgaagccaaccttcttcccacagttccacgcttttggcttacgatattgcgatgcgaagcggatgccttggggctgggattattccggctcctccaatctgggcgaactgaaacttctgctagaggaagcggtgatgttgcgacgtctgaaaagcgacgtcctatcacaattacccgccaagcagagaaaaattgttgtcatcgcgcccggacgcattaacgcccgcacaagggctgcacttgatgctgccgctaaagaaatgaccacaaaggacaaaactaagcagcagcagaaggatgcgctaatactgttttttaatcgcactgcagaagccaaaatcccttctgtgattgagtatatcctggacctgttagagtcagggagggagaagttcctggtcttcgcacaccacaaagtggtgctcgacgcaatcactcaggaacttgagagaaagcacgtgcaacatataagaatcgatgggtctacttctagcgcagagcgggaggatctttgtcagcagttccaattgagcgaacgccacgctgttgccgtgctgtccattaccgccgctaatatgggccttacattctccagtgcggatctcgtagtgttcgcagagctcttctggaatccaggggtgctcattcaggcagaggatagggtacaccggatcggtcagactagcagcgtgggtattcattatcttgtggctaaaggaactgccgacgattacctttggccccttatccaagaaaaaatcaaggtgctggccgaggccggcctctccgagaccaacttctctgaaatgacagagtctaccgactatctctacaaagatccaaagcagcaaaagatctacgatctgttccaaaagtcctttgaaaaggaggggtctgacatggagctgttggaggccgccgagtctttcgatcccggctcggcctcaggaacttcaggctctagcagtcagaacatgggggacaccctcgacgagagctctctgacggcaagtccccaaaagaagcggcgatttgagtttttcgataattgggatagcttcacatcccccctgtag

SEQ ID NO: 267354 - DNA, 60 bp, Artificial Sequence
  derived and/or modified sequence
atgagcctgcccctgaccgaggagcagcggaagaagatcgaggagaaccgtcagaaatag

SEQ ID NO: 267355 - DNA, 2865 bp, Artificial Sequence
  derived and/or modified sequence
atgagcctgcccctaaccgaagaacagagaaagaagattgaagagaacagacagaaggcattagctaggagggccgaaaaactgctcgctgaacaacatcagcgaacttcttcggggacgagcattgccggtaatcctttccaagccaagcagggaccctcgcaaaacttccctagagagtcatgcaagcctgtgagtcacggcgtgatctttaaacagcagaatctctcgagctcctcaaatgccgatcagaggccacacgatagtcacagtttccaggctaagggcatttggaaaaagcccgaagaaatgcctactgcctgccctgggcacagcccgcgatcgcagatggctcttacggggatcagcccccctctggcacagtcaccgcctgaggttcccaagcagcagctcctaagctatgaattgggtcaaggccacgcccaggcgagccctgagattcggtttacaccatttgccaatcccactcataagcctctggctaagccgaagtcatctcaggagaccccggcacacagctcgggtcagcctccaagggatgccaagttggaggctaagactgccaaagcttccccatctggacaaaacatctcatatatccactcatcctctgagtctgtgaccccccgtaccgagggaaggctgcaacagaaatccgggtcatctgtgcagaagggagtcaactcccagaaaggtaagtgtgtcagaaacggcgaccggtttcaggtgctgatcgggtataatgctgagctcatcgctgtatttaagaccctacctagcaaaaattacgaccctgataccaaaacctggaattttagcatgaacgactactcagcgctcatgaaagcagctcagagcttgcccaccgtgaacctgcagccattggaatgggcctacgggtctagcgaaagcccatctacctcgtctgaaggacaggcagggttaccatcagcaccatcactgagttttgtgaagggaagatgtatgttgatatcccgcgcatactttgaggccgatatcagttattcgcaggacctgatcgccctgttcaagcaaatggattcaagacgctacgacgtgaaaaccaggaagtggagcttcttactcgaggagcattccaaactgatcgccaaagttagatgcctgccccaagtgcagctcgatcctctacccacaaccctaactctggcatttgcctcccagctgaagaagaccagcctctccctgactccagacgtgccggaggcagacctgtcagaggtcgaccccaaattggtatcaaacttgatgcccttccagagagccggagtcaatttcgctattgctaagggcggtaggttgcttttggctgatgatatggggctcggcaaaactattcaagcgatatgcattgctgccttctacagaaaggagtggccgctgctcgtggtggttccatcaagtgtccgatttacatgggagcaggcatttctgcgatggctaccctccctcagccccgattgcatcaatgttgtggttacaggaaaggacagattgactgctggccttatcaatattgtttcatttgacctgctaagcaagttggagaagcaactgaagactcctttcaaggtcgttattatcgatgaatctcattttttgaagaattcccggaccgcaagatgtcgagcagctatgcccgtgctcaaggtagctaagcgagtgatactgctgtccggtacccccgcaatgagtcgaccagccgaactgtacacgcaaattattgcagtcaaacccacattttttccacagtttcatgccttcgggttgagatattgcgacgccaagcgcatgccttggggctgggattattctggctcatccaacttaggggaactgaaattgcttctggaagaggcagtgatgctgaggaggctcaagtcagatgttctctcccagctgccagcaaagcagaggaagatcgtcgttatcgcacccggtcgcattaatgccagaactagggccgctctcgatgcagcagctaaggagatgaccacaaaagataagactaaacagcagcagaaggacgctctaatcttgttttttaatagaactgccgaagcaaagatccctagtgtgattgagtacatcctggacctgttagaatctggtagggaaaaattcctggttttcgcccatcataaagtggtcttagatgctatcacacaggagcttgaacgaaaacacgttcagcacatcagaatcgatggttccacttcttcagccgagcgcgaggatctgtgccaacaattccagctgtcagagcgtcacgctgtagccgtactatctattaccgcagcaaacatgggtctcacctttagcagcgcagatctcgtggtgttcgcggaactgttttggaacccgggtgtgctgattcaggccgaggatagagtccaccgcattggccaaacatcatcagtaggcatacactacctggtggcgaaaggcactgcagacgattatttatggcctctgattcaagagaagatcaaggtccttgctgaggccggtctgtccgagaccaatttcagtgaaatgacagagtccaccgattatctttataaagaccctaaacagcagaaaatctacgatctttttcaaaagagttttgagaaggaagggtccgacatggagttgctggaggcagctgagagtttcgaccccggttccgcttccggaactagtggtagctcctcacagaatatgggcgacacgctagacgagtcttctctcaccgccagcccacaaaagaaaagaaggttcgaatttttcgacaattgggattccttcacaagcccgctgtag

SEQ ID NO: 267356 - DNA, 2865 bp, Artificial Sequence
  derived and/or modified sequence
atgtctctgcccctgacagaggagcagagaaagaagatagaggagaaccggcagaaggccctcgccaggagggccgaaaagttgctcgccgaacagcaccagcgaacttccagcggaacttccatcgccggaaacccttttcaagcaaaacaggggccatcccaaaacttccctcgggagtcatgcaaacccgtgtctcatggcgtaatctttaagcagcaaaatctgagctcatcatctaacgcagatcagaggccacacgactcccactcatttcaagctaagggaatttggaaaaaacctgaggaaatgcccaccgcttgtcccggacatagcccgagatcccagatggctctaacaggtatatctccccctctggcgcagtcccctccggaagtgcccaaacagcagttgctgagctacgagttgggacagggccacgcacaggcttcaccagagattcgcttcaccccttttgcgaaccccacccacaagcctttggccaaaccgaaatccagccaagaaacacccgctcactctagcggccagcccccacgggacgccaagctcgaggccaaaaccgcaaaggccagtccttccggacagaacatttcttacatacacagctcgagtgaaagtgttacccccaggacagagggcagactccagcaaaaaagcgggtcctctgtacagaaaggagtgaacagccagaaaggcaaatgtgttagaaacggagacagattccaggtgttgattggttataacgctgagctgatagccgttttcaaaaccttgccgtccaagaattatgaccccgacaccaaaacctggaatttcagtatgaacgattacagcgcacttatgaaagctgcgcagtctcttcccactgtgaacctgcagcctctggaatgggcttatgggagttccgagagccccagcacaagcagcgaaggccaagcagggttgccaagtgctccgtccctgtccttcgtcaagggcaggtgcatgctgatcagccgggcatacttcgaggcggatatctcctatagccaagacctgatcgcgttatttaagcagatggattcaaggaggtatgacgttaagactaggaaatggagctttctgctcgaggagcattccaagttgattgctaaggttaggtgccttcctcaggttcagctggacccactgccaacgacactcaccctggccttcgcctctcagttaaagaagacctccctttctctgacccctgatgtcccagaagcagacctctccgaagtggacccaaagcttgtgtccaacctaatgccatttcagcgcgctggagtgaatttcgccatcgcaaaaggtggcaggcttttgctcgctgacgacatgggcctcggcaagacgatccaggcaatctgtatcgctgctttctatagaaaggagtggcctcttcttgtggtggtgccctcctctgtgcggttcacctgggaacaggcgtttctccggtggctgccctccctgtcaccagactgtataaatgtcgtcgtaactggcaaagacagactgactgctggattaatcaatatcgtgagttttgatcttctctctaagctcgagaagcagcttaagactccattcaaggtagtgatcattgacgagagccacttcttgaagaattcccgcaccgctagatgtagggctgctatgcccgtgttgaaggtcgccaaaagggtcattctcttgtctggaacacccgctatgagtcggcctgcagaactctacacccagataatcgctgttaagcccaccttcttcccccagttccacgctttcggtttaaggtattgtgacgcaaaaagaatgccttgggggtgggattattctggtagcagcaatctgggagagctgaaactcttactagaagaggctgtcatgctaagaaggctgaaaagtgacgtgcttagtcaactgcctgctaagcagcggaagattgtcgttatagcaccaggacgcatcaatgccagaacacgggcagctttggatgctgccgctaaagagatgacaacaaaagacaagacaaagcagcagcagaaggatgcgttgattctttttttcaacaggacggctgaagccaagatcccatccgtgatcgagtacatcctcgatctgctggagtcggggagagaaaagttcttggtcttcgcccatcataaggtagtcctggacgcaataacgcaggagctagaacgtaagcacgtccagcacatccgaattgacggttcaaccagctccgccgaaagagaagacctgtgtcagcaattccaactgagcgagagacatgctgttgccgtcttgtcaatcaccgccgctaatatgggattaaccttttcctcagcagatctcgtcgtatttgccgaacttttctggaaccctggcgttctgatccaggctgaagaccgggtgcaccgaataggacagacgtcatccgtgggcatccactacctggtggccaagggcactgccgacgactatctgtggccactgattcaggagaagattaaagtcctggctgaggcaggattgtccgaaacaaatttcagcgaaatgactgaatccacagattatctgtacaaggatcctaagcagcaaaagatatacgacctgttccagaagagcttcgagaaggagggatctgacatggagctcctggaggccgcagaatcctttgatcctggaagcgcatccggaactagtggaagctcgtcgcagaatatgggcgacacgttggatgaaagtagcctgacggcttccccacagaagaaaaggaggtttgagtttttcgataattgggatagttttacttctccgctatag

SEQ ID NO: 267357 - DNA, 60 bp, Artificial Sequence
  derived and/or modified sequence
atgagcctgcccctcacagaggaacagagaaaaaagatagaagaaaacagacagaagtag

SEQ ID NO: 267358 - DNA, 3271 bp, Artificial Sequence
  derived and/or modified sequence
atcattcttacttttggaagcgaaactgcggccgcgttgcctgctgggaaatgtagttcagcggtggcctagcccttcaggcctggccgctacaataaggctggcgaactcgcagcgcttgaatacccgtggcctaaccgtccactcggaagaccggtcccgctcgggaggctctgcagtcgcgcctggggtcagggccgggggcgaatgtggctcgcgttctaggcctccctgggttggaaaaagactatgttagcaagtgtcacgccatgcttttgccaactttccaattaaaggttgacattcctgcataagcatttctctgtgaaaatgtccttgcctcttacagaggagcagaggaaaaagattgaagagaatcgacaaaaggctctggcccgcagagctgagaagttattggcagaacagcatcagaggactagctcgggcacctccattgctggcaacccattccaggccaagcaaggcccatcccaaaatttcccaagggagtcttgtaagccagtgagccatggtgtcattttcaagcaacagaatctcagtagctcatctaatgctgaccaaagacctcatgattcccacagttttcaggcaaagggaatatggaaaaagccagaagaaatgcccacagcctgcccaggccacagtccacgtagtcaaatggctctcactggaatctctcctcccttggcacaaagtcctccagaggtccctaaacaacagctcttgagttatgagttaggtcaaggtcatgctcaggcttcacctgagatcaggttcacaccctttgctaacccaactcataagcctctggccaaaccaaagagttcccaagagacaccagctcattcctctggacagcctcccagggatgctaagttagaggccaagacagcaaaagcctccccttcggggcagaacatttcttacatccattctagctcagagagtgtaacgcccaggacagaaggaagactccagcagaagtcagggtcctcagtccaaaaaggagtgaactctcagaagggaaagtgcgtaaggaacggcgatcgtttccaggtgttgattgggtacaatgcggaactcattgcagtgtttaagaccctgcccagcaagaattatgatcctgacaccaagacgtggaacttcagcatgaatgactatagtgccctgatgaaagcagcccagagcctccccacggtcaacctgcagcctctggaatgggcctatggcagcagcgagtcaccctccaccagcagtgagggacaggccggccttccatcagctccatccctttcatttgtcaaagggcgatgcatgctcatctccagggcctacttcgaggcagacatcagttattcacaggaccttattgcgctttttaaacagatggattccagaagatatgatgtcaagaccaggaagtggagctttctcttggaagagcacagtaaactaattgcaaaggtgcgctgcctcccacaagttcagctggaccctctgcccacgactctcaccctggcgtttgcttctcagctcaagaagacatctctcagtctcacgccagatgtcccagaggcagacctttctgaagtggaccccaagctcgtgtctaatctgatgccctttcagagagctggagtcaattttgccatagccaaaggaggccgcctgctgctcgctgacgacatgggcctggggaagaccatccaagccatctgcatcgcagccttttaccggaaggagtggccgctcctggtggtggtgccatcctccgtgcgcttcacctgggagcaggccttccttcggtggctgccatctctgagcccagattgcatcaacgtcgtggtgactgggaaggaccgcctgacagctggcctgatcaacattgtcagctttgaccttcttagcaagttggaaaaacagctaaaaaccccttttaaagttgtcatcattgatgaatctcacttcctcaaaaacagtaggactgcccgctgtcgagcagctatgccggtcctaaaggttgccaagagggtgatcctgttgtcgggcacaccagccatgtcccggcccgcagagctctacacgcagatcatcgcagtcaagccaactttcttcccccagtttcatgcctttggacttcgctactgtgatgccaaacggatgccttgggggtgggactactcaggttcctccaacctgggagagctgaagctcctgctggaggaagcagtcatgctgcggcgcctcaagtccgacgtcctttcccagctgcctgccaagcagcgcaagatagtggtgattgccccaggacggatcaatgccaggaccagagctgccctggatgctgcagccaaggaaatgaccaccaaggacaaaactaaacagcagcagaaagatgccctcattctcttcttcaacagaacagctgaagctaaaatcccatctgtcattgaatatatcttggacctactggaaagtggaagagagaagtttttagtatttgcacaccataaggtggtcctggacgcaattacgcaagagcttgagagaaagcacgtgcagcacatccgcatcgatggctccacctcatcagctgagcgggaggacctgtgccagcagttccaactgtcggagaggcatgctgtggccgtgctgtccatcaccgctgccaatatgggcctcaccttctcctcggctgacctggtggtgtttgctgagctgttttggaacccaggggtgctgatccaggctgaggaccgcgtgcaccgcattggacagaccagctccgtgggcattcactacctcgtggcaaagggcacagctgatgactacctttggcccctgattcaagagaagattaaagttctggcagaagccgggctttctgagaccaatttttcagaaatgacagaatccactgattacctctacaaggacccaaagcagcagaagatctacgacctattccagaagtcctttgagaaagaaggaagtgatatggagctcctggaagcagcagagtcctttgacccaggaagtgcttcaggaacatctggaagtagttcccagaacatgggagacaccctggatgaaagctcattgacagccagtccacagaagaaaaggagatttgaattttttgataactgggacagctttacgtctcccctgtaaaaggggcaaaaagaaaaaaataaaaagcattttaaaatcatggaattgaaataaaataatgtattttgttttaaaa

SEQ ID NO: 267359 - DNA, 3056 bp, Artificial Sequence
  derived and/or modified sequence
aagtggagatcgtaggggtgggagtggggcgtggcgcccgcttaccttgaggctgggttggaaaaagactatgttagcaagtgtcacgccatgcttttgccaactttccaattaaaggttgacattcctgcataagcatttctctgtgaaaatgtccttgcctcttacagaggagcagaggaaaaagattgaagagaatcgacaaaaggctctggcccgcagagctgagaagttattggcagaacagcatcagaggactagctcgggcacctccattgctggcaacccattccaggccaagcaaggcccatcccaaaatttcccaagggagtcttgtaagccagtgagccatggtgtcattttcaagcaacagaatctcagtagctcatctaatgctgaccaaagacctcatgattcccacagttttcaggcaaagggaatatggaaaaagccagaagaaatgcccacagcctgcccaggccacagtccacgtagtcaaatggctctcactggaatctctcctcccttggcacaaagtcctccagaggtccctaaacaacagctcttgagttatgagttaggtcaaggtcatgctcaggcttcacctgagatcaggttcacaccctttgctaacccaactcataagcctctggccaaaccaaagagttcccaagagacaccagctcattcctctggacagcctcccagggatgctaagttagaggccaagacagcaaaagcctccccttcggggcagaacatttcttacatccattctagctcagagagtgtaacgcccaggacagaaggaagactccagcagaagtcagggtcctcagtccaaaaaggagtgaactctcagaagggaaagtgcgtaaggaacggcgatcgtttccaggtgttgattgggtacaatgcggaactcattgcagtgtttaagaccctgcccagcaagaattatgatcctgacaccaagacgtggaacttcagcatgaatgactatagtgccctgatgaaagcagcccagagcctccccacggtcaacctgcagcctctggaatgggcctatggcagcagcgagtcaccctccaccagcagtgagggacaggccggccttccatcagctccatccctttcatttgtcaaagggcgatgcatgctcatctccagggcctacttcgaggcagacatcagttattcacaggaccttattgcgctttttaaacagatggattccagaagatatgatgtcaagaccaggaagtggagctttctcttggaagagcacagtaaactaattgcaaaggtgcgctgcctcccacaagttcagctggaccctctgcccacgactctcaccctggcgtttgcttctcagctcaagaagacatctctcagtctcacgccagatgtcccagaggcagacctttctgaagtggaccccaagctcgtgtctaatctgatgccctttcagagagctggagtcaattttgccatagccaaaggaggccgcctgctgctcgctgacgacatgggcctggggaagaccatccaagccatctgcatcgcagccttttaccggaaggagtggccgctcctggtggtggtgccatcctccgtgcgcttcacctgggagcaggccttccttcggtggctgccatctctgagcccagattgcatcaacgtcgtggtgactgggaaggaccgcctgacagctggcctgatcaacattgtcagctttgaccttcttagcaagttggaaaaacagctaaaaaccccttttaaagttgtcatcattgatgaatctcacttcctcaaaaacagtaggactgcccgctgtcgagcagctatgccggtcctaaaggttgccaagagggtgatcctgttgtcgggcacaccagccatgtcccggcccgcagagctctacacgcagatcatcgcagtcaagccaactttcttcccccagtttcatgcctttggacttcgctactgtgatgccaaacggatgccttgggggtgggactactcaggttcctccaacctgggagagctgaagctcctgctggaggaagcagtcatgctgcggcgcctcaagtccgacgtcctttcccagctgcctgccaagcagcgcaagatagtggtgattgccccaggacggatcaatgccaggaccagagctgccctggatgctgcagccaaggaaatgaccaccaaggacaaaactaaacagcagcagaaagatgccctcattctcttcttcaacagaacagctgaagctaaaatcccatctgtcattgaatatatcttggacctactggaaagtggaagagagaagtttttagtatttgcacaccataaggtggtcctggacgcaattacgcaagagcttgagagaaagcacgtgcagcacatccgcatcgatggctccacctcatcagctgagcgggaggacctgtgccagcagttccaactgtcggagaggcatgctgtggccgtgctgtccatcaccgctgccaatatgggcctcaccttctcctcggctgacctggtggtgtttgctgagctgttttggaacccaggggtgctgatccaggctgaggaccgcgtgcaccgcattggacagaccagctccgtgggcattcactacctcgtggcaaagggcacagctgatgactacctttggcccctgattcaagagaagattaaagttctggcagaagccgggctttctgagaccaatttttcagaaatgacagaatccactgattacctctacaaggacccaaagcagcagaagatctacgacctattccagaagtcctttgagaaagaaggaagtgatatggagctcctggaagcagcagagtcctttgacccaggaagtgcttcaggaacatctggaagtagttcccagaacatgggagacaccctggatgaaagctcattgacagccagtccacagaagaaaaggagatttgaattttttgataactgggacagctttacgtctcccctgtaaaaggggcaaaaagaaaaaaataaaaagcattttaaaatca

SEQ ID NO: 267360 - protein, 800 aa, Artificial Sequence
  derived and/or modified sequence
MSSLGASFVQIKFDDLQFFENCGGGSFGSVYRAKWISQDKEVAVKKLLKIEKEAEILSVLSHRNIIQFYGVILEPPNYGIVTEYASLGSLYDYINSNRSEEMDMDHIMTWATDVAKGMHYLHMEAPVKVIHRDLKSRNVVIAADGVLKICDFGASRFHNHTTHMSLVGTFPWMAPEVIQSLPVSETCDTYSYGVVLWEMLTREVPFKGLEGLQVAWLVVEKNERLTIPSSCPRSFAELLHQCWEADAKKRPSFKQIISILESMSNDTSLPDKCNSFLHNKAEWRCEIEATLERLKKLERDLSFKEQELKERERRLKMWEQKLTEQSNTPLLPSFEIGAWTEDDVYCWVQQLVRKGDSSAEMSVYASLFKENNITGKRLLLLEEEDLKDMGIVSKGHIIHFKSAIEKLTHDYINLFHFPPLIKDSGGEPEENEEKIVNLELVFGFHLKPGTGPQDCKWKMYMEMDGDEIAITYIKDVTFNTNLPDAEILKMTKPPFVMEKWIVGIAKSQTVECTVTYESDVRTPKSTKHVHSIQWSRTKPQDEVKAVQLAIQTLFTNSDGNPGSRSDSSADCQWLDTLRMRQIASNTSLQRSQSNPILGSPFFSHFDGQDSYAAAVRRPQVPIKYQQITPVNQSRSSSPTQYGLTKNFSSLHLNSRDSGFSSGNTDTSSERGRYSDRSRNKYGRGSISLNSSPRGRYSGKSQHSTPSRGRYPGKFYRVSQSALNPHQSPDFKRSPRDLHQPNTIPGMPLHPETDSRASEEDSKVSEGGWTKVEYRKKPHRPSPAKTNKERARGDHRGWRNF

SEQ ID NO: 267361 - DNA, 2403 bp, Artificial Sequence
  derived and/or modified sequence
atgagcagcctgggcgccagcttcgtgcagatcaagttcgacgacctgcagttcttcgagaactgcggcggcggcagcttcggcagcgtgtacagagccaagtggatcagccaggacaaggaggtggccgtgaagaagctgctgaagatcgagaaggaggccgagatcctgagcgtgctgagccacagaaacatcatccagttctacggcgtgatcctggagccccccaactacggcatcgtgaccgagtacgccagcctgggcagcctgtacgactacatcaacagcaacagaagcgaggagatggacatggaccacatcatgacctgggccaccgacgtggccaagggcatgcactacctgcacatggaggcccccgtgaaggtgatccacagagacctgaagagcagaaacgtggtgatcgccgccgacggcgtgctgaagatctgcgacttcggcgccagcagattccacaaccacaccacccacatgagcctggtgggcaccttcccctggatggcccccgaggtgatccagagcctgcccgtgagcgagacctgcgacacctacagctacggcgtggtgctgtgggagatgctgaccagagaggtgcccttcaagggcctggagggcctgcaggtggcctggctggtggtggagaagaacgagagactgaccatccccagcagctgccccagaagcttcgccgagctgctgcaccagtgctgggaggccgacgccaagaagagacccagcttcaagcagatcatcagcatcctggagagcatgagcaacgacaccagcctgcccgacaagtgcaacagcttcctgcacaacaaggccgagtggagatgcgagatcgaggccaccctggagagactgaagaagctggagagagacctgagcttcaaggagcaggagctgaaggagagagagagaagactgaagatgtgggagcagaagctgaccgagcagagcaacacccccctgctgcccagcttcgagatcggcgcctggaccgaggacgacgtgtactgctgggtgcagcagctggtgagaaagggcgacagcagcgccgagatgagcgtgtacgccagcctgttcaaggagaacaacatcaccggcaagagactgctgctgctggaggaggaggacctgaaggacatgggcatcgtgagcaagggccacatcatccacttcaagagcgccatcgagaagctgacccacgactacatcaacctgttccacttcccccccctgatcaaggacagcggcggcgagcccgaggagaacgaggagaagatcgtgaacctggagctggtgttcggcttccacctgaagcccggcaccggcccccaggactgcaagtggaagatgtacatggagatggacggcgacgagatcgccatcacctacatcaaggacgtgaccttcaacaccaacctgcccgacgccgagatcctgaagatgaccaagccccccttcgtgatggagaagtggatcgtgggcatcgccaagagccagaccgtggagtgcaccgtgacctacgagagcgacgtgagaacccccaagagcaccaagcacgtgcacagcatccagtggagcagaaccaagccccaggacgaggtgaaggccgtgcagctggccatccagaccctgttcaccaacagcgacggcaaccccggcagcagaagcgacagcagcgccgactgccagtggctggacaccctgagaatgagacagatcgccagcaacaccagcctgcagagaagccagagcaaccccatcctgggcagccccttcttcagccacttcgacggccaggacagctacgccgccgccgtgagaagaccccaggtgcccatcaagtaccagcagatcacccccgtgaaccagagcagaagcagcagccccacccagtacggcctgaccaagaacttcagcagcctgcacctgaacagcagagacagcggcttcagcagcggcaacaccgacaccagcagcgagagaggcagatacagcgacagaagcagaaacaagtacggcagaggcagcatcagcctgaacagcagccccagaggcagatacagcggcaagagccagcacagcacccccagcagaggcagataccccggcaagttctacagagtgagccagagcgccctgaacccccaccagagccccgacttcaagagaagccccagagacctgcaccagcccaacaccatccccggcatgcccctgcaccccgagaccgacagcagagccagcgaggaggacagcaaggtgagcgagggcggctggaccaaggtggagtacagaaagaagccccacagacccagccccgccaagaccaacaaggagagagccagaggcgaccacagaggctggagaaacttctag

SEQ ID NO: 267362 - DNA, 2403 bp, Artificial Sequence
  derived and/or modified sequence
atgtcctccctgggtgcgagttttgtacagatcaaatttgatgacctccagttcttcgagaattgtggaggaggaagctttgggtccgtgtatcgggccaagtggattagccaagacaaagaggtggccgtcaaaaagttgcttaaaatagagaaagaagccgagattcttagtgtgctgagccataggaacatcatacaattttacggggtaattctggagccgcctaattacggaatcgtgactgagtacgctagtctcggcagtctttatgactatatcaacagcaaccggtctgaggaaatggacatggatcatatcatgacatgggccacagacgttgccaaggggatgcattacttgcatatggaggccccagtaaaagtgatccaccgggacttaaagtcgagaaatgtggtgatcgccgccgacggcgtactcaagatttgcgatttcggcgcctctcgattccacaatcataccactcatatgagcctcgtggggaccttcccgtggatggccccagaggtgattcagtctctccccgtctccgaaacttgcgacacttactcatacggtgtcgtgctttgggagatgcttacccgcgaggtgcccttcaaggggctggagggattgcaggttgcctggctagtggttgaaaagaatgagagattaacgatcccaagcagctgccccaggagcttcgcagaactgctgcaccagtgctgggaggcggatgctaaaaaacgcccctctttcaaacagatcatatcgattctggaatccatgtctaatgatactagcctgcccgataagtgcaacagtttcctacacaataaagccgagtggaggtgcgagattgaggccacgcttgagcgtttgaaaaaactggagagggatctctcattcaaagaacaggagttaaaggagcgtgaacgcagactgaaaatgtgggagcaaaaactgacggagcagtccaacacccccttactgccctcattcgagatcggagcctggaccgaggatgacgtgtattgttgggtacagcagctggtgcgaaaaggggacagttccgctgagatgtccgtgtacgcatcgctttttaaagaaaacaatatcaccggtaagcgcctactgctgctcgaagaagaagatcttaaagatatgggtattgtgtcaaaaggccacatcatccattttaaaagcgcgattgagaagctgacccacgattacattaatctgtttcactttccaccgttgattaaggactctggaggcgaacccgaagagaatgaggagaaaatcgtcaatctggagctggtgttcgggttccatctgaagcctggcactggcccacaggattgtaagtggaaaatgtatatggagatggacggcgacgagatcgctatcacttatattaaagatgtgactttcaataccaatttgccagatgcagaaatattgaagatgactaaaccgcccttcgttatggagaaatggattgtcggcattgccaagagtcagaccgtggagtgcaccgtgacatatgagtccgacgtaagaacacccaaatcaaccaagcatgtgcattcaatacagtggagccggacaaaaccgcaagacgaggtcaaggccgtgcagttagcaattcagacacttttcaccaacagtgacggcaaccccggttcgcggtccgacagctctgccgactgccaatggttggatactctgaggatgcgccagatagcctcaaatactagcctccaaagatctcagagcaatccgatactaggctctcctttcttctcccactttgacggccaggatagctatgccgcggccgtgcgcaggccccaggtccctataaaatatcagcagattacaccagtcaatcagtccagaagttcatcgcccactcagtatggccttactaaaaattttagcagtttgcacttgaatagccgtgatagtggcttttcctccggcaacacggataccagcagcgagcgggggcgatactccgaccgttcaaggaataagtatggcagaggctccattagccttaacagctcgccaagaggcaggtactcggggaagtcacagcacagcactccgtcccgcggtcggtaccctgggaaattttatagggtgtctcagagcgctcttaacccgcaccagtcaccggactttaagagatcaccgcgcgatctgcatcaacccaataccatcccgggtatgccccttcacccagaaactgatagccgagcttccgaggaagattcaaaggtctctgagggcgggtggacgaaggtggagtacagaaagaagccacaccgcccttcccccgcgaaaacaaacaaggagagggctagaggcgatcatagaggttggagaaacttctag

SEQ ID NO: 267363 - DNA, 2403 bp, Artificial Sequence
  derived and/or modified sequence
atgagttctctcggggccagctttgtccagatcaagttcgatgaccttcaattcttcgagaattgtggcggtggaagttttggaagtgtataccgggcaaagtggatcagtcaggataaagaggttgcagttaagaagcttctcaaaatagagaaagaagctgagattctgtctgtgctgagccacagaaatatcatccagttttacggggtaatccttgagccacccaattacgggatagtgacagagtatgcctcactcggcagcctttatgattatatcaacagcaacaggagtgaagagatggatatggaccatatcatgacctgggccaccgatgtggctaaggggatgcattatttacatatggaagctcctgtaaaagtgattcacagagacttgaaatcccgcaatgtggtcattgcagctgatggggtcctgaagatttgtgattttggcgcgagcaggtttcacaaccacacaacccatatgtcactggtcgggacttttccgtggatggcgcccgaggtgatccagtccttgcctgtatccgaaacttgtgacacctactcctacggcgtagtgttgtgggagatgctgacccgggaggtgcccttcaaaggcctagagggcttacaggtggcttggttagtggtggagaagaatgagcgcctgaccattcctagttcttgtccaagaagctttgccgagttattacatcagtgctgggaggcagatgctaaaaaacggccctcttttaagcagatcatctcaatcctagaatccatgagcaacgatacctctcttcctgacaagtgtaactctttcctgcataataaagccgagtggcggtgtgagattgaggccactctagaacggctgaagaagctcgagagggatctcagtttcaaggaacaagagctgaaagaacgggagagacggttgaagatgtgggaacaaaagctcacagagcagtccaacacaccccttctgccatcatttgaaattggagcatggaccgaggatgatgtgtactgttgggttcagcagctggtccgtaagggcgattcatccgcagagatgagcgtgtacgcatccctctttaaggagaacaatatcaccgggaaaagactactcctactggaggaagaagatctcaaggatatgggaatcgtttccaaggggcacattatccattttaagagcgcaattgagaagctgacccatgactatatcaatctgttccatttccctcctctcatcaaagattccggcggcgagcccgaggagaatgaagagaagatcgtgaacttggaactggtgttcggatttcatcttaaacccgggaccggaccacaggattgcaagtggaagatgtatatggagatggacggggatgagattgcaatcacctacatcaaagacgtcaccttcaatacgaacctgcctgatgccgaaatacttaaaatgaccaaaccgccatttgtaatggagaagtggatcgtcgggattgccaagtcccaaactgtggaatgcactgtaacatacgaatctgatgttaggaccccaaagagcacaaagcatgtgcatagcatccagtggagcagaacgaagcctcaggacgaggtcaaggcagtgcagctggcgatccagacgctgtttaccaattccgacggtaaccctggcagcagaagtgatagtagtgctgattgtcagtggctggataccctgagaatgcggcaaatcgccagtaacacctccttacagcgttcccagtccaacccaattcttgggtcacccttcttctcccatttcgacggccaggactcctatgcagccgccgttaggcggccacaggttccaatcaaatatcaacagatcaccccggtaaaccagagccggtcttcgagccctacccagtacggactgacaaaaaatttctccagcctgcatttgaactccagagactccggcttctcaagcggaaatacagacaccagcagtgagcgtggaagatatagtgataggagtagaaataaatatggccggggcagcatatcactgaactcttctccaaggggtaggtacagcggcaagagccagcactcaacacctagtagaggacggtaccctgggaagttctacagagtgtctcagtcagccctgaacccccaccagagcccagatttcaagcggtccccaagggatctgcaccagcctaacacgataccgggtatgccccttcatccggaaacagactcgagagcctcagaggaagactcaaaggtgtcagagggaggctggaccaaagtagaatatcgcaagaagcctcatcgcccaagtcctgccaagactaataaagaacgggcccgcggcgatcatcggggctggaggaatttctag

SEQ ID NO: 267364 - DNA, 3741 bp, Artificial Sequence
  derived and/or modified sequence
cctccgcgcccccggctgctgctcacgccccgcccgggagccagattttgtggaagtataatactttgtcattatgagatgtcgtctctcggtgcctcctttgtgcaaattaaatttgatgacttgcagttttttgaaaactgcggtggaggaagttttgggagtgtttatcgagccaaatggatatcacaggacaaggaggtggctgtaaagaagctcctcaaaatagagaaagaggcagaaatactcagtgtcctcagtcacagaaacatcatccagttttatggagtaattcttgaacctcccaactatggcattgtcacagaatatgcttctctgggatcactctatgattacattaacagtaacagaagtgaggagatggatatggatcacattatgacctgggccactgatgtagccaaaggaatgcattatttacatatggaggctcctgtcaaggtgattcacagagacctcaagtcaagaaacgttgttatagctgctgatggagtattgaagatctgtgactttggtgcctctcggttccataaccatacaacacacatgtccttggttggaactttcccatggatggctccagaagttatccagagtctccctgtgtcagaaacttgtgacacatattcctatggtgtggttctctgggagatgctaacaagggaggtcccctttaaaggtttggaaggattacaagtagcttggcttgtagtggaaaaaaacgagagattaaccattccaagcagttgccccagaagttttgctgaactgttacatcagtgttgggaagctgatgccaagaaacggccatcattcaagcaaatcatttcaatcctggagtccatgtcaaatgacacgagccttcctgacaagtgtaactcattcctacacaacaaggcggagtggaggtgcgaaattgaggcaactcttgagaggctaaagaaactagagcgtgatctcagctttaaggagcaggagcttaaagaacgagaaagacgtttaaagatgtgggagcaaaagctgacagagcagtccaacaccccgctgctgccttcctttgagattggtgcatggacggaagacgatgtgtattgttgggttcagcagctcgtcagaaaaggtgactcttcagcagagatgagtgtatatgcaagcttgtttaaagaaaacaacattacagggaagcggctgctgctgctggaggaagaagacctgaaagacatgggcattgtctccaaggggcatatcattcacttcaagtcagccattgagaaattaacccatgattacataaatttgtttcacttcccaccactaattaaggactcaggaggtgaacctgaagaaaatgaggaaaaaatagtgaacctggaactggtttttggttttcacttgaaaccaggaactggcccacaggattgtaagtggaaaatgtatatggagatggatggggatgaaattgcaataacctacataaaagatgtgacattcaacactaacctacctgatgcggagattttaaagatgacaaagccaccatttgtaatggagaagtggattgtaggaatagcaaaaagtcagactgtggagtgcactgtcacatatgagagtgatgttagaactccaaaaagcactaaacatgtccattcgattcagtggagtagaacaaaacctcaggatgaagtgaaagcagtccaacttgccattcagacattattcaccaattcagatggcaaccctggaagcaggtccgactcaagtgctgattgccagtggttagatactctgaggatgcggcagattgcatccaacacttctttacagcgttcccagagcaatcctattctggggtcaccgttcttctcacactttgatggccaggattcctacgctgctgctgtgagacggccccaggtgcccattaagtatcaacagattacacctgtgaaccagtccagaagctcgtctcctactcagtatggactgaccaaaaacttctcttccctacatctcaactctagggacagtggcttttccagtggcaatactgacacctcttcagagaggggtcgatactcagacagaagcaggaacaaatatggacgtggtagtatatcactcaattcttctcctagaggaagatacagtggaaagagtcagcattccactccttcaagaggaagataccctggaaagttctacagggtttctcagtcagcactcaatcctcaccagtcgcctgacttcaagagaagccccagggacctccaccaacccaacaccataccagggatgcctttgcaccctgagactgactcaagagccagtgaagaggacagcaaagtcagcgaagggggctggacaaaagtggaataccggaaaaagccccacaggccatctcccgccaaaaccaataaagagagagccagaggggaccaccgtggatggagaaacttttgatgaattgaactacatagcttttctaagcaggttaaaaaaaaaaaaaaaaagaaatgtaatggtttttgataatatgatcccttcagattgaattaacgaaaagacaacacttccagtttttggattgggaaataccttctaattgagactatagccaaaccagggccaaaattatggatattggtcacccagtgatcataactaggcttgaaaatcactacacatattttctgccttgagtgaacatttttagaggaaaggttatgccatctttttaccctaaccactgatattctggttagcagggccaggacaaggggaaggaaaatgaggtcaacaaaaaaatcaaatttttaggaaaagataagatgaatgttactgatttttccttttggctgaggctgcaatatggcctggcaaggcactgttactgatcttgtctttaacattttgatattttgttcatcataatttttgcatttatttttttaaatattgcattaaaatatcatttagcttgattatcgagttttttggtttgaggttttttgttgcttcttttttcttttctttctttccccctcttttttttggatgtccccttaaattttgtgcccaaggcaggtacctcactcatctcatccttggctcagccctgctggttagtatttagtatttattttagtaagatatttgtgtctgtatgatggtcagagttgaactgatctggcttgtcatttttcagtaataaaaaaagttactgaatttaatgttgaatatgatgcatatctcattcattacgatttatcagaaaccaaagatttaaattgcctagatttgtggttctttctcttcctaagttcccagcgactgctttcaaatactattttctaaatttcaccaaaggagcaaagaggataaaacaacactccataaaggcctcttgggatgtcagaaatctaaaatctaaaagaaaacagacacagagcaagacaataacatcacaagctaaaagccagagaaatttaaaattaccaacatccttgttggagtaagacagtaaatatcagccttgcagcaagacagctctgagcagctgtgggcaaagaggtaaaccagtgggggtgcaaggagactgtctgcagcttagggcagaaatggtgggatccaacttgtgaaatgcttcatgttttacaaaccaaaaagtcaggtagcaacaaacttattgtatgtcaaatcaataaatgttactttcaatat

SEQ ID NO: 267365 - DNA, 2403 bp, Artificial Sequence
  derived and/or modified sequence
atgagcagcctgggcgccagctttgtgcagatcaagtttgatgacctgcagttctttgagaactgtggcggcggcagctttggatctgtgtaccgggccaagtggatcagccaggacaaggaggtggccgtgaagaagctgctgaagattgagaaggaggccgagatcctgtctgtgctgagccacaggaacatcatccagttctatggagtcatcctggagccccccaactacggcatcgtgacagaatatgccagcctgggcagcctgtatgactacatcaacagcaacagaagtgaggagatggacatggaccacatcatgacctgggccacagatgtggccaagggcatgcactacctgcacatggaggcccctgtgaaggtgatccaccgggacctgaagagcagaaatgtggtgattgctgctgatggagtgctgaagatctgtgactttggagccagccgcttccacaaccacaccacccacatgagcctggtgggcaccttcccctggatggcccctgaggtgatccagagcctgcctgtgtctgagacctgtgacacctacagctatggagtggtgctgtgggagatgctgacccgggaggtgcccttcaagggcctggagggcctgcaggtggcctggctggtggtggagaagaatgaaaggctgaccatccccagcagctgccccaggagctttgctgagctgctgcaccagtgctgggaggctgatgccaagaagaggcccagcttcaagcagatcatcagcatcctggagagcatgagcaatgacaccagcctgcctgacaagtgcaacagcttcctgcacaacaaggccgagtggaggtgtgaaattgaggccaccctggagcggctgaagaagctggagcgggacctgtccttcaaggagcaggagctgaaggagcgggagcggcggctgaagatgtgggagcagaagctgacagagcagagcaacacccccctgctgcccagctttgagatcggggcctggacagaagatgatgtgtactgctgggtgcagcagctggtgaggaagggggacagcagcgctgagatgtctgtgtatgccagcctcttcaaggagaacaacatcaccgggaagaggctgctgctgctggaggaggaggacctgaaggacatgggcatcgtgtccaagggccacatcatccacttcaagagcgccatcgagaagctgacccatgactacatcaacctcttccacttccccccactcatcaaggacagcggcggggagcctgaggagaatgaggagaagatcgtgaacctggagctggtgtttggcttccacctgaagccaggcaccggcccccaggactgcaagtggaagatgtacatggagatggatggagatgagatcgccatcacctacatcaaggatgtgaccttcaacaccaacctgcctgatgctgagatcctgaagatgaccaagcccccatttgtgatggagaagtggatcgtgggcatcgccaagagccagacagtggagtgcaccgtgacctatgaaagtgatgtgaggacccccaagagcaccaagcacgtgcacagcatccagtggagcaggaccaagccccaggatgaggtgaaggctgtgcagctggccatccagaccctcttcaccaacagtgatggcaaccctggcagcagaagtgacagcagcgctgactgccagtggctggacaccctgaggatgaggcagatcgccagcaacaccagcctgcagaggagccagagcaaccccatcctgggcagccccttcttcagccactttgatggccaggacagctatgctgctgctgtgcggcggccccaggtgcccatcaagtaccagcagatcacccctgtgaaccagagccgcagcagcagccccacccagtatggcctgaccaagaacttcagcagcctgcacctgaacagccgggacagcggcttcagcagcggcaacacagacaccagcagcgagcggggccgctacagcgacaggagcaggaacaagtatggccggggcagcatcagcctgaacagcagcccccggggccgctacagcggcaagagccagcacagcacccccagccggggccgctacccaggcaagttctacagagtgtcccagagcgccctgaacccccaccagagcccagacttcaagaggagcccccgggacctgcaccagcccaacaccatccctggcatgcccctgcaccctgagacagacagccgggccagcgaggaggacagcaaggtgtctgagggcggctggaccaaggtggagtacaggaagaagccccaccggcccagccctgccaagaccaacaaggagcgggcccggggggaccaccggggctggaggaacttctag

SEQ ID NO: 267366 - DNA, 2403 bp, Artificial Sequence
  derived and/or modified sequence
atgagcagcctgggcgccagcttcgtgcagatcaagttcgacgacctgcagttctttgaaaactgtggtggcggatcgttcggcagtgtttatcgggctaagtggatctcccaggacaaagaggtagccgtcaagaagctcctaaagattgaaaaggaagccgagattctatcggtactgtcgcacagaaatattattcagttttacggcgtgatcttagaacctccaaactacggcatagtgaccgaatacgcctccctgggaagcctatacgactacatcaattctaatagaagcgaggagatggacatggaccacatcatgacttgggccaccgacgtggctaaaggtatgcattatctgcacatggaggcccccgtaaaggtgattcaccgtgacttaaagtcacggaacgtagtcatagctgcggatggagtgctgaaaatttgcgacttcggcgcatcccgatttcacaaccacactactcatatgtcacttgtggggacgtttccctggatggccccagaagttatccaatcgctacctgtgtcagagacatgtgacacctactcatatggggttgtcctgtgggaaatgctcactagggaggttccattcaagggtctggaggggctccaggtggcttggctcgtggtggagaaaaacgaacggctcacgataccaagctcctgtccccggtccttcgcagagcttcttcaccagtgttgggaagccgacgctaagaaacgccccagtttcaaacagattatcagcatcctggagtctatgagtaatgataccagcctgcctgacaagtgtaattcctttctgcacaacaaggccgagtggaggtgtgaaatcgaggccactctagagcgcctgaagaagttggaaagagacctgagctttaaggagcaagaattgaaggagcgagagagacgactgaaaatgtgggagcagaaactgacggagcagtctaacactccactgcttccgtccttcgagatcggcgcttggacagaggatgacgtttattgctgggtccagcagcttgttaggaagggcgattcctctgctgagatgtctgtgtacgccagcttatttaaggagaacaacattacaggcaaaaggttgctgctgctggaggaggaggatttgaaggatatgggcatcgtgtccaaggggcacattatccactttaagtccgcaattgagaagctgactcacgattacatcaatctgtttcactttccaccactgataaaggacagcggcggggagcctgaggagaatgaagagaagatagttaatctggaacttgtgtttggtttccaccttaaacctggaacgggacctcaggactgcaagtggaaaatgtacatggaaatggacggcgatgagattgccataacatacattaaggacgtgactttcaacacaaatttgccggatgctgagatcctgaagatgactaagcctcctttcgttatggaaaaatggatagtgggcattgccaaatctcagaccgtggagtgcaccgttacttacgaatccgatgtgagaaccccaaagagcaccaaacacgttcatagtattcagtggagcaggaccaagccacaggatgaagtgaaagcggttcagctagccatccagaccctgttcacaaattcagatggaaacccgggcagccgaagtgactcatcggctgactgtcaatggctggataccctgaggatgcgtcagatcgcctcaaatacgagcctgcagcggtcgcaatccaacccgatcctgggttccccctttttttcccacttcgatgggcaggattcttacgctgccgcggtgaggagaccccaagttccaatcaaataccagcagatcacaccggtcaaccagtctcggtcaagctctcccacgcagtatggactcacgaagaatttctccagcctgcacctgaacagccgggactccggctttagcagtgggaacacagatacatctagtgagcggggtcgctattcggaccgcagcagaaacaagtacggcagagggtcaattagtctaaactcatcgccacggggtaggtactcggggaaatctcagcactcgacacctagtagaggccgctatcctggcaaattctaccgggtttcacagtctgccctgaaccctcatcagtcacccgattttaaacgctcccctcgcgatctgcaccagccgaataccattcctggcatgcccctgcaccccgagactgatagtcgggcatctgaagaggacagcaaagtctctgaaggagggtggactaaggtcgaatacagaaaaaaaccacatagacctagtcccgccaagactaataaggaacgcgctaggggtgatcaccggggatggcggaacttctag

SEQ ID NO: 267367 - DNA, 2403 bp, Artificial Sequence
  derived and/or modified sequence
atgagcagcctgggcgccagcttcgtgcagatcaagttcgacgacctgcagtttttcgaaaattgcggagggggatccttcggttcagtatatcgggccaaatggatctctcaggacaaggaagtcgctgttaaaaaattgcttaagattgagaaggaagccgaaattctgtccgtgctttcgcatcggaacattatacagttttatggagtaatattggagcctccaaattacggcatcgtgacagagtatgctagcctaggaagcttgtacgattatatcaacagtaacagaagtgaagaaatggatatggatcacattatgacctgggccacagatgtggccaagggcatgcactaccttcacatggaggctcctgttaaagtgatccatcgggacctgaagtcacggaatgtcgtcatcgctgctgacggtgtgctcaagatttgcgattttggagccagtaggttccacaatcacaccacccacatgagcctggtaggcacttttccctggatggcaccggaggtgattcagagtctgcctgttagcgagacttgtgacacctattcctatggcgtcgtgctgtgggagatgctaactcgggaagtgccttttaaaggccttgaaggcctacaggttgcctggttagttgtcgagaaaaacgagcgtctcactattccaagctcttgccccagaagcttcgccgagttgctccatcagtgctgggaggccgacgccaagaaacgcccctcctttaagcagatcatttcgatcttggagagtatgagtaacgataccagcctaccagacaaatgcaattcgttcctccacaacaaggccgaatggcgatgtgaaattgaagccaccctcgagcggctgaagaaactagagagggatctgtccttcaaagagcaggagttaaaggagcgagagcgccgcctcaagatgtgggagcagaagttgaccgaacaaagtaatacacctctgctccccagtttcgaaatcggagcatggaccgaagatgacgtgtactgctgggtgcagcagctcgtcaggaaaggagattcctccgcagagatgagcgtgtatgctagcttgttcaaagaaaacaatatcacaggaaaacgactgttgctgctggaggaggaagatctgaaggacatgggcatcgtttctaagggccacataattcacttcaagagtgccatcgagaagctgacgcatgattatatcaacctgttccattttcccccgctcattaaggactccggtggagaacccgaagagaatgaagaaaaaatcgtcaacttggaacttgtattcggattccatctgaagcccggtacagggccacaagactgcaagtggaaaatgtatatggaaatggacggcgatgagatcgcaattacctacatcaaagacgtgacatttaacactaacctgccggacgcagagatccttaaaatgactaaacctcctttcgtgatggaaaaatggatcgtgggaatcgcaaaaagtcagacagtagagtgtacagttacttatgaatcggatgtgcggactcctaaaagcaccaaacacgtgcactcaatacaatggtctagaacaaagcctcaagatgaagtcaaggccgtgcagttggctatccagaccctgttcacaaacagtgatgggaaccccggcagcagaagtgatagcagtgcagattgccagtggttggacacccttaggatgcggcaaatagcttctaatacctcattgcagagatcacagtccaacccaattctggggagtccattcttctcacatttcgatggccaggactcatatgcggcagctgtaagaaggccacaagtgccaatcaagtaccagcagatcacgccggtcaaccagtccaggtctagctcccctacgcaatatggtctgactaaaaacttttctagtctgcatctcaattcgagagattcaggattcagtagtggaaacacggacacctccagcgagagaggccgctattccgaccgaagccgaaataagtacgggagggggtctatttccctcaactcttcgccccgcggaaggtattctgggaagtcccaacacagcacaccgtcccggggtcgttatcctggaaaattctaccgcgtttctcagtcagccctgaaccctcatcagtcccctgactttaagaggagcccccgggatctccatcaaccaaacactatccccggcatgccgctgcatccggaaactgacagtagggcaagcgaagaagattctaaagtgtccgaaggcggctggacaaaggtggagtatcgcaagaagccccatcggccgagcccagcgaaaaccaataaagaaagggctaggggggatcaccggggctggaggaacttctag

SEQ ID NO: 267368 - DNA, 2572 bp, Artificial Sequence
  derived and/or modified sequence
ggtgccccccgggcgcaggccagggaggcccgagcgccttccccacgccccgctcgcccgcgcgtgtgaggggagggcggcccagccgtttcgcgccgggagattttgtggaagtataatactttgtcattatgagatgtcgtctctcggtgcctcctttgtgcaaattaaatttgatgacttgcagttttttgaaaactgcggtggaggaagttttgggagtgtttatcgagccaaatggatatcacaggacaaggaggtggctgtaaagaagctcctcaaaatagagaaagaggcagaaatactcagtgtcctcagtcacagaaacatcatccagttttatggagtaattcttgaacctcccaactatggcattgtcacagaatatgcttctctgggatcactctatgattacattaacagtaacagaagtgaggagatggatatggatcacattatgacctgggccactgatgtagccaaaggaatgcattatttacatatggaggctcctgtcaaggtgattcacagagacctcaagtcaagaaacgttgttatagctgctgatggagtattgaagatctgtgactttggtgcctctcggttccataaccatacaacacacatgtccttggttggaactttcccatggatggctccagaagttatccagagtctccctgtgtcagaaacttgtgacacatattcctatggtgtggttctctgggagatgctaacaagggaggtcccctttaaaggtttggaaggattacaagtagcttggcttgtagtggaaaaaaacgagagattaaccattccaagcagttgccccagaagttttgctgaactgttacatcagtgttgggaagctgatgccaagaaacggccatcattcaagcaaatcatttcaatcctggagtccatgtcaaatgacacgagccttcctgacaagtgtaactcattcctacacaacaaggcggagtggaggtgcgaaattgaggcaactcttgagaggctaaagaaactagagcgtgatctcagctttaaggagcaggagcttaaagaacgagaaagacgtttaaagatgtgggagcaaaagctgacagagcagtccaacaccccgctgctgccttcctttgagattggtgcatggacggaagacgatgtgtattgttgggttcagcagctcgtcagaaaaggtgactcttcagcagagatgagtgtatatgcaagcttgtttaaagaaaacaacattacagggaagcggctgctgctgctggaggaagaagacctgaaagacatgggcattgtctccaaggggcatatcattcacttcaagtcagccattgagaaattaacccatgattacataaatttgtttcacttcccaccactaattaaggactcaggaggtgaacctgaagaaaatgaggaaaaaatagtgaacctggaactggtttttggttttcacttgaaaccaggaactggcccacaggattgtaagtggaaaatgtatatggagatggatggggatgaaattgcaataacctacataaaagatgtgacattcaacactaacctacctgatgcggagattttaaagatgacaaagccaccatttgtaatggagaagtggattgtaggaatagcaaaaagtcagactgtggagtgcactgtcacatatgagagtgatgttagaactccaaaaagcactaaacatgtccattcgattcagtggagtagaacaaaacctcaggatgaagtgaaagcagtccaacttgccattcagacattattcaccaattcagatggcaaccctggaagcaggtccgactcaagtgctgattgccagtggttagatactctgaggatgcggcagattgcatccaacacttctttacagcgttcccagagcaatcctattctggggtcaccgttcttctcacactttgatggccaggattcctacgctgctgctgtgagacggccccaggtgcccattaagtatcaacagattacacctgtgaaccagtccagaagctcgtctcctactcagtatggactgaccaaaaacttctcttccctacatctcaactctagggacagtggcttttccagtggcaatactgacacctcttcagagaggggtcgatactcagacagaagcaggaacaaatatggacgtggtagtatatcactcaattcttctcctagaggaagatacagtggaaagagtcagcattccactccttcaagaggaagataccctggaaagttctacagggtttctcagtcagcactcaatcctcaccagtcgcctgacttcaagagaagccccagggacctccaccaacccaacaccataccagggatgcctttgcaccctgagactgactcaagagccagtgaagaggacagcaaagtcagcgaagggggctggacaaaagtggaataccggaaaaagccccacaggccatctcccgccaaaaccaataaagagagagccagaggggaccaccgtggatggagaaacttttgatgaattgaactacatagcttttctaagcaggtt

SEQ ID NO: 267369 - DNA, 2403 bp, Artificial Sequence
  derived and/or modified sequence
atgtccagcctaggagctagtttcgtccagatcaaatttgacgatcttcagttttttgaaaactgtgggggtggctcattcggtagcgtatacagggcaaaatggattagtcaggacaaagaagtggcagtgaagaaactgctcaagatagagaaagaggccgaaatcctgtccgttctgtcccaccggaatatcatccaattctacggtgtgatcttagaacctccaaattacggtatcgttaccgagtatgcctcactcggcagtctttacgactacattaacagcaatcgctcagaggaaatggacatggaccatataatgacatgggctaccgatgttgcaaaagggatgcactatctccatatggaggcaccagttaaggtaatacaccgcgatctcaagtcgagaaatgtcgtcatagccgcagacggagtcctgaagatttgcgatttcggtgcgagccgcttccacaatcataccacacatatgtcactcgtgggtacgtttccctggatggcacctgaggtaatccaatctctgccagtgagtgaaacttgcgacacgtattcctatggagtcgtactctgggagatgctaacgcgcgaggtacccttcaagggactagagggtctccaggtggcatggctagttgttgagaagaatgaaagactcacaattccaagctcctgtcccagaagttttgccgaactcctccaccagtgttgggaggctgacgctaagaagcgccctagcttcaagcaaataatcagtattctggagtctatgtcgaacgatacttctctgcccgataaatgtaattccttcctgcacaataaggctgagtggcgatgcgagatagaggctaccctggaacggctgaaaaaactcgagcgagatttgagctttaaggaacaggaactgaaggagagagaacgcagactgaaaatgtgggagcagaagctgactgaacaaagtaacactccattgctgccttcgttcgaaatcggtgcctggaccgaggatgatgtctactgttgggtccagcaacttgttcgaaaaggtgactcaagcgccgagatgtctgtgtacgcctccctattcaaagaaaacaatataacaggaaagaggctactgttgctggaagaagaggaccttaaagacatgggaatagtgtctaaaggacatatcatccattttaaatcagccatcgaaaagctgacacacgactacatcaatctttttcacttcccccctctcataaaagactccggcggagaacctgaagagaacgaggaaaaaatcgtaaatttggagctcgtttttgggtttcacctgaaacccggaacaggacctcaggattgtaagtggaaaatgtacatggaaatggacggggacgagatcgctatcacatatattaaggatgtgacttttaacaccaatcttcccgatgccgagattcttaagatgaccaagccaccgtttgtgatggagaagtggatcgtgggcatagcaaaaagccaaactgtagagtgcaccgtcacctacgagtccgacgtgcgaacccctaagtcaacaaagcatgtgcatagcatacagtggagcagaactaagccccaggatgaggtgaaggcagtgcaactggccatccagacactgttcactaatagcgatgggaatcccggaagccgttcagacagctccgccgactgccaatggctcgacaccctgcgcatgaggcagattgccagcaatacttctttacagcgctcacagagtaaccccatcctcggttctccttttttttctcactttgatggccaagactcatacgctgctgcagtccgccgaccccaggtacccatcaaataccagcagatcaccccagtgaatcaaagtcggagttcctcaccaacccagtatgggttaacaaagaacttcagttctctccacttaaatagccgcgacagtggtttttcgtccgggaatactgacacgtccagcgaacggggtcgctattccgaccggagcagaaacaaatatggcagaggcagcattagtctcaatagcagtccgaggggcagatacagtggaaaaagtcagcatagcacaccctcgcgcggacggtatccgggtaagttttatcgggtttcacagtctgctttaaatccccatcagagccccgacttcaagcgatcacctagggatctgcatcagcccaacacaatacccggaatgccgctccatccggaaactgattctcgcgctagcgaagaagatagcaaagtttcggaaggtggctggaccaaggtggaataccgcaagaagccccatcgtcccagccctgccaaaacaaacaaggagcgcgcacggggagatcacagaggctggaggaatttctag

SEQ ID NO: 267370 - DNA, 2403 bp, Artificial Sequence
  derived and/or modified sequence
atgtcttccctgggagcctccttcgtacaaataaaatttgacgacctgcaattttttgaaaactgcgggggaggcagtttcggcagcgtgtacagggccaaatggatttcacaggacaaagaggtcgcggtgaagaaactgctgaagattgaaaaagaagcggagatccttagcgtccttagtcataggaatatcattcagttctacggagtgattctcgagccacccaattatggaatagtgacagaatacgcctcattaggtagcctctatgattacatcaactctaacaggtcagaggagatggatatggaccacatcatgacttgggctaccgatgtggctaagggcatgcattatctgcacatggaagctccggtaaaggtgatccaccgcgatctcaaatcgcggaatgtggtaatcgcggcagacggtgttctgaaaatttgcgatttcggcgctagcaggttccacaaccataccacacatatgtctttagtggggacattcccatggatggctcccgaggtcatccagtccctgccagtgtctgaaacctgtgatacctattcatacggtgtggtgttatgggaaatgttgacccgcgaggttccatttaagggactcgaggggttgcaggtggcatggctcgtggtagaaaagaacgagagattgactattccttccagttgccccaggagtttcgcagagcttttacaccagtgttgggaagccgacgcaaagaagcggccatcattcaagcaaatcatctccattctggaatccatgagtaatgacaccagcctcccagacaagtgcaattcatttctccacaacaaagccgagtggcggtgtgaaatcgaggctaccctagagagactcaagaagttggagcgggatctatcgtttaaagagcaggaactgaaagaaagggaaaggcgactcaagatgtgggagcagaaacttacagagcagtcaaatacaccactactgcccagcttcgagattggggcatggacggaagatgacgtctactgctgggtccagcagttagtcaggaagggcgactccagtgcagaaatgtcggtttacgcgagtctgttcaaggaaaataatattacagggaagagactgctgctcttggaagaagaagatttgaaagacatgggcatcgtgtctaaagggcacatcattcactttaagagcgctatcgagaagctaacccatgattatatcaatttattccacttccctccactgatcaaggatagcggaggagaaccagaggagaatgaggagaagattgtgaatttggagctggtgtttgggttccatctgaaaccaggtactggaccacaggactgtaaatggaagatgtacatggagatggacggggacgaaatcgctataacctatataaaagacgttacattcaatacaaacctgccggatgccgaaatcctgaaaatgacgaagcccccattcgtgatggaaaaatggattgtgggtatcgccaagagccagaccgtggagtgtactgtcacctatgagagcgacgttcgaacccccaagagcacaaaacatgttcacagtattcagtggagccggaccaaaccccaggacgaggtcaaggcggtgcagctagccatccagacactctttaccaactcagatgggaatccagggtcccgatcagatagctccgctgactgtcaatggttagacaccctccggatgaggcagatagcctccaatacgagtcttcaacgaagtcagagcaacccgatcttaggctccccattcttcagtcactttgacggccaggactcttacgctgccgcagtgcgcaggccccaggtacctattaagtatcagcagattacccccgtgaaccagtcccgatcttcaagcccaacacaatacggcttgaccaaaaacttctctagcctccacctgaacagccgcgatagcggcttttctagcggaaatacagacacaagttctgagaggggtaggtattctgatagatccagaaacaagtacggccgtgggagcatcagcctgaattctagccctaggggacgttatagcggaaagtctcagcacagcactccatcccggggtcgttaccctggcaaattttaccgggtgagtcagtccgcccttaacccacaccaatcaccagactttaagagatcaccaagagatctgcaccaacctaacaccatcccgggtatgcccctgcatcctgagaccgatagtagagcttctgaggaggactcaaaagtctcggaggggggttggacaaaagtggaatatcggaaaaagccccacagaccttcaccggctaagacaaacaaagagagagctagaggcgatcaccgaggctggcgtaacttttag

SEQ ID NO: 267371 - protein, 398 aa, Artificial Sequence
  derived and/or modified sequence
MNWHLPLFLLASVTLPSICSHFNPLSLEELGSNTGIQVFNQIVKSRPHDNIVISPHGIASVLGMLQLGADGRTKKQLAMVMRYGVNGVGKILKKINKAIVSKKNKDIVTVANAVFVKNASEIEVPFVTRNKDVFQCEVRNVNFEDPASACDSINAWVKNETRDMIDNLLSPDLIDGVLTRLVLVNAVYFKGLWKSRFQPENTKKRTFVAADGKSYQVPMLAQLSVFRCGSTSAPNDLWYNFIELPYHGESISMLIALPTESSTPLSAIIPHISTKTIDSWMSIMVPKRVQVILPKFTAVAQTDLKEPLKVLGITDMFDSSKANFAKITTGSENLHVSHILQKAKIEVSEDGTKASAATTAILIARSSPPWFIVDRPFLFFIRHNPTGAVLFMGQINKP

SEQ ID NO: 267372 - DNA, 2195 bp, Artificial Sequence
  derived and/or modified sequence
cgataaagcccccgccgccgcggcagccagcttgcgctgtggggctgcccgggctgcgcggcgtctgcaggcgccaccgctgcctctttccggctgtgaccctcctcgccgccgccgcttggctgcgtcctccgactccccgcgccgccgagaccaggctcccgctccggttgcggccgcaccgccctccgcggccgccccctggggatccagcgagcgcggtcgtccttggtggaaggaaccatgaactggcatctccccctcttcctcttggcctctgtgacgctgccttccatctgctcccacttcaatcctctgtctctcgaggaactaggctccaacacggggatccaggttttcaatcagattgtgaagtcgaggcctcatgacaacatcgtgatctctccccatgggattgcgtcggtcctggggatgcttcagctgggggcggacggcaggaccaagaagcagctcgccatggtgatgagatacggcgtaaatggagttggtaaaatattaaagaagatcaacaaggccatcgtctccaagaagaataaagacattgtgacagtggctaacgccgtgtttgttaagaatgcctctgaaattgaagtgccttttgttacaaggaacaaagatgtgttccagtgtgaggtccggaatgtgaactttgaggatccagcctctgcctgtgattccatcaatgcatgggttaaaaatgaaaccagggatatgattgacaatctgctgtccccagatcttattgatggtgtgctcaccagactggtcctcgtcaacgcagtgtatttcaagggtctgtggaaatcacggttccaacccgagaacacaaagaaacgcactttcgtggcagccgacgggaaatcctatcaagtgccaatgctggcccagctctccgtgttccggtgtgggtcgacaagtgcccccaatgatttatggtacaacttcattgaactgccctaccacggggaaagcatcagcatgctgattgcactgccgactgagagctccactccgctgtctgccatcatcccacacatcagcaccaagaccatagacagctggatgagcatcatggtgcccaagagggtgcaggtgatcctgcccaagttcacagctgtagcacaaacagatttgaaggagccgctgaaagttcttggcattactgacatgtttgattcatcaaaggcaaattttgcaaaaataacaacagggtcagaaaacctccatgtttctcatatcttgcaaaaagcaaaaattgaagtcagtgaagatggaaccaaagcttcagcagcaacaactgcaattctcattgcaagatcatcgcctccctggtttatagtagacagaccttttctgtttttcatccgacataatcctacaggtgctgtgttattcatggggcagataaacaaaccctgaagagtatacaaaagaaaccatgcaaagcaacgactactttgctacgaagaaagactcctttcctgcatctttcatagttctgttaaatatttttgtacatcgcttctttttcaaaactagttcttaggaacagactcgatgcaagtgtttctgttctgggaggtattggagggaaaaaacaagcaggatggctggaacactgtactgaggaatgaatagaaaggcttccagatgtctaaaagattctttaaactactgaactgttacctaggttaacaaccctgttgagtatttgctgtttgtccagttcaggaatttttgttttgttttgtctatatgtgcggcttttcagaagaaatttaatcagtgtgacagaaaaaaaaatgttttatggtagcttttactttttatgaaaaaaaaattatttgccttttaaattcttttcccccatccccctccaaagtcttgatagcaagcgttattttggtggtagaaacggtgaaatctctagcctctttgtgtttttgttgttgttgttgttgttgttttatataatgcatgtattcactaaaataaaatttaaaaaactcctgtcttgctagacaaggttgctgttgtgcagtgtgcctgtcactactggtctgtactccttggatttgcatttttgtattttgtacaaagtaaaaataaactgttatgagtagtaaaaataaagctatttctctgctatttgaaaatacaatagaagaaactga

SEQ ID NO: 267373 - protein, 194 aa, Artificial Sequence
  derived and/or modified sequence
MKQLPAATVRLLSSSQIITSVVSVVKELIENSLDAGATSVDVKLENYGFDKIEVRDNGEGIKAVDAPVMAMKYYTSKINSHEDLENLTTYGFRGEALGSICCIAEVLITTRTAADNFSTQYVLDGSGHILSQKPSHLGQGTTVTALRLFKNLPVRKQFYSTAKKCKDEIKKIQDLLMSFGILKPDLRIVFVHNK

SEQ ID NO: 267374 - protein, 42 aa, Artificial Sequence
  derived and/or modified sequence
MADDKVAILTDDEEEQKRKYVLADPFNGISREPEPPSNETPS

SEQ ID NO: 267375 - protein, 114 aa, Artificial Sequence
  derived and/or modified sequence
MADDKVAILTDDEEEQKRKYVLADPFNGISREPEPPSNETPSSTETSAIPEEEIDWIEKHCVKINNDLLISKVFYFFFYSAYGSLYPLLPVYYKQLGMSPSQSGLLVGIRYFIE

SEQ ID NO: 267376 - protein, 156 aa, Artificial Sequence
  derived and/or modified sequence
MADDKVAILTDDEEEQKRKYVLADPFNGISREPEPPSNETPSSTETSAIPEEEIDWIEKHCVKINNDLLISKVFYFFFYSAYGSLYPLLPVYYKQLGMSPSQSGLLVGIRYFIEFCSAPFWGVVADRFKKGKIVLLFSLLCWVLFNLGIGFVKPAT

SEQ ID NO: 267377 - DNA, 345 bp, Artificial Sequence
  derived and/or modified sequence
atggcagacgacaaagttgcaattctaactgacgatgaggaggagcagaagcgcaagtatgtgttggccgaccccttcaatgggatttccagagaacccgagccaccctctaacgagacaccatcaagcactgagacctctgctattcccgaggaagaaatagactggatagagaagcactgcgttaaaatcaataacgacttactgatttccaaggttttttatttctttttctactcagcatatgggagtctttaccctctactgccggtgtattacaaacagctcggcatgtccccctcacagagtggactgctagtcgggataagatatttcattgagtag

SEQ ID NO: 267378 - DNA, 471 bp, Artificial Sequence
  derived and/or modified sequence
atggctgacgataaggtagctatcttaacggatgacgaggaggagcagaaacgtaagtatgtcctcgctgatccttttaatggtatatcacgggaacccgaacctcctagcaatgaaactccaagctccacagagaccagtgctattcctgaagaagaaatcgattggatagaaaaacattgcgtgaagattaacaacgaccttttaatctcgaaggtgttttattttttcttctatagcgcgtacggctccctgtatcccttattacccgtgtattacaagcagctcggaatgagcccttcgcagagtggattacttgtcggcattaggtactttatcgaattctgttctgcaccattctggggcgtggtcgctgataggtttaaaaaaggaaaaattgtcctgttgtttagcctgttgtgctgggtgctgttcaatctgggaatcggtttcgtgaagcctgcaacttag

SEQ ID NO: 267379 - DNA, 345 bp, Artificial Sequence
  derived and/or modified sequence
atggctgatgacaaggtggccatcctgacagatgatgaggaggagcagaagaggaaatatgtgctggccgaccccttcaacggcatcagccgggagcctgagccccccagcaatgagacccccagcagcacagagaccagcgccatccctgaggaggagattgactggattgagaagcactgtgtgaagatcaacaatgacctgctgatcagcaaggtgttctacttcttcttctacagcgcctacggcagcctgtaccccctgctgcctgtgtactacaagcagctgggcatgagccccagccagagcggcctgctggtgggcatccgctacttcattgaatag

SEQ ID NO: 267380 - DNA, 471 bp, Artificial Sequence
  derived and/or modified sequence
atggctgatgacaaggtggccatcctgacagatgatgaggaggagcagaagaggaaatatgtgctggccgaccccttcaacggcatcagccgggagcctgagccccccagcaatgagacccccagcagcacagagaccagcgccatccctgaggaggagattgactggattgagaagcactgtgtgaagatcaacaatgacctgctgatcagcaaggtgttctacttcttcttctacagcgcctacggcagcctgtaccccctgctgcctgtgtactacaagcagctgggcatgagccccagccagagcggcctgctggtgggcatccgctacttcatcgagttctgcagcgcccccttctggggcgtggtggccgaccgcttcaagaagggcaagatcgtgctgctcttcagcctgctgtgctgggtgctcttcaacctgggcattggatttgtgaagccagccacctag

SEQ ID NO: 267381 - DNA, 517 bp, Artificial Sequence
  derived and/or modified sequence
gtcgcagccccggaggagcgcgcgagcagcccgggatggtgcgcgctgccccgacagccgccgccccggcgccccgagccgccgccccgtgctccggggacagggctccccgcgccccgcgcagctgagcgctgccgccgccgcagcagacaggatctctctcagttacccaggccggagtgcagtggcgtgatcctagctcactgcagccttgaacccctgggctcaagtgattctcctgccttggcctcctgaatagctagaactacagatgatgaaatggaattggagccgctgagctggataggtgaaggcactaatgatgaaggaaaaatagatcaacagtacaaattctgaagtttgtaaacttgctgatggtggtggtaagccatggcagatgataaagttgctatcttaacggatgatgaagaggaacagaagagaaagtatgtgcttgcagatccctttaatggtatttccagggaaccagaaccaccttcgaatgaaacaccttcct

SEQ ID NO: 267382 - DNA, 546 bp, Artificial Sequence
  derived and/or modified sequence
gtcgcagccccggaggagcgcgcgagcagcccgggatggtgcgcgctgccccgacagccgccgccccggcgccccgagccgccgccccgtgctccggggacagggctccccgcgccccgcgcagctgagcgctgccgccgccgcagcagatcaacagtacaaattctgaagtttgtaaacttgctgatggtggtggtaagccatggcagatgataaagttgctatcttaacggatgatgaagaggaacagaagagaaagtatgtgcttgcagatccctttaatggtatttccagggaaccagaaccaccttcgaatgaaacaccttcctccacagaaacatctgctattcctgaggaggaaatagactggatagagaaacattgtgttaagataaacaacgatcttctaatttccaaggtcttttattttttcttttactctgcctatggctctctctatccccttttgcctgtgtattacaaacagctgggaatgtctccaagccagagtggactactagtaggtattcgttacttcattgaatt

SEQ ID NO: 267383 - DNA, 551 bp, Artificial Sequence
  derived and/or modified sequence
aatcttatctgatacagagtgctaaataaatcaacagtacaaattctgaagtttgtaaacttgctgatggtggtggtaagccatggcagatgataaagttgctatcttaacggatgatgaagaggaacagaagagaaagtatgtgcttgcagatccctttaatggtatttccagggaaccagaaccaccttcgaatgaaacaccttcctccacagaaacatctgctattcctgaggaggaaatagactggatagagaaacattgtgttaagataaacaacgatcttctaatttccaaggtcttttattttttcttttactctgcctatggctctctctatccccttttgcctgtgtattacaaacagctgggaatgtctccaagccagagtggactactagtaggtattcgttacttcattgaattctgcagtgcccccttttggggtgtagttgcagaccgctttaaaaaaggcaaaattgtcctcctcttttctcttttgtgttgggttttattcaacctgggcattggatttgtcaaacctgctacct

SEQ ID NO: 267384 - DNA, 345 bp, Artificial Sequence
  derived and/or modified sequence
atggccgacgacaaggtggccatcctgaccgacgacgaggaggagcagaagagaaagtatgtgctggccgatccttttaatggaatttccagagagccggagcctccttccaacgagaccccatcaagcacggaaacatctgcgatacctgaggaagagatagactggatcgaaaaacactgtgtgaaaattaataacgacctcctgatttctaaagtattttacttttttttttattccgcctacggcagcctctaccctctgctgccagtgtattacaaacagctcggtatgagtccctctcaatccggtttgctggttggaatccgatatttcattgaatag

SEQ ID NO: 267385 - DNA, 471 bp, Artificial Sequence
  derived and/or modified sequence
atggccgacgacaaggtggccatcctgaccgacgacgaggaggagcaaaagcgtaagtatgttctggccgatccctttaacggcatcagcagggagccggaacccccctccaatgagaccccatcctccacagagacttccgccatcccagaagaggaaattgattggatcgaaaagcactgcgtgaaaattaataacgacctgctcatcagtaaagtcttttatttcttcttctattcagcctacggcagcctgtatccactcctgcccgtgtattataagcagctaggaatgagcccctcccagagcgggctcctggtgggcatccggtacttcatagagttctgcagtgctcccttctggggcgtcgtagctgaccggttcaagaaggggaagattgtcttactcttctcactgctttgctgggtcctcttcaatctggggattggatttgtcaaacccgcgacttag

SEQ ID NO: 267386 - DNA, 345 bp, Artificial Sequence
  derived and/or modified sequence
atggcagatgataaagtagctatactcactgatgatgaagaggagcagaagagaaagtacgtcttagctgacccttttaacggcatttcaagggagcccgaaccccctagcaacgaaaccccctcgtccacagaaactagcgctattcccgaagaggagattgattggatcgagaaacactgtgtgaaaatcaacaacgatttactgattagtaaagtcttttatttttttttttacagcgcatacggctcactgtacccactattacccgtgtactataagcagctgggcatgagtccatcccagtctgggttgctggtgggcattcggtacttcatagagtag

SEQ ID NO: 267387 - DNA, 471 bp, Artificial Sequence
  derived and/or modified sequence
atggctgacgataaagttgcgattctaacggatgacgaggaagaacagaaacgcaaatacgtgctggccgacccgttcaatggcatttcccgggagcctgaacctcccagtaacgagaccccaagctctactgagacatcagctatccccgaagaggaaatcgactggatcgagaagcattgtgtgaagattaacaatgacctgttgatctcaaaagtgttttatttctttttctattctgcgtatggaagtctgtatccgctgctgccagtatattacaaacagcttgggatgtccccaagtcagagcgggttgctggtgggtatccgatattttatagagttttgtagcgctccgttctggggtgttgtcgcagaccgattcaaaaaaggcaaaatcgttttactcttcagtctgctgtgttgggtgttattcaatctgggcattggtttcgtaaaacctgcaacttag

SEQ ID NO: 267388 - DNA, 345 bp, Artificial Sequence
  derived and/or modified sequence
atggccgacgacaaggtggccatcctgaccgacgacgaggaggagcagaagagaaagtacgtgctggccgaccccttcaacggcatcagcagagagcccgagccccccagcaacgagacccccagcagcaccgagaccagcgccatccccgaggaggagatcgactggatcgagaagcactgcgtgaagatcaacaacgacctgctgatcagcaaggtgttctacttcttcttctacagcgcctacggcagcctgtaccccctgctgcccgtgtactacaagcagctgggcatgagccccagccagagcggcctgctggtgggcatcagatacttcatcgagtag

SEQ ID NO: 267389 - DNA, 471 bp, Artificial Sequence
  derived and/or modified sequence
atggccgacgacaaggtggccatcctgaccgacgacgaggaggagcagaagagaaagtacgtgctggccgaccccttcaacggcatcagcagagagcccgagccccccagcaacgagacccccagcagcaccgagaccagcgccatccccgaggaggagatcgactggatcgagaagcactgcgtgaagatcaacaacgacctgctgatcagcaaggtgttctacttcttcttctacagcgcctacggcagcctgtaccccctgctgcccgtgtactacaagcagctgggcatgagccccagccagagcggcctgctggtgggcatcagatacttcatcgagttctgcagcgcccccttctggggcgtggtggccgacagattcaagaagggcaagatcgtgctgctgttcagcctgctgtgctgggtgctgttcaacctgggcatcggcttcgtgaagcccgccacctag

SEQ ID NO: 267390 - protein, 666 aa, Artificial Sequence
  derived and/or modified sequence
MLSGAAGAARRGGAALAPSLTRSLAGTHAGADSCAGADKGSHKETIEERDKRQQRQQRQRQHQGCGAAGSGSDSPTSGPHPVPVLFPLALSLEEQPLPPLPLGRAPGLLAREGQGREALASPSSRGQMPIEIVCKIKFAEEDAKPKEKEAGDEQSLLGAVAPGAAPRDLATFASTSTLHGLGRACGPGPHGLRRTLWALALLTSLAAFLYQAAGLARGYLTRPHLVAMDPAAPAPVAGFPAVTLCNINRFRHSALSDADIFHLANLTGLPPKDRDGHRAAGLRYPEPDMVDILNRTGHQLADMLKSCNFSGHHCSASNFSVVYTRYGKCYTFNADPRSSLPSRAGGMGSGLEIMLDIQQEEYLPIWRETNETSFEAGIRVQIHSQEEPPYIHQLGFGVSPGFQTFVSCQEQRLTYLPQPWGNCRAESELREPELQGYSAYSVSACRLRCEKEAVLQRCHCRMVHMPGNETICPPNIYIECADHTLDSLGGGPEGPCFCPTPCNLTRYGKEISMVRIPNRGSARYLARKYNRNETYIRENFLVLDVFFEALTSEAMEQRAAYGLSALLGDLGGQMGLFIGASILTLLEILDYIYEVSWDRLKRVWRRPKTPLRTSTGGISTLGLQELKEQSPCPSRGRVEGGGVSSLLPNHHHPHGPPGGLFEDFAC

SEQ ID NO: 267391 - DNA, 2001 bp, Artificial Sequence
  derived and/or modified sequence
atgttgtcaggagcagctggagccgctcgtcgcggcggtgctgccctggccccttcactaaccaggtctctggctggcacccatgccggtgcagactcctgtgcaggcgccgacaaaggatcacataaagagacaattgaagagagggataagcggcaacaacgccaacaacgacagaggcagcaccagggatgcggagcagccgggtctggttctgactcccctaccagtggtccacaccccgttccagtgctgttcccccttgccctgtctctcgaagaacagcccctgccccctttgcccttgggacgagcccccggcctgctggcacgcgagggccagggtcgtgaagccttggcctcaccctcttcacgcggccagatgcccattgagattgtgtgtaagatcaaattcgccgaggaggacgctaaaccaaaggagaaagaagccggagatgaacagagtttgctgggtgctgttgcgcctggagcagctccccgggatctcgcaacctttgcatcaacatccaccttgcatgggctagggcgtgcctgtggtccaggacctcacggtctgaggaggacactctgggccctcgcactccttactagtctcgcagcttttctttatcaggcagccggactcgccaggggatacttaactcggccgcacctggtagcaatggatcctgccgctcccgccccagtagctgggttccctgccgtgaccctttgcaacattaacagatttagacacagtgccctgagtgatgcagacatcttccatctcgctaatctgacaggactgccacctaaagaccgggacggacatcgggctgcaggtctgcggtatcccgagcccgacatggtcgacatccttaataggacaggacaccaactcgcggatatgctgaagagctgcaactttagtggccatcattgcagcgcttctaactttagcgtggtgtatacacgttatggaaagtgttacactttcaacgccgacccgcgtagctcattacccagtagagccggcggcatgggctcggggctagaaatcatgctcgacatccagcaggaagagtacctacccatctggagagaaacaaacgaaacctcttttgaggctgggatcagagtgcaaatccatagtcaggaagagccaccctacatccatcagctaggcttcggggtcagcccaggattccagacgttcgtctcttgtcaggaacaaaggctcacatatcttcctcagccttggggaaattgtcgcgcagagagtgaacttagggaacccgaacttcaaggctatagcgcatattccgtgtccgcctgccgactgagatgtgagaaagaggcagtgctgcagcgatgccactgccgaatggtacatatgccaggtaatgagaccatttgcccaccaaatatctacatcgagtgcgcagaccacactctcgacagcttggggggcggtcccgagggcccttgcttctgccctaccccttgcaacctgactagatacggcaaagagatttcgatggtgcggatccctaaccgaggatctgcccgatacttagcccggaaatataaccgaaacgaaacctacattagagagaactttctcgtcctggatgtcttctttgaagctcttacttccgaggcgatggaacaacgcgcagcatacgggctgagcgcactcctgggcgatcttgggggccagatggggctgtttatcggcgcgtccattctgacactcctggaaattctggattacatttatgaagtctcttgggatagactcaagcgggtatggaggcggcctaagactcccttgcggacctctaccggggggatctcgacccttggcctgcaggagttaaaggagcagagcccctgtccctcacggggtcgcgtcgagggtgggggcgttagcagccttctccctaatcaccatcatccacatggcccacccggaggactatttgaggacttcgcatgttag

SEQ ID NO: 267392 - DNA, 2001 bp, Artificial Sequence
  derived and/or modified sequence
atgctgtctggagctgctggggccgcccggcggggcggggccgccctggcccccagcctgaccaggagcctggccggcacccatgctggagctgacagctgtgccggggctgacaagggcagccacaaggagaccatcgaggagcgggacaagaggcagcagaggcagcagaggcagaggcagcaccagggctgtggggccgccggcagcggcagtgacagccccaccagcggcccccaccctgtgcctgtgctcttccccctggccctgagcctggaggagcagcccctgccccccctgcccctgggccgggcccctggcctgctggcccgggagggccagggccgggaggccctggccagccccagcagccggggccagatgcccatcgagatcgtgtgcaagatcaagtttgctgaagaagatgccaagcccaaggagaaggaggccggagatgagcagagcctgctgggcgctgtggcccctggggccgccccccgggacctggccacctttgccagcaccagcaccctgcacggcctgggccgggcctgtggccctggcccccacggcctgcggaggaccctgtgggccctggccctgctgaccagcctggccgccttcctgtaccaggccgccggcctggcccggggctacctgacccggccccacctggtggccatggaccctgctgccccagcccctgtggccggcttccctgctgtgaccctgtgcaacatcaaccgcttccgccacagcgccctgagtgatgctgacatcttccacctggccaacctgaccggcctgccccccaaggacagagatggccacagagctgctggcctgcgctacccagagccagacatggtggacatcctgaacagaacaggccaccagctggccgacatgctgaagagctgcaacttcagcggccaccactgcagcgccagcaacttctctgtggtgtacaccaggtatggcaagtgctacaccttcaatgctgaccccaggagcagcctgcccagccgggccggcggcatgggcagcggcctggagatcatgctggacatccagcaggaggagtacctgcccatctggagggagaccaatgagaccagctttgaggccggcatccgggtgcagatccacagccaggaggagcccccctacatccaccagctgggcttcggcgtgtccccaggcttccagacctttgtgtcctgccaggagcagaggctgacctacctgccccagccctggggcaactgcagagctgagagcgagctgcgggagcctgagctgcagggctacagcgcctacagcgtgtctgcctgccgcctgcgctgtgagaaggaggccgtgctgcagcgctgccactgcaggatggtgcacatgcctggaaatgagaccatctgcccccccaacatctacattgaatgtgccgaccacaccctggacagcctgggcggcggccctgagggcccctgcttctgccccaccccctgcaacctgaccaggtatggcaaggagatctccatggtgcgcatccccaacagaggcagcgcccgctacctggccaggaagtacaacagaaatgagacctacatccgggagaacttcctggtgctggatgtgttctttgaggccctgaccagcgaggccatggagcagagagctgcctacggcctgagcgccctgctgggggacctgggcggccagatgggcctcttcatcggggccagcatcctgaccctgctggagatcctggactacatctatgaggtgtcctgggaccggctgaagagggtgtggaggcggcccaagacccccctgcggaccagcactggaggcatcagcaccctgggcctgcaggagctgaaggagcagagcccctgccccagccggggccgggtggagggcggcggcgtgagcagcctgctgcccaaccaccaccacccccacggccccccaggcggcctgtttgaggactttgcctgctag

SEQ ID NO: 267393 - DNA, 2741 bp, Artificial Sequence
  derived and/or modified sequence
gggctccggagcacatgctgagcggagcggctggggctgcgcggcgtggcggagcagcgctcgctccctcgctcactcgctcgctcgcagggacacacgcaggggctgacagctgtgctggtgctgataagggaagccacaaggagacgatcgaggagagagacaagcggcagcagaggcagcagcggcagaggcagcaccagggctgcggagctgctgggagtgggagtgactcccccacctcgggcccccaccctgtccctgtcctcttcccgcttgccctgagtttagaagagcagccgctgccaccactgccactcgggagggcaccagggctgctggctagggagggacagggcagggaggctctggccagtcccagcagccggggacagatgccgatcgagattgtgtgcaaaatcaaatttgctgaggaggatgcgaaacccaaggagaaggaggcaggggatgagcagagcctcctcggggctgttgcccctggagcagccccccgagacctggccacctttgccagcaccagcaccctgcatggactgggccgggcctgtggcccaggcccccacggactgcgcagaaccctgtgggcactggccctactcacctcgctggctgccttcctgtaccaggcggctggcctggcccggggctacctgacccggcctcacctggtggcaatggaccccgctgccccagccccagtggcgggcttcccggctgtcaccctctgcaatatcaaccgcttccggcattcggcactcagcgatgccgacatcttccacctggccaatctgacagggctgccccccaaagaccgggatgggcaccgtgcggctggcctgcgctacccagagcctgacatggtagacatcctcaaccgcactggccaccagctcgccgacatgcttaagagctgcaacttcagtgggcatcactgctccgccagcaacttctctgtggtctatactcgctatgggaagtgttacaccttcaacgcggacccgcggagctcgctgcccagccgggcagggggcatgggcagtggcctggagatcatgctggacatccagcaggaggagtacctgcccatctggagggagacaaatgagacgtcgtttgaggcaggtattcgggtgcagatccacagccaggaggagccgccctacatccaccagctggggttcggggtgtccccaggcttccagacctttgtgtcctgccaggaacagcggctgacctacctgccccagccctggggcaactgccgcgcagagagtgagctcagggagcctgagcttcagggctactcggcctacagtgtgtctgcctgccggctgcgctgtgaaaaggaggccgtgcttcagcgctgccactgccggatggtgcacatgccaggcaatgagaccatctgcccaccaaatatctacatcgagtgtgcagaccacacactggactccctgggtgggggccctgagggcccgtgcttctgccccaccccctgcaacctgacacgctatgggaaagagatctccatggtcaggatccccaacaggggctcagcccggtacctggcgaggaagtacaaccgcaacgagacctacatacgggagaacttcctggtcctagatgtcttctttgaggccctgacctctgaagccatggagcagcgagcagcctatggcctgtcagccctgctgggagacctcgggggacagatgggcctgttcattggggccagcatcctcacgttgctggagatcctcgactacatctatgaggtgtcctgggatcgactgaagcgggtatggaggcgtcccaagacccccctgcggacctccactgggggcatctccactttggggcttcaggagctgaaggaacagagtccctgcccgagccggggccgagtggagggtgggggggtcagcagtctgctccccaatcaccaccacccccacggtcccccaggaggtctctttgaagattttgcttgctaggacggtgctgtgactgaaaggacccaggagtctgggacccctcctgggatccccagcacattctcctgctcctgggagaggcctgggggcggtgctcactgggagggccaggactcagttcctgctctcatcctcccctgccctgatgtcagctgctttgcacaaaggtccttcttgtccacaccccttatccccaggctggtgccccgggagggctggagaccaggccatgggccctcacggagaggaagggaaggaaggagagggagggggaggatagagcccatcccagccggggagggggagccctctgtacatttgtaaatatttagggaaagccgggtggggggaggggatacagatgtagaaggtgggtagggctacaggggtgggtgatttagggacagccagggtcccagccccaatgtcagcaggatagggagagccccaggactcaggagtgctgggctggtcctacttcctgcccctctccaggcccagctcccctcttggcagggggagaggatggcccagcaggcctggcccagctcccagttccccctgcaccagccccacccctagagtcccttctatagggagggggcaggagaccttccagacttcggctgagcttggagggtgggaagggagccttctcagtcctctctccctccagtctgattttataaagtgctgacgagattgggaataaagaggcataaagaa

SEQ ID NO: 267394 - DNA, 2001 bp, Artificial Sequence
  derived and/or modified sequence
atgctgagcggcgccgccggcgccgcccggcggggcggcgccgccttagcgccctcattgaccaggtcgttagccggaacacacgccggagcggacagttgtgccggagctgataaaggatcccacaaagagactatcgaagaacgtgacaagcggcagcaacgtcagcaacggcagcggcagcatcagggctgtggagccgcggggagcgggtctgattcaccaacctccggcccccatcccgtacctgtgctgttcccattggctcttagcctggaagagcagcccttgcccccccttccacttggtagggccccgggtttgctggctagggagggacagggccgcgaggccttggcctcacccagctccagaggacagatgccaatcgaaatcgtgtgcaaaatcaagttcgccgaggaagatgcaaaacccaaagaaaaagaggctggtgacgagcagtctctcctgggcgccgtcgcgcctggcgccgcacccagagacctggccaccttcgcatccacctctactcttcacggattagggcgtgcttgtgggccaggcccccatggtctgcgacggaccctgtgggccctagctcttctgactagtctggctgctttcttgtaccaggccgccgggcttgctagaggctacctcacaaggccacacctcgtcgcgatggacccagccgctccggcgccagtcgcaggcttccctgcagtcactctctgcaatatcaaccgatttaggcatagcgccctgagcgacgccgatattttccatctcgctaatttgactgggctgcctcctaaggatagggatggccaccgggctgctgggctcaggtacccagaacccgatatggtcgacatcctaaatagaaccggtcaccaactggccgacatgctgaagtcctgcaacttctctggccaccactgcagcgccagcaatttttccgtcgtttacacccgatatggaaagtgctacacatttaatgcggaccccaggtcctccttgccatctcgtgctgggggaatgggctccggtcttgagattatgttggatatccagcaagaggaataccttccgatatggcgagagaccaacgagacatcttttgaagcaggcatccgggtccaaattcactctcaggaggagcccccttacatccaccagctgggctttggcgtgagtcccgggtttcagaccttcgtcagttgccaggagcagagattgacatacctaccacaaccctggggcaactgtagggctgagagcgaactgagagagcccgagctccaagggtattcagcatacagcgtcagcgcttgccggttgcgctgcgagaaggaggccgttcttcagagatgtcactgccggatggtccacatgcccggaaacgagaccatatgtcctccgaacatttacatcgagtgtgctgatcatacactcgactccctgggaggaggcccggaaggcccttgcttctgccccaccccatgtaaccttacgagatacgggaaagagattagcatggtgagaattcccaataggggctctgcacggtatctcgcccgcaaatataaccggaatgagacttatattagggaaaatttcctggtcctggacgtctttttcgaggcactgacatctgaagcgatggagcagagggccgcatatgggctgtccgctctcttgggagatctgggaggccagatggggctgttcattggcgcgtctatattgactttactggaaatcctcgattatatttacgaggtctcttgggaccggctgaaacgggtgtggagacggccaaagacccccctaaggactagcaccggcggaattagcacccttggtctgcaggaattaaaggaacaaagcccatgccccagccggggtcgggtggagggaggcggcgtgtccagcctgctacccaaccaccatcatccccacggcccacctggcggcctgtttgaagacttcgcgtgttag

SEQ ID NO: 267395 - DNA, 2001 bp, Artificial Sequence
  derived and/or modified sequence
atgctgtccggcgctgcaggcgctgcccgaaggggtggagctgcccttgctccctctctgacaagatcactcgcgggaactcacgctggcgcagatagctgcgcaggcgctgacaaaggatctcacaaggaaaccattgaagagagagacaaacggcagcagcgccagcagagacagcgacagcaccagggctgcggcgctgcgggatccggcagcgatagccctacctccggtccccaccccgtgccagtcctgtttcccctggcgctgtccctggaggaacagcctctgccaccattgcccctgggcagagccccaggtctgcttgctcgggagggccagggcagagaggctttggcatccccgagcagcaggggccaaatgcccatcgagattgtatgcaagattaaatttgctgaagaggatgcaaagccgaaggagaaggaagccggagacgagcagagcctgctgggagccgtggcccctggagcagcccctcgggacctggctacattcgccagtacttcaaccttgcacgggctgggacgggcatgcggacccggtccccatgggcttaggagaactctgtgggcccttgcgctgttgacttcgttggcagcatttttatatcaggctgcaggcctagccaggggttatctcaccagaccacatctggtggctatggatccagccgcacctgctccagtcgccggttttcccgcagtaacactctgtaatatcaatcgcttcagacattccgcactatctgacgcagacattttccacctggccaatttgaccggactgccacctaaagaccgggatggccatcgagcagccggattgcgttatcccgaacctgatatggtcgacattctcaatcggacagggcatcaactcgccgatatgctcaagagttgcaatttctccgggcatcattgcagtgcgagcaacttcagcgttgtatataccagatacgggaaatgttatactttcaatgcagacccacggtccagcctgccttccagggcaggcggtatgggcagtggattggagattatgctggacatacagcaagaagaatacctccctatttggagagagacaaacgagacgtcattcgaagccggaattcgcgtacaaattcatagccaggaggagccaccatatattcatcaacttggatttggcgtcagtccaggctttcagacatttgtgtcatgtcaagagcagaggcttacatacctccctcagccctggggcaactgccgggctgaatctgagctgagggaaccagagctgcagggttactccgcatattccgtgtctgcttgtaggttgcggtgtgaaaaagaggccgtgctccagcggtgtcactgtcgcatggtacacatgcccggaaacgaaacgatctgccccccaaatatttatatcgaatgcgccgatcatacactggattctctgggcggtggacctgaggggccatgcttttgtcctacaccgtgtaacctgacacgatatggcaaggaaatatcaatggtccggatacccaaccggggttccgctcgctaccttgcccgtaaatataaccgcaatgagacctacattcgcgaaaactttctcgtgctcgatgttttcttcgaagctctaacctcagaagcgatggaacagcgggctgcgtacggcctatctgccctgttaggagacctcggcggtcagatgggactgtttattggagccagtatattgaccctgctggaaatcctcgattacatctacgaagtgagctgggaccgccttaaacgtgtttggaggcgcccaaagactcccctccgaacctccacaggagggataagcacactggggctgcaggagctgaaagagcagtccccatgtccaagtcgagggagggtggagggtggtggtgtgagctcccttctgccgaatcatcatcatcctcatggtccccctggcggactgttcgaggactttgcttgctag

SEQ ID NO: 267396 - DNA, 2001 bp, Artificial Sequence
  derived and/or modified sequence
atgctgagcggcgccgccggcgccgccagaagaggcggcgccgccctggcccccagcctgaccagaagcctggccggcacccacgccggcgccgacagctgcgccggcgccgacaagggcagccacaaggagaccatcgaggagagagacaagagacagcagagacagcagagacagagacagcaccagggctgcggcgccgccggcagcggcagcgacagccccaccagcggcccccaccccgtgcccgtgctgttccccctggccctgagcctggaggagcagcccctgccccccctgcccctgggcagagcccccggcctgctggccagagagggccagggcagagaggccctggccagccccagcagcagaggccagatgcccatcgagatcgtgtgcaagatcaagttcgccgaggaggacgccaagcccaaggagaaggaggccggcgacgagcagagcctgctgggcgccgtggcccccggcgccgcccccagagacctggccaccttcgccagcaccagcaccctgcacggcctgggcagagcctgcggccccggcccccacggcctgagaagaaccctgtgggccctggccctgctgaccagcctggccgccttcctgtaccaggccgccggcctggccagaggctacctgaccagaccccacctggtggccatggaccccgccgcccccgcccccgtggccggcttccccgccgtgaccctgtgcaacatcaacagattcagacacagcgccctgagcgacgccgacatcttccacctggccaacctgaccggcctgccccccaaggacagagacggccacagagccgccggcctgagataccccgagcccgacatggtggacatcctgaacagaaccggccaccagctggccgacatgctgaagagctgcaacttcagcggccaccactgcagcgccagcaacttcagcgtggtgtacaccagatacggcaagtgctacaccttcaacgccgaccccagaagcagcctgcccagcagagccggcggcatgggcagcggcctggagatcatgctggacatccagcaggaggagtacctgcccatctggagagagaccaacgagaccagcttcgaggccggcatcagagtgcagatccacagccaggaggagcccccctacatccaccagctgggcttcggcgtgagccccggcttccagaccttcgtgagctgccaggagcagagactgacctacctgccccagccctggggcaactgcagagccgagagcgagctgagagagcccgagctgcagggctacagcgcctacagcgtgagcgcctgcagactgagatgcgagaaggaggccgtgctgcagagatgccactgcagaatggtgcacatgcccggcaacgagaccatctgcccccccaacatctacatcgagtgcgccgaccacaccctggacagcctgggcggcggccccgagggcccctgcttctgccccaccccctgcaacctgaccagatacggcaaggagatcagcatggtgagaatccccaacagaggcagcgccagatacctggccagaaagtacaacagaaacgagacctacatcagagagaacttcctggtgctggacgtgttcttcgaggccctgaccagcgaggccatggagcagagagccgcctacggcctgagcgccctgctgggcgacctgggcggccagatgggcctgttcatcggcgccagcatcctgaccctgctggagatcctggactacatctacgaggtgagctgggacagactgaagagagtgtggagaagacccaagacccccctgagaaccagcaccggcggcatcagcaccctgggcctgcaggagctgaaggagcagagcccctgccccagcagaggcagagtggagggcggcggcgtgagcagcctgctgcccaaccaccaccacccccacggcccccccggcggcctgttcgaggacttcgcctgctag

SEQ ID NO: 267397 - protein, 939 aa, Artificial Sequence
  derived and/or modified sequence
MRPGTGAERGGLMVSEMESHPPSQGPGDGERRLSGSSLCSGSWVSADGFLRRRPSMGHPGMHYAPMGMHPMGQRANMPPVPHGMMPQMMPPMGGPPMGQMPGMMSSVMPGMMMSHMSQASMQPALPPGVNSMDVAAGTYTLYKSMWTEHKSPDGRTYYYNTETKQSTWEKPDDLKTPAEQLLSKCPWKEYKSDSGKPYYYNSQTKESRWAKPKELEDLEGKMGKIKYSKQEECTTTSTAPVPTTEIPTTMSTMAAAEAAAAVVAAAAAAAAAAAAANANASTSASNTVSGTVPVVPEPEVTSIVATVVDNENTVTISTEEQAQLTSTPAIQDQSVEVSSNTGEETSKQETVADFTPKKEEEESQPAKKTYTWNTKEEAKQAFKELLKEKRVPSNASWEQAMKMIINDPRYSALAKLSEKKQAFNAYKVQTEKEEKEEARSKYKEAKESFQRFLENHEKMTSTTRYKKAEQMFGEMEVWNAISERDRLEIYEDVLFFLSKKEKEQAKQLRKRNWEALKNILDNMANVTYSTTWSEAQQYLMDNPTFAEDEELQNMDKEDALICFEEHIRALEKEEEEEKQKSLLRERRRQRKNRESFQIFLDELHEHGQLHSMSSWMELYPTISSDIRFTNMLGQPGSTALDLFKFYVEDLKARYHDEKKIIKDILKDKGFVVEVNTTFEDFVAIISSTKRSTTLDAGNIKLAFNSLLEKAEAREREREKEEARKMKRKESAFKSMLKQAAPPIELDAVWEDIRERFVKEPAFEDITLESERKRIFKDFMHVLEHECQHHHSKNKKHSKKSKKHHRKRSRSRSGSDSDDDDSHSKKKRQRSESRSASEHSSSAESERSYKKSKKHKKKSKKRRHKSDSPESDAEREKDKKEKDRESEKDRTRQRSESKHKSPKKKTGKDSGNWDTSGSELSEGELEKRRRTLLEQLDDDQ

SEQ ID NO: 267398 - DNA, 8048 bp, Artificial Sequence
  derived and/or modified sequence
gatcgaaccctctcctccgaacccctcctttcgccttccccgcctcctcccctccgcctcgagcaccgcgcgcgcgcattcggtcccagccaccgctaacactacaggctgcttacccccgccccctccaccctacccctggcggcctcaggtttgtggggcgtacgtaactcgggcggggagggtgaaggtggcagacccccactgccccaccccctacggggtgaggcggtctaagctcgggaagctgggacactgttgtcttcccttcccctggggaagttggtagagttttcccgacggaggactcggcgcagaaacttcctccgtcctcctcctcccccccccccatgcaggcgacgccgagtgaggctgaggctgggggcgaatcgccgcagagctgcgtgtcggcggcgcattctgattggacagcggggaagcccgtcagcctgttggccccgctgatcccgccccgtagcgcagggcagcctttaacctttagccccagtgggcgccagccactcagatcgcttcttgttggtatgtgtagcggcagtggccgccggcggagcagtctgagcccgacgatgaggccggggacgggagctgagcgtggaggcctcatgatggggcaccctggcatgcattatgccccaatgggaatgcaccctatgggtcagagagcgaatatgcctcctgtacctcatggaatgatgccgcagatgatgccccctatgggagggccaccaatgggacaaatgcctggaatgatgtcgtcagtaatgcctggaatgatgatgtctcatatgtctcaggcttccatgcagcctgccttaccgccaggagtaaatagtatggatgtagcagcaggtacagcatctggtgcaaaatcaatgtggactgaacataaatcacctgatggaaggacttactactacaacactgaaaccaaacagtctacctgggagaaaccagatgatcttaaaacacctgctgagcaactcttatctaaatgcccctggaaggaatacaaatcagattctggaaagccttactattataattctcaaacaaaagaatctcgctgggccaaacctaaagaacttgaggatcttgaaggataccagaataccattgttgctggaagtcttattacaaaatcaaacctgcatgcaatgatcaaagctgaagaaagcagtaagcaagaagagtgcaccacaacatcaacagccccagtccctacaacagaaattccgaccacaatgagcaccatggctgctgccgaagcagcagctgctgttgttgcagcagcagcagcggcagcagcagcagcagctgcagccaatgctaatgcttccacttctgcttctaatactgtcagtggaactgttccagttgttcctgagcctgaagttacttccattgttgctactgttgtagataatgagaatacagtaactatttcaactgaggaacaagcacaacttactagtacccctgctattcaggatcaaagtgtggaagtatccagtaatactggagaagaaacatctaagcaagaaactgtagctgattttactcccaaaaaagaagaggaggagagccaaccagcaaagaaaacatacacttggaatacaaaggaagaggcaaagcaagcttttaaagaattattgaaagaaaagcgggtaccatcgaatgcttcatgggagcaggctatgaaaatgattattaatgatccacgatacagtgctttggcaaagttaagtgaaaaaaagcaagcctttaatgcctataaagtccagacagaaaaagaagaaaaagaagaagcaagatcaaagtacaaagaggctaaggaatcctttcagcgttttcttgaaaatcatgagaaaatgacttctacaaccagatacaaaaaagcagagcaaatgtttggagagatggaagtttggaatgcaatatcagaacgtgatcgtcttgaaatctatgaagatgttttgttctttctttcaaaaaaagaaaaggaacaagcaaagcagttgcgaaagagaaattgggaagccttaaaaaacatacttgacaacatggctaatgtaacatactctaccacttggtctgaagcccagcagtatctgatggataatccaacttttgcagaagatgaggagttacaaaatatggacaaagaagatgcattaatttgctttgaagaacacattcgggctttagaaaaggaggaagaagaagaaaaacagaagagtttgctgagagaaaggagacgacagcgaaaaaatagggaatctttccagatatttttagatgaattacatgaacatggacaactgcattctatgtcatcttggatggaattgtatccaactattagttctgatattagattcactaatatgcttggtcagcctggatcaactgcacttgatcttttcaagttttatgttgaggatcttaaagcacgttatcatgacgagaagaagataataaaagacattctaaaggataaaggatttgtagttgaagtaaacactacttttgaagattttgtggcgataatcagttcaactaaaagatcaactacattagatgctggaaatatcaaattggctttcaatagtttactagaaaaggcagaagcccgtgaacgtgaaagagaaaaagaagaggctcggaagatgaaacgaaaagaatctgcatttaagagtatgttaaaacaagctgctcctccgatagaattggatgctgtctgggaagatatccgtgagagatttgtaaaagagccagcatttgaggacataactctagaatctgaaagaaaacgaatatttaaagattttatgcatgtgcttgagcatgaatgtcagcatcatcattcaaagaacaagaaacattctaagaaatctaaaaaacatcataggaaacgttcccgctctcgatcggggtcagattcagatgatgatgatagccattcaaagaaaaaaagacagcgatcagagtctcgttctgcttcagaacattcttctagtgcagagtctgagagaagttataaaaagtcaaaaaagcataagaagaaaagtaagaagaggagacataaatctgactctccagaatccgatgctgagcgagagaaggataaaaaagaaaaagatcgggaaagtgaaaaagacagaactagacaaagatcagaatcaaaacacaaatcgcctaagaaaaagactggaaaggattctggtaattgggatacttctggcagcgaactgagtgaaggggaattggaaaagcgcagaagaacccttttggagcaactggatgatgatcaataaattataccaaatatatgtttacagtatgatttaaagtctgattcagaccagggactctattttaagttcaactgaaataacactgggttttaattatatcacaggaaaaaaaaagtgcatttaagtattgttatcgtggactttataaaagcaaaggaaattgaaagtaacttttgattctgtatcaagaatcatattttcatacagtcataactgtctttctgtgaccctttcacagggcactgtaggatggattaaaggtggcaatttactgataactgcagatgtctctactttgttctaaaatctaagtcatgaggtgatttgatttactttatagaagctggattttgaagatctaatgaaaaattttttgataatatagtagtacaaaaaaagcaccagcaactgataaaaattgcttttttgtgcgctacccaactggttaaagccaatgtgatcttttatggtgaaactcctaagaaacaggtggttttgctggaaacttggtagacccttaattatagtggtgctaatgagcactactgtaatataaagccaccattattttttatcaaacatctgaatacattttacaaaggctattgtgagggcattattttgagcatctattttgaggtgatgtttaaaaaaactttaacatcaaatcaaattgtaaattaatttaaatatattgccttaaggacctactaaagaatgtgccaccagactttaagtgatagttgcaatatccttgtctaaaaaaaaaaaaaaagttgacttaaacattttctttaacagttgtcttttttttctaaattcagtctttctcttgcttttttttccctgctattgaggaagtattttgccttccctactcactgagaagtattgacttcgtggtacacattctaaagcatttctgatttgaatatttttgtacatttttatcaattattaaaccttctcttctagtgtgtactagtatttatttctacttaaactgctcagctctaaagaaattgtatgatcactttaaaggtactaaatccctgaaattttgcttcatcttacccacaccgctagtttactttccttttttaatatttaagaatattataaatcagtgcatttgaggtccctagatttgtttttcacctatgaattttttacagactattttagagaggctgtggtttgaagacagaatactctttacatgctaacttttgaaggttggtaatgtaatttatactattttccttcagtgcaggagattttttaagtaaataagtaaattttagcacctattcttcggtattatctgtgttattcttttaatgtgtacacttgaagagatcctatttcaaagttgggattttgaagaacaaaaagtttttttcttacccatcctagtgagttttgaaagtgggcctgaccagaatgtctctttcccattttgccccgtttgaattaaatataatgtctactctttaaaggctgaaggggtgggtgaggggattgtttctcattttgtctcccaagtcatttttctgctgtgaaatatgaccaggcttgtaggaagactcatcttggagaaaatgtgaagtaatcaaattgcttgagattagtctcctattgtatattagagccaaaacacataataactttggcaacagggagttgtctagactcaattttcagaggtcccattgtagtgagttaatattgctaatcatgtcaatcacttgacatggaagtcagtggcaaatctttaaagtatgcatttgatactggcaaatatatactactgatgtttcacaaaagaatcttagaatctgtagaaaacattaattacttccatgaattatttctaaagtataactttaaagttttgatttttctatttaaataaaaagctattgatgtgttttagcatgtcctcaaaatagattcctgtatttcttacagagataatcttactataaccgcaaatccctacaacacagtataaagtttccctgtagttcacccatgaaaattatttgacttaaaaacaaccatagtagtaagccaattgcaattcaaaatgcaacatccttgccataaaagatgtaacttaagtgactgtgatcctttgtctacctttcaggatcccatcaaatgggatttagttgctagaaagatacttgacagtctgaaggcacaggtgataagattttgttctctgtgaatatttttaaactaataggttatgtttttaaatcttcaatttggtaaaaaactgaaacgtcttggaatattggttctattagagttaaatatggtaaaacaggaaagcgtgtttattttcagataaggggaatttatacttttcattaaagtcttggagtcttaggaaaatgttgagggtttgtcttcccccagtgtcattaatactaatgaactattagatcaaattcacttatacatttaatatcatagttattcaaaatcaggactttaaatatttttttctcccagttcatatttctttgtgcgaaaattgaatttgtatgaaaagttagataattaagctaatcaagtatgaagtatacactcttcctaagtgaatttaaataatgtaatgcttttaaataaaagcagtggtcccaccacatttttttcagcatagtagctggcattttgttatcattagccagagtagcttcagcatataagttattgatgttttccaacttcaaaagtgcattttatgcctcccagtaaatttgataatgatttgtcacagctttgtcatcttttgacttttgcttatgggcctcacttcgtacaactataacatgaaaaaggattgtcctaaagtaagggaatcagttaatggtaggatgaagaaactgtaaaaactcctagaaaaaaacctgtgtgcatttttctggaaagttttcaaactgtgtaattcagttttcattcaattatataatttggttatatgctttaaaaaacatttgtctaaatgttcccggttttcttctggtcttagagtcagctgagtgctggctatgcagccactcgtatttttgcatccagaaaggagtaactccctttatatgaagatttttttttttaagcttagatgctatgtaagagaaaactatttgtaatcacatagtacccagggaggagtgatgaatgcttttttaaaaaaggatatttaagtatattatgtaatttaaatataaattatcaaactaaaaaacttcagcttttaaaactttctaaacaaaatgaagcaaagtacattaattccttctatcttaaatctgagactttttattttcccttgggtatatatttctctcagtgttaggtagatgttaattcaaccatcctacattctctatataaaattacactcattttacatgaaagcaaaataatgtcgttactttcatggaactgtgttctaacaggcttataatctcattctgtgcttctggtaatggcgtataccagtctgatgattcttaccatccttattcttacattactcttccaattgttttgattttaactggtggtcatgtaagttcctcggtggcagggatttatctggttcatttactgttatatatccttgtggaataggacagtgcctggcatataataggcacttttggaatgaatgtaaaatactagttgaaatatgtattcatctggcatccatggtacccatcatctgtattaaagggcttaaaaaagcatcattgcaataaaccatactaacccaccactaaagtcacagtcataattgaagtgcacccaaaataaggtccagtgactgtaccttagcttttacttcagacatgtccaaaacttgtgagaacatacaatttaaagttgaaaactcatcattttgggctatttttgaatagggctgaaatatggtgacatgtcaggcactcagttttttggagctgtcttaaaggtgaggtggaaagtgagagatgattttgctctaattacccacacattctccctaaccctccattttaagacacttagctataatagcttaagactatcaaaactgcttttgtgattctcagtaggatctagttcaaagccatctcagtgctagtgattggtaattgttaatttgatggtaattaccctacttgtaaagttgacattcatactggctaatcctccctgcccctagtcgtggacaatgaaacagtgagtggctggtgaattagatcagattcaaactaagccattccttgatgctattcttcactgctgttccttagggtatctaaatgtgttatttataaacatttttgggggctcctgcctgcaaacttcggtaggtgttggtcttccccacctctacaactgagccaaggacttgttctgaaaggtgagtaataaataagggaacaaggtttctattttctgtgtttgtaattaccagattttcacctctgtttatatattattctgatgtaaaagaacctcatagttatataaaattagaccttttgtaaataaatataatttattagaaaaaatggtatcttttactaaattggatttgtgtcagttttttcctttaagcaccactcaggcagcaagctctatgctgtgagagttgctggaggcccacgttatgttttctcagtgtaattcctctttttcttgataaaaaga

SEQ ID NO: 267399 - protein, 816 aa, Artificial Sequence
  derived and/or modified sequence
MCSGSGRRRSSLSPTMRPGTGAERGGLMMGHPGMHYAPMGMHPMGQRANMPPVPHGMMPQMMPPMGGPPMGQMPGMMSSVMPGMMMSHMSQASMQPALPQLLSKCPWKEYKSDSGKPYYYNSQTKESRWAKPKELEDLEGYQNTIVAGSLITKSNLHGMLTELKYSKQEECTTTSTAPVPTTEIPTTMSTMAAAEAAAAVVAAAAAAAAAAAAANANASTSASNTVSGTVPVVPEPEVTSIVATVVDNENTVTISTEEQAQLTSTPAIQDQSVEVSSNTGEETSKQETVADFTPKKEEEESQPAKKTYTWNTKEEAKQAFKELLKEKRVPSNASWEQAMKMIINDPRYSALAKLSEKKQAFNAYKVQTEKEEKEEARSKYKEAKESFQRFLENHEKMTSTTRYKKAEQMFGEMEVWNAISERDRLEIYEDVLFFLSKKEKEQAKQLRKRNWEALKNILDNMANVTYSTTWSEAQQYLMDNPTFAEDEELQNMDKEDALICFEEHIRALEKEEEEEKQKSLLRERRRQRKNRESFQIFLDELHEHGQLHSMSSWMELYPTISSDIRFTNMLGQPVFSLGSTALDLFKFYVEDLKARYHDEKKIIKDILKDKGFVVEVNTTFEDFVAIISSTKRSTTLDAGNIKLAFNSLLEKAEAREREREKEEARKMKRKESAFKSMLKQAAPPIELDAVWEDIRERFVKEPAFEDITLESERKRIFKDFMHVLEHECQHHHSKNKKHSKKSKKHHRKRSRSRSGSDSDDDDSHSKKKRQRSESRSASEHSSSAESERSYKKSKKHKKKSKKRRHKSDSPESDAER

SEQ ID NO: 267400 - DNA, 2451 bp, Artificial Sequence
  derived and/or modified sequence
atgtgtagtggctccgggcgccggagatccagtctctccccaaccatgcggcccggcactggcgccgaaagaggcggcctcatgatgggccaccctggcatgcattatgctcctatggggatgcacccaatgggacagagggctaacatgccaccggtgccacacggcatgatgccacagatgatgcctcccatggggggcccccccatggggcaaatgcccggaatgatgtcaagcgtcatgcctggcatgatgatgtctcacatgagtcaggcgtctatgcagccagcactccctcagttactttcaaagtgcccctggaaagaatataaatcagactcgggaaaaccatattattacaactctcagaccaaggaaagccgatgggcaaaaccgaaagaactggaagacctggagggataccaaaatactattgttgctggttcgttaatcacaaagtctaacctgcatggcatgctgactgaactgaagtattccaagcaggaggaatgtactactaccagtacagcccccgtgccaacaactgaaatccccaccacaatgtcgactatggccgccgccgaagcggccgccgctgtggtggctgcagccgctgccgcagcagccgcagcggcagctgccaatgccaacgcatccacttctgcaagcaacacagtctccgggactgtgcccgtggtgcccgagcctgaagttacctctatcgtggccaccgttgttgataacgagaatactgtcaccatttcaaccgaggagcaggcccagttgacatctactcctgccatccaggatcaatcagttgaggtgagcagtaacactggggaggaaacatcaaagcaagaaaccgtggccgactttacaccaaagaaagaagaggaagagagccagccggcaaaaaagacctatacctggaatacaaaagaggaggcaaagcaagcatttaaagagttgcttaaagaaaagagggtgccttctaacgcctcatgggagcaggccatgaagatgattattaatgatccccgctattccgccctcgcaaagctgagcgagaaaaagcaggcgttcaatgcttacaaggtacagactgagaaggaagagaaagaggaggctagatccaagtataaggaggcgaaagagtctttccaaagattccttgagaaccatgagaagatgacttccacgactcggtataagaaggcagagcagatgttcggggaaatggaagtctggaacgccatttcagaacgagatcgcctcgagatatatgaggatgttctgttctttctctccaaaaaggagaaggaacaagctaagcagttgaggaagcgaaactgggaagcactcaaaaacattctagataacatggcaaatgtgacatactctacaacttggagcgaggcccagcagtatctgatggacaatcccacttttgcagaggacgaagaactgcaaaacatggacaaggaggatgccctgatctgttttgaggagcatatacgtgcccttgaaaaagaagaagaggaggagaaacagaaatcccttctgcgcgaaagacggcgccaacggaagaaccgtgagtctttccagatctttctggacgaactccatgagcatggacagctccacagcatgtcttcttggatggaactttacccaaccatctcatcagatatccgttttacaaacatgctaggacagcctgtgtttagtcttggcagtacagccctggatctgttcaaattctatgttgaggatttgaaggctagatatcacgatgagaagaaaattattaaagatatccttaaagataagggattcgtggtcgaggtaaatactacctttgaggatttcgtggccatcatctcatccactaagcgcagtacaacactggacgctggtaacatcaagctggcctttaactcccttctggagaaggcggaggctagagagagggagagggaaaaagaagaggcccgaaaaatgaagagaaaagagagcgccttcaagagcatgctgaaacaggctgcccctccaattgaattggatgccgtatgggaggatattcgcgaacgcttcgtaaaggagccggccttcgaagacatcacattggagagtgaaagaaagcgaatattcaaggatttcatgcatgttctagagcacgagtgtcagcaccaccattccaagaacaagaaacacagcaagaaatctaaaaaacaccatagaaaaaggagcaggagccgcagcggctccgacagtgacgatgatgactcgcactctaaaaagaaaagacagcgctctgagagccggagcgcctctgagcattcatccagtgccgaaagtgagcgcagttacaaaaaatcaaagaagcataagaagaaaagcaagaaacggcgccataaatctgattcacctgagagcgacgcagaacgttag

SEQ ID NO: 267401 - DNA, 2451 bp, Artificial Sequence
  derived and/or modified sequence
atgtgcagcggcagcggcagaagaagaagcagcctgagccccaccatgaggcctggcaccggggctgagcggggcggcctgatgatgggccaccctggcatgcactacgcccccatgggcatgcaccccatgggccagagggccaacatgcctcctgtgccccacggcatgatgccccagatgatgccacccatgggcggcccccccatgggccagatgcctggcatgatgagctctgtgatgcctggcatgatgatgagccacatgagccaggcctccatgcagcctgccctgccccagctgctgagcaagtgcccctggaaggagtacaagagtgacagcggcaagccctactactacaacagccagaccaaggagagccgctgggccaagcccaaggagctggaggacctggagggctaccagaacaccatcgtggccggcagcctcatcaccaagagcaacctgcacggcatgctgacagagctgaagtacagcaagcaggaggagtgcaccaccaccagcacagcccctgtgcccaccacagagatccccaccaccatgagcaccatggctgctgctgaggccgctgctgctgtggtggccgctgctgctgctgctgctgctgctgctgctgctgccaatgccaatgccagcaccagcgccagcaacacagtgtctggaacagtgcctgtggtgcctgagcctgaggtgaccagcatcgtggccaccgtggtggacaatgaaaatacagtgaccatcagcacagaggagcaggcccagctgaccagcaccccagccatccaggaccagagcgtggaggtgagcagcaacacaggagaggagaccagcaagcaggagaccgtggccgacttcacccccaagaaggaggaggaggagagccagcctgccaagaagacctacacctggaacaccaaggaggaggccaagcaggccttcaaggagctgctgaaggagaagagggtgcccagcaatgcctcctgggagcaggccatgaagatgatcatcaatgacccccgctacagcgccctggccaagctgtctgagaagaagcaggccttcaatgcctacaaggtgcagacagagaaggaggagaaggaggaggcccggagcaagtacaaggaggccaaggagagcttccagcgcttcctggagaaccacgagaagatgaccagcaccacccgctacaagaaggccgagcagatgtttggagagatggaggtgtggaatgccatcagcgagcgggaccggctggagatctatgaagatgtgctcttcttcctgagcaagaaggagaaggagcaggccaagcagctgaggaagaggaactgggaggccctgaagaacatcctggacaacatggccaacgtgacctacagcaccacctggagcgaggcccagcagtacctgatggacaaccccacctttgctgaagatgaggagctgcagaacatggacaaggaggatgccctgatctgctttgaggagcacatccgggccctggagaaggaggaggaggaggagaagcagaagagcctgctgcgggagcggcggcggcagaggaagaaccgggagagcttccagatcttcctggatgagctgcacgagcacggccagctgcacagcatgagctcctggatggagctgtaccccaccatcagcagtgacatccgcttcaccaacatgctgggccagcctgtgttcagcctgggcagcacagccctggacctcttcaagttctacgtggaggacctgaaggcccgctaccatgatgagaagaagatcatcaaggacatcctgaaggacaagggctttgtggtggaggtgaacaccacctttgaagattttgtggccatcatcagcagcaccaagaggagcaccaccctggatgctggcaacatcaagctggccttcaacagcctgctggagaaggccgaggcccgggagcgggagcgggagaaggaggaggccaggaagatgaagaggaaggagagcgccttcaagtccatgctgaagcaggccgccccacccatcgagctggatgctgtgtgggaggacatccgggagagatttgtgaaggagcccgcctttgaggacatcaccctggagagcgagaggaagaggatcttcaaggacttcatgcacgtgctggagcacgagtgccagcaccaccacagcaagaacaagaagcacagcaagaagagcaagaagcaccacaggaagaggagccgcagccgcagcggcagtgacagtgatgatgatgacagccacagcaagaagaagaggcagaggtctgagagccgcagcgccagcgagcacagcagcagcgctgagagcgagaggagctacaagaagagcaagaagcacaagaagaagagcaagaagagaagacacaagagtgacagccctgagagtgatgctgagaggtag

SEQ ID NO: 267402 - DNA, 2451 bp, Artificial Sequence
  derived and/or modified sequence
atgtgcagcggcagcggccggcggcggagcagcctgagccccaccatgagacccggaaccggggccgaaagaggcgggttgatgatgggacatcccgggatgcattacgcccccatgggtatgcatcccatgggccagcgggccaatatgccccctgttcctcacgggatgatgccacagatgatgcctcctatgggcggaccccccatgggacagatgcccgggatgatgagcagcgtgatgcctggcatgatgatgtcccatatgtcccaggcctctatgcagcctgccctcccacagctccttagcaaatgcccctggaaagaatataagtctgactccggtaagccttattactacaacagccagacaaaagagtccaggtgggctaagccaaaagagcttgaagatctggagggctaccagaataccattgtggcagggtctctgatcacaaagtctaaccttcacggcatgctcacggaactgaaatactctaagcaagaggagtgcaccactacctcgactgctcccgtgcccactaccgaaattcccacaacgatgagtacgatggctgccgcagaggctgccgcagcggtggtcgcagccgcagccgctgctgctgctgctgccgccgctgctaacgccaatgctagtacttcggcctccaatactgtttccgggaccgtgcccgttgtccctgagcctgaggtgacctcaatcgtcgctacagtggttgataacgagaacaccgtaacaatatcaacagaggagcaggcacagcttacctccacccctgccatccaggaccagtctgtggaagtaagctcgaataccggcgaggagacctccaagcaagaaacagttgcagactttactcctaagaaggaggaggaagaaagtcagcccgccaagaagacttacacatggaatactaaggaagaagcaaagcaggcttttaaagaactactaaaggagaagagggtgccaagcaatgcttcatgggaacaggcaatgaagatgatcataaatgatccccgctattctgcactggccaaactgagcgagaagaagcaggccttcaacgcatataaagttcagaccgagaaagaggaaaaggaagaagcaagaagtaagtataaagaagccaaagaatcctttcaaaggttcctcgagaatcacgagaaaatgaccagcaccacaaggtataagaaggccgaacaaatgtttggagaaatggaagtctggaacgccatttctgagcgagataggctggagatctatgaggatgtgctctttttcctgtccaagaaagaaaaagagcaagctaagcagttacgcaaacgcaactgggaggctctaaagaatatactagacaacatggccaatgttacatacagtaccacttggtcagaggcacaacagtacctcatggataaccccacctttgcagaagatgaggagttgcagaacatggacaaggaagacgccctcatttgttttgaggagcatatccgagccctagaaaaggaagaggaggaggagaagcagaaaagcctactgcgcgaaagacgaagacaacggaagaacagagaatccttccagatctttttagatgagctgcacgaacatgggcaattacatagtatgtcttcgtggatggaactgtaccctaccatttcctcagacatccggtttactaatatgctgggacagccagtatttagtctaggctctaccgcgttagacctattcaagttttatgtcgaagacttaaaagctcgctatcacgatgagaaaaagattatcaaggacattcttaaagacaaggggttcgtggtggaagtaaatacaaccttcgaggactttgttgccattatcagcagtacaaagcggtctacaacactcgacgctgggaacataaagctcgcctttaattccctgctggaaaaggccgaggctcgggaacgggaacgcgagaaggaagaggcccgcaaaatgaagaggaaggagagcgccttcaagagcatgctgaaacaggcggctcctcctatcgagctcgatgcagtgtgggaggacatcagggagcgatttgtgaaggagcccgcatttgaggatatcaccttggagagcgagaggaagaggatattcaaggatttcatgcacgtactcgaacatgaatgccagcatcaccattcgaagaacaaaaagcactccaaaaaatccaaaaaacatcaccggaaacgttctaggtccagaagtggtagtgacagcgacgacgacgactctcatagcaagaaaaaacgccagagatccgagagcaggtccgcctctgagcactccagtagtgccgagagcgagcggtcttacaagaaaagtaagaagcataagaagaaaagtaagaaacggcgacacaagtctgactccccagagtcggatgccgagaggtag

SEQ ID NO: 267403 - DNA, 2451 bp, Artificial Sequence
  derived and/or modified sequence
atgtgcagtggaagtgggaggcggagaagtagtctttctcctaccatgaggccgggtaccggcgctgaaagaggaggcctcatgatgggtcatcctgggatgcactacgccccaatgggcatgcacccaatgggtcagcgagctaacatgccaccagtgcctcatggcatgatgccgcaaatgatgccacccatgggaggcccaccgatgggtcagatgccgggaatgatgagttccgttatgcccggaatgatgatgagtcatatgtcacaggcttcaatgcagcccgctctgccccagcttctcagtaaatgcccctggaaggagtataagtctgactccggaaagccatattattataattcacagaccaaggaatcccgatgggccaaaccgaaagagctcgaagatttagaagggtaccaaaatacaattgttgctggttccttgatcacaaaatctaacctccacggtatgcttactgagttgaaatacagtaagcaggaagagtgcacgacgacctcaaccgcgcctgttcctaccacagaaatccccaccaccatgtccactatggctgccgctgaagccgcagccgcagtcgtggcggctgccgctgctgcggcagccgctgcagctgcagcaaacgctaacgcaagcacgtctgcatccaacaccgtgtccgggaccgtacccgtcgtgcctgaacccgaagtgacatcaatcgtcgcgactgtggttgataatgaaaatacagtcacaatctcaaccgaagaacaagctcaattaaccagcacgccagctattcaggatcagagtgttgaagtatcctccaacactggggaggagacctcaaaacaagagactgtggccgatttcactccaaagaaggaggaagaagagagccagcctgctaaaaagacctacacttggaatacaaaggaggaagctaaacaggcgtttaaggagttgctgaaggagaagagggtaccttcaaatgctagctgggaacaggccatgaaaatgatcatcaacgacccacggtactctgcattggctaaactgtccgagaagaagcaagccttcaatgcttacaaagtccaaacagagaaggaagaaaaagaggaagctagaagcaaatataaggaggccaaagagtcctttcagcgcttccttgagaatcacgagaagatgaccagcactacacgatacaaaaaggcagagcagatgttcggtgagatggaggtatggaatgcaatctctgagcgcgaccggcttgagatttatgaggatgtcctctttttcctcagtaagaaagaaaaagaacaggccaagcagttaaggaaacggaactgggaggccctcaaaaacatcctcgataacatggctaatgtgacttactcaaccacgtggagtgaggcacagcagtacttgatggacaatccgacgttcgccgaagacgaggaactgcagaatatggacaaagaagacgcgcttatctgctttgaagagcacattagagcgctcgagaaagaagaagaggaagaaaagcagaagagcctgttacgcgagcgaagacgccagcggaagaacagagagtcctttcagattttcctggacgaactgcatgagcatggccagctacactccatgtcaagctggatggaattataccccaccatcagcagcgatattagattcacaaacatgttggggcagcctgtgttctcactgggctctactgcgctggatctgtttaagttctatgtggaagatctaaaagccagataccatgacgagaaaaaaattattaaggatatactgaaagacaaaggcttcgtggtcgaggtgaatacaacctttgaggattttgtggccatcatctcctcaaccaagcgaagtaccacattggacgcaggcaatattaagctggcctttaatagcctgctggaaaaagccgaggcacgagagcgtgagcgtgagaaagaggaggcgcgaaagatgaaaagaaaggagtcggcttttaaaagcatgctgaagcaggccgcacctcctatcgaattggacgctgtgtgggaggatatccgtgagcggtttgttaaagagcccgcattcgaggatatcacgctagaaagtgagagaaaacgcatattcaaagattttatgcacgttctcgagcacgaatgccagcaccaccactccaaaaataagaagcatagcaagaaaagtaagaagcaccataggaaacgctcacggagcagatctggctccgacagcgacgatgacgatagccactcaaagaagaaaagacagcggagcgaaagtcggagtgcctccgagcactcttcctcagcagaatcagagcgctcatacaaaaagtctaagaagcacaagaaaaagtccaagaagagacggcacaaatccgactccccagagagcgacgctgaacgctag

SEQ ID NO: 267404 - DNA, 2470 bp, Artificial Sequence
  derived and/or modified sequence
actcagatcgcttcttgttggtatgtgtagcggcagtggccgccggcggagcagtctgagcccgacgatgaggccggggacgggagctgagcgtggaggcctcatgatggggcaccctggcatgcattatgccccaatgggaatgcaccctatgggtcagagagcgaatatgcctcctgtacctcatggaatgatgccgcagatgatgccccctatgggagggccaccaatgggacaaatgcctggaatgatgtcgtcagtaatgcctggaatgatgatgtctcatatgtctcaggcttccatgcagcctgccttaccgcaactcttatctaaatgcccctggaaggaatacaaatcagattctggaaagccttactattataattctcaaacaaaagaatctcgctgggccaaacctaaagaacttgaggatcttgaaggataccagaataccattgttgctggaagtcttattacaaaatcaaacctgcatggaatgttaacggaattaaagtatagtaagcaagaagagtgcaccacaacatcaacagccccagtccctacaacagaaattccgaccacaatgagcaccatggctgctgccgaagcagcagctgctgttgttgcagcagcagcagcggcagcagcagcagcagctgcagccaatgctaatgcttccacttctgcttctaatactgtcagtggaactgttccagttgttcctgagcctgaagttacttccattgttgctactgttgtagataatgagaatacagtaactatttcaactgaggaacaagcacaacttactagtacccctgctattcaggatcaaagtgtggaagtatccagtaatactggagaagaaacatctaagcaagaaactgtagctgattttactcccaaaaaagaagaggaggagagccaaccagcaaagaaaacatacacttggaatacaaaggaagaggcaaagcaagcttttaaagaattattgaaagaaaagcgggtaccatcgaatgcttcatgggagcaggctatgaaaatgattattaatgatccacgatacagtgctttggcaaagttaagtgaaaaaaagcaagcctttaatgcctataaagtccagacagaaaaagaagaaaaagaagaagcaagatcaaagtacaaagaggctaaggaatcctttcagcgttttcttgaaaatcatgagaaaatgacttctacaaccagatacaaaaaagcagagcaaatgtttggagagatggaagtttggaatgcaatatcagaacgtgatcgtcttgaaatctatgaagatgttttgttctttctttcaaaaaaagaaaaggaacaagcaaagcagttgcgaaagagaaattgggaagccttaaaaaacatacttgacaacatggctaatgtaacatactctaccacttggtctgaagcccagcagtatctgatggataatccaacttttgcagaagatgaggagttacaaaatatggacaaagaagatgcattaatttgctttgaagaacacattcgggctttagaaaaggaggaagaagaagaaaaacagaagagtttgctgagagaaaggagacgacagcgaaaaaatagggaatctttccagatatttttagatgaattacatgaacatggacaactgcattctatgtcatcttggatggaattgtatccaactattagttctgatattagattcactaatatgcttggtcagcctgttttttcattaggatcaactgcacttgatcttttcaagttttatgttgaggatcttaaagcacgttatcatgacgagaagaagataataaaagacattctaaaggataaaggatttgtagttgaagtaaacactacttttgaagattttgtggcgataatcagttcaactaaaagatcaactacattagatgctggaaatatcaaattggctttcaatagtttactagaaaaggcagaagcccgtgaacgtgaaagagaaaaagaagaggctcggaagatgaaacgaaaagaatctgcatttaagagtatgttaaaacaagctgctcctccgatagaattggatgctgtctgggaagatatccgtgagagatttgtaaaagagccagcatttgaggacataactctagaatctgaaagaaaacgaatatttaaagattttatgcatgtgcttgagcatgaatgtcagcatcatcattcaaagaacaagaaacattctaagaaatctaaaaaacatcataggaaacgttcccgctctcgatcggggtcagattcagatgatgatgatagccattcaaagaaaaaaagacagcgatcagagtctcgttctgcttcagaacattcttctagtgcagagtctgagagaagttataaaaagtcaaaaaagcataagaagaaaagtaagaagaggagacataaatctgactctccagaatccgatgctgagcga

SEQ ID NO: 267405 - DNA, 2451 bp, Artificial Sequence
  derived and/or modified sequence
atgtgcagcggcagcggcagaagaagaagcagcctgagccccaccatgagacccggcaccggcgccgagagaggcggcctgatgatgggccaccccggcatgcactacgcccccatgggcatgcaccccatgggccagagagccaacatgccccccgtgccccacggcatgatgccccagatgatgccccccatgggcggcccccccatgggccagatgcccggcatgatgagcagcgtgatgcccggcatgatgatgagccacatgagccaggccagcatgcagcccgccctgccccagctgctgagcaagtgcccctggaaggagtacaagagcgacagcggcaagccctactactacaacagccagaccaaggagagcagatgggccaagcccaaggagctggaggacctggagggctaccagaacaccatcgtggccggcagcctgatcaccaagagcaacctgcacggcatgctgaccgagctgaagtacagcaagcaggaggagtgcaccaccaccagcaccgcccccgtgcccaccaccgagatccccaccaccatgagcaccatggccgccgccgaggccgccgccgccgtggtggccgccgccgccgccgccgccgccgccgccgccgccgccaacgccaacgccagcaccagcgccagcaacaccgtgagcggcaccgtgcccgtggtgcccgagcccgaggtgaccagcatcgtggccaccgtggtggacaacgagaacaccgtgaccatcagcaccgaggagcaggcccagctgaccagcacccccgccatccaggaccagagcgtggaggtgagcagcaacaccggcgaggagaccagcaagcaggagaccgtggccgacttcacccccaagaaggaggaggaggagagccagcccgccaagaagacctacacctggaacaccaaggaggaggccaagcaggccttcaaggagctgctgaaggagaagagagtgcccagcaacgccagctgggagcaggccatgaagatgatcatcaacgaccccagatacagcgccctggccaagctgagcgagaagaagcaggccttcaacgcctacaaggtgcagaccgagaaggaggagaaggaggaggccagaagcaagtacaaggaggccaaggagagcttccagagattcctggagaaccacgagaagatgaccagcaccaccagatacaagaaggccgagcagatgttcggcgagatggaggtgtggaacgccatcagcgagagagacagactggagatctacgaggacgtgctgttcttcctgagcaagaaggagaaggagcaggccaagcagctgagaaagagaaactgggaggccctgaagaacatcctggacaacatggccaacgtgacctacagcaccacctggagcgaggcccagcagtacctgatggacaaccccaccttcgccgaggacgaggagctgcagaacatggacaaggaggacgccctgatctgcttcgaggagcacatcagagccctggagaaggaggaggaggaggagaagcagaagagcctgctgagagagagaagaagacagagaaagaacagagagagcttccagatcttcctggacgagctgcacgagcacggccagctgcacagcatgagcagctggatggagctgtaccccaccatcagcagcgacatcagattcaccaacatgctgggccagcccgtgttcagcctgggcagcaccgccctggacctgttcaagttctacgtggaggacctgaaggccagataccacgacgagaagaagatcatcaaggacatcctgaaggacaagggcttcgtggtggaggtgaacaccaccttcgaggacttcgtggccatcatcagcagcaccaagagaagcaccaccctggacgccggcaacatcaagctggccttcaacagcctgctggagaaggccgaggccagagagagagagagagagaaggaggaggccagaaagatgaagagaaaggagagcgccttcaagagcatgctgaagcaggccgccccccccatcgagctggacgccgtgtgggaggacatcagagagagattcgtgaaggagcccgccttcgaggacatcaccctggagagcgagagaaagagaatcttcaaggacttcatgcacgtgctggagcacgagtgccagcaccaccacagcaagaacaagaagcacagcaagaagagcaagaagcaccacagaaagagaagcagaagcagaagcggcagcgacagcgacgacgacgacagccacagcaagaagaagagacagagaagcgagagcagaagcgccagcgagcacagcagcagcgccgagagcgagagaagctacaagaagagcaagaagcacaagaagaagagcaagaagagaagacacaagagcgacagccccgagagcgacgccgagagatag

SEQ ID NO: 267406 - protein, 448 aa, Artificial Sequence
  derived and/or modified sequence
MRPGTGAERGGLMVSEMESHPPSQGPGDGERRLSGSSLCSGSWVSADGFLRRRPSMGHPGMHYAPMGMHPMGQRANMPPVPHGMMPQMMPPMGGPPMGQMPGMMSSVMPGMMMSHMSQASMQPALPPGVNSMDVAAGTASGAKSMWTEHKSPDGRTYYYNTETKQSTWEKPDDLKTPAEQLLSKCPWKEYKSDSGKPYYYNSQTKESRWAKPKELEDLEGYQNTIVAGSLITKSNLHAMIKAEESSKQEECTTTSTAPVPTTEIPTTMSTMAAAEAAAAVVAAAAAAAAAAAAANANASTSASNTVSGTVPVVPEPEVTSIVATVVDNENTVTISTEEQAQLTSTPAIQDQSVEVSSNTGEETSKQETVADFTPKKEEEESQPAKKTYTWNTKEEAKQAFKELLKEKRVPSNASWEQAMKMIINDPRYSALAKLSEKKQAFNAYKVQT

SEQ ID NO: 267407 - DNA, 1347 bp, Artificial Sequence
  derived and/or modified sequence
atgcgcccaggaacgggcgcagagcggggcggcttaatggtgtccgaaatggagtctcatccaccatcgcaagggccgggggatggggaacgccggttatccggcagctcactctgcagcgggtcatgggttagcgctgatggcttcctgcggagacgtccgagtatgggccatcccggtatgcactatgcacctatggggatgcatcccatggggcaaagggctaatatgcccccagtgccacatgggatgatgccgcagatgatgccccccatgggtggtcccccgatgggacaaatgccagggatgatgtcgtctgtcatgcccggaatgatgatgtcgcatatgagccaagcgtccatgcagcccgctttaccacccggggtaaacagtatggacgtggcagccggaacagcgagtggggcgaagtcaatgtggacagagcataaatcccctgacggtcggacatactactataacaccgagactaagcagtcaacttgggagaagccagacgatctcaaaacgccagcagagcaattgctgagtaaatgtccatggaaagagtataaaagtgattctggcaagccctactactacaattctcagacaaaagagagccgctgggctaaaccaaaagagctcgaagatctggaagggtaccaaaacaccatcgtcgctggatctttgataactaagtcaaaccttcatgccatgatcaaagccgaagagagtagcaagcaggaagagtgtaccacaacctcaacagctccagtacctacgactgagattcccacgacaatgtctacgatggcagctgcagaggcagcggccgccgttgtggccgctgctgccgccgcagccgcggccgctgcagcggctaacgccaatgcctccactagcgcctcgaacacagtgagcgggaccgtaccagtggtaccagaaccagaagtgacatctatagtcgctaccgtggttgacaatgagaacaccgttaccatctccacagaggagcaggcccagttaactagcaccccagcaatacaagatcaatctgttgaagtgtccagcaatacaggtgaagaaacatccaaacaagagaccgttgccgattttacacctaagaaggaagaggaggagtcccagccagccaagaagacatacacgtggaatactaaagaagaggcgaagcaggcttttaaggaactgctgaaagagaagcgcgtaccttcgaacgcctcttgggagcaggcgatgaagatgatcattaatgaccctcggtactctgcgttggccaaattatctgagaaaaagcaggcattcaatgcatacaaagtgcagacgtag

SEQ ID NO: 267408 - DNA, 1347 bp, Artificial Sequence
  derived and/or modified sequence
atgaggcctggcactggagctgagcggggcggcctgatggtgtctgagatggagagccacccccccagccagggccctggagatggagagcggcggctgagcggcagcagcctgtgcagcggctcctgggtgtctgcagatggcttcctgcggcggcggcccagcatgggccaccctggcatgcactacgcccccatgggcatgcaccccatgggccagagggccaacatgcctcctgtgccccacggcatgatgccccagatgatgccacccatgggcggcccccccatgggccagatgcctggcatgatgagctctgtgatgcctggcatgatgatgagccacatgagccaggcctccatgcagcctgccctgcccccaggagtgaacagcatggatgtggccgccggcacagccagcggggccaagtccatgtggacagagcacaagagcccagatggccgcacctactactacaacacagagaccaagcagagcacctgggagaagccagatgacctgaagaccccagctgagcagctgctgagcaagtgcccctggaaggagtacaagagtgacagcggcaagccctactactacaacagccagaccaaggagagccgctgggccaagcccaaggagctggaggacctggagggctaccagaacaccatcgtggccggcagcctcatcaccaagagcaacctgcacgccatgatcaaggccgaggagagcagcaagcaggaggagtgcaccaccaccagcacagcccctgtgcccaccacagagatccccaccaccatgagcaccatggctgctgctgaggccgctgctgctgtggtggccgctgctgctgctgctgctgctgctgctgctgctgccaatgccaatgccagcaccagcgccagcaacacagtgtctggaacagtgcctgtggtgcctgagcctgaggtgaccagcatcgtggccaccgtggtggacaatgaaaatacagtgaccatcagcacagaggagcaggcccagctgaccagcaccccagccatccaggaccagagcgtggaggtgagcagcaacacaggagaggagaccagcaagcaggagaccgtggccgacttcacccccaagaaggaggaggaggagagccagcctgccaagaagacctacacctggaacaccaaggaggaggccaagcaggccttcaaggagctgctgaaggagaagagggtgcccagcaatgcctcctgggagcaggccatgaagatgatcatcaatgacccccgctacagcgccctggccaagctgtctgagaagaagcaggccttcaatgcctacaaggtgcagacctag

SEQ ID NO: 267409 - DNA, 1347 bp, Artificial Sequence
  derived and/or modified sequence
atgcggcccggcaccggcgccgagcggggcggcctgatggtgagcgaaatggagagccacccccccagccagggccccggggacggcgagcgaaggctatctggcagctccctctgtagcggcagttgggtaagcgctgacggctttctaagaaggaggccgagtatgggccatccaggaatgcactacgcccccatggggatgcatcctatgggccagagggcaaacatgcctcccgtaccacacgggatgatgccacagatgatgccaccaatgggcggacccccaatgggtcaaatgcccggcatgatgtccagcgtgatgcctgggatgatgatgtcacacatgtcacaggcgagcatgcaaccagctttacctcctggagtgaattctatggatgtggccgcgggcactgcttctggggccaagagcatgtggacggagcacaaaagtcccgacgggagaacatattactataacaccgagacaaaacagtccacctgggagaaacctgatgatttgaagactccggctgagcagctgttaagcaagtgcccgtggaaggaatataagtctgattctggcaaaccctattattacaatagtcaaaccaaagagtccagatgggccaagcccaaagagctggaggacttagaaggatatcagaatacaatcgttgccggtagcctgatcacaaaaagtaatctccacgctatgatcaaagcagaggagtctagcaaacaagaggagtgtaccaccaccagtactgcccctgtgcccaccacagaaatacctaccaccatgagtaccatggcggctgccgaggcagccgccgctgtggtagctgcagccgcagccgctgccgctgcagccgccgcagctaatgccaatgcaagcactagtgcatccaatacagtgagcggaacggtgccagttgtgcctgaacccgaggttacatcaatagtggctacagttgtcgacaatgaaaacaccgtcaccatttctactgaggagcaagcacagctgacatctactcccgctatccaggaccagtctgtggaggtctcatccaatactggcgaggagacctccaaacaagaaaccgttgcagatttcacccctaaaaaagaggaggaggagtctcagccagcgaaaaagacttatacttggaacactaaggaggaggccaaacaggccttcaaagagctcctgaaggaaaagcgagtccctagtaacgcatcatgggaacaggccatgaaaatgatcatcaatgatccgagatactccgcccttgccaagctcagcgagaagaagcaggcctttaacgcctacaaagttcagacctag

SEQ ID NO: 267410 - DNA, 1347 bp, Artificial Sequence
  derived and/or modified sequence
atgcggccagggactggtgccgagcggggaggccttatggtctcagaaatggaatcccatcccccaagtcagggcccaggcgatggtgaaagacgcctgtccggcagtagtctgtgctctggcagttgggtatctgctgatggatttctacgtaggagacccagcatggggcatcctggtatgcactatgctccaatgggtatgcacccgatgggtcaacgtgcgaatatgcccccagtcccccatggtatgatgccgcagatgatgccccctatgggaggaccccctatgggccagatgcccggaatgatgtcgagcgtgatgcccggtatgatgatgtctcacatgtcacaggcgagtatgcaacctgccctgcctcctggggtcaactctatggatgtggcggctggaaccgcctctggtgcaaagtcaatgtggaccgagcataaatcacccgatggcaggacttactactataacacagaaactaagcagtccacatgggaaaagcccgacgacctcaaaacaccagcagaacagcttctttcaaagtgcccctggaaagaatataagtctgatagtgggaaaccgtactattataattcacaaaccaaagagtcgaggtgggccaaacccaaggagctggaggaccttgaaggctatcagaatacaatcgtggccggatccctgataaccaaatctaacctccacgccatgataaaggcggaggaaagctcaaaacaggaggaatgcacaaccacaagcactgccccagtcccgactacagaaattcccacaacaatgagtaccatggctgcggcagaagcagccgctgcagtcgtggccgctgctgctgccgctgcggcagccgcagcagcagctaacgcgaacgccagcacttcagccagcaatactgtgtccggcacggtcccagtggtgcccgagccagaggtcacaagcatcgtggcaacagttgttgacaacgaaaataccgtaacaataagtacagaagagcaggctcagcttacctcaaccccggctatccaggatcagagtgtcgaggtgtcctctaataccggcgaagaaacgagcaagcaggagacggtcgccgatttcacgcccaagaaagaggaggaagaaagtcagccagccaagaagacatacacttggaatacaaaggaggaagcaaagcaagcctttaaagagctgttaaaggagaagcgtgtgccaagcaacgcttcttgggagcaagccatgaagatgattatcaatgacccacggtactctgccctagccaagctgagcgaaaaaaaacaggcttttaatgcgtacaaggttcagacgtag

SEQ ID NO: 267411 - DNA, 1358 bp, Artificial Sequence
  derived and/or modified sequence
tctgagcccgacgatgaggccggggacgggagctgagcgtggaggcctcatggtgagtgaaatggagagccatcctccctcgcagggtcctggggacggggagcggagattgtccggctcaagcctctgctccggctcttgggtctctgctgacggcttcctgaggagacggccctcgatggggcaccctggcatgcattatgccccaatgggaatgcaccctatgggtcagagagcgaatatgcctcctgtacctcatggaatgatgccgcagatgatgccccctatgggagggccaccaatgggacaaatgcctggaatgatgtcgtcagtaatgcctggaatgatgatgtctcatatgtctcaggcttccatgcagcctgccttaccgccaggagtaaatagtatggatgtagcagcaggtacagcatctggtgcaaaatcaatgtggactgaacataaatcacctgatggaaggacttactactacaacactgaaaccaaacagtctacctgggagaaaccagatgatcttaaaacacctgctgagcaactcttatctaaatgcccctggaaggaatacaaatcagattctggaaagccttactattataattctcaaacaaaagaatctcgctgggccaaacctaaagaacttgaggatcttgaaggataccagaataccattgttgctggaagtcttattacaaaatcaaacctgcatgcaatgatcaaagctgaagaaagcagtaagcaagaagagtgcaccacaacatcaacagccccagtccctacaacagaaattccgaccacaatgagcaccatggctgctgccgaagcagcagctgctgttgttgcagcagcagcagcggcagcagcagcagcagctgcagccaatgctaatgcttccacttctgcttctaatactgtcagtggaactgttccagttgttcctgagcctgaagttacttccattgttgctactgttgtagataatgagaatacagtaactatttcaactgaggaacaagcacaacttactagtacccctgctattcaggatcaaagtgtggaagtatccagtaatactggagaagaaacatctaagcaagaaactgtagctgattttactcccaaaaaagaagaggaggagagccaaccagcaaagaaaacatacacttggaatacaaaggaagaggcaaagcaagcttttaaagaattattgaaagaaaagcgggtaccatcgaatgcttcatgggagcaggctatgaaaatgattattaatgatccacgatacagtgctttggcaaagttaagtgaaaaaaagcaagcctttaatgcctataaagtccagacag

SEQ ID NO: 267412 - DNA, 1347 bp, Artificial Sequence
  derived and/or modified sequence
atgagacccggcaccggcgccgagagaggcggcctgatggtgagcgagatggagagccacccccccagccagggccccggcgacggcgagagaagactgagcggcagcagcctgtgcagcggcagctgggtgagcgccgacggcttcctgagaagaagacccagcatgggccaccccggcatgcactacgcccccatgggcatgcaccccatgggccagagagccaacatgccccccgtgccccacggcatgatgccccagatgatgccccccatgggcggcccccccatgggccagatgcccggcatgatgagcagcgtgatgcccggcatgatgatgagccacatgagccaggccagcatgcagcccgccctgccccccggcgtgaacagcatggacgtggccgccggcaccgccagcggcgccaagagcatgtggaccgagcacaagagccccgacggcagaacctactactacaacaccgagaccaagcagagcacctgggagaagcccgacgacctgaagacccccgccgagcagctgctgagcaagtgcccctggaaggagtacaagagcgacagcggcaagccctactactacaacagccagaccaaggagagcagatgggccaagcccaaggagctggaggacctggagggctaccagaacaccatcgtggccggcagcctgatcaccaagagcaacctgcacgccatgatcaaggccgaggagagcagcaagcaggaggagtgcaccaccaccagcaccgcccccgtgcccaccaccgagatccccaccaccatgagcaccatggccgccgccgaggccgccgccgccgtggtggccgccgccgccgccgccgccgccgccgccgccgccgccaacgccaacgccagcaccagcgccagcaacaccgtgagcggcaccgtgcccgtggtgcccgagcccgaggtgaccagcatcgtggccaccgtggtggacaacgagaacaccgtgaccatcagcaccgaggagcaggcccagctgaccagcacccccgccatccaggaccagagcgtggaggtgagcagcaacaccggcgaggagaccagcaagcaggagaccgtggccgacttcacccccaagaaggaggaggaggagagccagcccgccaagaagacctacacctggaacaccaaggaggaggccaagcaggccttcaaggagctgctgaaggagaagagagtgcccagcaacgccagctgggagcaggccatgaagatgatcatcaacgaccccagatacagcgccctggccaagctgagcgagaagaagcaggccttcaacgcctacaaggtgcagacctag

SEQ ID NO: 267413 - DNA, 5710 bp, Artificial Sequence
  derived and/or modified sequence
gtgcaaaacctggccagcagcccgagtgagtaggagccatgtgactctggtgagttggagtgtgcaattgcctcctgcttcagagctacctgatccgaatactaagcagagcgagtgccgggctgagtgtaagacactgaagacactgcagagcaaggtgcttattccagaggcgttacaaaacatggagattaaagaccagggagcccaaatggagccgctgctgcctacgccctgaagatgctgagacatagagatggctgtgattatcttttgtaagacaggaaatgcagtctttaggggtttctggaaatagaaaggtcatgcagtctggaacctgtgagccttttcaatctctaagtcatcagagaaatgatgaagaagcagttgtggatagaggtggaactcgttctattctcaaaacacactttgagaaagaagatttagaaggtcatcgaacactatttattggagtacatgtgcccttgggaggaagaaaaagccatcgacgtcacaggcatcgtggtcataaacacagaaagagagacagagaaagagattcaggattagaggatggaagggagtcaccttcttttgacaccccatcacagagggtacagtttattcttggaaccgaggatgatgacgaggaacacattcctcatgaccttttcacagaactggatgagatttgttggcgtgaaggtgaggacgctgagtggcgagaaacagccaggtggttgaagtttgaagaagatgtggaagatggaggagaaaggtggagcaagccttatgtggctactctttcattgcacagcttgtttgaattgagaagttgtattctgaatggaactgtgttgctggacatgcatgccaacactttagaagaaattgcagatatggttcttgaccaacaagtgagctcaggtcagctgaatgaagatgtacgccatagggtccatgaggcattgatgaaacagcatcatcatcagaatcagaaaaaactcaccaacaggattcccattgttcgttcctttgctgatattggcaagaaacagtcagaaccaaattccatggacaaaaatgcaggtcaggttgtttctcctcagtctgctccagcctgtgttgaaaataaaaatgatgttagcagagaaaacagcactgttgactttagcaaggttgatctgcattttatgaaaaagattcctccaggtgctgaagcatcgaacatcttagtgggagaactggagttcttggatcgaacagtagttgcgtttgtcaggttgtctccagctgtattgcttcaaggactggctgaagtcccaatcccaaccagatttttgttcattcttctgggacccctgggaaagggtcaacagtaccatgagattggcagatcaattgcaaccctaatgacagatgaggtatttcatgatgttgcctataaagctaaagatcgtaatgacttggtatcaggaattgatgagtttctggatcaggttactgttctccctcctggagaatgggatccaagcattcgaatagagcctcccaaaaatgttccttcccaggagaagaggaagattcctgctgtaccaaatggaacagcagctcatggggaagcagagccccacggaggacatagtggacctgaactccagcgaactggaaggatttttgggggacttattttagatatcaaaagaaaagctccatacttctggagtgacttcagagatgctttcagcctgcagtgcttagcatcttttctatttctctactgcgcgtgtatgtctcctgtcatcacgtttggaggactgctgggagaagcaactgaagggcgtataagtgcaattgaatctctctttggagcatccatgaccgggatagcctattctctctttggtggacagcctcttaccatattaggcagtacaggaccagttttggtgtttgaaaagattttgtttaaattttgcaaagaatatgggctgtcatacctatctttaagagctagcattggactttggactgcaactctatgtatcatacttgtggccacagatgctagttcccttgtctgctacatcactcggtttactgaagaagcttttgcttccctgatttgcatcattttcatttatgaggccctggagaagttgtttgaactcagtgaagcatatccaatcaacatgcataatgatctggaactgctgacacaatactcgtgtaactgtgtggaaccgcataatcccagcaatggcacattgaaggaatggagggaatccaatatttctgcctctgacataatttgggagaacctaactgtgtcagaatgcaaatcattgcatggagagtatgttggacgggcctgtggccatgatcacccatatgttccagatgttctattttggtctgtgatcctgttcttttccacagttactctgtcagccaccctgaagcagttcaagactagcagatattttccaaccaaggttcgatccatagtgagtgactttgctgtctttcttacaattctgtgtatggttttaattgactatgccattgggatcccatctccaaaactacaagtaccaagtgttttcaagcccactagagatgatcgtggctggtttgttacgcctttaggtccaaacccatggtggacagtaatagctgctataattccagctctgctttgtactattctaatttttatggaccaacagattacagctgtcatcatcaacaggaaagagcataagctaaagaaaggttgtgggtaccatctggacctattaatggtggctgtcatgctcggtgtatgctccatcatgggcctgccatggtttgtggctgccacagtcctctccatcactcatgtcaatagcctaaaactggaatcagaatgctcagctccaggagaacaacccaaatttctcggcattcgggagcaaagggttactgggcttatgatttttattcttatgggttcatcagtctttatgaccagtattctgaagtttattcccatgccagtgctatatggagtgtttctttatatgggtgcttcatctctaaagggaattcagttctttgataggataaagctcttctggatgccggcaaaacatcaaccagattttatatacctaaggcacgtaccgcttcgaaaagtgcatctcttcacaattattcagatgagttgccttggccttttgtggataataaaagtttcaagagctgctattgtctttcccatgatggtgttagccctggtatttgtaagaaagttgatggacttgttgttcacgaagcgggaactcagctggttggatgatttgatgcccgagagtaagaaaaagaaactggaagatgctgaaaaagaagaagaacaaagtatgctagctatggaagatgagggcacagtacaactcccattggaagggcactatagagatgatccatctgtgatcaatatatctgatgaaatgtcaaagactgccttgtggaggaaccttctgattactgccgataactcaaaagataaggagtcaagctttccttccaaaagctccccttcctaatcactctagaagctgattccccaaagcattgaaagccgaaaagagaagaaagctgactcagggaaaggtgttgacagggagacttgtctatgactcgatcttcaatttattttttacatatatatgagaagagtgtcacaattattaataaaactgctttgatcatgtattgtaaattctgtccctcaacccaaatccaccttcatactgtaagtagtgcaatacttgtttcatttctgtgtttaaacttctgagcagtgagacatccctgtgagcagatacaatagccaatgcaagaatctgtgtgttccttgctgtacgttagacatttgtaaactggattctgattgtcagttttatgagagcaatagcttccttaaagagataagtcatatttacctagtttgtattttcctactttagtgacctgaagatgcctgataatttcattcagaagaatttttgaaaggtagtcttacttctttttagtttttatagcttagcattagtgacttatttcaaaagacccaaatcaaaaagttagtttgaaagcattttttaataattgtatttatgcatttccttgatttaatatgataaatttaatacttaacaatttatatgtaactaaaacttaaagtcatttgaaaaatatatagaaacctatttacaacttgttaaggacaatcagacataatgcagagttaagtagtatttgcttaaaattcaagttgtgactaatgatcaaatactaggcttgtacgaaatgctttagaaaaactttgtaacagttttgtgggatttttcaatataaacctttatcagaaatatactaagtttgtctcccactgacaacagatgttttccaaataaacatattctatacatacttgtggaatgccacatggtgaatcattgtatatgaaattccactcctgtacagttactctgcagctaatggtcatgcactgcttaatgctggtcctgaatcatgttctcatgttagaccaacagctctccaattgtcattttttttctgcagagttttttttttccacttttaaattaaatgcatgttgtggaaaaacagtcttttaaaatgaaatttcagattccatttgagaaggttctgtagatatttcagtccatataaaataatacatctttactaaacttatataaggggagagaaagttatgaagttttggacattactaaaagtacagtatttgatttcactttcaatgaatgtgaagttaataaaactaaatctcataatgctcttggttcctaagaatgagtagtaatcatcaactttataatactccaatattccgttttataataattcagagccctgtggcttttacacaccgttaattatgtactctgttggaagtgcacatgaaaagtgaagaaaagttcctcttgtgattaaactaatgggaggaaataaatcaacaaagtctccattaagttctacattttgagaccttttaaaaattcccctcacaattctttaaggagcccccctttttatggaacatgagcctaaaaattatagaaagaagaattttaagttaataaagtttgtatttataaatgctgaaaaaatacagaaactttctgttccaaatgtgttgcctttgtgtattttataatacagatactacattgtaaacatttccattgttttatgatttagccagtgattccccaaagcagcctcttagtgttttaatatattaataactgttttgttaaaaatgatcatagtgaatttaaatcttcacatgatcacctatttgaataagcaatcatatccaatgaaattctgtatttctgagtatttttatagtcattttgttcttgtgtgaattttaaagctatccctatgttaatcctaatattttgaaatcatataaaatataataaaaatgtagtattatatatttacttctaatttcagattcctggtcaaaattactaaatatcttgaatgtaatttagtgccaagtttaaataatgtgtaaatgtgactaggatattgtgtttttcacaattaagaaatgttatgtggaaataaatatttatcctaacttccttgcacattttaaattgtg

SEQ ID NO: 267414 - protein, 979 aa, Artificial Sequence
  derived and/or modified sequence
MSPLKIHGPIRIRSMQTGITKWKEGSFEIVEKENKVSLVVHYNTGGIPRIFQLSHNIKNVVLRPSGAKQSRLMLTLQDNSFLSIDKVPSKDAEEMRLFLDAVHQNRLPAAMKPSQGSGSFGAILGSRTSQKETSRQLSYSDNQASAKRGSLETKDDIPFRKVLGNPGRGSIKTVAGSGIARTIPSLTSTSTPLRSGLLENRTEKRKRMISTGSELNEDYPKENDSSSNNKAMTDPSRKYLTSSREKQLSLKQSEENRTSGLLPLQSSSFYGSRAGSKEHSSGGTNLDRTNVSSQTPSAKRSLGFLPQPVPLSVKKLRCNQDYTGWNKPRVPLSSHQQQQLQGFSNLGNTCYMNAILQSLFSLQSFANDLLKQGIPWKKIPLNALIRRFAHLLVKKDICNSETKKDLLKKVKNAISATAERFSGYMQNDAHEFLSQCLDQLKEDMEKLNKTWKTEPVSGEENSPDISATRAYTCPVITNLEFEVQHSIICKACGEIIPKREQFNDLSIDLPRRKKPLPPRSIQDSLDLFFRAEELEYSCEKCGGKCALVRHKFNRLPRVLILHLKRYSFNVALSLNNKIGQQVIIPRYLTLSSHCTENTKPPFTLGWSAHMAISRPLKASQMVNSCITSPSTPSKKFTFKSKSSLALCLDSDSEDELKRSVALSQRLCEMLGNEQQQEDLEKDSKLCPIEPDKSELENSGFDRMSEEELLAAVLEISKRDASPSLSHEDDDKPTSSPDTGFAEDDIQEMPENPDTMETEKPKTITELDPASFTEITKDCDENKENKTPEGSQGEVDWLQQYDMEREREEQELQQALAQSLQEQEAWEQKEDDDLKRATELSLQEFNNSFVDALGSDEDSGNEDVFDMEYTEAEAEELKRNAETGNLPHSYRLISVVSHIGSTSSSGHYISDVYDIKKQAWFTYNDLEVSKIQEAAVQSDRDRSGYIFFYMHKEIFDELLETEKNSQSLSTEVGKTTRQAL

SEQ ID NO: 267415 - DNA, 2940 bp, Artificial Sequence
  derived and/or modified sequence
atgagcccattgaaaatccacgggcccatccgcatccgtagcatgcagaccggtattacaaaatggaaggaggggtctttcgagattgtagaaaaagagaacaaggtgagcctcgttgtccactacaacaccggcgggattcctaggattttccaactgagccataatatcaaaaacgttgtgctaaggccatccggggccaagcagagtaggctcatgctcacactgcaagataattcttttctcagcatcgataaggtgccaagcaaagacgccgaagagatgcgactattcctggatgcagtacaccagaatagactgccagctgccatgaagccctcccaaggatctgggagtttcggggccatcttaggatctcgcacaagccagaaagaaacttcccgccagctttcctactcagacaatcaggcttctgcaaagagaggttcacttgagaccaaagacgatattccttttaggaaggtgctgggtaatcccgggcgcgggagtatcaagaccgtggccggcagcggaatcgcccgcacaattccaagtctgacgagcactagcacaccgcttcgtagtggcttgcttgagaacagaaccgagaagcgaaagaggatgatttctactgggagtgagttgaacgaagactacccaaaagagaatgattcatcatctaataacaaggcaatgacagatccttccaggaagtatctgacaagctcccgggagaagcagctctccctgaagcagagcgaagagaatagaacaagcggactgctgccattacaatcgtcatccttttatggctctcgtgctggatctaaagaacactcatctggtggtacaaatctcgacagaacaaatgtcagcagtcagaccccatccgctaagaggagtctcgggttcctgcctcagccagtacccttgagtgtcaagaagctgcggtgcaaccaggattacacaggctggaataagcccagagtcccactctcatcacatcagcaacaacagttacaggggttttccaacctgggtaacacatgctacatgaacgcaattctgcaaagcctgttctccctccagtccttcgccaatgacctgctcaaacaaggtatcccttggaaaaagatacctctcaacgccctcatccggcggtttgctcatctgttagttaagaaagacatatgtaattcagagaccaaaaaagatcttttgaagaaggtcaagaatgccatctctgccaccgcggagagatttagcggctacatgcagaacgatgcccatgagttcctctcccaatgtcttgaccagctgaaagaagatatggagaagttaaacaagacttggaaaacagaacccgtatctggcgaagaaaactctcccgacatcagtgccacccgtgcgtacacttgtccagtaatcaccaatttagaattcgaagttcagcactcaattatatgcaaagcctgtggcgagatcatcccaaagcgggagcagtttaatgacctcagcatcgatctccctcgaagaaaaaagcctctgcctcctcgatctattcaggactccctggatcttttttttagagctgaggaactcgaatactcctgcgaaaaatgcggagggaaatgcgcactggtgcgtcacaaattcaatcgactgcccagagtgctgatactgcacttgaaaaggtattcttttaatgtcgcactctctctcaataacaagattggacagcaggtcatcataccccgatacctcaccctctcctcccattgcacagaaaacacaaagcccccatttaccctgggatggtctgctcacatggccatctctcgccctctgaaggccagccaaatggtcaatagttgtatcacctcccctagcacaccatctaaaaagtttacgttcaagagcaaaagctcgctggccctatgcttagatagcgactcagaggatgagctgaaaaggtcagtggctctatcccagagactttgtgaaatgctgggaaatgaacagcagcaggaggatctggagaaggattccaaactgtgtcccatagaacctgacaagagcgagttagagaactcaggcttcgaccgcatgtccgaggaagagctgctcgctgctgtactggagatcagcaaacgagacgcatctccaagcttgagtcacgaggacgatgacaaacctacttccagcccagacacaggtttcgcagaggacgacatccaggagatgcctgaaaatccagatacaatggaaacggaaaaaccaaaaaccattactgagttggaccccgcaagtttcaccgaaatcaccaaagattgtgatgaaaataaagagaacaaaacaccagagggttctcaaggggaggtagattggctccagcagtatgacatggaacgtgagcgggaagaacaggaactgcagcaggccctggcacagagtttgcaagagcaagaagcctgggagcagaaagaggatgacgacttaaaacgcgcaacagagctgagcttgcaggagtttaataattcctttgtcgacgctctgggatccgatgaagacagcggaaatgaggatgtgttcgatatggaatacactgaggctgaggccgaggaactcaagcggaatgccgagaccggaaatctaccacattcataccgtctgatcagtgtcgtctcacacatagggtccacctcttccagcggtcattacattagcgatgtttacgacataaagaaacaggcctggttcacatataacgacctcgaagtttcaaaaattcaggaagcggccgtccagagcgatcgcgatagatcaggttacatctttttttatatgcacaaagagatttttgatgaattattagaaaccgagaagaattctcagtccctgagcactgaagttgggaagactaccaggcaggccctctag

SEQ ID NO: 267416 - DNA, 2940 bp, Artificial Sequence
  derived and/or modified sequence
atgagtcctctgaagatccatggcccgatacgaattcggtcaatgcagactggtattaccaagtggaaggaagggagtttcgaaattgtcgaaaaagagaacaaagttagtctggtcgttcactataacactggaggaattccgaggattttccaactcagccacaacattaagaacgtagtgctccggccctcaggagccaaacagagcagacttatgctgactctgcaggacaattcatttctttccattgacaaggtccccagcaaagatgccgaggaaatgcgcctgtttctagacgcagtccaccagaaccggctcccagctgcgatgaagccctctcagggctctgggtcgtttggcgcgatccttggctcgcgcacttcacagaaagagacgtctagacagttgagttatagcgacaatcaggcatctgctaagcggggttccctggagaccaaggatgatatccctttcagaaaggtcttaggaaatccaggaaggggcagcattaagacagtcgccgggtcaggcatcgcgaggactattccttccctaacttccacatccacccctctgcgttctggccttcttgaaaatagaacagagaagaggaagaggatgatttccactggatctgagcttaatgaggattatcccaaggagaacgacagttcaagcaacaacaaagccatgacggatccgtctcggaagtaccttacaagctctcgggagaagcagttgagtctaaaacagagtgaggaaaaccgcacatcggggctcctgcctctgcaaagctcttccttctatggcagtagagcaggttccaaggagcattccagcggtggtacaaatctggacagaactaatgtatcgtcccagacaccatccgccaagcgtagcttgggtttcctgcctcagccggtccccctgtccgtgaagaagcttcgctgtaaccaggactataccggttggaacaaacctagggtcccgctgtccagccaccaacagcagcagctgcagggattctcgaacttgggcaatacttgctacatgaacgctatcctgcagtccttgttctctctgcagtcttttgcgaacgatctgctgaagcagggcattccctggaaaaaaatcccactcaacgctctaatccggcggttcgcgcacttgctggtgaagaaggacatttgcaatagtgaaaccaagaaggatctgctgaaaaaagttaaaaatgcgattagtgcaaccgcagagcgattcagtggatacatgcagaatgacgcacatgaattcctaagccaatgtctcgatcagttgaaggaggacatggaaaagctgaataaaacgtggaagaccgagcccgtctccggggaggaaaatagcccggatattagcgccacgcgtgcatatacttgtcccgttatcactaacttagagttcgaagtacaacacagcattatctgcaaggcatgcggggagatcatccctaaaagggaacagttcaacgatctgtctattgacttaccgcggcgaaagaaacccttaccccctcgaagcatccaggatagccttgatctctttttcagagctgaggagctggaatactcttgtgaaaaatgtggggggaaatgcgcactagtccggcacaagttcaaccgcctgccgagggtgttgatactccatcttaagaggtattcttttaacgttgctctgtcactgaacaacaaaatcggtcaacaggtcatcatccctcgctaccttactcttagctctcactgcaccgagaacacaaaacctccgtttactctagggtggagcgcccatatggcaatttcccgccctttgaaggcatcgcagatggttaacagctgtattacctcgccctctaccccttcaaagaaatttacctttaagagcaaatcctccctagctctgtgtttagactccgattccgaggatgaactaaaacgctctgtcgctctgtcacagcgcctctgtgaaatgctgggaaatgagcagcagcaggaggacctggaaaaggattctaaactatgcccgattgaaccggataagagtgaactggagaacagcggatttgaccgcatgagcgaagaagaactgttggcagccgtgctggagatatccaagagagacgcctcaccctccttaagccatgaagacgacgacaagcctacctccagtcctgatacaggctttgccgaagacgacatccaggagatgcccgagaatccagatacaatggaaacagaaaagcctaaaactatcacagagctggatccagcctccttcaccgaaataaccaaagactgcgacgaaaataaggagaataaaacccccgaagggtcacagggggaagttgactggctacagcagtacgacatggaaagagaaagagaagaacaggaactgcagcaagcactcgctcagtcgcttcaggaacaggaggcctgggaacagaaagaggacgacgacctgaaacgcgccaccgagctgagcctccaggagtttaataattccttcgtggatgcccttgggagcgacgaggactcaggaaatgaggatgtatttgacatggagtacacggaggctgaagccgaagagctgaagcggaacgctgagaccggaaatcttcctcatagttacaggttgatcagtgttgtgtcacatatcggctccacttcctcttctggtcattacatctctgacgtgtacgacattaagaaacaggcatggtttacctataatgacttggaagtgtccaagatacaggaggcagccgtgcaatctgacagggatagatctgggtacattttcttctatatgcataaggagatctttgatgagctgcttgagacagagaagaatagccaaagcttgtccaccgaagtgggtaaaacaacccgacaggccttgtag

SEQ ID NO: 267417 - DNA, 2940 bp, Artificial Sequence
  derived and/or modified sequence
atgagccctctgaagattcacggccccattcgaattcgatctatgcagacaggaataactaagtggaaggagggaagcttcgagattgttgagaaggagaacaaagtgagcctcgtggtgcactacaatacaggaggtatccccagaatcttccagctgtcccataatatcaaaaacgtggtgctgcgcccgtccggagctaaacagagccgccttatgcttactttgcaagacaatagctttctatcgatcgataaggtacccagcaaggatgctgaagaaatgagattgttccttgatgctgttcatcaaaaccggcttccggccgcaatgaagccgtcacagggatctggctcctttggggcaatcttggggtcccgtacgagccagaaagagacctcacgccagctgagctacagtgataaccaagccagtgcgaaaagaggatcattagagaccaaggacgatatcccattcaggaaggtgctgggtaacccggggcgtggatctatcaagactgtcgcaggctctggtattgcgagaaccataccaagtctgacatctacaagcacaccattgagatcaggtcttttggagaacagaaccgagaagcgcaaaagaatgattagcaccgggtcagagctaaacgaagattaccccaaggaaaacgactctagctccaacaacaaggccatgacagacccctccagaaagtatttaacaagttcaagggaaaagcagctgtccctcaaacaaagtgaggagaacagaaccagcggcctcctgccacttcagtcgtccagcttctacgggagccgggcaggcagcaaggaacattcatccgggggtaccaatcttgatcggacaaatgtatcatctcagacacccagtgctaaacgctcgttgggatttctcccgcagcccgtgcctttgagcgtgaaaaagctgcgctgcaaccaggattataccgggtggaataaaccacgcgtcccattgtcttcacatcaacagcaacaacttcagggctttagcaacctaggcaatacctgttatatgaacgccattttgcaaagcctgttttctctgcaatcctttgcgaacgatctgctcaagcagggcattccttggaaaaagatccccctgaatgccctgattaggcgatttgcccacctgctcgttaagaaggatatttgcaattctgaaaccaaaaaagacctgctaaaaaaggtcaagaacgccatctctgccacagcagagagattctcaggctacatgcaaaacgacgctcacgagtttttatcacagtgtctggatcagcttaaggaagatatggaaaagttgaacaagacatggaagacagagccagtgtctggcgaggagaattcacccgatatttctgccaccagagcctatacgtgcccggtgataactaacctggagttcgaggtgcagcacagcatcatatgcaaggcctgtggggagattatcccaaaaagggagcaattcaatgatctgtccattgacctgccacgaaggaaaaaacccctccccccccgaagtatacaggatagcctcgatctttttttccgggctgaagagctggagtactcctgtgagaagtgcggcggcaagtgcgcactcgtgagacacaaatttaatagacttcccagggtgctcattctgcatctcaaaagatatagctttaatgttgccctgagccttaacaacaagattggccagcaagtgatcattcctagatatctaacactgagttcccattgcacagaaaacacaaaaccgccgttcactctgggatggtccgctcacatggctattagtagacccctgaaggccagccagatggtgaattcctgtattacctcacccagcacacctagtaagaaattcacgtttaagtccaaatcatcactggcactttgcctggactctgattcggaagatgagctgaagaggtctgtcgccctgtctcagaggttatgcgagatgctgggaaatgaacaacaacaggaggacctcgaaaaagactcgaagctgtgtcccatagaaccagacaagagtgagctcgagaattcaggattcgaccgcatgtcagaagaagagctgttggctgcagtccttgagattagtaaaagagatgcgagtccaagcttgagccacgaggatgacgacaaacccacatccagcccggacactggctttgctgaggatgatattcaggagatgccggagaaccccgacaccatggaaacggagaagcccaaaactattaccgagttagatccagcctccttcactgaaatcacgaaagattgtgacgaaaataaggaaaacaaaacacccgaaggaagccagggagaagtggactggctgcagcagtatgatatggagagagagcgcgaagagcaagaactgcagcaggcgctggcacagtcgctgcaggaacaagaggcatgggaacaaaaggaggacgacgatttaaagcgcgcgaccgaattgagcttgcaggaattcaataactcatttgtggacgccctgggaagcgacgaggatagcggcaatgaggacgttttcgatatggagtacacggaagctgaagcggaagagctgaaacgcaatgcagaaacgggaaatctgccccacagttatagactgatttccgtggtgtcccatataggcagcacttcaagttccgggcactacatttcggatgtatacgacatcaaaaagcaagcctggtttacgtataatgacctagaggtatcaaaaatacaagaggcggccgtgcagtcagatcgggatcgtagcggatacatctttttctacatgcacaaggaaatattcgacgagctactcgagaccgaaaagaattcacagtctctctccacagaggtggggaagacaactagacaggctctctag

SEQ ID NO: 267418 - DNA, 2940 bp, Artificial Sequence
  derived and/or modified sequence
atgagccccctgaagatccacggccccatccgcatccgctccatgcagacaggcatcaccaagtggaaggagggcagctttgaaattgtggagaaggagaacaaggtgtccctggtggtgcactacaacacaggaggcatcccccgcatcttccagctgagccacaacatcaagaatgtggtgctgcggcccagcggggccaagcagagccggctgatgctgaccctgcaggacaacagcttcctgagcattgacaaggtgcccagcaaggatgctgaggagatgaggctcttcctggatgctgtgcaccagaaccggctgcctgctgccatgaagcccagccagggcagcggcagctttggagccatcctgggcagcaggaccagccagaaggagaccagccggcagctgagctacagcgacaaccaggccagcgccaagaggggcagcctggagaccaaggatgacatccccttcaggaaggtgctgggcaaccctggccggggcagcatcaagacagtggccggcagcggcatcgcccggaccatccccagcctgaccagcaccagcacccccctgcggagcggcctgctggagaacagaacagagaagaggaagaggatgatcagcactggaagtgagctgaatgaagactaccccaaggaaaatgacagcagcagcaacaacaaggccatgacagaccccagcaggaagtacctgaccagcagccgggagaagcagctgagcctgaagcagagtgaagaaaatagaacatctggcctgctgcccctgcagagcagcagcttctacggcagccgggccggcagcaaggagcacagcagcggcggcaccaacctggacaggaccaacgtgagcagccagaccccatctgccaagaggagcctgggcttcctgccccagcctgtgcccctgtctgtgaagaagctgcgctgcaaccaggactacacaggctggaacaagccccgggtgcccctgagcagccaccagcagcagcagctgcagggcttcagcaacctgggcaacacctgctacatgaatgccatcctgcagagcctcttcagcctgcagagctttgccaatgacctgctgaagcagggcatcccctggaagaagatccccctgaatgccctgatccgccgctttgcccacctgctggtgaagaaggacatctgcaacagcgagaccaagaaggacctgctgaagaaggtgaagaatgccatcagcgccacagctgagcgcttcagcggctacatgcagaatgatgcccacgagttcctgagccagtgcctggaccagctgaaggaggacatggagaagctgaacaagacctggaagacagagcctgtgtctggagaggagaacagcccagacatcagcgccacccgggcctacacctgccctgtgatcaccaacctggagtttgaggtgcagcacagcatcatctgcaaggcctgtggggagatcatccccaagcgggagcagttcaatgacctgagcattgacctgcccaggaggaagaagcccctgcccccaagaagcatccaggacagcctggacctcttcttccgggcagaggagctggagtacagctgtgagaagtgtggcggcaaatgtgccctggtgcgccacaagttcaaccggctgccccgggtgctgatcctgcacctgaagcgctacagcttcaacgtggccctgagcctgaacaacaagattggccagcaggtgatcatcccccgctacctgaccctgagcagccactgcacagagaacaccaagccacccttcaccctgggctggagcgcccacatggccatcagccggcccctgaaggccagccagatggtgaacagctgcatcaccagccccagcacccccagcaagaagttcaccttcaagagcaagagcagcctggccctgtgcctggacagcgacagtgaagatgagctgaagaggtctgtggccctgagccagaggctgtgtgagatgctgggcaatgagcagcagcaggaggacctggagaaggacagcaagctgtgccccatcgagccagacaagtctgagctggagaacagcggctttgacaggatgtctgaggaggagctgctggccgctgtgctggagatcagcaagagagatgccagccccagcctgagccatgaagatgatgacaagcccaccagcagcccagacaccggctttgctgaagatgacatccaggagatgcctgagaacccagacaccatggagacagagaagcccaagaccatcacagagctggaccctgccagcttcacagagatcaccaaggactgtgatgagaacaaggagaacaagaccccagagggcagccagggcgaggtggactggctgcagcagtatgacatggagcgggagcgggaggagcaggagctgcagcaggccctggcccagagcctgcaggagcaggaggcctgggagcagaaggaggatgatgacctgaagagggccacagagctgagcctgcaggagttcaacaacagctttgtggatgccctgggcagtgatgaggacagcggaaatgaagatgtgtttgacatggagtacacagaagctgaggccgaggagctgaagagaaatgctgagaccggcaacctgccccacagctaccgcctcatctctgtggtgagccacatcggcagcaccagcagcagcggccactacatcagtgatgtgtatgacatcaagaagcaggcctggttcacctacaatgacctggaggtgtccaagatccaggaggccgctgtgcagagcgaccgggacaggagcggctacatcttcttctacatgcacaaggagatctttgatgagctgctggagacagagaagaacagccagagcctgagcacagaggtgggcaagaccacccggcaggccctgtag

SEQ ID NO: 267419 - DNA, 2940 bp, Artificial Sequence
  derived and/or modified sequence
atgagccccctgaagatccacggccccatccggatccggagcatgcaaaccggcattactaagtggaaggagggctccttcgaaatcgtggaaaaggagaacaaagtgtccctggtcgttcattataatactggcggaataccacgcatttttcaactgagtcacaatatcaagaatgtggtcctaaggccctcaggggcgaagcagtcaaggctgatgctgacacttcaagacaacagcttcctctccattgataaggttcctagtaaggacgccgaggagatgcggctgtttctcgacgctgtacaccagaaccgacttcctgccgcaatgaagccttcccaaggttcagggtcctttggagcaatcttaggaagcagaacttctcaaaaggagacctctagacaacttagttactccgataaccaggcctccgccaaaaggggaagcctggaaacaaaggacgatataccatttagaaaagtgctgggcaacccgggacgaggaagcattaagaccgtagcaggctcagggatcgcgcgaactattcctagtcttacatccacctccacccctctgcgatctggcttgctggagaaccggaccgagaaaagaaagaggatgatcagtaccgggagcgaactaaatgaagattaccccaaggagaacgatagctcgtccaacaacaaggctatgacggatcccagcagaaagtatctcaccagtagcagagagaaacagctcagcctcaagcagagcgaagagaacagaacaagcgggctcctccctttgcagagttcttcattctatggttctagagccggctcgaaagagcacagctcgggcggcacaaacctagaccgcaccaatgtgagcagccagacacccagcgccaagaggagcctggggtttctgccgcagcccgtcccgctttcggttaagaaactccggtgtaaccaggactacactggttggaacaaaccacgggtgcccctatcctcccatcaacaacaacagcttcagggctttagcaacctaggcaacacgtgttacatgaacgccatattacagtcccttttcagcttacaatcctttgccaacgacttgctgaagcaggggattccttggaagaaaattcctttgaatgccctgatccggcgatttgctcatctgctggtgaaaaaggacatttgtaactccgagactaagaaggacctactcaaaaaagtaaaaaacgcaatcagtgcaacagcagagcgcttttccgggtatatgcagaacgatgcgcacgagtttctgtcccaatgtctggaccagctgaaggaagacatggagaagttgaacaagacttggaagaccgagccagtgtctggggaggagaatagcccagacatttcagctacacgggcatatacatgccccgtgataacaaatctagagttcgaagtacaacactctattatctgtaaagcatgtggagaaattatcccgaagagggagcaatttaatgatctttcgatcgatctgcccaggcggaagaaacctctgcctcctaggtccatccaagacagcctggatctgttcttccgggcagaggagctagagtattcatgtgagaagtgtggcggtaaatgcgctctggtgagacacaagtttaaccggctgccacgggtgttgatcctgcatctgaaaaggtactcctttaatgtcgccctgtccctgaataacaagatcggccagcaggtcattataccccggtacttgacactgtcctcacattgtacagagaatacaaaaccgccattcactttgggctggtctgcacacatggctatctcccgaccccttaaggcttcacagatggtgaactcttgcatcaccagccctagtacgccctcaaagaaatttacttttaaatctaagagttcacttgccctatgcttggatagcgactccgaggatgagttaaagcgatctgtggcgctcagccaacgtctgtgcgaaatgttaggaaacgagcagcagcaagaagacctcgaaaaagacagcaaactgtgtcccatcgagcccgataaaagcgagctcgagaattccggatttgatcgaatgagtgaggaagagctactcgcagcggtcctggagattagtaagcgggatgcaagccctagcctctctcacgaagatgatgacaaacccacttcctctccggatacaggcttcgccgaagacgacattcaggagatgccagagaatcccgataccatggaaaccgagaaacctaagacaatcaccgagttagatcctgctagcttcacggagatcacaaaagactgtgacgaaaacaaggagaacaaaactcccgagggatcgcagggcgaggtggactggctccagcagtatgatatggagagggagcgtgaggaacaggagctacagcaggccttggcacagtcactccaagagcaggaggcttgggaacagaaagaagacgacgatctgaaacgcgcaacagaactgtcgttgcaagagttcaacaattctttcgttgacgcccttggaagtgacgaggacagtggcaacgaagacgtgttcgacatggagtacacagaggcagaggctgaagagctcaagcgtaatgccgagactggcaacttaccccactcttaccggcttatatctgtggtgtcccacattggctctacgtcgtcgtctgggcactacataagtgatgtctacgatataaagaaacaggcgtggtttacttataacgatctcgaagtctctaagatacaggaggcagccgttcaaagtgaccgggatagaagtgggtacatttttttctatatgcataaggaaatttttgacgaactgttagagacagaaaagaactctcagtccttaagcactgaggtcggaaagacgacccggcaagcactgtag

SEQ ID NO: 267420 - DNA, 2940 bp, Artificial Sequence
  derived and/or modified sequence
atgagccccctgaagatccacggccccatccggatccggagcatgcagaccgggataaccaagtggaaggagggaagtttcgagatagttgagaaggaaaataaggtctccttagttgttcattataacaccgggggcatacctcgcattttccagctgtctcataatatcaaaaacgtggtcctgcggccgtccggtgcaaagcagagtcgactcatgttgaccctgcaggataactctttcctgtcaattgataaggtgccctccaaagatgctgaagaaatgcggctattccttgatgccgtgcaccagaatagactccctgccgccatgaaaccaagccagggatccggctcctttggcgctatccttggcagcagaacctcccagaaagaaacaagcagacagctatcgtattctgacaatcaggcgagcgctaagcgcggctccttagaaacaaaggacgatataccgttccgaaaagtgttgggtaatccagggcgaggttctataaagacggttgccgggagcggcatcgctaggactatccccagtctcactagtacttcaaccccactaaggagtggactattagagaatcggacagaaaagaggaagcgcatgatttccactggatccgagctaaatgaagattaccccaaggaaaacgactcctcctctaacaacaaggctatgacggaccccagccggaagtatttaacttcatcacgggaaaagcagctgtcacttaagcaaagtgaggaaaaccggacttcaggactgctccctctgcaatcctcgtccttttatgggagcagggccgggtctaaggaacactctagcggtggcactaaccttgatagaacaaatgtcagtagccaaacacccagtgccaagaggtctctggggttcttgccacaacctgtgccactgtcagtcaaaaagctgcgatgcaaccaagattacaccggctggaataagcccagagttccactcagcagtcaccaacagcagcagctccaaggtttcagtaatttagggaatacatgttacatgaatgcaatcctccagagccttttttcactgcagtcctttgcaaatgaccttctaaagcaaggcataccttggaaaaaaattcctctgaacgccttaattagaagatttgcccacctgttggtgaaaaaggatatttgtaactcggaaaccaagaaggaccttctgaaaaaagtcaaaaatgctatcagcgcgactgcggaacggttctcgggttatatgcaaaacgatgctcacgaattcctctcccagtgcctggaccagctcaaggaggacatggagaagttgaataaaacttggaagacagaaccagtgtcaggtgaagaaaatagcccggacatttccgcgacgcgggcctacacatgtccggtcataacaaacctggagtttgaggtgcagcacagtatcatatgcaaagcatgtggcgaaattatcccaaagcgggaacagttcaacgacttgagcatagatcttccccggaggaaaaagccactccccccccgaagtattcaggatagccttgacctatttttcagagcggaggaactagagtattcctgtgaaaagtgtggggggaagtgcgctcttgtgaggcataagttcaatcggctgccgcgagtcttgattttgcacttgaaacggtattcattcaacgtcgccctgtctctgaacaataaaataggccagcaagtgattattccgcgctacttgaccctcagcagtcattgtacagagaatacgaaacccccgtttaccctgggctggtctgcacatatggccatatcacgccctttgaaagccagtcaaatggtgaacagttgcattacttccccaagtactccctcaaaaaaatttacattcaaatcaaaaagctctctagctctgtgcctggattctgatagcgaggatgagctgaaacggtcagtagcactctcacagaggctgtgcgagatgctgggaaatgagcagcagcaggaggacctggaaaaggactccaagctttgccccattgaaccagacaagagcgagctcgagaattctggcttcgatcgcatgtcggaagaagagctgctcgccgccgtcctcgagatttcgaaaagagatgcaagcccttcgctgagccacgaagacgacgacaagcctactagttcccctgacactgggtttgccgaggacgacatccaggaaatgccggaaaatcctgatacgatggaaaccgaaaaacctaaaacgatcaccgaactggacccagcctcgttcacagaaatcactaaagattgcgacgagaataaagagaacaagacccctgagggcagccagggcgaagtggactggttacagcaatacgatatggagagagagagagaggagcaggagctccagcaggctctggcacagtctctacaggagcaggaggcttgggaacagaaagaggacgacgacctgaagagagccaccgaactctctttgcaagagtttaacaacagttttgttgacgctctcggcagcgatgaagattccggcaatgaggacgtctttgatatggagtatacagaggcagaagccgaagagctcaagagaaatgcggagacagggaatttaccccacagctatcgcctgatctcagtggtttcgcacatcggcagcacctctagctcaggccactacatctcagatgtctatgacataaagaagcaggcctggtttacctacaacgaccttgaagtgtcaaagatccaggaggctgccgtgcagtcagaccgcgatcgttccggttatatcttcttttacatgcacaaagagatctttgatgagctccttgagacagagaagaactcacagagcctttccactgaggtggggaagacaacccggcaggctttgtag

SEQ ID NO: 267421 - DNA, 2940 bp, Artificial Sequence
  derived and/or modified sequence
atgagccccctgaagatccacggccccatccggatccggagcatgcagacaggaatcacaaaatggaaagaaggttcgttcgaaatcgtggaaaaagagaataaagtctcactagtggtacactataatactggcgggatcccccgcatcttccagttgtcccacaacatcaaaaacgttgtcctgcgccccagcggtgccaaacaaagtcgacttatgctgaccctacaggataattcgttcctttcaattgataaagtgccctccaaggacgccgaggaaatgcgactcttcctggatgcagtgcatcagaacagactgcccgccgccatgaaaccttcacagggctcagggtcctttggtgcgattctgggatcccggacaagtcagaaagagacatctagacagctatcatactcagataaccaggcatccgctaaaaggggttccttggaaacaaaagacgacattcctttccggaaggtgctgggcaaccctggacgagggtccattaagaccgtcgcagggtcagggatagcacgcaccatcccatcgctgacaagcaccagcaccccactgcgttccggcctcttggagaacaggaccgaaaaaaggaaacgtatgatctccaccggatccgagctgaatgaggattatccgaaagagaacgattcttcttcgaataataaggcgatgactgaccccagtcgtaagtatctaacttcctcccgggagaagcagctgtcactgaaacagtccgaagagaataggacctccggcctccttcctcttcagtcctcgagcttctatggaagtcgggctggcagtaaggagcacagctctggaggcacaaacctcgaccgcactaacgtgtcaagccagaccccgagcgctaagcgctcccttggattcctaccccagccggtgccactgagcgttaagaagctgaggtgcaatcaagattataccgggtggaataaacctagggttcccctatctagccatcagcagcaacagctccagggatttagtaaccttggaaacacatgttacatgaacgcgattctccagtctctgttttcactgcagtccttcgcgaacgatctgctgaagcaggggatcccctggaaaaagataccacttaacgcgctcattaggcgctttgcccatcttctggttaagaaggacatctgcaactcagaaacaaagaaagacctgcttaaaaaggtgaaaaatgccatctcagccacagctgaacgcttttctgggtatatgcagaacgacgctcatgagttcctcagccaatgtctggatcaactgaaagaggacatggagaaactgaacaaaacttggaagacagagccagtgtctggcgaagagaatagtcccgatatttccgccacgcgtgcctatacttgccccgtaataacaaatctggagtttgaggttcaacatagcatcatttgtaaggcctgcggagaaatcatacccaagagagaacagttcaatgatctttccattgaccttcctaggcggaagaagcctctgcctccgcggagtatccaggattccctggacctcttctttcgggctgaggaacttgagtacagctgcgagaaatgtggaggaaagtgtgctcttgtgcgacataagttcaaccgactgccccgggtcctgatcctgcacttgaagcggtactctttcaacgttgctctgtccctgaataataagattggccagcaggtgatcatcccacggtaccttaccctgagctctcactgcaccgagaatactaagccaccattcacgcttggctggtctgcccacatggcaatcagcagaccgctgaaggcctcccagatggttaatagctgcatcacaagccccagcactccctcaaagaaattcacattcaaatccaaaagtagcttggccctctgtttggatagtgactctgaggatgaactcaagcgcagcgtggcattgagtcaacggctgtgcgagatgctcggcaatgagcagcagcaggaggatttagaaaaagatagtaagctctgcccaatcgaaccagacaaatcagagctcgagaattccggatttgaccgcatgtcagaggaagaactcttggcggccgtgctcgaaatcagcaagcgagatgcctccccttctctgtcacacgaggacgatgataaacctacttcaagcccagatactggcttcgccgaggacgacatccaggaaatgcctgagaatcccgatactatggagaccgaaaagccaaagacaatcaccgaattagatccagcgtcctttacagaaattacaaaggattgcgatgaaaacaaggaaaataaaacaccagagggatcacagggcgaagtggactggctgcaacaatatgacatggagagagagagggaggagcaagagctacagcaggccctggcccagtctttacaggaacaggaagcctgggaacagaaagaggacgatgacctgaaaagggcgaccgaactcagcttgcaagaatttaacaatagctttgttgacgctctgggaagtgacgaggactccgggaacgaagatgtcttcgatatggagtacaccgaggctgaagcagaagagttaaaaagaaacgcagagaccggaaacctcccccactcttaccggctaatctcagtggtgtcccatatagggtccacgagctcctcaggccactatatctccgacgtctacgatatcaaaaagcaggcatggtttacctataacgatctggaagtcagtaagatccaagaagccgcagtccagtcagatcgtgaccgaagtggatacatcttcttttacatgcacaaggaaattttcgacgaactgttggagaccgaaaagaactctcagagcctgtcaacagaggtcggtaagactaccaggcaggcactgtag

SEQ ID NO: 267422 - DNA, 2940 bp, Artificial Sequence
  derived and/or modified sequence
atgtcccctctaaagatacacggacccatcaggattcgctcaatgcagactggcattacgaaatggaaggagggatcattcgagattgtagagaaagaaaataaagtatctctggtagtgcattacaacacaggcggaatccccagaattttccaactgagtcacaacatcaagaatgtagtcttgcgccctagcggggcaaagcagagcagacttatgctgacgctccaggacaattcattcttgagcatcgacaaagtccccagtaaagatgccgaagaaatgcgcctctttctagatgccgtacatcagaatagacttcccgctgcaatgaaaccgtcacaggggtccggcagttttggggctatcctggggagcagaactagtcaaaaagaaacttcaagacagttgtcttattcagacaatcaggctagcgccaaacggggttccttggaaaccaaagatgacattccgttcagaaaggttcttgggaatccgggtagaggtagcatcaagacagtggcgggatccggaatcgcccgaacaattccaagccttacttccacttccacaccgcttcgaagcggacttcttgaaaacagaacagaaaaaaggaagcggatgatatcaaccggaagtgaattgaacgaagattatcccaaggaaaatgacagctcttccaacaataaagctatgaccgacccttctcgcaagtacctgacctcctcgcgggaaaagcagttgagtctgaaacagtcagaggaaaacaggacctccggtctcttgcccctgcagtcctctagcttttacggctccagggcaggcagcaaggagcatagtagcggcggaactaacttagatcggaccaatgtttccagccagacaccctcagctaaacgttccctgggtttcctcccacagcctgttcctctcagcgtgaagaagctaagatgtaatcaggactacaccgggtggaacaaacctcgtgtacctttgagcagccatcagcagcagcagcttcagggcttttctaacttgggaaacacatgttacatgaatgccatactccagagcctcttttctttgcaatctttcgcgaatgacctcctgaagcaggggatcccctggaagaagataccgttgaacgctctcatcaggcgatttgcacacctacttgtgaaaaaagatatctgcaactccgaaaccaaaaaggatctgctgaaaaaagtcaagaatgcaataagtgcaaccgccgaacgcttcagcgggtatatgcagaacgatgctcatgagtttctgtcccagtgtcttgatcagctgaaagaggacatggagaaattaaataaaacctggaaaactgaaccagtatcgggcgaggagaacagcccagacatctccgcaaccagggcatatacctgtccggtcatcacaaacctcgagtttgaggttcaacactcaatcatctgtaaagcttgcggggaaatcatccccaagagggaacagttcaacgatctgagtatcgacttgcccaggagaaagaaaccattaccacctcgaagcattcaggacagcctggacctttttttccgcgctgaagagttagaatattcctgcgagaagtgtgggggtaagtgcgccttagtccgtcacaagtttaatcgcctcccacgcgtcttgatcctgcacctgaagcggtacagcttcaacgtggctctgagcttgaacaataaaatcggacagcaggtgataatccccaggtatctcaccctatcatctcattgcactgagaacaccaagcctccatttaccctcggctggtccgcccatatggcaatttctagacccctaaaggctagtcagatggtgaacagttgcattacatcaccctcgactccctccaagaaatttactttcaaatcaaagagtagcttagccctgtgtctggattccgacagtgaggatgagctgaagagatcggtggcactatcacagcgattatgtgagatgcttgggaacgagcaacagcaagaagacctggagaaagattctaagctgtgccctatcgagccagacaaaagcgagttggagaattctggattcgatcgcatgtctgaagaagagctgctggcagctgttctggaaataagcaagcgagatgccagcccctctttaagccatgaagatgatgataagcctacatcaagtcctgacactggatttgccgaggatgacatacaagaaatgccggagaaccctgacacgatggagaccgagaaacctaaaaccatcaccgagctggatccagcgtcctttacagaaattaccaaggattgcgatgaaaacaaggaaaataagaccccggagggctctcagggggaggtggactggctacagcaatacgatatggagcgcgagagagaggagcaggagctgcagcaggctcttgcccagtctctccaggagcaggaagcatgggagcagaaagaagacgacgatctgaagcgtgcaaccgagctgtcactgcaggaattcaataattcttttgttgatgcactggggtccgatgaagacagtgggaatgaggacgtgtttgacatggagtacactgaggcagaggcagaagaacttaaacggaatgcggagactgggaatcttcctcactcttatcggctgataagcgttgtttcacatattggctctacatcgtcaagcggccattacatctcagatgtatatgatataaaaaagcaggcctggttcacttataacgacctcgaagtttctaagatccaagaagccgctgttcagagcgatcgggacagaagcggatacatatttttctatatgcacaaggagatctttgacgagctcctggagactgaaaagaattctcagtcactatccaccgaggtcggaaagacaaccaggcaggccctgtag

SEQ ID NO: 267423 - DNA, 2940 bp, Artificial Sequence
  derived and/or modified sequence
atgtccccattgaaaattcacgggcctatcaggatccgttccatgcagaccggcatcacgaaatggaaggaaggatcatttgagatcgtggagaaggagaataaggtatctcttgtggtgcactataacacaggcggaatcccgcgtatcttccagctctcccataacatcaaaaatgttgtgttgaggccctcaggcgctaaacagtctcgtctcatgctgacgctgcaggacaatagtttcctgagcatcgataaggtgccttctaaggacgcagaggaaatgaggctgttcctcgatgcagtgcaccagaatcgcctcccagccgctatgaagccctcgcagggttctggatcttttggggcaatcttggggtcaagaacctctcaaaaggagacaagtcgacagctcagttactccgataaccaggcaagcgcaaagaggggatcactggagactaaggacgatattccctttcgtaaagtactggggaatcctgggagggggagcataaagaccgtcgccggatcaggaatagccaggacgatcccatcattgactagtacctcgacaccccttagatccgggctgctggaaaatagaaccgagaaaagaaaacgcatgataagtacaggatccgaactcaatgaggattaccccaaagaaaatgacagctccagtaacaataaggcgatgacagaccccagtcggaagtacctgacctcctcccgcgagaaacagctgtcactgaagcagagcgaggaaaatcgaaccagcggcctgcttcccttgcagtcatccagcttttacggttccagagccggatctaaggagcactcctctggcggaactaacttggatcggaccaacgtaagctcccaaacacctagcgctaagcgttcgctagggtttctgccccagcctgttcccctatcagttaagaaacttaggtgtaaccaggattatactgggtggaataaacctcgtgttccccttagctctcatcagcaacagcagctgcaaggctttagtaaccttgggaacacttgttacatgaatgccatactgcagtcactattctccctccagtcattcgctaatgatttattgaagcagggaatcccatggaagaagattccgcttaatgccctgattcggcgttttgcccatctcttagtgaagaaagatatttgcaactccgagaccaagaaggacctgctcaagaaagttaagaatgccatatccgccacagctgaaaggtttagcgggtacatgcaaaatgatgcgcacgagttcctttcacagtgcctggaccaattgaaggaggacatggagaagctcaacaaaacatggaagaccgagcccgtaagcggagaagagaacagccccgatatctcagccactcgcgcatacacatgcccagtgataacaaatttagagtttgaggtgcaacattctattatttgcaaggcctgcggtgagatcatcccaaagcgggaacaatttaatgatctgagtatcgatctcccaaggagaaagaagcccctgcctccaagaagcattcaggacagtctagatctgttctttcgcgcagaggaacttgagtatagctgcgagaaatgcgggggtaagtgtgctctcgtcaggcacaagttcaaccgtttaccgagggttcttattttgcacttgaagagatactctttcaatgtcgcgttgtctctgaacaataagatcggccaacaggtgatcataccccgttatctaaccctttctagtcactgtacagagaacaccaagccaccctttacactcggctggagcgcgcacatggctataagcagaccccttaaagcctcacaaatggtcaactcatgcattacctccccaagtacgccaagcaaaaagttcacctttaaaagtaaatcctcactagcactgtgtctggactcagactctgaggacgagctgaagaggtccgtcgccctctctcaaaggctgtgtgagatgctcggaaatgagcaacagcaagaagatctggagaaggactccaagctgtgtccgattgaacctgacaagtcagaactcgagaattctgggtttgacagaatgtcggaggaagagcttctcgccgctgtgctggagatctccaaaagagacgcaagcccctccctgagccacgaggacgacgataaaccaacatcctctcctgacacgggatttgcggaagatgacatccaggagatgcccgaaaaccctgacacgatggagactgagaagcccaagactatcacagaattggacccggcttcttttacagagattacaaaggattgcgatgagaacaaggagaacaagacgccagaggggagtcaaggtgaggtcgactggctgcaacagtatgatatggagagagaaagagaggaacaggagctgcagcaagctttagctcagagccttcaggagcaggaagcctgggaacagaaggaggacgacgatctgaaaagggctaccgagctgagcctgcaggagtttaacaatagcttcgtagacgcgctgggttctgacgaggacagcgggaatgaggacgttttcgatatggaatataccgaggcagaagccgaggaactaaaacgtaacgccgagactggcaatctacctcatagctaccgcctgatcagcgtggtgagccatatcgggtcaacctcctccagtggtcactacatcagtgatgtatatgatattaagaagcaggcttggttcacctacaatgatctggaggtctctaagatacaagaagccgctgtgcagtcagaccgcgatcgttctggatatatctttttttatatgcacaaggagatctttgatgagctgctggagacagaaaaaaacagtcagtcactaagcaccgaagtggggaaaaccaccagacaggctctttag

SEQ ID NO: 267424 - DNA, 2940 bp, Artificial Sequence
  derived and/or modified sequence
atgtcccccctgaagattcacggtcccataagaattcgttctatgcagacaggtatcactaagtggaaggaaggaagttttgaaattgtggaaaaggaaaataaagtcagtctcgtggtgcattacaacaccggcggaatcccccgtatctttcagctgagtcataacataaagaatgtcgttctccgtccctccggagcaaagcagagccggttaatgctgaccttgcaggataattccttcctctcaatagacaaggtccctagcaaggatgctgaggaaatgcggcttttcctcgacgcggtgcaccagaataggctcccagcggcaatgaaaccttcacaaggaagtggctccttcggcgcaattctaggcagtagaacctcccagaaggaaacaagtaggcagctctcttacagcgacaaccaggcttcggccaaaagaggatcactggagaccaaggatgacataccgtttcggaaagtgctgggcaaccccggaaggggttcaattaaaacagtcgccggatctggaatcgctaggaccatcccaagcttgacatccacgagcacacctcttcggagtgggctgttagagaataggacagagaagcggaagcgtatgatctccaccggatcagagctcaatgaagattaccccaaagagaatgactctagcagcaataacaaagccatgacagacccctcgagaaaatacctaacaagttctcgtgagaagcagctgagcctcaagcaatccgaagaaaatagaacatctggcctcttgcctcttcagagttcatcattctacgggtctagggccggatccaaagagcactcatcgggaggaaccaacctggataggaccaatgtgagctctcagaccccaagcgcgaagcggtctctcggatttctaccccagccggtgcccttgtcagtgaaaaagcttcgctgcaaccaggactacacaggttggaataagcctcgagtgcctctgtcgtctcatcagcagcaacagctccagggtttttcaaacctagggaacacttgttacatgaacgctattctgcagtcgctgttctctctccagagcttcgctaatgacctgctgaaacaaggtatcccctggaagaagataccgctcaacgcgctgatacgcaggttcgcccatctgctggtgaagaaggacatttgtaactcagaaactaagaaagatctactgaagaaggtgaagaacgcaatttccgccactgcagagcgtttcagcggctatatgcagaatgatgcacatgagttcctgagtcagtgtcttgaccagctcaaagaggatatggagaaactgaataagacttggaagaccgaaccggtgtccggcgaggaaaacagccctgatatcagtgctactcgtgcctatacctgccctgtgattaccaacctcgagtttgaagtgcagcactccattatatgtaaggcttgtggggagattattccaaagagggaacagttcaatgacctcagtatagacctaccgcgacgcaagaaaccactacccccaaggagcattcaagactctctggacctgtttttcagagctgaggaactcgaatacagttgcgagaagtgtggtggtaagtgcgccctggtccggcacaagttcaacaggttacccagagtgctcatccttcaccttaagcgctatagtttcaatgttgcactcagtctgaacaataagataggccagcaggtaattatccctagatacctgacgttatcatcccattgtactgagaacacgaagcccccatttaccctgggttggtccgcccacatggctatctcacgcccactgaaagctagccagatggtgaacagttgcatcacctcaccaagtaccccttccaagaagttcacatttaagtcaaaaagcagcctcgccctgtgtctggactctgacagcgaagatgagcttaagcgcagcgttgccctcagtcagagattatgcgagatgctcggcaacgaacagcagcaggaggatcttgagaaagattctaagttgtgcccgattgaaccagacaagtccgagctggagaattccggtttcgatcgcatgagtgaagaagaactgctggctgccgtgctggaaatctcaaaaagagacgcctctccctcactgagtcatgaagacgatgataaaccgaccagctcccccgatactggattcgcagaagacgatatccaagagatgcccgaaaaccccgacacgatggaaaccgaaaagccaaagaccataaccgaactggatcctgcctcattcactgagatcactaaggactgcgatgaaaataaggaaaataaaactcctgagggaagccagggagaggtagactggctccagcagtacgatatggagagggagcgtgaggagcaggagctgcagcaagcactggctcagtctctgcaggaacaggaggcctgggaacaaaaggaggatgacgaccttaaacgcgctaccgaactctctctgcaggagttcaacaattcatttgtagacgcattgggatcggacgaggactccgggaatgaggatgtcttcgatatggagtacactgaggcagaagcagaggagctgaaacgtaatgccgagacaggtaaccttccccacagctatcgactgatatcagtggttagccatatcggatccacttcctccagcggccactacatatctgacgtgtatgacatcaagaagcaggcatggtttacatataacgaccttgaggtgagcaaaattcaggaggccgctgtgcagtccgatagggatcggtccggctacattttcttctacatgcacaaggagattttcgacgaattgctcgaaacagaaaagaattcccagagtctcagcaccgaggtggggaagaccacaaggcaggctttgtag

SEQ ID NO: 267425 - DNA, 8032 bp, Artificial Sequence
  derived and/or modified sequence
gtgcgtgcgtgtttgcgtgtggtcacagttcccgccatcagccgctctccctgactaggggtagctagcggcctccctcctttgggttcggtatccctacttccattaccctcggctcctcccactcctcgcgggctccgtgctttccgcgggtctgtccgggggctccggaccctcggcgcagctgagttgatggcttccggagaactggcatagctgcagaatatgagtagtgtcccaagaagagtgctttgcctttggcacaaggatcagaataaaggtgaattgctattacatagggtttttcggtaaaagtcactgaaaattatttgccatacagtaaccagagacctccaactaggggcccccaaactgtatcctgcctgtagccagaagcaatttttaaagaaaatatgtctcctctgaagatacatggtcctatcagaattcgaagtatgcagactgggattacaaagtggaaagaaggatcctttgaaattgtagaaaaagagaataaagtcagcctagtagttcactacaatactggaggaattccaaggatatttcagctaagtcataacattaaaaatgtggtgcttcgacccagtggagcgaaacaaagccgcctaatgttaactctgcaagataacagcttcttgtctattgacaaagtaccaagtaaggatgcagaggaaatgaggttgtttctagatgcagtccatcaaaacagacttcctgcagccatgaaaccgtctcaggggtctggtagttttggagccattctgggcagcaggacctcacagaaggaaaccagcaggcagctttcttactcagacaatcaggcttctgcaaaaagaggaagtttggaaactaaagatgatattccatttcgaaaagttcttggtaatccgggtagaggatcgattaagactgtagcaggaagtggaatagctcggacgattccttctttgacatctacttcaacacctcttagatcagggttgctagaaaatcgtactgaaaagaggaaaagaatgatatcaactggctcagaattgaatgaagattaccctaaggaaaatgattcatcatcgaacaacaaggccatgacagatccctccagaaagtatttaaccagcagtagagaaaagcagctgagtttgaaacagtcagaagagaataggacatcagggcttttacctttacagtcatcatccttttatggtagcagagctggatccaaggaacactcttctggtggcactaacttagacaggactaatgtttcaagccagactccctctgccaaaagaagtttgggatttcttcctcagccagttcctctttctgttaaaaaactgaggtgtaaccaggattacactggctggaataaaccaagagtgcccctttcctctcaccaacagcagcaactgcagggcttctccaatttgggaaatacctgctatatgaatgctattctacaatctctattttcactccagtcatttgcaaatgacttgcttaaacaaggtatcccatggaagaaaattccactcaatgcacttatcagacgctttgcacacttgcttgttaaaaaagatatctgtaattcagagaccaaaaaggatttactcaagaaggttaaaaatgccatttcagctacagcagagagattctctggttatatgcagaatgatgctcatgaatttttaagtcagtgtttggaccagctgaaagaagatatggaaaaattaaataaaacttggaagactgaacctgtttctggagaagaaaattcaccagatatttcagctaccagagcatacacttgccctgttattactaatttggagtttgaggttcagcactccatcatttgtaaagcatgtggagagattatccccaaaagagaacagtttaatgacctctctattgaccttcctcgtaggaaaaaaccactccctcctcgttcaattcaagattctcttgatcttttctttagggccgaagaactggagtattcttgtgagaagtgtggtgggaagtgtgctcttgtcaggcacaaatttaacaggcttcctagggtcctcattctccatttgaaacgatatagcttcaatgtggctctctcgcttaacaataagattgggcagcaagtcatcattccaagatacctgaccctgtcatctcattgcactgaaaatacaaaaccaccttttacccttggttggagtgcacatatggcaatttctagaccattgaaagcctctcaaatggtgaattcctgcatcaccagcccttctacaccttcaaagaaattcaccttcaaatccaagagctccttggctttatgccttgattcagacagtgaggatgagctaaaacgttctgtggccctcagccagagactttgtgaaatgttaggcaacgaacagcagcaggaagacctggaaaaagattcaaaattatgcccaatagagcctgacaagtctgaattggaaaactcaggatttgacagaatgagcgaagaagagcttctagcagctgtcttggagataagtaagagagatgcttcaccatctctgagtcatgaagatgatgataagccaactagcagcccagataccggatttgcagaagatgatattcaagaaatgccagaaaatccagacactatggaaactgagaagcccaaaacaatcacagagctggatcctgccagttttactgagataactaaagactgtgatgagaataaagaaaacaaaactccagaaggatctcagggagaagttgattggctccagcagtatgatatggagcgtgaaagggaagagcaagagcttcagcaggcactggctcagagccttcaagagcaagaggcttgggaacagaaagaagatgatgacctcaaaagagctaccgagttaagtcttcaagagtttaacaactcctttgtggatgcattgggttctgatgaggactctggaaatgaggatgtttttgatatggagtacacagaagctgaagctgaggaactgaaaagaaatgctgagacaggaaatctgcctcattcgtaccggctcatcagtgttgtcagtcacattggtagcacttcttcttcaggtcattacattagtgatgtatatgacattaagaagcaagcgtggtttacttacaatgacctggaggtatcaaaaatccaagaggctgccgtgcagagtgatcgagatcggagtggctacatcttcttttatatgcacaaggagatctttgatgagctgctggaaacagaaaagaactctcagtcacttagcacggaagtggggaagactacccgtcaggccttgtgaggaacaaactcctgggttggcagcatgcactgcatatttgttactgctgcccacctcacctttcctctgctgaaggagaatttggaattctacttgatgcgggagcaacaaacagctcagggccaaaccaaaagacaaaaattggagtaacgtagaatgctccatgctattttatggaaactttggtctcacatccgtagctgattatcctctttttctcctatgagtggcacttcttttgtcttaggaatacatgttgtaaatatatatctgtgtatgtgtgtatacacacacacagacacacacacacacacacgggatgaatggagccttaaagagttaggatgagccaccagaatatgcctgctcaaaattaatagcacagcagtttggagaagaaatgaaggtgtcaaagagtccattcacctgagaaatgtgtgaagacatacttatcagttggcttttagcttttatgttccttgagtagtttcactcaagtctgtaaccttttgtgtttccttattagtaaaattcactggaaagccagctcttcatgttacactaatgacagtttgttctctttgcaagagaggggcattactgtcacctgacttgaggagctgttttgttgttgttgttgtctgcaaatttcatgaatttgtgatgtctttgctgtttacatgcagtcccaagaaatggattgttggtgctttggaatatgttacagtcccacatttgatatttcttatatactttgttttctctaaggagatttcttcacacagtatgttcatcatatatcatcatcattattatggtggtaaagatagaatcttttttcttttttgtcattctgccatggagcagcattaccctaatggattgcaaccaaaactttaaacaagtagaaagataatatttctccaattgggactccccagcaggaatacttagggataaggaagaatgctagcatctctgtctctcaaacatagggaggataagaagagtgttcttctggtaaagctaaaattctggaccactgaagctaaaagccctattgcaagtatgaaattaagtacttgagctgtaggacaaaccttgggcatttaaccatttactgtctggctttgcccttaaaatagggttgcaattaaaatgtgattggcttaggtaatcccaaaaactaacaaataacaaaggtgcataatttatttatctactttttaggtgctctgagttgaggcaaagtagagcggcaacattaagtgctatgctagtcacttagctgacgtaaccagcttggttaagcagcttatgaaaccatataaagaattcttttgaggatggaattctgtccacaaaataattttgtgagcccagatatcattaggatcacacagagttaaatatagaaaaatgaaaccatcattatattctttcgtgttttttcttttattataaacaaggggattattctttagttctcagaggtagggacaaaaccacatcaggttttcagaaggaaaaaacatttaaaaacccaccatcacatgagagaatcacttgaacccaggaggcagaggttgcagtgagctgagatcgcatcattgcactgcagtctgagtgacagagtgagactccatctcattaaaaaaaacgaaaacaaaaacaaaaaaaacacaaaccatcatcacagaagatgcaacatcttttctgaaagattgccttaagagagctccagtcctactcttggaacttggatgtattctaatgtagtaaactattctaagttttcattctttgaattataaatggcctcagcagttttgctcaactactgataaatgctttgcctcctaccatctacctatataccttattgtaatgaatgttccaaaatggtagagtggtagaaaacgccagagtagtttagagcagaggaaaatatttgttttaaaactagctttaaagttttgtttcatttctaccaggagcctctttggtttggtttgattttgcttggaaataattggttttcttataaatgagtgaagcggtgataaaattctttggctagttattaattcttttacgtgtctttgcatttgagaggcactgttaaaaattattgggaaagatttaaagtgcaggctgcaattaaaacatggagaaaagtagaaataatgccataagtctagattgcctcatgaagcagcctcatttgaattgctttcatagctttcatgtgtgtatggtttagaagtacacttacctcagaaacctgatttgatcttcatgtcttgggcaggagttgttgaaaataggttattggaatatataagttatctcactgctcatgtacttgcatgtttgggactcaaattttacttgatgtctgtccattcttgtggccctatcagccttctccttcctttactcctttaatctacttctttgactaccagtggagatttcagctggactatgttgatggggtttgttgttgtttttgagctggctgtatatattttaaaattataaatagataatatattattttttgcacattgtgatcagtttgcccagaattggggatggggcagttagcatgttggggccaggaagggacaagttagataaggactgagtgcttccgttgcaggcagtttgcacaatacctaattaaccttcctattgaaaataccaaatgtgtggttacattactttaaatgacattgaattggaacttgatggcaattagttctagatacaaccttttgatctttgttggaattttaagggaaaaatgaactaaacttcatatttgttgattttaatcacctaatagtactgaaggttggaaagttgcatgtggctggatgctgttaatttctttaatagccatgactataatttaagcctatgagaagatagactgtttcgtagggatatattcacatgtgtgtgcacactcatgagttttgtctcagcaggatagaataagcaaatccatgaactggtcttctattaatactttgattctaaaaattatttgtttacttgctatggtctgttcattctgggcctaaccttaaaggctcaataacaaatacaacaaatgtaaatatgtttacattttaagacatatgcagtggttcttacagatcagttaattaactccagaaagcaaatgttagactacacatttatttttctccttgatcaagtataaaattctgaaacagaggctttaaaatttaaaacctcagcaaaataatccatgaatttactgattcttctgtatcgtgtgtagttaccattatgtaactatacacacatacagctacggatataatgaaaattatctgcaaacacctaaattaaagagaaaaaaaagtagtttgtaaactcatttgtgatctactgaaaagaggttatattaaagcaaattaaaatattttccttctctgtcctctgaaatgactgcagtagatactcttagttatcccatttagggtggttggagggcctttttaatttaattgaccccccgaggtggtcttttgttttaaacagggggcaacagctggatctccaagtacatatggattttgtatatataggagatttttagaaaaatcaacaacctaacaccagattcaagtcacataaaagtgttccaataaaatggatggatgtctttttcctccccattttgctttatactgagtaatgcactcttgcaagtgtatacaaaaactaaatagacttctgccctccaacatctttttattgcattacttcaaaatcctaattttgtctctactgatatgtcttattaacatctgaaaaaatatatattttttattggaaaattctaatttgttaggccttgaaagttttgtgacaattattttgctgtgtttaaccacaatcattcaccttatggcatgctttgattactagacttcaggcagtctcattcattgtatcatacttacacacaattagtaagttgtctccatgtgtgctatatgtctgaggtgtatggagtttttatttaaaaagtgtgccagtctgaatataagcatttgattttgtaacattggacttttcttaaaagtacagaggttcaaagtataggtatgtccattggcataagaatagagtgggtgagggtctggaccaggttccaggttggtccagtcagatgccagaacaaagaagaacagtcaactaaactggtctacttcaaaaatagtgggcctgtgtgaagagtgagaccacatgtgggtgtgcacacctcttgtccccaggtttccctccctttgagcttttctttccctccctaacttctctggcctattgtcattgttgtttctttaaacttaaggagagaaaaacaaaaatgagattcctacactttgcctaattgagccactaccaggttttctggcagctgtggccacattatttgtgagatgattttttttctttatgttcagagtgacttttgattctgattctttatgttttgtatggagcggcacttttatctgtgttttagcagaactgttcctctgtatcctttacggtttttctttgtttttgtttcctttttaaattatgcatagagtttttttgtgtgtatgaaattaaagcctttattaaccttc

SEQ ID NO: 267426 - DNA, 3353 bp, Artificial Sequence
  derived and/or modified sequence
gcctccctcctttgggttcggtatccctacttccattaccctcggctcctcccactcctcgcgggctccgtgctttccgcgggtctgtccgggggctccggaccctcggcgcagctgagttgatggcttccggagaactggcatagctgcagaatatgagtagtgtcccaagaagagtgctttgcctttggcacaaggatcagaataaagttatttgccatacagtaaccagagacctccaactaggggcccccaaactgtatcctgcctgtagccagaagcaatttttaaagaaaatatgtctcctctgaagatacatggtcctatcagaattcgaagtatgcagactgggattacaaagtggaaagaaggatcctttgaaattgtagaaaaagagaataaagtcagcctagtagttcactacaatactggaggaattccaaggatatttcagctaagtcataacattaaaaatgtggtgcttcgacccagtggagcgaaacaaagccgcctaatgttaactctgcaagataacagcttcttgtctattgacaaagtaccaagtaaggatgcagaggaaatgaggttgtttctagatgcagtccatcaaaacagacttcctgcagccatgaaaccgtctcaggggtctggtagttttggagccattctgggcagcaggacctcacagaaggaaaccagcaggcagctttcttactcagacaatcaggcttctgcaaaaagaggaagtttggaaactaaagatgatattccatttcgaaaagttcttggtaatccgggtagaggatcgattaagactgtagcaggaagtggaatagctcggacgattccttctttgacatctacttcaacacctcttagatcagggttgctagaaaatcgtactgaaaagaggaaaagaatgatatcaactggctcagaattgaatgaagattaccctaaggaaaatgattcatcatcgaacaacaaggccatgacagatccctccagaaagtatttaaccagcagtagagaaaagcagctgagtttgaaacagtcagaagagaataggacatcagggcttttacctttacagtcatcatccttttatggtagcagagctggatccaaggaacactcttctggtggcactaacttagacaggactaatgtttcaagccagactccctctgccaaaagaagtttgggatttcttcctcagccagttcctctttctgttaaaaaactgaggtgtaaccaggattacactggctggaataaaccaagagtgcccctttcctctcaccaacagcagcaactgcagggcttctccaatttgggaaatacctgctatatgaatgctattctacaatctctattttcactccagtcatttgcaaatgacttgcttaaacaaggtatcccatggaagaaaattccactcaatgcacttatcagacgctttgcacacttgcttgttaaaaaagatatctgtaattcagagaccaaaaaggatttactcaagaaggttaaaaatgccatttcagctacagcagagagattctctggttatatgcagaatgatgctcatgaatttttaagtcagtgtttggaccagctgaaagaagatatggaaaaattaaataaaacttggaagactgaacctgtttctggagaagaaaattcaccagatatttcagctaccagagcatacacttgccctgttattactaatttggagtttgaggttcagcactccatcatttgtaaagcatgtggagagattatccccaaaagagaacagtttaatgacctctctattgaccttcctcgtaggaaaaaaccactccctcctcgttcaattcaagattctcttgatcttttctttagggccgaagaactggagtattcttgtgagaagtgtggtgggaagtgtgctcttgtcaggcacaaatttaacaggcttcctagggtcctcattctccatttgaaacgatatagcttcaatgtggctctctcgcttaacaataagattgggcagcaagtcatcattccaagatacctgaccctgtcatctcattgcactgaaaatacaaaaccaccttttacccttggttggagtgcacatatggcaatttctagaccattgaaagcctctcaaatggtgaattcctgcatcaccagcccttctacaccttcaaagaaattcaccttcaaatccaagagctccttggctttatgccttgattcagacagtgaggatgagctaaaacgttctgtggccctcagccagagactttgtgaaatgttaggcaacgaacagcagcaggaagacctggaaaaagattcaaaattatgcccaatagagcctgacaagtctgaattggaaaactcaggatttgacagaatgagcgaagaagagcttctagcagctgtcttggagataagtaagagagatgcttcaccatctctgagtcatgaagatgatgataagccaactagcagcccagataccggatttgcagaagatgatattcaagaaatgccagaaaatccagacactatggaaactgagaagcccaaaacaatcacagagctggatcctgccagttttactgagataactaaagactgtgatgagaataaagaaaacaaaactccagaaggatctcagggagaagttgattggctccagcagtatgatatggagcgtgaaagggaagagcaagagcttcagcaggcactggctcagagccttcaagagcaagaggcttgggaacagaaagaagatgatgacctcaaaagagctaccgagttaagtcttcaagagtttaacaactcctttgtggatgcattgggttctgatgaggactctggaaatgaggatgtttttgatatggagtacacagaagctgaagctgaggaactgaaaagaaatgctgagacaggaaatctgcctcattcgtaccggctcatcagtgttgtcagtcacattggtagcacttcttcttcaggtcattacattagtgatgtatatgacattaagaagcaagcgtggtttacttacaatgacctggaggtatcaaaaatccaagaggctgccgtgcagagtgatcgagatcggagtggctacatcttcttttatatgcacaaggagatctttgatgagctgctggaaacagaaaagaactctcagtcacttagcacggaagtggggaagactacccgtcaggccttgtgaggaacaaactcctgggttggcagcatgcactgcatatttgttactgctgcccacctcacctttcctctgctgaaggagaatttggaattctacttgatgcgggagcaacaaacag

SEQ ID NO: 267427 - DNA, 5019 bp, Artificial Sequence
  derived and/or modified sequence
atcagccgctctccctgactaggggtagctagcggcctccctcctttgggttcggtatccctacttccattaccctcggctcctcccactcctcgcgggctccgtgctttccgcgggtctgtccgggggctccggaccctcggcgcagctgagttgatggcttccggagaactggcatagctgcagaatatgagtagtgtcccaagaagagtgctttgcctttggcacaaggatcagaataaaggtgaattgctattacatagggtttttcggtaaaagtcactgaaaattatttgccatacagtaaccagagacctccaactaggggcccccaaactgtatcctgcctgtagaacctgccaggtaaaggtatatttttgctttttaatttagccagaagcaatttttaaagaaaatatgtctcctctgaagatacatggtcctatcagaattcgaagtatgcagactgggattacaaagtggaaagaaggatcctttgaaattgtagaaaaagagaataaagtcagcctagtagttcactacaatactggaggaattccaaggatatttcagctaagtcataacattaaaaatgtggtgcttcgacccagtggagcgaaacaaagccgcctaatgttaactctgcaagataacagcttcttgtctattgacaaagtaccaagtaaggatgcagaggaaatgaggttgtttctagatgcagtccatcaaaacagacttcctgcagccatgaaaccgtctcaggggtctggtagttttggagccattctgggcagcaggacctcacagaaggaaaccagcaggcagctttcttactcagacaatcaggcttctgcaaaaagaggaagtttggaaactaaagatgatattccatttcgaaaagttcttggtaatccgggtagaggatcgattaagactgtagcaggaagtggaatagctcggacgattccttctttgacatctacttcaacacctcttagatcagggttgctagaaaatcgtactgaaaagaggaaaagaatgatatcaactggctcagaattgaatgaagattaccctaaggaaaatgattcatcatcgaacaacaaggccatgacagatccctccagaaagtatttaaccagcagtagagaaaagcagctgagtttgaaacagtcagaagagaataggacatcagggcttttacctttacagtcatcatccttttatggtagcagagctggatccaaggaacactcttctggtggcactaacttagacaggactaatgtttcaagccagactccctctgccaaaagaagtttgggatttcttcctcagccagttcctctttctgttaaaaaactgaggtgtaaccaggattacactggctggaataaaccaagagtgcccctttcctctcaccaacagcagcaactgcagggcttctccaatttgggaaatacctgctatatgaatgctattctacaatctctattttcactccagtcatttgcaaatgacttgcttaaacaaggtatcccatggaagaaaattccactcaatgcacttatcagacgctttgcacacttgcttgttaaaaaagatatctgtaattcagagaccaaaaaggatttactcaagaaggttaaaaatgccatttcagctacagcagagagattctctggttatatgcagaatgatgctcatgaatttttaagtcagtgtttggaccagctgaaagaagatatggaaaaattaaataaaacttggaagactgaacctgtttctggagaagaaaattcaccagatatttcagctaccagagcatacacttgccctgttattactaatttggagtttgaggttcagcactccatcatttgtaaagcatgtggagagattatccccaaaagagaacagtttaatgacctctctattgaccttcctcgtaggaaaaaaccactccctcctcgttcaattcaagattctcttgatcttttctttagggccgaagaactggagtattcttgtgagaagtgtggtgggaagtgtgctcttgtcaggcacaaatttaacaggcttcctagggtcctcattctccatttgaaacgatatagcttcaatgtggctctctcgcttaacaataagattgggcagcaagtcatcattccaagatacctgaccctgtcatctcattgcactgaaaatacaaaaccaccttttacccttggttggagtgcacatatggcaatttctagaccattgaaagcctctcaaatggtgaattcctgcatcaccagcccttctacaccttcaaagaaattcaccttcaaatccaagagctccttggctttatgccttgattcagacagtgaggatgagctaaaacgttctgtggccctcagccagagactttgtgaaatgttaggcaacgaacagcagcaggaagacctggaaaaagattcaaaattatgcccaatagagcctgacaagtctgaattggaaaactcaggatttgacagaatgagcgaagaagagcttctagcagctgtcttggagataagtaagagagatgcttcaccatctctgagtcatgaagatgatgataagccaactagcagcccagataccggatttgcagaagatgatattcaagaaatgccagaaaatccagacactatggaaactgagaagcccaaaacaatcacagagctggatcctgccagttttactgagataactaaagactgtgatgagaataaagaaaacaaaactccagaaggatctcagggagaagttgattggctccagcagtatgatatggagcgtgaaagggaagagcaagagcttcagcaggcactggctcagagccttcaagagcaagaggcttgggaacagaaagaagatgatgacctcaaaagagctaccgagttaagtcttcaagagtttaacaactcctttgtggatgcattgggttctgatgaggactctggaaatgaggatgtttttgatatggagtacacagaagctgaagctgaggaactgaaaagaaatgctgagacaggaaatctgcctcattcgtaccggctcatcagtgttgtcagtcacattggtagcacttcttcttcaggtcattacattagtgatgtatatgacattaagaagcaagcgtggtttacttacaatgacctggaggtatcaaaaatccaagaggctgccgtgcagagtgatcgagatcggagtggctacatcttcttttatatgcacaaggagatctttgatgagctgctggaaacagaaaagaactctcagtcacttagcacggaagtggggaagactacccgtcaggccttgtgaggaacaaactcctgggttggcagcatgcactgcatatttgttactgctgcccacctcacctttcctctgctgaaggagaatttggaattctacttgatgcgggagcaacaaacagctcagggccaaaccaaaagacaaaaattggagtaacgtagaatgctccatgctattttatggaaactttggtctcacatccgtagctgattatcctctttttctcctatgagtggcacttcttttgtcttaggaatacatgttgtaaatatatatctgtgtatgtgtgtatacacacacacagacacacacacacacacacgggatgaatggagccttaaagagttaggatgagccaccagaatatgcctgctcaaaattaatagcacagcagtttggagaagaaatgaaggtgtcaaagagtccattcacctgagaaatgtgtgaagacatacttatcagttggcttttagcttttatgttccttgagtagtttcactcaagtctgtaaccttttgtgtttccttattagtaaaattcactggaaagccagctcttcatgttacactaatgacagtttgttctctttgcaagagaggggcattactgtcacctgacttgaggagctgttttgttgttgttgttgtctgcaaatttcatgaatttgtgatgtctttgctgtttacatgcagtcccaagaaatggattgttggtgctttggaatatgttacagtcccacatttgatatttcttatatactttgttttctctaaggagatttcttcacacagtatgttcatcatatatcatcatcattattatggtggtaaagatagaatcttttttcttttttgtcattctgccatggagcagcattaccctaatggattgcaaccaaaactttaaacaagtagaaagataatatttctccaattgggactccccagcaggaatacttagggataaggaagaatgctagcatctctgtctctcaaacatagggaggataagaagagtgttcttctggtaaagctaaaattctggaccactgaagctaaaagccctattgcaagtatgaaattaagtacttgagctgtaggacaaaccttgggcatttaaccatttactgtctggctttgcccttaaaatagggttgcaattaaaatgtgattggcttaggtaatcccaaaaactaacaaataacaaaggtgcataatttatttatctactttttaggtgctctgagttgaggcaaagtagagcggcaacattaagtgctatgctagtcacttagctgacgtaaccagcttggttaagcagcttatgaaaccatataaagaattcttttgaggatggaattctgtccacaaaataattttgtgagcccagatatcattaggatcacacagagttaaatatagaaaaatgaaaccatcattatattctttcgtgttttttcttttattataaacaaggggattattctttagttctcagaggtagggacaaaaccacatcaggttttcagaaggaaaaaacatttaaaaacccaccatcacatgagagaatcacttgaacccaggaggcagaggttgcagtgagctgagatcgcatcattgcactgcagtctgagtgacagagtgagactccatctcattaaaaaaaacg

SEQ ID NO: 267428 - DNA, 2940 bp, Artificial Sequence
  derived and/or modified sequence
atgagccccctgaagatccacggccccatcagaatcagaagcatgcagaccggcatcaccaagtggaaggagggcagcttcgagatcgtggagaaggagaacaaggtgagcctggtggtgcactacaacaccggcggcatccccagaatcttccagctgagccacaacatcaagaacgtggtgctgagacccagcggcgccaagcagagcagactgatgctgaccctgcaggacaacagcttcctgagcatcgacaaggtgcccagcaaggacgccgaggagatgagactgttcctggacgccgtgcaccagaacagactgcccgccgccatgaagcccagccagggcagcggcagcttcggcgccatcctgggcagcagaaccagccagaaggagaccagcagacagctgagctacagcgacaaccaggccagcgccaagagaggcagcctggagaccaaggacgacatccccttcagaaaggtgctgggcaaccccggcagaggcagcatcaagaccgtggccggcagcggcatcgccagaaccatccccagcctgaccagcaccagcacccccctgagaagcggcctgctggagaacagaaccgagaagagaaagagaatgatcagcaccggcagcgagctgaacgaggactaccccaaggagaacgacagcagcagcaacaacaaggccatgaccgaccccagcagaaagtacctgaccagcagcagagagaagcagctgagcctgaagcagagcgaggagaacagaaccagcggcctgctgcccctgcagagcagcagcttctacggcagcagagccggcagcaaggagcacagcagcggcggcaccaacctggacagaaccaacgtgagcagccagacccccagcgccaagagaagcctgggcttcctgccccagcccgtgcccctgagcgtgaagaagctgagatgcaaccaggactacaccggctggaacaagcccagagtgcccctgagcagccaccagcagcagcagctgcagggcttcagcaacctgggcaacacctgctacatgaacgccatcctgcagagcctgttcagcctgcagagcttcgccaacgacctgctgaagcagggcatcccctggaagaagatccccctgaacgccctgatcagaagattcgcccacctgctggtgaagaaggacatctgcaacagcgagaccaagaaggacctgctgaagaaggtgaagaacgccatcagcgccaccgccgagagattcagcggctacatgcagaacgacgcccacgagttcctgagccagtgcctggaccagctgaaggaggacatggagaagctgaacaagacctggaagaccgagcccgtgagcggcgaggagaacagccccgacatcagcgccaccagagcctacacctgccccgtgatcaccaacctggagttcgaggtgcagcacagcatcatctgcaaggcctgcggcgagatcatccccaagagagagcagttcaacgacctgagcatcgacctgcccagaagaaagaagcccctgccccccagaagcatccaggacagcctggacctgttcttcagagccgaggagctggagtacagctgcgagaagtgcggcggcaagtgcgccctggtgagacacaagttcaacagactgcccagagtgctgatcctgcacctgaagagatacagcttcaacgtggccctgagcctgaacaacaagatcggccagcaggtgatcatccccagatacctgaccctgagcagccactgcaccgagaacaccaagccccccttcaccctgggctggagcgcccacatggccatcagcagacccctgaaggccagccagatggtgaacagctgcatcaccagccccagcacccccagcaagaagttcaccttcaagagcaagagcagcctggccctgtgcctggacagcgacagcgaggacgagctgaagagaagcgtggccctgagccagagactgtgcgagatgctgggcaacgagcagcagcaggaggacctggagaaggacagcaagctgtgccccatcgagcccgacaagagcgagctggagaacagcggcttcgacagaatgagcgaggaggagctgctggccgccgtgctggagatcagcaagagagacgccagccccagcctgagccacgaggacgacgacaagcccaccagcagccccgacaccggcttcgccgaggacgacatccaggagatgcccgagaaccccgacaccatggagaccgagaagcccaagaccatcaccgagctggaccccgccagcttcaccgagatcaccaaggactgcgacgagaacaaggagaacaagacccccgagggcagccagggcgaggtggactggctgcagcagtacgacatggagagagagagagaggagcaggagctgcagcaggccctggcccagagcctgcaggagcaggaggcctgggagcagaaggaggacgacgacctgaagagagccaccgagctgagcctgcaggagttcaacaacagcttcgtggacgccctgggcagcgacgaggacagcggcaacgaggacgtgttcgacatggagtacaccgaggccgaggccgaggagctgaagagaaacgccgagaccggcaacctgccccacagctacagactgatcagcgtggtgagccacatcggcagcaccagcagcagcggccactacatcagcgacgtgtacgacatcaagaagcaggcctggttcacctacaacgacctggaggtgagcaagatccaggaggccgccgtgcagagcgacagagacagaagcggctacatcttcttctacatgcacaaggagatcttcgacgagctgctggagaccgagaagaacagccagagcctgagcaccgaggtgggcaagaccaccagacaggccctgtag

SEQ ID NO: 267429 - DNA, 1815 bp, Artificial Sequence
  derived and/or modified sequence
ggccgcggtaggtggggacgcggcggcgctgctcctccgctgccgccgggagagtcggcgacgccgccagctccgcgcgcgaactcccgtccatggcacgcagggcggcggctgcccgagctgctcgagtctcgcccgctgccgcgccgtacttttaggcgagtgcggaggtcgaaggcggaggggaagtcagcgcggagctgcagcccccgccggccgccgccgcgcggcgagagggagttcccagagctgccgcggccccgggcccggccggccacctccttgcgccctccccctcgcggcgaggctgccccgcgcccgcgcccgcgcccgcacccgccgccgccgcccgcagcgatgatcttccccagcagcagtggcaaccccgggggcagcagcaactgccggacgccctatcgcaagcagcagtctctggtcccagcccaccccatggcccctcccagtcccagcaccaccagcagtaataacaacagtagcagcagtagcaactcaggatgggatcagctcagcaaaacgaacctctatatccgaggactgcctccccacaccaccgaccaggacctggtgaagctctgtcaaccatatgggaaaatagtctccacaaaggcaattttggataagacaacgaacaaatgcaaaggttatggttttgtcgactttgacagccctgcagcagctcaaaaagctgtgtctgccctgaaggccagtggggttcaagctcaaatggcaaagcaacaggaacaagatcctaccaacctctacatttctaatttgccactctccatggatgagcaagaactagaaaatatgctcaaaccatttggacaagttatttctacaaggatactacgtgattccagtggtacaagtcgtggtgttggctttgctaggatggaatcaacagaaaaatgtgaagctgttattggtcattttaatggaaaatttattaagacaccaccaggagtttctgcccccacagaacctttattgtgtaagtttgctgatggaggacagaaaaagagacagaacccaaacaaatacatccctaatggaagaccatggcatagagaaggagaggctggaatgacacttacttacgacccaactacagctgctatacagaacggattttatccttcaccatacagtattgctacaaaccgaatgatcactcaaacttctattacaccctatattgcatctcctgtatctgcctaccaggtgcaaagtccttcgtggatgcaacctcaaccatatattctacagcaccctggtgccgtgttaactccctcaatggagcacaccatgtcactacagcccgcatcaatgatcagccctctggcccagcagatgagtcatctgtcactaggcagcaccggaacatacatgcctgcaacgtcagctatgcaaggagcctacttgccacagtatgcacatatgcagacgacagcggttcctgttgaggaggcaagtggtcaacagcaggtggctgtcgagacgtctaatgaccattctccatatacctttcaacctaataagtaactgtgagatgtacagaaaggtgttcttacatgaagaagggtgtgaaggctgaacaatcatggatttttctgatcaattgtgctttaggaaattattgacagttttgcacaggttcttgaaaacgttatttataatgaaatcaactaaaactatttttgctataagttctataaggtgcataaaacccttaaattcatctagtagctgttcccccgaacaggtttattttagtaaaaaaaaaaaaacaaaaaa

SEQ ID NO: 267430 - protein, 419 aa, Artificial Sequence
  derived and/or modified sequence
MGKVWKQQMYPQYATYYYPQYLQAKQSLVPAHPMAPPSPSTTSSNNNSSSSSNSGWDQLSKTNLYIRGLPPHTTDQDLVKLCQPYGKIVSTKAILDKTTNKCKGYGFVDFDSPAAAQKAVSALKASGVQAQMAKQQEQDPTNLYISNLPLSMDEQELENMLKPFGQVISTRILRDSSGTSRGVGFARMESTEKCEAVIGHFNGKFIKTPPGVSAPTEPLLCKFADGGQKKRQNPNKYIPNGRPWHREGEAGMTLTYDPTTAAIQNGFYPSPYSIATNRMITQTSITPYIASPVSAYQVAKETRENKYRGSAIKVQSPSWMQPQPYILQHPGAVLTPSMEHTMSLQPASMISPLAQQMSHLSLGSTGTYMPATSAMQGAYLPQYAHMQTTAVPVEEASGQQQVAVETSNDHSPYTFQPNK

SEQ ID NO: 267431 - DNA, 1702 bp, Artificial Sequence
  derived and/or modified sequence
ctggtcccggctgggaggtggagcagcggcagcagcagcagccgccgccgccgccgccgctgccgccgccgccggaaagggagaggcaggagagcccgagacttggaaaccccaaagtgtccgcgaccctgcacggcaggctcccttccagcttcatgggcaaagtgtggaaacagcagatgtaccctcagtacgccacctactattacccccagtatctgcaagccaagcagtctctggtcccagcccaccccatggcccctcccagtcccagcaccaccagcagtaataacaacagtagcagcagtagcaactcaggatgggatcagctcagcaaaacgaacctctatatccgaggactgcctccccacaccaccgaccaggacctggtgaagctctgtcaaccatatgggaaaatagtctccacaaaggcaattttggataagacaacgaacaaatgcaaaggttatggttttgtcgactttgacagccctgcagcagctcaaaaagctgtgtctgccctgaaggccagtggggttcaagctcaaatggcaaagcaacaggaacaagatcctaccaacctctacatttctaatttgccactctccatggatgagcaagaactagaaaatatgctcaaaccatttggacaagttatttctacaaggatactacgtgattccagtggtacaagtcgtggtgttggctttgctaggatggaatcaacagaaaaatgtgaagctgttattggtcattttaatggaaaatttattaagacaccaccaggagtttctgcccccacagaacctttattgtgtaagtttgctgatggaggacagaaaaagagacagaacccaaacaaatacatccctaatggaagaccatggcatagagaaggagaggctggaatgacacttacttacgacccaactacagctgctatacagaacggattttatccttcaccatacagtattgctacaaaccgaatgatcactcaaacttctattacaccctatattgcatctcctgtatctgcctaccaggtggcaaaggaaaccagagaaaacaagtatcggggctctgctatcaaggtgcaaagtccttcgtggatgcaacctcaaccatatattctacagcaccctggtgccgtgttaactccctcaatggagcacaccatgtcactacagcccgcatcaatgatcagccctctggcccagcagatgagtcatctgtcactaggcagcaccggaacatacatgcctgcaacgtcagctatgcaaggagcctacttgccacagtatgcacatatgcagacgacagcggttcctgttgaggaggcaagtggtcaacagcaggtggctgtcgagacgtctaatgaccattctccatatacctttcaacctaataagtaactgtgagatgtacagaaaggtgttcttacatgaagaagggtgtgaaggctgaacaatcatggatttttctgatcaattgtgctttaggaaattattgacagttttgcacaggttcttgaaaacgttatttataatgaaatcaactaaaactatttttgctataagttctataaggtgcataaaacccttaaattcatctagtagctgttcccccgaacaggtttattttagtaaaaaaaaaaaaacaaaaaacaaaaacaaaagatttttatcaaatgttatgatgc

SEQ ID NO: 267432 - DNA, 1260 bp, Artificial Sequence
  derived and/or modified sequence
atgggtaaggtctggaaacagcagatgtatccacagtatgctacttattattatccccagtacctgcaagctaaacagtccctggtccctgcacaccccatggctccccctagtcccagtaccacgtctagcaacaataactcctcctctagcagtaattctggctgggaccagctgtccaagactaacctctacatccgcggcctccctccccacaccacagaccaggacctagtgaagctctgccagccttacggcaaaatcgtatctacaaaagccattctcgataaaactactaacaagtgcaagggctacgggtttgttgattttgattcaccggcagctgcacagaaggctgtaagtgctcttaaagcctccggcgtacaggcacagatggcgaaacagcaggagcaagatccaaccaacctgtacatttccaaccttcctctaagcatggacgaacaggaactggagaacatgctgaagccatttggccaagtgatcagcaccaggatattgcgggactcgagcggcacatcccgaggcgtgggttttgccagaatggaaagtactgagaaatgtgaagccgtgatcgggcactttaacggcaaatttatcaaaacaccaccaggcgtttccgccccaacagagcctttgctctgcaaattcgcagacggcggccagaagaaaaggcagaatcctaataagtacatccctaacggacggccatggcatcgtgaaggtgaagccggaatgaccctaacatatgatcctaccacggcggccatccagaacgggttctacccgtctccctatagtatcgcaacaaatagaatgatcacccagaccagcatcacaccctacatagcctcacctgtgtccgcctaccaggtggccaaagaaacgagggaaaataagtaccgtgggtccgccatcaaggtgcaatccccctcttggatgcagcctcagccatacatcctgcagcaccctggcgccgtcctgaccccatctatggagcacaccatgtcactgcagcccgcttctatgatttcacccctggcccaacagatgagccatctgtctcttggttcaacgggaacctacatgccagccacctcggcgatgcagggagcatatctgcctcagtacgcccacatgcaaacaactgccgtgccagttgaggaagcatctggtcagcagcaagtggcagtggagacgtcgaacgaccatagtccctacaccttccagcctaataagtag

SEQ ID NO: 267433 - DNA, 1260 bp, Artificial Sequence
  derived and/or modified sequence
atgggcaaggtgtggaagcagcagatgtacccccagtatgccacctactactacccccagtacctgcaggccaagcagagcctggtgcctgcccaccccatggccccacccagccccagcaccaccagcagcaacaacaacagcagcagcagcagcaacagcggctgggaccagctgagcaagaccaacctgtacatccggggcctgcccccccacaccacagaccaggacctggtgaagctgtgccagccctacggcaagatcgtgtccaccaaggccatcctggacaagaccaccaacaagtgcaagggctacggctttgtggactttgacagccctgctgctgcccagaaggctgtgtctgccctgaaggccagcggcgtgcaggcccagatggccaagcagcaggagcaggaccccaccaacctgtacatcagcaacctgcccctgtccatggatgagcaggagctggagaacatgctgaagcccttcggccaggtgatcagcacccgcatcctgcgggacagcagcggcaccagccggggcgtgggctttgccaggatggagagcacagagaagtgtgaggccgtcatcggccacttcaacgggaagttcatcaagaccccacctggggtgtctgcccccacagagcccctgctgtgcaagtttgctgatggcggccagaagaagaggcagaaccccaacaagtacatccccaacggccggccctggcaccgggagggggaggccggcatgaccctgacctatgaccccaccacagctgccatccagaatggcttctaccccagcccctacagcatcgccaccaacaggatgatcacccagaccagcatcaccccctacatcgccagccctgtgtctgcctaccaggtggccaaggagacccgggagaacaagtaccggggcagcgccatcaaggtgcagagccccagctggatgcagccccagccctacatcctgcagcaccctggagctgtgctgacccccagcatggagcacaccatgagcctgcagcctgcctccatgatcagccccctggcccagcagatgagccacctgagcctgggcagcacaggcacctacatgcctgccaccagcgccatgcagggcgcctacctgccccagtatgcccacatgcagaccacagctgtgcctgtggaggaggccagcggccagcagcaggtggccgtggagaccagcaatgaccacagcccctacaccttccagcccaacaagtag

SEQ ID NO: 267434 - DNA, 1260 bp, Artificial Sequence
  derived and/or modified sequence
atgggcaaggtgtggaagcagcagatgtacccccagtacgccacctattattatccccaatacctccaggcaaaacagtctctggttccagcacaccctatggctcctccgtctcctagcactacctcttctaataacaactccagctcgtcttccaattcaggatgggatcagttatcaaagaccaacctctacattcgagggctgcctccccacaccacagaccaggatctggtcaagctgtgccagccatacggcaagattgtgtctaccaaagcaatattggacaaaactaccaataaatgcaagggatatggttttgtggatttcgacagccctgctgccgctcagaaagccgtatcagctctcaaggcctccggtgttcaagctcagatggccaaacagcaggagcaggaccccacaaacctgtacatatccaacctacccttgtcgatggatgagcaagaactggaaaacatgctcaaaccctttggccaggtcatctctaccaggatcctcagggacagctccgggacatctaggggcgtgggatttgcccgcatggagagcactgagaaatgcgaagcagtgatcggccatttcaacggcaagttcatcaaaactccgccaggggtgagtgccccaacagagccattgttgtgtaaatttgccgacggcgggcagaaaaaacggcaaaaccctaataaatatatcccaaacggccgcccttggcacagggagggggaggccggcatgacattaacatatgaccctactacagccgcaatccagaatggcttctacccttcaccgtactctatcgcaaccaacaggatgattacacagacctctattaccccttacatcgcaagccccgtgagtgcgtaccaagtggccaaagaaacccgggagaataagtacaggggctcagccattaaggtccagagtccgagctggatgcagccccaaccgtacatcctgcagcatcccggagctgtcttaactccatccatggaacatactatgagcttacagcctgcctccatgatctcaccccttgcccagcagatgtcccacctgtccctgggctctaccgggacctacatgccagccacttcggctatgcagggtgcctacctgccacaatacgcccacatgcagactaccgctgtgccagtggaggaagcttccgggcaacagcaggtggctgtggagacctctaacgaccacagcccctacacattccaacctaataaatag

SEQ ID NO: 267435 - DNA, 1260 bp, Artificial Sequence
  derived and/or modified sequence
atgggtaaggtttggaaacagcagatgtaccctcagtacgctacatattattaccctcagtatctgcaggcgaagcaatcactggtccctgctcatcctatggcaccaccctcaccttcaactacaagctctaataataacagcagtagttcctctaattcagggtgggatcaactgagcaaaacgaacctgtatatccgaggcctaccgcctcacaccaccgatcaggaccttgtcaaactgtgtcaaccctacggaaagatcgtgtcaactaaggctatcttagataaaaccaccaataagtgcaaagggtatggcttcgtggatttcgattctccggctgctgctcagaaggctgtcagtgcattgaaggccagcggcgtccaggctcagatggccaagcagcaggaacaggacccaacaaatctttatatcagcaatctgcctctatccatggatgaacaggagctggagaatatgctgaaacctttcggccaggtcatcagcacacgtatccttagagattcaagcgggactagtaggggggtgggtttcgccaggatggagtccacagaaaagtgcgaggccgtgatcggacacttcaatggaaaattcatcaagactcccccaggagtgtcggccccaactgagcccttgctttgcaaattcgctgacggagggcagaaaaaaaggcagaatcctaacaaatatatccctaacggtcgcccatggcacagggaaggcgaggccggtatgacacttacctacgatccgaccacagccgctatccagaatggattctatcctagcccctactctatcgcaaccaatcggatgattacccaaacctctatcaccccctacatcgcttcccccgtttcagcttaccaagttgcaaaagagactcgggagaacaaatataggggcagcgccatcaaggttcagtccccatcctggatgcaaccacagccatacattctgcagcatcccggtgccgtactgacgcctagtatggagcatacgatgagcctgcagcccgcatcgatgatctcccctcttgctcagcagatgagtcatttgagcctcgggtcgactggaacctatatgccggcaaccagcgctatgcagggggcttatttaccgcagtatgctcatatgcagactacagcggtccccgtggaagaggcctctgggcaacagcaagtggccgttgagacaagtaacgatcatagtccttatactttccagcccaacaagtag

SEQ ID NO: 267436 - DNA, 1260 bp, Artificial Sequence
  derived and/or modified sequence
atgggcaaggtgtggaagcagcagatgtacccccagtacgccacctactactacccccagtacctgcaggccaagcagagcctggtgcccgcccaccccatggccccccccagccccagcaccaccagcagcaacaacaacagcagcagcagcagcaacagcggctgggaccagctgagcaagaccaacctgtacatcagaggcctgcccccccacaccaccgaccaggacctggtgaagctgtgccagccctacggcaagatcgtgagcaccaaggccatcctggacaagaccaccaacaagtgcaagggctacggcttcgtggacttcgacagccccgccgccgcccagaaggccgtgagcgccctgaaggccagcggcgtgcaggcccagatggccaagcagcaggagcaggaccccaccaacctgtacatcagcaacctgcccctgagcatggacgagcaggagctggagaacatgctgaagcccttcggccaggtgatcagcaccagaatcctgagagacagcagcggcaccagcagaggcgtgggcttcgccagaatggagagcaccgagaagtgcgaggccgtgatcggccacttcaacggcaagttcatcaagaccccccccggcgtgagcgcccccaccgagcccctgctgtgcaagttcgccgacggcggccagaagaagagacagaaccccaacaagtacatccccaacggcagaccctggcacagagagggcgaggccggcatgaccctgacctacgaccccaccaccgccgccatccagaacggcttctaccccagcccctacagcatcgccaccaacagaatgatcacccagaccagcatcaccccctacatcgccagccccgtgagcgcctaccaggtggccaaggagaccagagagaacaagtacagaggcagcgccatcaaggtgcagagccccagctggatgcagccccagccctacatcctgcagcaccccggcgccgtgctgacccccagcatggagcacaccatgagcctgcagcccgccagcatgatcagccccctggcccagcagatgagccacctgagcctgggcagcaccggcacctacatgcccgccaccagcgccatgcagggcgcctacctgccccagtacgcccacatgcagaccaccgccgtgcccgtggaggaggccagcggccagcagcaggtggccgtggagaccagcaacgaccacagcccctacaccttccagcccaacaagtag

SEQ ID NO: 267437 - protein, 2005 aa, Artificial Sequence
  derived and/or modified sequence
MAQSVLVPPGPDSFRFFTRESLAAIEQRIAEEKAKRPKQERKDEDDENGPKPNSDLEAGKSLPFIYGDIPPEMVSVPLEDLDPYYINKKTFIVLNKGKAISRFSATPALYILTPFNPIRKLAIKILVHSLFNMLIMCTILTNCVFMTMSNPPDWTKNVEYTFTGIYTFESLIKILARGFCLEDFTFLRDPWNWLDFTVITFAYVTEFVDLGNVSALRTFRVLRALKTISVIPGLKTIVGALIQSVKKLSDVMILTVFCLSVFALIGLQLFMGNLRNKCLQWPPDNSSFEINITSFFNNSLDGNGTTFNRTVSIFNWDEYIEDKSHFYFLEGQNDALLCGNSSDAGQCPEGYICVKAGRNPNYGYTSFDTFSWAFLSLFRLMTQDFWENLYQLTLRAAGKTYMIFFVLVIFLGSFYLINLILAVVAMAYEEQNQATLEEAEQKEAEFQQMLEQLKKQQEEAQAAAAAASAESRDFSGAGGIGVFSESSSVASKLSSKSEKELKNRRKKKKQKEQSGEEEKNDRVRKSESEDSIRRKGFRFSLEGSRLTYEKRFSSPHQSLLSIRGSLFSPRRNSRASLFSFRGRAKDIGSENDFADDEHSTFEDNDSRRDSLFVPHRHGERRHSNVSQASRASRVLPILPMNGKMHSAVDCNGVVSLVGGPSTLTSAGQLLPEGTTTETEIRKRRSSSYHVSMDLLEDPTSRQRAMSIASILTNTMEELEESRQKCPPCWYKFANMCLIWDCCKPWLKVKHLVNLVVMDPFVDLAITICIVLNTLFMAMEHYPMTEQFSSVLSVGNLVFTGIFTAEMFLKIIAMDPYYYFQEGWNIFDGFIVSLSLMELGLANVEGLSVLRSFRLLRVFKLAKSWPTLNMLIKIIGNSVGALGNLTLVLAIIVFIFAVVGMQLFGKSYKECVCKISNDCELPRWHMHDFFHSFLIVFRVLCGEWIETMWDCMEVAGQTMCLTVFMMVMVIGNLVVLNLFLALLLSSFSSDNLAATDDDNEMNNLQIAVGRMQKGIDFVKRKIREFIQKAFVRKQKALDEIKPLEDLNNKKDSCISNHTTIEIGKDLNYLKDGNGTTSGIGSSVEKYVVDESDYMSFINNPSLTVTVPIAVGESDFENLNTEEFSSESDMEESKEKLNATSSSEGSTVDIGAPAEGEQPEVEPEESLEPEACFTEDCVRKFKCCQISIEEGKGKLWWNLRKTCYKIVEHNWFETFIVFMILLSSGALAFEDIYIEQRKTIKTMLEYADKVFTYIFILEMLLKWVAYGFQVYFTNAWCWLDFLIVDVSLVSLTANALGYSELGAIKSLRTLRALRPLRALSRFEGMRVVVNALLGAIPSIMNVLLVCLIFWLIFSIMGVNLFAGKFYHCINYTTGEMFDVSVVNNYSECKALIESNQTARWKNVKVNFDNVGLGYLSLLQVATFKGWMDIMYAAVDSRNVELQPKYEDNLYMYLYFVIFIIFGSFFTLNLFIGVIIDNFNQQKKKFGGQDIFMTEEQKKYYNAMKKLGSKKPQKPIPRPANKFQGMVFDFVTKQVFDISIMILICLNMVTMMVETDDQSQEMTNILYWINLVFIVLFTGECVLKLISLRYYYFTIGWNIFDFVVVILSIVGMFLAELIEKYFVSPTLFRVIRLARIGRILRLIKGAKGIRTLLFALMMSLPALFNIGLLLFLVMFIYAIFGMSNFAYVKREVGIDDMFNFETFGNSMICLFQITTSAGWDGLLAPILNSGPPDCDPDKDHPGSSVKGDCGNPSVGIFFFVSYIIISFLVVVNMYIAVILENFSVATEESAEPLSEDDFEMFYEVWEKFDPDATQFIEFAKLSDFADALDPPLLIAKPNKVQLIAMDLPMVSGDRIHCLDILFAFTKRVLGESGEMDALRIQMEERFMASNPSKVSYEPITTTLKRKQEEVSAIIIQRAYRRYLLKQKVKKVSSIYKKDKGKECDGTPIKEDTLIDKLNENSTPEKTDMTPSTTSPPSYDSVTKPEKEKFEKDKSEKEDKGKDIRESKK

SEQ ID NO: 267438 - protein, 503 aa, Artificial Sequence
  derived and/or modified sequence
MAQSVLVPPGPDSFRFFTRESLAAIEQRIAEEKAKRPKQERKDEDDENGPKPNSDLEAGKSLPFIYGDIPPEMVSVPLEDLDPYYINKKTFIVLNKGKAISRFSATPALYILTPFNPIRKLAIKILVHSLFNMLIMCTILTNCVFMTMSNPPDWTKNVEYTFTGIYTFESLIKILARGFCLEDFTFLRDPWNWLDFTVITFAYVTEFVDLGNVSALRTFRVLRALKTISVIPGLKTIVGALIQSVKKLSDVMILTVFCLSVFALIGLQLFMGNLRNKCLQWPPDNSSFEINITSFFNNSLDGNGTTFNRTVSIFNWDEYIEDKSHFYFLEGQNDALLCGNSSDAGQCPEGYICVKAGRNPNYGYTSFDTFSWAFLSLFRLMTQDFWENLYQLTLRAAGKTYMIFFVLVIFLGSFYLINLILAVVAMAYEEQNQATLEEAEQKEAEFQQMLEQLKKQQEEAQAAAAAASAESRDFSGAGGIGVFSESSSVASKLSSKSEKELKN

SEQ ID NO: 267439 - DNA, 6018 bp, Artificial Sequence
  derived and/or modified sequence
atggcccaatcagtccttgtgcccccgggaccagactcttttcggttcttcacaagagaaagccttgccgcaattgaacagaggatcgccgaagagaaggcaaaacggcccaagcaagaacgcaaggacgaagacgacgagaatggccctaaaccgaattcagatctggaagcagggaagtccctcccttttatctatggggatatacccccagaaatggtttctgtgcccttagaggacctggatccatactacatcaataaaaagacttttatcgtgttgaacaaaggaaaggcgataagcagattctctgccacgcccgccctctacatacttacacctttcaatccgattcgcaagctggccatcaagatattagtgcactccttgtttaatatgctgattatgtgtacgatcctcacaaactgtgtgttcatgacaatgagtaatccgcctgactggactaagaatgtagagtacaccttcaccggcatctacacctttgagagtttgataaaaatcctggcaagaggcttctgcctcgaggacttcacctttcttcgggatccctggaactggctcgatttcacagttatcacctttgcctacgttacagagttcgtcgatctgggcaacgtcagtgcccttcgcaccttcagagtactcagagcactcaaaacgataagcgtgatcccaggcctgaaaaccatagtcggagctctgatccagtctgtgaagaagcttagcgacgtcatgattttgaccgtcttctgcctatctgtcttcgcactgattgggctccagctgtttatgggcaatttacggaataagtgccttcagtggccacccgacaactctagctttgaaataaatattacgagcttcttcaataatagtttagacggcaacggaaccaccttcaacagaacagtttctatttttaattgggatgagtatatcgaagacaaatcccatttttattttctcgaaggtcaaaacgacgctctgctgtgcggcaactcctccgacgctgggcagtgccccgaggggtacatttgtgtcaaagcggggcgtaaccctaattacggatacacatctttcgacaccttctcctgggccttcctatcgttatttcgcctgatgacacaggatttctgggagaatctatatcagcttacattgagagccgccggtaagacgtatatgatcttctttgtgctggtcatctttctgggctccttttacctgattaaccttattcttgcagtggtagcaatggcctatgaagagcagaatcaagcaacattagaagaggctgagcagaaagaagctgagttccagcagatgcttgagcagcttaagaagcagcaggaagaggcacaggccgcagccgctgcagctagcgcagagagtagggatttcagcggggccggtggtattggagttttcagcgaatcaagctctgtcgcttcaaaactttcctctaaaagcgagaaggaattaaaaaacaggaggaagaagaagaagcagaaggagcaaagcggcgaggaagaaaagaatgacagagtgcggaagtctgaaagcgaggatagtattcgcagaaaaggctttcgattctcactggaagggtctcgtcttacttacgaaaagaggtttagcagcccacaccagtccctgttgtccatcagagggtccttgttcagtccaaggcgcaactcccgggccagcctcttctccttcagggggcgcgccaaggatattggtagcgagaatgattttgcagacgatgaacacagtactttcgaagacaatgactcacggcgcgattcactgtttgtgccacataggcacggtgagcgcaggcatagtaatgtgagccaggcatccagagccagccgcgttctccccatcctccctatgaatggcaagatgcacagcgccgtcgactgtaacggggtggtgagcctggtgggagggccaagtacccttacaagtgccggacagttgttaccagagggtaccactaccgagaccgagatacgaaagcggcgcagcagctcctatcacgttagcatggaccttctggaggacccaacttcccgccagcgggccatgagcattgcctcaatcctgacaaatactatggaggagcttgaggagtcccggcaaaagtgccctccatgttggtataagtttgccaacatgtgcttgatttgggattgctgtaagccatggctgaaagtcaagcatcttgtgaacctggttgtcatggacccattcgtagatctcgctataaccatatgcatcgtactcaataccctctttatggcaatggagcattatccgatgaccgaacaattttcatcggtcctaagcgtgggcaacctggtcttcactggcatctttactgctgagatgtttctgaaaatcatcgccatggacccatactactatttccaggaaggatggaacatttttgacgggttcatcgtgtccctgagtctgatggaactggggctagctaacgtggagggattatctgtgctcaggagcttccgtctgttaagggtcttcaagttggcgaagtcttggcctaccttaaacatgctgatcaagatcatcggcaatagcgtcggagccctcggaaatctgaccctcgtcctcgccatcatcgtctttatttttgccgttgtggggatgcagctgtttggaaaatcttacaaggaatgcgtgtgtaaaatctccaacgattgcgaattgccaaggtggcacatgcatgacttcttccactctttcctcattgtgtttcgcgtgctttgcggggagtggattgaaaccatgtgggattgcatggaggtggctgggcagactatgtgtctcactgtgttcatgatggtgatggttatcggcaaccttgtggtgctcaacctgttccttgccctgcttctgagcagtttttcctccgacaaccttgccgccacagatgatgacaacgagatgaataatctccagattgctgtgggacggatgcagaagggcatcgactttgtcaagcgcaaaattcgcgaattcattcagaaggcctttgtgcggaaacagaaggccctggatgagatcaaacccctcgaggatctcaacaacaagaaagactcatgtatctctaatcacaccacaatcgaaattggaaaggacctgaactacttgaaagacgggaacgggaccacgtcagggatcgggagttctgtggaaaaatacgtcgtggatgaatctgactatatgagcttcattaataatccttcactgactgtgactgtacccattgcagtaggagaaagcgacttcgagaacctgaatactgaggaattcagtagcgagagtgacatggaggaatccaaagagaaactaaatgccaccagtagctcagaaggctcgacagttgacataggtgcccccgcggagggagaacagcccgaagtcgagcccgaagagtctctggaacccgaggcttgcttcacggaagattgtgtaagaaagtttaagtgctgtcagatcagtatagaggaaggaaagggaaagctatggtggaatttaaggaaaacttgttacaaaatagttgagcataattggttcgagacattcatcgtgttcatgattctgctgtcgtccggcgccctggcctttgaagatatctacattgagcagagaaagaccatcaaaacaatgctcgagtacgctgataaggtcttcacatacattttcatacttgaaatgctactgaagtgggtagcctacggatttcaagtttactttacgaacgcttggtgttggctggactttctcattgtggatgtctctttagttagtctgacggctaacgctctgggatactctgaattgggagccatcaaaagcctgcgcacacttcgagctctcagacccctgcgcgcattatcgcggttcgagggcatgcgtgtagtggttaatgcactgctgggtgccatccctagtattatgaacgtccttctggtctgccttattttctggctgattttcagcatcatgggtgtgaatctgttcgcaggcaagttttatcactgcatcaactacactacaggagagatgtttgacgtatccgttgtcaataattacagcgagtgtaaggcgctgattgaatccaaccagacggccagatggaagaatgtcaaggtgaattttgacaatgtgggcctcggctacctaagccttctccaagttgcaacctttaaagggtggatggacatcatgtatgcagccgtggattcccgcaacgtggaactccaaccaaagtacgaggacaacctgtacatgtacctgtattttgtcatatttattatattcggctcattctttaccttgaacctgttcatcggcgtgatcatcgataatttcaatcagcagaaaaagaagttcggtggtcaagacatcttcatgaccgaggagcagaaaaagtattataatgccatgaagaagctgggatcaaagaagcctcaaaaacccatccccagaccagctaataagttccaggggatggtgtttgactttgtgactaagcaggtgttcgacataagcatcatgatcctgatctgcctcaatatggtgaccatgatggtggaaactgatgaccagtcccaagagatgactaatatcttgtactggatcaacttggtctttatcgtgctctttaccggcgaatgcgtgctcaaactgatcagcctccgctactattactttacaatcggctggaatatctttgacttcgtggtggtaatcctgtctatcgtgggcatgttcctagcggaactgatcgaaaagtatttcgtgtctccaaccctgtttagagtcatacgcctggcacgcattgggcggatactgcgcctcattaaaggcgcgaaaggcatccggacactgctatttgcacttatgatgagtctgcccgccctgttcaatattgggcttttgctctttttggttatgttcatctatgctatcttcgggatgtccaacttcgcctacgtcaaaagagaagtgggcatcgatgatatgttcaacttcgagacattcggaaatagtatgatctgcctcttccagattacaacttccgccggctgggacggtctcctggcccctattctgaactccgggcctccagactgcgaccctgacaaggatcaccccggctccagcgtgaaaggggattgtgggaaccccagcgtcggcatcttttttttcgtgagctacattatcatctcatttctcgtggtcgttaacatgtacatcgcagttatactcgaaaacttctctgttgccaccgaggagagcgcggagcctctttccgaggatgattttgaaatgttctacgaggtatgggaaaaatttgatcctgacgccacccaatttatcgaatttgcaaagttgtctgattttgctgacgcacttgacccaccattactgattgcaaagccaaataaagtgcagcttatcgccatggacctaccaatggtgagcggtgatcggattcattgcttggacatcctgttcgcctttaccaagagggttctcggcgagtccggcgagatggacgctctaaggatccagatggaagaaaggttcatggctagcaacccatcaaaagtgtcatatgagcccattactaccaccctcaaacggaaacaagaggaggtctcagccataataatacagagggcatacaggagatatttactgaaacagaaagtaaagaaggtgtccagtatctataagaaggataaagggaaggaatgcgatggcactcctataaaagaggataccttgattgacaagcttaatgaaaactctacaccagagaaaacagatatgacacccagtaccacatcccctcccagctacgacagcgttactaaaccagaaaaagagaagttcgagaaggacaagtccgaaaaggaagacaaaggcaaggatatcagggaaagtaagaagtag

SEQ ID NO: 267440 - DNA, 6018 bp, Artificial Sequence
  derived and/or modified sequence
atggcacagtctgtgttggtgccccctggacctgattcatttaggttctttacaagggagagcctggccgcaattgagcagcgaatcgctgaagagaaggcaaaacggccaaaacaagaacgcaaggacgaggatgatgagaatggccctaaacccaacagtgatcttgaggccgggaagagcctgcctttcatctacggagatatccctcctgaaatggttagcgtaccactcgaggacctcgatccatattatattaacaagaaaaccttcattgtgttgaacaaagggaaggctatctctagattcagtgcgacacccgctctttacattctgaccccctttaaccctattagaaaactggctattaaaattctcgtgcatagtttattcaacatgcttattatgtgtactatactcacgaactgcgtattcatgacgatgagtaatccccccgattggaccaaaaacgtcgagtatacgttcactgggatctacacctttgagagtctaataaagatcctcgctcgcggcttctgcttggaggacttcacattcctaagagacccctggaactggctcgacttcacggtcataacgtttgcatacgtaactgagttcgttgacctcggaaatgtgagtgctctacgaacctttcgcgtgctgagagctctgaagactataagcgtgatcccgggcttgaaaaccatcgtcggagcacttattcagagtgtcaaaaagctcagtgacgtcatgattcttactgtgttttgcctgtcagtgtttgcactgatcggactgcaattgttcatggggaacttgcgcaataaatgtttgcagtggccacccgataactcctctttcgagatcaacatcacctcattctttaacaatagccttgatggaaatggtaccacctttaatcggaccgttagtattttcaattgggacgagtacatagaggacaaatcccatttctatttcctggaagggcagaacgatgccctgctgtgcggaaatagctctgatgcaggacagtgccccgagggatacatttgcgtgaaagctggtagaaatcccaactacggctacaccagtttcgatactttttcatgggcatttctgagcctgtttagactcatgacgcaagacttctgggagaatctgtatcagttaacactgagagccgccggaaagacttatatgatcttcttcgtgctggtgatcttcctcggatcgttctaccttataaatttgatcctggccgtagtggccatggcctacgaggagcagaatcaggcaactctcgaggaggctgaacagaaagaagctgagttccagcaaatgcttgaacaactaaagaagcagcaagaagaggctcaagcagccgcagctgccgcatctgccgaatcaagagacttcagtggcgctggaggaattggggtgttctctgaatcatcctcggttgcttctaagctgtccagtaagtccgaaaaagagctcaagaaccgtaggaagaagaaaaaacagaaagagcagtctggcgaagaagaaaaaaacgatagggtcagaaaaagcgagagcgaggatagcattcgcagaaaaggttttaggttctctctggaaggcagtcgtctcacatatgagaagaggttctcctctccacaccagagcctgctttctattagagggtccttgtttagcccccgccgaaacagccgggctagtttgttctcattccgaggcagggccaaagatatcgggtctgagaacgatttcgccgacgacgaacattccacttttgaagacaacgattctcgccgcgattcgctgttcgtgcctcatcgccatggtgagcgacgccactccaacgttagtcaggccagtagggcctcccgtgtactgcccatcttacctatgaacgggaaaatgcattctgcagtcgactgcaacggcgtggtgtctctcgtgggcggcccgtccacccttacgtccgccggtcagctgcttcctgaaggcacaacgacggagactgagatccgaaagagacggtcttcgtcctaccatgttagtatggacctgctcgaggaccctacatcccgacagcgcgcaatgagtattgcttccattctaaccaatactatggaggagttggaagaaagtaggcagaagtgtcctccctgttggtacaagtttgctaacatgtgccttatctgggattgctgcaagccctggctaaaggtgaagcacctcgtgaacctcgtggtgatggacccttttgtagacttggccatcacaatttgtattgtcctcaataccttgtttatggctatggagcattacccaatgacagaacagttttcatctgtcctgtccgtggggaacctggtattcaccggaatcttcaccgccgagatgtttctgaagatcattgcaatggatccctattactacttccaggagggctggaatatcttcgacggattcatcgtgagcctctcgctgatggagctgggactggctaacgtggaaggtctgagcgtgctgcggtcctttcgcctactccgggtgtttaagctcgcaaaatcatggccaacactcaacatgctgattaaaatcataggaaatagtgtcggcgctctcgggaatctgaccttagtcttagctatcatcgtcttcatctttgctgtggtcgggatgcaactattcggcaagtcatacaaggagtgcgtgtgtaaaattagcaacgactgtgagctcccccggtggcacatgcacgacttttttcacagttttctcatagtgtttcgggtgctgtgtggagagtggatcgaaactatgtgggactgtatggaagtcgccgggcagactatgtgcctgacagtgtttatgatggttatggtgattggcaatctcgtcgtcttaaatctgtttctcgctttattgctttcttcgttctcctccgacaatctggctgcgacagatgacgataacgaaatgaataatctacagatcgcagtcggcaggatgcagaaaggaattgacttcgtgaagcggaagatacgcgagttcatccaaaaagctttcgtgcgaaagcaaaaagcattagatgagattaagcctctggaggacttaaataacaagaaggactcatgcatttcaaaccacaccaccatcgagatcgggaaggacctgaactatttaaaagatggaaatgggacgacctcaggaatcgggtcttctgtggaaaaatatgtcgtggacgaatcagattacatgagcttcatcaataatccctcactcaccgtgacggttcctattgcggtcggagagtccgattttgagaatctgaatactgaggaatttagttccgaaagcgacatggaggagtccaaggagaagctgaacgctactagttccagcgagggatccactgtggacattggagcaccagctgagggggagcagcctgaggtcgaacccgaagagagccttgaacccgaagcctgctttactgaggattgcgttcgcaagttcaaatgttgccagatctctattgaggaggggaaaggcaaactctggtggaatctccgcaaaacctgttacaaaatcgtggagcacaactggtttgaaacctttattgtctttatgatccttttaagctccggcgccctcgccttcgaagacatttacatcgagcagaggaagactattaagaccatgctcgagtacgccgacaaagtgtttacttatatatttattctggaaatgttgctgaagtgggttgcatatggatttcaggtgtatttcacaaatgcctggtgctggcttgattttcttatcgtggacgtatccctcgtctcccttacagctaatgctttaggatattcagagctgggcgccattaaaagtctgagaacactccgggccctccgccctttgcgggccctgagccggtttgaaggcatgcgagtcgtagttaacgctctgctgggcgccatacctagcataatgaacgttctgctcgtctgcctgattttttggttgattttctccattatgggggtgaatctttttgccggaaaattctaccattgtatcaactacaccacaggagaaatgtttgacgtaagcgtcgtgaacaactactcagagtgcaaggccctgattgagtccaatcaaacagcgagatggaagaacgtaaaggtaaatttcgataatgtgggtctgggctatttaagcctattgcaggtggcaacttttaaaggctggatggacattatgtatgcagcagtggactcacgaaacgttgagctgcagcctaagtacgaagacaatttgtacatgtatctgtatttcgtgatttttatcatctttggatctttctttactttaaatctcttcattggagtgatcatcgacaatttcaatcagcagaagaagaagtttggcggtcaggacattttcatgacagaggagcagaaaaaatactataacgccatgaagaaactcggctccaagaagccacagaagcctataccgaggcccgccaataagtttcaggggatggttttcgattttgtgacaaagcaggtgttcgacatatctataatgatactgatctgcctgaatatggtgaccatgatggtggaaacggacgatcaaagtcaggagatgactaatatattatactggataaacctcgtgtttattgtcctatttacaggggaatgcgttctcaagctgataagtctcaggtactactattttactatcggctggaacatatttgactttgtggtggttattctttcaattgtaggaatgtttctcgcagaactgatcgaaaagtatttcgtgtctccgacactgttcagggtgattaggctggctcggattggccggatattacgcttgattaagggtgccaaaggtatacggacgctcctgtttgccttgatgatgtcactgccagcactttttaatattggacttctcctgtttctcgtcatgttcatatacgccatcttcggaatgtccaactttgcctacgtgaaaagagaagtgggaatcgatgacatgtttaactttgaaacttttggcaatagcatgatttgcctctttcagattacaacctccgcgggctgggacggcctactcgcacctattctgaactccgggcctcctgattgtgatcccgacaaggatcatcctggtagctcagttaaaggcgattgcggtaacccctcagtcgggattttcttcttcgtctcatacataatcataagctttcttgtggtcgtgaatatgtatatcgccgtgattcttgagaattttagtgtagctacagaagaaagtgccgaacctctatccgaagacgacttcgaaatgttctacgaagtttgggaaaaattcgatcctgacgctacccagttcatagaattcgccaaactgtcagactttgccgacgccctagaccctcccctcctgattgccaaacccaataaggtccaacttattgcaatggacctccctatggttagcggcgaccggattcactgtctcgatattctgtttgcttttaccaaaagagtgcttggcgagagcggcgagatggacgcgttacggatacaaatggaggagcggttcatggcttcaaaccccagcaaggtgagctacgaacccatcacaaccactctaaagagaaaacaagaggaggtgtccgccatcattattcaaagggcatatcgtaggtatctcttaaaacagaaggtgaagaaagtgagctccatttacaaaaaggacaagggaaaagaatgcgatggtacacccatcaaagaggatacactgattgataagttgaacgagaatagtacaccggagaaaactgacatgacaccttccacaaccagccctccgagttacgatagcgtcacaaaacctgagaaagaaaagttcgagaaggacaagtctgaaaaggaggataaaggtaaagacattcgggagagcaagaaatag

SEQ ID NO: 267441 - DNA, 1512 bp, Artificial Sequence
  derived and/or modified sequence
atggcgcaaagcgtgctcgtgcctccaggccctgattctttccgcttctttacccgagagtctttggcggctattgagcagaggattgctgaggaaaaagcgaaaaggcccaagcaggaacgcaaggatgaagatgatgagaatgggcccaaaccaaatagcgacctcgaagctgggaaatcgctgcccttcatctatggggatatcccacctgagatggtcagcgtgcccctggaggacttagacccatattacattaataagaaaactttcatcgtgctgaataaggggaaggctatatctagattctccgccactccagcactgtacatcctgacaccattcaaccctatacgcaaattggcaattaagatccttgtgcatagtctgtttaatatgctgatcatgtgcactatattaactaattgtgtgttcatgacgatgagtaacccaccggactggacaaaaaacgttgaatacacgttcacaggcatatataccttcgaatctcttataaaaatcctcgctcggggtttttgcctggaggattttacttttctgcgcgatccatggaactggctggattttacagttataactttcgcgtacgtcacagagttcgtggacttggggaatgtgtctgccctaagaaccttcagagtgctgcgtgcgttaaaaaccataagtgtgattccaggtctgaaaaccattgtcggcgctctcatccaatcggtaaagaagttatctgacgtgatgatactcacggtgttctgtttgtcagtttttgccctcatcggcctgcagctgttcatgggcaatctgcgtaacaaatgcctgcagtggcccccagacaattcatcattcgaaatcaatattacaagcttcttcaacaattccctcgatggcaacgggaccacgttcaacaggaccgtttccatcttcaattgggacgaatacatagaagataaaagtcacttctacttcctcgagggtcaaaatgacgcactcttgtgcggcaactctagtgatgctggtcagtgtccagaggggtacatttgtgtcaaggcaggtcggaatcctaattacgggtatacatcttttgatacattcagttgggcttttctttcactgttcaggcttatgacgcaggatttctgggaaaacctgtaccagctgacactccgtgccgccggtaagacctacatgatcttcttcgtcttggtcattttcctcggttctttctatctgatcaacctgatattagccgtcgtggccatggcttatgaagagcagaatcaggcaaccttggaggaagccgagcagaaggaagccgagtttcaacagatgctcgagcaactgaaaaaacaacaggaggaggcgcaggccgctgcagccgccgcgtccgctgaaagcagggactttagtggcgccggtggaatcggagtatttagtgaaagttccagcgtggcctctaaactgtcaagcaagagtgaaaaggaacttaaaaattag

SEQ ID NO: 267442 - DNA, 6018 bp, Artificial Sequence
  derived and/or modified sequence
atggcccagagcgtgctggtgcccccaggccctgacagcttccgcttcttcacccgggagagcctggccgccatcgagcagagaattgctgaggagaaggccaagaggcccaagcaggagaggaaggatgaagatgatgaaaatggccccaagcccaacagcgacctggaggccggcaagagcctgcccttcatctacggggacatccccccagagatggtgtctgtgcccctggaggacctggacccctactacatcaacaagaagaccttcatcgtgctgaacaagggcaaggccatcagccgcttcagcgccaccccagccctgtacatcctgacccccttcaaccccatcaggaagctggccatcaagatcctggtgcacagcctcttcaacatgctgatcatgtgcaccatcctgaccaactgtgtgttcatgaccatgagcaaccccccagactggaccaagaatgtggagtacaccttcaccggcatctacacctttgagagcctcatcaagatcctggcccggggcttctgcctggaggacttcaccttcctgcgggacccctggaactggctggacttcaccgtcatcacctttgcctacgtgacagaatttgtggacctgggcaatgtgtctgccctgcggaccttccgggtgctgcgggccctgaagaccatcagcgtcatccctggcctgaagaccatcgtgggcgccctgatccagagcgtgaagaagctgagtgatgtgatgatcctgactgtgttctgcctgtctgtgtttgccctgattggcctgcagctgttcatgggcaacctgaggaacaagtgcctgcagtggcccccagacaacagcagctttgagatcaacatcaccagcttcttcaacaacagcctggatggaaatggcaccaccttcaacagaacagtgtccatcttcaactgggatgagtacatcgaggacaagagccacttctacttcctggagggccagaatgatgccctgctgtgtggcaacagcagtgatgctggccagtgcccagagggctacatctgtgtgaaggccggcaggaaccccaactacggctacaccagctttgacaccttctcctgggccttcctgagcctcttccggctgatgacccaggacttctgggagaacctgtaccagctgaccctgcgggctgctgggaagacctacatgatcttctttgtgctggtgatcttcctgggcagcttctacctgatcaacctgatcctggccgtggtggccatggcctatgaggagcagaaccaggccaccctggaggaggccgagcagaaggaggccgagttccagcagatgctggagcagctgaagaagcagcaggaggaggcccaggccgctgctgctgctgccagcgctgagagccgggacttctctggagctgggggcatcggggtcttcagcgagagcagctctgtggccagcaagctgagcagcaagtctgagaaggagctgaagaacagaaggaagaagaagaagcagaaggagcagagcggggaggaggagaagaatgacagagtgaggaagtctgagagtgaagattccatccggaggaagggcttccgcttcagcctggagggcagccggctgacctatgagaagcgcttcagcagcccccaccagagcctgctgagcatccggggcagcctcttcagccccaggaggaacagccgggccagcctcttctccttccggggccgggccaaggacatcggctctgaaaatgactttgctgatgatgagcacagcacctttgaggacaatgacagcagaagagacagcctgtttgtgccccacagacatggagagcggcggcacagcaatgtgtcccaggccagccgggccagccgggtgctgcccatcctgcccatgaatggcaagatgcacagcgctgtggactgcaatggagtggtgtccctggtgggcggccccagcaccctgaccagcgctggccagctgctgcctgagggcaccaccacagaaacagagatcaggaagagaagaagcagcagctaccacgtgtccatggacctgctggaggaccccaccagccggcagagggccatgagcatcgccagcatcctgaccaacaccatggaggagctggaggagagccggcagaagtgccccccctgctggtacaagtttgccaacatgtgcctgatctgggactgctgcaagccctggctgaaggtgaagcacctggtgaacctggtggtgatggacccctttgtggacctggccatcaccatctgcatcgtgctgaacaccctcttcatggccatggagcactaccccatgacagagcagttcagctctgtgctgtctgtgggcaacctggtgttcaccggcatcttcaccgctgagatgttcctgaagatcatcgccatggacccctactactacttccaggagggctggaacatctttgatggcttcatcgtgtccctgagcctgatggagctgggcctggccaacgtggagggcctgtctgtgctgcgctccttccggctgctgcgggtcttcaagctggccaagtcctggcccaccctgaacatgctgatcaagatcatcggcaacagcgtgggcgccctgggcaacctgaccctggtgctggccatcatcgtgttcatctttgctgtggtgggcatgcagctgtttgggaagagctacaaggaatgtgtgtgcaagatcagcaatgactgtgagctgccccgctggcacatgcatgacttcttccacagcttcctgattgtgttccgggtgctgtgtggggagtggattgagaccatgtgggactgcatggaggtggccggccagaccatgtgcctgactgtgttcatgatggtgatggtgattggcaacctggtggtgctgaacctcttcctggccctgctgctgagcagcttcagcagtgacaacctggccgccacagatgatgacaatgagatgaacaacctgcagattgctgtgggccgcatgcagaagggcatcgactttgtgaagaggaagatccgggagttcatccagaaggcctttgtgaggaagcagaaggccctggatgagatcaagcccctggaggacctgaacaacaagaaggacagctgcatcagcaaccacaccaccattgaaattggcaaggacctgaactacctgaaggatggaaatggcaccaccagcggcatcggcagctctgtggagaagtatgtggtggatgaaagtgactacatgtccttcatcaacaaccccagcctgactgtgacagtgcccatcgctgtgggggagagtgactttgagaacctgaacacagaggagttcagcagcgagagtgacatggaggagagcaaggagaagctgaatgccaccagcagcagcgagggcagcacagtggacatcggggccccagctgagggggagcagcctgaggtggagcctgaggagagcctggagcctgaggcctgcttcacagaggactgtgtgaggaagttcaagtgctgccagatcagcattgaggagggcaagggcaagctgtggtggaacctgaggaagacctgctacaagatcgtggagcacaactggtttgagaccttcatcgtgttcatgatcctgctgagcagcggggccctggcctttgaggacatctacatcgagcagaggaagaccatcaagaccatgctggagtatgctgacaaggtgttcacctacatcttcatcctggagatgctgctgaagtgggtggcctacggcttccaggtgtacttcaccaatgcctggtgctggctggacttcctgattgtggatgtgtccctggtgtccctgacagccaatgccctgggctacagcgagctgggcgccatcaagagcctgcggaccctgcgggccctgcggcccctgcgggccctgagcagatttgagggcatgagggtggtggtgaatgccctgctgggcgccatccccagcatcatgaatgtgctgctggtgtgcctgatcttctggctgatcttcagcatcatgggcgtgaacctgtttgctgggaagttctaccactgcatcaactacaccactggagagatgtttgatgtgtctgtggtgaacaactacagcgagtgcaaggccctgattgagagcaaccagacagcccgctggaagaatgtgaaggtgaactttgacaacgtgggcctgggctacctgagcctgctgcaggtggccaccttcaagggctggatggacatcatgtatgctgctgtggacagcagaaatgtggagctgcagcccaagtatgaggacaacctgtacatgtacctgtactttgtgatcttcatcatcttcggcagcttcttcaccctgaacctcttcatcggggtcatcatcgacaacttcaaccagcagaagaagaagtttggaggccaggacatcttcatgacagaggagcagaagaagtactacaatgccatgaagaagctgggcagcaagaagccccagaagcccatccccaggcctgccaacaagttccagggcatggtgtttgattttgtgaccaagcaggtgtttgacatcagcatcatgatcctgatctgcctgaacatggtgaccatgatggtggagacagatgaccagagccaggagatgaccaacatcctgtactggatcaacctggtgttcatcgtgctcttcaccggagaatgtgtgctgaagctgatcagcctgcgctactactacttcaccatcggctggaacatctttgattttgtggtggtgatcctgagcatcgtgggcatgttcctggccgagctgattgagaagtactttgtgagccccaccctcttccgggtcatccggctggccagaattggccgcatcctgcggctcatcaagggggccaagggcatccgcaccctgctgtttgccctgatgatgagcctgcctgccctcttcaacatcggcctgctgctcttcctggtgatgttcatctatgccatcttcggcatgagcaactttgcctacgtgaagcgggaggtgggcattgatgacatgttcaactttgagaccttcggcaacagcatgatctgcctcttccagatcaccaccagcgctggctgggatggcctgctggcccccatcctgaacagcggccccccagactgtgaccctgacaaggaccaccctggcagctctgtgaagggggactgtggcaaccccagcgtgggcatcttcttctttgtgtcctacatcatcatctccttcctggtggtggtgaacatgtacatcgctgtgatcctggagaacttctctgtggccacagaggagagcgctgagcccctgtctgaagatgactttgagatgttttatgaggtgtgggagaagtttgatcctgatgccacccagttcattgaatttgccaagctgagtgactttgctgatgccctggacccccccctgctgattgccaagcccaacaaggtgcagctgattgccatggacctgcccatggtgtctggggaccgcatccactgcctggacatcctgtttgccttcaccaagagggtgctgggggagagcggggagatggatgccctgcgcatccagatggaggagcgcttcatggccagcaaccccagcaaggtgtcctatgagcccatcaccaccaccctgaagaggaagcaggaggaggtgtctgccatcatcatccagagggcctaccgccgctacctgctgaagcagaaggtgaagaaggtgagcagcatctacaagaaggacaagggcaaggaatgtgatggcacccccatcaaggaggacaccctgattgacaagctgaatgaaaacagcaccccagagaagacagacatgacccccagcaccaccagcccccccagctatgattctgtgaccaagccagagaaggagaagtttgagaaggacaagtctgagaaggaggacaagggcaaggacatccgggagagcaagaagtag

SEQ ID NO: 267443 - DNA, 1512 bp, Artificial Sequence
  derived and/or modified sequence
atggcccagagcgtgctggtgcccccaggccctgacagcttccgcttcttcacccgggagagcctggccgccatcgagcagagaattgctgaggagaaggccaagaggcccaagcaggagaggaaggatgaagatgatgaaaatggccccaagcccaacagcgacctggaggccggcaagagcctgcccttcatctacggggacatccccccagagatggtgtctgtgcccctggaggacctggacccctactacatcaacaagaagaccttcatcgtgctgaacaagggcaaggccatcagccgcttcagcgccaccccagccctgtacatcctgacccccttcaaccccatcaggaagctggccatcaagatcctggtgcacagcctcttcaacatgctgatcatgtgcaccatcctgaccaactgtgtgttcatgaccatgagcaaccccccagactggaccaagaatgtggagtacaccttcaccggcatctacacctttgagagcctcatcaagatcctggcccggggcttctgcctggaggacttcaccttcctgcgggacccctggaactggctggacttcaccgtcatcacctttgcctacgtgacagaatttgtggacctgggcaatgtgtctgccctgcggaccttccgggtgctgcgggccctgaagaccatcagcgtcatccctggcctgaagaccatcgtgggcgccctgatccagagcgtgaagaagctgagtgatgtgatgatcctgactgtgttctgcctgtctgtgtttgccctgattggcctgcagctgttcatgggcaacctgaggaacaagtgcctgcagtggcccccagacaacagcagctttgagatcaacatcaccagcttcttcaacaacagcctggatggaaatggcaccaccttcaacagaacagtgtccatcttcaactgggatgagtacatcgaggacaagagccacttctacttcctggagggccagaatgatgccctgctgtgtggcaacagcagtgatgctggccagtgcccagagggctacatctgtgtgaaggccggcaggaaccccaactacggctacaccagctttgacaccttctcctgggccttcctgagcctcttccggctgatgacccaggacttctgggagaacctgtaccagctgaccctgcgggctgctgggaagacctacatgatcttctttgtgctggtgatcttcctgggcagcttctacctgatcaacctgatcctggccgtggtggccatggcctatgaggagcagaaccaggccaccctggaggaggccgagcagaaggaggccgagttccagcagatgctggagcagctgaagaagcagcaggaggaggcccaggccgctgctgctgctgccagcgctgagagccgggacttctctggagctgggggcatcggggtcttcagcgagagcagctctgtggccagcaagctgagcagcaagtctgagaaggagctgaagaactag

SEQ ID NO: 267444 - DNA, 6018 bp, Artificial Sequence
  derived and/or modified sequence
atggcccagagcgtgctggtgccccccggccccgacagcttccggttcttcactcgcgaaagtctagcagccattgagcagaggatcgcagaagagaaagccaagcgcccgaagcaggagcggaaggatgaggacgatgaaaacgggccaaagcctaattcagacctggaggccggcaagtccctgccattcatctacggagacattccccctgagatggtttcagtgccgctcgaggatctcgatccgtactacatcaacaaaaaaaccttcatagttctaaacaagggaaaagccatttctagattcagcgccacacccgccctgtacatactcacgccatttaatcctatcagaaaactcgcaataaagattctggtccacagcctttttaacatgctcattatgtgcactatactcaccaactgtgtattcatgacaatgagcaaccccccggactggaccaaaaatgtggaatacactttcacaggcatttatacttttgaatctctcattaaaatcttagcccggggcttttgcttagaggactttacttttctgcgcgatccctggaattggctggatttcaccgtgataacattcgcctacgtgaccgaatttgtggatctggggaatgtatcggcactgcggacctttcgcgtccttcgagcactgaagaccatcagtgtgattcccggcttaaagacaatcgtcggagccctgatccaatctgtcaagaagttgagtgacgtgatgatactgacagtgttttgcctgtccgtctttgccctcatcggcttgcaactgttcatgggaaatttgcggaataagtgtctgcagtggcccccagataactcctccttcgagattaacatcaccagcttttttaataattccctggatggcaacggcacaacctttaatcggacggtttctatttttaactgggacgagtacattgaagacaaaagccatttctatttcttggaggggcagaacgacgctctgttatgcggtaacagtagcgacgcgggtcagtgccccgaagggtatatttgcgtgaaggccgggcgaaatcctaactatggttataccagttttgatacattctcctgggcatttttatcactgttcaggctgatgacacaggacttttgggaaaacttgtaccagctgacactgcgcgcggcaggcaagacctatatgatttttttcgtccttgtcattttcctgggctccttctatctaataaatttgatccttgcagtggtagctatggcatacgaggagcagaatcaggcaacgttagaagaagcagagcagaaggaggccgagtttcagcaaatgttagagcaactgaaaaagcagcaggaagaagcacaagcggccgctgccgctgcctctgctgagagccgggacttcagcggtgctggggggatcggagtcttctcagagagcagttcagttgcctccaaactgtcaagcaagtccgaaaaggagttaaaaaaccgaaggaagaagaagaagcaaaaggagcaaagtggagaggaggagaagaacgatcgagttcgcaaatcggaatccgaagacagcattagacgcaagggcttccggttctcacttgaggggagccgtctaacatacgagaaaaggttcagttctccccatcagtccttgctgagcattagaggatcattattcagccccagaaggaacagtcgcgctagccttttttcattcagggggcgcgccaaagacatcgggtctgagaatgactttgccgacgacgagcacagcacctttgaggataacgactctaggagggacagcctctttgtgccccaccggcatggcgagcgccgccactccaatgtgtcccaggcgtcacgggcgtcccgcgttctgcccatacttccgatgaacggcaagatgcactctgcagtggattgcaatggtgtggtgtccctggtgggcggcccttctacactgacaagcgctgggcaactcctcccagagggtaccactacagagactgaaattcggaagaggcgctccagcagttatcacgtgtctatggacctgctggaagatcccacctcgcggcagagggcaatgtcaatcgcttctattctgacgaatacaatggaagagctggaggagagtcggcagaagtgccccccgtgttggtacaaattcgctaacatgtgtcttatttgggattgctgcaagccctggttaaaagttaaacatctcgtcaacctcgtcgtcatggacccttttgtggatcttgcgattacaatctgcatcgtcctgaacactttgtttatggctatggagcactatccaatgacagaacaattttcatccgtcctatctgttgggaacctagtgttcactggcatcttcacagctgagatgttcctgaagatcattgctatggatccctattattatttccaggagggctggaacattttcgatggtttcattgtgagcctctccctcatggaactcggcttggccaatgtcgagggcctgagtgtgttgagatccttccgcctgctgcgcgtcttcaaactcgccaagtcctggcctacactgaacatgctgattaaaatcatcgggaatagcgttggcgctctcggcaatctgaccttggtgttggctatcattgtcttcatttttgctgtggtggggatgcagctgttcgggaagtcctacaaagaatgcgtgtgcaagatatcaaatgattgcgaactgcctcgatggcatatgcacgactttttccacagctttctgatagtgtttcgggtgctctgcggagaatggattgaaacaatgtgggactgtatggaggtggcgggacagacgatgtgccttacggtttttatgatggttatggtgattggtaacttggtggtgttaaatctctttctagccttgctccttagtagcttcagctctgacaacctagccgcaacagacgatgacaacgaaatgaataatctgcaaatagctgtgggtaggatgcagaaggggatcgattttgttaagcgtaaaatccgggagtttatacagaaggctttcgtccgcaaacaaaaggccctggacgagatcaagccgctggaggacctgaacaataaaaaggatagttgtattagtaaccacacgacaatagaaataggaaaagacctgaactatttgaaggatgggaacgggaccacatcaggaattgggagtagtgttgaaaagtatgtggtggatgagagcgactacatgtcattcatcaataacccctcactgaccgtgacagtgcccattgccgtaggcgagtccgactttgagaaccttaacacagaggagttctcttccgagtcagacatggaggaatccaaggagaagctgaatgctacgagttcttcagagggatcaaccgtggacattggtgcaccagcagaaggcgaacagcccgaagtggaacctgaggaaagcttggagccagaagcatgtttcactgaagactgcgtgaggaaattcaagtgctgtcagataagcattgaagaaggtaagggcaagctttggtggaacctgaggaaaacatgttacaagatcgtggaacacaactggtttgaaactttcatcgtctttatgatccttctcagctccggcgcactggccttcgaggacatttacatcgagcaacgcaagaccatcaagacgatgctcgagtatgcagataaggtcttcacctatatcttcatcctcgaaatgctcttaaagtgggtggcgtacggattccaggtgtattttacaaacgcttggtgctggctcgactttctgattgtagacgtgtcattagtgtcgttgaccgctaatgcccttgggtactctgaactgggtgcaataaagtctctgaggaccttacgtgctctcaggccattgcgcgctctcagtcggttcgaaggcatgcgagtggttgttaacgccctgctgggtgccatccctagcatcatgaatgtgctgttagtttgtctcatattttggcttatcttctccatcatgggtgtgaatctcttcgctgggaagttctatcattgtatcaactacacaaccggagaaatgttcgatgtgagtgtagttaacaattacagtgaatgtaaagctctgattgaatctaatcagacagctcgctggaagaatgtgaaggtaaattttgataatgtgggcctcgggtatttgtcgctgctccaagttgccaccttcaagggctggatggacatcatgtatgccgccgtggatagcaggaatgttgaactccagcctaagtacgaagacaacctgtatatgtatctctacttcgtgatcttcatcattttcggatcttttttcacactgaacctgttcatcggcgtaattatagacaatttcaaccagcaaaagaagaagtttggaggccaggacattttcatgacagaggaacaaaaaaagtattacaacgccatgaagaagctgggcagtaaaaagccccagaagcccatccctcgaccggcaaataagtttcagggtatggtatttgacttcgtgaccaagcaggtatttgatatatcaatcatgattctgatatgtctaaacatggtgacgatgatggtggagactgatgaccagtctcaggagatgaccaatattctctactggattaatctagtatttatcgttttgtttaccggagagtgcgttctgaagctgatcagtctgcgatattactactttacaatcggttggaacatctttgacttcgtagtggtgatcttatctattgtgggaatgtttctggcagagctcatcgagaaatactttgttagccctacgcttttcagggtcattcgcctcgctcgaattggccgtatactgcgactaattaagggtgctaaggggattagaaccctccttttcgcccttatgatgtctctgcctgctcttttcaatataggccttctactgtttctggtcatgttcatttacgccatcttcggaatgagcaatttcgcatacgtgaaaagggaggtgggaatagatgacatgttcaattttgagactttcggcaatagcatgatctgtttatttcagataaccacatcggcaggctgggatgggctgctggcccctatcttgaacagcggccccccagattgtgatccagacaaggaccatcctggctccagtgtgaagggcgactgtggaaaccctagtgtgggcattttcttctttgtgagttacattatcatctctttccttgtcgttgtgaatatgtatattgccgtcattctagagaacttctctgtggcgacagaggagtccgcggagcctctctccgaggatgattttgagatgttttacgaagtttgggagaaattcgatcccgacgctacacaattcatagagttcgccaaactctcagatttcgcagatgcactggacccaccactgctgatagcaaagccaaacaaggtgcaactcatcgcaatggacttgccgatggtgtccggagataggattcattgtttggatatcctattcgccttcaccaagcgcgtcctgggggaatcaggcgaaatggacgcactgcgtattcagatggaagagcgctttatggccagtaacccttctaaagtcagttacgaaccaattactacgacattgaagcgcaagcaggaggaagtgagtgccatcatcatccaacgggcctatcgcagatacctgttgaagcaaaaagtcaaaaaagtctcttcaatatataagaaggataaaggaaaggagtgcgatggcacgccaattaaagaagacactctgattgacaagctgaatgaaaacagcacgcccgaaaaaaccgacatgacaccaagtaccacgtcaccaccatcctatgattctgttactaaaccggaaaaagaaaagttcgaaaaggacaagagcgagaaagaggataagggtaaggatatcagagagtctaaaaaatag

SEQ ID NO: 267445 - DNA, 6018 bp, Artificial Sequence
  derived and/or modified sequence
atggcccagagcgtgctggtgccccccggccccgacagcttccggttcttcacccgcgaaagcttggctgcaattgaacagcggatcgctgaggagaaggccaagaggccaaaacaggagaggaaagacgaggacgacgagaatggcccaaagccaaacagcgacctcgaagccgggaaatctctcccttttatttatggtgacatccccccggaaatggtctctgtgcccctggaggacctggacccttactacataaacaaaaagacctttatagtgctaaacaagggaaaagctatttcccgatttagtgccacgcccgccctctatattcttactccattcaaccctattagaaagctggcaatcaaaatcctggtccactctctcttcaatatgctaatcatgtgcacgatcctgacaaactgcgtctttatgaccatgagtaaccctcccgactggactaaaaacgtagagtatacatttactgggatctataccttcgagtccttaataaagattctggcccggggcttctgtctagaagatttcaccttcttgcgagacccatggaactggcttgatttcacggtgattacctttgcttatgtgaccgaattcgtcgatctcgggaatgtgagtgcgctgagaacctttagggtcctgcgagccctgaaaactatctccgtcattcctggcttaaagacgatcgtcggggcacttatccagtccgtgaaaaagctgtctgacgtgatgatcctgacagtgttctgcctgtcagtgttcgcactgatcggcttgcagctattcatgggcaacctgaggaataagtgtctgcaatggccacctgacaactcatccttcgagatcaatattacctcattctttaataacagcttggacggaaatggaaccacatttaatcggaccgtcagtatattcaactgggatgagtacatcgaggacaagtcacacttctacttcttagagggccagaatgacgctttgctgtgcggcaactcgagtgacgctggtcagtgcccagaaggctacatctgtgtgaaggctggacggaatcccaactatggttacacctcatttgataccttttcatgggcgtttctttctttgttccgcctgatgacacaggacttttgggaaaatctgtaccagttgactctgagggctgctggtaagacctacatgatattttttgtgctggtaatttttttaggcagcttttacctgattaaccttatactagcagttgttgctatggcctacgaggaacaaaatcaggctaccctagaggaagctgaacaaaaggaagccgagttccaacagatgttagaacagcttaaaaagcagcaagaggaggcccaggcagcggctgcggcagccagcgccgagagtagggattttagtggggccggagggataggggtgttctccgaatcatcttcagttgcttctaagcttagctccaagtcagagaaggagctcaaaaacagacggaagaagaaaaagcagaaggagcagtccggtgaggaagagaagaacgacagagtgagaaaatccgaatctgaagatagcattcgacgaaagggcttcagatttagcttggagggctcccgcctgacctatgagaagagattcagctctccccatcagtccctgctatccatacgcgggagtcttttcagcccccggcgcaactccagagcgagcctcttctcttttaggggacgcgccaaagacattggatccgagaacgatttcgccgatgacgagcacagtacatttgaagacaatgactcacggcgggacagtctgtttgtgccacaccgccatggtgaacggcggcattctaacgtcagccaggccagtcgggccagccgggttctgccgattctgcctatgaacggcaaaatgcattccgctgttgattgtaatggcgtggtgtcacttgtggggggcccgagcacactcacttccgccggacagctgctgccagagggaactacgactgagaccgagattcggaaacgacggtcatcatcataccacgtcagtatggacctgctggaggaccccacatcaagacaaagagctatgagtatcgctagcatactgacgaacaccatggaggagttggaggagtcacggcagaagtgccccccatgctggtataagtttgcgaacatgtgcctcatctgggactgctgtaagccctggctgaaggtcaaacacctcgtgaatttggtagttatggatcccttcgttgacctggccatcactatttgtattgtgttaaataccctgtttatggccatggaacattacccaatgactgaacagttcagtagcgttcttagcgtggggaacctggttttcactgggatctttactgcagagatgttcttgaagattatagcaatggacccatattattatttccaggagggctggaacatcttcgacggtttcatagtcagtcttagcctgatggagctgggactagcaaacgttgagggcttgtccgtactgaggagctttcgcctccttagagtgtttaagttagccaaatcttggcccaccctgaatatgcttattaagatcataggtaactcagttggcgcactgggtaacctgaccctagttctggctattatcgttttcattttcgctgtagttggtatgcaactgttcggaaaatcatacaaagaatgcgtatgtaaaatcagcaacgattgcgaactccccagatggcacatgcacgacttttttcacagctttctcatcgttttccgggttctttgtggagaatggattgagaccatgtgggattgcatggaggtggctggtcagaccatgtgtttgactgtgtttatgatggtgatggtgattggaaatctggttgtcctgaacttgttcctggcgcttttactgtcgtccttttccagcgataacttggcggcaacagatgacgacaacgaaatgaacaatttacagatagcagtgggaagaatgcagaaaggcatagacttcgtgaagcgcaagattagggaattcatccagaaagctttcgtgcggaagcagaaggccctggatgaaataaaaccgctcgaggacttgaataacaaaaaagattcatgcatctcaaaccacactaccatcgaaatagggaaggatctcaactatctaaaagatggcaatggtaccacaagtggcattggttccagtgtggaaaagtacgtcgtagacgaatctgactatatgagcttcatcaataacccatcactgacagttactgttcccattgccgtcggagaaagcgatttcgagaacctcaacacagaggagttctctagtgagagcgacatggaagaatccaaggagaagctaaatgcaacctcatcttcggagggtagcacggtcgacatcggcgctccagccgaaggcgaacagccagaggtagagccagaggagtccctggagccagaagcttgcttcacagaagattgcgtgcggaaattcaagtgttgtcaaatcagcatcgaagaggggaaaggcaagctgtggtggaatctccgcaagacatgctataagatcgttgagcataactggtttgagacattcatcgtcttcatgatcctgctgagttctggggctctcgcatttgaagatatctatatagagcagaggaagacgatcaagacgatgctggagtacgccgacaaggtttttacttatatctttatattggaaatgttacttaaatgggtcgcctacggctttcaggtgtactttaccaacgcttggtgttggctggattttctaatcgtcgacgtgtccctagtatcactcaccgcgaacgcgctgggatactctgaacttggagccatcaaatctctgcggacactgcgtgcactgcggcctcttcgggcgcttagtcggttcgaggggatgagggtggtggtcaacgcactcttaggcgcgattccttccattatgaatgtcctgcttgtttgcctgatcttctggctgattttcagcattatgggcgtcaatctgtttgcaggtaaattctatcactgcattaactacacgacgggggaaatgtttgacgtctccgtagtgaataactactccgagtgcaaggccctgatagaatccaaccagactgcccgctggaagaatgtgaaggtaaacttcgacaatgtggggcttggatacctatctttattgcaggtggctacctttaagggttggatggacattatgtatgccgcagtggatagccgcaacgtggagctgcagccaaagtacgaggacaacttatacatgtatctgtactttgtcattttcattatttttgggtcatttttcaccttaaacctcttcatcggggtgattatcgataactttaatcagcagaaaaaaaagttcggcggccaagatatctttatgaccgaggagcagaagaaatactacaacgcaatgaagaaacttggcagcaagaagccccagaagcctatccccagaccggctaacaagttccaggggatggtgtttgactttgtgacaaaacaagtgttcgatattagtatcatgattctaatctgcttgaacatggtcacaatgatggttgagacagacgaccagtcacaggagatgacgaacatcctttactggatcaatttggtatttattgtcctgttcaccggggagtgcgtgctgaaactcatttctttacgatattactacttcactatcgggtggaatatctttgacttcgttgtcgttatcctgtcaattgtggggatgttcctggcagagttgatagagaagtacttcgtatcccccactctatttagggttatacggttagcacgcattgggaggattctacggctaatcaagggcgccaaagggatcaggacattgctctttgccctaatgatgtcactgccggcgctgtttaatatcggattgctgctttttctcgtcatgtttatctacgcaatatttgggatgtctaattttgcatatgtcaagagagaagtgggcattgatgacatgttcaacttcgaaacctttggcaattctatgatttgtctctttcagatcaccactagtgcaggctgggatggcttgctggcccctatactaaactccggccctccagattgcgatcccgacaaggaccaccccggatcctctgtcaaaggcgactgcggcaaccccagcgtggggatctttttctttgttagctatattatcatttccttcttggtggtcgtcaacatgtacatcgccgtaattttagaaaatttcagcgttgcaaccgaagagtctgctgaaccattgagcgaagacgacttcgagatgttttacgaggtctgggagaaatttgatcctgatgcaacacagttcatcgagttcgctaaacttagtgattttgcggacgcactcgatcctcccttactaatcgccaagccaaacaaggtgcagcttatcgccatggatctgcctatggtgtctggagacagaatccattgcctggatatactgtttgcatttacgaagcgggttctaggggagagcggtgagatggacgcattaagaattcagatggaggaacgctttatggcctctaacccatcaaaggtctcatacgagcctattactactactctaaagcggaagcaagaggaggtgtccgctattatcatccagagggcctacagaagatacttgctgaaacagaaggtgaagaaggtctccagcatatataagaaggacaaaggtaaagaatgtgacggcacacccattaaggaggatacgttgattgacaagcttaacgagaactctaccccagagaaaaccgacatgacacctagtactacgtcacccccctcatacgatagtgtgaccaaacccgagaaagagaaatttgaaaaggacaagtctgaaaaagaagataagggtaaagatataagggagtctaagaaatag

SEQ ID NO: 267446 - DNA, 1512 bp, Artificial Sequence
  derived and/or modified sequence
atggcccagagcgtgctggtgccccccggccccgacagcttccggttctttacgagggagtccctggctgccattgaacagagaattgctgaggaaaaggctaagcggcctaagcaggagcgcaaagacgaggacgatgagaacggtcctaagccgaacagcgatctggaagccggcaagagtctgcccttcatctatggggacatcccccccgagatggtctccgtgccattagaggacttggacccgtattatatcaacaagaagactttcatcgtactgaataaaggaaaagcaataagccgcttctcagccacgccagctctttacatcctgactccctttaaccccatccggaaactggcaattaaaatactcgtacacagtctgttcaacatgcttattatgtgcacaattcttaccaactgcgtcttcatgaccatgtctaatcccccagattggaccaagaatgtggaatacacgttcacaggaatttataccttcgaaagccttatcaagatcttggcccgtgggttctgcttggaggattttacctttcttcgggatccatggaattggctcgacttcacagtcatcaccttcgcatatgttaccgagtttgtggatctgggcaatgtatcagccctgaggactttccgagtgctccgagccctaaaaacaatttcagttattccagggttgaaaaccattgtgggggcactgatccagtctgtaaagaagttaagcgatgtgatgatcctgacagtgttttgtttgagtgtattcgccctcatcggactccaattattcatgggaaatctcagaaacaaatgtctgcaatggcctcccgacaactctagtttcgagatcaacattactagctttttcaataattcacttgacggcaacggaactacttttaaccgtacagtctcaatcttcaactgggatgaatacattgaagataagtcccacttttattttctagaaggacagaatgatgcattgctttgtggcaacagctctgacgccggacaatgccctgaaggctacatatgcgtcaaggcaggtcgaaacccaaattacggctatacttccttcgataccttttcatgggcttttctgagtctgttccgccttatgacccaggacttttgggaaaacctataccagctgactctgcgggccgctgggaaaacctatatgatcttttttgttcttgtaatctttttggggagcttctatctgattaatttaattctcgccgtcgtagcgatggcttacgaggagcagaatcaggccactctggaagaagctgagcagaaagaagctgagttccagcagatgctggagcagctgaaaaaacagcaggaagaagcacaagctgccgcagctgccgcttctgcagagtcaagagatttctcaggagccggaggaatcggtgtgttcagtgagtcctcatctgtggcctccaaactgtcatctaagagtgagaaggagttgaaaaactag

SEQ ID NO: 267447 - DNA, 6018 bp, Artificial Sequence
  derived and/or modified sequence
atggcacagagcgtgttagtgcctccagggcctgatagcttcaggtttttcacaagggaaagtctggccgctattgagcaaaggatcgctgaggagaaagcaaagaggcccaaacaggagcgcaaggacgaggacgatgagaatggcccaaagcctaattccgatctcgaagccggtaaatccttaccatttatctacggagacatcccccctgagatggtgagtgtgcctctcgaggatcttgacccatactatatcaacaaaaagacatttatcgttctgaacaaagggaaagccatatctaggttcagcgccacccccgctctgtatatcttgactccgttcaatcctatccggaagttggcgataaaaattctcgttcacagcctgttcaacatgcttattatgtgcactatcttaacgaattgtgtgtttatgactatgagtaatcccccagactggactaagaatgtggaatacacattcaccggcatttatacatttgagtctctaatcaagattctggcaagagggttctgcttagaggatttcactttcctgagagatccatggaattggctggatttcacagttatcacgttcgcctacgtaaccgagtttgtcgatctcgggaacgtcagcgcattgagaacattcagagttctacgcgcattgaaaacaatctccgtgatccctggactgaaaacaatcgtcggtgcattgattcagtccgtaaagaaactcagtgacgttatgatcctaaccgttttctgcttgtccgtcttcgccctcatcggactgcagctgtttatgggcaaccttcgtaataagtgcctgcagtggccgcctgacaactcaagtttcgagattaatatcaccagcttcttcaataattccctcgatggaaatggaacaactttcaacaggaccgtgtccatcttcaactgggacgaatacattgaagacaaaagccatttctattttctagaaggccagaatgatgcactcctgtgtggtaactcgtctgatgcagggcagtgcccagaaggttatatttgcgtcaaagctgggcgtaatcctaactacggttacacatcttttgataccttctcatgggcctttcttagtttgttcagactcatgacgcaggatttttgggagaatctgtatcaactgaccctgcgcgcagcagggaaaacttacatgattttcttcgttttagtgatttttctgggcagtttttatcttatcaaccttattctggctgttgttgcgatggcttacgaggaacagaaccaggcgactctggaggaagctgagcagaaggaggcagagttccagcaaatgttagagcagctcaagaaacagcaagaggaggctcaagcagccgctgctgctgcttccgcagagagcagggacttctcaggcgctgggggtattggcgtcttctccgaaagctcgagtgtagcctcaaagcttagttccaaatccgagaaagagctgaagaaccgtcgtaagaagaagaaacaaaaggagcaatccggcgaggaagaaaagaacgaccgagtgaggaagagcgagtcagaggactctatccgcaggaaagggtttcggttctcactcgagggctccagattgacatacgaaaaacgcttttctagtccccaccaaagtctcttaagcatacggggttctcttttttctccacgacgcaactctcgggcaagcctgttctcctttaggggcagagccaaagacattgggtctgagaacgactttgcagatgacgaacactctacttttgaagacaatgactctaggagggatagtctgttcgtgccacacagacacggagaaagacggcatagtaacgtgagtcaagccagtcgggcatcccgggtgttgccgatactgcctatgaatggcaaaatgcactccgccgtggactgtaatggggttgtttcacttgtcggaggaccctctacgctgaccagtgcgggtcagctcttaccagaaggcactaccacagaaaccgagataagaaagcgcaggagttcgtcatatcacgtgagcatggatctgctggaggaccccaccagtagacagcgggctatgtcaatcgccagcattttgaccaatacaatggaagagctcgaagagtctcgacagaagtgcccaccttgttggtataagttcgccaacatgtgcctgatttgggattgttgcaagccatggctcaaagtgaagcaccttgtaaatttagtcgtgatggacccattcgtcgatttagcaataaccatatgtatagtgcttaataccctcttcatggcgatggaacactaccccatgactgaacaattctccagcgtactgtcagtcggtaatctggtctttacagggatctttaccgccgagatgttcctgaagatcatagcaatggatccatattactattttcaggaaggatggaatatttttgacggattcatcgtaagcttgtcactcatggaactgggcctggccaacgtcgaaggtttgtctgtgctcagaagcttcaggctccttagggtcttcaaattagcaaagtcgtggcccacgcttaacatgcttatcaaaattataggaaatagcgtcggtgccctcgggaatctgacgttggtgctggccatcatcgtgttcatctttgctgtggtcgggatgcagctttttggtaagtcgtacaaggagtgtgtttgcaaaatttctaacgactgtgagcttcctcggtggcacatgcatgactttttccactctttcttaatcgtttttcgggttctatgtggcgaatggatagaaacaatgtgggattgtatggaggtagctggtcagactatgtgcctgaccgttttcatgatggtgatggtcattggcaacctggtagtactgaacctgttcctggcattgctcctttcatctttttcttccgacaatctagctgcaactgacgacgataatgaaatgaataacctgcagatagctgttggccgaatgcagaaaggaatcgattttgttaagcgcaaaataagagagtttattcaaaaggcgttcgtgcggaagcaaaaagcactagatgagatcaagcctctcgaagatctcaacaataagaaagacagctgtatctctaaccacaccaccatcgagattggaaaagacctgaattatcttaaggatggaaatggcacaacctctggcattggctcaagtgtggaaaagtacgttgtggatgagagcgactatatgtcctttattaataacccaagcctgacggtcaccgtccccatagccgtgggcgaatctgattttgagaacttgaacacagaggagttcagttcagagagcgatatggaagaatcaaaggagaagctcaatgcgacaagtagctcagagggaagcaccgttgacataggagcacctgcagagggggaacagccggaggtcgagcccgaggagtctttggagcccgaggcctgtttcacagaagactgtgtgagaaaatttaaatgctgtcaaatatcaatcgaggaggggaaaggaaaactctggtggaatctccgcaaaacatgctacaagatcgttgaacataactggttcgagactttcattgtttttatgatcctgctaagcagcggggcactggctttcgaggacatctacattgagcagcggaagaccatcaagactatgctcgaatacgctgacaaagtgtttacgtacatattcattctggagatgctgcttaagtgggttgcctacggctttcaggtttatttcacaaacgcctggtgttggcttgatttcctgatagtggacgtctctctggtgagccttacagcaaacgccctcggctactctgaacttggtgctattaaatccctccgaacgctgcgtgccctcaggccccttcgcgctctctcccggttcgaaggtatgagggtggtagtcaacgccctgttgggtgccataccttccattatgaacgtcctcctcgtttgcctgatcttctggctcatcttctccattatgggcgtgaatcttttcgctggcaagttctatcactgcatcaattacactacaggcgaaatgtttgacgtaagtgtggtcaacaactattctgagtgcaaagctctgattgaatcaaaccagacagcaagatggaagaatgtgaaggtcaactttgataacgtgggcctcggctatttatctctcctccaggttgcgaccttcaaaggctggatggatattatgtatgcggctgtcgattctcgcaatgtggaacttcagccaaagtatgaggataatctttacatgtacctgtacttcgtgattttcattattttcggatccttctttacgctcaatctgttcatcggcgttattattgacaatttcaaccagcagaaaaaaaaatttggcggacaggatatcttcatgacagaggaacagaagaagtactacaacgccatgaaaaaattgggctctaagaaaccccagaaaccaatcccccgacccgcaaacaagtttcagggcatggtcttcgattttgtgacaaagcaggtgttcgacatctccattatgatactgatctgtctgaacatggtgactatgatggttgaaacggacgaccagagccaagaaatgaccaatattctgtattggatcaatcttgtgtttatcgttctgttcacaggggagtgcgtgttaaagttaatttcgttgaggtattattacttcacaattgggtggaacatctttgatttcgtagtggtgatattaagcatcgtgggaatgttcctcgccgagcttatagagaaatacttcgtcagcccaacactcttccgcgtcataagacttgcgaggatagggaggatcctgcggctcattaagggagctaagggcattcgaacactcttgttcgctcttatgatgtcactgcccgcactgttcaacattggtttactgcttttccttgtgatgttcatctatgccattttcgggatgtcgaactttgcctacgtgaaaagggaggttggtattgatgatatgttcaacttcgagacgtttggcaactccatgatttgtcttttccagatcacaaccagtgcgggatgggatggattgctcgcgccaattctcaattctggaccacctgattgcgatcccgacaaggaccatccgggatcctctgtgaagggagattgcggaaacccctcagtcggaattttcttttttgtgtcttatattatcatcagcttcctggtcgttgtgaacatgtatatcgctgtgatcctcgagaatttttccgtggccaccgaggagtcagcagaacccctttctgaggacgacttcgagatgttttatgaagtctgggagaaatttgaccccgacgctactcaatttatcgagttcgctaaactaagcgatttcgcggacgccttagacccacccttgttgatagctaagcctaataaggtccagttaattgcaatggatctacccatggtcagtggagataggatacattgcctggatattttattcgcctttacaaaaagggtccttggcgaaagcggcgagatggatgccctgcgcatccagatggaggagcgattcatggcatcaaatccaagcaaagtatcatacgagcccatcacaaccaccctgaagagaaaacaggaggaagtaagcgccatcattatccagcgcgcatatcggcgatacctgctgaaacaaaaagtgaagaaggtttcatctatctacaagaaagataagggaaaagaatgcgacgggacacccataaaggaggatacactgatagacaagctgaacgagaatagcactcctgaaaagacagacatgacgcccagtacaacatcccccccttcgtatgattcggttacaaagcccgagaaagagaaattcgagaaagataaatccgagaaggaagataagggaaaagatatccgggagagtaaaaaatac

SEQ ID NO: 267448 - DNA, 6017 bp, Artificial Sequence
  derived and/or modified sequence
atggcgcaatcggtcctagttcccccagggccagactcattccggtttttcactcgcgaaagcctagcagccattgaacaaaggatcgccgaagagaaggccaagcgtcccaagcaggagcggaaagatgaggatgacgagaacggaccaaagcctaacagcgacctcgaagctgggaagagcctgccgttcatctatggggatattccacccgagatggtaagtgtgccactcgaagacctggatccttattacataaataagaagacgttcattgtcctgaacaaaggaaaagcaatctctaggttcagcgctacccccgctctatatatccttacacccttcaacccaatacgtaagctcgccatcaagattttggtacattccctcttcaatatgctgataatgtgtaccatcctcacgaattgtgtgtttatgaccatgtcgaatcccccagactggactaagaatgttgaatacacttttacaggaatctacacctttgagagtctgataaagatactggctcggggattctgtctggaggatttcacattcttgcgggatccctggaactggctggattttaccgtgatcaccttcgcctacgtcacagagtttgtagatctgggcaacgtgagcgccctcagaacattcagagtcctcagagccctgaaaaccatttccgtgatccctggcttgaagaccatcgtcggtgccctgattcagagcgtcaagaagctgagtgacgttatgatactgacagttttctgcttgtccgtatttgcactaattgggctccagctgttcatggggaatctgcgaaataagtgcctgcagtggcccccagacaatagcagttttgagatcaatataacctcatttttcaataatagtctggacggcaatggcactacctttaaccgcactgtgtccatcttcaactgggacgaatacattgaagacaagagccatttctattttttggagggacagaatgatgctcttctgtgtgggaacagttcagacgctggccagtgccctgaggggtacatttgcgttaaggccggaaggaatcccaactacggctacacttcttttgataccttcagctgggctttcctaagtctcttccgcctgatgacgcaggacttctgggagaacctctatcagctaacacttcgcgcagctggaaaaacatatatgatcttctttgtgctggtgattttcctgggaagtttctatctgataaatctgatattggcagtggtcgccatggcttatgaggagcagaaccaagccacccttgaagaggcagagcagaaggaagcggagtttcagcagatgttggagcagcttaagaagcagcaggaggaagcccaggctgcagctgccgcagccagcgccgagagccgagatttctccggtgctggcggaatcggagttttctctgaatcaagctctgtcgctagcaagttgtcgagtaagagcgaaaaggaactgaagaatcgacgaaaaaagaaaaaacagaaggaacaatctggcgaagaagaaaagaacgaccgagtgagaaagtccgagtccgaggactccatcagacgtaagggattccgatttagcctagagggctcgaggcttacttacgaaaaacggttcagtagtccccatcagtcattactctctatacggggtagtctttttagccctagaagaaatagtagggccagcctgtttagctttcgtggtagagcaaaagacatcggaagcgagaatgattttgctgatgacgagcactctacctttgaggacaatgattctcggcgagattcgctgtttgtcccacatcggcacggggagcgacgacacagcaatgtttcacaagcttcaagagcctcccgagttctgcccatcctgcctatgaatgggaagatgcattccgcggtggactgcaatggagtcgtgtctctcgtcggcggtccttctacgctcacgtccgctggtcaacttctacccgaaggcaccactaccgagacggagatccgtaagagaagaagcagttcttaccatgtgtctatggacctacttgaggatcccaccagccggcagcgggcaatgtcaattgcttcaatcctcacaaatacaatggaggagctggaggagtctaggcagaaatgccctccatgctggtataaatttgccaatatgtgtctgatttgggactgctgtaaaccctggctcaaggtgaagcacttagtcaacttggtggtgatggacccatttgtggatctagccataacaatttgcatagtgttgaatacactgttcatggccatggaacattatcctatgacagaacagttcagcagcgtgctttcagtcgggaatctggtgttcactggtatattcaccgccgaaatgttcctgaaaattatcgccatggacccatactactatttccaagaggggtggaatatttttgatgggttcatcgtctctctgagtctcatggaactgggattagccaatgttgaagggttatctgttttaaggtccttcagattgctgagggtgttcaagctggccaagtcctggccaactctgaatatgctgattaagattataggtaacagtgtgggagccctggggaacctaacactcgttcttgccatcatcgtctttattttcgcagtggtgggaatgcaactgttcgggaagtcttataaggaatgcgtctgtaaaatatcaaatgattgtgagctccctcggtggcacatgcacgacttcttccattcgtttcttatcgtgtttcgggtgctgtgtggggagtggatagaaaccatgtgggactgcatggaagtggccggtcagacgatgtgccttaccgtgtttatgatggtgatggttataggcaatctggtggtgctgaatctcttcttggcactccttctgtcatccttttcatccgacaatctcgccgctaccgatgacgataacgaaatgaataacctgcagatcgccgtcggacgaatgcaaaagggcattgactttgtgaagaggaaaatccgggaattcatccagaaagctttcgtgagaaagcaaaaggccttggacgaaatcaagcccctggaggacctgaacaacaagaaagattcttgcatcagcaatcatacgaccatcgagattggaaaggacctgaactatttaaaggatggaaatggcactaccagtggtatagggtcatctgtagagaagtacgtggtggacgagtctgattacatgtccttcatcaacaatccctcactgactgtcaccgtgcctattgctgttggagaaagtgacttcgaaaacctgaatactgaggagttctcatccgagagtgacatggaggagagcaaagagaagttgaacgccacctcatctagcgagggctcaaccgttgacattggggctccggctgagggcgaacagcccgaggtggagcctgaggaatcattggagcctgaagcctgtttcaccgaggactgcgtgcggaagtttaaatgttgccaaatatctatagaggagggaaagggcaagctgtggtggaatctccgaaagacttgctataaaattgtggaacacaactggtttgaaacctttattgtgtttatgatccttctctctagcggagctctggcctttgaagatatctacattgaacagagaaagacaattaaaaccatgctggaatatgctgataaagtgtttacttacatctttatcttggaaatgttgctgaaatgggtcgcgtacgggtttcaggtgtactttacgaatgcgtggtgctggttggacttcttaatcgtggacgtgtcactcgtctccctgaccgctaatgcactaggctattctgaactgggcgcaatcaagtctcttagaacattacgagcactgcgcccactgcgcgcactctcccggttcgaggggatgcgggtagtggtaaacgctttgctcggcgctataccaagtatcatgaacgtgttgctagtttgcctgatcttctggttaatcttcagcatcatgggggtgaacctttttgccggtaaattctaccattgtattaactacaccaccggtgaaatgttcgatgtctctgtcgtcaataactactctgagtgcaaagccctgatcgagagcaatcagaccgctagatggaagaacgtgaaagtgaactttgataacgttgggctgggctacctgtccctgctgcaggttgccacctttaagggttggatggacattatgtacgccgcagtggactcacggaacgtggagctgcaaccgaagtatgaagacaacctgtacatgtacttatacttcgtgatcttcataatttttgggtcttttttcacacttaatctttttattggcgtcatcatcgataatttcaatcagcagaagaagaagttcggaggccaggacatctttatgaccgaagaacaaaaaaaatattacaacgcaatgaaaaagttgggctccaagaaaccgcagaagccaattccaagacccgctaataagtttcagggaatggtatttgactttgtgacaaagcaggtgtttgacatttcaatcatgattctgatttgcctaaacatggttactatgatggtagaaaccgacgaccagtcacaggagatgactaacattttgtattggattaacctagtgtttatcgtactgtttacgggcgagtgtgtactgaagctaattagcttacggtattactattttaccattggatggaacatattcgacttcgtagtggtcatattaagtattgtgggaatgtttttagcagagttgatcgaaaagtactttgtgtcgcccacgttgtttcgggttatacgcctcgctcgaattggaaggatcctacgcttgatcaaaggcgcaaaaggtatccgaaccctgctgtttgcactgatgatgagcctcccggctctgttcaatatcggccttctcctgttcctggtgatgttcatctatgccatttttgggatgtctaacttcgcctatgttaagcgcgaggttgggattgacgacatgtttaactttgaaactttcggaaatagcatgatctgcctctttcagattacaacaagtgccggatgggacggactgctggcccctatcctgaattccggaccacccgattgcgacccagataaggaccatcctggcagctctgttaaaggggattgtgggaatcctagcgttggaatattcttttttgttagttacattatcattagcttcctcgtggttgtcaacatgtatatcgctgtgattctggagaacttcagtgtggctacggaagagtccgcggagccactctccgaagacgactttgagatgttttacgaagtgtgggaaaagtttgaccctgacgcaacgcagttcatcgaatttgctaaactgtccgattttgctgacgccctagacccacccctgcttatcgctaaacctaacaaagtgcaactgattgcaatggaccttcctatggtcagtggggatcggatacattgtctggacattctattcgcttttacaaaacgggtcctgggggagtctggcgaaatggacgcgcttcgcattcagatggaagaaagattcatggcgagcaacccctccaaggtgtcatatgaacccatcacaaccactctgaaacgcaagcaagaggaggtatctgcgatcatcattcaacgtgcctacagacggtacttgctgaagcagaaagtgaaaaaagtttcgagtatatacaagaaggacaagggaaaagaatgcgatggcacgcccatcaaagaggatactctgatcgacaagctcaatgagaactctactcccgagaagacggacatgacgcctagcactacctcgccaccatcttatgacagcgtgacaaaaccggagaaagagaagtttgagaaagataaatctgaaaaggaagacaagggaaaagacattagggagtcaaagaagta

SEQ ID NO: 267449 - DNA, 1512 bp, Artificial Sequence
  derived and/or modified sequence
atggctcagtctgtcctggtaccacccggtcccgattctttcaggtttttcacaagagaaagccttgccgcaatcgaacagcgcattgcggaagaaaaggccaaacggcctaaacaagagcggaaggatgaagacgacgaaaacggtcctaaaccaaactccgacctggaggccggaaagagtctcccgtttatttatggtgacatcccccctgaaatggtgtccgtgccccttgaggacttagatccgtattacattaataagaaaaccttcattgtgctgaataaaggaaaggccatctcgaggttctccgcaaccccagcattgtatattcttaccccctttaatccaatcagaaaactggctatcaagattctggtgcattccctgttcaacatgctcatcatgtgcactatcctcacgaactgcgtgtttatgacaatgagcaatcccccagattggactaagaatgtggaatataccttcacagggatctacacttttgaatctctgattaaaatcctagcacggggattctgcctcgaagatttcacattcttaagagacccttggaactggctggatttcaccgtgataacatttgcgtacgtcaccgagttcgtcgacctgggaaacgtctccgccctgcgcacgttcagagtgctgcgggctctgaaaacaatatcagtgatcccaggactcaaaactatagtgggagccttaattcagtctgtgaagaagctgagcgatgttatgattctgactgtgttctgtctgtctgtgttcgcccttattggcttgcagctgttcatgggcaatctgagaaataagtgcctgcagtggccacccgataactcatctttcgaaatcaatatcaccagctttttcaacaattcactggatggcaacggcacaactttcaacagaacagtttctattttcaactgggatgaatacatagaagacaaatctcacttctacttcctcgaggggcagaacgacgcattgctgtgtgggaatagtagcgatgctggccagtgccccgaagggtacatatgtgtgaaagccggacgtaatccgaattacggctatacctcctttgatactttttcctgggcatttctgagcttatttcgcctcatgacacaggacttctgggaaaacctttatcaactgactcttcgcgcagccggtaagacgtacatgattttttttgttctggtgatttttctgggaagtttctacctgattaacttgatactggccgttgtcgccatggcatatgaagagcagaaccaggccaccctagaggaagccgagcagaaagaggccgaattccagcagatgctggagcaactgaaaaagcagcaggaagaggcccaggcggctgccgcagcagcctctgcggaaagcagagatttttctggtgcaggcggaattggggtcttctcagagtcatcgtccgtcgccagcaagctcagctctaagagcgagaaggaactgaaaaattag

SEQ ID NO: 267450 - DNA, 8403 bp, Artificial Sequence
  derived and/or modified sequence
aaaaaaaagatttttttttttttaaagcatgatggaattttagctgcagtcttcttggtgccagcttatcaatcccaaactctgggtgtaaaagattctacagggcactttcttatgcaaggagctaaacagtgattaaaggagcaggatgaaaagatggcacagtcagtgctggtaccgccaggacctgacagcttccgcttctttaccagggaatcccttgctgctattgaacaacgcattgcagaagagaaagctaagagacccaaacaggaacgcaaggatgaggatgatgaaaatggcccaaagccaaacagtgacttggaagcaggaaaatctcttccatttatttatggagacattcctccagagatggtgtcagtgcccctggaggatctggacccctactatatcaataagaaaacgtttatagtattgaataaagggaaagcaatctctcgattcagtgccacccctgccctttacattttaactcccttcaaccctattagaaaattagctattaagattttggtacattctttattcaatatgctcattatgtgcacgattcttaccaactgtgtatttatgaccatgagtaaccctccagactggacaaagaatgtggagtatacctttacaggaatttatacttttgaatcacttattaaaatacttgcaaggggcttttgtttagaagatttcacatttttacgggatccatggaattggttggatttcacagtcattacttttgcatatgtgacagagtttgtggacctgggcaatgtctcagcgttgagaacattcagagttctccgagcattgaaaacaatttcagtcattccaggcctgaagaccattgtgggggccctgatccagtcagtgaagaagctttctgatgtcatgatcttgactgtgttctgtctaagcgtgtttgcgctaataggattgcagttgttcatgggcaacctacgaaataaatgtttgcaatggcctccagataattcttcctttgaaataaatatcacttccttctttaacaattcattggatgggaatggtactactttcaataggacagtgagcatatttaactgggatgaatatattgaggataaaagtcacttttattttttagaggggcaaaatgatgctctgctttgtggcaacagctcagatgcaggccagtgtcctgaaggatacatctgtgtgaaggctggtagaaaccccaactatggctacacgagctttgacacctttagttgggcctttttgtccttatttcgtctcatgactcaagacttctgggaaaacctttatcaactgacactacgtgctgctgggaaaacgtacatgatattttttgtgctggtcattttcttgggctcattctatctaataaatttgatcttggctgtggtggccatggcctatgaggaacagaatcaggccacattggaagaggctgaacagaaggaagctgaatttcagcagatgctcgaacagttgaaaaagcaacaagaagaagctcaggcggcagctgcagccgcatctgctgaatcaagagacttcagtggtgctggtgggataggagttttttcagagagttcttcagtagcatctaagttgagctccaaaagtgaaaaagagctgaaaaacagaagaaagaaaaagaaacagaaagaacagtctggagaagaagagaaaaatgacagagtccgaaaatcggaatctgaagacagcataagaagaaaaggtttccgtttttccttggaaggaagtaggctgacatatgaaaagagattttcttctccacaccagtccttactgagcatccgtggctcccttttctctccaagacgcaacagtagggcgagccttttcagcttcagaggtcgagcaaaggacattggctctgagaatgactttgctgatgatgagcacagcacctttgaggacaatgacagccgaagagactctctgttcgtgccgcacagacatggagaacggcgccacagcaatgtcagccaggccagccgtgcctccagggtgctccccatcctgcccatgaatgggaagatgcatagcgctgtggactgcaatggtgtggtctccctggtcgggggcccttctaccctcacatctgctgggcagctcctaccagagggcacaactactgaaacagaaataagaaagagacggtccagttcttatcatgtttccatggatttattggaagatcctacatcaaggcaaagagcaatgagtatagccagtattttgaccaacaccatggaagaacttgaagaatccagacagaaatgcccaccatgctggtataaatttgctaatatgtgtttgatttgggactgttgtaaaccatggttaaaggtgaaacaccttgtcaacctggttgtaatggacccatttgttgacctggccatcaccatctgcattgtcttaaatacactcttcatggctatggagcactatcccatgacggagcagttcagcagtgtactgtctgttggaaacctggtcttcacagggatcttcacagcagaaatgtttctcaagataattgccatggatccatattattactttcaagaaggctggaatatttttgatggttttattgtgagccttagtttaatggaacttggtttggcaaatgtggaaggattgtcagttctccgatcattccggctgctccgagttttcaagttggcaaaatcttggccaactctaaatatgctaattaagatcattggcaattctgtgggggctctaggaaacctcaccttggtattggccatcatcgtcttcatttttgctgtggtcggcatgcagctctttggtaagagctacaaagaatgtgtctgcaagatttccaatgattgtgaactcccacgctggcacatgcatgactttttccactccttcctgatcgtgttccgcgtgctgtgtggagagtggatagagaccatgtgggactgtatggaggtcgctggccaaaccatgtgccttactgtcttcatgatggtcatggtgattggaaatctagtggttctgaacctcttcttggccttgcttttgagttccttcagttctgacaatcttgctgccactgatgatgataacgaaatgaataatctccagattgctgtgggaaggatgcagaaaggaatcgattttgttaaaagaaaaatacgtgaatttattcagaaagcctttgttaggaagcagaaagctttagatgaaattaaaccgcttgaagatctaaataataaaaaagacagctgtatttccaaccataccaccatagaaataggcaaagacctcaattatctcaaagacggaaatggaactactagtggcataggcagcagtgtagaaaaatatgtcgtggatgaaagtgattacatgtcatttataaacaaccctagcctcactgtgacagtaccaattgctgttggagaatctgactttgaaaatttaaatactgaagaattcagcagcgagtcagatatggaggaaagcaaagagaagctaaatgcaactagttcatctgaaggcagcacggttgatattggagctcccgccgagggagaacagcctgaggttgaacctgaggaatcccttgaacctgaagcctgttttacagaagactgtgtacggaagttcaagtgttgtcagataagcatagaagaaggcaaagggaaactctggtggaatttgaggaaaacatgctataagatagtggagcacaattggttcgaaaccttcattgtcttcatgattctgctgagcagtggggctctggcctttgaagatatatacattgagcagcgaaaaaccattaagaccatgttagaatatgctgacaaggttttcacttacatattcattctggaaatgctgctaaagtgggttgcatatggttttcaagtgtattttaccaatgcctggtgctggctagacttcctgattgttgatgtctcactggttagcttaactgcaaatgccttgggttactcagaacttggtgccatcaaatccctcagaacactaagagctctgaggccactgagagctttgtcccggtttgaaggaatgagggttgttgtaaatgctcttttaggagccattccatctatcatgaatgtacttctggtttgtctgatcttttggctaatattcagtatcatgggagtgaatctctttgctggcaagttttaccattgtattaattacaccactggagagatgtttgatgtaagcgtggtcaacaactacagtgagtgcaaagctctcattgagagcaatcaaactgccaggtggaaaaatgtgaaagtaaactttgataacgtaggacttggatatctgtctctacttcaagtagccacgtttaagggatggatggatattatgtatgcagctgttgattcacgaaatgtagaattacaacccaagtatgaagacaacctgtacatgtatctttattttgtcatctttattatttttggttcattctttaccttgaatcttttcattggtgtcatcatagataacttcaaccaacagaaaaagaagtttggaggtcaagacatttttatgacagaagaacagaagaaatactacaatgcaatgaaaaaactgggttcaaagaaaccacaaaaacccatacctcgacctgctaacaaattccaaggaatggtctttgattttgtaaccaaacaagtctttgatatcagcatcatgatcctcatctgccttaacatggtcaccatgatggtggaaaccgatgaccagagtcaagaaatgacaaacattctgtactggattaatctggtgtttattgttctgttcactggagaatgtgtgctgaaactgatctctcttcgttactactatttcactattggatggaatatttttgattttgtggtggtcattctctccattgtaggaatgtttctggctgaactgatagaaaagtattttgtgtcccctaccctgttccgagtgatccgtcttgccaggattggccgaatcctacgtctgatcaaaggagcaaaggggatccgcacgctgctctttgctttgatgatgtcccttcctgcgttgtttaacatcggcctccttcttttcctggtcatgttcatctacgccatctttgggatgtccaattttgcctatgttaagagggaagttgggatcgatgacatgttcaactttgagacctttggcaacagcatgatctgcctgttccaaattacaacctctgctggctgggatggattgctagcacctattcttaatagtggacctccagactgtgaccctgacaaagatcaccctggaagctcagttaaaggagactgtgggaacccatctgttgggattttcttttttgtcagttacatcatcatatccttcctggttgtggtgaacatgtacatcgcggtcatcctggagaacttcagtgttgctactgaagaaagtgcagagcctctgagtgaggatgactttgagatgttctatgaggtttgggagaagtttgatcccgatgcgacccagtttatagagtttgccaaactttctgattttgcagatgccctggatcctcctcttctcatagcaaaacccaacaaagtccagctcattgccatggatctgcccatggtgagtggtgaccggatccactgtcttgacatcttatttgcttttacaaagcgtgttttgggtgagagtggagagatggatgcccttcgaatacagatggaagagcgattcatggcatcaaacccctccaaagtctcttatgagcccattacgaccacgttgaaacgcaaacaagaggaggtgtctgctattattatccagagggcttacagacgctacctcttgaagcaaaaagttaaaaaggtatcaagtatatacaagaaagacaaaggcaaagaatgtgatggaacacccatcaaagaagatactctcattgataaactgaatgagaattcaactccagagaaaaccgatatgacgccttccaccacgtctccaccctcgtatgatagtgtgaccaaaccagaaaaagaaaaatttgaaaaagacaaatcagaaaaggaagacaaagggaaagatatcagggaaagtaaaaagtaaaaagaaaccaagaattttccattttgtgatcaattgtttacagcccgtgatggtgatgtgtttgtgtcaacaggactcccacaggaggtctatgccaaactgactgtttttacaaatgtatacttaaggtcagtgcctataacaagacagagacctctggtcagcaaactggaactcagtaaactggagaaatagtatcgatgggaggtttctattttcacaaccagctgacactgctgaagagcagaggcgtaatggctactcagacgataggaaccaatttaaaggggggagggaagttaaatttttatgtaaattcaacatgtgacacttgataatagtaattgtcaccagtgtttatgttttaactgccacacctgccatatttttacaaaacgtgtgctgtgaatttatcacttttctttttaattcacaggttgtttactattatatgtgactatttttgtaaatgggtttgtgtttggggagagggattaaagggagggaattctacatttctctattgtattgtataactggatatattttaaatggaggcatgctgcaattctcattcacacataaaaaaatcacatcacaaaagggaagagtttacttcttgtttcaggatgtttttagatttttgaggtgcttaaatagctattcgtatttttaaggtgtctcatccagaaaaaatttaatgtgcctgtaaatgttccatagaatcacaagcattaaagagttgttttatttttacataacccattaaatgtacatgtatatatgtatatatgtatatgtgcgtgtatatacatatatatgtatacacacatgcacacacagagatatacacataccattacattgtcattcacagtcccagcagcatgactatcacatttttgataagtgtcctttggcataaaataaaaatatcctatcagtcctttctaagaagcctgaattgaccaaaaaacatccccaccaccactttataaagttgattctgctttatcctgcagtattgtttagccatcttctgctcttggtaaggttgacatagtatatgtcaatttaaaaaataaaagtctgctttgtaaatagtaattttacccagtggtgcatgtttgagcaaacaaaaatgatgatttaagcacactacttattgcatcaaatatgtaccacagtaagtatagtttgcaagctttcaacaggtaatatgatgtaattggttccattatagtttgaagctgtcactgctgcatgtttatcttgcctatgctgctgtatcttattccttccactgttcagaagtctaatatgggaagccatatatcagtggtaaagtgaagcaaattgttctaccaagacctcattcttcatgtcattaagcaataggttgcagcaaacaaggaagagcttcttgctttttattcttccaaccttaattgaacactcaatgatgaaaagcccgactgtacaaacatgttgcaagctgcttaaatctgtttaaaatatatggttagagttttctaagaaaatataaatactgtaaaaagttcattttattttatttttcagccttttgtacgtaaaatgagaaattaaaagtatcttcaggtggatgtcacagtcactattgttagtttctgttcctagcacttttaaattgaagcacttcacaaaataagaagcaaggactaggatgcagtgtaggtttctgcttttttattagtactgtaaacttgcacacatttcaatgtgaaacaaatctcaaactgagttcaatgtttatttgctttcaatagtaatgccttatcattgaaagaggcttaaagaaaaaaaaaatcagctgatactcttggcattgcttgaatccaatgtttccacctagtctttttattcagtaatcatcagtcttttccaatgtttgtttacacagatagatcttattgacccatatggcactagaactgtatcagatataatatgggatcccagctttttttcctctcccacaaaaccaggtagtgaagttatattaccagttacagcaaaatactttgtgtttcacaagcaacaataaatgtagattctttatactgaagctattgacttgtagtgtgttggtgaaatgcatgcaggaaaatgctgttaccataaagaacggtaaaccacattacaatcaagccaaaagaataaaggtttcgcttttgtttttgtatttaa

SEQ ID NO: 267451 - DNA, 8792 bp, Artificial Sequence
  derived and/or modified sequence
atgctgttttctaacagacattgggtaccatcgaatgactgtcagaacagaaagctaaggcaaaggagggaggatgctgtggtcatcctttcttgtttttttcttctttaatgaggatagagcacatgtgagattttactttctactccagtaaaaattctgaagaattgcattggagactgttatattcaacacatacgtggattctgtgttatgatttacatttttctttatttcagcactttcttatgcaaggagctaaacagtgattaaaggagcaggatgaaaagatggcacagtcagtgctggtaccgccaggacctgacagcttccgcttctttaccagggaatcccttgctgctattgaacaacgcattgcagaagagaaagctaagagacccaaacaggaacgcaaggatgaggatgatgaaaatggcccaaagccaaacagtgacttggaagcaggaaaatctcttccatttatttatggagacattcctccagagatggtgtcagtgcccctggaggatctggacccctactatatcaataagaaaacgtttatagtattgaataaagggaaagcaatctctcgattcagtgccacccctgccctttacattttaactcccttcaaccctattagaaaattagctattaagattttggtacattctttattcaatatgctcattatgtgcacgattcttaccaactgtgtatttatgaccatgagtaaccctccagactggacaaagaatgtggagtatacctttacaggaatttatacttttgaatcacttattaaaatacttgcaaggggcttttgtttagaagatttcacatttttacgggatccatggaattggttggatttcacagtcattacttttgcatatgtgacagagtttgtggacctgggcaatgtctcagcgttgagaacattcagagttctccgagcattgaaaacaatttcagtcattccaggcctgaagaccattgtgggggccctgatccagtcagtgaagaagctttctgatgtcatgatcttgactgtgttctgtctaagcgtgtttgcgctaataggattgcagttgttcatgggcaacctacgaaataaatgtttgcaatggcctccagataattcttcctttgaaataaatatcacttccttctttaacaattcattggatgggaatggtactactttcaataggacagtgagcatatttaactgggatgaatatattgaggataaaagtcacttttattttttagaggggcaaaatgatgctctgctttgtggcaacagctcagatgcaggccagtgtcctgaaggatacatctgtgtgaaggctggtagaaaccccaactatggctacacgagctttgacacctttagttgggcctttttgtccttatttcgtctcatgactcaagacttctgggaaaacctttatcaactgacactacgtgctgctgggaaaacgtacatgatattttttgtgctggtcattttcttgggctcattctatctaataaatttgatcttggctgtggtggccatggcctatgaggaacagaatcaggccacattggaagaggctgaacagaaggaagctgaatttcagcagatgctcgaacagttgaaaaagcaacaagaagaagctcaggcggcagctgcagccgcatctgctgaatcaagagacttcagtggtgctggtgggataggagttttttcagagagttcttcagtagcatctaagttgagctccaaaagtgaaaaagagctgaaaaacagaagaaagaaaaagaaacagaaagaacagtctggagaagaagagaaaaatgacagagtccgaaaatcggaatctgaagacagcataagaagaaaaggtttccgtttttccttggaaggaagtaggctgacatatgaaaagagattttcttctccacaccagtccttactgagcatccgtggctcccttttctctccaagacgcaacagtagggcgagccttttcagcttcagaggtcgagcaaaggacattggctctgagaatgactttgctgatgatgagcacagcacctttgaggacaatgacagccgaagagactctctgttcgtgccgcacagacatggagaacggcgccacagcaatgtcagccaggccagccgtgcctccagggtgctccccatcctgcccatgaatgggaagatgcatagcgctgtggactgcaatggtgtggtctccctggtcgggggcccttctaccctcacatctgctgggcagctcctaccagagggcacaactactgaaacagaaataagaaagagacggtccagttcttatcatgtttccatggatttattggaagatcctacatcaaggcaaagagcaatgagtatagccagtattttgaccaacaccatggaagaacttgaagaatccagacagaaatgcccaccatgctggtataaatttgctaatatgtgtttgatttgggactgttgtaaaccatggttaaaggtgaaacaccttgtcaacctggttgtaatggacccatttgttgacctggccatcaccatctgcattgtcttaaatacactcttcatggctatggagcactatcccatgacggagcagttcagcagtgtactgtctgttggaaacctggtcttcacagggatcttcacagcagaaatgtttctcaagataattgccatggatccatattattactttcaagaaggctggaatatttttgatggttttattgtgagccttagtttaatggaacttggtttggcaaatgtggaaggattgtcagttctccgatcattccggctgctccgagttttcaagttggcaaaatcttggccaactctaaatatgctaattaagatcattggcaattctgtgggggctctaggaaacctcaccttggtattggccatcatcgtcttcatttttgctgtggtcggcatgcagctctttggtaagagctacaaagaatgtgtctgcaagatttccaatgattgtgaactcccacgctggcacatgcatgactttttccactccttcctgatcgtgttccgcgtgctgtgtggagagtggatagagaccatgtgggactgtatggaggtcgctggccaaaccatgtgccttactgtcttcatgatggtcatggtgattggaaatctagtggttctgaacctcttcttggccttgcttttgagttccttcagttctgacaatcttgctgccactgatgatgataacgaaatgaataatctccagattgctgtgggaaggatgcagaaaggaatcgattttgttaaaagaaaaatacgtgaatttattcagaaagcctttgttaggaagcagaaagctttagatgaaattaaaccgcttgaagatctaaataataaaaaagacagctgtatttccaaccataccaccatagaaataggcaaagacctcaattatctcaaagacggaaatggaactactagtggcataggcagcagtgtagaaaaatatgtcgtggatgaaagtgattacatgtcatttataaacaaccctagcctcactgtgacagtaccaattgctgttggagaatctgactttgaaaatttaaatactgaagaattcagcagcgagtcagatatggaggaaagcaaagagaagctaaatgcaactagttcatctgaaggcagcacggttgatattggagctcccgccgagggagaacagcctgaggttgaacctgaggaatcccttgaacctgaagcctgttttacagaagactgtgtacggaagttcaagtgttgtcagataagcatagaagaaggcaaagggaaactctggtggaatttgaggaaaacatgctataagatagtggagcacaattggttcgaaaccttcattgtcttcatgattctgctgagcagtggggctctggcctttgaagatatatacattgagcagcgaaaaaccattaagaccatgttagaatatgctgacaaggttttcacttacatattcattctggaaatgctgctaaagtgggttgcatatggttttcaagtgtattttaccaatgcctggtgctggctagacttcctgattgttgatgtctcactggttagcttaactgcaaatgccttgggttactcagaacttggtgccatcaaatccctcagaacactaagagctctgaggccactgagagctttgtcccggtttgaaggaatgagggttgttgtaaatgctcttttaggagccattccatctatcatgaatgtacttctggtttgtctgatcttttggctaatattcagtatcatgggagtgaatctctttgctggcaagttttaccattgtattaattacaccactggagagatgtttgatgtaagcgtggtcaacaactacagtgagtgcaaagctctcattgagagcaatcaaactgccaggtggaaaaatgtgaaagtaaactttgataacgtaggacttggatatctgtctctacttcaagtagccacgtttaagggatggatggatattatgtatgcagctgttgattcacgaaatgtagaattacaacccaagtatgaagacaacctgtacatgtatctttattttgtcatctttattatttttggttcattctttaccttgaatcttttcattggtgtcatcatagataacttcaaccaacagaaaaagaagtttggaggtcaagacatttttatgacagaagaacagaagaaatactacaatgcaatgaaaaaactgggttcaaagaaaccacaaaaacccatacctcgacctgctaacaaattccaaggaatggtctttgattttgtaaccaaacaagtctttgatatcagcatcatgatcctcatctgccttaacatggtcaccatgatggtggaaaccgatgaccagagtcaagaaatgacaaacattctgtactggattaatctggtgtttattgttctgttcactggagaatgtgtgctgaaactgatctctcttcgttactactatttcactattggatggaatatttttgattttgtggtggtcattctctccattgtaggaatgtttctggctgaactgatagaaaagtattttgtgtcccctaccctgttccgagtgatccgtcttgccaggattggccgaatcctacgtctgatcaaaggagcaaaggggatccgcacgctgctctttgctttgatgatgtcccttcctgcgttgtttaacatcggcctccttcttttcctggtcatgttcatctacgccatctttgggatgtccaattttgcctatgttaagagggaagttgggatcgatgacatgttcaactttgagacctttggcaacagcatgatctgcctgttccaaattacaacctctgctggctgggatggattgctagcacctattcttaatagtggacctccagactgtgaccctgacaaagatcaccctggaagctcagttaaaggagactgtgggaacccatctgttgggattttcttttttgtcagttacatcatcatatccttcctggttgtggtgaacatgtacatcgcggtcatcctggagaacttcagtgttgctactgaagaaagtgcagagcctctgagtgaggatgactttgagatgttctatgaggtttgggagaagtttgatcccgatgcgacccagtttatagagtttgccaaactttctgattttgcagatgccctggatcctcctcttctcatagcaaaacccaacaaagtccagctcattgccatggatctgcccatggtgagtggtgaccggatccactgtcttgacatcttatttgcttttacaaagcgtgttttgggtgagagtggagagatggatgcccttcgaatacagatggaagagcgattcatggcatcaaacccctccaaagtctcttatgagcccattacgaccacgttgaaacgcaaacaagaggaggtgtctgctattattatccagagggcttacagacgctacctcttgaagcaaaaagttaaaaaggtatcaagtatatacaagaaagacaaaggcaaagaatgtgatggaacacccatcaaagaagatactctcattgataaactgaatgagaattcaactccagagaaaaccgatatgacgccttccaccacgtctccaccctcgtatgatagtgtgaccaaaccagaaaaagaaaaatttgaaaaagacaaatcagaaaaggaagacaaagggaaagatatcagggaaagtaaaaagtaaaaagaaaccaagaattttccattttgtgatcaattgtttacagcccgtgatggtgatgtgtttgtgtcaacaggactcccacaggaggtctatgccaaactgactgtttttacaaatgtatacttaaggtcagtgcctataacaagacagagacctctggtcagcaaactggaactcagtaaactggagaaatagtatcgatgggaggtttctattttcacaaccagctgacactgctgaagagcagaggcgtaatggctactcagacgataggaaccaatttaaaggggggagggaagttaaatttttatgtaaattcaacatgtgacacttgataatagtaattgtcaccagtgtttatgttttaactgccacacctgccatatttttacaaaacgtgtgctgtgaatttatcacttttctttttaattcacaggttgtttactattatatgtgactatttttgtaaatgggtttgtgtttggggagagggattaaagggagggaattctacatttctctattgtattgtataactggatatattttaaatggaggcatgctgcaattctcattcacacataaaaaaatcacatcacaaaagggaagagtttacttcttgtttcaggatgtttttagatttttgaggtgcttaaatagctattcgtatttttaaggtgtctcatccagaaaaaatttaatgtgcctgtaaatgttccatagaatcacaagcattaaagagttgttttatttttacataacccattaaatgtacatgtatatatgtatatatgtatatgtgcgtgtatatacatatatatgtatacacacatgcacacacagagatatacacataccattacattgtcattcacagtcccagcagcatgactatcacatttttgataagtgtcctttggcataaaataaaaatatcctatcagtcctttctaagaagcctgaattgaccaaaaaacatccccaccaccactttataaagttgattctgctttatcctgcagtattgtttagccatcttctgctcttggtaaggttgacatagtatatgtcaatttaaaaaataaaagtctgctttgtaaatagtaattttacccagtggtgcatgtttgagcaaacaaaaatgatgatttaagcacactacttattgcatcaaatatgtaccacagtaagtatagtttgcaagctttcaacaggtaatatgatgtaattggttccattatagtttgaagctgtcactgctgcatgtttatcttgcctatgctgctgtatcttattccttccactgttcagaagtctaatatgggaagccatatatcagtggtaaagtgaagcaaattgttctaccaagacctcattcttcatgtcattaagcaataggttgcagcaaacaaggaagagcttcttgctttttattcttccaaccttaattgaacactcaatgatgaaaagcccgactgtacaaacatgttgcaagctgcttaaatctgtttaaaatatatggttagagttttctaagaaaatataaatactgtaaaaagttcattttattttatttttcagccttttgtacgtaaaatgagaaattaaaagtatcttcaggtggatgtcacagtcactattgttagtttctgttcctagcacttttaaattgaagcacttcacaaaataagaagcaaggactaggatgcagtgtaggtttctgcttttttattagtactgtaaacttgcacacatttcaatgtgaaacaaatctcaaactgagttcaatgtttatttgctttcaatagtaatgccttatcattgaaagaggcttaaagaaaaaaaaaatcagctgatactcttggcattgcttgaatccaatgtttccacctagtctttttattcagtaatcatcagtcttttccaatgtttgtttacacagatagatcttattgacccatatggcactagaactgtatcagatataatatgggatcccagctttttttcctctcccacaaaaccaggtagtgaagttatattaccagttacagcaaaatactttgtgtttcacaagcaacaataaatgtagattctttatactgaagctattgacttgtagtgtgttggtgaaatgcatgcaggaaaatgctgttaccataaagaacggtaaaccacattacaatcaagccaaaagaataaaggtttcgcttttgtttttgtatttaattgttgtctttgtttctatctttgaaatgccatttaaaggtagatttctatcatgtaaaaataatctatctgaaaaacaaatgtaaagaacacacattaattactataattcatctttcaattttttcatggaatggaagttaattaagaagagtgtattggataactactttaatattggccaaaaagctagatatggcatcaggtagactagtggaaagttacaaaaattaataaaaaattgactaacatttt

SEQ ID NO: 267452 - DNA, 1801 bp, Artificial Sequence
  derived and/or modified sequence
atgctgttttctaacagacattgggtaccatcgaatgactgtcagaacagaaagctaaggcaaaggagggaggatgctgtggtcatcctttcttgtttttttcttctttaatgaggatagagcacatgtgagattttactttctactccagtaaaaattctgaagaattgcattggagactgttatattcaacacatacgtggattctgtgttatgatttacatttttctttatttcagcactttcttatgcaaggagctaaacagtgattaaaggagcaggatgaaaagatggcacagtcagtgctggtaccgccaggacctgacagcttccgcttctttaccagggaatcccttgctgctattgaacaacgcattgcagaagagaaagctaagagacccaaacaggaacgcaaggatgaggatgatgaaaatggcccaaagccaaacagtgacttggaagcaggaaaatctcttccatttatttatggagacattcctccagagatggtgtcagtgcccctggaggatctggacccctactatatcaataagaaaacgtttatagtattgaataaagggaaagcaatctctcgattcagtgccacccctgccctttacattttaactcccttcaaccctattagaaaattagctattaagattttggtacattctttattcaatatgctcattatgtgcacgattcttaccaactgtgtatttatgaccatgagtaaccctccagactggacaaagaatgtggagtatacctttacaggaatttatacttttgaatcacttattaaaatacttgcaaggggcttttgtttagaagatttcacatttttacgggatccatggaattggttggatttcacagtcattacttttgcatatgtgacagagtttgtggacctgggcaatgtctcagcgttgagaacattcagagttctccgagcattgaaaacaatttcagtcattccaggcctgaagaccattgtgggggccctgatccagtcagtgaagaagctttctgatgtcatgatcttgactgtgttctgtctaagcgtgtttgcgctaataggattgcagttgttcatgggcaacctacgaaataaatgtttgcaatggcctccagataattcttcctttgaaataaatatcacttccttctttaacaattcattggatgggaatggtactactttcaataggacagtgagcatatttaactgggatgaatatattgaggataaaagtcacttttattttttagaggggcaaaatgatgctctgctttgtggcaacagctcagatgcaggccagtgtcctgaaggatacatctgtgtgaaggctggtagaaaccccaactatggctacacgagctttgacacctttagttgggcctttttgtccttatttcgtctcatgactcaagacttctgggaaaacctttatcaactgacactacgtgctgctgggaaaacgtacatgatattttttgtgctggtcattttcttgggctcattctatctaataaatttgatcttggctgtggtggccatggcctatgaggaacagaatcaggccacattggaagaggctgaacagaaggaagctgaatttcagcagatgctcgaacagttgaaaaagcaacaagaagaagctcaggcggcagctgcagccgcatctgctgaatcaagagacttcagtggtgctggtgggataggagttttttcagagagttcttcagtagcatctaagttgagctccaaaagtgaaaaagagctgaaaaacag

SEQ ID NO: 267453 - DNA, 6018 bp, Artificial Sequence
  derived and/or modified sequence
atggcccagagcgtgctggtgccccccggccccgacagcttcagattcttcaccagagagagcctggccgccatcgagcagagaatcgccgaggagaaggccaagagacccaagcaggagagaaaggacgaggacgacgagaacggccccaagcccaacagcgacctggaggccggcaagagcctgcccttcatctacggcgacatcccccccgagatggtgagcgtgcccctggaggacctggacccctactacatcaacaagaagaccttcatcgtgctgaacaagggcaaggccatcagcagattcagcgccacccccgccctgtacatcctgacccccttcaaccccatcagaaagctggccatcaagatcctggtgcacagcctgttcaacatgctgatcatgtgcaccatcctgaccaactgcgtgttcatgaccatgagcaacccccccgactggaccaagaacgtggagtacaccttcaccggcatctacaccttcgagagcctgatcaagatcctggccagaggcttctgcctggaggacttcaccttcctgagagacccctggaactggctggacttcaccgtgatcaccttcgcctacgtgaccgagttcgtggacctgggcaacgtgagcgccctgagaaccttcagagtgctgagagccctgaagaccatcagcgtgatccccggcctgaagaccatcgtgggcgccctgatccagagcgtgaagaagctgagcgacgtgatgatcctgaccgtgttctgcctgagcgtgttcgccctgatcggcctgcagctgttcatgggcaacctgagaaacaagtgcctgcagtggccccccgacaacagcagcttcgagatcaacatcaccagcttcttcaacaacagcctggacggcaacggcaccaccttcaacagaaccgtgagcatcttcaactgggacgagtacatcgaggacaagagccacttctacttcctggagggccagaacgacgccctgctgtgcggcaacagcagcgacgccggccagtgccccgagggctacatctgcgtgaaggccggcagaaaccccaactacggctacaccagcttcgacaccttcagctgggccttcctgagcctgttcagactgatgacccaggacttctgggagaacctgtaccagctgaccctgagagccgccggcaagacctacatgatcttcttcgtgctggtgatcttcctgggcagcttctacctgatcaacctgatcctggccgtggtggccatggcctacgaggagcagaaccaggccaccctggaggaggccgagcagaaggaggccgagttccagcagatgctggagcagctgaagaagcagcaggaggaggcccaggccgccgccgccgccgccagcgccgagagcagagacttcagcggcgccggcggcatcggcgtgttcagcgagagcagcagcgtggccagcaagctgagcagcaagagcgagaaggagctgaagaacagaagaaagaagaagaagcagaaggagcagagcggcgaggaggagaagaacgacagagtgagaaagagcgagagcgaggacagcatcagaagaaagggcttcagattcagcctggagggcagcagactgacctacgagaagagattcagcagcccccaccagagcctgctgagcatcagaggcagcctgttcagccccagaagaaacagcagagccagcctgttcagcttcagaggcagagccaaggacatcggcagcgagaacgacttcgccgacgacgagcacagcaccttcgaggacaacgacagcagaagagacagcctgttcgtgccccacagacacggcgagagaagacacagcaacgtgagccaggccagcagagccagcagagtgctgcccatcctgcccatgaacggcaagatgcacagcgccgtggactgcaacggcgtggtgagcctggtgggcggccccagcaccctgaccagcgccggccagctgctgcccgagggcaccaccaccgagaccgagatcagaaagagaagaagcagcagctaccacgtgagcatggacctgctggaggaccccaccagcagacagagagccatgagcatcgccagcatcctgaccaacaccatggaggagctggaggagagcagacagaagtgccccccctgctggtacaagttcgccaacatgtgcctgatctgggactgctgcaagccctggctgaaggtgaagcacctggtgaacctggtggtgatggaccccttcgtggacctggccatcaccatctgcatcgtgctgaacaccctgttcatggccatggagcactaccccatgaccgagcagttcagcagcgtgctgagcgtgggcaacctggtgttcaccggcatcttcaccgccgagatgttcctgaagatcatcgccatggacccctactactacttccaggagggctggaacatcttcgacggcttcatcgtgagcctgagcctgatggagctgggcctggccaacgtggagggcctgagcgtgctgagaagcttcagactgctgagagtgttcaagctggccaagagctggcccaccctgaacatgctgatcaagatcatcggcaacagcgtgggcgccctgggcaacctgaccctggtgctggccatcatcgtgttcatcttcgccgtggtgggcatgcagctgttcggcaagagctacaaggagtgcgtgtgcaagatcagcaacgactgcgagctgcccagatggcacatgcacgacttcttccacagcttcctgatcgtgttcagagtgctgtgcggcgagtggatcgagaccatgtgggactgcatggaggtggccggccagaccatgtgcctgaccgtgttcatgatggtgatggtgatcggcaacctggtggtgctgaacctgttcctggccctgctgctgagcagcttcagcagcgacaacctggccgccaccgacgacgacaacgagatgaacaacctgcagatcgccgtgggcagaatgcagaagggcatcgacttcgtgaagagaaagatcagagagttcatccagaaggccttcgtgagaaagcagaaggccctggacgagatcaagcccctggaggacctgaacaacaagaaggacagctgcatcagcaaccacaccaccatcgagatcggcaaggacctgaactacctgaaggacggcaacggcaccaccagcggcatcggcagcagcgtggagaagtacgtggtggacgagagcgactacatgagcttcatcaacaaccccagcctgaccgtgaccgtgcccatcgccgtgggcgagagcgacttcgagaacctgaacaccgaggagttcagcagcgagagcgacatggaggagagcaaggagaagctgaacgccaccagcagcagcgagggcagcaccgtggacatcggcgcccccgccgagggcgagcagcccgaggtggagcccgaggagagcctggagcccgaggcctgcttcaccgaggactgcgtgagaaagttcaagtgctgccagatcagcatcgaggagggcaagggcaagctgtggtggaacctgagaaagacctgctacaagatcgtggagcacaactggttcgagaccttcatcgtgttcatgatcctgctgagcagcggcgccctggccttcgaggacatctacatcgagcagagaaagaccatcaagaccatgctggagtacgccgacaaggtgttcacctacatcttcatcctggagatgctgctgaagtgggtggcctacggcttccaggtgtacttcaccaacgcctggtgctggctggacttcctgatcgtggacgtgagcctggtgagcctgaccgccaacgccctgggctacagcgagctgggcgccatcaagagcctgagaaccctgagagccctgagacccctgagagccctgagcagattcgagggcatgagagtggtggtgaacgccctgctgggcgccatccccagcatcatgaacgtgctgctggtgtgcctgatcttctggctgatcttcagcatcatgggcgtgaacctgttcgccggcaagttctaccactgcatcaactacaccaccggcgagatgttcgacgtgagcgtggtgaacaactacagcgagtgcaaggccctgatcgagagcaaccagaccgccagatggaagaacgtgaaggtgaacttcgacaacgtgggcctgggctacctgagcctgctgcaggtggccaccttcaagggctggatggacatcatgtacgccgccgtggacagcagaaacgtggagctgcagcccaagtacgaggacaacctgtacatgtacctgtacttcgtgatcttcatcatcttcggcagcttcttcaccctgaacctgttcatcggcgtgatcatcgacaacttcaaccagcagaagaagaagttcggcggccaggacatcttcatgaccgaggagcagaagaagtactacaacgccatgaagaagctgggcagcaagaagccccagaagcccatccccagacccgccaacaagttccagggcatggtgttcgacttcgtgaccaagcaggtgttcgacatcagcatcatgatcctgatctgcctgaacatggtgaccatgatggtggagaccgacgaccagagccaggagatgaccaacatcctgtactggatcaacctggtgttcatcgtgctgttcaccggcgagtgcgtgctgaagctgatcagcctgagatactactacttcaccatcggctggaacatcttcgacttcgtggtggtgatcctgagcatcgtgggcatgttcctggccgagctgatcgagaagtacttcgtgagccccaccctgttcagagtgatcagactggccagaatcggcagaatcctgagactgatcaagggcgccaagggcatcagaaccctgctgttcgccctgatgatgagcctgcccgccctgttcaacatcggcctgctgctgttcctggtgatgttcatctacgccatcttcggcatgagcaacttcgcctacgtgaagagagaggtgggcatcgacgacatgttcaacttcgagaccttcggcaacagcatgatctgcctgttccagatcaccaccagcgccggctgggacggcctgctggcccccatcctgaacagcggcccccccgactgcgaccccgacaaggaccaccccggcagcagcgtgaagggcgactgcggcaaccccagcgtgggcatcttcttcttcgtgagctacatcatcatcagcttcctggtggtggtgaacatgtacatcgccgtgatcctggagaacttcagcgtggccaccgaggagagcgccgagcccctgagcgaggacgacttcgagatgttctacgaggtgtgggagaagttcgaccccgacgccacccagttcatcgagttcgccaagctgagcgacttcgccgacgccctggacccccccctgctgatcgccaagcccaacaaggtgcagctgatcgccatggacctgcccatggtgagcggcgacagaatccactgcctggacatcctgttcgccttcaccaagagagtgctgggcgagagcggcgagatggacgccctgagaatccagatggaggagagattcatggccagcaaccccagcaaggtgagctacgagcccatcaccaccaccctgaagagaaagcaggaggaggtgagcgccatcatcatccagagagcctacagaagatacctgctgaagcagaaggtgaagaaggtgagcagcatctacaagaaggacaagggcaaggagtgcgacggcacccccatcaaggaggacaccctgatcgacaagctgaacgagaacagcacccccgagaagaccgacatgacccccagcaccaccagcccccccagctacgacagcgtgaccaagcccgagaaggagaagttcgagaaggacaagagcgagaaggaggacaagggcaaggacatcagagagagcaagaagtag

SEQ ID NO: 267454 - DNA, 1512 bp, Artificial Sequence
  derived and/or modified sequence
atggcccagagcgtgctggtgccccccggccccgacagcttcagattcttcaccagagagagcctggccgccatcgagcagagaatcgccgaggagaaggccaagagacccaagcaggagagaaaggacgaggacgacgagaacggccccaagcccaacagcgacctggaggccggcaagagcctgcccttcatctacggcgacatcccccccgagatggtgagcgtgcccctggaggacctggacccctactacatcaacaagaagaccttcatcgtgctgaacaagggcaaggccatcagcagattcagcgccacccccgccctgtacatcctgacccccttcaaccccatcagaaagctggccatcaagatcctggtgcacagcctgttcaacatgctgatcatgtgcaccatcctgaccaactgcgtgttcatgaccatgagcaacccccccgactggaccaagaacgtggagtacaccttcaccggcatctacaccttcgagagcctgatcaagatcctggccagaggcttctgcctggaggacttcaccttcctgagagacccctggaactggctggacttcaccgtgatcaccttcgcctacgtgaccgagttcgtggacctgggcaacgtgagcgccctgagaaccttcagagtgctgagagccctgaagaccatcagcgtgatccccggcctgaagaccatcgtgggcgccctgatccagagcgtgaagaagctgagcgacgtgatgatcctgaccgtgttctgcctgagcgtgttcgccctgatcggcctgcagctgttcatgggcaacctgagaaacaagtgcctgcagtggccccccgacaacagcagcttcgagatcaacatcaccagcttcttcaacaacagcctggacggcaacggcaccaccttcaacagaaccgtgagcatcttcaactgggacgagtacatcgaggacaagagccacttctacttcctggagggccagaacgacgccctgctgtgcggcaacagcagcgacgccggccagtgccccgagggctacatctgcgtgaaggccggcagaaaccccaactacggctacaccagcttcgacaccttcagctgggccttcctgagcctgttcagactgatgacccaggacttctgggagaacctgtaccagctgaccctgagagccgccggcaagacctacatgatcttcttcgtgctggtgatcttcctgggcagcttctacctgatcaacctgatcctggccgtggtggccatggcctacgaggagcagaaccaggccaccctggaggaggccgagcagaaggaggccgagttccagcagatgctggagcagctgaagaagcagcaggaggaggcccaggccgccgccgccgccgccagcgccgagagcagagacttcagcggcgccggcggcatcggcgtgttcagcgagagcagcagcgtggccagcaagctgagcagcaagagcgagaaggagctgaagaactag

SEQ ID NO: 267455 - protein, 2005 aa, Artificial Sequence
  derived and/or modified sequence
MAQSVLVPPGPDSFRFFTRESLAAIEQRIAEEKAKRPKQERKDEDDENGPKPNSDLEAGKSLPFIYGDIPPEMVSVPLEDLDPYYINKKTFIVLNKGKAISRFSATPALYILTPFNPIRKLAIKILVHSLFNMLIMCTILTNCVFMTMSNPPDWTKNVEYTFTGIYTFESLIKILARGFCLEDFTFLRDPWNWLDFTVITFAYVTEFVNLGNVSALRTFRVLRALKTISVIPGLKTIVGALIQSVKKLSDVMILTVFCLSVFALIGLQLFMGNLRNKCLQWPPDNSSFEINITSFFNNSLDGNGTTFNRTVSIFNWDEYIEDKSHFYFLEGQNDALLCGNSSDAGQCPEGYICVKAGRNPNYGYTSFDTFSWAFLSLFRLMTQDFWENLYQLTLRAAGKTYMIFFVLVIFLGSFYLINLILAVVAMAYEEQNQATLEEAEQKEAEFQQMLEQLKKQQEEAQAAAAAASAESRDFSGAGGIGVFSESSSVASKLSSKSEKELKNRRKKKKQKEQSGEEEKNDRVRKSESEDSIRRKGFRFSLEGSRLTYEKRFSSPHQSLLSIRGSLFSPRRNSRASLFSFRGRAKDIGSENDFADDEHSTFEDNDSRRDSLFVPHRHGERRHSNVSQASRASRVLPILPMNGKMHSAVDCNGVVSLVGGPSTLTSAGQLLPEGTTTETEIRKRRSSSYHVSMDLLEDPTSRQRAMSIASILTNTMEELEESRQKCPPCWYKFANMCLIWDCCKPWLKVKHLVNLVVMDPFVDLAITICIVLNTLFMAMEHYPMTEQFSSVLSVGNLVFTGIFTAEMFLKIIAMDPYYYFQEGWNIFDGFIVSLSLMELGLANVEGLSVLRSFRLLRVFKLAKSWPTLNMLIKIIGNSVGALGNLTLVLAIIVFIFAVVGMQLFGKSYKECVCKISNDCELPRWHMHDFFHSFLIVFRVLCGEWIETMWDCMEVAGQTMCLTVFMMVMVIGNLVVLNLFLALLLSSFSSDNLAATDDDNEMNNLQIAVGRMQKGIDFVKRKIREFIQKAFVRKQKALDEIKPLEDLNNKKDSCISNHTTIEIGKDLNYLKDGNGTTSGIGSSVEKYVVDESDYMSFINNPSLTVTVPIAVGESDFENLNTEEFSSESDMEESKEKLNATSSSEGSTVDIGAPAEGEQPEVEPEESLEPEACFTEDCVRKFKCCQISIEEGKGKLWWNLRKTCYKIVEHNWFETFIVFMILLSSGALAFEDIYIEQRKTIKTMLEYADKVFTYIFILEMLLKWVAYGFQVYFTNAWCWLDFLIVDVSLVSLTANALGYSELGAIKSLRTLRALRPLRALSRFEGMRVVVNALLGAIPSIMNVLLVCLIFWLIFSIMGVNLFAGKFYHCINYTTGEMFDVSVVNNYSECKALIESNQTARWKNVKVNFDNVGLGYLSLLQVATFKGWMDIMYAAVDSRNVELQPKYEDNLYMYLYFVIFIIFGSFFTLNLFIGVIIDNFNQQKKKFGGQDIFMTEEQKKYYNAMKKLGSKKPQKPIPRPANKFQGMVFDFVTKQVFDISIMILICLNMVTMMVETDDQSQEMTNILYWINLVFIVLFTGECVLKLISLRYYYFTIGWNIFDFVVVILSIVGMFLAELIEKYFVSPTLFRVIRLARIGRILRLIKGAKGIRTLLFALMMSLPALFNIGLLLFLVMFIYAIFGMSNFAYVKREVGIDDMFNFETFGNSMICLFQITTSAGWDGLLAPILNSGPPDCDPDKDHPGSSVKGDCGNPSVGIFFFVSYIIISFLVVVNMYIAVILENFSVATEESAEPLSEDDFEMFYEVWEKFDPDATQFIEFAKLSDFADALDPPLLIAKPNKVQLIAMDLPMVSGDRIHCLDILFAFTKRVLGESGEMDALRIQMEERFMASNPSKVSYEPITTTLKRKQEEVSAIIIQRAYRRYLLKQKVKKVSSIYKKDKGKECDGTPIKEDTLIDKLNENSTPEKTDMTPSTTSPPSYDSVTKPEKEKFEKDKSEKEDKGKDIRESKK

SEQ ID NO: 267456 - DNA, 6018 bp, Artificial Sequence
  derived and/or modified sequence
atggcacagtccgtgctggtgccacccggaccggatagctttcgcttctttaccagagaaagtttggcggctatagaacagaggatcgcagaagagaaagcgaaacggccgaagcaggagaggaaggatgaggatgatgagaacggacccaaacctaattcggacctcgaggcaggcaagagcctgcctttcatctacggtgacatacctcctgagatggtatcagtcccgctggaagatctcgacccatattacattaacaagaaaacctttattgtgctcaataagggaaaggccatctcccggttcagtgccactcctgctttatacatcctcacccccttcaaccctatcagaaagttagcgattaagattctggtgcactcactgtttaatatgctcataatgtgcacaatcctgacgaactgcgtctttatgactatgtctaatcctcctgactggaccaaaaacgttgagtacaccttcacagggatctacactttcgagagtttgattaagattttggcacggggtttctgtctcgaggatttcacctttctgcgcgacccttggaattggctcgactttaccgtaatcacatttgcttatgttacagaattcgtaaatcttggcaatgttagcgcattgcggacgttccgagttctccgcgctttaaagaccattagcgtgatccccggcctcaagaccattgtgggtgcccttatccagtccgttaagaagctcagtgacgtcatgatactgaccgttttttgcctgagtgtcttcgcgctgattgggttgcagctgttcatgggaaacttgcgaaacaagtgcctccagtggcccccagacaactcttcctttgagattaacatcacttcttttttcaacaacagtcttgacgggaacggaacaacctttaaccggaccgttagcatattcaattgggacgagtacatcgaggacaagtcccacttctatttcctcgaaggccagaatgacgccttactttgcggcaatagctccgacgctggacagtgcccagaaggttacatctgtgtcaaggctggacgaaatcccaactacgggtacacaagcttcgataccttcagctgggcctttttaagtctgtttagactcatgacccaggacttctgggagaatctatatcagttaacattgcgtgccgcagggaagacgtatatgatctttttcgtgctggtgatttttctgggcagcttctacctgattaacctcatattagcggttgtcgcaatggcctacgaggagcagaaccaggccacactggaggaggctgaacagaaggaagccgagtttcaacagatgctcgaacagctgaagaaacagcaggaagaagcacaggcggccgcagcagctgcttccgccgaatctagagattttagcggagcaggaggcattggggtgttctccgaatcctcttcagtggcttcgaaattaagctccaaatcggaaaaggagcttaagaaccgtcgaaagaagaaaaaacaaaaggagcaatctggcgaggaggagaagaacgacagggtcagaaaaagtgagagcgaggattccatacggcggaagggattcagattttcactagagggtagccgattgacatacgagaaaagattctcttctccgcaccagagtctgttaagtatccggggcagtctgttcagtccaagacgcaattctagagcgtctctcttttccttccggggccgtgccaaggatattgggtccgaaaacgattttgcagacgacgagcactccactttcgaggacaatgattctcgccgagactctctctttgtaccccatcgtcacggtgaacgcagacattccaacgtctcacaggcgtccagggcctctagggttctgcctatcctgccaatgaatgggaaaatgcattcagcggtcgactgtaatggagtcgtgtccctcgtgggcggaccgtcgaccctcacatccgcagggcagctcctgcctgagggcaccaccacagagactgaaatccgcaagcggcggtcatcaagctaccatgtctcaatggacttacttgaagatccaacaagtcggcagcgcgctatgtccatagcctctattctgacaaatacaatggaggagctcgaggaatcacggcagaagtgccctccttgctggtataagtttgctaatatgtgcctgatttgggattgttgtaagccatggctgaaggtgaaacaccttgtaaacctggtggtcatggaccccttcgtagacctggccatcactatctgcatcgtgctgaatactttattcatggccatggagcattaccccatgaccgaacagttcagttctgttttgagcgtaggtaatctagtcttcacgggaatcttcacagccgagatgttcctcaaaataattgcaatggatccatattattactttcaagaagggtggaacatttttgatggtttcatagtgtctctatctttaatggagcttggactggcgaatgtggaagggctctccgtcctacgatcgttccgccttttacgggtatttaaactggctaaaagctggcctacgctaaacatgctcattaagatcattggtaacagcgttggagccctaggaaacctgaccctggttcttgccatcatagtgtttatcttcgcagtagtcggcatgcagctgttcggcaagtcttataaggagtgtgtgtgtaaaatcagcaacgactgtgagctgcctaggtggcacatgcacgactttttccatagtttcctgatcgtcttcagggtgctgtgtggggagtggattgagactatgtgggattgcatggaagtggccggccaaacaatgtgtctgactgtctttatgatggttatggtaatcgggaacctggttgtactgaacctgttcctcgccctgctactgagctcttttagctcggacaacctggctgccactgatgacgataacgagatgaataatctccaaattgctgttggacgtatgcagaagggtatcgactttgtcaaacgtaagatccgagagttcattcagaaagcctttgtgaggaagcaaaaggccctggatgaaatcaagccactagaggatcttaataacaagaaggatagttgtatctctaaccacaccacaatcgagatcgggaaggacctgaactacctaaaggacggaaacggaacaaccagcgggatagggagtagcgtggagaaatatgtcgtggacgagtccgactatatgtcttttatcaacaatccatctctaaccgttactgtgcccattgctgttggtgagtctgactttgaaaatttgaataccgaggaattctcaagtgagtctgatatggaggagagcaaagaaaagctcaatgccacctcctcctctgagggttccaccgtggatattggggcccccgcagaaggcgagcagcctgaagttgagcccgaggagtctctggaaccagaggcatgcttcaccgaggactgcgtgaggaaattcaaatgctgtcaaatctccatcgaggaggggaagggtaagctgtggtggaacctgagaaagacatgttataagattgtggaacataactggttcgaaacttttattgtctttatgatcttgctttcatcaggcgcactggcctttgaagatatctacatagagcaaaggaagacaatcaaaactatgcttgagtatgctgataaggtgttcacctatattttcatactagagatgctcttgaagtgggtcgcttacggcttccaggtctacttcactaatgcgtggtgttggctggacttcctcatcgtggacgttagcctggtgtctctcacggctaacgcactgggatacagtgagttgggcgcaatcaaaagtctgaggacacttagagcacttaggcccctgcgcgccctgtctcggtttgagggcatgcgcgtggtggtaaatgccctgctcggtgccatcccaagtattatgaatgtgctgctcgtgtgcctgatcttctggctgatcttttctattatgggagttaaccttttcgccggcaagttctatcactgtatcaactatacaaccggcgagatgtttgacgtctctgtggtcaacaactactctgaatgtaaggccctcatcgagagcaatcagaccgcccgttggaagaacgtcaaggtgaacttcgataatgtgggcctggggtatctgtcattactgcaggtggcgacttttaagggctggatggacatcatgtacgctgctgtggacagtcggaatgtggaactccaacctaaatatgaagataacttgtatatgtatctgtatttcgtcattttcatcatattcgggagcttttttacactgaatttattcatcggtgtgattatcgataacttcaaccagcagaaaaagaaattcggcggccaagacatcttcatgacagaggagcagaagaaatattataacgccatgaagaagctgggtagcaagaaaccacagaagcccatcccacgcccagctaataaattccagggtatggtgtttgacttcgtgacaaagcaggtgtttgatattagcatcatgattctaatctgtttaaacatggtgacaatgatggtcgagactgacgaccagtctcaggaaatgacaaacatcctgtattggattaacttagtgttcattgtcctgtttacaggggaatgtgtgctgaaactcatctcacttaggtactactattttactatcggatggaacattttcgatttcgtcgtggtcattttaagcatcgtggggatgtttttagcggagttgattgagaagtacttcgtttcaccaactctcttcagagtgattaggctcgcccgcattggtaggatcctgagactgattaaaggcgccaaggggatcagaacacttctgttcgcactcatgatgtctctcccagcccttttcaatatcgggttactccttttcttggttatgttcatttacgccatattcggtatgagcaactttgcttacgtcaaaagagaagtaggtattgacgacatgttcaattttgagacttttggtaactccatgatctgtctctttcagatcaccacctccgcaggctgggatggccttttggctcctatacttaatagtggcccacccgactgtgatcccgataaggatcaccctggatcctccgtaaagggtgattgtggaaatcctagcgtgggtatcttttttttcgttagttacatcattatcagctttctggttgtggtgaatatgtatatcgccgttatcctcgagaattttagcgttgccacggaagagagtgctgagcccctgtccgaggacgatttcgagatgttttacgaggtctgggagaagttcgatcccgacgcaacgcaattcatcgaattcgcaaagctgtccgacttcgctgatgccttggatccccccctcctcatcgcgaagccaaataaggtgcagcttattgcgatggacctgcctatggtgtccggagaccggatccattgcctggacatcctgttcgcttttaccaagcgcgttttgggcgagtcaggggagatggacgccctgcggattcagatggaggagcgctttatggctagcaacccatcaaaggtgagctacgagcctataacaactactcttaaaagaaagcaggaggaagtgtcagctatcattatccaaagggcatatcggcgctacctgctcaaacagaaggtgaagaaagtgtcatccatctataagaaggataaagggaaggaatgtgatggaactcctatcaaggaagacactctcatagataaattgaatgagaacagcacaccagagaagacggacatgacaccttccaccacatcccctcccagttacgactctgtgacaaagcctgagaaagagaagttcgaaaaagataagtctgagaaggaagataaaggcaaggacatcagagaaagtaaaaaatag

SEQ ID NO: 267457 - DNA, 6018 bp, Artificial Sequence
  derived and/or modified sequence
atggctcagtctgtgttggtgccccccgggcctgatagctttagattcttcacgagggaaagccttgcggccattgagcagcggatcgccgaggaaaaggctaagcgaccgaaacaggagaggaaggacgaggacgacgaaaacggtcctaagcccaacagcgacctggaagcaggcaagtcactgcccttcatctatggggatatccctccagaaatggtgagcgtacctctggaggaccttgacccatactacatcaacaagaaaacttttatcgttctcaacaaaggcaaggcaatctcacggtttagcgccactccagccctgtacatcctcaccccctttaatccgatacggaaactcgcaatcaagatcctggttcatagcctttttaacatgttgatcatgtgcacaatcctcaccaactgcgtgttcatgacaatgtccaacccccctgattggaccaaaaatgtggaatacacgtttactgggatctacacttttgagagtttgatcaagatcctggctcgggggttctgtcttgaagacttcacctttttacgcgacccctggaattggctggattttaccgttattacgtttgcctacgtgacggagtttgtcaacctgggcaacgtgtctgcactcagaacatttcgagtcctgcgagccctaaaaacaatctctgtgatcccgggtcttaagaccatcgtcggtgcactcatccagtccgtcaagaaactgagcgatgtgatgatactaacagtcttctgcctttccgtgttcgcccttattggtcttcaactgttcatggggaatctgcgtaacaagtgtctgcaatggccgcccgacaatagttcctttgaaatcaacatcaccagcttcttcaataattcattagatggtaacggaaccacattcaaccgcaccgtttccatcttcaattgggacgagtacatcgaggacaagtctcacttttatttccttgagggtcagaacgacgctcttctgtgcggaaactcttctgatgccggccagtgccctgagggatacatttgcgtaaaagctggaagaaatccaaattacggttatacctcattcgatacctttagctgggccttcctctctctttttcggttaatgacccaggacttctgggagaacttgtaccaactgacgctgcgcgctgctggcaagacttatatgatcttttttgtcctcgtcatctttcttgggtccttttacctcatcaatctcattttagctgtggtcgcgatggcatacgaggagcagaaccaggccactctcgaagaagctgaacagaaagaagcggagtttcagcagatgttggagcaactcaagaagcagcaggaagaggcgcaggctgcagccgcagccgccagcgcagaaagtcgcgactttagcggagccggcggtattggggtcttctccgaaagcagtagtgtcgcttcaaaattgagctccaagagcgagaaagaactgaaaaacagacgtaagaaaaagaagcagaaagagcagagtggcgaagaagagaaaaacgacagggtgcggaaaagcgaaagcgaggacagcatacgtcggaaaggcttccgattctcactcgaggggtcccgactgacgtacgagaagcgcttttcttctccgcaccagtccctcctgtctatcagagggagtcttttcagtccccgcaggaattcacgcgcatccttatttagctttagaggtcgcgctaaggacatagggagcgaaaacgactttgctgacgacgaacattcgacctttgaggacaacgatagtaggcgagatagtctgttcgtgcctcaccggcacggcgagaggcgacatagcaacgtgtcacaagcgagcagggcgtcacgggtgctgcccattctccccatgaacggaaagatgcactcagccgtcgactgcaacggcgtcgtcagtcttgtcggggggccatctaccctgacatctgcgggccagctcctgccagaaggcaccacaacagagactgaaatacgcaaacgcaggagcagctcttatcacgtaagcatggatttgctcgaggacccgactagtcgacagagagccatgagcattgcctccattttaaccaatacaatggaggaactggaggagtcaaggcagaaatgcccaccctgctggtacaagtttgccaatatgtgtctgatttgggattgctgcaaaccgtggctcaaggtgaagcatttggtgaatcttgtggtaatggaccccttcgtagacctcgcgattactatctgtatagtgctcaacacactgtttatggcaatggaacactatcccatgaccgagcagttcagttccgtgctgtccgttggaaacctggtgttcacaggcatttttacagcagaaatgtttctcaagatcatagcgatggacccatactactatttccaagaaggatggaacatttttgacggattcatcgtgagtttatcactgatggagttagggctcgccaacgtggaaggactgtctgttcttaggagttttcggctcctcagggtgttcaagttagccaagtcgtggccaactctgaacatgctcattaagatcatcggcaattccgtgggggcactgggaaatctcactctggtgctggcaattatcgtctttatctttgcggtggtcggcatgcagctcttcggtaagtcttataaggaatgcgtttgtaagatttcaaatgactgcgagctgccgcgatggcatatgcacgacttctttcatagcttcctgattgtatttagagtgctatgcggggagtggatagaaaccatgtgggactgcatggaagttgccgggcagactatgtgcctgacggtattcatgatggtgatggtcatcgggaacctggtggtcttgaatctgttccttgcccttctgctgtcctccttttcctctgacaacctggctgcgactgacgatgacaatgagatgaataacctgcaaatcgcagttggccgtatgcagaagggcatagatttcgtgaaaaggaagatccgtgaattcattcagaaggcctttgtcagaaaacaaaaagccttggacgagatcaaacctctggaagatctgaacaataaaaaggactcatgtatttccaatcacacgaccatcgagataggcaaagatctcaattacctgaaagacggcaacgggaccacaagtggcataggatcctccgtggagaaatatgtagtcgatgagtctgattatatgtcatttattaataatccctccctgaccgtcaccgtgccaattgccgtcggtgagtcagacttcgagaaccttaatactgaagaattctcctccgaatccgacatggaggaatccaaggagaagctcaacgccacctcgtcttcagagggcagcacggtggacattggcgcgcccgccgagggcgaacagccggaggtggagccagaagagtctctggagcctgaggcttgttttacggaggactgtgtgaggaaattcaagtgttgtcagatttctatcgaagaaggcaaagggaagttgtggtggaacctgagaaagacctgctacaagattgtggaacacaactggtttgaaactttcatcgtatttatgattctgctttccagcggcgctctggcattcgaagacatttacatagagcaaaggaaaacaatcaaaactatgttggaatacgccgacaaggtcttcacatacatattcattctcgaaatgctgcttaaatgggtggcttacgggtttcaagtgtattttactaacgcttggtgctggttagactttttgatcgtggatgtgagtctcgtttctctcactgcaaatgccctaggatactctgagctgggcgctattaaaagcttacggactctgcgtgcactgcgcccattacgggcactatcccggtttgaaggtatgcgtgtggttgtgaacgcccttcttggggccataccaagcattatgaatgtcctgctcgtgtgcctgatcttttggttaattttctctattatgggtgttaatctgttcgctggcaagttctaccattgcattaattacacaacgggggaaatgtttgatgtgtccgtggttaataattattctgaatgtaaggctttgattgagtccaatcaaacagcccgttggaagaacgtaaaggtcaattttgacaatgtgggactcggatatctcagcctgctccaggtggcgaccttcaagggttggatggacattatgtacgccgcggttgactcccggaatgtcgaactgcaacccaaatatgaagacaacctgtatatgtacctgtactttgtcatcttcattatcttcgggtcatttttcaccctgaacttattcatcggggtgattatcgataatttcaaccagcagaaaaaaaaatttggtggccaggatatattcatgacagaggaacagaagaaatactacaatgccatgaagaagctggggtcaaagaaacctcagaaaccaatccccagaccagccaataaatttcagggcatggtgttcgacttcgtgacgaaacaagttttcgacatcagcataatgatcctgatttgcctcaatatggtgacaatgatggttgagacagacgatcagtcgcaggagatgaccaacattctgtattggataaacctcgtgttcatcgtgttatttaccggagaatgtgtgttaaagctcatcagcctccgctattactactttactattgggtggaatatttttgatttcgtagtggtgattttgtctatcgtgggcatgtttcttgctgagctgatcgagaaatatttcgtcagccccacgttgtttagagtgattcggctcgccaggatcgggaggattttgcgcttgattaagggggcaaaagggatacgtacattgctctttgccctcatgatgtccctgccagctctctttaatatcggtttgctcctgtttttggtaatgtttatctatgctatattcgggatgtcgaacttcgcctatgtaaagcgcgaggtagggatcgatgacatgtttaactttgagacctttggcaattcaatgatttgtcttttccagattactactagtgcaggctgggacggactgctagcccccatcctgaatagcggcccacccgattgtgatcctgataaagatcaccccgggtctagcgtcaaaggtgattgcgggaatccttcagtaggcatctttttctttgtgagttatatcattatatccttcctggtggtggtgaacatgtatatagctgtgatactcgaaaacttcagcgttgccacagaagaaagcgcagagcccctgtcagaggacgactttgaaatgttttacgaggtgtgggaaaaattcgatcctgatgccacccaattcattgaatttgctaagctgtccgatttcgccgacgcccttgatccacccctactgatcgcaaagcctaacaaagtgcaattaatcgctatggacctgccaatggtgtccggggaccgtattcattgtctcgacattttgttcgccttcaccaaacgggtgctcggtgaaagcggagagatggacgcattgaggatccaaatggaggaaagattcatggcatctaatccctccaaggtgtcatacgaaccaatcaccacgacattgaagcgtaagcaggaggaggtcagcgctattattattcagagagcataccgtagatacttgctaaagcagaaagtaaagaaggtaagcagtatctataagaaggacaagggcaaagagtgtgatggaacaccaatcaaggaagacaccctcatagataagctgaatgagaactcaacaccagaaaaaacggatatgaccccaagcacaacatctccaccctcttacgattctgtgacaaaaccagaaaaggaaaagtttgaaaaagataagtctgagaaggaggataaagggaaggatattcgagaatccaagaaatag

SEQ ID NO: 267458 - DNA, 6018 bp, Artificial Sequence
  derived and/or modified sequence
atggcccagagcgtgctggtgcccccaggccctgacagcttccgcttcttcacccgggagagcctggccgccatcgagcagagaattgctgaggagaaggccaagaggcccaagcaggagaggaaggatgaagatgatgaaaatggccccaagcccaacagcgacctggaggccggcaagagcctgcccttcatctacggggacatccccccagagatggtgtctgtgcccctggaggacctggacccctactacatcaacaagaagaccttcatcgtgctgaacaagggcaaggccatcagccgcttcagcgccaccccagccctgtacatcctgacccccttcaaccccatcaggaagctggccatcaagatcctggtgcacagcctcttcaacatgctgatcatgtgcaccatcctgaccaactgtgtgttcatgaccatgagcaaccccccagactggaccaagaatgtggagtacaccttcaccggcatctacacctttgagagcctcatcaagatcctggcccggggcttctgcctggaggacttcaccttcctgcgggacccctggaactggctggacttcaccgtcatcacctttgcctacgtgacagaatttgtgaacctgggcaatgtgtctgccctgcggaccttccgggtgctgcgggccctgaagaccatcagcgtcatccctggcctgaagaccatcgtgggcgccctgatccagagcgtgaagaagctgagtgatgtgatgatcctgactgtgttctgcctgtctgtgtttgccctgattggcctgcagctgttcatgggcaacctgaggaacaagtgcctgcagtggcccccagacaacagcagctttgagatcaacatcaccagcttcttcaacaacagcctggatggaaatggcaccaccttcaacagaacagtgtccatcttcaactgggatgagtacatcgaggacaagagccacttctacttcctggagggccagaatgatgccctgctgtgtggcaacagcagtgatgctggccagtgcccagagggctacatctgtgtgaaggccggcaggaaccccaactacggctacaccagctttgacaccttctcctgggccttcctgagcctcttccggctgatgacccaggacttctgggagaacctgtaccagctgaccctgcgggctgctgggaagacctacatgatcttctttgtgctggtgatcttcctgggcagcttctacctgatcaacctgatcctggccgtggtggccatggcctatgaggagcagaaccaggccaccctggaggaggccgagcagaaggaggccgagttccagcagatgctggagcagctgaagaagcagcaggaggaggcccaggccgctgctgctgctgccagcgctgagagccgggacttctctggagctgggggcatcggggtcttcagcgagagcagctctgtggccagcaagctgagcagcaagtctgagaaggagctgaagaacagaaggaagaagaagaagcagaaggagcagagcggggaggaggagaagaatgacagagtgaggaagtctgagagtgaagattccatccggaggaagggcttccgcttcagcctggagggcagccggctgacctatgagaagcgcttcagcagcccccaccagagcctgctgagcatccggggcagcctcttcagccccaggaggaacagccgggccagcctcttctccttccggggccgggccaaggacatcggctctgaaaatgactttgctgatgatgagcacagcacctttgaggacaatgacagcagaagagacagcctgtttgtgccccacagacatggagagcggcggcacagcaatgtgtcccaggccagccgggccagccgggtgctgcccatcctgcccatgaatggcaagatgcacagcgctgtggactgcaatggagtggtgtccctggtgggcggccccagcaccctgaccagcgctggccagctgctgcctgagggcaccaccacagaaacagagatcaggaagagaagaagcagcagctaccacgtgtccatggacctgctggaggaccccaccagccggcagagggccatgagcatcgccagcatcctgaccaacaccatggaggagctggaggagagccggcagaagtgccccccctgctggtacaagtttgccaacatgtgcctgatctgggactgctgcaagccctggctgaaggtgaagcacctggtgaacctggtggtgatggacccctttgtggacctggccatcaccatctgcatcgtgctgaacaccctcttcatggccatggagcactaccccatgacagagcagttcagctctgtgctgtctgtgggcaacctggtgttcaccggcatcttcaccgctgagatgttcctgaagatcatcgccatggacccctactactacttccaggagggctggaacatctttgatggcttcatcgtgtccctgagcctgatggagctgggcctggccaacgtggagggcctgtctgtgctgcgctccttccggctgctgcgggtcttcaagctggccaagtcctggcccaccctgaacatgctgatcaagatcatcggcaacagcgtgggcgccctgggcaacctgaccctggtgctggccatcatcgtgttcatctttgctgtggtgggcatgcagctgtttgggaagagctacaaggaatgtgtgtgcaagatcagcaatgactgtgagctgccccgctggcacatgcatgacttcttccacagcttcctgattgtgttccgggtgctgtgtggggagtggattgagaccatgtgggactgcatggaggtggccggccagaccatgtgcctgactgtgttcatgatggtgatggtgattggcaacctggtggtgctgaacctcttcctggccctgctgctgagcagcttcagcagtgacaacctggccgccacagatgatgacaatgagatgaacaacctgcagattgctgtgggccgcatgcagaagggcatcgactttgtgaagaggaagatccgggagttcatccagaaggcctttgtgaggaagcagaaggccctggatgagatcaagcccctggaggacctgaacaacaagaaggacagctgcatcagcaaccacaccaccattgaaattggcaaggacctgaactacctgaaggatggaaatggcaccaccagcggcatcggcagctctgtggagaagtatgtggtggatgaaagtgactacatgtccttcatcaacaaccccagcctgactgtgacagtgcccatcgctgtgggggagagtgactttgagaacctgaacacagaggagttcagcagcgagagtgacatggaggagagcaaggagaagctgaatgccaccagcagcagcgagggcagcacagtggacatcggggccccagctgagggggagcagcctgaggtggagcctgaggagagcctggagcctgaggcctgcttcacagaggactgtgtgaggaagttcaagtgctgccagatcagcattgaggagggcaagggcaagctgtggtggaacctgaggaagacctgctacaagatcgtggagcacaactggtttgagaccttcatcgtgttcatgatcctgctgagcagcggggccctggcctttgaggacatctacatcgagcagaggaagaccatcaagaccatgctggagtatgctgacaaggtgttcacctacatcttcatcctggagatgctgctgaagtgggtggcctacggcttccaggtgtacttcaccaatgcctggtgctggctggacttcctgattgtggatgtgtccctggtgtccctgacagccaatgccctgggctacagcgagctgggcgccatcaagagcctgcggaccctgcgggccctgcggcccctgcgggccctgagcagatttgagggcatgagggtggtggtgaatgccctgctgggcgccatccccagcatcatgaatgtgctgctggtgtgcctgatcttctggctgatcttcagcatcatgggcgtgaacctgtttgctgggaagttctaccactgcatcaactacaccactggagagatgtttgatgtgtctgtggtgaacaactacagcgagtgcaaggccctgattgagagcaaccagacagcccgctggaagaatgtgaaggtgaactttgacaacgtgggcctgggctacctgagcctgctgcaggtggccaccttcaagggctggatggacatcatgtatgctgctgtggacagcagaaatgtggagctgcagcccaagtatgaggacaacctgtacatgtacctgtactttgtgatcttcatcatcttcggcagcttcttcaccctgaacctcttcatcggggtcatcatcgacaacttcaaccagcagaagaagaagtttggaggccaggacatcttcatgacagaggagcagaagaagtactacaatgccatgaagaagctgggcagcaagaagccccagaagcccatccccaggcctgccaacaagttccagggcatggtgtttgattttgtgaccaagcaggtgtttgacatcagcatcatgatcctgatctgcctgaacatggtgaccatgatggtggagacagatgaccagagccaggagatgaccaacatcctgtactggatcaacctggtgttcatcgtgctcttcaccggagaatgtgtgctgaagctgatcagcctgcgctactactacttcaccatcggctggaacatctttgattttgtggtggtgatcctgagcatcgtgggcatgttcctggccgagctgattgagaagtactttgtgagccccaccctcttccgggtcatccggctggccagaattggccgcatcctgcggctcatcaagggggccaagggcatccgcaccctgctgtttgccctgatgatgagcctgcctgccctcttcaacatcggcctgctgctcttcctggtgatgttcatctatgccatcttcggcatgagcaactttgcctacgtgaagcgggaggtgggcattgatgacatgttcaactttgagaccttcggcaacagcatgatctgcctcttccagatcaccaccagcgctggctgggatggcctgctggcccccatcctgaacagcggccccccagactgtgaccctgacaaggaccaccctggcagctctgtgaagggggactgtggcaaccccagcgtgggcatcttcttctttgtgtcctacatcatcatctccttcctggtggtggtgaacatgtacatcgctgtgatcctggagaacttctctgtggccacagaggagagcgctgagcccctgtctgaagatgactttgagatgttttatgaggtgtgggagaagtttgatcctgatgccacccagttcattgaatttgccaagctgagtgactttgctgatgccctggacccccccctgctgattgccaagcccaacaaggtgcagctgattgccatggacctgcccatggtgtctggggaccgcatccactgcctggacatcctgtttgccttcaccaagagggtgctgggggagagcggggagatggatgccctgcgcatccagatggaggagcgcttcatggccagcaaccccagcaaggtgtcctatgagcccatcaccaccaccctgaagaggaagcaggaggaggtgtctgccatcatcatccagagggcctaccgccgctacctgctgaagcagaaggtgaagaaggtgagcagcatctacaagaaggacaagggcaaggaatgtgatggcacccccatcaaggaggacaccctgattgacaagctgaatgaaaacagcaccccagagaagacagacatgacccccagcaccaccagcccccccagctatgattctgtgaccaagccagagaaggagaagtttgagaaggacaagtctgagaaggaggacaagggcaaggacatccgggagagcaagaagtag

SEQ ID NO: 267459 - DNA, 6018 bp, Artificial Sequence
  derived and/or modified sequence
atggcccagagcgtgctggtgccccccggccccgacagcttccggttcttcacacgggagagtctcgccgctatcgagcaacggatcgctgaggaaaaagcaaagagacccaagcaggagagaaaggatgaagatgatgaaaacggcccaaagcctaatagcgacctggaggcaggtaagtcattaccctttatctatggagatatcccccctgagatggtttctgtccccttggaagacctcgacccatattacattaacaaaaaaacatttattgtgctgaataaagggaaggcgatttctaggttctctgctacccccgcgctctacatacttaccccattcaatccaatcaggaaactcgctatcaagatcttagtgcatagcctgttcaacatgttgataatgtgcacgatcctgactaactgcgtgttcatgaccatgtccaatccccccgactggaccaagaacgtggaatatacttttaccgggatctacacttttgaaagtctgatcaagatcctggcacggggattttgtcttgaagattttacattcctccgggacccttggaattggctggattttaccgtaatcacgtttgcctacgtcacagagttcgtaaatctgggcaatgtgtccgctctgagaacattcagggtgctgcgggcactgaagacaatttccgtcatccctgggttgaagaccatcgtgggcgctctgatccagtcagtaaagaagctgagcgacgtgatgattctcacagtgttttgtctatctgtctttgccttgatcgggctccagctgttcatggggaaccttcgtaataagtgtctccaatggccccctgacaattcttcctttgagattaacattaccagttttttcaataattccctcgacggaaatggaactacatttaatagaacagtttccatctttaattgggatgaatacatcgaagataagagtcatttttactttttagaaggacagaatgatgccctgctgtgcggaaacagctccgacgcagggcagtgtccagagggctatatctgcgtcaaggcagggcgtaacccaaactacggatataccagcttcgacacgttctcctgggccttcctcagcctttttcgtctgatgacccaggacttctgggagaacctgtaccagcttaccctccgagctgctgggaagacgtacatgatattcttcgtcctggtgatcttcctggggtccttctacttgatcaacctcatcctcgccgtcgtcgctatggcttatgaggagcagaaccaggccacactggaagaggctgaacagaaggaagcagagtttcagcaaatgctggagcaacttaagaaacagcaggaagaagcccaggctgcagccgctgctgcctccgccgaaagccgcgacttctccggcgcaggcggtatcggcgtcttttccgagtcatccagtgtggcctcaaagctatcaagtaaaagtgagaaagagttgaaaaatcgacgtaagaaaaaaaaacaaaaggaacagtctggcgaagaggagaagaatgatagggtccggaagagcgaatctgaagatagtatccgcagaaagggcttccgattttccctggaaggatcacggctcacgtatgaaaagcggttctcgtcccctcatcagtcactgcttagcatcagaggtagcctgttttctccacggaggaactcaagagccagcctcttctcatttcgcggccgtgccaaagatattgggagcgaaaacgacttcgctgatgatgagcactctaccttcgaagacaatgactctcgccgagactcattgttcgtaccacataggcacggcgaaagacgccattctaacgtcagccaagcaagtagggccagccgcgttctgccaattctacccatgaatggcaaaatgcattcagctgtggactgcaatggtgtcgtcagcctggtgggagggccatcaacgttaacaagtgccggacagctgctccccgagggaacaacaaccgagactgagatcaggaagcggcgatccagcagctaccatgttagcatggacctcctcgaggatccgacctctcggcaacgggctatgagcatagcttccatcctcaccaacactatggaggaactggaggagtctaggcagaaatgtccgccatgctggtacaagtttgctaacatgtgtctgatatgggattgttgtaagccttggctgaaggttaaacacctcgtgaatttggttgttatggatccattcgtggacctggccattactatttgcatcgtgctaaatacactgtttatggcaatggagcactatcccatgaccgagcaattcagcagcgtcctgtctgtgggcaaccttgtttttacaggtatatttaccgcagagatgtttctgaagatcattgccatggacccctactattacttccaggaggggtggaacatctttgacggcttcattgtgtctctctccctgatggagctagggcttgcaaacgtcgaaggtctgagtgttctgaggagtttcaggctgctgcgagttttcaagctcgcaaaaagctggccgacactgaacatgctgatcaaaatcattgggaatagcgtaggtgccctcgggaatcttacactggtgctggctattatcgtgttcattttcgcagtggtgggaatgcagctgttcgggaagagctataaggagtgcgtctgtaagatctcaaatgactgcgagctgcctcgctggcacatgcatgatttctttcattcctttctcatcgtgttcagggtgctgtgtggagagtggatcgagacaatgtgggactgcatggaagtggccggacagacaatgtgtctgaccgtgttcatgatggtaatggttattggaaacctggtcgtgctcaatctcttcctggccctgcttctctcaagtttctccagcgataatcttgcagctactgatgacgacaatgaaatgaacaatttgcagatcgccgtgggcagaatgcagaaaggcattgattttgtgaaacgaaagatccgggaatttatccagaaggccttcgtcaggaaacaaaaagccctggatgagattaagccgctggaagatctgaacaataaaaaggatagctgtatctcaaaccacaccacaatagagatcggcaaagacctgaattatctaaaggatggtaatggaaccaccagtgggatcggctcaagcgtggaaaaatacgtggtcgacgaatcggattacatgtccttcattaataacccatcactcacagttaccgttcctatcgccgtgggagagtccgacttcgaaaatctgaatactgaggaatttagcagtgagtctgacatggaagaatccaaggagaagttgaacgcaacttctagcagtgagggaagcacagtggatattggggccccagccgaaggtgaacagccggaagtggagcccgaggaaagcttagagccagaagcctgtttcaccgaagactgtgtacggaaatttaagtgctgccaaattagcattgaggaaggtaaaggtaagttgtggtggaacctcaggaaaacctgctacaaaattgtagagcataactggttcgaaaccttcattgtcttcatgattcttctctcttcgggggctctggcctttgaagatatctatattgaacaacgaaaaaccatcaaaaccatgttagagtacgccgataaagtgtttacctatatcttcattctggagatgctgttaaaatgggttgcatacggcttccaggtctacttcactaatgcttggtgttggctagattttttgattgtggacgtctctctggtctctctgacggccaatgcgctgggctattctgagctaggagctatcaagagcctgagaaccctgcgggcactcaggccgcttcgagccctgtccaggttcgaaggcatgagagttgtagtaaatgctctgttgggggctatccccagtatcatgaacgtgcttctcgtctgtctaattttttggctcattttttccatcatgggcgtgaatctgttcgccggaaagttctatcactgcatcaactacactactggggaaatgtttgatgttagcgtggtgaataattatagcgagtgtaaggccctgatcgaatcaaatcagacagcgcgctggaagaacgtgaaggtgaactttgataatgtcggactgggatacttaagcctattgcaggtcgccacgttcaagggatggatggacattatgtacgccgctgtggacagtcgcaatgtcgaactgcaacccaaatacgaggataacctgtacatgtatctgtattttgttatatttatcatatttggcagcttctttaccctcaacctctttatcggcgtgatcatcgataattttaatcagcaaaaaaaaaagtttggcgggcaggatatcttcatgactgaggagcaaaaaaagtactacaacgcgatgaagaagctgggcagtaagaagccacagaaacctatcccaagacccgcaaataaatttcaagggatggtgtttgattttgtaactaaacaagttttcgatatatcgattatgattcttatctgcttaaacatggtgacaatgatggtggaaacggacgatcagtcccaggaaatgacgaatatcctgtattggattaatctggtgtttatcgttttgttcaccggagagtgtgtcctcaaacttatctctctgagatattattatttcacgatcggctggaacattttcgactttgtagttgtcattctgtcaattgtgggcatgttcctcgctgaactgatcgaaaagtacttcgtgtccccgaccctttttagagttatccggctggctcgaatcggtagaattctaaggctgatcaagggagccaaaggaatccgcaccttgctctttgcgctgatgatgagtctgcccgctctgttcaatattggtctgctgctgttcttagtgatgttcatttacgctatcttcggcatgagtaatttcgcgtatgtgaaaagggaggtgggcatcgacgacatgtttaattttgagacttttgggaacagcatgatatgcttgttccagataaccacaagcgctggctgggacgggttacttgccccgattcttaactccggcccacctgattgcgacccagataaggatcacccaggtagtagtgtgaaaggtgactgtggtaatccatctgttggcatttttttttttgtgtcttacataatcatcagctttcttgtggtggtgaacatgtatatcgccgtcattctcgagaacttttcagttgcaaccgaggaatctgctgaacctctttccgaggatgattttgagatgttctacgaggtctgggagaaatttgaccctgacgccacacagttcattgagttcgctaagctaagcgacttcgccgacgccctggacccgcctttactgattgccaagcctaataaagttcagctgatagccatggaccttcccatggtgagcggtgataggatccactgtctggacatccttttcgcattcacaaagcgagtgctcggcgaaagtggggagatggacgcactccgcatccagatggaggagaggttcatggcctccaacccatctaaagtgtcctatgaacccatcacaaccaccctgaagcgaaagcaggaggaagtttccgctataatcatccagcgggcatatagaagatatctgctgaagcagaaggttaaaaaagtcagtagcatctacaagaaagataaaggcaaagaatgtgacggcacaccgattaaggaggatactctgattgacaagttgaatgagaacagcactccagagaagactgacatgacgccctccactaccagtccgccctcctatgacagcgtgactaagcccgaaaaggagaaatttgagaaggataaatctgagaaagaagataaaggtaaagacatcagagaatctaaaaaatag

SEQ ID NO: 267460 - DNA, 6018 bp, Artificial Sequence
  derived and/or modified sequence
atggcccagagcgtgctggtgccccccggccccgacagcttccggtttttcacacgggagtcacttgcagccattgagcagcgcatcgccgaagaaaaagcaaagagaccaaaacaggagcgaaaggacgaggacgacgaaaatggccccaaacctaattcagacctcgaggccggtaaatcactcccgtttatctacggcgacattcctccagagatggtctctgtgcctctcgaggacttagatccttactacatcaataagaagacattcatcgtgctgaacaagggtaaggcgatatctcgcttctcagccacacccgccctgtatatcctgacaccttttaatcctatcaggaaattggctatcaaaatcttagtgcatagcctgtttaacatgttaatcatgtgcaccattttgacaaattgtgtttttatgaccatgtcgaacccccccgattggaccaagaatgtggagtatacttttaccggcatttacacctttgaaagcctcattaaaattctcgctagagggttctgtcttgaggactttaccttcctccgggacccatggaactggctggactttaccgtcattactttcgcctatgtcaccgagttcgtgaacctcggcaacgtttctgcacttcgtaccttccgagtgctccgtgcgttgaaaaccatcagtgtcattcctggactaaagactatcgtcggtgccctgatccagtccgttaaaaagctatccgacgtaatgatcttaacagtcttctgcctttcagtgttcgccctcattggcctgcagctcttcatggggaacttgagaaataagtgcctacaatggcctccagataattcctcctttgaaatcaacatcacaagcttcttcaacaatagcttggatggtaatggcaccactttcaatcgaacggtgtccattttcaattgggatgagtacattgaagacaaaagccacttctactttttagagggacaaaacgatgcactcttgtgtgggaatagctctgatgctggtcaatgtcctgaagggtacatatgcgttaaagctggtaggaaccccaattacggttacacctccttcgacaccttctcatgggccttcctgagccttttccgcctcatgacacaggacttctgggaaaatctctatcagttaactctaagggccgccgggaagacctatatgattttttttgtcctggtcatcttcctcggcagtttctatctgatcaatctgatccttgccgtagttgccatggcgtacgaggaacagaaccaggccacactggaagaggctgagcaaaaagaggccgaattccagcaaatgctggagcagctaaaaaagcagcaggaggaggctcaggccgccgccgcagctgcctctgctgagagccgagacttcagcggagcaggggggataggcgttttttccgagtcatcaagcgtggcctcaaaactgtcaagtaagtccgaaaaagagcttaagaatcgacgcaaaaaaaaaaagcagaaagaacagtcaggtgaagaggagaagaacgaccgtgtccgaaaatcggagagtgaagatagtatcagacggaagggcttccgattcagcctagaaggctctcggctcacatatgagaagcgcttctctagtccccaccagagcttgctgtcgataaggggaagtctcttttcaccgcgcagaaactctcgggcttccctctttagttttagaggcagagcaaaagacatcggcagcgagaatgacttcgctgacgatgagcactctacgttcgaggataacgattccaggagggacagccttttcgttccgcatcgacatggagagcgacgacattctaatgtgagtcaggcctcccgggcgagtcgggtcttgccgattctgcctatgaatggcaaaatgcactcagctgtggactgtaacggcgtagtgagtctagtgggaggccctagtactctgacttccgccggacagttattaccagagggcactacgactgagacagaaataaggaagcgccggagttcctcatatcatgtcagcatggacctgttggaagatcccacttcaaggcaaagggcgatgtcaatagcttccatactgacaaatactatggaggaattggaggagagtagacagaagtgcccaccctgttggtacaaatttgccaacatgtgccttatatgggactgttgcaaaccatggctgaaggtgaaacaccttgtcaacttggttgtgatggaccccttcgtggatttggctattacaatttgcattgtgctcaataccctctttatggccatggaacattatccgatgacagagcagttctcctcggtcctgagcgtggggaatctcgtttttactgggatttttactgctgagatgttcctgaaaattatcgccatggatccctactattactttcaggaaggatggaatattttcgatgggtttattgtgagcctgagcctcatggaattggggctcgccaacgtcgagggtcttagcgtgctgagatccttccgtctcttacgtgtcttcaagctggcgaagtcctggccaacgctgaatatgctgattaagattattggcaattccgtgggcgctctcggaaacctaaccctcgtgctagccatcatagtttttatattcgctgtcgtggggatgcagcttttcgggaagtcatataaggaatgtgtttgcaagatctctaatgactgcgagttacctcgatggcatatgcacgatttcttccacagcttcctgatcgtgttcagggtgttgtgtggagagtggatcgagaccatgtgggactgtatggaagtcgctgggcagacaatgtgcctgacagtcttcatgatggtgatggtcatcggcaatctcgttgtgcttaacttgtttctggctctgctactctccagcttcagctcggataatctcgcggccactgatgacgacaatgagatgaacaatcttcaaatcgccgtggggagaatgcagaaaggtattgattttgtcaaaaggaaaatccgggaatttatacagaaagcttttgttaggaagcagaaggcactggatgaaattaagcccctggaggacctcaacaacaaaaaagactcttgtatctcgaatcacactacgattgagatcggcaaggacctaaattacctcaaagacggcaatggaaccacctctggcatcggttccagtgttgagaaatacgttgtggacgaaagtgattatatgagtttcattaataatccatcacttaccgtaacggtgcccatagccgtgggtgagagtgatttcgaaaacctcaacactgaggagttctcctccgaatccgatatggaagagtcaaaggaaaagctaaatgccaccagctctagtgaggggtccactgtcgatataggcgcacccgcggaaggcgaacagcccgaagttgagccagaagagtcattggaacccgaggcatgcttcactgaggattgcgtccgtaaatttaagtgctgccagatttcaatcgaagaaggcaaggggaaattgtggtggaatctccgaaaaacgtgctataaaatagttgaacacaattggtttgagacattcatcgttttcatgatccttctgtcttccggcgcgctggcctttgaagatatttacatcgagcaacggaagacgattaaaaccatgctcgagtacgcagataaagttttcacatacatcttcattctggagatgctgctgaagtgggtggcctacgggtttcaggtctacttcaccaacgcttggtgttggctcgatttcctgattgttgacgtttcgctggtgtctctgacagcaaacgcactcggatatagcgaactgggtgctataaagagcctgaggaccctgcgcgctcttcgtccactgcgcgctttaagtcggtttgagggaatgcgcgttgtcgtaaacgcgcttctgggagcaattccctcaattatgaacgtgttgctcgtctgccttatattctggctcatcttctctattatgggcgtcaatctgttcgccgggaaattttaccactgtatcaactacactaccggggaaatgtttgatgtatctgtggttaacaactacagtgagtgcaaggcccttattgagtccaatcagacagctcggtggaagaacgtgaaggtaaacttcgataacgtgggcctggggtacctgtccctgctgcaggttgccacattcaagggatggatggatatcatgtatgcagcagtggactctcggaacgtggagctgcagcccaaatacgaagataatctatacatgtatctttacttcgttattttcattatctttggctcatttttcacgctgaacctgtttatcggggttatcattgacaatttcaatcaacagaagaagaaatttgggggacaggacatctttatgacagaggagcagaagaagtattataatgctatgaagaaacttggctctaagaaaccccagaaacctatcccaagaccagcaaataagttccagggcatggtgtttgactttgtgacaaaacaggtctttgatatctctataatgattctgatttgccttaacatggttaccatgatggtcgaaaccgatgaccagtcccaggagatgaccaatatactatattggataaacctagtctttatcgtgctctttacaggggaatgtgtgctgaaactcattagtctgcgatattattacttcactatcggatggaacattttcgatttcgtggttgtcatcctcagcatagtaggcatgtttctggccgaactgattgagaaatattttgtgagtcccacattgttccgggtgatacggctggcccgaattggtcggatccttcggcttataaagggcgctaagggaataagaaccttactgttcgcacttatgatgagcctgcctgcattgttcaacatcggactgctcttgttcctcgtgatgttcatttatgcgatcttcggcatgtctaactttgcctatgtaaaacgtgaggtcggcatagatgatatgttcaatttcgaaacctttggaaatagcatgatctgcctcttccaaatcacaactagcgctggctgggacggcttgttggcccccattctaaactccgggccacctgactgcgaccccgacaaggatcatcctggatcgtccgttaaaggggattgcggtaaccccagcgtgggtatattcttctttgttagctacattattatcagcttcctggttgttgtgaacatgtacatcgcagtcatactggagaactttagcgtcgctacggaggagagcgcagagcccctctcagaagacgacttcgagatgttctacgaagtctgggaaaagttcgaccctgatgccacacagttcatcgagttcgctaagctatctgactttgctgatgctctggatccccccctactcattgccaagccaaacaaggtccagcttattgccatggatcttccaatggtttccggcgatcggatccactgcctggacattctgtttgcattcacaaagcgtgtccttggggagagcggcgaaatggacgcactgcgcatacaaatggaggagcgttttatggcaagtaatccctcaaaggtatcctatgaaccaataactacgacattgaagaggaagcaggaggaggtgtccgcgattataattcagcgcgcctaccgcagataccttttgaaacaaaaggtcaagaaggtgagcagcatttacaagaaagacaagggcaaggagtgtgacgggacacctatcaaagaggataccctcatagacaaactaaatgagaactccacccctgagaaaacagatatgaccccctctaccacctcaccacctagctatgactcagtgaccaagccagagaaggagaagtttgaaaaggacaagtctgagaaagaggataaaggtaaggacatccgcgagtccaagaaatag

SEQ ID NO: 267461 - DNA, 6017 bp, Artificial Sequence
  derived and/or modified sequence
atggcccagagcgttctcgtgccgcctggaccagactcctttcggtttttcaccagagagtcccttgcagcaatcgagcaaagaattgccgaggagaaggctaagagacccaaacaagagcggaaggatgaggacgatgagaatggccctaagcccaactccgatctggaggcagggaaaagtttacccttcatttacggagacatccctccagaaatggttagtgtgccattggaagatcttgacccttattatattaacaaaaagacgttcatcgtgctgaacaaggggaaggcaatctccagatttagtgcgacccccgctttgtacatactcaccccattcaaccctattaggaaattggccattaaaatcctagtgcattcactctttaacatgttaattatgtgcacgatcttgaccaattgcgtatttatgactatgagcaacccccctgattggaccaagaatgtggaatatacgttcacagggatctatacatttgagagcttgatcaagattctggccagaggtttttgcttagaggattttacttttctgagggatccctggaattggctggacttcacggtaatcacctttgcttatgtcactgaattcgtgaatcttggaaatgtgtccgcactccgcacttttagggtgcttcgcgcactgaagactatatcagtcatacctggcctgaaaactattgtgggtgcccttattcagtctgtaaaaaaattaagcgatgtgatgattctgaccgttttttgcctgtccgtgttcgcactgatcggcctgcagctgtttatgggcaacttgaggaataaatgccttcagtggcctccagacaatagcagcttcgaaataaacatcacctcgttctttaataattccctcgacggcaacggcacaacgttcaacagaactgtgtctatctttaactgggacgagtacatcgaagacaagtcacacttttattttcttgaaggccagaacgacgccttattgtgcggcaacagctctgatgctggacagtgccctgaaggctatatttgcgtcaaggccggaagaaaccctaactacgggtacacgagctttgatactttttcctgggctttcctgagcttgtttcgcttaatgacgcaggacttttgggaaaatttataccagcttactttaagggccgcaggtaagacttacatgattttttttgtgctggtaatatttctgggatcattctacctgatcaacctgatcctagccgtcgtggccatggcatatgaagagcagaatcaagctaccttagaggaagccgaacaaaaagaggccgaattccaacagatgctcgagcaactcaaaaaacagcaggaggaggctcaggctgccgcagctgccgcatcagcagaaagcagagatttcagcggagccggtgggattggggtcttctcagagtctagctcagtggcgtccaagctttcaagtaaatctgagaaagagctgaagaacagacgcaagaaaaagaaacagaaagagcagtccggtgaagaagaaaaaaacgaccgagttcggaaatccgagtctgaagactctattcgacggaaagggtttaggttttccctcgaaggctcccgattaacatacgaaaaacggttttcctcgcctcaccagtccctgcttagcattagaggctcgctgttcagtcccagacgaaactcgcgcgcaagccttttttcattcagaggcagggcaaaagacatcggttctgagaacgactttgctgacgatgaacacagcaccttcgaggacaacgacagcagaagggattcgctttttgtgcctcaccgccatggagaacgaaggcattcaaatgtgtcacaggcttccagagcaagcagggtcttgccgattctgcctatgaacggaaagatgcacagcgcagtggattgtaatggggtggtgtccctagtggggggaccatcaaccctgacgagtgctggccaactgctgccagaaggtacaacaacagagactgaaattcgcaaaaggcgtagctccagctatcacgtctcgatggatctgctggaggatcccacttctagacaacgggctatgagcatcgcttcgattttgacaaacacaatggaggaactggaggagagcaggcaaaagtgtcccccttgctggtataaattcgctaatatgtgtttgatatgggattgttgtaaaccctggctcaaggtcaaacacctggttaacttggtggtgatggacccttttgtggacctggccattacgatttgtattgttctgaacactctattcatggcaatggagcactatcctatgaccgaacagttctcttccgttctcagtgtaggcaacctggtgtttacagggatatttactgccgagatgttcctcaagatcatcgccatggatccttactattattttcaggaaggctggaacatctttgacgggttcatcgtgtctctaagcctcatggaactggggctggcgaacgtagagggtctgagcgtcttgaggagctttagactcctccgtgtgttcaaactcgccaagtcctggcccactttaaatatgctgatcaagattatcgggaacagcgtaggcgctctgggtaatttaaccctcgtgctcgcaatcatcgtttttatatttgctgtcgtcggtatgcagctgttcgggaaaagctacaaggagtgtgtatgcaagataagcaacgactgtgagctacccagatggcacatgcacgattttttccacagcttcctcattgtgtttagagttctctgcggagagtggattgaaactatgtgggactgtatggaagttgccggtcaaacaatgtgtttgacagtgtttatgatggttatggtgatcggaaacctggttgtacttaatcttttcttagctttgctgctgtcctcatttagttctgataacctggcagctaccgacgacgacaacgaaatgaacaacctgcaaatagccgttgggagaatgcagaaggggatagacttcgttaaaaggaagattagggaattcattcagaaggcattcgtgcggaagcaaaaagcattagatgagatcaaaccgctcgaagacctcaataacaaaaaagacagctgcatcagtaaccacaccaccattgaaataggcaaggacctgaactatcttaaagacggaaatggtactacaagtggcatcgggagttcggttgagaaatacgtggtggatgagtccgattacatgtcctttatcaataacccgtccttgacagttactgtcccaatcgctgtgggagagagcgacttcgaaaacctcaacaccgaagagttcagctctgagagcgatatggaggagtcaaaagaaaagttgaacgcaacttccagtagtgaaggatctacagtcgatataggggcacccgctgagggggaacagccggaggtggaacctgaagagagtctggaacctgaagcgtgcttcacagaggattgtgtgcgcaaattcaaatgctgccagatttccatagaggaagggaagggcaagttatggtggaatctacggaagacctgctataagatcgtggagcacaactggttcgaaactttcattgtgtttatgatacttctgtcaagtggggctttggccttcgaggacatttacatagagcagaggaagaccattaagactatgttggaatacgccgataaggtgttcacatatatcttcattctggaaatgttgctgaagtgggtagcatacggtttccaagtctactttactaacgcttggtgttggctcgactttctcatagtagatgttagccttgtgtcactgaccgcaaatgccctcggctatagcgaactgggggctattaagagtctgcggaccttgcgagccctgaggccattgcgggctctgagcaggttcgagggcatgcgcgtagtggtaaatgctcttctcggcgcaatccctagtattatgaacgtgttattggtgtgcctcatcttttggctgattttctctatcatgggggttaatctgtttgctggtaagttttaccattgtattaactatacaactggagaaatgttcgatgtgagtgtggtgaacaattacagcgagtgtaaagccttgatcgaatccaaccagaccgccagatggaagaacgtgaaggttaactttgacaacgtggggcttggctacctgtctctattacaagtcgctacctttaaaggctggatggatataatgtatgctgctgtagactccaggaatgtggaacttcagcccaagtacgaagacaacttgtacatgtacctttatttcgtaatctttattatattcggttccttcttcacccttaatctgtttataggagtaattatcgacaactttaatcaacagaaaaaaaagtttggcggacaggacatcttcatgacagaagagcagaagaagtattacaacgccatgaagaagctgggtagcaagaaaccccaaaagcccattcctcgcccagcaaacaagtttcaagggatggttttcgactttgtgaccaaacaggtcttcgacatttccattatgattctaatatgcctgaacatggtgaccatgatggtggaaaccgatgaccaatcccaggagatgaccaacatcctgtattggattaacctcgtttttatcgtccttttcacaggcgagtgtgtgttaaagctgatttctctgagatactactatttcacgattggctggaacatattcgacttcgtagtagtgatcctctcaatcgtggggatgtttctggccgagttaatcgaaaaatacttcgttagtccaaccttgtttcgggttataagactagcaagaatcggacggatactgcgcttaataaaaggcgctaagggtatccggactctgctctttgcgttgatgatgtctttacctgctctttttaatatcggacttttactattcctggtgatgtttatctacgctatttttgggatgagcaactttgcctacgtgaaaagagaagtgggtatcgacgacatgtttaactttgaaaccttcggtaacagtatgatctgtttgttccagatcaccacctccgctgggtgggatggcttgctggcacccatcctgaatagcgggccaccagattgcgacccagataaagatcaccccggatcctctgtgaagggggattgcgggaatccctcagtgggcattttcttttttgtcagttatatcatcatttcatttctggtcgtggtaaacatgtatattgctgttatcctggagaatttcagtgtcgccaccgaggaaagtgcagagccacttagcgaggacgactttgaaatgttctatgaagtgtgggaaaagttcgatcccgacgccacccagttcatcgagttcgctaaactctctgatttcgcggatgctctggacccaccgctcctgatcgcaaagcctaataaggttcaactgattgccatggacctgcctatggtcagcggtgatagaattcattgtctcgatattttgttcgcattcaccaaacgtgtgctcggggagtcaggtgaaatggacgctctccgcattcagatggaggaacggtttatggcctctaatcctagcaaggtgtcgtacgagccaatcacaacaaccctaaagagaaagcaggaggaggtctccgctataattattcagagagcctacaggaggtacctgctgaaacagaaagtaaaaaaggtctcttccatttataaaaaggacaagggtaaagagtgcgatggaactcccatcaaggaggacacattaatcgacaagcttaacgaaaacagtacaccggaaaagactgacatgacaccctccaccacctcaccaccgagctatgattcagtgacaaagccagagaaggaaaagtttgaaaaggataagtccgaaaaagaagacaaggggaaggacatccgtgaaagtaaaaaata

SEQ ID NO: 267462 - DNA, 6017 bp, Artificial Sequence
  derived and/or modified sequence
atggctcagagtgtgctggtcccccctgggccagacagcttcagattttttacgcgggagagcctggccgctattgagcagagaatcgccgaggagaaagccaaaagacccaagcaggaacggaaggatgaggatgacgagaacggcccaaaacctaacagtgatctggaggcgggaaaaagcctgccatttatctacggcgacattcctccggaaatggtttccgtcccactggaagacctggacccatattacataaataaaaagacttttattgtcctcaataaaggcaaggcaatctcacgattttctgcaactcccgctctgtatatattaaccccatttaacccaatccgaaaactcgcgattaagatcctggtccactctctttttaatatgttaatcatgtgcaccatcctgactaactgtgtgttcatgaccatgagtaatcctcctgattggaccaagaatgttgaatacaccttcaccggtatctatacatttgaatccctcataaagattctggccagggggttctgccttgaggatttcaccttcctcagggatccatggaattggcttgacttcaccgtgatcacatttgcttacgttacagaattcgtaaatctcggcaacgtttcagcattgcgcacttttcgagtcctgcgggctctgaaaaccatatccgtgatcccaggcttgaaaaccatcgtgggggctctgattcagtccgtcaagaaattatctgacgtgatgatcttaaccgtgttttgtttgagcgtttttgcacttattggcctccagctcttcatgggaaacttgcgcaataaatgcctgcagtggccgccagacaactcttcttttgaaattaatataacaagcttttttaataattctcttgatggcaacggcacaacatttaatagaaccgtctctatctttaattgggacgaatatatcgaggataagtcccacttttattttttggaaggacagaatgacgccctcttgtgtggcaactcgagtgacgctggacaatgccccgaaggatatatttgcgttaaagccggacgaaacccaaactatggatacacaagttttgatactttctcatgggcatttctcagtctgttccgcctcatgacccaggacttctgggagaatctgtaccagttaacacttcgcgctgccggtaagacctatatgatcttttttgtgcttgtgatcttcctgggctctttttacctaatcaaccttattctggccgttgtcgccatggcgtatgaggaacaaaaccaagctaccctcgaggaagcggaacagaaggaagccgaattccagcagatgctggaacagctgaagaagcagcaggaagaggcccaggccgctgcagcagcggcaagcgcagaatcccgcgatttttccggtgccggaggcattggagtgttttccgagagttcaagcgtagcttctaaactgtcatcaaaaagtgagaaggaattaaaaaatagacggaagaaaaaaaagcagaaggagcaatccggcgaggaggagaaaaacgatcgtgtccgaaagagtgaatctgaggacagcatacgccgtaaaggatttcgctttagcttagagggatccagattaacatacgaaaagcggttctcctccccgcaccagtcactgctgagtatccggggatccctgttttcgccacgcaggaatagtcgggcaagtctgtttagctttcggggtcgagcgaaagacatcggcagtgagaacgactttgccgacgatgagcacagtacatttgaggataacgactcgagacgagatagcctgtttgttcctcatagacatggggagagaaggcatagtaacgtgtctcaagcttcgagggccagtcgcgtgcttcctattctgcccatgaacggcaagatgcactcagccgtggattgcaacggggtagtaagcctcgtcgggggtcccagtacactaacatcagccggacaactgctccccgagggcacaacgacagaaacggagattcgaaagcgacggagttcatcctaccatgtgtccatggatctcctcgaggatcctacctccagacagcgggctatgtccatcgcatctatcctcacaaataccatggaggagctggaggaatcacgtcagaaatgccctccctgctggtacaagtttgctaacatgtgcttaatttgggactgctgtaaaccgtggctcaaggtaaagcatctcgtgaatcttgttgtgatggacccctttgtggacctagctataaccatctgtattgtcctgaacacactgttcatggcgatggagcactacccgatgacggaacagttcagttccgtgttgtctgtgggtaatctagtgtttacgggcatttttacagcggaaatgtttttaaagataatcgctatggacccatactactacttccaggaggggtggaacattttcgacgggttcatcgttagtctcagcctgatggagctgggtctcgcaaatgtggaaggtttgagcgtgcttcgaagcttccggctgttacgggttttcaagctggccaagtcatggcccaccttgaatatgctcattaagatcatagggaattctgtgggggcactgggtaatttgaccctggtcctagctatcattgtctttatctttgctgtcgtgggaatgcaactttttgggaagagttacaaggagtgtgtatgcaagatcagcaatgactgtgaactgccacgctggcacatgcacgatttctttcactccttcctgatagtctttcgcgtgctgtgcggcgagtggatcgaaactatgtgggattgtatggaagtcgctggccagacaatgtgtctcactgtcttcatgatggtcatggtgatcggaaacctggtcgtgctgaacctcttcctagcactgctgctgtccagcttctcatccgataatctagctgccaccgatgacgataacgaaatgaacaacctacagattgccgtcgggaggatgcagaagggaattgactttgtcaaacgcaaaatacgtgaatttattcaaaaggcgttcgtaaggaaacagaaggctctggatgaaataaaacccctggaggaccttaataataagaaagactcctgcattagtaaccacaccaccattgaaatcgggaaagacctcaattacttaaaagacggcaatggaacaacatcaggcatcggcagctctgtcgaaaaatatgtggtggatgaaagcgattacatgagcttcatcaataatcccagtctaaccgtgaccgtcccaattgctgtgggcgagtcagatttcgagaaccttaacaccgaggaattcagcagcgagtcggacatggaggagagcaaagagaaactgaacgcgacctcgtcgtccgaaggaagcactgttgatataggggcacctgccgagggcgagcaacccgaggtcgaacctgaggaatcactggagcctgaggcatgctttaccgaggattgcgtcaggaagttcaaatgctgccaaatttccatcgaagaaggcaagggtaagttgtggtggaatctccggaagacgtgttacaagattgtcgagcacaactggttcgagacctttatagtcttcatgatcctgctgtctagtggagcgttagcgttcgaagatatctacatcgagcaacgcaaaacgataaagaccatgctggaatacgcagacaaagtctttacttacattttcatcctggaaatgctgttgaaatgggtggcctacggattccaagtttatttcacaaatgcttggtgctggttagatttcctcatagtggatgtttccttggtgagcctaacggcgaacgccctgggatatagcgagctcggagctattaaaagcttacggacccttagggcactgcgccctctgcgcgcactgtcaaggttcgagggcatgagggtggtagtcaacgcgctactgggggctatcccctcaatcatgaatgtgctgctggtgtgcttgatcttctggctgatctttagcatcatgggtgtgaacctgttcgctggcaaattttatcattgtatcaactacacgacgggagagatgttcgatgtgtccgttgtgaataattactcggagtgtaaggcattaatcgaaagtaatcaaaccgccagatggaagaatgtgaaggtgaacttcgacaacgttggcctcggctaccttagcttgctgcaggtcgccacctttaaaggatggatggacataatgtacgcggctgtggacagtcgaaacgttgaactgcagcccaagtacgaggataacttatatatgtacctttacttcgttatttttattatctttggatctttctttaccttgaatctgttcattggagtgattatcgacaattttaatcagcagaagaaaaaattcggcggtcaggacattttcatgaccgaggagcagaagaagtattataacgcgatgaaaaagctcggcagcaaaaagcctcagaaacctataccacggccagctaataaatttcagggtatggtgtttgattttgttacaaaacaggtatttgatatcagcatcatgatcctgatttgtctgaatatggtgactatgatggttgaaacagatgatcagtcccaagaaatgactaatattctctattggatcaatctcgtttttatcgtgctcttcaccggcgagtgcgtgctgaagctgatttcactgaggtactattacttcacaatcggatggaacattttcgactttgtcgtcgtgattttgagcatcgtcggaatgttcctggcagaattgatcgaaaagtactttgttagcccgacccttttccgcgtcattcgcctcgccaggatcggacggattctgagattgatcaagggcgcaaagggcatcaggacactgttgttcgcactaatgatgtccctgccagcactgttcaatatcggtctgttgctattcctggtgatgtttatttacgccatatttgggatgtcaaattttgcctacgtgaaaagagaggtgggtattgacgacatgttcaacttcgaaacctttggaaacagcatgatctgtctgtttcagattacgacctccgccggatgggatggcctacttgcaccgatccttaacagtgggcctcctgattgtgatccggacaaggaccaccctggtagctctgtgaaaggcgactgcggaaacccttctgtgggcatctttttctttgtcagctacatcataatctcatttctggtcgtggtgaatatgtatatcgccgtaattcttgaaaacttttccgtcgctaccgaggagagtgcagaacccttgtctgaggacgattttgaaatgttttatgaggtttgggagaagtttgatcctgacgcaacccagttcatcgagtttgctaagctctcagattttgcagacgccctggatcctccattactgatcgccaagccaaacaaggtgcagttgatcgccatggacttgcccatggtgagcggcgacagaatccactgcttagatatactatttgcatttactaagcgggtgctgggggagtccggggagatggatgccctgcgcattcagatggaggagcgattcatggcatctaacccctcaaaagtttcctacgaaccgatcacgacaactctgaaaaggaagcaggaggaggtgtctgctataattatccaacgagcataccgcagatatttgctgaaacagaaagtcaaaaaggtgagctctatctataaaaaggacaagggcaaagaatgtgacgggactcctatcaaagaagacacactgatcgacaagctgaatgaaaattccaccccggaaaaaacagacatgactcctagcactacaagtcctcctagctatgactccgtgaccaagcccgagaaggagaaattcgagaaggataaaagcgagaaggaggataagggcaaggacatcagagagtcaaagaaata

SEQ ID NO: 267463 - DNA, 8792 bp, Artificial Sequence
  derived and/or modified sequence
atgctgttttctaacagacattgggtaccatcgaatgactgtcagaacagaaagctaaggcaaaggagggaggatgctgtggtcatcctttcttgtttttttcttctttaatgaggatagagcacatgtgagattttactttctactccagtaaaaattctgaagaattgcattggagactgttatattcaacacatacgtggattctgtgttatgatttacatttttctttatttcagcactttcttatgcaaggagctaaacagtgattaaaggagcaggatgaaaagatggcacagtcagtgctggtaccgccaggacctgacagcttccgcttctttaccagggaatcccttgctgctattgaacaacgcattgcagaagagaaagctaagagacccaaacaggaacgcaaggatgaggatgatgaaaatggcccaaagccaaacagtgacttggaagcaggaaaatctcttccatttatttatggagacattcctccagagatggtgtcagtgcccctggaggatctggacccctactatatcaataagaaaacgtttatagtattgaataaagggaaagcaatctctcgattcagtgccacccctgccctttacattttaactcccttcaaccctattagaaaattagctattaagattttggtacattctttattcaatatgctcattatgtgcacgattcttaccaactgtgtatttatgaccatgagtaaccctccagactggacaaagaatgtggagtatacctttacaggaatttatacttttgaatcacttattaaaatacttgcaaggggcttttgtttagaagatttcacatttttacgggatccatggaattggttggatttcacagtcattacttttgcgtatgtaacagaatttgtaaacctaggcaatgtttcagctcttcgaactttcagagtcttgagagctttgaaaactatttctgtaattccaggcctgaagaccattgtgggggccctgatccagtcagtgaagaagctttctgatgtcatgatcttgactgtgttctgtctaagcgtgtttgcgctaataggattgcagttgttcatgggcaacctacgaaataaatgtttgcaatggcctccagataattcttcctttgaaataaatatcacttccttctttaacaattcattggatgggaatggtactactttcaataggacagtgagcatatttaactgggatgaatatattgaggataaaagtcacttttattttttagaggggcaaaatgatgctctgctttgtggcaacagctcagatgcaggccagtgtcctgaaggatacatctgtgtgaaggctggtagaaaccccaactatggctacacgagctttgacacctttagttgggcctttttgtccttatttcgtctcatgactcaagacttctgggaaaacctttatcaactgacactacgtgctgctgggaaaacgtacatgatattttttgtgctggtcattttcttgggctcattctatctaataaatttgatcttggctgtggtggccatggcctatgaggaacagaatcaggccacattggaagaggctgaacagaaggaagctgaatttcagcagatgctcgaacagttgaaaaagcaacaagaagaagctcaggcggcagctgcagccgcatctgctgaatcaagagacttcagtggtgctggtgggataggagttttttcagagagttcttcagtagcatctaagttgagctccaaaagtgaaaaagagctgaaaaacagaagaaagaaaaagaaacagaaagaacagtctggagaagaagagaaaaatgacagagtccgaaaatcggaatctgaagacagcataagaagaaaaggtttccgtttttccttggaaggaagtaggctgacatatgaaaagagattttcttctccacaccagtccttactgagcatccgtggctcccttttctctccaagacgcaacagtagggcgagccttttcagcttcagaggtcgagcaaaggacattggctctgagaatgactttgctgatgatgagcacagcacctttgaggacaatgacagccgaagagactctctgttcgtgccgcacagacatggagaacggcgccacagcaatgtcagccaggccagccgtgcctccagggtgctccccatcctgcccatgaatgggaagatgcatagcgctgtggactgcaatggtgtggtctccctggtcgggggcccttctaccctcacatctgctgggcagctcctaccagagggcacaactactgaaacagaaataagaaagagacggtccagttcttatcatgtttccatggatttattggaagatcctacatcaaggcaaagagcaatgagtatagccagtattttgaccaacaccatggaagaacttgaagaatccagacagaaatgcccaccatgctggtataaatttgctaatatgtgtttgatttgggactgttgtaaaccatggttaaaggtgaaacaccttgtcaacctggttgtaatggacccatttgttgacctggccatcaccatctgcattgtcttaaatacactcttcatggctatggagcactatcccatgacggagcagttcagcagtgtactgtctgttggaaacctggtcttcacagggatcttcacagcagaaatgtttctcaagataattgccatggatccatattattactttcaagaaggctggaatatttttgatggttttattgtgagccttagtttaatggaacttggtttggcaaatgtggaaggattgtcagttctccgatcattccggctgctccgagttttcaagttggcaaaatcttggccaactctaaatatgctaattaagatcattggcaattctgtgggggctctaggaaacctcaccttggtattggccatcatcgtcttcatttttgctgtggtcggcatgcagctctttggtaagagctacaaagaatgtgtctgcaagatttccaatgattgtgaactcccacgctggcacatgcatgactttttccactccttcctgatcgtgttccgcgtgctgtgtggagagtggatagagaccatgtgggactgtatggaggtcgctggccaaaccatgtgccttactgtcttcatgatggtcatggtgattggaaatctagtggttctgaacctcttcttggccttgcttttgagttccttcagttctgacaatcttgctgccactgatgatgataacgaaatgaataatctccagattgctgtgggaaggatgcagaaaggaatcgattttgttaaaagaaaaatacgtgaatttattcagaaagcctttgttaggaagcagaaagctttagatgaaattaaaccgcttgaagatctaaataataaaaaagacagctgtatttccaaccataccaccatagaaataggcaaagacctcaattatctcaaagacggaaatggaactactagtggcataggcagcagtgtagaaaaatatgtcgtggatgaaagtgattacatgtcatttataaacaaccctagcctcactgtgacagtaccaattgctgttggagaatctgactttgaaaatttaaatactgaagaattcagcagcgagtcagatatggaggaaagcaaagagaagctaaatgcaactagttcatctgaaggcagcacggttgatattggagctcccgccgagggagaacagcctgaggttgaacctgaggaatcccttgaacctgaagcctgttttacagaagactgtgtacggaagttcaagtgttgtcagataagcatagaagaaggcaaagggaaactctggtggaatttgaggaaaacatgctataagatagtggagcacaattggttcgaaaccttcattgtcttcatgattctgctgagcagtggggctctggcctttgaagatatatacattgagcagcgaaaaaccattaagaccatgttagaatatgctgacaaggttttcacttacatattcattctggaaatgctgctaaagtgggttgcatatggttttcaagtgtattttaccaatgcctggtgctggctagacttcctgattgttgatgtctcactggttagcttaactgcaaatgccttgggttactcagaacttggtgccatcaaatccctcagaacactaagagctctgaggccactgagagctttgtcccggtttgaaggaatgagggttgttgtaaatgctcttttaggagccattccatctatcatgaatgtacttctggtttgtctgatcttttggctaatattcagtatcatgggagtgaatctctttgctggcaagttttaccattgtattaattacaccactggagagatgtttgatgtaagcgtggtcaacaactacagtgagtgcaaagctctcattgagagcaatcaaactgccaggtggaaaaatgtgaaagtaaactttgataacgtaggacttggatatctgtctctacttcaagtagccacgtttaagggatggatggatattatgtatgcagctgttgattcacgaaatgtagaattacaacccaagtatgaagacaacctgtacatgtatctttattttgtcatctttattatttttggttcattctttaccttgaatcttttcattggtgtcatcatagataacttcaaccaacagaaaaagaagtttggaggtcaagacatttttatgacagaagaacagaagaaatactacaatgcaatgaaaaaactgggttcaaagaaaccacaaaaacccatacctcgacctgctaacaaattccaaggaatggtctttgattttgtaaccaaacaagtctttgatatcagcatcatgatcctcatctgccttaacatggtcaccatgatggtggaaaccgatgaccagagtcaagaaatgacaaacattctgtactggattaatctggtgtttattgttctgttcactggagaatgtgtgctgaaactgatctctcttcgttactactatttcactattggatggaatatttttgattttgtggtggtcattctctccattgtaggaatgtttctggctgaactgatagaaaagtattttgtgtcccctaccctgttccgagtgatccgtcttgccaggattggccgaatcctacgtctgatcaaaggagcaaaggggatccgcacgctgctctttgctttgatgatgtcccttcctgcgttgtttaacatcggcctccttcttttcctggtcatgttcatctacgccatctttgggatgtccaattttgcctatgttaagagggaagttgggatcgatgacatgttcaactttgagacctttggcaacagcatgatctgcctgttccaaattacaacctctgctggctgggatggattgctagcacctattcttaatagtggacctccagactgtgaccctgacaaagatcaccctggaagctcagttaaaggagactgtgggaacccatctgttgggattttcttttttgtcagttacatcatcatatccttcctggttgtggtgaacatgtacatcgcggtcatcctggagaacttcagtgttgctactgaagaaagtgcagagcctctgagtgaggatgactttgagatgttctatgaggtttgggagaagtttgatcccgatgcgacccagtttatagagtttgccaaactttctgattttgcagatgccctggatcctcctcttctcatagcaaaacccaacaaagtccagctcattgccatggatctgcccatggtgagtggtgaccggatccactgtcttgacatcttatttgcttttacaaagcgtgttttgggtgagagtggagagatggatgcccttcgaatacagatggaagagcgattcatggcatcaaacccctccaaagtctcttatgagcccattacgaccacgttgaaacgcaaacaagaggaggtgtctgctattattatccagagggcttacagacgctacctcttgaagcaaaaagttaaaaaggtatcaagtatatacaagaaagacaaaggcaaagaatgtgatggaacacccatcaaagaagatactctcattgataaactgaatgagaattcaactccagagaaaaccgatatgacgccttccaccacgtctccaccctcgtatgatagtgtgaccaaaccagaaaaagaaaaatttgaaaaagacaaatcagaaaaggaagacaaagggaaagatatcagggaaagtaaaaagtaaaaagaaaccaagaattttccattttgtgatcaattgtttacagcccgtgatggtgatgtgtttgtgtcaacaggactcccacaggaggtctatgccaaactgactgtttttacaaatgtatacttaaggtcagtgcctataacaagacagagacctctggtcagcaaactggaactcagtaaactggagaaatagtatcgatgggaggtttctattttcacaaccagctgacactgctgaagagcagaggcgtaatggctactcagacgataggaaccaatttaaaggggggagggaagttaaatttttatgtaaattcaacatgtgacacttgataatagtaattgtcaccagtgtttatgttttaactgccacacctgccatatttttacaaaacgtgtgctgtgaatttatcacttttctttttaattcacaggttgtttactattatatgtgactatttttgtaaatgggtttgtgtttggggagagggattaaagggagggaattctacatttctctattgtattgtataactggatatattttaaatggaggcatgctgcaattctcattcacacataaaaaaatcacatcacaaaagggaagagtttacttcttgtttcaggatgtttttagatttttgaggtgcttaaatagctattcgtatttttaaggtgtctcatccagaaaaaatttaatgtgcctgtaaatgttccatagaatcacaagcattaaagagttgttttatttttacataacccattaaatgtacatgtatatatgtatatatgtatatgtgcgtgtatatacatatatatgtatacacacatgcacacacagagatatacacataccattacattgtcattcacagtcccagcagcatgactatcacatttttgataagtgtcctttggcataaaataaaaatatcctatcagtcctttctaagaagcctgaattgaccaaaaaacatccccaccaccactttataaagttgattctgctttatcctgcagtattgtttagccatcttctgctcttggtaaggttgacatagtatatgtcaatttaaaaaataaaagtctgctttgtaaatagtaattttacccagtggtgcatgtttgagcaaacaaaaatgatgatttaagcacactacttattgcatcaaatatgtaccacagtaagtatagtttgcaagctttcaacaggtaatatgatgtaattggttccattatagtttgaagctgtcactgctgcatgtttatcttgcctatgctgctgtatcttattccttccactgttcagaagtctaatatgggaagccatatatcagtggtaaagtgaagcaaattgttctaccaagacctcattcttcatgtcattaagcaataggttgcagcaaacaaggaagagcttcttgctttttattcttccaaccttaattgaacactcaatgatgaaaagcccgactgtacaaacatgttgcaagctgcttaaatctgtttaaaatatatggttagagttttctaagaaaatataaatactgtaaaaagttcattttattttatttttcagccttttgtacgtaaaatgagaaattaaaagtatcttcaggtggatgtcacagtcactattgttagtttctgttcctagcacttttaaattgaagcacttcacaaaataagaagcaaggactaggatgcagtgtaggtttctgcttttttattagtactgtaaacttgcacacatttcaatgtgaaacaaatctcaaactgagttcaatgtttatttgctttcaatagtaatgccttatcattgaaagaggcttaaagaaaaaaaaaatcagctgatactcttggcattgcttgaatccaatgtttccacctagtctttttattcagtaatcatcagtcttttccaatgtttgtttacacagatagatcttattgacccatatggcactagaactgtatcagatataatatgggatcccagctttttttcctctcccacaaaaccaggtagtgaagttatattaccagttacagcaaaatactttgtgtttcacaagcaacaataaatgtagattctttatactgaagctattgacttgtagtgtgttggtgaaatgcatgcaggaaaatgctgttaccataaagaacggtaaaccacattacaatcaagccaaaagaataaaggtttcgcttttgtttttgtatttaattgttgtctttgtttctatctttgaaatgccatttaaaggtagatttctatcatgtaaaaataatctatctgaaaaacaaatgtaaagaacacacattaattactataattcatctttcaattttttcatggaatggaagttaattaagaagagtgtattggataactactttaatattggccaaaaagctagatatggcatcaggtagactagtggaaagttacaaaaattaataaaaaattgactaacatttt

SEQ ID NO: 267464 - DNA, 6274 bp, Artificial Sequence
  derived and/or modified sequence
cactttcttatgcaaggagctaaacagtgattaaaggagcaggatgaaaagatggcacagtcagtgctggtaccgccaggacctgacagcttccgcttctttaccagggaatcccttgctgctattgaacaacgcattgcagaagagaaagctaagagacccaaacaggaacgcaaggatgaggatgatgaaaatggcccaaagccaaacagtgacttggaagcaggaaaatctcttccatttatttatggagacattcctccagagatggtgtcagtgcccctggaggatctggacccctactatatcaataagaaaacgtttatagtattgaataaagggaaagcaatctctcgattcagtgccacccctgccctttacattttaactcccttcaaccctattagaaaattagctattaagattttggtacattctttattcaatatgctcattatgtgcacgattcttaccaactgtgtatttatgaccatgagtaaccctccagactggacaaagaatgtggagtatacctttacaggaatttatacttttgaatcacttattaaaatacttgcaaggggcttttgtttagaagatttcacatttttacgggatccatggaattggttggatttcacagtcattacttttgcgtatgtaacagaatttgtaaacctaggcaatgtttcagctcttcgaactttcagagtcttgagagctttgaaaactatttctgtaattccaggcctgaagaccattgtgggggccctgatccagtcagtgaagaagctttctgatgtcatgatcttgactgtgttctgtctaagcgtgtttgcgctaataggattgcagttgttcatgggcaacctacgaaataaatgtttgcaatggcctccagataattcttcctttgaaataaatatcacttccttctttaacaattcattggatgggaatggtactactttcaataggacagtgagcatatttaactgggatgaatatattgaggataaaagtcacttttattttttagaggggcaaaatgatgctctgctttgtggcaacagctcagatgcaggccagtgtcctgaaggatacatctgtgtgaaggctggtagaaaccccaactatggctacacgagctttgacacctttagttgggcctttttgtccttatttcgtctcatgactcaagacttctgggaaaacctttatcaactgacactacgtgctgctgggaaaacgtacatgatattttttgtgctggtcattttcttgggctcattctatctaataaatttgatcttggctgtggtggccatggcctatgaggaacagaatcaggccacattggaagaggctgaacagaaggaagctgaatttcagcagatgctcgaacagttgaaaaagcaacaagaagaagctcaggcggcagctgcagccgcatctgctgaatcaagagacttcagtggtgctggtgggataggagttttttcagagagttcttcagtagcatctaagttgagctccaaaagtgaaaaagagctgaaaaacagaagaaagaaaaagaaacagaaagaacagtctggagaagaagagaaaaatgacagagtccgaaaatcggaatctgaagacagcataagaagaaaaggtttccgtttttccttggaaggaagtaggctgacatatgaaaagagattttcttctccacaccagtccttactgagcatccgtggctcccttttctctccaagacgcaacagtagggcgagccttttcagcttcagaggtcgagcaaaggacattggctctgagaatgactttgctgatgatgagcacagcacctttgaggacaatgacagccgaagagactctctgttcgtgccgcacagacatggagaacggcgccacagcaatgtcagccaggccagccgtgcctccagggtgctccccatcctgcccatgaatgggaagatgcatagcgctgtggactgcaatggtgtggtctccctggtcgggggcccttctaccctcacatctgctgggcagctcctaccagagggcacaactactgaaacagaaataagaaagagacggtccagttcttatcatgtttccatggatttattggaagatcctacatcaaggcaaagagcaatgagtatagccagtattttgaccaacaccatggaagaacttgaagaatccagacagaaatgcccaccatgctggtataaatttgctaatatgtgtttgatttgggactgttgtaaaccatggttaaaggtgaaacaccttgtcaacctggttgtaatggacccatttgttgacctggccatcaccatctgcattgtcttaaatacactcttcatggctatggagcactatcccatgacggagcagttcagcagtgtactgtctgttggaaacctggtcttcacagggatcttcacagcagaaatgtttctcaagataattgccatggatccatattattactttcaagaaggctggaatatttttgatggttttattgtgagccttagtttaatggaacttggtttggcaaatgtggaaggattgtcagttctccgatcattccggctgctccgagttttcaagttggcaaaatcttggccaactctaaatatgctaattaagatcattggcaattctgtgggggctctaggaaacctcaccttggtattggccatcatcgtcttcatttttgctgtggtcggcatgcagctctttggtaagagctacaaagaatgtgtctgcaagatttccaatgattgtgaactcccacgctggcacatgcatgactttttccactccttcctgatcgtgttccgcgtgctgtgtggagagtggatagagaccatgtgggactgtatggaggtcgctggccaaaccatgtgccttactgtcttcatgatggtcatggtgattggaaatctagtggttctgaacctcttcttggccttgcttttgagttccttcagttctgacaatcttgctgccactgatgatgataacgaaatgaataatctccagattgctgtgggaaggatgcagaaaggaatcgattttgttaaaagaaaaatacgtgaatttattcagaaagcctttgttaggaagcagaaagctttagatgaaattaaaccgcttgaagatctaaataataaaaaagacagctgtatttccaaccataccaccatagaaataggcaaagacctcaattatctcaaagacggaaatggaactactagtggcataggcagcagtgtagaaaaatatgtcgtggatgaaagtgattacatgtcatttataaacaaccctagcctcactgtgacagtaccaattgctgttggagaatctgactttgaaaatttaaatactgaagaattcagcagcgagtcagatatggaggaaagcaaagagaagctaaatgcaactagttcatctgaaggcagcacggttgatattggagctcccgccgagggagaacagcctgaggttgaacctgaggaatcccttgaacctgaagcctgttttacagaagactgtgtacggaagttcaagtgttgtcagataagcatagaagaaggcaaagggaaactctggtggaatttgaggaaaacatgctataagatagtggagcacaattggttcgaaaccttcattgtcttcatgattctgctgagcagtggggctctggcctttgaagatatatacattgagcagcgaaaaaccattaagaccatgttagaatatgctgacaaggttttcacttacatattcattctggaaatgctgctaaagtgggttgcatatggttttcaagtgtattttaccaatgcctggtgctggctagacttcctgattgttgatgtctcactggttagcttaactgcaaatgccttgggttactcagaacttggtgccatcaaatccctcagaacactaagagctctgaggccactgagagctttgtcccggtttgaaggaatgagggttgttgtaaatgctcttttaggagccattccatctatcatgaatgtacttctggtttgtctgatcttttggctaatattcagtatcatgggagtgaatctctttgctggcaagttttaccattgtattaattacaccactggagagatgtttgatgtaagcgtggtcaacaactacagtgagtgcaaagctctcattgagagcaatcaaactgccaggtggaaaaatgtgaaagtaaactttgataacgtaggacttggatatctgtctctacttcaagtagccacgtttaagggatggatggatattatgtatgcagctgttgattcacgaaatgtagaattacaacccaagtatgaagacaacctgtacatgtatctttattttgtcatctttattatttttggttcattctttaccttgaatcttttcattggtgtcatcatagataacttcaaccaacagaaaaagaagtttggaggtcaagacatttttatgacagaagaacagaagaaatactacaatgcaatgaaaaaactgggttcaaagaaaccacaaaaacccatacctcgacctgctaacaaattccaaggaatggtctttgattttgtaaccaaacaagtctttgatatcagcatcatgatcctcatctgccttaacatggtcaccatgatggtggaaaccgatgaccagagtcaagaaatgacaaacattctgtactggattaatctggtgtttattgttctgttcactggagaatgtgtgctgaaactgatctctcttcgttactactatttcactattggatggaatatttttgattttgtggtggtcattctctccattgtaggaatgtttctggctgaactgatagaaaagtattttgtgtcccctaccctgttccgagtgatccgtcttgccaggattggccgaatcctacgtctgatcaaaggagcaaaggggatccgcacgctgctctttgctttgatgatgtcccttcctgcgttgtttaacatcggcctccttcttttcctggtcatgttcatctacgccatctttgggatgtccaattttgcctatgttaagagggaagttgggatcgatgacatgttcaactttgagacctttggcaacagcatgatctgcctgttccaaattacaacctctgctggctgggatggattgctagcacctattcttaatagtggacctccagactgtgaccctgacaaagatcaccctggaagctcagttaaaggagactgtgggaacccatctgttgggattttcttttttgtcagttacatcatcatatccttcctggttgtggtgaacatgtacatcgcggtcatcctggagaacttcagtgttgctactgaagaaagtgcagagcctctgagtgaggatgactttgagatgttctatgaggtttgggagaagtttgatcccgatgcgacccagtttatagagtttgccaaactttctgattttgcagatgccctggatcctcctcttctcatagcaaaacccaacaaagtccagctcattgccatggatctgcccatggtgagtggtgaccggatccactgtcttgacatcttatttgcttttacaaagcgtgttttgggtgagagtggagagatggatgcccttcgaatacagatggaagagcgattcatggcatcaaacccctccaaagtctcttatgagcccattacgaccacgttgaaacgcaaacaagaggaggtgtctgctattattatccagagggcttacagacgctacctcttgaagcaaaaagttaaaaaggtatcaagtatatacaagaaagacaaaggcaaagaatgtgatggaacacccatcaaagaagatactctcattgataaactgaatgagaattcaactccagagaaaaccgatatgacgccttccaccacgtctccaccctcgtatgatagtgtgaccaaaccagaaaaagaaaaatttgaaaaagacaaatcagaaaaggaagacaaagggaaagatatcagggaaagtaaaaagtaaaaagaaaccaagaattttccattttgtgatcaattgtttacagcccgtgatggtgatgtgtttgtgtcaacaggactcccacaggaggtctatgccaaactgactgtttttacaaatgtatacttaaggtcagtgcctataacaagacagagacctctggtcagcaaactggaactcagtaaactggagaaatagtatcgatggg

SEQ ID NO: 267465 - DNA, 6018 bp, Artificial Sequence
  derived and/or modified sequence
atggcccagagcgtgctggtgccccccggccccgacagcttcagattcttcaccagagagagcctggccgccatcgagcagagaatcgccgaggagaaggccaagagacccaagcaggagagaaaggacgaggacgacgagaacggccccaagcccaacagcgacctggaggccggcaagagcctgcccttcatctacggcgacatcccccccgagatggtgagcgtgcccctggaggacctggacccctactacatcaacaagaagaccttcatcgtgctgaacaagggcaaggccatcagcagattcagcgccacccccgccctgtacatcctgacccccttcaaccccatcagaaagctggccatcaagatcctggtgcacagcctgttcaacatgctgatcatgtgcaccatcctgaccaactgcgtgttcatgaccatgagcaacccccccgactggaccaagaacgtggagtacaccttcaccggcatctacaccttcgagagcctgatcaagatcctggccagaggcttctgcctggaggacttcaccttcctgagagacccctggaactggctggacttcaccgtgatcaccttcgcctacgtgaccgagttcgtgaacctgggcaacgtgagcgccctgagaaccttcagagtgctgagagccctgaagaccatcagcgtgatccccggcctgaagaccatcgtgggcgccctgatccagagcgtgaagaagctgagcgacgtgatgatcctgaccgtgttctgcctgagcgtgttcgccctgatcggcctgcagctgttcatgggcaacctgagaaacaagtgcctgcagtggccccccgacaacagcagcttcgagatcaacatcaccagcttcttcaacaacagcctggacggcaacggcaccaccttcaacagaaccgtgagcatcttcaactgggacgagtacatcgaggacaagagccacttctacttcctggagggccagaacgacgccctgctgtgcggcaacagcagcgacgccggccagtgccccgagggctacatctgcgtgaaggccggcagaaaccccaactacggctacaccagcttcgacaccttcagctgggccttcctgagcctgttcagactgatgacccaggacttctgggagaacctgtaccagctgaccctgagagccgccggcaagacctacatgatcttcttcgtgctggtgatcttcctgggcagcttctacctgatcaacctgatcctggccgtggtggccatggcctacgaggagcagaaccaggccaccctggaggaggccgagcagaaggaggccgagttccagcagatgctggagcagctgaagaagcagcaggaggaggcccaggccgccgccgccgccgccagcgccgagagcagagacttcagcggcgccggcggcatcggcgtgttcagcgagagcagcagcgtggccagcaagctgagcagcaagagcgagaaggagctgaagaacagaagaaagaagaagaagcagaaggagcagagcggcgaggaggagaagaacgacagagtgagaaagagcgagagcgaggacagcatcagaagaaagggcttcagattcagcctggagggcagcagactgacctacgagaagagattcagcagcccccaccagagcctgctgagcatcagaggcagcctgttcagccccagaagaaacagcagagccagcctgttcagcttcagaggcagagccaaggacatcggcagcgagaacgacttcgccgacgacgagcacagcaccttcgaggacaacgacagcagaagagacagcctgttcgtgccccacagacacggcgagagaagacacagcaacgtgagccaggccagcagagccagcagagtgctgcccatcctgcccatgaacggcaagatgcacagcgccgtggactgcaacggcgtggtgagcctggtgggcggccccagcaccctgaccagcgccggccagctgctgcccgagggcaccaccaccgagaccgagatcagaaagagaagaagcagcagctaccacgtgagcatggacctgctggaggaccccaccagcagacagagagccatgagcatcgccagcatcctgaccaacaccatggaggagctggaggagagcagacagaagtgccccccctgctggtacaagttcgccaacatgtgcctgatctgggactgctgcaagccctggctgaaggtgaagcacctggtgaacctggtggtgatggaccccttcgtggacctggccatcaccatctgcatcgtgctgaacaccctgttcatggccatggagcactaccccatgaccgagcagttcagcagcgtgctgagcgtgggcaacctggtgttcaccggcatcttcaccgccgagatgttcctgaagatcatcgccatggacccctactactacttccaggagggctggaacatcttcgacggcttcatcgtgagcctgagcctgatggagctgggcctggccaacgtggagggcctgagcgtgctgagaagcttcagactgctgagagtgttcaagctggccaagagctggcccaccctgaacatgctgatcaagatcatcggcaacagcgtgggcgccctgggcaacctgaccctggtgctggccatcatcgtgttcatcttcgccgtggtgggcatgcagctgttcggcaagagctacaaggagtgcgtgtgcaagatcagcaacgactgcgagctgcccagatggcacatgcacgacttcttccacagcttcctgatcgtgttcagagtgctgtgcggcgagtggatcgagaccatgtgggactgcatggaggtggccggccagaccatgtgcctgaccgtgttcatgatggtgatggtgatcggcaacctggtggtgctgaacctgttcctggccctgctgctgagcagcttcagcagcgacaacctggccgccaccgacgacgacaacgagatgaacaacctgcagatcgccgtgggcagaatgcagaagggcatcgacttcgtgaagagaaagatcagagagttcatccagaaggccttcgtgagaaagcagaaggccctggacgagatcaagcccctggaggacctgaacaacaagaaggacagctgcatcagcaaccacaccaccatcgagatcggcaaggacctgaactacctgaaggacggcaacggcaccaccagcggcatcggcagcagcgtggagaagtacgtggtggacgagagcgactacatgagcttcatcaacaaccccagcctgaccgtgaccgtgcccatcgccgtgggcgagagcgacttcgagaacctgaacaccgaggagttcagcagcgagagcgacatggaggagagcaaggagaagctgaacgccaccagcagcagcgagggcagcaccgtggacatcggcgcccccgccgagggcgagcagcccgaggtggagcccgaggagagcctggagcccgaggcctgcttcaccgaggactgcgtgagaaagttcaagtgctgccagatcagcatcgaggagggcaagggcaagctgtggtggaacctgagaaagacctgctacaagatcgtggagcacaactggttcgagaccttcatcgtgttcatgatcctgctgagcagcggcgccctggccttcgaggacatctacatcgagcagagaaagaccatcaagaccatgctggagtacgccgacaaggtgttcacctacatcttcatcctggagatgctgctgaagtgggtggcctacggcttccaggtgtacttcaccaacgcctggtgctggctggacttcctgatcgtggacgtgagcctggtgagcctgaccgccaacgccctgggctacagcgagctgggcgccatcaagagcctgagaaccctgagagccctgagacccctgagagccctgagcagattcgagggcatgagagtggtggtgaacgccctgctgggcgccatccccagcatcatgaacgtgctgctggtgtgcctgatcttctggctgatcttcagcatcatgggcgtgaacctgttcgccggcaagttctaccactgcatcaactacaccaccggcgagatgttcgacgtgagcgtggtgaacaactacagcgagtgcaaggccctgatcgagagcaaccagaccgccagatggaagaacgtgaaggtgaacttcgacaacgtgggcctgggctacctgagcctgctgcaggtggccaccttcaagggctggatggacatcatgtacgccgccgtggacagcagaaacgtggagctgcagcccaagtacgaggacaacctgtacatgtacctgtacttcgtgatcttcatcatcttcggcagcttcttcaccctgaacctgttcatcggcgtgatcatcgacaacttcaaccagcagaagaagaagttcggcggccaggacatcttcatgaccgaggagcagaagaagtactacaacgccatgaagaagctgggcagcaagaagccccagaagcccatccccagacccgccaacaagttccagggcatggtgttcgacttcgtgaccaagcaggtgttcgacatcagcatcatgatcctgatctgcctgaacatggtgaccatgatggtggagaccgacgaccagagccaggagatgaccaacatcctgtactggatcaacctggtgttcatcgtgctgttcaccggcgagtgcgtgctgaagctgatcagcctgagatactactacttcaccatcggctggaacatcttcgacttcgtggtggtgatcctgagcatcgtgggcatgttcctggccgagctgatcgagaagtacttcgtgagccccaccctgttcagagtgatcagactggccagaatcggcagaatcctgagactgatcaagggcgccaagggcatcagaaccctgctgttcgccctgatgatgagcctgcccgccctgttcaacatcggcctgctgctgttcctggtgatgttcatctacgccatcttcggcatgagcaacttcgcctacgtgaagagagaggtgggcatcgacgacatgttcaacttcgagaccttcggcaacagcatgatctgcctgttccagatcaccaccagcgccggctgggacggcctgctggcccccatcctgaacagcggcccccccgactgcgaccccgacaaggaccaccccggcagcagcgtgaagggcgactgcggcaaccccagcgtgggcatcttcttcttcgtgagctacatcatcatcagcttcctggtggtggtgaacatgtacatcgccgtgatcctggagaacttcagcgtggccaccgaggagagcgccgagcccctgagcgaggacgacttcgagatgttctacgaggtgtgggagaagttcgaccccgacgccacccagttcatcgagttcgccaagctgagcgacttcgccgacgccctggacccccccctgctgatcgccaagcccaacaaggtgcagctgatcgccatggacctgcccatggtgagcggcgacagaatccactgcctggacatcctgttcgccttcaccaagagagtgctgggcgagagcggcgagatggacgccctgagaatccagatggaggagagattcatggccagcaaccccagcaaggtgagctacgagcccatcaccaccaccctgaagagaaagcaggaggaggtgagcgccatcatcatccagagagcctacagaagatacctgctgaagcagaaggtgaagaaggtgagcagcatctacaagaaggacaagggcaaggagtgcgacggcacccccatcaaggaggacaccctgatcgacaagctgaacgagaacagcacccccgagaagaccgacatgacccccagcaccaccagcccccccagctacgacagcgtgaccaagcccgagaaggagaagttcgagaaggacaagagcgagaaggaggacaagggcaaggacatcagagagagcaagaagtag

SEQ ID NO: 267466 - protein, 644 aa, Artificial Sequence
  derived and/or modified sequence
MEQLSDEEIDHGAEEDSDKEDQDLDKMFGAWLGELDKLTQSLDSDKPMEPVKRSPLRQETNMANFSYRFSIYNLNEALNQGETVDLDALMADLCSIEQELSSIGSGNSKRQITETKATQKLPVSRHTLKHGTLKGLSSSSNRIAKPSHASYSLDDVTAQLEQASLSMDEAAQQSVLEDTKPLVTNQHRRTASAGTVSDAEVHSISNSSHSSITSAASSMDSLDIDKVTRPQELDLTHQGQPITEHAISLRCSSKQAKRHIDFTEEQAELTPHSYLDRETSLLLRNIAGKPSHLLTKEEQAAKLKAEKIRVALEKIKEAQVKKLVIRVHMSDDSSKTMMVDERQTVRQVLDNLMDKSHCGYSLDWSLVETVSELQMERIFEDHENLVENLLNWTRDSQNKLIFMERIEKYALFKNPQNYLLGKKETAEMADRNKEVLLEECFCGSSVTVPEIEGVLWLKDDGKKSWKKRYFLLRASGIYYVPKGKAKVSRDLVCFLQLDHVNVYYGQDYRNKYKAPTDYCLVLKHPQIQKKSQYIKYLCCDDVRTLHQWVNGIRIAKYGKQLYMNYQEALKRTESAYDWTSLSSSSIKSGSSSSSIPESQSNHSNQSDSGVSDTQPAGHVRSQSIVSSVFSEAWKRGTQLEESSK

SEQ ID NO: 267467 - protein, 1302 aa, Artificial Sequence
  derived and/or modified sequence
MEQLSDEEIDHGAEEDSDKEDQDLDKMFGAWLGELDKLTQSLDSDKPMEPVKRSPLRQETNMANFSYRFSIYNLNEALNQGETVDLDALMADLCSIEQELSSIGSGNSKRQITETKATQKLPVSRHTLKHGTLKGLSSSSNRIAKPSHASYSLDDVTAQLEQASLSMDEAAQQSVLEDTKPLVTNQHRRTASAGTVSDAEVHSISNSSHSSITSAASSMDSLDIDKVTRPQELDLTHQGQPITEHAISLRCSSKQAKRHIDFTEEQAELTPHSYLDRETSLLLRNIAGKPSHLLTKEEQAAKLKAEKIRVALEKIKEAQVKKLVIRVHMSDDSSKTMMVDERQTVRQVLDNLMDKSHCGYSLDWSLVETVSELQMERIFEDHENLVENLLNWTRDSQNKLIFMERIEKYALFKNPQNYLLGKKETAEMADRNKEVLLEECFCGSSVTVPEIEGVLWLKDDGKKSWKKRYFLLRASGIYYVPKGKAKVSRDLVCFLQLDHVNVYYGQDYRNKYKAPTDYCLVLKHPQIQKKSQYIKYLCCDDVRTLHQWVNGIRIAKYGKQLYMNYQEALKRTESAYDWTSLSSSSIKSGSSSSSIPESQSNHSNQSDSGVSDTQPAGHVRSQSIVSSVFSEAWKRGTQLEESSKARMESMNRPYTSLVPPLSPQPKIVTPYTASQPSPPLPPPPPPPPPPPPPPPPPPPPLPSQSAPSAGSAAPMFVKYSTITRLQNASQHSGALFKPPTPPVMQSQSVKPQILVPPNGVVPPPPPPPPPPTPGSAMAQLKPAPCAPSLPQFSAPPPPLKIHQVQHITQVAPPTPPPPPPIPAPLPPQAPPKPLVTIPAPTSTKTVAPVVTQAAPPTPTPPVPPAKKQPAFPASYIPPSPPTPPVPVPPPTLPKQQSFCAKPPPSPLSPVPSVVKQIASQFPPPPTPPAMESQPLKPVPANVAPQSPPAVKAKPKWQPSSIPVPSPDFPPPPPESSLVFPPPPPSPVPAPPPPPPPTASPTPDKSGSPGKKTSKTSSPGGKKPPPTPQRNSSIKSSSGAEHPEPKRPSVDSLVSKFTPPAESGSPSKETLPPPAAPPKPGKLNLSGVNLPGVLQQGCVSAKAPVLSGRGKDSVVEFPSPPSDSDFPPPPPETELPLPPIEIPAVFSGNTSPKVAVVNPQPQQWSKMSVKKAPPPTRPKRNDSTRLTQAEISEQPTMATVVPQVPTSPKSSLSVQPGFLADLNRTLQRKSITRHGSLSSRMSRAEPTATMDDMALPPPPPELLSDQQKAGYGGSHISGYATLRRGPPPAPPKRDQNTKLSRDW

SEQ ID NO: 267468 - protein, 649 aa, Artificial Sequence
  derived and/or modified sequence
MEQLSDEEIDHGAEEDSDKEDQDLDKMFGAWLGELDKLTQSLDSDKPMEPVKRSPLRQETNMANFSYRFSIYNLNEALNQGETVDLDALMADLCSIEQELSSIGSGNSKRQITETKATQKLPVSRHTLKHGTLKGLSSSSNRIAKPSHASYSLDDVTAQLEQASLSMDEAAQQSVLEDTKPLVTNQHRRTASAGTVSDAEVHSISNSSHSSITSAASSMDSLDIDKVTRPQELDLTHQGQPITEHAISLRCSSKQAKRHIDFTEEQAELTPHSYLDRETSLLLRNIAGKPSHLLTKEEQAAKLKAEKIRVALEKIKEAQVKKLVIRVHMSDDSSKTMMVDERQTVRQVLDNLMDKSHCGYSLDWSLVETVSELQMERIFEDHENLVENLLNWTRDSQNKLIFMERIEKYALFKNPQNYLLGKKETAEMADRNKEVLLEECFCGSSVTVPEIEGVLWLKDDGKKSWKKRYFLLRASGIYYVPKGKAKVSRDLVCFLQLDHVNVYYGQDYRNKYKAPTDYCLVLKHPQIQKKSQYIKYLCCDDVRTLHQWVNGIRIAKYGKQLYMNYQEALKRTESAYDWTSLSSSSIKSGSSSSSIPESQSNHSNQSDSGVSDTQPAGHVRSQSIVSSVFSEAWKRGTQLEESSKVTASF

SEQ ID NO: 267469 - DNA, 3909 bp, Artificial Sequence
  derived and/or modified sequence
atggagcagctgagcgacgaggagatcgaccacggcgccgaggaggacagcgacaaggaggaccaggacctggacaagatgttcggcgcctggctgggcgagctggacaagctgacccagagcctggacagcgacaagcccatggagcccgtgaagagaagccccctgagacaggagaccaacatggccaacttcagctacagattcagcatctacaacctgaacgaggccctgaaccagggcgagaccgtggacctggacgccctgatggccgacctgtgcagcatcgagcaggagctgagcagcatcggcagcggcaacagcaagagacagatcaccgagaccaaggccacccagaagctgcccgtgagcagacacaccctgaagcacggcaccctgaagggcctgagcagcagcagcaacagaatcgccaagcccagccacgccagctacagcctggacgacgtgaccgcccagctggagcaggccagcctgagcatggacgaggccgcccagcagagcgtgctggaggacaccaagcccctggtgaccaaccagcacagaagaaccgccagcgccggcaccgtgagcgacgccgaggtgcacagcatcagcaacagcagccacagcagcatcaccagcgccgccagcagcatggacagcctggacatcgacaaggtgaccagaccccaggagctggacctgacccaccagggccagcccatcaccgagcacgccatcagcctgagatgcagcagcaagcaggccaagagacacatcgacttcaccgaggagcaggccgagctgaccccccacagctacctggacagagagaccagcctgctgctgagaaacatcgccggcaagcccagccacctgctgaccaaggaggagcaggccgccaagctgaaggccgagaagatcagagtggccctggagaagatcaaggaggcccaggtgaagaagctggtgatcagagtgcacatgagcgacgacagcagcaagaccatgatggtggacgagagacagaccgtgagacaggtgctggacaacctgatggacaagagccactgcggctacagcctggactggagcctggtggagaccgtgagcgagctgcagatggagagaatcttcgaggaccacgagaacctggtggagaacctgctgaactggaccagagacagccagaacaagctgatcttcatggagagaatcgagaagtacgccctgttcaagaacccccagaactacctgctgggcaagaaggagaccgccgagatggccgacagaaacaaggaggtgctgctggaggagtgcttctgcggcagcagcgtgaccgtgcccgagatcgagggcgtgctgtggctgaaggacgacggcaagaagagctggaagaagagatacttcctgctgagagccagcggcatctactacgtgcccaagggcaaggccaaggtgagcagagacctggtgtgcttcctgcagctggaccacgtgaacgtgtactacggccaggactacagaaacaagtacaaggcccccaccgactactgcctggtgctgaagcacccccagatccagaagaagagccagtacatcaagtacctgtgctgcgacgacgtgagaaccctgcaccagtgggtgaacggcatcagaatcgccaagtacggcaagcagctgtacatgaactaccaggaggccctgaagagaaccgagagcgcctacgactggaccagcctgagcagcagcagcatcaagagcggcagcagcagcagcagcatccccgagagccagagcaaccacagcaaccagagcgacagcggcgtgagcgacacccagcccgccggccacgtgagaagccagagcatcgtgagcagcgtgttcagcgaggcctggaagagaggcacccagctggaggagagcagcaaggccagaatggagagcatgaacagaccctacaccagcctggtgccccccctgagcccccagcccaagatcgtgaccccctacaccgccagccagcccagcccccccctgccccccccccccccccccccccccccccccccccccccccccccccccccccccccccccctgcccagccagagcgcccccagcgccggcagcgccgcccccatgttcgtgaagtacagcaccatcaccagactgcagaacgccagccagcacagcggcgccctgttcaagccccccaccccccccgtgatgcagagccagagcgtgaagccccagatcctggtgccccccaacggcgtggtgccccccccccccccccccccccccccccccacccccggcagcgccatggcccagctgaagcccgccccctgcgcccccagcctgccccagttcagcgccccccccccccccctgaagatccaccaggtgcagcacatcacccaggtggccccccccaccccccccccccccccccccatccccgcccccctgcccccccaggccccccccaagcccctggtgaccatccccgcccccaccagcaccaagaccgtggcccccgtggtgacccaggccgccccccccacccccaccccccccgtgccccccgccaagaagcagcccgccttccccgccagctacatcccccccagcccccccaccccccccgtgcccgtgcccccccccaccctgcccaagcagcagagcttctgcgccaagcccccccccagccccctgagccccgtgcccagcgtggtgaagcagatcgccagccagttcccccccccccccaccccccccgccatggagagccagcccctgaagcccgtgcccgccaacgtggccccccagagcccccccgccgtgaaggccaagcccaagtggcagcccagcagcatccccgtgcccagccccgacttccccccccccccccccgagagcagcctggtgttccccccccccccccccagccccgtgcccgcccccccccccccccccccccccaccgccagccccacccccgacaagagcggcagccccggcaagaagaccagcaagaccagcagccccggcggcaagaagcccccccccaccccccagagaaacagcagcatcaagagcagcagcggcgccgagcaccccgagcccaagagacccagcgtggacagcctggtgagcaagttcaccccccccgccgagagcggcagccccagcaaggagaccctgcccccccccgccgccccccccaagcccggcaagctgaacctgagcggcgtgaacctgcccggcgtgctgcagcagggctgcgtgagcgccaaggcccccgtgctgagcggcagaggcaaggacagcgtggtggagttccccagcccccccagcgacagcgacttccccccccccccccccgagaccgagctgcccctgccccccatcgagatccccgccgtgttcagcggcaacaccagccccaaggtggccgtggtgaacccccagccccagcagtggagcaagatgagcgtgaagaaggcccccccccccaccagacccaagagaaacgacagcaccagactgacccaggccgagatcagcgagcagcccaccatggccaccgtggtgccccaggtgcccaccagccccaagagcagcctgagcgtgcagcccggcttcctggccgacctgaacagaaccctgcagagaaagagcatcaccagacacggcagcctgagcagcagaatgagcagagccgagcccaccgccaccatggacgacatggccctgcccccccccccccccgagctgctgagcgaccagcagaaggccggctacggcggcagccacatcagcggctacgccaccctgagaagaggccccccccccgccccccccaagagagaccagaacaccaagctgagcagagactggtag

SEQ ID NO: 267470 - DNA, 3909 bp, Artificial Sequence
  derived and/or modified sequence
atggaacagctgagtgatgaggaaattgatcatggtgccgaagaagattcagataaagaggaccaggatctggataagatgttcggggcttggctcggtgaactggataagctcacacagtctttagattcagacaagcccatggagcccgtgaagcggtctccactgaggcaggagacaaacatggccaacttctcttatagattttctatctataatctgaacgaagcactcaatcagggtgagacggtggatttagatgccttaatggcggacttgtgctcaattgagcaggaactgagctcaatcggttctggcaactccaagcgacaaatcaccgagacgaaggcaacacagaagctgcccgttagcagacacacactcaaacacggcacactgaagggtctgtcatctagctccaataggatcgccaagccatcccacgcctcctacagcctcgacgacgtgacagcacagctggaacaggcttctctgtccatggacgaggctgctcagcagtctgtcctggaagatactaagccactcgtcacgaaccagcacaggcgtacagcctccgccggcactgttagtgacgccgaggtccacagtattagcaattcaagccactcctccatcacttccgcagcaagctctatggattcccttgatatcgataaggtcacacggccccaggagctcgacctcacacatcagggccagcctatcacagagcatgctatctctctgcgctgcagctccaagcaggccaagagacatatcgatttcaccgaggagcaagcggagcttacaccacattcatacctggatcgcgaaacaagcctgctgctgagaaatatagccggcaaaccatcccacctcctgaccaaggaagaacaagctgctaagttgaaagccgaaaaaatcagggtagcccttgagaagatcaaggaggctcaggttaagaagctggtgattcgcgtacacatgtccgacgactcgtctaaaactatgatggttgacgagcgccagacggtgaggcaagtgttagacaacctgatggacaagtcacactgtggatatagtctggactggagcctggttgaaaccgtctccgaactccagatggagagaatattcgaggaccacgagaatttagtcgagaatctgctgaattggacaagagactcccaaaacaagctaattttcatggagaggatcgaaaagtatgctctgttcaagaacccgcaaaactatttgcttgggaagaaggagactgccgagatggccgatcgaaataaggaggtcctcctggaagaatgcttttgcggcagtagtgttactgtacccgaaattgaaggtgtgctgtggctaaaggacgacgggaaaaaaagctggaagaagcggtactttctgttgcgggcttctggcatctactatgtacctaaaggaaaggcaaaggtatcaagagacctggtgtgctttttgcagctggatcacgtcaatgtgtattatggacaggactaccgcaacaagtacaaagcacctaccgactattgcctggtgctaaaacatccccaaatccaaaagaagtcccagtacattaaatacctttgttgtgacgatgtaaggactcttcaccagtgggtgaatggcattcggatagccaaatacggtaagcagctctatatgaactatcaggaagctctgaaacggacagagtctgcgtacgattggacatccttatccagttcttccattaagagcggctcgtcttcttcaagtataccggaatcacagtctaaccactctaaccagagcgattccggcgtctccgacacccagccagccggccacgtcagaagccagagtatagtgagctcggtcttcagtgaggcatggaagcgcggaacacagctcgaagagtcatctaaggcccgcatggagagtatgaatcgcccctatacatcactggtccctcccctgtctccccagccaaaaatagtgactccctacacggcatctcagcccagcccacctctgcccccaccacccccacccccccctcctccaccaccacctcccccccctccccccccacccctgcccagccagtcagccccatctgctggcagtgccgcgcctatgttcgtcaaatactctaccattacacggctccagaacgcatcgcagcactctggtgccttgttcaagcccccaacaccccccgttatgcagagccagagcgtaaagccccaaatactggtgcctcctaatggggtggtacccccacccccgccaccccctccacctccgacaccaggcagtgccatggcccagctgaaaccagctccatgtgcgccctccctaccccagtttagcgcccctcccccaccccttaagattcatcaggtccagcacattacccaggttgctccccccacccctccacccccacctcccatcccagccccactcccaccgcaggccccccccaaaccgcttgtgacaattcctgcgccaaccagcactaagacagtcgctccagttgtcacccaggccgctccacccacccctacaccccctgtgcctccagccaaaaagcagccagcattcccagcctcttacatccctccttcccctccaactcctcctgtgcctgtgcccccccccactctcccgaagcaacagtctttctgcgcgaaaccccccccatcaccgctgtcccccgtgccgagtgttgttaagcagatcgcatcacagttccctccccccccaactccccccgctatggagtcgcagcccctgaagcccgtgcccgctaacgtggcccctcagagcccccccgccgtgaaagcaaagccaaagtggcaaccctcctcgatcccagtacctagtcccgacttccctcccccaccccctgagtcttcactagtgttcccacctccaccaccgtcccccgttcccgccccccccccaccaccgccccccacagcctcccccacgcccgacaaatctggaagcccaggtaagaagacatcgaagaccagcagccccggcggaaagaaaccccccccgacgccccagcgcaactcctcaattaaatctagctccggtgccgagcatccggagccaaaaagaccatccgtggattcactagtttctaagtttacacctcctgctgaatcggggtctcccagtaaggagacgctacccccgcctgctgcccctcccaaaccaggcaagctcaacttgtctggcgtgaatctccccggtgttctgcaacaggggtgtgtgtccgctaaggcccctgttctgtctggccggggaaaggacagcgttgtagagtttccgagcccaccctcagattccgatttccctccacccccacctgagaccgagttgccactcccgcccatagagatccccgctgtgttctctgggaacacctctcccaaggtggctgttgtcaacccacagccccagcagtggtccaaaatgtctgtcaaaaaagctcctcccccaacgagaccgaaaagaaacgatagtacaaggttgactcaagcagaaatctcggagcaaccgaccatggcgactgtcgttccccaggtgcccacaagtccaaagtctagcctaagtgtgcagccaggcttcctggcagatctgaatcgcaccctccaacggaaatccataacccggcatggctccctatcttctcgcatgagtcgggctgagcccaccgcaactatggatgatatggcgctcccacctcctccccctgagctcctgtccgaccagcagaaggccggatatggcggatcgcacattagcggttacgcaactttgagacgcgggcctccgcctgccccacccaaacgcgatcagaatacaaaactcagtcgtgactggtag

SEQ ID NO: 267471 - DNA, 3909 bp, Artificial Sequence
  derived and/or modified sequence
atggagcagctgagtgatgaggagattgaccatggagcagaagaagattctgacaaggaggaccaggacctggacaagatgtttggagcctggctgggggagctggacaagctgacccagagcctggacagcgacaagcccatggagcctgtgaagaggagccccctgcggcaggagaccaacatggccaacttctcctaccgcttcagcatctacaacctgaatgaggccctgaaccagggcgagaccgtggacctggatgccctgatggctgacctgtgcagcattgagcaggagctgagcagcatcggcagcggcaacagcaagaggcagatcacagagaccaaggccacccagaagctgcctgtgagccgccacaccctgaagcacggcaccctgaagggcctgagcagcagcagcaacagaattgccaagcccagccacgccagctacagcctggatgatgtgacagcccagctggagcaggccagcctgtccatggatgaggccgcccagcagagcgtgctggaggacaccaagcccctggtgaccaaccagcacagaagaacagccagcgctggcaccgtgtctgatgctgaggtgcacagcatcagcaacagcagccacagcagcatcaccagcgctgccagctccatggacagcctggacatcgacaaggtgacccggccccaggagctggacctgacccaccagggccagcccatcacagaacatgccatcagcctgcgctgcagcagcaagcaggccaagaggcacatcgacttcacagaggagcaggccgagctgaccccccacagctacctggaccgggagaccagcctgctgctgaggaacattgctgggaagcccagccacctgctgaccaaggaggagcaggccgccaagctgaaggccgagaagatccgggtggccctggagaagatcaaggaggcccaggtgaagaagctggtgatccgggtgcacatgtctgatgacagcagcaagaccatgatggtggatgagcggcagacagtgcggcaggtgctggacaacctgatggacaagagccactgcggctacagcctggactggagcctggtggagaccgtgtctgagctgcagatggagcgcatctttgaggaccacgagaacctggtggagaacctgctgaactggacccgggacagccagaacaagctgatcttcatggagcgcatcgagaagtatgccctcttcaagaacccccagaactacctgctgggcaagaaggagacagctgagatggctgacaggaacaaggaggtgctgctggaggagtgcttctgtggcagctctgtgacagtgcctgagattgaaggagtgctgtggctgaaggatgatggcaagaagtcctggaagaagcgctacttcctgctgcgggccagcggcatctactacgtgcccaagggcaaggccaaggtgtcccgggacctggtgtgcttcctgcagctggaccacgtgaatgtgtactacggccaggactacagaaacaagtacaaggcccccacagactactgcctggtgctgaagcacccccagatccagaagaagagccagtacatcaagtacctgtgctgtgatgatgtgaggaccctgcaccagtgggtgaatggcatccgcatcgccaagtatggcaagcagctgtacatgaactaccaggaggccctgaagaggacagagagcgcctatgactggaccagcctgagcagcagcagcatcaagagcggcagcagcagcagcagcatccctgagagccagagcaaccacagcaaccagagcgacagcggcgtgtctgacacccagcctgctggccacgtgcgcagccagagcatcgtgtcctctgtgttcagcgaggcctggaagaggggcacccagctggaggagagcagcaaggccaggatggagagcatgaaccggccctacaccagcctggtgccccccctgagcccccagcccaagatcgtgaccccctacacagccagccagcccagcccccccctgcccccacctcctcctcctcctcctcctcctcctcctcctcctcctcctcctcctccacccctgcccagccagagcgcccccagcgctggcagcgctgcccccatgtttgtgaagtacagcaccatcacccggctgcagaatgccagccagcacagcggggccctcttcaagccacccaccccacctgtgatgcagagccagagcgtgaagccccagatcctggtgccccccaacggggtggtgcccccacctcctcctcctcctcctccacccaccccaggcagcgccatggcccagctgaagccagccccctgtgcccccagcctgccccagttcagcgcccctcctccacccctgaagatccaccaggtgcagcacatcacccaggtggccccacccaccccacctcctcctccacccatcccagcccccctgcccccccaggccccacccaagcccctggtgaccatcccagcccccaccagcaccaagacagtggcccctgtggtgacccaggccgccccacccacccccaccccacctgtgcccccagccaagaagcagcctgccttccctgccagctacatcccccccagcccccccaccccacctgtgcctgtgcccccacccaccctgcccaagcagcagagcttctgtgccaagcccccacccagccccctgagccctgtgcccagcgtggtgaagcagatcgccagccagttccccccaccacccaccccaccagccatggagagccagcccctgaagcctgtgcctgccaacgtggccccccagagccccccagctgtgaaggccaagcccaagtggcagcccagcagcatccctgtgcccagcccagacttccccccacctcctcctgagagcagcctggtgttccccccacctccacccagccctgtgcctgcccctcctcctcctcctccacccacagccagccccaccccagacaagagcggcagccctgggaagaagaccagcaagaccagcagccctgggggcaagaagcccccacccaccccccagaggaacagcagcatcaagagcagcagtggagctgagcaccctgagcccaagaggcccagcgtggacagcctggtgtccaagttcaccccacctgctgagagcggcagccccagcaaggagaccctgcccccacctgctgccccacccaagccaggcaagctgaacctgtctggagtgaacctgcccggggtgctgcagcagggctgtgtgtctgccaaggcccctgtgctgagcggccggggcaaggacagcgtggtggagttccccagccccccaagtgacagcgacttccccccacctcctcctgagacagagctgcccctgccccccatcgagatcccagctgtgttcagcggcaacaccagccccaaggtggccgtggtgaacccccagccccagcagtggagcaagatgtctgtgaagaaggcccccccacccacccggcccaagagaaatgacagcacccggctgacccaggccgagatcagcgagcagcccaccatggccaccgtggtgccccaggtgcccaccagccccaagagcagcctgtctgtgcagcccggcttcctggccgacctgaacagaaccctgcagaggaagagcatcaccaggcatggcagcctgagcagcaggatgagcagagctgagcccacagccaccatggatgacatggccctgcccccacctcctcctgagctgctgagtgaccagcagaaggccggctacggcggcagccacatcagcggctacgccaccctgcggcggggccccccaccagccccacccaagagggaccagaacaccaagctgagccgggactggtag

SEQ ID NO: 267472 - DNA, 3909 bp, Artificial Sequence
  derived and/or modified sequence
atggagcagctgagcgacgaggagatcgaccacggcgccgaggaggacagtgataaagaagatcaggacctggataagatgttcggagcctggttgggagaactggacaagctcacacaaagtctggattccgataaaccaatggagccagttaaacggtcccccttacgtcaggagaccaatatggccaattttagctatcgcttttcaatatacaacttgaacgaagccctaaatcagggggagaccgtcgacctcgacgcactcatggctgacttatgcagcattgagcaggagctgtccagcatcggttccggcaactcgaaacgacagattaccgaaaccaaagcaactcagaagttgcctgttagcaggcacactttgaagcatggcaccctgaaaggcctgtcttcctcaagcaaccgcatcgccaagcctagtcatgccagttactccctggatgacgtcacagcccaactggagcaggccagcctgtcgatggacgaggctgctcagcaatccgtgctcgaggataccaagcctctcgtgacgaaccagcacaggcggacggcctccgccggcacagtcagcgatgcggaggtgcacagtatcagtaactcttcacattcttccattacatcagcagctagctcgatggatagccttgacattgataaggtcacccggccccaggagctggatctaactcatcaggggcaacccattactgaacatgctataagcctgcggtgtagctctaagcaggccaagaggcatatcgacttcactgaggaacaggctgagctgacaccacactcctaccttgaccgcgaaacatccctgctccttagaaacatagccggtaagccaagccacctgctcaccaaagaagagcaggcagccaagctgaaggctgagaaaattcgagttgcattggagaagattaaagaagcacaagtgaaaaagctggtcatccgtgtgcacatgagcgatgattcttctaaaaccatgatggtggacgaacgtcagactgtcaggcaggttttggataatctgatggacaagtctcactgcggctactcactggattggagcctggtagaaaccgttagcgagctccagatggagcggatcttcgaggaccatgaaaatctagtcgagaacttattaaactggacaagggactcccagaataagctcatcttcatggaacgaatagagaaatatgcgctgttcaagaatccgcagaattatttacttgggaagaaggagactgccgagatggccgatcgcaataaggaggtcttactggaggagtgtttctgtggaagtagtgtgaccgttccagagatcgagggagtgctttggctcaaggacgacggcaaaaaatcctggaagaagcggtactttctgctccgggctagcgggatttattacgtgcccaaaggcaaggcaaaagtgtctcgcgacctcgtatgcttcctacagctggaccacgttaatgtttactacgggcaggactatcggaataagtacaaagcaccaacggactattgtcttgttctgaagcatccccagattcagaagaagagccagtacattaaatacctctgctgtgacgacgtccggacactgcatcaatgggtcaatggaattaggatcgccaagtacggaaaacagctctatatgaactaccaagaagcccttaagcggactgaaagtgcgtacgactggacgagcctctcctcctcttctatcaaatctgggtcctcaagctcatcaattcccgagtcccaatctaatcacagcaaccagagtgatagcggggtttctgacacgcaaccagcgggacatgttcggtcgcagagcatcgtgtcatcagttttttctgaggcatggaagcgaggtacccaactagaggaatcctctaaagcaaggatggagtccatgaataggccgtacacgagcttggtgccgccgctatcccctcagcccaagatagttacaccctacactgcctcacagccaagccctcctctgcctccccctcctccgccccctccccccccacctccgcctccccctccccccccacctcccctgccttctcagtcagcacccagcgctggatccgccgcccccatgttcgtcaaatactccacgatcactcggctccagaacgcttctcagcacagtggagccctgtttaagccaccaaccccacctgtgatgcagagtcaatcggtgaaaccccagattctggtcccccccaacggagtggtgcctccccctcctcccccgcctcccccacctacccccggcagtgctatggcacagttaaaaccagccccgtgcgctccttcactgccccagttttctgcaccgccaccaccgttaaagatccatcaggtgcaacacatcacacaagtggcaccaccaacaccccctccgcctcctcctataccggcccccttgccaccacaggcacctcccaaaccgctcgtcacgatacccgcacccacgtccacgaaaacagtcgcacctgtggtaactcaggcagcacctccaacccccacaccacccgtgcctccggcgaaaaagcagccagccttccctgcctcgtacatcccacccagcccccccacgccaccggtgcctgtaccccctcccacccttcctaagcagcagtccttctgtgcaaagcctcctccatcccccctttccccggtgccgagtgtagttaagcaaatagccagtcaatttccacctcctccaacaccccccgctatggaatctcagccattgaagcccgttcccgcgaatgtcgccccccagtcaccacccgctgtgaaagcgaagccgaagtggcagcccagctccatcccggtcccgtctccagatttccctccaccaccaccagaaagcagtctggtgttccccccccccccgcccagtcccgttcccgcgccaccaccgcctcccccccctacagcctcgccgacccctgataaaagtggttctcctggtaaaaagaccagtaagactagttcgcccggcggaaaaaagccacctcccactcctcagcgaaacagtagcatcaaaagctcaagcggcgcggaacatcccgaaccaaaaagaccttccgtggacagtcttgtttctaaatttacacccccagctgagagcggcagcccctcaaaagaaaccctgcccccccctgccgcaccgcccaagccagggaaactaaatctgtctggcgttaatctgcctggagtgctgcaacagggctgcgtgtcagccaaagcccccgtgttgtcgggcagaggcaaggactcagtcgtcgaatttccttcaccccctagcgattccgactttccaccacccccccccgagactgagctgccactgccgccaatagaaattcctgcagtgttcagcggtaacacaagcccaaaggttgccgttgtgaaccctcagccccagcaatggtcgaagatgagcgtgaagaaggctccgccaccaacccgaccgaagagaaacgactcaactagattaacccaggctgagatctcggagcaacctactatggccaccgtggtaccgcaggttcccacctcaccaaagtcttcactctccgtgcagccaggcttcctggcagacctcaacagaacacttcagcgaaagtcaataaccaggcacggtagcttgtcaagtcggatgtcccgtgctgaaccgaccgccacaatggatgacatggcactgcctcctccccctccggagctgctttcggaccagcagaaggcaggctatggtggtagccacatcagcgggtacgcaactctccgaaggggtccacctcccgcgcccccgaaacgggaccaaaacactaagctcagcagagattggtag

SEQ ID NO: 267473 - DNA, 3909 bp, Artificial Sequence
  derived and/or modified sequence
atggaacagttgtcggacgaggaaatcgatcacggggcagaagaggacagcgataaagaagaccaagatcttgacaagatgttcggagcctggcttggggagctggacaaacttacacaatcactcgactcagataagccgatggaacccgtgaaacgctcccctctgaggcaggagactaatatggcaaatttcagctataggttctccatctataacttgaacgaggccttaaaccagggggagaccgttgacctggatgctctgatggctgacctctgcagcattgagcaagaactgtcatctatcggctcagggaatagtaagcgacagataacggagactaaggcaacccagaaacttccagtgagtagacataccctcaaacacggcacactaaagggactatcctccagcagcaaccggattgccaaacctagtcacgcttcctatagtcttgacgatgtgacggcccagctggagcaagccagtctgtccatggatgaagctgcacagcagagcgtgcttgaggacactaaaccccttgtgacgaatcagcacagacgcaccgcgtcggccggaactgtctccgacgcagaagtgcattcaattagcaattcatcccactcttccatcacaagcgcggctagctctatggattccttggacatcgataaggtgaccagaccccaggaacttgaccttacccaccaaggccagccaatcaccgagcatgccatctcccttcgctgttctagtaaacaggctaagcggcatatcgattttaccgaggagcaggcagagttgactccccactcttatttggatcgggagacctcactcctcttgcggaatattgccggaaagccatctcacctcttaaccaaggaagagcaggccgctaagttgaaggcagagaaaatccgagttgctctcgagaagattaaagaagcacaggtgaagaagcttgtaatcagggtacatatgtccgacgatagctccaagactatgatggtagatgagaggcaaaccgtccgacaggttcttgacaatctcatggataaatcccactgcggatactccctcgattggagcctggtagagaccgtgagcgaactccaaatggagcggatcttcgaagatcatgaaaatttagtggaaaatctgttaaattggacacgcgactcacagaacaaactgatattcatggagagaatcgagaagtatgccctctttaaaaacccgcagaactacttattagggaagaaggaaactgccgagatggccgataggaataaagaggtgttgctcgaggaatgtttttgtgggtctagcgttacagtgccagagatcgagggcgttctctggctaaaggacgatgggaagaagagttggaagaagcggtactttctcttgagggcaagcggaatctactacgtacctaagggcaaggccaaagtatctcgcgatttggtgtgtttcttgcaacttgatcacgtcaatgtgtactatggtcaggactatcgcaacaaatataaggcaccaactgattattgtctcgtgctaaaacacccccaaatacagaagaagagccagtatatcaagtacctgtgttgtgacgacgtacgcacgctccaccagtgggtaaacggtataagaatcgcaaagtatggcaaacaactgtatatgaactaccaggaggcccttaaaaggaccgagagtgcatatgactggaccagtctgtcttcctcctcaatcaaatctggaagctcatccagttccataccggaaagccagagcaatcacagtaaccagtccgactccggagtcagcgatacacagcccgcaggacacgtccgatcccaatcgattgtgtctagcgtgttctcagaggcctggaaacgcggtactcagctagaggagtcgtccaaagcgcgaatggagtcaatgaaccgcccttatacctcgctggttccccctctgtctccgcagccaaagatcgtgacaccctacactgctagccagcctagccctccactgcctcctcctcccccaccccctccgccacccccacctccaccaccaccaccaccaccccctctgccctcccagtcagcccctagcgcgggatccgccgcacccatgttcgtcaagtattccaccatcacccgccttcagaacgcatcccaacatagtggggctctgtttaaaccccctacacccccagtcatgcagagtcagagcgtcaagccacaaattttggtacctcctaatggggtcgttcccccacctccaccacctccccctccacccacgccaggcagcgcaatggcccagctcaagcccgctccctgtgccccatctctgccacaattcagtgctccccctcctcccttaaaaatacaccaggtgcagcacatcacgcaggtcgcaccacccaccccgcctcctcccccacctataccggctcctctgccccctcaggcccctcccaagcccctggtgactatacctgcacctacaagcacaaagactgtggctcctgtggttacgcaagcagccccacccaccccaaccccacccgtcccgcctgcgaaaaagcagcccgctttccccgcttcgtatatcccgccatcacctcctacgccccctgttccggtgccacctccaacgctccctaagcaacaatctttttgtgcaaaaccgcctccaagccccttgtccccagtgcccagtgtcgtgaagcagattgccagtcagttcccacctccaccgactccccctgcaatggaatcccagccactgaaaccggtgcccgctaacgtcgccccacagtctccacctgcagtcaaagccaaacctaagtggcagccttcctccatcccagtcccgtccccagactttccccctcccccaccagaatcttcacttgtgttcccaccacctccacctagcccagtgcccgctccacctcccccaccccctccaacagcttctcccactccagataaaagcgggtccccaggcaaaaaaactagcaagaccagctcacccggtggtaaaaagcctcccccaaccccccagaggaattcttctattaaatcttcgtccggagctgaacaccctgaacccaaaagacctagcgtggacagtctggtaagtaagtttaccccacctgccgagtcgggaagcccttcaaaggaaacactgccaccacccgctgccccacctaaaccaggtaagctgaatctgtctggtgtcaacttgcccggagttctccagcagggttgtgtgagcgctaaggctccagttttatcaggacgcggaaaagattccgtggtcgagttcccctcccccccaagcgatagtgactttcctcctccacctcctgagaccgagctcccattacccccaatcgaaatcccagccgtcttttcgggcaacaccagcccaaaggttgctgtggtcaacccacagccccagcaatggtccaagatgtcagtgaagaaagcgccaccacccactcggcctaaacggaacgactcaacgcgacttacacaagcggagataagcgagcaacctacaatggcaacagttgtaccacaggtaccaacatcccctaaaagcagtttatctgttcaacccggttttctggctgatctcaatcggacactgcaacgtaagagcattaccagacatggctcactgagttccagaatgagccgggcagagccaactgctacaatggacgatatggccctaccccctcctcccccagagttgttgtcagatcagcagaaagcaggatacggtggaagtcacatatccggttacgctacacttcggcgaggacctcccccagctcctcccaagcgggatcagaacacaaagctgtcccgggactggtag

SEQ ID NO: 267474 - DNA, 2765 bp, Artificial Sequence
  derived and/or modified sequence
gcggccgccccgcccccgctcccgccgccgcccgccagtcagtcagtcagtcagtcagtcagtcagtcagtcagtcactgagcgcgcggcgcgggagctgctggcagtcgctgcgtctctggcgagggagcgccgcgcctggggaggaggcggaggcagcggctggaggagcgcgagcggcggtttccttgcccggggccgcgggaaggccgaccgactgccgcgatggagcagctatcagatgaagaaattgatcatggtgctgaagaagacagtgacaaggaagatcaggacctggacaaaatgtttggagcctggcttggagaactagacaaactcactcagagtttggattctgacaagcccatggaaccagtaaaaagatctcctcttcgccaggaaacaaacatggccaacttttcttaccgcttctccatatacaacttgaatgaagctctgaatcagggagagactgtggatctggatgccttgatggctgatctttgctctatagagcaggagctcagcagcattggttcaggaaacagtaagcgtcaaatcacagaaacgaaagctactcagaaattgcctgttagccgacatacattgaaacatggcaccttgaaaggattatcttcttcatctaataggatagctaaaccttcccatgccagctactccttggacgacgtcactgcacagttagaacaggcctctttgagtatggatgaggctgctcagcaatctgtactagaagatactaaacccttagtaactaatcagcacagaagaaccgcgtcagcaggcacagtgagtgatgctgaagtacactctattagtaattcctcccattccagcatcacttccgcagcctccagcatggactctttggatattgataaagtaacacgccctcaagagctggatttgacacatcaagggcagccaattactgagcatgctatttctctgagatgttccagcaagcaggccaagcgtcatattgacttcacagaagaacaggctgagctgacacctcactcctatctggacagggaaacctcccttcttctgagaaacattgcaggaaaaccttctcatttgctgaccaaggaagaacaggcagcaaaattgaaagctgagaagatcagagttgccctagagaaaattaaagaggcacaagtgaaaaagctggtgatcagagtccacatgtctgatgacagttctaaaacaatgatggtggatgagaggcagacagtaagacaagtactggataacctgatggacaaatcccactgcggttatagtttagactggtcactggtagaaaccgtttctgaattacaaatggagagaatctttgaagaccatgaaaacttggttgaaaatcttcttaattggacaagagatagccaaaacaagcttatatttatggagcgtatagaaaaatatgcacttttcaaaaacccacagaattatcttttggggaaaaaagaaacagctgagatggcagatagaaacaaagaagtcctcttggaggaatgtttttgtggaagttctgtaactgtaccagaaattgaaggagtcctttggttgaaggatgatggcaagaagtcctggaaaaagcgttattttctcttgcgagcatctggtatctactatgttcccaaaggaaaagcaaaggtctctcgggatctggtgtgctttctccagctggatcatgtcaacgtttattatggccaggactatcggaacaaatacaaagcacctacagactattgtctggtgctgaagcatccacaaatccagaagaaatctcaatatatcaaatacctttgttgtgatgatgtgaggacactgcatcagtgggtcaatgggatccgcattgcaaagtatgggaagcagctctatatgaactaccaagaagccttgaagaggacagagtcagcctatgattggacttccttatccagctccagcattaaatcgggatccagttcttccagcatcccagagtctcagtcaaaccactccaatcagtctgatagcggagtttctgacacccagccagcaggacacgtccgttcccagagcattgtgagctccgtattctctgaagcctggaaacgaggcactcagttggaagagtccagcaagtaaaacaaatgtaaagaatgtcccccctttacctgcattgctggacttctgtgcatgttggatgcaattgtctcacaccaacacgagtgtgtgtgtcaagcttattcattcctgtgtgactgtgcacgcctgctcaacattctcatactctcctgtgtcagcttactagcatcaaaaagccatcctcattccaccaggaagccctcctaaacccagttatagcatctgcttgatgtggatgcagtcatggactgaaaggtaaactggagccatcacatctccccttggaagtccagtgctcagaggaccgccacagagggttccatgtagggcaggctgtgtcaaagtcatacagccaaggtcagaagtcatgcatcctgtcaccattcaaacagcttttgcagccggacatttttcctagattgttagatggtctagctattttactgtggggtaaaacaagttttctgtttccttcttgcccgcacaatcagattttagccttcctgacattgtccatctttatgatcaccaccaacttctgcatccttttcatgcatgtcccagactccctgctttttagttttacacaatcaaagcttacctct

SEQ ID NO: 267475 - DNA, 3909 bp, Artificial Sequence
  derived and/or modified sequence
atggagcagctatcagatgaagaaattgatcatggtgctgaagaagacagtgacaaggaagatcaggacctggacaaaatgtttggagcctggcttggagaactagacaaactcactcagagtttggattctgacaagcccatggaaccagtaaaaagatctcctcttcgccaggaaacaaacatggccaacttttcttaccgcttctccatatacaacttgaatgaagctctgaatcagggagagactgtggatctggatgccttgatggctgatctttgctctatagagcaggagctcagcagcattggttcaggaaacagtaagcgtcaaatcacagaaacgaaagctactcagaaattgcctgttagccgacatacattgaaacatggcaccttgaaaggattatcttcttcatctaataggatagctaaaccttcccatgccagctactccttggacgacgtcactgcacagttagaacaggcctctttgagtatggatgaggctgctcagcaatctgtactagaagatactaaacccttagtaactaatcagcacagaagaaccgcgtcagcaggcacagtgagtgatgctgaagtacactctattagtaattcctcccattccagcatcacttccgcagcctccagcatggactctttggatattgataaagtaacacgccctcaagagctggatttgacacatcaagggcagccaattactgagcatgctatttctctgagatgttccagcaagcaggccaagcgtcatattgacttcacagaagaacaggctgagctgacacctcactcctatctggacagggaaacctcccttcttctgagaaacattgcaggaaaaccttctcatttgctgaccaaggaagaacaggcagcaaaattgaaagctgagaagatcagagttgccctagagaaaattaaagaggcacaagtgaaaaagctggtgatcagagtccacatgtctgatgacagttctaaaacaatgatggtggatgagaggcagacagtaagacaagtactggataacctgatggacaaatcccactgcggttatagtttagactggtcactggtagaaaccgtttctgaattacaaatggagagaatctttgaagaccatgaaaacttggttgaaaatcttcttaattggacaagagatagccaaaacaagcttatatttatggagcgtatagaaaaatatgcacttttcaaaaacccacagaattatcttttggggaaaaaagaaacagctgagatggcagatagaaacaaagaagtcctcttggaggaatgtttttgtggaagttctgtaactgtaccagaaattgaaggagtcctttggttgaaggatgatggcaagaagtcctggaaaaagcgttattttctcttgcgagcatctggtatctactatgttcccaaaggaaaagcaaaggtctctcgggatctggtgtgctttctccagctggatcatgtcaacgtttattatggccaggactatcggaacaaatacaaagcacctacagactattgtctggtgctgaagcatccacaaatccagaagaaatctcaatatatcaaatacctttgttgtgatgatgtgaggacactgcatcagtgggtcaatgggatccgcattgcaaagtatgggaagcagctctatatgaactaccaagaagccttgaagaggacagagtcagcctatgattggacttccttatccagctccagcattaaatcgggatccagttcttccagcatcccagagtctcagtcaaaccactccaatcagtctgatagcggagtttctgacacccagccagcaggacacgtccgttcccagagcattgtgagctccgtattctctgaagcctggaaacgaggcactcagttggaagagtccagcaaggccagaatggagtctatgaatcggccctacacttcacttgtgccccctttatccccgcaacctaagatagtcaccccctacactgcttcacagccttcaccacctctacctcctccgccacccccacctcctcctccaccaccccctccaccaccccctcctcccccactccccagccagtctgcaccttctgcaggctcagcagccccaatgttcgtcaagtacagcacaataacacggctacagaatgcgtctcagcattcaggggccctgtttaagccgccaacacccccagtgatgcagtcacagtcagtgaagcctcagatcctggtaccccccaatggagttgttccaccaccccctccccctcctccacccccaaccccaggctctgccatggcccagctaaagcctgcaccgtgtgccccatcccttccacagttcagtgccccgcctcctccactgaagatccatcaagttcagcatattactcaggtggctcccccaacaccccccccacctcctcctatccctgcacccctccctccccaagctcccccaaaaccccttgtgaccatccccgcaccaaccagcaccaagactgtggcacctgttgtgactcaagctgcaccacccacacctactcctccagtgcccccagcaaaaaagcagccagctttccctgcttcttacattccaccctctccccctacccctcctgttccagtacccccgccaacattacccaagcaacagagcttctgtgcaaaaccccctccctctccactgtcaccggtgccctcggtcgtgaagcagatagccagccagtttccaccccctccaactccccctgccatggaatctcagcccttaaagcctgtcccagcaaatgtagctccacagtcccctcctgcagtaaaagcaaagcccaagtggcagcccagctccatcccagtcccttctccggacttccctcctccccctcctgaaagcagcctggtgtttcctcctccacccccatcacctgtcccagccccaccaccaccacctccacccacagcttctcctacccctgacaaaagtggatctccaggcaaaaagaccagtaagacgtccagccctgggggaaagaaaccacccccaaccccacagcgcaactccagcattaaatccagcagtggtgcagagcaccccgagcccaagagaccctcggtggacagtctagtcagcaagtttacaccgccagcagaatcagggtctcccagcaaggagaccctaccacctcctgcagcaccccccaagcctggaaaactcaatctttctggagtcaaccttcctggagttctccaacaagggtgtgtgtcagcaaaagcccctgttctgagtgggcgtggaaaggactccgtggtggaatttccttctcctccatccgattctgattttccaccccctccacctgaaacagagcttcctctgccccccattgagattccagcagttttctcgggaaacacctctccaaaagtggcagtcgttaatcctcaaccacaacaatggtctaaaatgtcagtgaagaaggcccctccacccacacgacccaaacggaatgatagcacccgcctcactcaagctgagatttctgagcagccaacaatggccacagttgtgccacaagtgcccacctctcccaaatccagccttagtgtccagcctggattcctggctgacctcaacaggacactgcaacgaaagtccatcactcggcacggctcactctcctcccgcatgtccagagcagaaccaacagccaccatggatgatatggcattgcctccaccaccccctgaactgctgtctgatcaacagaaggctggttacggaggcagtcatatatcaggctatgcaacgttgcggagaggaccccctcctgctccccccaaaagagaccagaacaccaagctctccagagactggtag

SEQ ID NO: 267476 - protein, 1259 aa, Artificial Sequence
  derived and/or modified sequence
MANGVIPPPGGASPLPQVRVPLEEPPLSPDVEEEDDDLGKTLAVSRFGDLISKPPAWDPEKPSRSYSERDFEFHRHTSHHTHHPLSARLPPPHKLRRLPPTSARHTRRKRKKEKTSAPPSEGTPPIQEEGGAGVDEEEEEEEEEEGESEAEPVEPPHSGTPQKAKFSIGSDEDDSPGLPGRAAVTKPLPSVGPHTDKSPQHSSRPCSELRDGDGTTDLALSSPRLLCCLPSSPSPRARASRLAGEKSRPWSPSASYDLRERLCPGSALGNPGGPEQQVPTDEAEAQMLGSADLDDMKSHRLEDNPGVRRHLVKKPSRTQGGRGSPSGLAPILRRKKKKKKLDRRPHEVFVELNELMLDRSQEPHWRETARWIKFEEDVEEETERWGKPHVASLSFRSLLELRRTIAHGAALLDLEQTTLPGIAHLVVETMIVSDQIRPEDRASVLRTLLLKHSHPNDDKDSGFFPRNPSSSSMNSVLGNHHPTPSHGPDGAVPTMADDLGEPAPLWPHDPDAKEKPLHMPGGDGHRGKSLKLLEKIPEDAEATVVLVGCVPFLEQPAAAFVRLNEAVLLESVLEVPVPVRFLFVMLGPSHTSTDYHELGRSIATLMSDKLFHEAAYQADDRQDLLSAISEFLDGSIVIPPSEVEGRDLLRSVAAFQRELLRKRREREQTKVEMTTRGGYTAPGKELSLELGGSEATPEDDPLLRTGSVFGGLVRDVRRRYPHYPSDLRDALHSQCVAAVLFIYFAALSPAITFGGLLGEKTEGLMGVSELIVSTAVLGVLFSLLGAQPLLVVGFSGPLLVFEEAFFKFCRAQDLEYLTGRVWVGLWLVVFVLALVAAEGSFLVRYISPFTQEIFAFLISLIFIYETFYKLYKVFTEHPLLPFYPPEGALEGSLDAGLEPNGSALPPTEGPPSPRNQPNTALLSLILMLGTFFIAFFLRKFRNSRFLGGKARRIIGDFGIPISILVMVLVDYSITDTYTQKLTVPTGLSVTSPDKRSWFIPPLGSARPFPPWMMVAAAVPALLVLILIFMETQITALIVSQKARRLLKGSGFHLDLLLIGSLGGLCGLFGLPWLTAATVRSVTHVNALTVMRTAIAPGDKPQIQEVREQRVTGVLIASLVGLSIVMGAVLRRIPLAVLFGIFLYMGVTSLSGIQLSQRLLLILMPAKHHPEQPYVTKVKTWRMHLFTCIQLGCIALLWVVKSTAASLAFPFLLLLTVPLRHCLLPRLFQDRELQALDSEDAEPNFDEDGQDEYNELHMPV

SEQ ID NO: 267477 - DNA, 3780 bp, Artificial Sequence
  derived and/or modified sequence
atggccaacggcgtgatccccccccccggcggcgccagccccctgccccaggtgagagtgcccctggaggagccccccctgagccccgacgtggaggaggaggacgacgacctgggcaagaccctggccgtgagcagattcggcgacctgatcagcaagccccccgcctgggaccccgagaagcccagcagaagctacagcgagagagacttcgagttccacagacacaccagccaccacacccaccaccccctgagcgccagactgccccccccccacaagctgagaagactgccccccaccagcgccagacacaccagaagaaagagaaagaaggagaagaccagcgccccccccagcgagggcaccccccccatccaggaggagggcggcgccggcgtggacgaggaggaggaggaggaggaggaggaggagggcgagagcgaggccgagcccgtggagcccccccacagcggcaccccccagaaggccaagttcagcatcggcagcgacgaggacgacagccccggcctgcccggcagagccgccgtgaccaagcccctgcccagcgtgggcccccacaccgacaagagcccccagcacagcagcagaccctgcagcgagctgagagacggcgacggcaccaccgacctggccctgagcagccccagactgctgtgctgcctgcccagcagccccagccccagagccagagccagcagactggccggcgagaagagcagaccctggagccccagcgccagctacgacctgagagagagactgtgccccggcagcgccctgggcaaccccggcggccccgagcagcaggtgcccaccgacgaggccgaggcccagatgctgggcagcgccgacctggacgacatgaagagccacagactggaggacaaccccggcgtgagaagacacctggtgaagaagcccagcagaacccagggcggcagaggcagccccagcggcctggcccccatcctgagaagaaagaagaagaagaagaagctggacagaagaccccacgaggtgttcgtggagctgaacgagctgatgctggacagaagccaggagccccactggagagagaccgccagatggatcaagttcgaggaggacgtggaggaggagaccgagagatggggcaagccccacgtggccagcctgagcttcagaagcctgctggagctgagaagaaccatcgcccacggcgccgccctgctggacctggagcagaccaccctgcccggcatcgcccacctggtggtggagaccatgatcgtgagcgaccagatcagacccgaggacagagccagcgtgctgagaaccctgctgctgaagcacagccaccccaacgacgacaaggacagcggcttcttccccagaaaccccagcagcagcagcatgaacagcgtgctgggcaaccaccaccccacccccagccacggccccgacggcgccgtgcccaccatggccgacgacctgggcgagcccgcccccctgtggccccacgaccccgacgccaaggagaagcccctgcacatgcccggcggcgacggccacagaggcaagagcctgaagctgctggagaagatccccgaggacgccgaggccaccgtggtgctggtgggctgcgtgcccttcctggagcagcccgccgccgccttcgtgagactgaacgaggccgtgctgctggagagcgtgctggaggtgcccgtgcccgtgagattcctgttcgtgatgctgggccccagccacaccagcaccgactaccacgagctgggcagaagcatcgccaccctgatgagcgacaagctgttccacgaggccgcctaccaggccgacgacagacaggacctgctgagcgccatcagcgagttcctggacggcagcatcgtgatcccccccagcgaggtggagggcagagacctgctgagaagcgtggccgccttccagagagagctgctgagaaagagaagagagagagagcagaccaaggtggagatgaccaccagaggcggctacaccgcccccggcaaggagctgagcctggagctgggcggcagcgaggccacccccgaggacgaccccctgctgagaaccggcagcgtgttcggcggcctggtgagagacgtgagaagaagatacccccactaccccagcgacctgagagacgccctgcacagccagtgcgtggccgccgtgctgttcatctacttcgccgccctgagccccgccatcaccttcggcggcctgctgggcgagaagaccgagggcctgatgggcgtgagcgagctgatcgtgagcaccgccgtgctgggcgtgctgttcagcctgctgggcgcccagcccctgctggtggtgggcttcagcggccccctgctggtgttcgaggaggccttcttcaagttctgcagagcccaggacctggagtacctgaccggcagagtgtgggtgggcctgtggctggtggtgttcgtgctggccctggtggccgccgagggcagcttcctggtgagatacatcagccccttcacccaggagatcttcgccttcctgatcagcctgatcttcatctacgagaccttctacaagctgtacaaggtgttcaccgagcaccccctgctgcccttctacccccccgagggcgccctggagggcagcctggacgccggcctggagcccaacggcagcgccctgccccccaccgagggcccccccagccccagaaaccagcccaacaccgccctgctgagcctgatcctgatgctgggcaccttcttcatcgccttcttcctgagaaagttcagaaacagcagattcctgggcggcaaggccagaagaatcatcggcgacttcggcatccccatcagcatcctggtgatggtgctggtggactacagcatcaccgacacctacacccagaagctgaccgtgcccaccggcctgagcgtgaccagccccgacaagagaagctggttcatcccccccctgggcagcgccagacccttccccccctggatgatggtggccgccgccgtgcccgccctgctggtgctgatcctgatcttcatggagacccagatcaccgccctgatcgtgagccagaaggccagaagactgctgaagggcagcggcttccacctggacctgctgctgatcggcagcctgggcggcctgtgcggcctgttcggcctgccctggctgaccgccgccaccgtgagaagcgtgacccacgtgaacgccctgaccgtgatgagaaccgccatcgcccccggcgacaagccccagatccaggaggtgagagagcagagagtgaccggcgtgctgatcgccagcctggtgggcctgagcatcgtgatgggcgccgtgctgagaagaatccccctggccgtgctgttcggcatcttcctgtacatgggcgtgaccagcctgagcggcatccagctgagccagagactgctgctgatcctgatgcccgccaagcaccaccccgagcagccctacgtgaccaaggtgaagacctggagaatgcacctgttcacctgcatccagctgggctgcatcgccctgctgtgggtggtgaagagcaccgccgccagcctggccttccccttcctgctgctgctgaccgtgcccctgagacactgcctgctgcccagactgttccaggacagagagctgcaggccctggacagcgaggacgccgagcccaacttcgacgaggacggccaggacgagtacaacgagctgcacatgcccgtgtag

SEQ ID NO: 267478 - DNA, 3780 bp, Artificial Sequence
  derived and/or modified sequence
atggccaacggtgtgatccctccacctggcggtgcatccccgttaccccaggtccgagttcccctcgaggagccgcccctcagcccagatgtcgaggaggaagacgatgacctggggaagaccctggccgtcagccgcttcggcgatctaatcagtaagcctccagcatgggatccagagaagccctcaagatcttactccgagcgagacttcgaatttcatcggcacaccagccatcatacgcaccaccctctgagcgctcgccttccccctccacacaagcttcgtcgcctcccaccgactagcgctagacacaccaggaggaagcggaaaaaagaaaaaacgtccgccccaccttctgaggggactcctccgatccaggaagaaggaggcgccggcgtggatgaggaggaagaggaagaggaggaggaggagggggagtctgaagccgagcctgtggaacctccacattcaggcaccccccagaaggcaaagttttcaatcgggtctgatgaggatgacagtcccggattgcctggacgggccgctgttaccaagccgctccctagtgtcgggccccacacggacaaatccccccagcactcgtctaggccctgcagcgaactccgggatggcgacggcaccactgacctggcactgtccagtcccaggctcctgtgctgcctcccatcgagcccgtcgccccgcgctagggcctccaggctggcaggagaaaagagtagaccatggtcccccagcgctagctatgatctgagagagcgcttgtgccccggctcggcgctggggaaccccggcggacctgaacagcaggtgccgaccgatgaagctgaagcacaaatgctgggctcagccgatcttgatgatatgaagagccatcggctggaagacaatcctggtgtgagacggcacctcgttaaaaaacctagccgcacgcaggggggcagagggtccccaagcgggctagccccaatcctcagaagaaaaaaaaagaagaaaaagctggaccgcaggccgcatgaagtctttgtcgagcttaatgagttaatgctcgaccgatcgcaggaaccacactggcgggagaccgccagatggatcaaatttgaggaggatgtcgaggaggaaacagaaagatgggggaaacctcacgtggcttcactctctttccggtctctgctggaacttcgccggacaatcgcccacggggcagcccttctagaccttgagcagaccacgttacccgggatcgcacacctggtggtagaaacaatgatcgtctccgatcagattcgaccagaggaccgtgccagcgttctcaggaccctgctgctgaagcactcgcaccccaacgatgacaaagatagcggcttctttccgagaaacccgagctcctctagtatgaactctgtgttggggaaccaccaccccactcctagccacgggcccgacggtgctgtccccaccatggctgacgatttaggggagcccgcacccctgtggccacacgacccagatgcaaaagagaagcccctgcatatgcccgggggagatgggcatcggggtaagtccctcaaacttttagagaaaatcccagaagatgctgaagctaccgtcgtgctcgtgggatgcgtgcctttcctcgaacagcccgcagctgctttcgtgcggcttaacgaggcagtcctactggaatccgttcttgaggtcccagtaccagttcgcttcctgtttgttatgttgggcccctcccatacgagcaccgactaccacgagcttggccgcagcatcgccacgctcatgtctgacaaactgttccacgaagccgcgtaccaggccgacgacaggcaggaccttctgagcgcaatctctgaattcctggacggctctattgtgattcctcccagcgaagtagagggaagggacctgctgaggagtgtggccgctttccagagggaactgttacgaaaaaggagggaacgtgaacagactaaagtcgagatgaccacaagagggggctacaccgcacccggaaaggaactgtccctggagctggggggctccgaggctactccagaggatgatcctctgcttaggacaggctctgtatttggagggctggtccgagacgtgcgcagaagataccctcactacccctccgacctccgggatgcactgcactcacagtgtgtcgcggccgttctttttatttactttgccgcgctttcaccagccataactttcggcggactcctcggcgagaagaccgaagggttgatgggtgtctccgagttaatcgtctcaacagcggttctgggagttctgtttagcctgctaggtgcccagccactgctggtggtgggctttagcggccctctccttgtctttgaagaagcattctttaagttttgcagggcgcaagacttggaatacttaacaggacgggtttgggtgggcctctggttggtggtgtttgttttggcgcttgttgcagccgaaggaagctttctcgtccgatacatatccccgtttacacaggaaatttttgcattccttatctctctgatattcatatatgaaactttctacaaactctacaaggtcttcaccgagcaccccctgttgcctttctatcctccggaaggtgctctggaggggtcactcgacgcaggcctggaacctaacggctccgccctcccccctactgaaggcccaccctcgcccagaaaccagccaaacacggctctgcttagcttgatcctcatgctcggtaccttcttcatcgctttttttttgcgaaagtttaggaattctcgtttcctaggcggcaaggccagacggatcataggggatttcggcatccccattagcattctcgtaatggtgcttgtggattattctattacggatacgtatacccaaaagcttacagtgccaacaggactgagcgtgacctcccctgataaaagaagttggtttattccccccctcgggtcagctaggccattcccaccctggatgatggtggcggccgcggttccggccctgctcgtgttaatactcatctttatggagacccagatcaccgctcttatcgtatcgcaaaaggccagaagactactgaagggctccggttttcacctggatctcctgttaatcgggagcctcgggggcctgtgtggcctcttcggcttgccctggcttaccgccgccacagtgcgatctgtgacacacgtcaacgctttaactgttatgaggaccgcaattgccccgggcgataagccccaaatccaagaagtccgcgaacagagagtcactggcgtgctgatcgcgagcctcgtcgggctgtctattgtaatgggagcagtgctgcggcgcattcccctggctgttctcttcggcatcttcttgtacatgggggtgacatctctgtctggcattcaattgtcccaacggctgcttttaatcctgatgcccgctaagcaccacccggagcaaccctacgtcaccaaagtaaaaacatggaggatgcacctgtttacgtgtatacaactggggtgtatagccctactctgggtggtaaagagcactgcagcctccctcgcattcccgttcctactcttgctaacagtccctttaaggcactgtctcctgccccggctcttccaagacagggaacttcaggcactggattctgaggacgcagagccaaacttcgatgaggacgggcaagatgagtataacgagttgcatatgcctgtttag

SEQ ID NO: 267479 - DNA, 3780 bp, Artificial Sequence
  derived and/or modified sequence
atggcgaacggagttatccccccccccggcggtgccagtcctctgcctcaggttcgggtcccgctcgaggaacctcccctgtcgccagacgtggaggaggaagacgatgatctcggcaaaacactcgcagtttccaggttcggggatctgattagcaaaccgccagcttgggatcctgagaagccctcaaggagctatagtgagcgcgattttgaattccatcgacatacatcccaccacacacaccatccccttagtgccagactccctcccccccataagttgcgccggctcccacccacttcagcacgtcacactagacgtaaaaggaaaaaggagaagaccagcgcccctccatctgagggaacccctcccatccaggaggaaggtggcgcgggcgtggatgaggaggaagaggaagaggaggaagaagagggtgaatctgaggcagaacctgtggagccacctcatagcggcactccacagaaggctaaattcagcatcggctctgacgaggacgatagcccgggactgccagggcgagccgccgtcaccaaacctttgccaagcgtgggacctcacaccgacaaaagtcctcagcactccagccgcccatgcagtgagctgcgggacggcgacggcaccactgacctcgctctgagcagccctaggctgttgtgctgtctgccaagcagtccctcaccacgggcgagggcttcccgactcgctggtgaaaagagtaggccctggtccccctctgcatcctatgatctgcgggagaggctctgccccggcagcgccctaggtaaccccggaggtccagagcaacaggtccccaccgatgaagccgaagctcagatgctgggatccgccgatctggatgatatgaagtcccatcgcctggaggataacccaggggtgcggcgacacctggtaaagaaaccttcacggacgcaaggaggccgcgggagcccgagcgggctggctccgatcctgcggcggaagaagaaaaaaaagaaacttgacaggcgacctcacgaggtgtttgtcgagttgaacgagttgatgctggatcgctctcaggaaccccattggagagagactgcgagatggattaaattcgaggaagatgtcgaggaagaaactgaacgctggggtaagccacacgttgccagcctgagcttccgatctctactggagctgagacggactatcgctcacggggcggcactattagatctagaacaaaccacgctcccaggcatcgcgcatctggtagttgagactatgattgtgtctgatcagatcaggcctgaggacagggcatctgtgctgcgaacattgttactgaaacattcccacccgaatgacgacaaggattctggcttcttcccacgcaacccttctagcagttccatgaactccgtactgggaaaccaccacccgaccccttcccacggccccgacggcgccgtcccaaccatggcggatgacctgggtgagcccgctccactgtggcctcatgatcccgacgctaaggaaaagcccctgcatatgccggggggagatgggcaccgaggaaaaagcctcaagctacttgaaaagatccccgaagatgccgaagcaacagtcgtcctagtggggtgtgtcccgttcctggaacagcctgcagccgctttcgtgaggctgaacgaggccgtccttcttgaatcagtgctagaagtgcccgtccctgttagatttttgtttgtgatgctcggtccttcccacacatcaacagactaccatgagctcggccgctccattgctacattaatgtccgataaattattccacgaggctgcctatcaggcagacgaccggcaggacttactgtccgctatcagcgaattcctggatggctccatcgtgattcctccatccgaagtcgagggcagagatctgctgcggtctgtggcagccttccaacgggagctgctaaggaagcgccgcgagcgcgaacagacaaaagtcgagatgaccaccagaggaggctataccgccccaggcaaggaactttctcttgaactgggtgggtctgaggcaacccccgaggatgatccactgctgagaacaggttcagtttttggaggtctcgtgcgagatgtacggcggagatacccacactatccgtctgatttgagagatgctttacacagccagtgtgtcgctgccgtgctatttatttacttcgccgcattgtctcccgccatcacctttggagggctgttaggcgagaagaccgaggggctaatgggggtttcagagctcatcgtcagcacagcggtcctcggagtactatttagtttattaggtgcacagccccttctggtggtgggattctcagggcccttactggtcttcgaagaggcattctttaaattctgccgagcgcaggatctggagtacctcaccgggcgcgtctgggtgggtttatggctcgttgtctttgtgctggccctcgtcgctgcggaaggcagcttcttggtgaggtatatctctccattcactcaagaaatattcgcttttctgattagcctaatttttatatatgaaacattctacaagttgtataaggttttcaccgagcacccactgctgccattctacccccctgagggcgctttagagggcagtctggacgccggattggagcccaacgggagcgccttgccacccacagagggcccaccaagtccccgtaaccagcctaacacggctctactatccttgatactcatgcttggcacgttttttatcgcctttttcctgcgaaaattccgcaacagtagattcttagggggcaaagcccgccgcattatcggggactttggaataccaatctctatcctggttatggtgctggttgattattccattactgacacgtacacacagaaacttacagtgcctacaggcctaagcgtgacgagcccggataagcggtcatggtttatccccccactgggatccgccagacccttccccccatggatgatggttgcagctgccgtcccagcgttactggtgctgatcttaatcttcatggaaacacagatcaccgccttgatagtctcacaaaaggcaaggcggcttttaaaaggttctgggtttcatttggacctgctactcattgggtcccttggcggtctctgcggcctcttcggtctcccatggctgaccgcagccaccgtgagaagcgtgacccacgtgaacgctctaacagtgatgagaaccgccattgcccccggggacaaaccacaaattcaggaggttagagagcaaagggttactggagtcctcatagcgagccttgttggactgtcaatcgtaatgggagccgtcctccgccggattcctctcgcagtattgtttggcattttcctgtatatgggcgtgacctcccttagcggaatccaactctcgcagaggctgctcctcatccttatgcccgctaaacaccacccagaacaaccctacgtaacaaaggtgaagacttggcgcatgcacctgtttacttgcatccaattgggatgtattgccctgctttgggtggttaaatccactgcagcgtccctggcctttccattcctcttgttgctgactgtgccactgcgacattgccttctgcccaggttgtttcaggaccgggaactccaagctttggattctgaggatgcagagccgaatttcgacgaggatggtcaggacgagtacaatgaactgcacatgcctgtgtag

SEQ ID NO: 267480 - DNA, 3780 bp, Artificial Sequence
  derived and/or modified sequence
atggccaatggagtcatccccccacctggaggagccagccccctgccccaggtgcgggtgcccctggaggagccccccctgagcccagatgtggaggaggaggatgatgacctgggcaagaccctggccgtgtccagatttggagacctgatcagcaagcccccagcctgggaccctgagaagcccagccgcagctacagcgagcgggactttgagttccaccgccacaccagccaccacacccaccaccccctgagcgcccggctgcccccaccccacaagctgcggcggctgccccccaccagcgcccggcacaccaggaggaagaggaagaaggagaagaccagcgccccacccagcgagggcaccccacccatccaggaggagggcggggccggcgtggatgaggaggaggaggaggaggaggaggaggagggggagagcgaggccgagcctgtggagcccccccacagcggcaccccccagaaggccaagttcagcatcggcagtgatgaagatgacagccctggcctgcccggccgggctgctgtgaccaagcccctgcccagcgtgggcccccacacagacaagagcccccagcacagcagccggccctgcagcgagctgagagatggagatggcaccacagacctggccctgagcagcccccggctgctgtgctgcctgcccagcagccccagcccccgggcccgggccagccggctggccggggagaagagccggccctggagccccagcgccagctatgacctgcgggagcggctgtgccccggcagcgccctgggcaaccctgggggccctgagcagcaggtgcccacagatgaagctgaggcccagatgctgggcagcgctgacctggatgacatgaagagccaccggctggaggacaaccctggggtgcggcggcacctggtgaagaagcccagcaggacccagggcggccggggcagccccagcggcctggcccccatcctgcggaggaagaagaagaagaagaagctggacagaagacctcatgaggtgtttgtggagctgaatgagctgatgctggacaggagccaggagccccactggagggagacagcccgctggatcaagtttgaggaggatgtggaggaggagacagagcgctggggcaagccccacgtggccagcctgtccttccgcagcctgctggagctgcggaggaccatcgcccatggagctgccctgctggacctggagcagaccaccctgcccggcatcgcccacctggtggtggagaccatgattgtgtctgaccagatccggccagaagatcgggcctctgtgctgcggaccctgctgctgaagcacagccaccccaatgatgacaaggacagcggcttcttccccaggaaccccagcagcagctccatgaacagcgtgctgggcaaccaccaccccacccccagccacggcccagatggagctgtgcccaccatggctgatgacctgggggagcccgcccccctgtggccccatgaccctgatgccaaggagaagcccctgcacatgcctggaggagatggccaccggggcaagagcctgaagctgctggagaagatcccagaagatgctgaggccaccgtggtgctggtgggctgtgtgcccttcctggagcagcctgctgctgcctttgtgcggctgaatgaggccgtgctgctggagagcgtgctggaggtgcctgtgcctgtgcgcttcctgtttgtgatgctgggccccagccacaccagcacagactaccacgagctgggccgcagcatcgccaccctgatgtctgacaagctgttccacgaggccgcctaccaggctgatgaccggcaggacctgctgagcgccatcagcgagttcctggatggcagcatcgtcatccccccatctgaggtggagggccgggacctgctgcggtctgtggccgccttccagcgggagctgctgaggaagagaagagagcgggagcagaccaaggtggagatgaccacccggggcggctacacagcccctgggaaggagctgagcctggagctgggcggcagcgaggccaccccagaagatgaccccctgctgaggactggatctgtgtttggaggcctggtgagagatgtgagaagacgctacccccactaccccagcgacctgagagatgccctgcacagccagtgtgtggccgctgtgctcttcatctactttgctgccctgagccctgccatcacctttggaggcctgctgggggagaagacagagggcctgatgggcgtgtctgagctgattgtgtccacagctgtgctgggcgtgctcttcagcctgctgggcgcccagcccctgctggtggtgggcttcagcggccccctgctggtgtttgaggaggccttcttcaagttctgccgggcccaggacctggagtacctgaccggccgggtgtgggtgggcctgtggctggtggtgtttgtgctggccctggtggccgctgagggcagcttcctggtgcgctacatcagccccttcacccaggagatctttgccttcctgatcagcctcatcttcatctatgagaccttctacaagctgtacaaggtgttcacagagcaccccctgctgcccttctacccacctgagggcgccctggagggcagcctggatgctggcctggagcccaacggcagcgccctgcccccaacagagggcccccccagccccaggaaccagcccaacacagccctgctgagcctcatcctgatgctgggcaccttcttcatcgccttcttcctgaggaagttcaggaacagccgcttcctgggcggcaaggcccggcgcatcatcggggactttggcatccccatcagcatcctggtgatggtgctggtggactacagcatcacagacacctacacccagaagctgactgtgcccaccggcctgtctgtgaccagcccagacaagaggtcctggttcatcccccccctgggcagcgcccggcccttccccccctggatgatggtggccgctgctgtgcctgccctgctggtgctgatcctgatcttcatggagacccagatcacagccctgattgtgtcccagaaggcccggcggctgctgaagggcagcggcttccacctggacctgctgctgattggcagcctgggcggcctgtgtggcctgtttggcctgccctggctgacagctgccaccgtgcgctctgtgacccacgtgaatgccctgactgtgatgaggacagccatcgcccctggggacaagccccagatccaggaggtgcgggagcagagggtgactggagtgctgattgccagcctggtgggcctgagcatcgtgatgggcgctgtgctgcggcgcatccccctggccgtgctgtttggcatcttcctgtacatgggcgtgaccagcctgagcggcatccagctgagccagaggctgctgctgatcctgatgcctgccaagcaccaccctgagcagccctacgtgaccaaggtgaagacctggaggatgcacctgttcacctgcatccagctgggctgcatcgccctgctgtgggtggtgaagagcacagctgccagcctggccttccccttcctgctgctgctgactgtgcccctgcggcactgcctgctgcccaggctcttccaggaccgggagctgcaggccctggacagtgaagatgctgagcccaactttgatgaagatggccaggatgagtacaatgagctgcacatgcctgtgtag

SEQ ID NO: 267481 - DNA, 3780 bp, Artificial Sequence
  derived and/or modified sequence
atggccaacggcgtgatccccccccccggcggcgccagccccctgccccaggtaagagtgcccttggaagaaccccccttgagcccagatgtggaggaggaggacgatgacttgggtaagaccctggcggtaagcagatttggggacctgatctcaaaacctccagcctgggacccagaaaaaccatccagatcctattctgagcgagacttcgaatttcaccgccatactagccaccacacccaccaccccctgtccgcaaggctgcctcctccacacaaacttaggagattgccccccacgagcgcccgccatacaaggagaaagagaaaaaaagagaaaacctccgctccaccatctgagggcacccctcctattcaggaggaaggaggcgccggcgtggatgaagaagaggaagaagaggaggaggaggaaggtgagtccgaggctgaacccgtggaaccacctcatagcggtaccccgcaaaaagctaagtttagcattggttcagacgaagacgactcgcccggtctgccagggcgcgccgctgtcaccaaaccgcttccatctgttggtccccacactgacaagtcccctcagcacagttccagaccgtgcagtgagcttcgcgatggagacgggacaactgacttggccctttcttccccccgtttactgtgctgtctgccatcatccccctctcctcgagcaagggcaagccgactagccggggagaaaagtcgtccatggtcaccctcagcctcctatgatctaagggagagactttgcccagggagcgcactggggaaccccggaggacctgaacagcaggttccgacagacgaggctgaggcacaaatgctcggcagcgcggatttggacgacatgaaatcccacaggctggaggataacccaggcgtccgaaggcatcttgtgaagaaaccatctaggacgcagggaggcaggggcagcccctcaggccttgctccaatattgagaagaaagaagaagaaaaaaaagcttgaccgcagaccacacgaagtcttcgtcgagctgaacgagctcatgttggacaggagccaggaaccacattggcgggagaccgcaaggtggattaaatttgaagaggacgtggaggaagagaccgagagatggggtaagcctcatgtagctagcctgagttttcggtctctcttagagctgcgccgaaccattgcccacggggctgccctcctcgatctcgaacagaccaccttaccaggcattgcccatctagtggttgagacaatgatcgtaagtgaccaaatccgccctgaggatcgggccagcgttctgcgcactctcctcctgaaacattctcaccctaatgacgataaagatagcggatttttccctaggaacccttcatcaagctcaatgaatagtgttctggggaatcatcatcccaccccaagccatggcccagacggtgctgtgccgactatggccgacgatttgggcgagcccgcaccactttggcctcacgaccctgacgccaaggagaaaccactgcacatgccaggaggggacggccatcggggcaagagtctaaaactgcttgaaaaaataccggaggacgctgaggccactgtggtcctggtgggctgcgtcccttttctggaacaaccagccgcggccttcgtgcgactgaatgaagcagtgctcctcgaaagtgtgctggaggttcccgtccctgtccggttcctttttgtaatgctcggaccctcccacactagcactgactatcacgagctcggcagaagcattgccaccctcatgagtgataaactctttcacgaggccgcttatcaagcagatgacagacaagatttattgtccgctattagtgaatttctggatggctcaatcgtgattccccccagcgaggtggagggacgcgatctgctgaggtcagttgcggcatttcaacgcgaattgctgaggaaacgccgtgagcgcgaacagacaaaggttgagatgaccacacgcggggggtataccgctcccggaaaggaattgtctctagaacttggtggatcagaagctacaccagaggacgaccccttgctgagaactgggagtgtgtttggcggcctggtccgagacgtgcggaggagatacccacattaccccagcgatttgcgagacgccttgcacagtcagtgcgtcgctgctgtactgttcatttattttgcagcactgtctccagccattacattcggcggcctgttgggagagaagacggagggactgatgggagttagcgagcttatcgttagtacagcggtactgggcgttctattctcacttctgggagcccaaccattattagtagtgggtttctcgggacctctgctggtttttgaggaagcgttctttaagttctgtagggcgcaggacctggaatacctcaccgggcgtgtgtgggtgggcctttggctagtggtgttcgttttggcccttgtggcggctgaagggagcttcctcgtgaggtacattagccccttcacccaggagatattcgcatttctgatttcactcatcttcatatatgagactttctataagctctacaaggttttcacagaacatcccctcttacctttctatccgcccgagggcgctctcgagggatcactcgatgctggacttgagcccaatggatctgcccttccccccacagaaggcccaccttcacctcgcaaccagcccaatacagccttgctctctctgatcctgatgctgggcacctttttcattgcctttttcttaagaaagtttcgtaattcccgcttcctgggcggaaaggccagacgaattatcggcgacttcgggatcccgatatcaatcctggtgatggtgctggtggattactccataactgacacgtacacccagaagctgacagtgcccaccggattgagcgttacttcccccgataaaaggagttggtttatcccaccactggggagtgcgcgccctttcccgccatggatgatggtggctgccgctgtccctgcacttctcgtgctgatattgatctttatggagacacagatcaccgcacttatcgtctcacagaaggctaggcgattgctcaaggggtcagggttccacttggatcttctgctcattggctcactgggaggcttgtgcggcttgtttggtctgccatggcttaccgctgccacagtgcggagtgtcacccatgttaatgccttgaccgtcatgagaacagctattgcacccggagataagcctcagatccaagaggttcgcgagcagcgagtaacaggtgtgctcatagcttcactggtggggctgagcatagtcatgggtgcggtactgcgtcgtataccactagctgtcttgtttgggatctttctgtatatgggtgtgactagcctgagtggaatccagctgagtcagcgactgttgttgattcttatgccagctaaacaccacccagagcagccttacgtgactaaggtcaaaacatggcgcatgcatctgtttacttgcattcagttaggatgcatcgctttgctgtgggtagtcaaatccactgctgcatccctcgccttccccttcctgctgcttctaacagtaccattgcggcattgcctgctgccccgcctgtttcaggatagagagctacaggctttggattcagaggatgcagagcctaatttcgacgaggacggacaagatgagtacaatgaattacacatgccagtgtag

SEQ ID NO: 267482 - DNA, 3780 bp, Artificial Sequence
  derived and/or modified sequence
atggccaacggcgtgatccccccccccggcggcgccagccccctgccccaggtccgggtcccattagaagaaccgccactgtctcccgacgtcgaggaggaggatgacgacctgggcaagacactggctgtgtcaaggtttggcgatctgattagcaaacctccagcctgggatcccgagaaaccctcacggagttactccgaaagagattttgaattccataggcacacaagccaccacacgcatcaccctctaagcgcgcgcttacctcctccccacaagctgaggaggctgcctcccacaagcgccagacacaccagacgcaagcgcaagaaagaaaaaacctcagcccccccatccgaaggcacgccccctatccaagaggaaggtggagcaggagtcgacgaagaggaagaagaagaggaggaagaagagggagagtccgaagcagaacccgtggagcctccacattctggcaccccgcaaaaggccaagtttagtatcgggtccgatgaggacgactctcctggtctccctgggagagctgcagtaacaaaacctctgccctcagtggggccacacacagataagagtccgcaacacagtagcagaccctgctccgagttaagggacggcgatggaaccactgatctcgcactgagttcccctcgacttctgtgctgtctgccttctagtccatcaccacgcgctagggcttcgcgcttggcaggggagaagagcaggccgtggtcacctagtgccagttatgacttgagagagcgtctctgtcctggctccgccctcggcaatccaggcgggcccgagcagcaggtcccaaccgacgaagccgaagcgcagatgctgggaagcgcggacctggatgatatgaaatcgcataggctggaagataaccctggcgtgagacgccatttggttaaaaagccctcccggacccagggggggcgcggcagcccttctggtctcgccccaatcctgcgacggaagaaaaagaagaagaagctcgatcgtaggccacatgaggtgtttgtcgagttaaatgaactgatgctggatcggagtcaggagccgcactggcgagagacagctagatggattaagttcgaagaggatgtggaggaggaaactgagcgttgggggaaacctcacgtcgcatcgctttcgttccgctcacttttggagctgcgcaggaccatcgcacatggtgccgccctgttagatcttgaacagaccaccttgcccgggattgcacacctggtggttgaaaccatgatcgtgtctgatcagatcagacccgaagaccgggcatctgtgctcagaactcttctgcttaaacacagccacccaaacgacgacaaggactcaggatttttccctagaaacccttcaagttcatctatgaacagcgttctaggaaatcatcatcctactccatcccacggtcctgacggagccgtgccgacaatggctgatgatcttggagaacctgcccccctctggccacacgatccagatgctaaggagaagcccctgcatatgcccggaggagacgggcaccgcggtaagtccctgaagctgttagaaaaaatccccgaagacgcagaagccacagtggtgctggtagggtgtgtgccattcctcgagcaaccagctgctgcttttgtgaggctgaatgaggcggtacttctggaaagcgtcttagaggttccagtgccagtcagattcctcttcgtaatgttgggtccgagccacacatctactgattaccacgagctcggccgcagtattgccacgttgatgtccgacaagctgttccatgaagccgcctatcaggccgacgacaggcaggatctcttatctgctattagtgagtttctggacggatccatcgtcatccccccaagcgaggtggaggggagagatctgcttagatcagtggctgcctttcagcgcgagctgcttcgaaagcgaagagagcgggaacagaccaaggtggaaatgacgacaaggggcggctatacggctcccggcaaggagttgtcgttggagttgggcgggagtgaggccacacccgaagacgaccctctgctacgcactggatcggtctttgggggtcttgtaagggacgtgcgtaggaggtatccacattatccctctgacctgcgagatgctctgcactcccaatgcgtggctgccgtgctctttatttatttcgctgctctgtctcctgccattacattcggggggctcttgggggagaaaactgagggactgatgggcgtgagtgaactcattgtgagtacagccgtgctgggggtgctcttctctctgttgggagcccagccgctgttggtggtgggcttctctggccctctcctagtgttcgaagaagccttttttaagttttgtagggcacaggatttggaatacctaaccgggagggtctgggtgggtttgtggttagttgtgtttgtcttggccttagttgcggcagagggcagtttcctggtgcgctacataagccccttcacccaggagatatttgctttcctcatatccctcatcttcatctacgaaaccttttataaactctataaggtgttcaccgaacatcctctgttgcctttctaccctcccgagggagcacttgagggtagcctggatgcgggcctggagcctaacggcagcgcgctaccacctaccgagggcccaccttccccccgcaaccagcctaacactgcacttctgtcacttatcctgatgctaggcaccttttttatcgccttcttcctccgtaagttcagaaacagcaggttcttgggaggcaaagctaggcggataataggtgatttcggcatacccataagcatccttgtgatggtcttagtggactatagtattaccgacacttacacccagaagctcacggtgcccactgggctgtccgttacctcacctgataagcgaagctggttcatccctcccctaggaagcgcccgaccgtttcctccttggatgatggtagctgcggctgtgcctgccctgctggtcctgattctgattttcatggagactcaaatcacggcactgatcgtgagtcagaaagcccgcagactcttaaaaggctcagggttccatctcgatctgctcctgatcggttctttaggaggactgtgcggacttttcggactgccatggttaactgccgccactgtccgcagcgtcactcatgttaatgccctcaccgtgatgagaacggcgattgcccctggcgacaagccacagatccaagaagtgagggaacaacgtgtcacaggggtgctcatagctagtctggtaggtctgtctattgtcatgggggcagtgctaaggaggattccactagcggtgctgttcggcatatttttgtatatgggagttactagtctgagcggtattcagctttctcaacggttattactcatcctaatgccggctaagcaccatcccgagcagccatacgtaacaaaggttaagacttggcgaatgcatctgttcacctgcattcaactcgggtgtatcgctcttctctgggtggtaaaaagcacagctgccagcttagcattcccctttttgttgctgctcacagtgcctctccgccactgtttgctgcctagattgtttcaggaccgagagcttcaggccctggacagtgaagatgccgaacctaattttgacgaagatgggcaggatgaatataatgagttgcacatgcccgtgtag

SEQ ID NO: 267483 - DNA, 3780 bp, Artificial Sequence
  derived and/or modified sequence
atggctaacggcgtgatccctcccccaggaggtgccagtccattacctcaagttcgggtgcctctggaagagccacctctctcacctgacgtggaagaagaggatgacgatttaggcaaaaccctcgccgtgagcagatttggagacctgatctcaaagcccccagcttgggaccctgagaaaccttctaggtcttactctgaaagagactttgagttccacaggcatacctcgcatcacacacaccacccgctcagtgcgcgtcttccacctccccataaactgagacgcctgcctcctacttcggccaggcatactcgacgaaagcggaaaaaggagaagacctcagctccgccttcagaaggaacgccccctattcaggaagagggcggagctggagtcgatgaagaagaggaggaagaggaagaggaggagggcgagagcgaagcagagcctgtcgagcctccccactctggaactccacagaaggctaaattcagtataggatcggacgaggacgactctccgggtctccctggaagagccgcagttacaaagccattgccctctgtgggccctcacactgataagtccccgcagcattcgtcgcggccatgcagcgaactacgggacggggacgggacaacggacttggccctttcttccccacgattgctatgctgtctcccaagctccccgagtccaagagcgagggcctcacgactagctggagaaaagtcgcgcccatggagtccatccgcgtcctatgatctccgcgagcggctgtgtccaggcagtgccctgggtaacccaggaggccctgagcagcaagttccaacagacgaggctgaggcccagatgctgggatccgctgatctggatgacatgaagtcacacagactggaggacaaccctggggttaggcggcacctcgtgaagaaaccctcccggacacagggcggacggggtagcccttcaggcttagctccgatcctccgcagaaaaaagaagaaaaagaaactggatcgaaggccccacgaggtcttcgttgaactaaatgagttgatgctcgatcggtcccaggaaccccactggcgagagactgcaagatggataaaattcgaggaagacgtggaggaggagacagagagatgggggaaacctcacgttgcctctctgtctttcagatcactgttggaactgagaaggaccattgcccacggggctgctctgttagatcttgagcagacaacactgccaggaatcgctcaccttgtggttgaaaccatgatcgtcagcgaccaaattcgacctgaagatagagccagcgtcttaaggaccctgcttttaaaacatagccaccccaatgatgacaaagactccggattcttcccaagaaaccccagctccagtagtatgaacagcgtgctcgggaatcaccaccccaccccatcccatggcccagacggtgccgtgcctaccatggcagacgacctgggcgagccagcgccactctggccacatgaccccgacgccaaggagaagccactgcacatgcctgggggagacggccatcggggaaagtcactgaagctcctggagaaaatccctgaagatgccgaggcaacggttgtgcttgtcggctgcgtaccttttcttgagcagcctgccgcagcttttgtgcggctgaacgaagcagtgcttctggagagcgtgctggaagttcccgttcctgtccggttcctgttcgtgatgctggggccttcacataccagcacagattaccatgagttggggagaagcatcgccacactaatgtccgataagctattccacgaggccgcttaccaggcagacgaccggcaggacctcctaagtgctatcagtgaattcctggacggcagcatcgtcattcctccctcagaagttgagggtagagatttgctgcgaagcgtcgcagcttttcagcgggagctgctccgcaaacgccgagaaagggagcagaccaaagtagagatgaccacgaggggcggatataccgcccctggaaaggagctcagcctggaattggggggtagtgaagcaacgcctgaggacgacccacttcttcgtaccgggtccgtcttcgggggactagtgcgagacgtccgcagacggtacccccattacccctccgacctgcgggacgccctgcatagtcaatgcgtcgccgctgtgctgttcatatattttgctgccctctctcccgcaattaccttcggaggtctgctgggcgaaaaaacggaaggcctgatgggtgtgagcgaactcatagtgagtacagccgtcctgggtgtgctgttctcactgctcggggctcagcccctgctcgttgtgggtttctctggcccactactcgttttcgaggaagcattctttaagttttgtagggcacaggacctcgaatatcttaccggccgtgtctgggtgggactctggctggtcgtgttcgtgttggccctcgtggccgctgaggggtcatttttagtgcggtacatcagcccatttacacaggaaatcttcgccttcctgatctcactgatcttcatttacgaaacattctataagctatacaaggttttcaccgagcatccccttctgcctttttatccgccagaaggagcgctcgaaggaagtcttgacgctggcctggaacctaatggtagtgctttgcccccaacagagggtccacctagtcctagaaaccagccgaataccgccctgctcagtcttatcctgatgctgggaacattttttatcgctttcttccttcggaaatttagaaacagtcggttcctcggaggcaaagctagaaggataataggagatttcggtatacctatctccattctggtcatggtcttggtagactactccattaccgacacttatacccagaagctgactgtccccaccggactgtccgtcacctcacctgataagcggagctggtttattccccctcttggctcggctcgtccatttccaccttggatgatggtcgctgctgcggtcccagctttgctagtactgatcctgatctttatggaaacacagatcactgctctcatcgtgagtcagaaggctagaagattactgaagggctctggtttccacctagatcttctgttgattggttcactcgggggtttgtgcgggctatttggactaccatggctaacggcggctacggtgcgtagcgttacccacgtcaatgcccttacagtcatgcgaacagccatagcccctggcgataagccccagatacaggaggtgagagagcaaagggtgactggagtgctaattgctagtctggtcggactgtcaattgtgatgggagccgtgttacgacgaatcccattggctgtgctttttgggatcttcctgtatatgggcgtgaccagcctgtccggaattcagctcagccagcgcctgctcttgatactgatgccagcaaagcatcaccctgaacagccctatgtcaccaaggtgaagacttggcggatgcacctgttcacctgcatacagctcgggtgcatcgctctgctctgggtcgtcaagtctaccgcagcctcactggcgttcccatttctgctattgctgacagtccccttgagacattgcttgctgccacgcctgttccaagacagagaactgcaagcattggacagcgaggacgccgagccaaacttcgacgaagatggtcaagacgagtataacgagctgcatatgccggtatag

SEQ ID NO: 267484 - DNA, 3780 bp, Artificial Sequence
  derived and/or modified sequence
atggcaaacggcgttatccccccaccaggcggagcgagcccactcccccaagtcagggtgcctctggaggaacccccacttagccccgacgtcgaggaggaagatgatgacctggggaagaccctcgcggttagtcggtttggggatttgatcagtaagccaccggcttgggaccctgagaaaccatcgagaagctatagcgaacgagactttgaatttcaccgccacacatcacaccacacacaccacccactctccgcaaggctgcccccacctcacaaactaaggaggcttcccccaacctctgccaggcacacgcggaggaagcgaaagaaagagaagacttccgctccaccttccgagggcacacctcccatccaggaggaaggaggcgcaggcgtcgacgaggaggaagaggaggaggaagaggaggagggagaaagtgaagccgaacctgtcgagccccctcattcaggtacaccccagaaagccaagtttagcataggttccgacgaggacgattcaccgggactcccaggaagggcggctgtcaccaagcccctgccaagcgtggggcctcacacggataagagtcctcagcactcatcccggccatgctctgaattacgcgacggcgacggcaccacagatctggcgttgagcagtcctcgcttactttgctgcttgccatcctccccctcacccagggccagagcgtcacgcttggccggtgaaaagtcgcgaccttggtccccctcagccagctatgatctgagggaacgtctgtgccccggaagtgccctgggcaatccaggcggaccagaacaacaagtgccaaccgacgaggcagaggcccagatgttaggtagcgcagatctggacgatatgaagtcccaccggctggaggataaccctggtgtgcgcaggcatttggtcaaaaaaccctcgagaacacagggaggacgcggttccccaagcggccttgcccctattttgaggcggaagaagaagaagaaaaaacttgataggcgaccccatgaagtgtttgtagaactcaatgagctgatgctggacagatctcaggagccgcactggcgcgaaaccgcaaggtggataaaattcgaagaggacgtagaggaagaaactgagcgctgggggaagccacacgttgcaagtctgtcgttccggagtctcctcgagctgagacggaccatcgcacacggggctgctctcctggatctcgaacagactaccctgcccggaatcgcgcacctcgttgtggaaacaatgatcgtgagcgatcaaataaggccagaagaccgcgcttcggtgctgcggaccttattgcttaaacactcacatcccaacgatgacaaagattccggctttttcccccgaaacccctcttcttcctcaatgaatagtgtgctgggaaaccaccatccaacaccttctcacggccctgatggcgctgtgccaaccatggctgacgatttaggggaaccggcacccctgtggccacacgatcctgacgcaaaagaaaaacctctgcacatgcctggaggagacggacaccgtggtaagagtctgaagctcctcgaaaagatccccgaagatgctgaggcaacagttgtgctggtcgggtgcgtgcccttcctggaacaaccagccgctgcttttgtccgacttaacgaagccgtgctcctagagtctgtgctggaggttcctgttccagtgcgttttctgttcgttatgcttggacctagtcatactagtactgattaccacgagctgggccgatctatagcaaccttaatgtctgacaaattgtttcatgaagctgcctatcaagcagatgaccgtcaggatttgctgtctgcgatctcagaatttctagacggctcgatcgtgattccacccagcgaggtagagggcagggatcttttgaggagcgtagccgctttccagcgcgaattgctgaggaagcggagagaacgtgaacagaccaaagtcgagatgaccacccgcggaggttatactgcaccgggtaaagaactttcgctggagctcgggggaagcgaagccaccccagaggacgacccattactgcggactggctctgttttcgggggactggtccgtgacgtgcgacggagatatccacattaccccagtgacctgcgcgatgctctgcattctcagtgcgtagctgcagtgttatttatttacttcgccgctctttccccggctattacattcggaggcctgctcggtgaaaaaaccgaagggctgatgggtgtgtccgaactgattgtgtctacagccgtgctgggagtattatttagtctgctgggcgcacaaccgttgctagtagtgggcttcagtgggcctctgttggtattcgaagaagcttttttcaagttctgcagagcccaggacctggaatacttgaccgggagggtctgggtgggattgtggttagtcgtattcgtcctggccctagtggccgctgagggctcttttctggtgaggtacatcagcccctttacccaagagatttttgcctttttgatatctctgatttttatttacgaaaccttttacaagctgtacaaggtattcactgagcaccccttactccccttctacccccctgagggagcactggagggctcactggacgcaggcctggagcctaacgggtctgcgttgccgccaaccgaaggaccaccgtctcccagaaaccagcctaatacagccttactctctttgattcttatgctggggaccttctttatagccttcttcttacgaaaattccgcaattctcgcttcctgggtggtaaggccagacgcatcattggcgactttggcattcccatctccattttagtaatggtactcgtcgactattccattaccgatacctatactcagaagctaaccgttcctacgggcctgtctgtcacctcccctgataagcgttcatggtttattcctcctctcgggtccgccaggcccttcccaccgtggatgatggtagccgcagcagtgccagccctcttagttttgatattgatcttcatggagacacagataaccgcactaattgtcagccagaaagccaggcgacttttaaaaggcagcggctttcatctcgacctgctgctgatcggctctcttgggggactgtgcggactgtttggtctgccgtggctcacggctgccactgtgcgaagcgtcactcacgtgaatgcactgacagtaatgcggacagcgattgcaccaggagataaacctcagattcaggaggtgcgagagcagagagtcacgggggttctcatcgctagcctggttgggctgagcattgtaatgggtgccgtactgcgcaggattccgctcgcagtgctatttggaatcttcctgtacatgggcgtgacctctctctccggcatccagctttcacagcgattgcttttgattctgatgcccgcaaaacaccatcccgagcagccttacgtgactaaggtgaagacctggaggatgcatctattcacctgtatccagcttgggtgcatcgctctcttatgggtagtgaagagcactgcagcttccttagcctttccctttctcctgctgctgaccgttcccctgcggcactgcttgttgcctcggctttttcaggaccgcgagctgcaggcactggactctgaggatgccgagccaaatttcgatgaggacgggcaggacgagtataacgagctgcacatgcctgtctag

SEQ ID NO: 267485 - DNA, 4246 bp, Artificial Sequence
  derived and/or modified sequence
gcggagcggagcgcgaggaggtggagccgcgggctgcgggctccggcgcctgcgtccgcccggccagcccggctctgcgctgcgagaggccggacggcagtcgcggctgcgctcgggagagagcgcgggggacatggggcgcggcggcccgcctgggcctcgcaggctccggagccccgagtgagcgagagcgtccccagccgcctacctggccatggccaacggagtgatcccgccgcccgggggcgcctcccccctaccccaggtccgggtgcccttggaggagccccctctaagtccagacgtggaggaggaggacgatgacttgggcaagaccttggctgtgagcaggtttggggacctcatcagcaagcccccggcctgggaccccgagaagcccagccgcagctacagcgagcgggactttgagtttcaccggcacacatcccaccacacccaccacccgctctcagcgcgcctgcctccaccccacaagctgcggcggctgccccccacctctgcccggcacaccaggagaaagaggaagaaggagaaaacctctgctcctccctccgaggggacccctcccatccaggaggaggggggagctggagtggatgaggaagaggaggaagaggaggaagaggaaggagaatctgaggcagaacctgtggagcccccccactcagggaccccacagaaggcaaagttctccattggaagtgacgaggatgacagtccaggcctccctgggagggctgctgtcaccaagcccctgccctcggtgggcccacacactgacaagagcccccagcactccagcaggccgtgctctgagctgagggacggtgatggaaccaccgacctggccctgtcaagtccaaggctgctgtgttgcctccccagctcccccagcccccgggcccgggcctcccgactcgctggggagaaaagccggccctggagcccatcggccagttatgacctgcgggagcgactgtgcccaggcagtgccctgggcaacccaggtggtccagagcagcaggtgcccacagatgaggcggaggcccagatgctgggttctgcagacctggacgacatgaagagtcaccgactggaggacaaccctggtgtgcggcgacacttagtgaaaaagccctcccggacgcagggcgggaggggcagtcccagcggcctggcccccatccttcgcaggaagaagaagaagaaaaagctggaccggaggcctcatgaggtgttcgtggagctgaacgagctgatgctggaccgcagccaggagccccactggcgggagacggcccgctggatcaagtttgaggaggacgtggaggaggagacggagcgctgggggaagccccatgttgcctcgctctccttccgtagccttctggagctcaggaggaccatcgcccatggagctgccctcctggacctggagcaaaccaccctgccaggcattgcacacctcgtggtggagaccatgattgtgtctgaccagatccggccggaggacagggccagcgtcctacgtaccctgctactgaagcacagccatcccaacgatgacaaggacagtggcttctttccccgaaacccatcgagctccagcatgaactcggttctggggaatcatcacccaactcccagccatggccctgatggggcggtgcctaccatggctgatgacctgggggagccagccccactctggccacatgaccctgacgccaaggagaagcccctccacatgcctgggggagatggtcaccgggggaaaagcctgaagctgctggagaagatccctgaagatgctgaggccacggttgtgcttgtgggttgtgtgcctttcttggagcagcctgcagcagccttcgtgcgtctgaatgaggctgtactcctggagtctgtgcttgaggtccctgtcccggtccgcttcctcttcgtgatgctggggcccagccacaccagcactgactatcacgagcttgggcgctccattgccacccttatgtctgacaagctgtttcatgaggctgcctaccaggcagatgaccggcaagacctcctaagtgccatcagcgagttcctggatggcagcattgtgatccccccgtccgaggtggagggccgtgacctgctgcgctccgtggctgctttccagcgagagctgcttaggaagcggcgagagcgtgaacagaccaaagtcgagatgaccacacggggtggctacacggcccctgggaaagaactgtctttggagttggggggctctgaagcaacccctgaagatgaccccttgctgcggacgggctcggtatttggggggcttgtgcgggatgtgaggcgccggtacccgcactaccccagtgacctgcgagatgcgctgcactcccagtgtgtggccgctgtgctcttcatctacttcgcagccctcagccctgccatcaccttcggggggctgctgggagagaagaccgaggggctgatgggcgtgtccgagctgatcgtgtccaccgctgtgctcggcgtcctcttctctctgctgggagctcagccgctgcttgtggttggcttctctgggccgctgcttgtgtttgaggaagccttcttcaagttctgccgagcccaggacctggagtacctcactggccgggtgtgggttggtctctggctggtggtcttcgtccttgccctggtggccgccgaaggcagcttcctggtccgctacatctcgcctttcacccaggagatctttgcctttctcatctcactcattttcatctacgagaccttctacaagctctacaaggtgttcacagagcacccactgctgccgttctacccccctgagggggccctggaggggtccctggatgctggtctggagccaaatggcagtgccctgccccccaccgagggcccccccagcccgaggaaccagcccaatacggcactgctctcactcatcctcatgctcgggaccttcttcatagccttcttcctgcgcaagttcaggaacagccgcttcctggggggcaaggctcgtcgcatcatcggggactttggcatccccatctccatcctggtgatggtcctggtggattactccatcacagacacctacacgcagaagctgacagtgcctacagggctctcagtgacctctcccgataagcgctcgtggttcatcccacccctgggcagtgcccgtcctttcccgccgtggatgatggtggcagccgctgttcccgccctcctcgtcctcatcctgatcttcatggagacacagatcacggcgcttatcgtcagccagaaggcgcggaggctgctcaagggctccggtttccacctggacctgctcctcattggctccctgggggggctctgtgggctgtttgggttgccctggctcacggctgccacggtccgctccgtcacccatgtcaatgcgttgacagtgatgcgtactgccatcgcgcctggtgacaagccccagatccaggaggtgcgggagcagcgggtcactggtgtgctcatcgccagcctcgtgggcctgtccatcgtcatgggggctgtgctgcgtcggatcccattggctgtgctctttgggatcttcctgtacatgggggtcacgtccctgtctggtatccagctgtcccagcgtttgttgctcatcctcatgccggcaaaacaccatcctgagcagccctatgtgaccaaggtgaagacgtggcggatgcatctgttcacctgcatccagctgggctgcatcgcactgctctgggtggtcaagtccacggcggcctcactcgcctttcccttcctgctgctgctcacggtgcctctgaggcattgccttctgccccggctcttccaggacagggagctgcaggcgctggactcggaagatgctgaaccaaacttcgatgaggatggccaggatgagtacaatgagctgcacatgccagtgtgacccttgaagacagtgcccctcagagaccccaagaccttagggattgacacctgggcctcaggcagagcccagccctgggctggggggctcctcaggacccagagatgtgcctggaaccactcctgatgccatggctagagtggcccccctgacttctgcccggggtgttgacctcgcctcacctttcacagaccagaccggcacaggctttgagctcattataaccacactccttgtctcgtgtctgcctca

SEQ ID NO: 267486 - DNA, 4300 bp, Artificial Sequence
  derived and/or modified sequence
gcggagcgcgaggaggtggagccgcgggctgcgggctccggcgcctgcgtccgcccggccagcccggctctgcgctgcgagaggccggacggcagtcgcggctgcgctcgggagagagcgcgggggacatggggcgcggcggcccgcctgggcctcgcaggctccggagccccgagggctccccgctaggccccctcagtggcccctccttctcacctgggtctcgggtcccctagtgagcgagagcgtccccagccgcctacctggccatggccaacggagtgatcccgccgcccgggggcgcctcccccctaccccaggtccgggtgcccttggaggagccccctctaagtccagacgtggaggaggaggacgatgacttgggcaagaccttggctgtgagcaggtttggggacctcatcagcaagcccccggcctgggaccccgagaagcccagccgcagctacagcgagcgggactttgagtttcaccggcacacatcccaccacacccaccacccgctctcagcgcgcctgcctccaccccacaagctgcggcggctgccccccacctctgcccggcacaccaggagaaagaggaagaaggagaaaacctctgctcctccctccgaggggacccctcccatccaggaggaggggggagctggagtggatgaggaagaggaggaagaggaggaagaggaaggagaatctgaggcagaacctgtggagcccccccactcagggaccccacagaaggcaaagttctccattggaagtgacgaggatgacagtccaggcctccctgggagggctgctgtcaccaagcccctgccctcggtgggcccacacactgacaagagcccccagcactccagcaggccgtgctctgagctgagggacggtgatggaaccaccgacctggccctgtcaagtccaaggctgctgtgttgcctccccagctcccccagcccccgggcccgggcctcccgactcgctggggagaaaagccggccctggagcccatcggccagttatgacctgcgggagcgactgtgcccaggcagtgccctgggcaacccaggtggtccagagcagcaggtgcccacagatgaggcggaggcccagatgctgggttctgcagacctggacgacatgaagagtcaccgactggaggacaaccctggtgtgcggcgacacttagtgaaaaagccctcccggacgcagggcgggaggggcagtcccagcggcctggcccccatccttcgcaggaagaagaagaagaaaaagctggaccggaggcctcatgaggtgttcgtggagctgaacgagctgatgctggaccgcagccaggagccccactggcgggagacggcccgctggatcaagtttgaggaggacgtggaggaggagacggagcgctgggggaagccccatgttgcctcgctctccttccgtagccttctggagctcaggaggaccatcgcccatggagctgccctcctggacctggagcaaaccaccctgccaggcattgcacacctcgtggtggagaccatgattgtgtctgaccagatccggccggaggacagggccagcgtcctacgtaccctgctactgaagcacagccatcccaacgatgacaaggacagtggcttctttccccgaaacccatcgagctccagcatgaactcggttctggggaatcatcacccaactcccagccatggccctgatggggcggtgcctaccatggctgatgacctgggggagccagccccactctggccacatgaccctgacgccaaggagaagcccctccacatgcctgggggagatggtcaccgggggaaaagcctgaagctgctggagaagatccctgaagatgctgaggccacggttgtgcttgtgggttgtgtgcctttcttggagcagcctgcagcagccttcgtgcgtctgaatgaggctgtactcctggagtctgtgcttgaggtccctgtcccggtccgcttcctcttcgtgatgctggggcccagccacaccagcactgactatcacgagcttgggcgctccattgccacccttatgtctgacaagctgtttcatgaggctgcctaccaggcagatgaccggcaagacctcctaagtgccatcagcgagttcctggatggcagcattgtgatccccccgtccgaggtggagggccgtgacctgctgcgctccgtggctgctttccagcgagagctgcttaggaagcggcgagagcgtgaacagaccaaagtcgagatgaccacacggggtggctacacggcccctgggaaagaactgtctttggagttggggggctctgaagcaacccctgaagatgaccccttgctgcggacgggctcggtatttggggggcttgtgcgggatgtgaggcgccggtacccgcactaccccagtgacctgcgagatgcgctgcactcccagtgtgtggccgctgtgctcttcatctacttcgcagccctcagccctgccatcaccttcggggggctgctgggagagaagaccgaggggctgatgggcgtgtccgagctgatcgtgtccaccgctgtgctcggcgtcctcttctctctgctgggagctcagccgctgcttgtggttggcttctctgggccgctgcttgtgtttgaggaagccttcttcaagttctgccgagcccaggacctggagtacctcactggccgggtgtgggttggtctctggctggtggtcttcgtccttgccctggtggccgccgaaggcagcttcctggtccgctacatctcgcctttcacccaggagatctttgcctttctcatctcactcattttcatctacgagaccttctacaagctctacaaggtgttcacagagcacccactgctgccgttctacccccctgagggggccctggaggggtccctggatgctggtctggagccaaatggcagtgccctgccccccaccgagggcccccccagcccgaggaaccagcccaatacggcactgctctcactcatcctcatgctcgggaccttcttcatagccttcttcctgcgcaagttcaggaacagccgcttcctggggggcaaggctcgtcgcatcatcggggactttggcatccccatctccatcctggtgatggtcctggtggattactccatcacagacacctacacgcagaagctgacagtgcctacagggctctcagtgacctctcccgataagcgctcgtggttcatcccacccctgggcagtgcccgtcctttcccgccgtggatgatggtggcagccgctgttcccgccctcctcgtcctcatcctgatcttcatggagacacagatcacggcgcttatcgtcagccagaaggcgcggaggctgctcaagggctccggtttccacctggacctgctcctcattggctccctgggggggctctgtgggctgtttgggttgccctggctcacggctgccacggtccgctccgtcacccatgtcaatgcgttgacagtgatgcgtactgccatcgcgcctggtgacaagccccagatccaggaggtgcgggagcagcgggtcactggtgtgctcatcgccagcctcgtgggcctgtccatcgtcatgggggctgtgctgcgtcggatcccattggctgtgctctttgggatcttcctgtacatgggggtcacgtccctgtctggtatccagctgtcccagcgtttgttgctcatcctcatgccggcaaaacaccatcctgagcagccctatgtgaccaaggtgaagacgtggcggatgcatctgttcacctgcatccagctgggctgcatcgcactgctctgggtggtcaagtccacggcggcctcactcgcctttcccttcctgctgctgctcacggtgcctctgaggcattgccttctgccccggctcttccaggacagggagctgcaggcgctggactcggaagatgctgaaccaaacttcgatgaggatggccaggatgagtacaatgagctgcacatgccagtgtgacccttgaagacagtgcccctcagagaccccaagaccttagggattgacacctgggcctcaggcagagcccagccctgggctggggggctcctcaggacccagagatgtgcctggaaccactcctgatgccatggctagagtggcccccctgacttctgcccggggtgttgacctcgcctcacctttcacagaccagaccggcacaggctttgagctcattataaccacactccttgtctcgtgtctgcctc

SEQ ID NO: 267487 - protein, 227 aa, Artificial Sequence
  derived and/or modified sequence
MTSPLEKDPEPNGALSPGPGDTNSWGFGRDPAPSPRDSLAPEDLEMFVLDFEDGDLWESIRGQLGPMAGPPTCHRLEDNPGVRRHLVKKPSRTQGGRGSPSGLAPILRRKKKKKKLDRRPHEVFVELNELMLDRSQEPHWRETARWIKFEEDVEEETERWGKPHVASLSFRSLLELRRTIAHGAALLDLEQTTLPGIAHLVVETMIVSDQIRPEDRASVLRTLLLKH

SEQ ID NO: 267488 - DNA, 684 bp, Artificial Sequence
  derived and/or modified sequence
atgaccagccccctggagaaggaccccgagcccaacggcgccctgagccccggccccggcgacaccaacagctggggcttcggcagagaccccgcccccagccccagagacagcctggcccccgaggacctggagatgttcgtgctggacttcgaggacggcgacctgtgggagagcatcagaggccagctgggccccatggccggcccccccacctgccacagactggaggacaaccccggcgtgagaagacacctggtgaagaagcccagcagaacccagggcggcagaggcagccccagcggcctggcccccatcctgagaagaaagaagaagaagaagaagctggacagaagaccccacgaggtgttcgtggagctgaacgagctgatgctggacagaagccaggagccccactggagagagaccgccagatggatcaagttcgaggaggacgtggaggaggagaccgagagatggggcaagccccacgtggccagcctgagcttcagaagcctgctggagctgagaagaaccatcgcccacggcgccgccctgctggacctggagcagaccaccctgcccggcatcgcccacctggtggtggagaccatgatcgtgagcgaccagatcagacccgaggacagagccagcgtgctgagaaccctgctgctgaagcactag

SEQ ID NO: 267489 - DNA, 684 bp, Artificial Sequence
  derived and/or modified sequence
atgacttctcccttggagaaggatcctgagccaaacggagccctctcccccggccctggcgatacaaactcctgggggtttggcagggaccccgcccctagccccagggactctctcgctcccgaagacctggaaatgttcgtgctggattttgaggatggggatctctgggagtccatacgcggccagctgggccccatggctggccctcctacatgccaccggcttgaggacaaccccggggtccgacggcacctggtaaaaaagccatcaaggactcagggcggccgaggtagcccctctggtctcgctccaattctgagaagaaagaagaaaaaaaaaaaactcgaccgtagaccccatgaagtctttgtcgagctgaatgagctgatgctcgacaggtctcaagagccccattggcgagagaccgcaagatggatcaaattcgaagaagatgttgaagaggagacggaaaggtgggggaaaccacacgtagcgtcactgtcctttagaagcctgctggaactgcgacgcacgatcgctcatggagcagccctcctggatctggaacagacaacgctgcccgggatagcccacctcgtggtggagaccatgatcgtttccgaccagattagaccagaggaccgcgccagtgtgcttcggaccctgctgctgaaacattag

SEQ ID NO: 267490 - DNA, 684 bp, Artificial Sequence
  derived and/or modified sequence
atgaccagccccctggagaaggaccctgagcccaacggggccctgagccctggccctggggacaccaacagctggggcttcggccgggaccctgcccccagcccccgggacagcctggcccctgaggacctggagatgtttgtgctggactttgaagatggagacctgtgggagagcatccggggccagctgggccccatggccggcccccccacctgccaccggctggaggacaaccctggggtgagaagacacctggtgaagaagcccagcaggacccagggcggccggggcagccccagcggcctggcccccatcctgcggaggaagaagaagaagaagaagctggaccggcggccccatgaggtgtttgtggagctgaatgagctgatgctggacaggagccaggagccccactggagggagacagcccgctggatcaagtttgaagaagatgtggaggaggagacagagcgctggggcaagccccacgtggccagcctgtccttccgcagcctgctggagctgcggaggaccatcgcccacggggccgccctgctggacctggagcagaccaccctgcccggcatcgcccacctggtggtggagaccatgattgtgtctgaccagatccggcctgaggaccgggcctctgtgctgcggaccctgctgctgaagcactag

SEQ ID NO: 267491 - DNA, 684 bp, Artificial Sequence
  derived and/or modified sequence
atgaccagccccctggagaaggaccccgagcccaacggcgccctgtcacctgggccaggggataccaactcctgggggttcggccgcgaccctgctccctctccaagggatagccttgcgcctgaagacctggagatgtttgtcctagattttgaggacggggatctgtgggaatcgattcgggggcaactcggccctatggctggcccacctacttgccaccgcctcgaagataaccctggagtcaggcgtcacctcgtgaagaagccctcacggacacagggaggccgaggttccccatccggcttggcacctattctgagaagaaaaaaaaagaaaaaaaaattggatcgccgtcctcatgaggtcttcgttgaacttaatgaactaatgctcgatagatcacaggagccacattggcgcgaaaccgctcggtggattaagtttgaggaggatgtcgaggaggagaccgagcgttggggcaaacctcacgtcgcctctctcagcttccgcagcctgcttgaactgcgtcggacaatcgcacatggcgccgccctgctcgacctggagcagactaccctgccaggcatcgctcacctggtggtggagacgatgatcgtatccgaccaaataagacctgaggatagggcctctgttctgcgcactcttttgctgaagcattag

SEQ ID NO: 267492 - DNA, 684 bp, Artificial Sequence
  derived and/or modified sequence
atgacatccccactggaaaaggatccggagcccaacggtgctttgagcccagggccaggtgacactaactcgtgggggttcggacgcgatccagcacctagcccacgtgacagcctggcgccagaagacctggaaatgtttgtactggacttcgaggacggggacctctgggagtccatccggggtcagctggggcctatggccggaccacctacctgtcaccgcctggaggataatcccggagtgaggcgccacctggttaaaaagccttcccggacacaggggggaaggggaagtcccagcggcctggcaccgattctgcggaggaaaaagaagaagaagaagttggacaggcgccctcatgaggttttcgtggagctgaatgagctgatgcttgacaggtcacaggagccacattggcgggagacggccaggtggatcaagtttgaggaagatgtcgaggaggagacagagaggtggggcaagccccacgttgcttctctctcatttcgctccttgttggagctgcgcagaaccatcgcccatggcgcagctttgctggacctcgagcaaactactcttccaggtatcgcccaccttgttgtggagacaatgatcgtctcagatcagattagacccgaggatagggcttccgtcctgcgtaccttgcttttgaagcactag

SEQ ID NO: 267493 - DNA, 792 bp, Artificial Sequence
  derived and/or modified sequence
ccaccttcagctctggttggacagaagccaccccgtccaggctcccaccttgtaggagagccgaggggtctggtagggagcggaggccgaggtctcggccaccgggagaatgacgagcccactggagaaggaccctgagcccaatggggcactgagccctgggcctggggataccaatagctggggctttgggagggatccagcccccagtcctcgagactcactggccccggaagacttagagatgtttgtgctggactttgaggatggtgacctgtgggagtccatcaggggccagctgggccccatggcagggccaccaacttgtcaccgactggaggacaaccctggtgtgcggcgacacttagtgaaaaagccctcccggacgcagggcgggaggggcagtcccagcggcctggcccccatccttcgcaggaagaagaagaagaaaaagctggaccggaggcctcatgaggtgttcgtggagctgaacgagctgatgctggaccgcagccaggagccccactggcgggagacggcccgctggatcaagtttgaggaggacgtggaggaggagacggagcgctgggggaagccccatgttgcctcgctctccttccgtagccttctggagctcaggaggaccatcgcccatggagctgccctcctggacctggagcaaaccaccctgccaggcattgcacacctcgtggtggagaccatgattgtgtctgaccagatccggccggaggacagggccagcgtcctacgtaccctgctactgaagcacag

SEQ ID NO: 267494 - protein, 73 aa, Artificial Sequence
  derived and/or modified sequence
MEQSNDSLRVNHNDGEESKTSAQVFEHLICMDSRDSSFGQNDSPTVLPITTREANNSLISQNIPGPLTQTQTL

SEQ ID NO: 267495 - protein, 585 aa, Artificial Sequence
  derived and/or modified sequence
MSGILKRKFEEVDGSSPCSSVRESDDEVSSSESADSGDSVNPSTSSHFTPSSILKREKRLRTKNVHFSCVTVYYFTRRQGFTSVPSQGGSTLGMSSRHNSVRQYTLGEFAREQERLHREMLREHLREEKLNSLKLKMTKNGTVESEEASTLTLDDISDDDIDLDNTEVDEYFFLQPLPTKKRRALLRASGVKKIDVEEKHELRAIRLSREDCGCDCRVFCDPDTCTCSLAGIKCQVDRMSFPCGCTKEGCSNTAGRIEFNPIRVRTHFLHTIMKLELEKNREQQIPTLNGCHSEISAHSSSMGPVAHSVEYSIADSFEIETEPQAAVLHLQSAEELDCQGEEEEEEEDGSSFCSGVTDSSTQSLAPSESDEEEEEEEEEEEEEDDDDDKGDGFVEGLGTHAEVVPLPSVLCYSDGTAVHESHAKNASFYANSSTLYYQIDSHIPGTPNQISENYSERDTVKNGTLSLVPYTMTPEQFVDYARQAEEAYGASHYPAANPSVIVCCSSSENDSGVPCNSLYPEHRSNHPQVEFHSYLKGPSQEGFVSALNGDSHISEHPAENSLSLAEKSILHEECIKSPVVETVPV

SEQ ID NO: 267496 - protein, 617 aa, Artificial Sequence
  derived and/or modified sequence
MKCALFLRVKILQRVCRSRYIVHAGTCDSTAAMSGILKRKFEEVDGSSPCSSVRESDDEVSSSESADSGDSVNPSTSSHFTPSSILKREKRLRTKNVHFSCVTVYYFTRRQGFTSVPSQGGSTLGMSSRHNSVRQYTLGEFAREQERLHREMLREHLREEKLNSLKLKMTKNGTVESEEASTLTLDDISDDDIDLDNTEVDEYFFLQPLPTKKRRALLRASGVKKIDVEEKHELRAIRLSREDCGCDCRVFCDPDTCTCSLAGIKCQVDRMSFPCGCTKEGCSNTAGRIEFNPIRVRTHFLHTIMKLELEKNREQQIPTLNGCHSEISAHSSSMGPVAHSVEYSIADSFEIETEPQAAVLHLQSAEELDCQGEEEEEEEDGSSFCSGVTDSSTQSLAPSESDEEEEEEEEEEEEEDDDDDKGDGFVEGLGTHAEVVPLPSVLCYSDGTAVHESHAKNASFYANSSTLYYQIDSHIPGTPNQISENYSERDTVKNGTLSLVPYTMTPEQFVDYARQAEEAYGASHYPAANPSVIVCCSSSENDSGVPCNSLYPEHRSNHPQVEFHSYLKGPSQEGFVSALNGDSHISEHPAENSLSLAEKSILHEECIKSPVVETVPV

SEQ ID NO: 267497 - protein, 138 aa, Artificial Sequence
  derived and/or modified sequence
MSGILKRKFEEVDGSSPCSSVRESDDEVSSSESADSGDSVNPSTSSHFTPSSILKREKRLRTKNVHFSCVTVYYFTRRQGFTSVPSQGGSTLGMSSRHNSVRQYTLGEFAREQERLHREMLREHLREEKLNSLKLKMT

SEQ ID NO: 267498 - protein, 522 aa, Artificial Sequence
  derived and/or modified sequence
TCDSTAAMSGILKRKFEEVDGSSPCSSVRESDDEVSSSESADSGDSVNPSTSSHFTPSSILKREKRLRTKNVHFSCVTVYYFTRRQGFTSVPSQGGSTLGMSSRHNSVRQYTLGEFAREQERLHREMLREHLREEKLNSLKLKMTKNGTVESEEASTLTLDDISDDDIDLDNTEVDEYFFLQPLPTKKRRALLRASGVKKIDVEEKHELRAIRLSREDCGCDCRVFCDPDTCTCSLAGIKCQVDRMSFPCGCTKEGCSNTAGRIEFNPIRVRTHFLHTIMKLELEKNREQQIPTLNGCHSEISAHSSSMGPVAHSVEYSIADSFEIETEPQAAVLHLQSAEELDCQGEEEEEEEDGSSFCSGVTDSSTQSLAPSESDEEEEEEEEEEEEEDDDDDKGDGFVEGLGTHAEVVPLPSVLCYSDGTAVHESHAKNASFYANSSTLYYQNDSGVPCNSLYPEHRSNHPQVEFHSYLKGPSQEGFVSALNGDSHISEHPAENSLSLAEKSILHEECIKSPVVETVPV

SEQ ID NO: 267499 - DNA, 1854 bp, Artificial Sequence
  derived and/or modified sequence
atgaaatgtgcactgttcctccgcgtgaaaatcctccaaagagtctgtcggagcaggtatatcgtccatgcgggtacctgcgacagtaccgcagccatgtccggaattctgaaacggaaatttgaggaggtggatggttcatctccctgttctagtgtgagagagagcgacgacgaagtgtcttcgagtgaaagcgccgattctggagacagtgtcaacccatcaacaagcagccacttcacaccaagttctattcttaaaagggagaagaggctccgtacaaagaatgtgcatttttcctgcgtcaccgtgtattatttcacaagacggcaggggtttacctctgtcccgtcacagggcggaagcacactcgggatgtccagccggcataatagtgtgcgccaatataccctcggcgagttcgctcgagagcaggagcgactccatagggagatgctcagggaacatctgcgcgaagagaagttgaactctctcaagctcaaaatgaccaagaacgggacggtggaatcagaggaagcctccaccctgacactcgacgatatttctgacgatgacatagatctggacaacaccgaggtagatgagtacttcttcctgcagcctctccctacaaaaaagcgaagagccctgctgagagcgtccggtgtaaagaaaatcgatgtggaggagaaacatgagctacgagctattcgactgtctagagaagactgtggttgcgattgccgagtgttctgcgatccagacacgtgtacctgctctctggccgggattaagtgtcaggtagataggatgtccttcccctgcggatgtaccaaggagggatgctctaacacggccggtagaattgagttcaatcctatccgagtaaggactcactttcttcatacaatcatgaaactggagctcgaaaaaaatcgggagcagcaaatacctacactcaatgggtgccattccgagatcagcgctcattcaagtagcatgggccctgtggcacattctgtggagtattctatagctgactctttcgagatcgagaccgagccccaggcagcagtcctgcacttgcagagcgctgaagagctagattgccaaggtgaagaagaggaagaagaggaggacgggagctcattttgtagtggcgtgaccgacagtagtacccagagcctggccccctccgaaagcgacgaagaagaggaggaggaagaggaagaggaggaggaggaggacgacgacgacgataaaggtgacggcttcgttgagggcttaggaacacatgccgaggtggtccctcttccctctgtgctttgttactccgacggcactgccgtgcatgagtcgcatgcgaaaaatgcttcattttacgcaaacagtagcacactgtactatcagatcgatagccacatcccgggtacacccaatcagatcagtgagaattattctgaaagagacacagtgaagaacggtacactctctttggtcccatacacgatgactcccgagcagttcgtagactacgctagacaggccgaagaagcctacggagcctcacactacccagccgcaaatccgtccgtgattgtctgctgctccagttcagaaaacgactcaggtgtgccttgcaattccctgtacccagaacacaggagtaatcatccacaagtggagttccactcctacctgaaaggcccaagtcaggaaggcttcgtctctgccctcaacggggattcccatatttctgagcatcccgctgagaacagtctgagtctggcagagaagtctatccttcatgaggagtgtattaaatcacccgtcgtggaaacagtcccagtttag

SEQ ID NO: 267500 - DNA, 1569 bp, Artificial Sequence
  derived and/or modified sequence
acttgcgattcgactgctgccatgagtggcatcctgaaacgcaaatttgaggaggtcgacggctcttccccctgttcctccgtgcgcgagtctgatgatgaggtctcatcgagtgaatccgctgacagtggcgattccgtgaacccttccacaagctcacacttcacccccagttctatcctgaagagagaaaaacggctgcgaaccaaaaacgttcatttctcctgcgtcacagtctattattttacaaggcggcagggttttacgagcgttccaagccagggagggtcaacgctggggatgtcctcacggcacaatagtgtcagacagtacacgcttggtgaattcgctagggaacaggagaggctccacagggagatgttgcgggaacacctacgggaggagaaactaaacagtttaaaattgaagatgacaaaaaacggcactgtggagtccgaagaagcctccaccttgaccctggatgatatcagtgacgatgacatcgatttagacaacacagaggtcgacgagtattttttcctacagcccctgcctactaagaaacgccgcgctctcctgcgtgcaagcggggtcaaaaaaatcgacgtggaggagaagcacgaactgcgtgcaattaggctgtctcgggaagactgcgggtgtgactgcagagtgttctgcgatcccgatacttgtacttgctccttggccggtattaaatgtcaggtggacaggatgtcattcccatgcggctgtacaaaggaagggtgttccaatacagcgggacggatagagttcaatccaatcagggtgaggacgcactttctccataccatcatgaaactggaactggagaagaatcgagagcagcagataccaacactaaatggatgccactctgaaatctcagctcacagctccagtatgggcccagttgcgcatagcgttgagtactcaatcgctgatagcttcgagattgagacagagccccaggccgcggtgcttcatcttcagtctgccgaggagttagactgccagggtgaggaggaagaggaggaggaggatggatcatccttctgcagtggtgtcactgacagcagcactcagtctctggcgccttccgaatcagatgaggaagaagaagaggaggaagaagaagaagaggaagaagacgatgacgacgacaaaggggacggtttcgtggagggcctgggcacacatgcagaggtcgttccgttgccaagcgttctctgttacagcgatgggaccgcagtgcacgaaagtcacgccaagaacgcctctttctatgccaactcctccactctgtattatcagaacgactcaggggtcccctgtaattccctgtatcctgaacataggtccaatcacccccaggtggagttccactcttatctgaagggaccatctcaagaaggttttgtaagcgccctcaacggtgatagccacataagcgagcatccagcagagaactctttgagtttggcagagaagtccatcctccacgaagagtgtattaagagccctgtagtggagaccgtgccggtttag

SEQ ID NO: 267501 - DNA, 1854 bp, Artificial Sequence
  derived and/or modified sequence
atgaagtgtgccctcttcctgcgggtgaagatcctgcagagggtgtgccgcagccgctacatcgtgcacgccggcacctgtgacagcacagctgccatgagcggcatcctgaagaggaagtttgaggaggtggatggcagcagcccctgcagctctgtgcgggagagtgatgatgaggtgagcagcagcgagagcgctgacagcggggacagcgtgaaccccagcaccagcagccacttcacccccagcagcatcctgaagcgggagaagaggctgcggaccaagaatgtgcacttcagctgtgtgacagtgtactacttcacccggcggcagggcttcacctctgtgcccagccagggcggcagcaccctgggcatgagcagccgccacaacagcgtgcggcagtacaccctgggggagtttgcccgggagcaggagcggctgcaccgggagatgctgcgggagcacctgcgggaggagaagctgaacagcctgaagctgaagatgaccaagaatggcaccgtggagagcgaggaggccagcaccctgaccctggatgacatcagtgatgatgacatcgacctggacaacacagaggtggatgagtacttcttcctgcagcccctgcccaccaagaagaggcgggccctgctgcgggccagcggcgtgaagaagattgatgtggaggagaagcatgagctgcgggccatccggctgagccgggaggactgtggctgtgactgcagggtcttctgtgaccctgacacctgcacctgcagcctggccggcatcaagtgccaggtggacaggatgtccttcccctgtggctgcaccaaggagggctgcagcaacacagctggaagaattgagttcaaccccatccgggtgaggacccacttcctgcacaccatcatgaagctggagctggagaagaaccgggagcagcagatccccaccctgaatggctgccacagcgagatcagcgcccacagcagctccatgggccctgtggcccacagcgtggagtacagcattgctgacagctttgaaattgaaacagagccccaggccgctgtgctgcacctgcagagcgctgaggagctggactgccagggcgaggaggaggaggaggaggaggatggcagcagcttctgcagcggcgtgacagacagcagcacccagagcctggcccccagcgagagtgatgaggaggaggaggaggaggaggaggaggaggaggaggaggatgatgatgatgacaagggagatggctttgtggagggcctgggcacccatgctgaggtggtgcccctgcccagcgtgctgtgctacagtgatggaacagctgtgcatgagagccacgccaagaatgccagcttctacgccaacagcagcaccctgtactaccagattgacagccacatccctggcacccccaaccagatcagcgagaactacagcgagcgggacacagtgaagaatggcaccctgagcctggtgccctacaccatgaccccagagcagtttgtggactatgcccggcaggccgaggaggcctacggggccagccactacccagctgccaaccccagcgtgattgtgtgctgcagcagcagtgaaaatgattctggagtgccctgcaacagcctgtacccagagcacaggagcaaccacccccaggtggagttccacagctacctgaagggccccagccaggagggctttgtgtctgccctgaatggagacagccacatcagcgagcaccctgctgagaacagcctgagcctggccgagaagagcatcctgcacgaggagtgcatcaagagccctgtggtggagaccgtgcctgtgtag

SEQ ID NO: 267502 - DNA, 1569 bp, Artificial Sequence
  derived and/or modified sequence
acctgtgacagcacagctgccatgagcggcatcctgaagaggaagtttgaggaggtggatggcagcagcccctgcagctctgtgcgggagagtgatgatgaggtgagcagcagcgagagcgctgacagcggggacagcgtgaaccccagcaccagcagccacttcacccccagcagcatcctgaagcgggagaagaggctgcggaccaagaatgtgcacttcagctgtgtgacagtgtactacttcacccggcggcagggcttcacctctgtgcccagccagggcggcagcaccctgggcatgagcagccgccacaacagcgtgcggcagtacaccctgggggagtttgcccgggagcaggagcggctgcaccgggagatgctgcgggagcacctgcgggaggagaagctgaacagcctgaagctgaagatgaccaagaatggaacagtggagagcgaggaggccagcaccctgaccctggatgacatcagtgatgatgacatcgacctggacaacacagaggtggatgagtacttcttcctgcagcccctgcccaccaagaagagaagagccctgctgcgggccagcggcgtgaagaagattgatgtggaggagaagcatgagctgcgggccatccggctgagccgggaggactgtggctgtgactgcagggtcttctgtgaccctgacacctgcacctgcagcctggccggcatcaagtgccaggtggacaggatgtccttcccctgtggctgcaccaaggagggctgcagcaacacagctggccgcatcgagttcaaccccatccgggtgaggacccacttcctgcacaccatcatgaagctggagctggagaagaaccgggagcagcagatccccaccctgaatggctgccacagcgagatcagcgcccacagcagctccatgggccctgtggcccacagcgtggagtacagcattgctgacagctttgaaattgaaacagagccccaggccgctgtgctgcacctgcagagcgctgaggagctggactgccagggcgaggaggaggaggaggaggaggatggcagcagcttctgcagcggcgtgacagacagcagcacccagagcctggcccccagcgagagtgatgaggaggaggaggaggaggaggaggaggaggaggaggaggatgatgatgatgacaagggagatggctttgtggagggcctgggcacccacgccgaggtggtgcccctgcccagcgtgctgtgctacagtgatggaacagctgtgcatgagagccacgccaagaatgccagcttctacgccaacagcagcaccctgtactaccagaatgacagcggcgtgccctgcaacagcctgtacccagagcacaggagcaaccacccccaggtggagttccacagctacctgaagggccccagccaggagggctttgtgtctgccctgaatggagacagccacatcagcgagcaccctgctgagaacagcctgagcctggccgagaagagcatcctgcacgaggagtgcatcaagagccctgtggtggagaccgtgcctgtgtag

SEQ ID NO: 267503 - DNA, 1854 bp, Artificial Sequence
  derived and/or modified sequence
atgaagtgcgccctgttcctgcgggtgaagatcctgcagcgggtgtgccgctccaggtacattgtgcacgcaggaacctgtgattccactgccgctatgtctggcatcctaaagcgaaagtttgaggaggttgatggcagtagcccttgcagctccgtgcgcgagagcgatgatgaagtttcttcctccgagtcggcggattctggcgactccgtgaatcctagcaccagcagccactttacacccagctctattttaaaaagagaaaagaggctgcgaaccaagaatgttcactttagttgcgtgaccgtgtactacttcacaagacgtcaagggtttacctccgtcccttcgcaggggggctctacattaggcatgtcttcccgtcacaactccgtgagacaatacactttgggagagttcgctagagagcaggagagactgcatcgcgaaatgctccgagagcacctgcgggaggaaaagctaaactcccttaagctcaagatgacaaagaatggtactgtcgaatctgaagaagcttctacccttactctggatgatataagtgatgatgatatagatttggataataccgaggtggatgagtacttctttctacagcctttgcctactaagaagcgtagggcgttactgcgggccagtggcgtaaagaaaatcgatgtggaagagaagcatgagcttcgggcgatccgcctctcacgggaggattgcggatgcgattgccgggtgttctgcgatcccgatacgtgcacttgcagcctggctggcatcaaatgccaggtcgaccgaatgtcattcccgtgcggttgcacaaaggagggctgtagtaacactgctggacgcattgaattcaatccaataagggtacggactcattttcttcatacaatcatgaaactggagctcgaaaaaaacagggagcaacagattccaacactaaacggatgtcacagcgagatcagtgctcattcttcttctatggggcctgtagcccacagcgttgaatattccatcgctgatagcttcgagatagagacagaaccccaggctgcagtgctgcatcttcagtctgccgaggagcttgactgccaaggtgaagaggaggaggaagaggaggacggaagttccttttgtagtggtgttaccgattccagcacacagagccttgccccaagcgagagtgatgaagaagaggaagaggaggaagaggaagaagaggaggaggatgacgacgacgataagggggatggattcgtggaagggctgggcacgcacgcagaagtggtgccgctgccttcagtcctgtgctactctgatggtaccgcagttcacgagtcccatgctaagaacgccagcttctatgcaaacagttcgacgctctattaccaaatcgatagccacatccctggtacgcctaaccagattagtgagaattactcagagcgcgacacagtgaagaacgggaccctctcattagtgccatacacaatgacaccagagcaattcgtggactacgcccggcaggccgaggaggcctatggagcgtcccactaccctgcagctaatcccagcgtgattgtatgttgttcgagctccgagaatgacagcggagtcccttgcaacagcctgtacccagagcacaggagtaatcacccgcaagtcgaatttcactcttacctgaaaggtccgtcacaggaaggattcgtcagcgcactcaacggggattcacacatctctgaacatccagcagagaactccttgtccttggcggagaagtctatcttgcacgaggagtgtatcaagtccccagtggtggaaacagtgcctgtctag

SEQ ID NO: 267504 - DNA, 1569 bp, Artificial Sequence
  derived and/or modified sequence
acctgcgacagcaccgccgccatgagcggcatcctgaagcggaagttcgaggaggtcgatgggtcgtccccgtgtagtagtgtgcgggagtctgatgacgaggtgtctagcagcgaatccgcagacagtggcgattcagttaacccctctacctcaagccactttaccccgtcatctatcctgaaacgcgaaaagcgcctgagaactaaaaatgttcatttcagctgtgtcaccgtgtattacttcacccgcagacagggttttacctccgtgccgtcacagggagggtccactctgggtatgagctcacggcataacagtgtgcgacagtatactctgggagagttcgcaagagagcaggaaagactacatcgggagatgctcagggagcatcttagagaagaaaaactgaacagcctgaagctgaagatgacaaagaacggaaccgtcgaaagcgaggaggcgagcaccctaacactagacgacatctccgacgacgatatagacctggataataccgaggtggacgaatacttttttctgcagcctcttcctaccaagaaaagaagggccttgctgagggcgtcaggggtcaaaaaaatcgacgttgaagagaagcatgagctcagggcgataagactgagtagagaagactgtggctgtgattgtagggtgttctgtgaccccgatacctgcacttgctccctggcaggaataaagtgccaggttgaccgcatgtcattcccatgtggttgtactaaggaaggatgtagcaatacagccgggaggatcgagttcaaccctatccgtgtccgtactcacttcctgcataccatcatgaagctggaattggaaaagaatcgcgagcaacaaatcccgacactgaatggttgtcacagcgaaatcagcgctcattctagtagtatgggcccggtagctcactctgtcgaatattccatcgcagatagttttgagatcgagactgagccccaggctgccgtactgcacctgcagtctgcagaggagctggattgccagggagaagaggaagaggaggaggaggatggtagcagcttctgtagtggggtgacagacagtagcacgcaaagcttggcaccatcagagtctgacgaggaagaagaagaggaggaggaggaggaggaagaggaggacgacgacgacgacaagggtgacggctttgtggaaggattggggacacacgccgaagtcgtgccactccccagcgttctgtgctacagtgacggaactgctgtccacgagtcccatgctaagaatgcttctttttatgctaattccagcacattgtactaccaaaacgactcaggcgtgccatgcaacagtctctaccctgagcaccgtagcaatcatccgcaggtggaattccattcatacttgaagggacccagccaggaaggtttcgtgtctgcactcaatggcgactcgcatattagcgaacacccggccgagaactctctgtccctcgccgagaaatcaatcctacatgaggagtgcatcaagagtcctgtggtggaaaccgtacctgtctag

SEQ ID NO: 267505 - DNA, 1854 bp, Artificial Sequence
  derived and/or modified sequence
atgaagtgcgctctgttcctgagggttaaaatccttcagcgggtgtgtagaagccgctacattgttcatgccggaacatgcgatagtacagcggcaatgagcggtatcctcaaacgcaaattcgaagaagtcgatggctccagcccttgtagctccgtacgcgagtctgatgatgaggtaagctcaagcgaaagcgcggactctggcgacagcgttaatcccagcacatccagtcactttacaccttcctcaattctgaaacgggaaaaacgattacggaccaaaaatgtgcacttttcctgcgtgactgtctactatttcactcggcgtcaaggctttacttcagttccttcccagggtggaagcacactcggcatgtctagcagacacaactctgtcaggcagtatacactaggagaatttgccagggaacaggagagattgcatcgggagatgctaagggaacacttgagggaagaaaagcttaactctttgaaacttaaaatgacaaaaaatggcacggttgaatccgaagaggcaagtactctcacattggatgatatctcagatgacgatattgacttagataatactgaagtggatgaatatttcttcctgcaacccctccccacaaaaaagagacgggctcttctgcgggctagtggcgtgaaaaaaattgacgtcgaggaaaagcatgagctgagggcaatcagactgtcacgggaagactgtggatgtgactgtcgcgttttttgtgaccctgacacatgtacctgcagtctcgcaggcattaaatgtcaggtggatcgaatgtcctttccttgcggatgtaccaaagagggctgctcaaacacagcaggcagaatcgagtttaatccaatacgggtcagaacccacttcctccataccataatgaagttagagttggagaagaacagggagcagcagatccccaccctgaacggttgccactctgaaatttccgctcacagttcttctatgggtcctgttgcccattccgtggaatatagtatagctgactcattcgagattgagactgagccacaggccgctgtactccacctgcagagcgccgaggagctagattgccaaggcgaagaggaagaggaggaggaagacgggtctagtttctgttctggtgtaacggactcttccacccagagtttagccccaagtgaatctgacgaagaggaggaggaggaagaggaggaggaggaggaggaggatgacgacgacgacaaaggtgacggcttcgtggaggggctaggcactcacgcagaagtcgttcctctgccttcagtgttatgttattcagacgggactgcagtccacgagagtcacgctaagaacgcctccttctatgctaacagtagtaccctctattatcagatcgatagtcacattcccggaaccccgaaccagatcagtgaaaattatagtgagagggacaccgtaaagaatggtacgttgtctcttgtaccatataccatgacaccggagcagtttgttgactatgccaggcaggctgaggaagcatacggcgcatcacactatcctgccgctaaccccagtgtcattgtgtgttgctcctctagcgaaaacgattctggggtgccctgcaactcgttgtacccagagcaccgcagtaatcacccccaagtggagttccattcctatctcaaaggaccatcacaggaggggtttgtcagcgctctgaacggagactctcatattagcgagcaccctgccgagaatagcctgtccttggcagagaagtctattctccacgaggaatgtatcaaatcacccgtggtggagacagtgcccgtctag

SEQ ID NO: 267506 - DNA, 1569 bp, Artificial Sequence
  derived and/or modified sequence
acatgtgacagcaccgctgccatgtcaggcatactgaagcgcaaatttgaagaagtggatggttcttccccgtgctcctccgtgcgagagtcagacgacgaggtgtcctccagcgaaagtgcggactccggagacagcgtgaacccaagtacgagcagtcatttcactccttcctccattttgaagcgggaaaaacgcctccgcacaaaaaatgtgcacttttcttgtgtgaccgtgtactatttcacccggcgtcagggctttacttccgttcctagccagggaggctctaccttaggcatgagcagtagacacaattcagtcaggcagtacacccttggcgaatttgcccgagagcaagaaaggctccacagggaaatgctgagggagcacctgcgagaggagaagctgaacagcttgaagcttaaaatgaccaagaatggtactgtggagagtgaggaggcttctaccctgaccttagacgacatttctgacgacgatatagacctggataatacagaagtggacgagtacttctttctacagcctctgccaaccaagaagagaagggccttactccgggcttcaggagtaaagaaaattgatgtggaggagaaacatgaactcagggccattaggctctcccgggaggactgtgggtgcgactgccgagtcttttgtgacccagacacatgcacctgcagtctcgcaggcatcaaatgtcaagtcgatcggatgtctttcccttgcggatgcactaaagagggatgtagcaacacagctggaaggatcgagtttaatcccatacgcgttcggacccactttctgcacacaattatgaagctggagctcgagaaaaaccgcgagcagcaaatccccactcttaatggctgccactctgaaatctcggcccattccagctcaatggggccagtagctcattcagtagaatactctatcgcggattcttttgaaatagaaacggagccccaggcagcagttctgcatctgcaatcagctgaggaattagactgtcagggggaagaggaggaggaagaagaagacggtagctccttttgctctggcgtgacagattccagcacgcagtcactggccccaagcgaatctgatgaagaagaagaggaggaagaggaggaagaagaagaagaagatgatgacgatgacaagggcgatggattcgtggagggtctcgggacacacgctgaggttgttcccctcccatccgtgctgtgctatagtgatggcactgccgtccacgaaagccacgcgaagaacgcgtccttctacgccaactccagtaccctatattatcagaatgattccggagtgccttgcaattctctgtaccccgaacaccgctccaatcatccacaggtcgagttccattcatatctgaagggcccatcccaggaagggtttgtgtctgccctgaacggcgatagccatatctcagaacacccggctgaaaacagtttgtctctggctgagaaatcaatcttgcatgaagaatgcatcaaatcccccgtggtcgagacagtgcctgtgtag

SEQ ID NO: 267507 - DNA, 11788 bp, Artificial Sequence
  derived and/or modified sequence
attggttggctgccgcctgatggatagacgagggaggagtgtactctcttcagtgtgttctgacggagccgaagtacagaaaccatatttacaggtacatgtgacagcgttgcagctatgagtggaattttaaaggggaagtttgaagaagtcaacggctcctcaccctgctcttcagtgcaggaatcagatgatgaagttttcagctgtgacagtactgagagtgttgatagtgtcaatcgttcagttttaatgattttaccagaaaaaatgaggaaatatcaacagactgaaaatatgttttcagaggcatagaatcttcaggaaaatactggagttcctgagatctcaaggtacatgtgacagcactgcagcgatgagtggaattttaaagaggaagtttgaagaagttgacggctcctcaccctgctcctctgtgagggaatcagatgatgaagtttccagcagtgaaagtgctgacagtggggacagtgtcaatccatccacttctagtcattttaccccttcctccattctcaaaagggagaaacgactgaggacaaagaatgtacattttagttgtgtcaccgtgtactacttcaccaggaggcaaggcttcacaagtgtgcccagtcaagggggaagcaccctggggatgtccagccgccataacagcgtgcgccagtacactcttggcgagtttgcaagggagcaggagaggctccaccgggagatgttgagagaacaccttagggaggaaaagctgaactccttaaaactaaagatgactaagaatggcacagtagaatcagaagaagccagcactcttacactggatgacatttctgatgatgacattgacctggacaacacagaggtagatgagtacttcttcctacaacctttgccaacaaaaaaacgaagagctctgctgcgtgcctctggagtgaaaaagattgacgtggaagaaaagcacgaactccgagccatccgcctctcacgagaggactgtggctgtgactgccgagtgttctgtgatccagacacgtgcacctgcagcctggctggcattaagtgccaggtggatcgtatgtctttcccatgcggctgcactaaagaaggatgtagtaacacagcaggtagaattgaatttaatcctatccgtgttcggactcactttttgcacacaataatgaaacttgaactggagaaaaaccgagagcagcaaatccccacgctgaatggctgccacagtgagataagtgctcacagtagttctatgggccctgtcgctcactccgtagaatattcaatcgcagacagttttgagattgaaactgagccccaggctgcagtgctgcacctgcagtcggctgaagaattagattgccaaggagaggaggaggaagaagaggaggatgggagcagcttttgcagcggagtcacagattctagcacgcaaagcttggcacctagtgagtcagacgaggaggaggaggaagaagaagaggaagaggaggaggaggatgacgatgatgacaaaggagatggcttcgtggaaggtttgggcacccatgccgaagttgtccctcttccttcagttctttgttattctgatggcaccgccgttcacgaaagccatgcaaagaatgcttctttttatgccaactcttcaactctgtattaccaaatagatagccacattccaggaactccaaatcagatctctgagaactattctgaaagagacactgtcaaaaatggtaccctttcgctggtgccttacaccatgaccccggagcaattcgttgactatgcccgacaagcagaagaggcctatggtgcctcccactacccagctgccaacccctctgtaatcgtttgctgctcctcttccgaaaatgatagcggtgtgccctgcaatagtttatatcctgaacacaggtccaatcaccctcaagtggaatttcactcatacttgaaaggcccctcccaagaagggtttgtctctgcattgaatggtgacagtcacatttcagagcatcctgctgaaaattctttgagccttgcagaaaagagcatattgcatgaagagtgcatcaaatcacccgtggttgagacagtccctgtttagtagcttaaattattctaggaccaactcttctcttatttaaggcactgtatttaattggatttcctgggctcatcattgtttaaactgaagaccaagaaaacttggacggtggttaatcttccagactgtattttgttttttcctttctagccacatgactgtggcattgcacaaatacagtctctgtagggattttaaaagatttcagactgttttgatagaaaaagctaaattttaaaatgcatatctcacagttgcctacctgtcaaactgtgtgaaacctgccaatctgtgtagatcagagctccaaattttggattatcgggcctgtgcaagattgttaactaaggctgggaaataataagatttagagtcctaattttcaatatatctgaagataatgatgactttttaatgtaaaagtaattattgtaagaaaaagatttaattgttccatgtgtattttatttatggtagtttagaagacatgttttgatgaaaatgaacagccgcatgttcattcaagctgaagatgcatagctagttccacagagcatgcccacatggattgcatctggaatccattcacatttttatgatcatgactgatcagatttgcaaattcttaagggtgaaataggcctatttttgctattttggacaaataaatgattctatatgtgcaggtccttacacagttttctctaaagttaagagttaggacaatcctctggggagagtctagttcactgccctccctcagctgactccagagatggaggtagaaggaattgcctttcttttttaaacagcatcatcttgattcttagcttggacagcacctttaagctctaccccctacatcaaaatgcactttagtgccccttcacggtacctcgtgtggggtggggactgagaactctttgagatgaaaaaatttaaaaaaaaattaaaaagatctttaactattataaggttcatataattaatatagaggaatcatccaatgatacttatgaagggaaaatgacctattttccttcaccactctgaggacctaactcagtaaatgcagaggaggctgaggaaacatggaagagacacgacctcagcaaccagccttttctccagcgtgatcaatccatctctacaaaatcagtgtataatgagatttccacttagtgactagctgattgaaggggggcctctacccaaatactcaactaggcctttcttttctgaagcattttgatttgtcttgcctgggacaactagcagaacagtccagaatgcattgcatactttctaattacctcacattctcttattaaagagaacagatagaaataaaacatgcactccccacctttagattacctgcacttggttcgtcggaggacttctaggatcccgtttccctgtaaattaatttaggtaactaaatagtgtaattctgcctttttttttccaatgcaatatgactatgctaaacctgtttcatatttttgaccttctattgttatatcacttcacatgttttataactatttgaaatgcggacatgacttgctattcagtgactgcatcgctacttattttttatgtcttttagacttgggtgtttagaattatggatataaatatattgtagatctcaatttctaaaaaaaatattttatttaattgaacttaaaaatgcttgatctagagaaagtcctccagtggaaaagtttctactaaactttgttttggggaaaaaatgtttacttggcagctcttccactgtgcagttggtttctgccccttctcttcccccctacattgggccaaatttataactcttaatattaacattaaaagagctttgggtttgtctttatgtaggttgcagtaatgagagcagggttgttccttttgaatgattggccctttgggctaatcagaatgaggatttgttgaaatctcaaatatacatatatatatatatatatatatatatatatatatacacacacacacacacatacacatatatatacacatatatgtatgtgtgtgtgtgtgtgtgtgtgtgtgtatatatatatatcccatgttgtctgcaaagtgacagtttttagtgcttaatctccaaaattttccccctactgatacaatctaaagagcacaggcccaaagagaaaatgacaagaggctattgttccttcattcaagcacatgaaaggatcatgtgtactgtatttgctggaccattacaagctcttgaaggatctgcttgtgaagtactctgaggttattcttggaacacagagtgtgggagagtggggaagagccagctccagcctgagcaaagctgaagggtagaatgacagtccagtttctgaaaagagatattttaattttagttcagctttattttcctaagacgatatgaagcctacttttttatttttggctaggtctttgttttctagctttgtttccaaaaggatgcttaagaaaacagagtttttttcccctatccatttatctagggtagaaagtcactgccctgtgagaagaattacccttccaatcatgacagcttctattccaacttttcatatacctgactaacctgtaaacatatcccacaaaccacatacacaggctacctattaaaactctcccatatacctaacacatacacatgcacacacatacaaaatatatacatatcacacacttagagaatgacagatttcaggcaatggccaatagtcagtattgagtttttctaaccccagaatctggttgggctttatgatctaaaaaaatgtggtttagaaaagaggataattggtagagctgtagtttgaaaatatcaggtcaaagttgcaaacatacttatgatggaatcatttcatttttagttcctttcccagaaaagctgagagagcacactgttccagctgacttttttttccattaatagccgttctattcaacaaagagctgcccacatgccaggaaagtgctacagtccttctaagcttttaaaaatggggatcaagctacatgcagccagttggaatacttaagatctttatgccaagacacaataacctgacctgcagctgttgtattgcctccatagtatatctagccaaactgtagtctttgacacacaactttttagtcattcactatcaattgcaaagcttcatgctccagccctggctattctagtaccagtcctatacctttaaatgggacttaattcccagttataatcctggccgaattgatttgaaagtcaagtggctgaagcagcttgcatctcctttgtcattcccaatttcctttgggagaagtcaatgaaagagatttacttaagtttttcctccttatctcttgatcattaattattaagacatgggtaaaattcatttgtctcatgtcttttggttgattgaataatatagttactttttgaaagcccatcatttctttgtgataaaaccattttctcaatgtgacagccacatgtaaaatgtgaaactaatgtttcttagtatgtttaaaatcttcacaatcatatatggccctgcaatactccctgaattccttccctccaaaaaaaaactatgagttgcaaaaacactagttacgaattaatcaagaagcaaagagagtatgttaagtggctatgttctttaaaattttacattctaatagatgacttctaggcaaaattttggtatgattaccattaaacaggaaaacataccatgatttactttctataacttgctaatcactgtttcttttatttcaatttttgatattgttgcacaagtttatgactctttggtctttatattcaaaatttattaagtatcaattctttctttcaacaaatatgtactgaacacatgctgtgttagaacaactgtcttgggtagtaaaaagaggggaacactacaaattataatggataatattaatgaagggtggcatgaaataatcaagctttctcaaatcctcttaatatgtgattttatcaagtgacattagaaaaactgacatcagttcttgtctaattatatgtgagctgcaactaaaagatgcttcctttacctaaattatagaactcactggatcgcccttcatctctctccctccatctgaaatgtatgaattaaatcaggactcagctaggactgaatcaaatgaaaaagaaattttcgattaattgcttcttcaatgttagacctatataagtgatgctaaatttacaccagcaaactcctatcagacagtttcaaggaggatttgactcatgcataacccaggaaacatttcaggaaacttttaagacaacagtgtggaacacaatcactcttacttctatttataaaaagcctatcaaaacagcaaaatcctgttgcaaattccaaagacatcactttgcagcaggtggaaaacagagaggttgttagactccatcactttcagctggagttacaaaccatcaaattagcaggtggaaaatttatattctcagaagccaacaggagactgcctttttaaaaggtgtcatgaagccttctatttctccaaacaactcaatatttctctttaaaatggcatctctgttccttattctcttgatgacagtttgcagtgccattatagccagtgtattaaataccaggctttaatgggaagcacctttgtgctttcaaaggcaagacttgtctgtaattttaaattagaactgttggttgtattcttaccacaaccaaaacccaaagtttaaaggcttgattactctatattaggtctaatatgaattttcaccttctgattgcattactttttctgaaatctgctaactagtgctggaataacaaaaatgcctaagccaaaatgctgtagctctgcaccaacagcacagctcatcagatgttttctatagtagtaaagaatttgattgacttaattgaatatcagcaattttaatacccactagaattatggaagtatcagagtggaagtgaggacgcaataaaagcttaataagtggtggtgtcttctaggaattatgaaaaaaaaagctcagcagagctaagccagatcttattacatcataaagactagagttacaaatggcagccccaaacctagaaggggcagttacaatgtggacaccctttcagcccagttggtgctcacatctgctgaccaacattcatatcaattacatttttacagtctgtaagtcatttgatgctttagaaaataaaaacacacacctacagcattctaaagaaactattttgttaaaaaatttaaacacattttatattaaaataagtgatcaatgactttcatgattgtcaaaagtaaaaagtgcagacatttaaaaaagctcttctttcacattttacctaccaaatctagatattcaacgtgagtccttaaaacagtcacttctaaattttattttgactcctttcttggctttttcaaactggaccatgagacccccttcctaaacaatgcagttgttttgttttattctttttttccagaaattcaagctgaaacatttgatatgacctgtgttttacctggtgatcagttctcaggctagtctaagtctgtgctgtcttggcatgccttgggtttcctatcctgagagtggtaatgccagtagaatgatgggaaccaggagagtgaatacgaccagattcaaagcctaaaacaatatgtttcagtttacttttatatgtagattttttaaatattcacatctagcctggaattttagtaaatacagatacttgttgtatccatgggaaatgaggtcatttcaaagatgtaagtcacgttggtgactactttcttttacttgtgataaatatatcactatacagggtaattgcttttataaatttgatcctttgcattggcttataattcaagaaatgtcaacttcactgtgtcactttatgtcatctctcataaaagtttctggcaggactaaagtttcaaaggaatgtgatagaatttattttggataacatttgtattcagcatgctaatgatgtaactcctctctttatcattaccacggtgatagttaagttcattcgttaactcattttagtgacatgtgaggccatttaaatatttttaagataatgtatattgattagaaagggttagaaggagacaaatttatggtagaaattagccttgccattgtctaagttaatttatgtgacctgattgaacagttttagttgtaactttagagtagcttctttgttagaggatctctttcctttctcttttggttttctcccaatatttttatctgtcttgggattatcttaaaaggtatttattaatgagtatttggaagaaaattgacctagaaaatgtctcttttaaatttatctaggtacttgtatcaccagagaccttcatcaagtcctactgccacactggataaggccactacccccgacccttcttgtcagggacatggcttcctaataatggttttgctgttgtctctacataggggacctatggaaaaggagtttgaaatttctacctttgtagtacattgtatccaattttgttttgctcctccttttcatgtggtcaccaagcttttttccttagccattaaaaaagccacccctctttaaaacaaatttaaagatctatatacatttttgcaactttatttaataaaaaagagaagaaaaaataaaatctaaatctcaattaccctaaagtggaaaaacctaagtatctaacctaggaacttgttgcctggtggtggttgttgttgttgttgttttttaatttatttagtgttgatccttgagttatttaatggtatccaaatgatatctgaaagtgattgattttaagatgtaatagttggcaaagtcatttcatttgtgtctcaaacaaataaagcccactgccatgggttaccatctgaaccctgattcattaggcactagtcatgccaaatggggatctcagaatagtttaatcttttcaaagatactcacaatggccaactgtgtgtgaatactggaaagtttgagattcttctatattcttcaaatttatggtcctgagactaggagggatctccagaggtcatatggctcatcgatctaccaccagggaagactgtcacttaggcatgcccaacaggagagatcgccatctattcttaacatctctagggaaggcagtttccttggcaacacaattcagctctcttaggttttctcacaataagaaaatatcttggccagtctttgagggttaggcacctggcaacagttgtggtgatttgggccattgtactaggggattcaagggaagttgggtttccccctacatttggtgattattacattaatatatgatcattccataagtctcctaagaaatcagatttttaaagaaagacacggattcagagacaatggtctgtaacatgaccaacttttgacaaatatggctgtactaggttttcatttttgctgttgttgttgtttgtttttgtgattgctcttatgtcggtaggtaatgtcaggaaaagtgactgtttcagatccccagtacaaacatcagaactaggatcaaatgacttgacttttaagctgttccattttctaagaagttacaattacaaaaagtaagcattttctacattcttacttctaagtaatgaccttctcattaatctttccttggcttaaaatgacaaataagaatccaaagtttttccactcctcctgtgggagataggaatagttgtgaagagtctgatggaataaaatgactccagagatttacacagccaccatttgatcccagcctttgtccttgtgttatttaaacaatggcttcctgctttctcaggggtcaggaaaatgatttaaaaatttgtcttcttgacaaggcctgaaaacgaagggaggtgtcgtggagaaatggtgatttttctggttacatcacttgattcaagcactccctggagctttcaaagccttttttatctgctcagagttgacacccaactcagagtcagaactcaccagaagatgaggaacacccccgaaatcaatgtttcctttctccatgggatttttttcaatcttggtacagctgcatatctcccaaactcggatgctcttgtgaaatgacagccacatcagtgtggttactccccacaaataacactagggggaaatgaccttttttatttaaaaaaaaaaaaaaggctaatgctatagaatgatcatgtaaagaatgttgaataaaatttggcccatgttttaattgactctaggcacctctattgaaataagtctgaggcatagtttgtgaaacatgtttcaaaagtgtttgatgtataataaatgctagaaatttacagtacagaaatagtaaaaaaataaaataaaaataaacctgtagattacagctctgttcctaagaacctcagcctttattgtgtcttagtaaagttgatctgctttatttttagtttattgaatttctggtgtactagcctcttaagatagaacttttaatacatatgtactggttaatgcctgtttacgcagaaaatggcactttgttctttcagtgtgtttccctcagtgtcacagggtatatcaatttgatagatcatttgacatttgtcaaaaatacgtttcccattttaaaaatatgtataattggttgcatagacatatgtcactttttgcagtgtcttcatcttgatcatagttttagacatcaactatgtctcactttccaactgccatagaaatttggtacatttgcaaattctggtggaatctagtgagctgaatgtattggtagatcaaatgatccaaaggacttgggtgttatccttcagtctgtgttgaaccattcagatattgggaatggtccttacacaagggaagtcttttgagaatatttgttctcttattttttgtttgtttgttgctggcaaaaaaaaaagtaactttaaaaactcagaaaagccactgaactgtattttgtgaccttatgattagttttatctttcaactgatttttattgttacttttactcaatatcaacagtacttcaatagatatttattagttatgttcaatctaatgacttaaaacagttgaaaaggaggaaaatcaactccagtccacacatacagtcatgttacattaagatgtcatgttgtatgtcacacagtttctagattgatttctcttgtgtataagttataacatcaaaaatgccaaagggtatataaaataagctacaataatattcaacagaacttaacctggaccttatgttgtaataatttattcatattagctgtagtcttctgtatttatattttcagtatttattatgaatgacatggaaattcgtgtatttattgtggctttttattgcagtgtgtatatatatataacaaataagcatttttaagtcttatccttaagtttcttttattagtggcacttgtattatgctgtactttttattacatattgtacaatatcttgtccatttgtttgcagcagagtaaaaccggtttctaagttgta

SEQ ID NO: 267508 - DNA, 11684 bp, Artificial Sequence
  derived and/or modified sequence
ctcagtgaggctgatgccgtgcagcaagcagtaggtaatgagtctttgtgcagagtgaagctcttgttgctgaacaataaagcatatggtacaagcaataaaacacagggctgggaaatttaagaagattcctctgaaccaggaagaactgtgtcttcggtgatgctgacacatatgataaaatgatcatttattttggatcctaatgaataaagagtgcaaggactaagactacagttatttgaacaggtacatgtgacagcactgcagcgatgagtggaattttaaagaggaagtttgaagaagttgacggctcctcaccctgctcctctgtgagggaatcagatgatgaagtttccagcagtgaaagtgctgacagtggggacagtgtcaatccatccacttctagtcattttaccccttcctccattctcaaaagggagaaacgactgaggacaaagaatgtacattttagttgtgtcaccgtgtactacttcaccaggaggcaaggcttcacaagtgtgcccagtcaagggggaagcaccctggggatgtccagccgccataacagcgtgcgccagtacactcttggcgagtttgcaagggagcaggagaggctccaccgggagatgttgagagaacaccttagggaggaaaagctgaactccttaaaactaaagatgactaagaatggcacagtagaatcagaagaagccagcactcttacactggatgacatttctgatgatgacattgacctggacaacacagaggtagatgagtacttcttcctacaacctttgccaacaaaaaaacgaagagctctgctgcgtgcctctggagtgaaaaagattgacgtggaagaaaagcacgaactccgagccatccgcctctcacgagaggactgtggctgtgactgccgagtgttctgtgatccagacacgtgcacctgcagcctggctggcattaagtgccaggtggatcgtatgtctttcccatgcggctgcactaaagaaggatgtagtaacacagcaggtagaattgaatttaatcctatccgtgttcggactcactttttgcacacaataatgaaacttgaactggagaaaaaccgagagcagcaaatccccacgctgaatggctgccacagtgagataagtgctcacagtagttctatgggccctgtcgctcactccgtagaatattcaatcgcagacagttttgagattgaaactgagccccaggctgcagtgctgcacctgcagtcggctgaagaattagattgccaaggagaggaggaggaagaagaggaggatgggagcagcttttgcagcggagtcacagattctagcacgcaaagcttggcacctagtgagtcagacgaggaggaggaggaagaagaagaggaagaggaggaggaggatgacgatgatgacaaaggagatggcttcgtggaaggtttgggcacccatgccgaagttgtccctcttccttcagttctttgttattctgatggcaccgccgttcacgaaagccatgcaaagaatgcttctttttatgccaactcttcaactctgtattaccaaatagatagccacattccaggaactccaaatcagatctctgagaactattctgaaagagacactgtcaaaaatggtaccctttcgctggtgccttacaccatgaccccggagcaattcgttgactatgcccgacaagcagaagaggcctatggtgcctcccactacccagctgccaacccctctgtaatcgtttgctgctcctcttccgaaaatgatagcggtgtgccctgcaatagtttatatcctgaacacaggtccaatcaccctcaagtggaatttcactcatacttgaaaggcccctcccaagaagggtttgtctctgcattgaatggtgacagtcacatttcagagcatcctgctgaaaattctttgagccttgcagaaaagagcatattgcatgaagagtgcatcaaatcacccgtggttgagacagtccctgtttagtagcttaaattattctaggaccaactcttctcttatttaaggcactgtatttaattggatttcctgggctcatcattgtttaaactgaagaccaagaaaacttggacggtggttaatcttccagactgtattttgttttttcctttctagccacatgactgtggcattgcacaaatacagtctctgtagggattttaaaagatttcagactgttttgatagaaaaagctaaattttaaaatgcatatctcacagttgcctacctgtcaaactgtgtgaaacctgccaatctgtgtagatcagagctccaaattttggattatcgggcctgtgcaagattgttaactaaggctgggaaataataagatttagagtcctaattttcaatatatctgaagataatgatgactttttaatgtaaaagtaattattgtaagaaaaagatttaattgttccatgtgtattttatttatggtagtttagaagacatgttttgatgaaaatgaacagccgcatgttcattcaagctgaagatgcatagctagttccacagagcatgcccacatggattgcatctggaatccattcacatttttatgatcatgactgatcagatttgcaaattcttaagggtgaaataggcctatttttgctattttggacaaataaatgattctatatgtgcaggtccttacacagttttctctaaagttaagagttaggacaatcctctggggagagtctagttcactgccctccctcagctgactccagagatggaggtagaaggaattgcctttcttttttaaacagcatcatcttgattcttagcttggacagcacctttaagctctaccccctacatcaaaatgcactttagtgccccttcacggtacctcgtgtggggtggggactgagaactctttgagatgaaaaaatttaaaaaaaaattaaaaagatctttaactattataaggttcatataattaatatagaggaatcatccaatgatacttatgaagggaaaatgacctattttccttcaccactctgaggacctaactcagtaaatgcagaggaggctgaggaaacatggaagagacacgacctcagcaaccagccttttctccagcgtgatcaatccatctctacaaaatcagtgtataatgagatttccacttagtgactagctgattgaaggggggcctctacccaaatactcaactaggcctttcttttctgaagcattttgatttgtcttgcctgggacaactagcagaacagtccagaatgcattgcatactttctaattacctcacattctcttattaaagagaacagatagaaataaaacatgcactccccacctttagattacctgcacttggttcgtcggaggacttctaggatcccgtttccctgtaaattaatttaggtaactaaatagtgtaattctgcctttttttttccaatgcaatatgactatgctaaacctgtttcatatttttgaccttctattgttatatcacttcacatgttttataactatttgaaatgcggacatgacttgctattcagtgactgcatcgctacttattttttatgtcttttagacttgggtgtttagaattatggatataaatatattgtagatctcaatttctaaaaaaaatattttatttaattgaacttaaaaatgcttgatctagagaaagtcctccagtggaaaagtttctactaaactttgttttggggaaaaaatgtttacttggcagctcttccactgtgcagttggtttctgccccttctcttcccccctacattgggccaaatttataactcttaatattaacattaaaagagctttgggtttgtctttatgtaggttgcagtaatgagagcagggttgttccttttgaatgattggccctttgggctaatcagaatgaggatttgttgaaatctcaaatatacatatatatatatatatatatatatatatatatatacacacacacacacacatacacatatatatacacatatatgtatgtgtgtgtgtgtgtgtgtgtgtgtgtatatatatatatcccatgttgtctgcaaagtgacagtttttagtgcttaatctccaaaattttccccctactgatacaatctaaagagcacaggcccaaagagaaaatgacaagaggctattgttccttcattcaagcacatgaaaggatcatgtgtactgtatttgctggaccattacaagctcttgaaggatctgcttgtgaagtactctgaggttattcttggaacacagagtgtgggagagtggggaagagccagctccagcctgagcaaagctgaagggtagaatgacagtccagtttctgaaaagagatattttaattttagttcagctttattttcctaagacgatatgaagcctacttttttatttttggctaggtctttgttttctagctttgtttccaaaaggatgcttaagaaaacagagtttttttcccctatccatttatctagggtagaaagtcactgccctgtgagaagaattacccttccaatcatgacagcttctattccaacttttcatatacctgactaacctgtaaacatatcccacaaaccacatacacaggctacctattaaaactctcccatatacctaacacatacacatgcacacacatacaaaatatatacatatcacacacttagagaatgacagatttcaggcaatggccaatagtcagtattgagtttttctaaccccagaatctggttgggctttatgatctaaaaaaatgtggtttagaaaagaggataattggtagagctgtagtttgaaaatatcaggtcaaagttgcaaacatacttatgatggaatcatttcatttttagttcctttcccagaaaagctgagagagcacactgttccagctgacttttttttccattaatagccgttctattcaacaaagagctgcccacatgccaggaaagtgctacagtccttctaagcttttaaaaatggggatcaagctacatgcagccagttggaatacttaagatctttatgccaagacacaataacctgacctgcagctgttgtattgcctccatagtatatctagccaaactgtagtctttgacacacaactttttagtcattcactatcaattgcaaagcttcatgctccagccctggctattctagtaccagtcctatacctttaaatgggacttaattcccagttataatcctggccgaattgatttgaaagtcaagtggctgaagcagcttgcatctcctttgtcattcccaatttcctttgggagaagtcaatgaaagagatttacttaagtttttcctccttatctcttgatcattaattattaagacatgggtaaaattcatttgtctcatgtcttttggttgattgaataatatagttactttttgaaagcccatcatttctttgtgataaaaccattttctcaatgtgacagccacatgtaaaatgtgaaactaatgtttcttagtatgtttaaaatcttcacaatcatatatggccctgcaatactccctgaattccttccctccaaaaaaaaactatgagttgcaaaaacactagttacgaattaatcaagaagcaaagagagtatgttaagtggctatgttctttaaaattttacattctaatagatgacttctaggcaaaattttggtatgattaccattaaacaggaaaacataccatgatttactttctataacttgctaatcactgtttcttttatttcaatttttgatattgttgcacaagtttatgactctttggtctttatattcaaaatttattaagtatcaattctttctttcaacaaatatgtactgaacacatgctgtgttagaacaactgtcttgggtagtaaaaagaggggaacactacaaattataatggataatattaatgaagggtggcatgaaataatcaagctttctcaaatcctcttaatatgtgattttatcaagtgacattagaaaaactgacatcagttcttgtctaattatatgtgagctgcaactaaaagatgcttcctttacctaaattatagaactcactggatcgcccttcatctctctccctccatctgaaatgtatgaattaaatcaggactcagctaggactgaatcaaatgaaaaagaaattttcgattaattgcttcttcaatgttagacctatataagtgatgctaaatttacaccagcaaactcctatcagacagtttcaaggaggatttgactcatgcataacccaggaaacatttcaggaaacttttaagacaacagtgtggaacacaatcactcttacttctatttataaaaagcctatcaaaacagcaaaatcctgttgcaaattccaaagacatcactttgcagcaggtggaaaacagagaggttgttagactccatcactttcagctggagttacaaaccatcaaattagcaggtggaaaatttatattctcagaagccaacaggagactgcctttttaaaaggtgtcatgaagccttctatttctccaaacaactcaatatttctctttaaaatggcatctctgttccttattctcttgatgacagtttgcagtgccattatagccagtgtattaaataccaggctttaatgggaagcacctttgtgctttcaaaggcaagacttgtctgtaattttaaattagaactgttggttgtattcttaccacaaccaaaacccaaagtttaaaggcttgattactctatattaggtctaatatgaattttcaccttctgattgcattactttttctgaaatctgctaactagtgctggaataacaaaaatgcctaagccaaaatgctgtagctctgcaccaacagcacagctcatcagatgttttctatagtagtaaagaatttgattgacttaattgaatatcagcaattttaatacccactagaattatggaagtatcagagtggaagtgaggacgcaataaaagcttaataagtggtggtgtcttctaggaattatgaaaaaaaaagctcagcagagctaagccagatcttattacatcataaagactagagttacaaatggcagccccaaacctagaaggggcagttacaatgtggacaccctttcagcccagttggtgctcacatctgctgaccaacattcatatcaattacatttttacagtctgtaagtcatttgatgctttagaaaataaaaacacacacctacagcattctaaagaaactattttgttaaaaaatttaaacacattttatattaaaataagtgatcaatgactttcatgattgtcaaaagtaaaaagtgcagacatttaaaaaagctcttctttcacattttacctaccaaatctagatattcaacgtgagtccttaaaacagtcacttctaaattttattttgactcctttcttggctttttcaaactggaccatgagacccccttcctaaacaatgcagttgttttgttttattctttttttccagaaattcaagctgaaacatttgatatgacctgtgttttacctggtgatcagttctcaggctagtctaagtctgtgctgtcttggcatgccttgggtttcctatcctgagagtggtaatgccagtagaatgatgggaaccaggagagtgaatacgaccagattcaaagcctaaaacaatatgtttcagtttacttttatatgtagattttttaaatattcacatctagcctggaattttagtaaatacagatacttgttgtatccatgggaaatgaggtcatttcaaagatgtaagtcacgttggtgactactttcttttacttgtgataaatatatcactatacagggtaattgcttttataaatttgatcctttgcattggcttataattcaagaaatgtcaacttcactgtgtcactttatgtcatctctcataaaagtttctggcaggactaaagtttcaaaggaatgtgatagaatttattttggataacatttgtattcagcatgctaatgatgtaactcctctctttatcattaccacggtgatagttaagttcattcgttaactcattttagtgacatgtgaggccatttaaatatttttaagataatgtatattgattagaaagggttagaaggagacaaatttatggtagaaattagccttgccattgtctaagttaatttatgtgacctgattgaacagttttagttgtaactttagagtagcttctttgttagaggatctctttcctttctcttttggttttctcccaatatttttatctgtcttgggattatcttaaaaggtatttattaatgagtatttggaagaaaattgacctagaaaatgtctcttttaaatttatctaggtacttgtatcaccagagaccttcatcaagtcctactgccacactggataaggccactacccccgacccttcttgtcagggacatggcttcctaataatggttttgctgttgtctctacataggggacctatggaaaaggagtttgaaatttctacctttgtagtacattgtatccaattttgttttgctcctccttttcatgtggtcaccaagcttttttccttagccattaaaaaagccacccctctttaaaacaaatttaaagatctatatacatttttgcaactttatttaataaaaaagagaagaaaaaataaaatctaaatctcaattaccctaaagtggaaaaacctaagtatctaacctaggaacttgttgcctggtggtggttgttgttgttgttgttttttaatttatttagtgttgatccttgagttatttaatggtatccaaatgatatctgaaagtgattgattttaagatgtaatagttggcaaagtcatttcatttgtgtctcaaacaaataaagcccactgccatgggttaccatctgaaccctgattcattaggcactagtcatgccaaatggggatctcagaatagtttaatcttttcaaagatactcacaatggccaactgtgtgtgaatactggaaagtttgagattcttctatattcttcaaatttatggtcctgagactaggagggatctccagaggtcatatggctcatcgatctaccaccagggaagactgtcacttaggcatgcccaacaggagagatcgccatctattcttaacatctctagggaaggcagtttccttggcaacacaattcagctctcttaggttttctcacaataagaaaatatcttggccagtctttgagggttaggcacctggcaacagttgtggtgatttgggccattgtactaggggattcaagggaagttgggtttccccctacatttggtgattattacattaatatatgatcattccataagtctcctaagaaatcagatttttaaagaaagacacggattcagagacaatggtctgtaacatgaccaacttttgacaaatatggctgtactaggttttcatttttgctgttgttgttgtttgtttttgtgattgctcttatgtcggtaggtaatgtcaggaaaagtgactgtttcagatccccagtacaaacatcagaactaggatcaaatgacttgacttttaagctgttccattttctaagaagttacaattacaaaaagtaagcattttctacattcttacttctaagtaatgaccttctcattaatctttccttggcttaaaatgacaaataagaatccaaagtttttccactcctcctgtgggagataggaatagttgtgaagagtctgatggaataaaatgactccagagatttacacagccaccatttgatcccagcctttgtccttgtgttatttaaacaatggcttcctgctttctcaggggtcaggaaaatgatttaaaaatttgtcttcttgacaaggcctgaaaacgaagggaggtgtcgtggagaaatggtgatttttctggttacatcacttgattcaagcactccctggagctttcaaagccttttttatctgctcagagttgacacccaactcagagtcagaactcaccagaagatgaggaacacccccgaaatcaatgtttcctttctccatgggatttttttcaatcttggtacagctgcatatctcccaaactcggatgctcttgtgaaatgacagccacatcagtgtggttactccccacaaataacactagggggaaatgaccttttttatttaaaaaaaaaaaaaaggctaatgctatagaatgatcatgtaaagaatgttgaataaaatttggcccatgttttaattgactctaggcacctctattgaaataagtctgaggcatagtttgtgaaacatgtttcaaaagtgtttgatgtataataaatgctagaaatttacagtacagaaatagtaaaaaaataaaataaaaataaacctgtagattacagctctgttcctaagaacctcagcctttattgtgtcttagtaaagttgatctgctttatttttagtttattgaatttctggtgtactagcctcttaagatagaacttttaatacatatgtactggttaatgcctgtttacgcagaaaatggcactttgttctttcagtgtgtttccctcagtgtcacagggtatatcaatttgatagatcatttgacatttgtcaaaaatacgtttcccattttaaaaatatgtataattggttgcatagacatatgtcactttttgcagtgtcttcatcttgatcatagttttagacatcaactatgtctcactttccaactgccatagaaatttggtacatttgcaaattctggtggaatctagtgagctgaatgtattggtagatcaaatgatccaaaggacttgggtgttatccttcagtctgtgttgaaccattcagatattgggaatggtccttacacaagggaagtcttttgagaatatttgttctcttattttttgtttgtttgttgctggcaaaaaaaaaagtaactttaaaaactcagaaaagccactgaactgtattttgtgaccttatgattagttttatctttcaactgatttttattgttacttttactcaatatcaacagtacttcaatagatatttattagttatgttcaatctaatgacttaaaacagttgaaaaggaggaaaatcaactccagtccacacatacagtcatgttacattaagatgtcatgttgtatgtcacacagtttctagattgatttctcttgtgtataagttataacatcaaaaatgccaaagggtatataaaataagctacaataatattcaacagaacttaacctggaccttatgttgtaataatttattcatattagctgtagtcttctgtatttatattttcagtatttattatgaatgacatggaaattcgtgtatttattgtggctttttattgcagtgtgtatatatatataacaaataagcatttttaagtcttatccttaagtttcttttattagtggcacttgtattatgctgtactttttattacatattgtacaatatcttgtccatttgtttgcagcagagtaaaaccggtttctaagttgta

SEQ ID NO: 267509 - DNA, 2545 bp, Artificial Sequence
  derived and/or modified sequence
tcctgctctcccgtgattcaggtagcctggcagaaccgcagttccacaattccttacccagcattccgtttcagctgctggaggactgcctgagccttatgcaaatgagaccagctcggaggctttgactgcagaagcgagaggagggggcagaagggagttcaaaggtcacagggctggtggaaagctggatcagttgcctgaaaaaaatgtactggggttctctgcagcagtgttttgcagcagttaaatgaagtgtgctttatttctgagagtgaagattttacagcgtgtgtgccgtagtcgttatatagtgcacgcaggtacatgtgacagcactgcagcgatgagtggaattttaaagaggaagtttgaagaagttgacggctcctcaccctgctcctctgtgagggaatcagatgatgaagtttccagcagtgaaagtgctgacagtggggacagtgtcaatccatccacttctagtcattttaccccttcctccattctcaaaagggagaaacgactgaggacaaagaatgtacattttagttgtgtcaccgtgtactacttcaccaggaggcaaggcttcacaagtgtgcccagtcaagggggaagcaccctggggatgtccagccgccataacagcgtgcgccagtacactcttggcgagtttgcaagggagcaggagaggctccaccgggagatgttgagagaacaccttagggaggaaaagctgaactccttaaaactaaagatgactaagaatggcacagtagaatcagaagaagccagcactcttacactggatgacatttctgatgatgacattgacctggacaacacagaggtagatgagtacttcttcctacaacctttgccaacaaaaaaacgaagagctctgctgcgtgcctctggagtgaaaaagattgacgtggaagaaaagcacgaactccgagccatccgcctctcacgagaggactgtggctgtgactgccgagtgttctgtgatccagacacgtgcacctgcagcctggctggcattaagtgccaggtggatcgtatgtctttcccatgcggctgcactaaagaaggatgtagtaacacagcaggtagaattgaatttaatcctatccgtgttcggactcactttttgcacacaataatgaaacttgaactggagaaaaaccgagagcagcaaatccccacgctgaatggctgccacagtgagataagtgctcacagtagttctatgggccctgtcgctcactccgtagaatattcaatcgcagacagttttgagattgaaactgagccccaggctgcagtgctgcacctgcagtcggctgaagaattagattgccaaggagaggaggaggaagaagaggaggatgggagcagcttttgcagcggagtcacagattctagcacgcaaagcttggcacctagtgagtcagacgaggaggaggaggaagaagaagaggaagaggaggaggaggatgacgatgatgacaaaggagatggcttcgtggaaggtttgggcacccatgccgaagttgtccctcttccttcagttctttgttattctgatggcaccgccgttcacgaaagccatgcaaagaatgcttctttttatgccaactcttcaactctgtattaccaaatagatagccacattccaggaactccaaatcagatctctgagaactattctgaaagagacactgtcaaaaatggtaccctttcgctggtgccttacaccatgaccccggagcaattcgttgactatgcccgacaagcagaagaggcctatggtgcctcccactacccagctgccaacccctctgtaatcgtttgctgctcctcttccgaaaatgatagcggtgtgccctgcaatagtttatatcctgaacacaggtccaatcaccctcaagtggaatttcactcatacttgaaaggcccctcccaagaagggtttgtctctgcattgaatggtgacagtcacatttcagagcatcctgctgaaaattctttgagccttgcagaaaagagcatattgcatgaagagtgcatcaaatcacccgtggttgagacagtccctgtttagtagcttaaattattctaggaccaactcttctcttatttaaggcactgtatttaattggatttcctgggctcatcattgtttaaactgaagaccaagaaaacttggacggtggttaatcttccagactgtattttgttttttcctttctagccacatgactgtggcattgcacaaatacagtctctgtagggattttaaaagatttcagactgttttgatagaaaaagctaaattttaaaatgcatatctcacagttgcctacctgtcaaactgtgtgaaacctgccaatctgtgtagatcagagctccaaattttggattatcgggcctgtgcaagattgttaactaaggctgggaaataataagatttagagtcctaattttcaatatatctgaagataatgatgactttttaatgtaaaagtaattattgtaagaaaaa

SEQ ID NO: 267510 - DNA, 482 bp, Artificial Sequence
  derived and/or modified sequence
agtgtgttctgacggagccgaagtacagaaaccatatttacaggtacatgtgacagcactgcagcgatgagtggaattttaaagaggaagtttgaagaagttgacggctcctcaccctgctcctctgtgagggaatcagatgatgaagtttccagcagtgaaagtgctgacagtggggacagtgtcaatccatccacttctagtcattttaccccttcctccattctcaaaagggagaaacgactgaggacaaagaatgtacattttagttgtgtcaccgtgtactacttcaccaggaggcaaggcttcacaagtgtgcccagtcaagggggaagcaccctggggatgtccagccgccataacagcgtgcgccagtacactcttggcgagtttgcaagggagcaggagaggctccaccgggagatgttgagagaacaccttagggaggaaaagctgaactccttaaaactaaagatgactaa

SEQ ID NO: 267511 - DNA, 1688 bp, Artificial Sequence
  derived and/or modified sequence
attggttggctgccgcctgatggatagacgagggaggagtgtactctcttcagtgtgttctgacggagccgaagtacagaaaccatatttacaggtacatgtgacagcgttgcagctatgagtggaattttaaaggggaagtttgaagaagtcaacggctcctcaccctgctcttcagtgcaggaatcagatgatgaagttttcagctgtgacagtactgagagtgttgatagtgtcaatcgttcagttttaatgattttaccagaaaaaatgaggaaatatcaacagactgaaaatatgttttcagaggcatagaatcttcaggaaaatactggagttcctgagatctcaaggtacatgtgacagcactgcagcgatgagtggaattttaaagaggaagtttgaagaagttgacggctcctcaccctgctcctctgtgagggaatcagatgatgaagtttccagcagtgaaagtgctgacagtggggacagtgtcaatccatccacttctagtcattttaccccttcctccattctcaaaagggagaaacgactgaggacaaagaatgtacattttagttgtgtcaccgtgtactacttcaccaggaggcaaggcttcacaagtgtgcccagtcaagggggaagcaccctggggatgtccagccgccataacagcgtgcgccagtacactcttggcgagtttgcaagggagcaggagaggctccaccgggagatgttgagagaacaccttagggaggaaaagctgaactccttaaaactaaagatgactaagaatggcacagtagaatcagaagaagccagcactcttacactggatgacatttctgatgatgacattgacctggacaacacagaggtagatgagtacttcttcctacaacctttgccaacaaaaaaacgaagagctctgctgcgtgcctctggagtgaaaaagattgacgtggaagaaaagcacgaactccgagccatccgcctctcacgagaggactgtggctgtgactgccgagtgttctgtgatccagacacgtgcacctgcagcctggctggcattaagtgccaggtggatcgtatgtctttcccatgcggctgcactaaagaaggatgtagtaacacagcaggtagaattgaatttaatcctatccgtgttcggactcactttttgcacacaataatgaaacttgaactggagaaaaaccgagagcagcaaatccccacgctgaatggctgccacagtgagataagtgctcacagtagttctatgggccctgtcgctcactccgtagaatattcaatcgcagacagttttgagattgaaactgagccccaggctgcagtgctgcacctgcagtcggctgaagaattagattgccaaggagaggaggaggaagaagaggaggatgggagcagcttttgcagcggagtcacagattctagcacgcaaagcttggcacctagtgagtcagacgaggaggaggaggaagaagaagaggaagaggaggaggaggatgacgatgatgacaaaggagatggcttcgtggaaggtttgggcacccatgccgaagttgtccctcttccttcagttctttgttattctgatggcaccgccgttcacgaaagccatgcaaagaatgcttctttttatgccaactcttcaactctgtattacc

SEQ ID NO: 267512 - DNA, 1924 bp, Artificial Sequence
  derived and/or modified sequence
attggttggctgccgcctgatggatagacgagggaggagtgtactctcttcagtgtgttctgacggagccgaagtacagaaaccatatttacaggtacatgtgacagcgttgcagctatgagtggaattttaaaggggaagtttgaagaagtcaacggctcctcaccctgctcttcagtgcaggaatcagatgatgaagttttcagctgtgacagtactgagagtgttgatagtgtcaatcgttcagttttaatgattttaccagaaaaaatgaggaaatatcaacagactgaaaatatgttttcagaggcatagaatcttcaggaaaatactggagttcctgagatctcaaggtacatgtgacagcactgcagcgatgagtggaattttaaagaggaagtttgaagaagttgacggctcctcaccctgctcctctgtgagggaatcagatgatgaagtttccagcagtgaaagtgctgacagtggggacagtgtcaatccatccacttctagtcattttaccccttcctccattctcaaaagggagaaacgactgaggacaaagaatgtacattttagttgtgtcaccgtgtactacttcaccaggaggcaaggcttcacaagtgtgcccagtcaagggggaagcaccctggggatgtccagccgccataacagcgtgcgccagtacactcttggcgagtttgcaagggagcaggagaggctccaccgggagatgttgagagaacaccttagggaggaaaagctgaactccttaaaactaaagatgactaagaatggcacagtagaatcagaagaagccagcactcttacactggatgacatttctgatgatgacattgacctggacaacacagaggtagatgagtacttcttcctacaacctttgccaacaaaaaaacgaagagctctgctgcgtgcctctggagtgaaaaagattgacgtggaagaaaagcacgaactccgagccatccgcctctcacgagaggactgtggctgtgactgccgagtgttctgtgatccagacacgtgcacctgcagcctggctggcattaagtgccaggtggatcgtatgtctttcccatgcggctgcactaaagaaggatgtagtaacacagcaggtagaattgaatttaatcctatccgtgttcggactcactttttgcacacaataatgaaacttgaactggagaaaaaccgagagcagcaaatccccacgctgaatggctgccacagtgagataagtgctcacagtagttctatgggccctgtcgctcactccgtagaatattcaatcgcagacagttttgagattgaaactgagccccaggctgcagtgctgcacctgcagtcggctgaagaattagattgccaaggagaggaggaggaagaagaggaggatgggagcagcttttgcagcggagtcacagattctagcacgcaaagcttggcacctagtgagtcagacgaggaggaggaggaagaagaagaggaagaggaggaggaggatgacgatgatgacaaaggagatggcttcgtggaaggtttgggcacccatgccgaagttgtccctcttccttcagttctttgttattctgatggcaccgccgttcacgaaagccatgcaaagaatgcttctttttatgccaactcttcaactctgtattaccaaaatgatagcggtgtgccctgcaatagtttatatcctgaacacaggtccaatcaccctcaagtggaatttcactcatacttgaaaggcccctcccaagaagggtttgtctctgcattgaatggtgacagtcacatttcagagcatcctgctgaaaattctttgagccttgcagaaaagagcatattgcatgaagagtgcatcaaatcacccgtggttgagacagtccctgtttag

SEQ ID NO: 267513 - DNA, 1854 bp, Artificial Sequence
  derived and/or modified sequence
atgaagtgcgccctgttcctgagagtgaagatcctgcagagagtgtgcagaagcagatacatcgtgcacgccggcacctgcgacagcaccgccgccatgagcggcatcctgaagagaaagttcgaggaggtggacggcagcagcccctgcagcagcgtgagagagagcgacgacgaggtgagcagcagcgagagcgccgacagcggcgacagcgtgaaccccagcaccagcagccacttcacccccagcagcatcctgaagagagagaagagactgagaaccaagaacgtgcacttcagctgcgtgaccgtgtactacttcaccagaagacagggcttcaccagcgtgcccagccagggcggcagcaccctgggcatgagcagcagacacaacagcgtgagacagtacaccctgggcgagttcgccagagagcaggagagactgcacagagagatgctgagagagcacctgagagaggagaagctgaacagcctgaagctgaagatgaccaagaacggcaccgtggagagcgaggaggccagcaccctgaccctggacgacatcagcgacgacgacatcgacctggacaacaccgaggtggacgagtacttcttcctgcagcccctgcccaccaagaagagaagagccctgctgagagccagcggcgtgaagaagatcgacgtggaggagaagcacgagctgagagccatcagactgagcagagaggactgcggctgcgactgcagagtgttctgcgaccccgacacctgcacctgcagcctggccggcatcaagtgccaggtggacagaatgagcttcccctgcggctgcaccaaggagggctgcagcaacaccgccggcagaatcgagttcaaccccatcagagtgagaacccacttcctgcacaccatcatgaagctggagctggagaagaacagagagcagcagatccccaccctgaacggctgccacagcgagatcagcgcccacagcagcagcatgggccccgtggcccacagcgtggagtacagcatcgccgacagcttcgagatcgagaccgagccccaggccgccgtgctgcacctgcagagcgccgaggagctggactgccagggcgaggaggaggaggaggaggaggacggcagcagcttctgcagcggcgtgaccgacagcagcacccagagcctggcccccagcgagagcgacgaggaggaggaggaggaggaggaggaggaggaggaggaggacgacgacgacgacaagggcgacggcttcgtggagggcctgggcacccacgccgaggtggtgcccctgcccagcgtgctgtgctacagcgacggcaccgccgtgcacgagagccacgccaagaacgccagcttctacgccaacagcagcaccctgtactaccagatcgacagccacatccccggcacccccaaccagatcagcgagaactacagcgagagagacaccgtgaagaacggcaccctgagcctggtgccctacaccatgacccccgagcagttcgtggactacgccagacaggccgaggaggcctacggcgccagccactaccccgccgccaaccccagcgtgatcgtgtgctgcagcagcagcgagaacgacagcggcgtgccctgcaacagcctgtaccccgagcacagaagcaaccacccccaggtggagttccacagctacctgaagggccccagccaggagggcttcgtgagcgccctgaacggcgacagccacatcagcgagcaccccgccgagaacagcctgagcctggccgagaagagcatcctgcacgaggagtgcatcaagagccccgtggtggagaccgtgcccgtgtag

SEQ ID NO: 267514 - DNA, 1569 bp, Artificial Sequence
  derived and/or modified sequence
acctgcgacagcaccgccgccatgagcggcatcctgaagagaaagttcgaggaggtggacggcagcagcccctgcagcagcgtgagagagagcgacgacgaggtgagcagcagcgagagcgccgacagcggcgacagcgtgaaccccagcaccagcagccacttcacccccagcagcatcctgaagagagagaagagactgagaaccaagaacgtgcacttcagctgcgtgaccgtgtactacttcaccagaagacagggcttcaccagcgtgcccagccagggcggcagcaccctgggcatgagcagcagacacaacagcgtgagacagtacaccctgggcgagttcgccagagagcaggagagactgcacagagagatgctgagagagcacctgagagaggagaagctgaacagcctgaagctgaagatgaccaagaacggcaccgtggagagcgaggaggccagcaccctgaccctggacgacatcagcgacgacgacatcgacctggacaacaccgaggtggacgagtacttcttcctgcagcccctgcccaccaagaagagaagagccctgctgagagccagcggcgtgaagaagatcgacgtggaggagaagcacgagctgagagccatcagactgagcagagaggactgcggctgcgactgcagagtgttctgcgaccccgacacctgcacctgcagcctggccggcatcaagtgccaggtggacagaatgagcttcccctgcggctgcaccaaggagggctgcagcaacaccgccggcagaatcgagttcaaccccatcagagtgagaacccacttcctgcacaccatcatgaagctggagctggagaagaacagagagcagcagatccccaccctgaacggctgccacagcgagatcagcgcccacagcagcagcatgggccccgtggcccacagcgtggagtacagcatcgccgacagcttcgagatcgagaccgagccccaggccgccgtgctgcacctgcagagcgccgaggagctggactgccagggcgaggaggaggaggaggaggaggacggcagcagcttctgcagcggcgtgaccgacagcagcacccagagcctggcccccagcgagagcgacgaggaggaggaggaggaggaggaggaggaggaggaggaggacgacgacgacgacaagggcgacggcttcgtggagggcctgggcacccacgccgaggtggtgcccctgcccagcgtgctgtgctacagcgacggcaccgccgtgcacgagagccacgccaagaacgccagcttctacgccaacagcagcaccctgtactaccagaacgacagcggcgtgccctgcaacagcctgtaccccgagcacagaagcaaccacccccaggtggagttccacagctacctgaagggccccagccaggagggcttcgtgagcgccctgaacggcgacagccacatcagcgagcaccccgccgagaacagcctgagcctggccgagaagagcatcctgcacgaggagtgcatcaagagccccgtggtggagaccgtgcccgtgtag

SEQ ID NO: 267515 - protein, 492 aa, Artificial Sequence
  derived and/or modified sequence
MNPLGSASRATVDQLTDLPSKEQLSCVVFALWPPAFSSNLSDPGVKITNEIFPVWTYSYLVLLLPVFVLTDYVRYKPVIILQGISFIITWLLLLFGQGVKTMQVVEFFYGMVTAAEVAYYAYIYSVVSPEHYQRVSGYCRSVTLAAYTAGSVLAQLLVSLANMSYFYLNVISLASVSVAFLFSLFLPMPKKSMFFHAKPSREIKKSSSVNPVLEETHEGEAPGCEEQKPTSEILSTSGKLNKGQLNSLKPSNVTVDVFVQWFQDLKECYSSKRLFYWSLWWAFATAGFNQVLNYVQILWDYKAPSQDSSIYNGAVEAIATFGGAVAAFAVGYVKVNWDLLGELALVVFSVVNAGSLFLMHYTANIWACYAGYLIFKSSYMLLITIAVFQIAVNLNVERYALVFGINTFIALVIQTIMTVIVVDQRGLNLPVSIQFLVYGSYFAVIAGIFLMRSMYITYSTKSQKDVQSPAPSENPDVSHPEEESNIIMSTKL

SEQ ID NO: 267516 - DNA, 1479 bp, Artificial Sequence
  derived and/or modified sequence
atgaacccactggggtccgcctcccgcgctactgtagaccagttaaccgatctcccctctaaggagcagctcagctgtgttgtgtttgcactgtggccacctgcattctctagcaatttaagcgacccaggagtcaaaattacgaacgaaattttccccgtgtggacatattcttatctggtgctactcctgcccgttttcgtgttaactgattacgtccgttataagcccgtcatcatcctgcaggggattagctttataatcacctggctgcttctgctgtttggacagggcgtgaaaaccatgcaggtggtggaattcttttatggaatggtcactgctgccgaagtagcatactatgcgtacatctattctgtggtgtcaccggaacattatcagcgggtgtccggctactgtaggagcgtgactctggcagcctataccgccggctcagtactggctcaacttctggtgagcctggcaaacatgtcatacttctatttgaatgtcatctctcttgcctccgtgagcgtggcttttctgtttagcctgttcctgcctatgcccaagaagagcatgtttttccatgccaaaccttcccgggagatcaagaaatcctccagtgtgaacccggttctagaggagacgcatgaaggggaagcacctgggtgcgaagagcaaaaacccacctcagaaattctgtccactagtggcaaactgaataaaggacaactgaacagcctgaagcccagtaacgttactgtggatgtgttcgtccagtggttccaggacttaaaggagtgttacagctctaaacggctattctactggtccctctggtgggcctttgccaccgccggcttcaaccaggttctgaattatgtgcagatcctgtgggattataaagcccccagccaggactccagcatctataatggggccgttgaggctattgctaccttcggcggggccgtggccgctttcgctgtgggctacgtcaaggtgaactgggacctgcttggggaactcgcactggtggtatttagcgtggttaatgctggctccctgttcctgatgcactacaccgccaacatatgggcgtgctacgctgggtacctgatctttaagtccagttatatgcttctgataacaattgcagtgtttcaaattgctgttaatctgaatgtcgaaaggtacgcactggtgttcggaataaacacttttatcgctctggtgatacagactattatgacagttatcgtagtcgaccaacgtggactgaacctcccagtttccattcagttcctcgtgtatggatcatattttgctgtaattgccggaatattcttgatgaggtccatgtatatcacctactccaccaaatcacaaaaggacgtgcagtcaccagctcccagtgaaaaccctgacgtgtcgcatccggaagaggagagcaatatcatcatgtcaacgaagctgtag

SEQ ID NO: 267517 - DNA, 1479 bp, Artificial Sequence
  derived and/or modified sequence
atgaaccccctgggcagcgccagccgggccaccgtggaccagctgacagacctgcccagcaaggagcagctgagctgtgtggtgtttgccctgtggcccccagccttcagcagcaacctgagtgaccccggggtgaagatcaccaatgagatcttccctgtgtggacctacagctacctggtgctgctgctgcctgtgtttgtgctgacagattatgtgcgctacaagcctgtgatcatcctgcagggcatctccttcatcatcacctggctgctgctgctgtttggccagggcgtgaagaccatgcaggtggtggagttcttctacggcatggtgacagctgctgaggtggcctactatgcctacatctacagcgtggtgtccccagagcactaccagagggtgtctggctactgccgctctgtgaccctggccgcctacacagctggctctgtgctggcccagctgctggtgtccctggccaacatgagctacttctacctgaatgtcatcagcctggcctctgtgtctgtggccttcctgttcagcctcttcctgcccatgcccaagaagtccatgttcttccacgccaagcccagccgggagatcaagaagagcagctctgtgaaccctgtgctggaggagacccatgaaggagaggcccctggctgtgaggagcagaagcccaccagcgagatcctgagcaccagcggcaagctgaacaagggccagctgaacagcctgaagcccagcaatgtgacagtggatgtgtttgtgcagtggttccaggacctgaaggagtgctacagcagcaagaggctcttctactggagcctgtggtgggcctttgccacagctggcttcaaccaggtgctgaactacgtgcagatcctgtgggactacaaggcccccagccaggacagcagcatctacaacggggctgtggaggccatcgccacctttggaggagctgtggccgcctttgctgtgggctacgtgaaggtgaactgggacctgctgggggagctggccctggtggtgttttctgtggtgaatgccggcagcctcttcctgatgcactacacagccaacatctgggcctgctacgccggctacctgatcttcaagagcagctacatgctgctgatcaccatcgctgtgttccagattgctgtgaacctgaatgtggagagatatgccctggtgtttggcatcaacaccttcatcgccctggtgatccagaccatcatgaccgtcatcgtggtggaccagaggggcctgaacctgcctgtgtccatccagttcctggtgtatggcagctactttgctgtgattgctggcatcttcctgatgaggtccatgtacatcacctacagcaccaagagccagaaggatgtgcagagccctgcccccagtgaaaatccagatgtgagccaccctgaggaggagagcaacatcatcatgagcaccaagctgtag

SEQ ID NO: 267518 - DNA, 1479 bp, Artificial Sequence
  derived and/or modified sequence
atgaaccccctgggcagcgccagccgggccaccgtggaccagctgacagacctcccctccaaagaacagctcagctgcgtggtgtttgctctctggccacctgctttttcctccaatctgtccgaccccggagttaaaatcaccaatgagatctttcctgtgtggacttacagctatctggtgctgttgcttcctgtctttgttctcaccgactacgtgcgatacaagcctgtcatcatcctgcaagggatctcatttataattacatggttgctgttgctgttcggtcaaggagtgaagaccatgcaagtggtggaattcttttacggcatggtgacggccgcagaagtggcttactacgcctacatttacagcgtggtatctcctgaacactaccagcgggttagcggttattgcagatctgtgaccctcgcagcttatacagctggatcagtcctcgcgcagctgctagtgagcctcgccaacatgagttacttttacctaaacgttatctcattggcgagcgtgagtgtcgccttcctgttcagcttgtttcttcccatgcccaagaaaagcatgtttttccatgcgaagcccagcagggagattaagaaatccagcagcgtcaatcctgtcctggaggaaacacatgaaggcgaagcgcctggctgcgaggagcaaaagcccacttctgagattctttcaacctcgggaaagctcaacaagggccagctgaactcactcaaacccagcaacgtgaccgttgacgtgtttgtccagtggtttcaggacctgaaggaatgctactcttctaagcgtctattttactggtcactgtggtgggcttttgcaactgcggggtttaaccaggtgctgaactacgttcagatcttgtgggactacaaggcaccttctcaggattctagtatctacaacggggcagtggaagcaattgctacgttcggtggagcggtggctgcctttgccgtcgggtatgtgaaggtgaactgggacctcctgggggaactagcacttgtggttttttctgtagtgaatgccggatccctgttcctcatgcactacacagcaaacatctgggcgtgctacgcggggtacctgatatttaaaagctcatacatgctgctcataaccatagcagtattccagatcgccgtgaatcttaatgtagaacgttacgcactggtgttcggcatcaacacttttatagctctagtgattcagactattatgactgtaattgtggtggaccagaggggccttaatttgccagtaagcatacagtttctagtgtacggctcctacttcgcggttatcgctggcatcttcttgatgagatcaatgtatattacatactccaccaagagtcagaaagatgtgcagagccccgctccctctgaaaacccagatgtttcccatccagaggaggaatcaaacatcatcatgtccacaaaactgtag

SEQ ID NO: 267519 - DNA, 1479 bp, Artificial Sequence
  derived and/or modified sequence
atgaatccactggggtcagcgagtcgggcaaccgtggaccagctcacggacttgccaagcaaagaacaactgtcatgcgttgtgtttgccctgtggccacctgcattctctagtaacctgagcgatcccggtgtcaaaatcacaaacgagatctttcctgtgtggacctactcctacctggttctgctgctaccagtgtttgttcttaccgattatgtgagatacaagccagttattattctccagggcatcagttttatcatcacttggctcctgctcctgtttgggcagggtgttaagaccatgcaagttgtggagttcttctacggtatggtgaccgcagctgaggtggcgtactacgcctacatctacagcgtcgtgtctcccgaacattaccagagagtgagcgggtattgtaggtcggtaacacttgccgcatacactgcaggttctgtgctggcccagctgctggtctcactggcaaacatgagctacttctacttgaacgtcatctccttggccagcgtttccgtcgctttcctcttcagtctgtttctgccgatgccaaaaaagtccatgtttttccatgcaaagccttcccgagagatcaagaagtcatcttcagttaatcccgtgcttgaagaaacacatgaaggggaggcccctgggtgcgaggagcaaaaacccacaagcgaaatcctgtccacctccgggaaactgaataaagggcagcttaattcgctgaagccaagtaacgtaacggtcgacgttttcgtgcagtggttccaagatctgaaagagtgttattcctctaaaagactcttttattggtctctgtggtgggcctttgccaccgccggatttaaccaagtgctcaattacgtccagatcctgtgggactacaaggcccctagtcaagattctagcatctacaatggggctgtggaggccatcgctacattcgggggtgccgtggctgcattcgcggtggggtatgtcaaagttaattgggacctgctcggagaactggcgcttgtggttttttctgtcgtgaatgctggatcactttttctgatgcactacaccgctaatatttgggcttgctatgccggatatttgatctttaagagcagttatatgttacttattactattgctgtatttcaaatcgcagtaaacttaaatgtcgagaggtacgctctggtctttggcattaatacattcatagccctggtaattcaaaccataatgaccgtgatcgtggtggatcagagaggtttgaacctcccagtcagcatccagtttctagtctacggtagctactttgcagtgatcgctgggatctttctcatgagaagcatgtatatcacatattccaccaaaagccaaaaagacgtgcaaagtcccgctccctctgagaaccctgatgtcagtcaccctgaggaagagagtaatattatcatgtccaccaagctctag

SEQ ID NO: 267520 - DNA, 1954 bp, Artificial Sequence
  derived and/or modified sequence
gggtgcgtggtcgtgcggcaagtgagcgatttggtgaacagacactcccttctgtagccatggattgttacagaacttcactaagcagttcctggatttaccccactgtgatcctctgcttatttggttttttctccatgatgagaccctcagaaccattccttatcccatatttatctggaccagataaaaacctgaccagtgcagaggttgaagcatgccacaattaagacaacaaaggacagatgcagggtcagaagcaactcaatgaatccactgggttctgcttctcgagccactgtggaccagttaacagaccttccctccaaggagcagctcagttgtgtggtctttgctctgtggcctcctgctttctccagcaacctcagtgatccaggtgtcaagataacaaatgagatcttccccgtttggacatactcctacctggtgctgctgctgcctgtgtttgtcctcaccgattatgtccgctacaagccagtcatcatcttgcaaggtatcagtttcatcattacctggctgctgctgttgtttggccaaggagtgaagaccatgcaggttgtagagttcttctatgggatggtcaccgccgccgaggtggcctactacgcctacatatacagcgtggtcagccccgagcactaccagagagtgagcggctactgcaggagcgtcacgctggccgcctacacagcagggtcggtgctggctcaactcttggtatccctggcgaacatgtcgtacttttacctcaacgtcatatccttggcctctgtctccgtggctttccttttctcacttttcctaccaatgcccaagaaaagcatgttttttcatgcaaaacccagcagagaaataaagaagtcatcaagcgtgaatccagtattagaggaaactcacgaaggtgaagcaccaggctgtgaagagcagaaacccacatcagaaatactcagcacttcagggaagctgaataagggccagctgaacagcctgaaaccaagcaatgtgactgtggacgtttttgtgcagtggttccaagatttgaaggagtgctactcctcaaaacgtcttttctactggtctctatggtgggctttcgccacagcaggttttaaccaggttttgaactatgttcaaatcctgtgggattacaaggcgccatcccaagattcttccatctataatggggccgtagaagctattgcaacctttggaggggctgtggctgcctttgcagtgggttatgtgaaagtcaactgggaccttctgggagagctggctctggtggtcttctcagttgtcaatgccggttctttatttctcatgcattacacagccaatatctgggcgtgctatgctggctatttgatattcaagtccagctatatgcttcttataaccatagcagtatttcagattgcagttaatctgaatgtggaacgctatgccttggtatttggaatcaacacctttattgccttggtgattcagaccatcatgactgtgattgtagtagatcagagagggctcaacttgccagtcagcattcagtttttagtttatgggagctattttgcagtaattgctggaattttcctaatgagaagcatgtatattacctactcaaccaaatcccagaaggatgtacagagccctgctccaagtgagaatccagatgtgtctcacccagaggaagagagtaatatcatcatgtcaacaaaactctaacctcatcgcaacaaacgcaacagtggctttcaaagttatgcaataataaggaaagattttgagatgggtggcatatgttttgccataacttgacatgctttgcaaatctggattccaatggacctttcaaaaccacaacaaaacctcagttttagatgagttctctatgtgaccaattttactggatgcaattgacaggacccgtcat

SEQ ID NO: 267521 - DNA, 1479 bp, Artificial Sequence
  derived and/or modified sequence
atgaaccccctgggcagcgccagcagagccaccgtggaccagctgaccgacctgcccagcaaggagcagctgagctgcgtggtgttcgccctgtggccccccgccttcagcagcaacctgagcgaccccggcgtgaagatcaccaacgagatcttccccgtgtggacctacagctacctggtgctgctgctgcccgtgttcgtgctgaccgactacgtgagatacaagcccgtgatcatcctgcagggcatcagcttcatcatcacctggctgctgctgctgttcggccagggcgtgaagaccatgcaggtggtggagttcttctacggcatggtgaccgccgccgaggtggcctactacgcctacatctacagcgtggtgagccccgagcactaccagagagtgagcggctactgcagaagcgtgaccctggccgcctacaccgccggcagcgtgctggcccagctgctggtgagcctggccaacatgagctacttctacctgaacgtgatcagcctggccagcgtgagcgtggccttcctgttcagcctgttcctgcccatgcccaagaagagcatgttcttccacgccaagcccagcagagagatcaagaagagcagcagcgtgaaccccgtgctggaggagacccacgagggcgaggcccccggctgcgaggagcagaagcccaccagcgagatcctgagcaccagcggcaagctgaacaagggccagctgaacagcctgaagcccagcaacgtgaccgtggacgtgttcgtgcagtggttccaggacctgaaggagtgctacagcagcaagagactgttctactggagcctgtggtgggccttcgccaccgccggcttcaaccaggtgctgaactacgtgcagatcctgtgggactacaaggcccccagccaggacagcagcatctacaacggcgccgtggaggccatcgccaccttcggcggcgccgtggccgccttcgccgtgggctacgtgaaggtgaactgggacctgctgggcgagctggccctggtggtgttcagcgtggtgaacgccggcagcctgttcctgatgcactacaccgccaacatctgggcctgctacgccggctacctgatcttcaagagcagctacatgctgctgatcaccatcgccgtgttccagatcgccgtgaacctgaacgtggagagatacgccctggtgttcggcatcaacaccttcatcgccctggtgatccagaccatcatgaccgtgatcgtggtggaccagagaggcctgaacctgcccgtgagcatccagttcctggtgtacggcagctacttcgccgtgatcgccggcatcttcctgatgagaagcatgtacatcacctacagcaccaagagccagaaggacgtgcagagccccgcccccagcgagaaccccgacgtgagccaccccgaggaggagagcaacatcatcatgagcaccaagctgtag

SEQ ID NO: 267522 - DNA, 252 bp, Artificial Sequence
  derived and/or modified sequence
atggggggtcttttctctagatggcggactaagccatcaacagtcgaggtgctggaatcaattgataaagagatacaagctttagaagaatttagagagaaaaatcagcgactccagaagctttgggtgggccgcctcatcctctacagctccgtcctttatctgttcacatgtctgatcgtttacttatggtacctgcctgacgaattcacggcaagattggctatgactcttcccttcttcgctttctag

SEQ ID NO: 267523 - DNA, 252 bp, Artificial Sequence
  derived and/or modified sequence
atgggcggcctcttcagccgctggaggaccaagcccagcacagtggaggtgctggagagcattgacaaggagatccaggccctggaggagttccgggagaagaaccagaggctgcagaagctgtgggtgggccgcctcatcctgtacagctctgtgctgtacctgttcacctgcctgattgtgtacctgtggtacctgcctgatgagttcaccgcccggctggccatgaccctgcccttctttgccttctag

SEQ ID NO: 267524 - DNA, 252 bp, Artificial Sequence
  derived and/or modified sequence
atgggcggcctgttcagccggtggcggaccaagcccagcaccgtggaggtgctggagtctattgacaaggaaatccaagccctagaagaatttcgcgaaaagaaccagcgtctgcagaagctctgggtagggagactcattctctactctagcgttctgtaccttttcacctgcttgatcgtgtacctgtggtacctgccagacgagttcaccgctcgacttgctatgacgcttccattttttgcattttag

SEQ ID NO: 267525 - DNA, 252 bp, Artificial Sequence
  derived and/or modified sequence
atgggcggacttttcagccggtggcgcaccaaacctagtacagtggaagtgcttgagtctatcgataaagaaattcaggcactggaagagtttcgggagaagaaccagcggctgcagaagttgtgggttgggcgattgattctttatagcagtgtcttgtacttgttcacctgcttgattgtctacttgtggtatctacctgatgaatttaccgcgcgtttggccatgactctgcccttcttcgctttttag

SEQ ID NO: 267526 - DNA, 252 bp, Artificial Sequence
  derived and/or modified sequence
atgggcggcctgttcagcagatggagaaccaagcccagcaccgtggaggtgctggagagcatcgacaaggagatccaggccctggaggagttcagagagaagaaccagagactgcagaagctgtgggtgggcagactgatcctgtacagcagcgtgctgtacctgttcacctgcctgatcgtgtacctgtggtacctgcccgacgagttcaccgccagactggccatgaccctgcccttcttcgccttctag

SEQ ID NO: 267527 - protein, 279 aa, Artificial Sequence
  derived and/or modified sequence
MTLPFFAFPLIIWSIRTVIIFFFSKRTERNNEALDDLKSQRKKILEEVMEKETYKTAKLILERFDPDSKKAKECEPPSAGAAVTARPGQEIRQRTAAQRNLSPTPASPNQGPPPQVPVSPGPPKDSSAPGGPPERTVTPALSSNVLPRHLGSPATSVPGMGLHPPGPPLARPILPRERGALDRIVEYLVGDGPQNRYALICQQCFSHNGMALKEEFEYIAFRCAYCFFLNPARKTRPQAPRLPEFSFEKRQVVEGSSSVGPLPSGSVLSSDNQFNEVQY

SEQ ID NO: 267528 - DNA, 840 bp, Artificial Sequence
  derived and/or modified sequence
atgactctgccattcttcgcttttcctttgattatctggagcattagaaccgttatcatcttcttcttttctaagaggaccgaaaggaataacgaggccctcgacgatctgaagtcgcagcgcaaaaagatccttgaggaagttatggaaaaggaaacgtacaaaacagctaaactcatactagagcgttttgacccagactcaaagaaggccaaggagtgtgagccaccatctgccggcgccgccgtaaccgcccgtcccgggcaggaaatccgacagcgcactgcggctcagcggaatctgtctcccacccctgcctcacctaaccaagggcctccaccacaggtgcctgttagtcccggccccccaaaagattcctctgcccctggtgggcctccagaaagaactgtgacaccggcactcagctcgaacgtgcttcctcgacatctgggctcccctgcaacatcagtcccaggaatgggcctacatccgcctggtccccctctcgcaagaccaatcctaccccgcgagagaggagctcttgatagaattgtcgagtacctagttggcgacggcccccagaatcgctacgcccttatctgccagcagtgcttttctcataatggcatggctctaaaagaggagttcgagtatatcgcctttcgatgtgcctactgttttttcttgaaccctgcaaggaagaccagacctcaggcgccccggctcccggaattttccttcgagaaacggcaggtggtggaaggctccagcagcgttgggcctctgccctctggaagtgtgttgtccagtgataatcaatttaatgaggtccagtactag

SEQ ID NO: 267529 - DNA, 840 bp, Artificial Sequence
  derived and/or modified sequence
atgaccctgcccttctttgccttccccctcatcatctggagcatcagaactgtcatcatcttcttcttcagcaagaggacagaaagaaataatgaggccctggatgacctgaagagccagaggaagaagatcctggaggaggtgatggagaaggagacctacaagacagccaagctgatcctggagagatttgatcctgacagcaagaaggccaaggaatgtgagccccccagcgctggagctgctgtgacagcccggcccggccaggagatccggcagaggacagctgcccagaggaacctgagccccaccccagccagccccaaccagggccccccaccccaggtgcctgtgtccccaggcccccccaaggacagcagcgcccctgggggccccccagagaggacagtgaccccagccctgagcagcaatgtgctgcccaggcacctgggcagccctgccacctctgtgcccggcatgggcctgcaccccccaggcccccccctggcccggcccatcctgccccgggagcggggggccctggaccgcatcgtggagtacctggtgggagatggcccccagaacagatatgccctgatctgccagcagtgcttcagccacaacggcatggccctgaaggaggagtttgagtacatcgccttccgctgtgcctactgcttcttcctgaacccagccaggaagacccggccccaggccccccggctgcctgagttctcctttgagaagaggcaggtggtggagggcagcagctctgtgggccccctgcccagcggctctgtgctgagcagtgacaaccagttcaatgaggtgcagtactag

SEQ ID NO: 267530 - DNA, 840 bp, Artificial Sequence
  derived and/or modified sequence
atgaccctgcccttcttcgccttccccctgatcatctggagcatccgaaccgtgataattttcttcttctcaaagcggactgaaagaaacaacgaggcattagacgacctcaagagccaacgcaaaaagatactcgaagaggtcatggagaaggaaacgtacaaaacagccaaactgatattagaacgcttcgatcccgactctaagaaggctaaggagtgcgagcctccatctgcgggggctgcggtcaccgcaaggccaggccaggaaattcgccagcggaccgccgcccaacggaatctctccccaaccccggcctccccaaaccaaggacctcccccacaggttcccgtgagcccaggaccgcctaaagacagcagcgcccccggtggaccccccgagagaaccgtgacgccagccttgtcatcaaacgtgctgcctcgccacttaggatcaccggcaacctccgtgccaggaatggggcttcacccccctggtccgccgctggcaagacccatcctgcctcgagagcgcggagctctcgaccgcattgtggagtacctggttggagacggcccccagaatcgctatgcgttgatttgtcaacaatgcttctcccacaacggcatggcactgaaagaagaatttgagtatatcgctttcaggtgtgcatattgcttttttctgaacccagcacggaagacaagaccacaggccccacgcctccccgaattcagtttcgaaaagaggcaggtcgtggaagggagctccagcgttggaccccttccgagtggttccgtgctttcaagtgataaccagttcaacgaggtgcagtactag

SEQ ID NO: 267531 - DNA, 840 bp, Artificial Sequence
  derived and/or modified sequence
atgaccctccccttcttcgcctttccgctcattatttggtccattcgtacagtaattatattctttttcagtaagcgcaccgaaaggaacaacgaagccttagatgatctgaaatcgcagagaaagaagatcctggaggaagtcatggaaaaggaaacctacaagacagccaaactcatccttgagcgatttgatcccgacagcaaaaaggccaaagaatgcgaacctccctccgccggagcagcagtgacagcccgacccggacaggagatccggcagcggacagccgcacagcgtaatctgtccccgacccctgccagtccaaatcagggtcctccaccacaggtgcctgtgtcccccggaccaccaaaagactcctctgcacccggaggccctccggagcgcaccgttacccctgcactgtccagtaacgtcctccctcgccatctcggtagccctgcaacaagcgttcccggaatgggcttgcatccaccaggaccaccccttgccaggccaatactcccgagagaacgcggtgctctggataggatagtcgagtacctggttggagatggaccccagaatcggtatgctttgatctgccagcagtgtttctcccacaatggcatggccctgaaggaggagtttgagtatattgcttttcgctgcgcatactgcttttttctgaacccggcacgcaaaacgaggcctcaggctcctagactccccgagttcagctttgagaaaaggcaggtggtcgaggggtccagcagtgtggggccattgccaagtggttccgttcttagctctgataaccaatttaacgaagtgcagtattag

SEQ ID NO: 267532 - DNA, 2028 bp, Artificial Sequence
  derived and/or modified sequence
ccggcttgtctctctgtcagtggcggctgctgcctgctctggaggcaggctgggcggtggcggccgagactggcgggggtggacgcccgggccgggctgcgcccgcttcttgcagctgtgaattcctttggacaattgatgatatttatcattgtgcccagtttctacaaataaaagatgggtggattattttctcgatggaggcatctggagcataagaacagtaattattttcttcttttccaagagaacagaaagaaataatgaagcattggatgatttaaaatcccagaggaaaaaaatacttgaagaagtcatggaaaaagaaacttacaagacggctaaattaattcttgaaaggtttgatccggactcaaagaaagcaaaggagtgtgagccgccatctgctggagcagctgtaactgcaagacctggacaagagattcgtcagcgaactgcagctcaaagaaacctttctccaacaccagcaagccctaaccagggccctcctccacaagttccagtatctcctggaccaccaaaggacagttctgcccctggtggacccccagaaaggactgttactccagccctatcatcaaatgtgttaccaagacatcttggatcccctgctacttcagtgcctggaatgggtcttcatcctccaggtccacctttagcaagacctattctcccccgagaacgaggtgctttggatagaattgttgaatatttggttggtgatggtccacaaaacaggtatgcacttatatgtcagcagtgtttttctcataatggcatggctttgaaggaagaatttgaatacattgcttttcgatgtgcctactgttttttcttgaaccctgcaagaaaaaccagacctcaggctccaagacttcctgagtttagttttgagaagaggcaggtggtggaaggttcaagttcagttggtcccttgccatcaggaagtgtgctttcatcagacaaccagtttaatgaagaatctttagaacacgatgttcttgatgataatacagagcagacagatgacaaaataccagctacagaacagacaaaccaagtgattgaaaaagcatctgactcagaggaaccagaggagaaacaagagactgagaatgaggaagcctcagtgattgaaaccaactccacagttcctggagctgattctattcctgatcctgaactaagtggagaatctttgacggcagagtagtaaatgcttccacgtgccttcaactggatatttatagtcttactgatgtcagttattgctttttcggtggcacttactttttttgcccctctaagggtatgcttgtgtatcatttgaattcagattgcctagctatttgaacatctcaaagttatatatactgggtattaaaattaaaagcaagttatatcagtgaagtaagatccttttgaatgtacaaagacccacactattgagacagcttttagatacttttttgtccattctaaaagtaagcaaacatgattgccttcttgttttctgtatgtataacccgtaaatatccattttgacataggaagaactttggttaagagtaagttctctaattgtgtttgttttaaggaatgaaacttggttaagattttgactacttcattattaaaaattgatagaattttagctcctgagatatttacaactgggagaaatgtctatttaggtgtttacattaagcggtatgaaagttgttaccacataggcactggtacgaattctcaataagaatgcagtggaacagttaagtagaactgtaactacgttggcactggtacgaattctcagtgagaatgcaatgaaacagtcaactgcagtgtttctttttgatgtcttttattttacaactgggccaaaggcacattatgtatataattagtttatatttacacactagcatataggaaatatttctgcacttgaccctatttgaattctgagcattatttataagtataaaatgatgatatataagtgaa

SEQ ID NO: 267533 - DNA, 840 bp, Artificial Sequence
  derived and/or modified sequence
atgaccctgcccttcttcgccttccccctgatcatctggagcatcagaaccgtgatcatcttcttcttcagcaagagaaccgagagaaacaacgaggccctggacgacctgaagagccagagaaagaagatcctggaggaggtgatggagaaggagacctacaagaccgccaagctgatcctggagagattcgaccccgacagcaagaaggccaaggagtgcgagccccccagcgccggcgccgccgtgaccgccagacccggccaggagatcagacagagaaccgccgcccagagaaacctgagccccacccccgccagccccaaccagggcccccccccccaggtgcccgtgagccccggcccccccaaggacagcagcgcccccggcggcccccccgagagaaccgtgacccccgccctgagcagcaacgtgctgcccagacacctgggcagccccgccaccagcgtgcccggcatgggcctgcacccccccggcccccccctggccagacccatcctgcccagagagagaggcgccctggacagaatcgtggagtacctggtgggcgacggcccccagaacagatacgccctgatctgccagcagtgcttcagccacaacggcatggccctgaaggaggagttcgagtacatcgccttcagatgcgcctactgcttcttcctgaaccccgccagaaagaccagaccccaggcccccagactgcccgagttcagcttcgagaagagacaggtggtggagggcagcagcagcgtgggccccctgcccagcggcagcgtgctgagcagcgacaaccagttcaacgaggtgcagtactag

SEQ ID NO: 267534 - protein, 464 aa, Artificial Sequence
  derived and/or modified sequence
MDFSRNLYDIGEQLDSEDLASLKFLSLDYIPQRKQEPIKDALMLFQRLQEKRMLEESNLSFLKELLFRINRLDLLITYLNTRKEEMERELQTPGRAQISAYRVMLYQISEEVSRSELRSFKFLLQEEISKCKLDDDMNLLDIFIEMEKRVILGEGKLDILKRVCAQINKSLLKIINDYEEFSKGEELCGVMTISDSPREQDSESQTLDKVYQMKSKPRGYCLIINNHNFAKAREKVPKLHSIRDRNGTHLDAGALTTTFEELHFEIKPHDDCTVEQIYEILKIYQLMDHSNMDCFICCILSHGDKGIIYGTDGQEAPIYELTSQFTGLKCPSLAGKPKVFFIQACQGDNYQKGIPVETDSEEQPYLEMDLSSPQTRYIPDEADFLLGMATVNNCVSYRNPAEGTWYIQSLCQSLRERCPRGDDILTILTEVNYEVSNKDDKKNMGKQMPQPTFTLRKKLVFPSD

SEQ ID NO: 267535 - DNA, 2650 bp, Artificial Sequence
  derived and/or modified sequence
gtagagctggctggctgtgcccttccgtccttcattagacgtttgctcttgtcttagatgctcagatggtagtggataggcctgtgacgaaggtgctaccatcgtgagagtaagattatattctcctgccttttaaaaagatggacttcagcagaaatctttatgatattggggaacaactggacagtgaagatctggcctccctcaagttcctgagcctggactacattccgcaaaggaagcaagaacccatcaaggatgccttgatgttattccagagactccaggaaaagagaatgttggaggaaagcaatctgtccttcctgaaggagctgctcttccgaattaatagactggatttgctgattacctacctaaacactagaaaggaggagatggaaagggaacttcagacaccaggcagggctcaaatttctgcctacagggtcatgctctatcagatttcagaagaagtgagcagatcagaattgaggtcttttaagtttcttttgcaagaggaaatctccaaatgcaaactggatgatgacatgaacctgctggatattttcatagagatggagaagagggtcatcctgggagaaggaaagttggacatcctgaaaagagtctgtgcccaaatcaacaagagcctgctgaagataatcaacgactatgaagaattcagcaaaggggaggagttgtgtggggtaatgacaatctcggactctccaagagaacaggatagtgaatcacagactttggacaaagtttaccaaatgaaaagcaaacctcggggatactgtctgatcatcaacaatcacaattttgcaaaagcacgggagaaagtgcccaaacttcacagcattagggacaggaatggaacacacttggatgcaggggctttgaccacgacctttgaagagcttcattttgagatcaagccccacgatgactgcacagtagagcaaatctatgagattttgaaaatctaccaactcatggaccacagtaacatggactgcttcatctgctgtatcctctcccatggagacaagggcatcatctatggcactgatggacaggaggcccccatctatgagctgacatctcagttcactggtttgaagtgcccttcccttgctggaaaacccaaagtgttttttattcaggcttgtcagggggataactaccagaaaggtatacctgttgagactgattcagaggagcaaccctatttagaaatggatttatcatcacctcaaacgagatatatcccggatgaggctgactttctgctggggatggccactgtgaataactgtgtttcctaccgaaaccctgcagagggaacctggtacatccagtcactttgccagagcctgagagagcgatgtcctcgaggcgatgatattctcaccatcctgactgaagtgaactatgaagtaagcaacaaggatgacaagaaaaacatggggaaacagatgcctcagcctactttcacactaagaaaaaaacttgtcttcccttctgattgatggtgctattttgtttgttttgttttgttttgtttttttgagacagaatctcgctctgtcgcccaggctggagtgcagtggcgtgatctcggctcaccgcaagctccgcctcccgggttcaggccattctcctgcctcagcctcccgagtagctgggactacaggggcccgccaccacacctggctaattttttaaaaatatttttagtagagacagggtttcactgtgttagccagggtggtcttgatctcctgacctcgtgatccacccacctcggcctcccaaagtgctgggattacaggcgtgagccaccgcgcctggccgatggtactatttagatataacactatgtttatttactaattttctagattttctactttattaattgttttgcacttttttataagagctaaagttaaataggatattaacaacaataacactgtctcctttctcttatgcttaaggctttgggaatgtttttagctggtggcaataaataccagacacgtacaaaatccagctatgaatatagagggcttatgattcagattgttatctatcaactataagcccactgttaatattctattaactttaattctctttcaaagctaaattccacactaccacattaaaaaaattagaaagtagccacgtatggtggctcatgtctataatcccagcactttgggaggttgaggtgggaggattgcttgaacccaagaggtcaaggctgcagtgagccatgttcacaccgctgcactcaagcttgggtgacagaacaagaccccgtctcaaaaaaaattttttttttaataaaacaaaatttgtttgaaatcttttaaaaattcaaatgatttttacaagttttaaataagctctccccaaacttgctttatgccttcttattgcttttatgatatatatatgcttggctaactatatttgctttttgctaacaatgctctggggtctttttatgcatttgcatttgctctttcatctctgcttggattattttaaatcattaggaattaagttatctttaaaatttaagtatcttttttcaaaaacattttttaatagaataaaatataatttgatctta

SEQ ID NO: 267536 - DNA, 1283 bp, Artificial Sequence
  derived and/or modified sequence
gaagttttctctttctctcggagaccagattctgcctttctgctggagggaagtgttttcacagattatattctcctgccttttaaaaagatggacttcagcagaaatctttatgatattggggaacaactggacagtgaagatctggcctccctcaagttcctgagcctggactacattccgcaaaggaagcaagaacccatcaaggatgccttgatgttattccagagactccaggaaaagagaatgttggaggaaagcaatctgtccttcctgaaggagctgctcttccgaattaatagactggatttgctgattacctacctaaacactagaaaggaggagatggaaagggaacttcagacaccaggcagggctcaaatttctgcctacagggtcatgctctatcagatttcagaagaagtgagcagatcagaattgaggtcttttaagtttcttttgcaagaggaaatctccaaatgcaaactggatgatgacatgaacctgctggatattttcatagagatggagaagagggtcatcctgggagaaggaaagttggacatcctgaaaagagtctgtgcccaaatcaacaagagcctgctgaagataatcaacgactatgaagaattcagcaaaggggaggagttgtgtggggtaatgacaatctcggactctccaagagaacaggatagtgaatcacagactttggacaaagtttaccaaatgaaaagcaaacctcggggatactgtctgatcatcaacaatcacaattttgcaaaagcacgggagaaagtgcccaaacttcacagcattagggacaggaatggaacacacttggatgcagggtctcactctgttgcccaggctggagtgcagtggtgtgatctcagctcactgcagcctccacctccctggttcaagtgattctcctgcctcagcctcccaagtagctgggactacaggcacacaccaccacacatggctaatttttgtatttttagtagagatggggttttgccatattggccaggctggtcttgaactcctgacctcaagtgatccgcctgcctcggcctcccaaagtgctggaattacaggtgtcagccacctgtacctggtccctgctaacatttgatttgtttatttaagcaaatctaagcctttaaaaaggcacagagattaagtccattgattacatcattcgtcactatgcgcttggtattgaaaaaaatattttggacccttgatttgtattcttttaaaattaaaacatttctatt

SEQ ID NO: 267537 - DNA, 1627 bp, Artificial Sequence
  derived and/or modified sequence
gtgctctgagtttttggtttctgtttcaccttgtgtctgagctggtctgaaggctggttgttcagactgagcttcctgcctgcctgtaccccgccaacagcttcagaagaaggagcagcccctgggtgcgtccactttctgggcacgtgaggttgggccttggccgcctgagcccttgagttggtcacttgaaccttgggaatattgagattatattctcctgccttttaaaaagatggacttcagcagaaatctttatgatattggggaacaactggacagtgaagatctggcctccctcaagttcctgagcctggactacattccgcaaaggaagcaagaacccatcaaggatgccttgatgttattccagagactccaggaaaagagaatgttggaggaaagcaatctgtccttcctgaaggagctgctcttccgaattaatagactggatttgctgattacctacctaaacactagaaaggaggagatggaaagggaacttcagacaccaggcagggctcaaatttctgcctacagggtcatgctctatcagatttcagaagaagtgagcagatcagaattgaggtcttttaagtttcttttgcaagaggaaatctccaaatgcaaactggatgatgacatgaacctgctggatattttcatagagatggagaagagggtcatcctgggagaaggaaagttggacatcctgaaaagagtctgtgcccaaatcaacaagagcctgctgaagataatcaacgactatgaagaattcagcaaaggggaggagttgtgtggggtaatgacaatctcggactctccaagagaacaggatagtgaatcacagactttggacaaagtttaccaaatgaaaagcaaacctcggggatactgtctgatcatcaacaatcacaattttgcaaaagcacgggagaaagtgcccaaacttcacagcattagggacaggaatggaacacacttggatgcaggggctttgaccacgacctttgaagagcttcattttgagatcaagccccacgatgactgcacagtagagcaaatctatgagattttgaaaatctaccaactcatggaccacagtaacatggactgcttcatctgctgtatcctctcccatggagacaagggcatcatctatggcactgatggacaggaggcccccatctatgagctgacatctcagttcactggtttgaagtgcccttcccttgctggaaaacccaaagtgttttttattcaggcttgtcagggggataactaccagaaaggtatacctgttgagactgattcagaggagcaaccctatttagaaatggatttatcatcacctcaaacgagatatatcccggatgaggctgactttctgctggggatggccactgtgaataactgtgtttcctaccgaaaccctgcagagggaacctggtacatccagtcactttgccagagcctgagagagcgatgtcctcgaggcgatgatattctcaccatcctgactgaagtgaactatgaagtaagcaacaaggatgacaagaaaaacatggggaaacagatgcctcagcctactttcacactaagaaaaaaacttgtcttcccttctgat

SEQ ID NO: 267538 - DNA, 2682 bp, Artificial Sequence
  derived and/or modified sequence
gtgctctgagtttttggtttctgtttcaccttgtgtctgagctggtctgaaggctggttgttcagactgagcttcctgcctgcctgtaccccgccaacagcttcagaagaaggagcagcccctgggtgcgtccactttctgggcacgtgaggttgggccttggccgcctgagcccttgagttggtcacttgaaccttgggaatattgagattatattctcctgccttttaaaaagatggacttcagcagaaatctttatgatattggggaacaactggacagtgaagatctggcctccctcaagttcctgagcctggactacattccgcaaaggaagcaagaacccatcaaggatgccttgatgttattccagagactccaggaaaagagaatgttggaggaaagcaatctgtccttcctgaaggagctgctcttccgaattaatagactggatttgctgattacctacctaaacactagaaaggaggagatggaaagggaacttcagacaccaggcagggctcaaatttctgcctacagggtcatgctctatcagatttcagaagaagtgagcagatcagaattgaggtcttttaagtttcttttgcaagaggaaatctccaaatgcaaactggatgatgacatgaacctgctggatattttcatagagatggagaagagggtcatcctgggagaaggaaagttggacatcctgaaaagagtctgtgcccaaatcaacaagagcctgctgaagataatcaacgactatgaagaattcagcaaagactttggacaaagtttaccaaatgaaaagcaaacctcggggatactgtctgatcatcaacaatcacaattttgcaaaagcacgggagaaagtgcccaaacttcacagcattagggacaggaatggaacacacttggatgcaggggctttgaccacgacctttgaagagcttcattttgagatcaagccccacgatgactgcacagtagagcaaatctatgagattttgaaaatctaccaactcatggaccacagtaacatggactgcttcatctgctgtatcctctcccatggagacaagggcatcatctatggcactgatggacaggaggcccccatctatgagctgacatctcagttcactggtttgaagtgcccttcccttgctggaaaacccaaagtgttttttattcaggcttgtcagggggataactaccagaaaggtatacctgttgagactgattcagaggagcaaccctatttagaaatggatttatcatcacctcaaacgagatatatcccggatgaggctgactttctgctggggatggccactgtgaataactgtgtttcctaccgaaaccctgcagagggaacctggtacatccagtcactttgccagagcctgagagagcgatgtcctcgaggcgatgatattctcaccatcctgactgaagtgaactatgaagtaagcaacaaggatgacaagaaaaacatggggaaacagatgcctcagcctactttcacactaagaaaaaaacttgtcttcccttctgattgatggtgctattttgtttgttttgttttgttttgtttttttgagacagaatctcgctctgtcgcccaggctggagtgcagtggcgtgatctcggctcaccgcaagctccgcctcccgggttcaggccattctcctgcctcagcctcccgagtagctgggactacaggggcccgccaccacacctggctaattttttaaaaatatttttagtagagacagggtttcactgtgttagccagggtggtcttgatctcctgacctcgtgatccacccacctcggcctcccaaagtgctgggattacaggcgtgagccaccgcgcctggccgatggtactatttagatataacactatgtttatttactaattttctagattttctactttattaattgttttgcacttttttataagagctaaagttaaataggatattaacaacaataacactgtctcctttctcttatgcttaaggctttgggaatgtttttagctggtggcaataaataccagacacgtacaaaatccagctatgaatatagagggcttatgattcagattgttatctatcaactataagcccactgttaatattctattaactttaattctctttcaaagctaaattccacactaccacattaaaaaaattagaaagtagccacgtatggtggctcatgtctataatcccagcactttgggaggttgaggtgggaggattgcttgaacccaagaggtcaaggctgcagtgagccatgttcacaccgctgcactcaagcttgggtgacagaacaagaccccgtctcaaaaaaaattttttttttaataaaacaaaatttgtttgaaatcttttaaaaattcaaatgatttttacaagttttaaataagctctccccaaacttgctttatgccttcttattgcttttatgatatatatatgcttggctaactatatttgctttttgctaacaatgctctggggtctttttatgcatttgcatttgctctttcatctctgcttggattattttaaatcattaggaattaagttatctttaaaatttaagtatcttttttcaaaaacattttttaatagaataaaatataatttgatcttatt

SEQ ID NO: 267539 - protein, 220 aa, Artificial Sequence
  derived and/or modified sequence
MDFSRNLYDIGEQLDSEDLASLKFLSLDYIPQRKQEPIKDALMLFQRLQEKRMLEESNLSFLKELLFRINRLDLLITYLNTRKEEMERELQTPGRAQISAYRVMLYQISEEVSRSELRSFKFLLQEEISKCKLDDDMNLLDIFIEMEKRVILGEGKLDILKRVCAQINKSLLKIINDYEEFSKDFGQSLPNEKQTSGILSDHQQSQFCKSTGESAQTSQH

SEQ ID NO: 267540 - protein, 209 aa, Artificial Sequence
  derived and/or modified sequence
MDFSRNLYDIGEQLDSEDLASLKFLSLDYIPQRKQEPIKDALMLFQRLQEKRMLEESNLSFLKELLFRINRLDLLITYLNTRKEEMERELQTPGRAQISAYRVMLYQISEEVSRSELRSFKFLLQEEISKCKLDDDMNLLDIFIEMEKRVILGEGKLDILKRVCAQINKSLLKIINDYEEFSKDFGQSLPNEKQTSGILSDHQQSQFCK

SEQ ID NO: 267541 - DNA, 663 bp, Artificial Sequence
  derived and/or modified sequence
atggatttttcacgcaatctctacgacatcggggaacaactagactcagaggatcttgcctcgctgaaatttctgtccctggactacatccctcagaggaaacaggagcctattaaggacgctttgatgctgtttcagcgcttacaagaaaagcgtatgctggaagaaagtaatttaagcttcctcaaggaacttctctttagaatcaaccggcttgatctattgatcacctatttgaatacccgcaaagaggagatggagcgcgaactgcaaactcctgggagagctcagattagcgcttatagagtgatgctgtatcagatctccgaggaggtgtcaagaagcgagctaagatccttcaaattcctgctgcaggaggagatatccaagtgtaagcttgacgacgatatgaacctactcgatatctttatcgaaatggagaaaagggtgattctaggcgaaggcaagctggatatcttaaagagggtgtgtgctcagattaataagagtctgctcaagattataaatgactacgaggagttctccaaggatttcgggcaatccctgccgaacgagaaacaaacaagcggcattcttagcgatcatcagcagtcccagttttgcaagtctacaggtgagtctgcacagacatctcagcactag

SEQ ID NO: 267542 - DNA, 630 bp, Artificial Sequence
  derived and/or modified sequence
atggatttttccaggaacctttacgacataggcgaacaactggactctgaagacctggcttcactgaagtttctgagtctagactacattccccaaaggaaacaggaacctattaaagatgcactgatgttgtttcagcgactgcaggaaaagcgtatgctagaggagagtaatctgagcttcctgaaggagctgctttttaggattaaccgcctggatttgctgataacgtatctgaatactcgaaaagaagagatggaacgagaactgcagactcccggacgagctcagattagcgcctaccgcgtcatgctctaccagattagtgaagaagtatcccgttcagagctaagaagtttcaaatttctcctccaggaggaaatctctaaatgcaaactggatgatgatatgaacctgctggacatcttcatcgaaatggaaaagagggtgatccttggtgaaggaaaattagacatcctgaaacgtgtctgtgcgcaaatcaataaatccctactgaagatcattaatgattacgaagaattttccaaagatttcggccaatcactgcccaacgaaaagcaaacatccgggatcttgtcggaccaccagcagagccagttttgcaaatag

SEQ ID NO: 267543 - DNA, 663 bp, Artificial Sequence
  derived and/or modified sequence
atggacttcagcaggaacctgtatgacatcggggagcagctggacagcgaggacctggccagcctgaagttcctgagcctggactacatcccccagaggaagcaggagcccatcaaggatgccctgatgctgttccagaggctgcaggagaagaggatgctggaggagagcaacctgtccttcctgaaggagctgctcttccgcatcaaccggctggacctgctgatcacctacctgaacaccaggaaggaggagatggagcgggagctgcagaccccaggccgggcccagatcagcgcctacagagtgatgctgtaccagatcagcgaggaggtgagccgctctgagctgcgctccttcaagttcctgctgcaggaggagatcagcaagtgcaagctggatgatgacatgaacctgctggacatcttcatcgagatggagaagagggtcatcctgggggagggcaagctggacatcctgaagagggtgtgtgcccagatcaacaagagcctgctgaagatcatcaatgactatgaggagttcagcaaggactttggccagagcctgcccaatgagaagcagaccagcggcatcctgagtgaccaccagcagagccagttctgcaagagcactggagagagcgcccagaccagccagcactag

SEQ ID NO: 267544 - DNA, 630 bp, Artificial Sequence
  derived and/or modified sequence
atggacttcagcaggaacctgtatgacatcggggagcagctggacagcgaggacctggccagcctgaagttcctgagcctggactacatcccccagaggaagcaggagcccatcaaggatgccctgatgctgttccagaggctgcaggagaagaggatgctggaggagagcaacctgtccttcctgaaggagctgctcttccgcatcaaccggctggacctgctgatcacctacctgaacaccaggaaggaggagatggagcgggagctgcagaccccaggccgggcccagatcagcgcctacagagtgatgctgtaccagatcagcgaggaggtgagccgctctgagctgcgctccttcaagttcctgctgcaggaggagatcagcaagtgcaagctggatgatgacatgaacctgctggacatcttcatcgagatggagaagagggtcatcctgggggagggcaagctggacatcctgaagagggtgtgtgcccagatcaacaagagcctgctgaagatcatcaatgactatgaggagttcagcaaggactttggccagagcctgcccaatgagaagcagaccagcggcatcctgagtgaccaccagcagagccagttctgcaagtag

SEQ ID NO: 267545 - DNA, 663 bp, Artificial Sequence
  derived and/or modified sequence
atggacttcagccggaacctgtacgacatcggcgagcagctggacagtgaggacttagccagccttaagtttctgtctctggactatatcccgcagcggaaacaggagcccattaaagacgctctaatgctgttccagcggctccaggaaaaaaggatgctggaggagagcaatctgtcatttttgaaggaacttttgttcaggattaacagactggacttgctgatcacgtacctgaacactcgcaaggaggagatggagcgcgagttacaaactccagggcgagcccagattagcgcttatcgcgtgatgctgtatcaaataagtgaagaggtctctaggagcgagcttagaagcttcaaattcctgttgcaggaggagatatcaaagtgcaagctggacgacgacatgaatctccttgacatattcattgagatggaaaagagagtgatactaggcgaaggaaagctggacattcttaagcgcgtttgtgctcagatcaataagtcactgctgaagatcatcaatgactacgaagaattctctaaggattttggccagtccctgccaaatgaaaagcagacgagcggcattctcagtgatcaccagcaatctcaattttgcaagtccactggcgagagcgcacaaacaagccagcactag

SEQ ID NO: 267546 - DNA, 630 bp, Artificial Sequence
  derived and/or modified sequence
atggacttcagccggaacctgtacgacatcggcgagcagctggactccgaggacttggctagcttgaagtttctaagcctggattatatcccccagcgcaagcaggaaccgattaaagacgccctgatgctgtttcaaagactccaggaaaaacgtatgctggaggagtctaacctgtcattccttaaggaactgctgttcaggatcaatcggcttgatctgttgattacatatctgaacaccagaaaagaggagatggagagggagttgcaaacccctggcagagcgcagatctcagcctacagagtgatgctttaccagattagcgaagaggtgagcagatctgaactccggtctttcaagtttctgctgcaggaagagatatcaaagtgtaagctggacgacgacatgaacttgctggatatattcatcgaaatggagaagagagtcatcctcggtgaagggaagctcgatatcctcaagcgggtttgcgctcaaatcaacaaatccttgctgaagattataaacgactatgaggaattcagcaaagattttggccagagtctcccaaatgagaaacagaccagcggcattctgtcggatcatcaacagagtcagttttgcaagtag

SEQ ID NO: 267547 - DNA, 663 bp, Artificial Sequence
  derived and/or modified sequence
atggacttctcccggaatctctatgacattggagagcagcttgacagcgaggatctggctagtttgaaatttctgagcctggactacatcccgcaacgcaagcaggaaccaatcaaagacgcccttatgctgttccagcgcttgcaggagaagaggatgctggaggagtccaacctgagtttcctgaaagaactgcttttcaggatcaatcggctggacctgctgatcacctacctgaacacacgcaaggaggagatggaacgagagctccagacccccggacgcgcacagatatcggcatatagggtgatgctatatcagatttccgaggaggtgagccgctccgagctccgcagttttaaattcctactacaggaagagatcagtaagtgtaagttggatgatgatatgaacctgctggacatctttattgagatggaaaagcgcgtgatactgggagaggggaagctggatattctcaagcgcgtctgtgcacagatcaacaagtctctgctgaaaatcattaatgattatgaggaattctctaaggacttcggccaaagtctacctaatgaaaaacagacctctggcatactgtcagatcatcagcagtctcagttttgcaagtccaccggcgaaagtgcacagacctcacagcactag

SEQ ID NO: 267548 - DNA, 630 bp, Artificial Sequence
  derived and/or modified sequence
atggactttagtcggaacctctacgacatcggagaacagctcgattcggaagacctcgcatccctaaaattcctgtccctggactatatacctcaaagaaagcaggaacctataaaggacgcactcatgctatttcaaaggcttcaagaaaagcgcatgttagaggaatcaaatctgtcttttcttaaggaactgctgttccggattaacagactggatttgcttatcacatacctaaatactcgaaaagaggaaatggagcgggaactccagaccccgggacgagcccagatctctgcctaccgagtgatgctgtaccagatctcggaagaagtgagtcgttccgagctccgttctttcaaattcctgctgcaggaagagatctccaaatgtaagctcgacgatgatatgaatctcctggatatctttatcgaaatggagaagagagtcattctgggcgagggcaagctagatatcctgaagcgggtttgtgctcagattaacaagagcctgctgaagatcatcaatgattacgaggaattttccaaggacttcgggcagtcacttccaaatgaaaagcagacgtcaggcattctgagcgaccaccagcaatctcagttctgcaagtag

SEQ ID NO: 267549 - DNA, 717 bp, Artificial Sequence
  derived and/or modified sequence
agattctagcacttcctttgtgaggctctaaccccctctcctatagtggatttgttaagaacttctgtttttgtggctttgttattataaaattttttgaaatgttgttctctaaaaaagttatgattttatgtttttcttcatgagattctttcactgccttccagctgcaagtagaatgacgtctaaatctttgtgatctgtcactgaagcccttgagtgagacacttaaatctggctgtggctctctctcttactagcttatttccaagccgtgatttttcacaacagaaaaatggggacagtaatagtagtttcttcagaggcttttagtgaaatgagattatattctcctgccttttaaaaagatggacttcagcagaaatctttatgatattggggaacaactggacagtgaagatctggcctccctcaagttcctgagcctggactacattccgcaaaggaagcaagaacccatcaaggatgccttgatgttattccagagactccaggaaaagagaatgttggaggaaagcaatctgtccttcctgaaggagctgctcttccgaattaatagactggatttgctgattacctacctaaacactagaaaggaggagatggaaagggaacttcagacaccaggcagggctcaaatttctgcctacagggtcatgctctatcagatttcagaagaagtgagcagatcagaat

SEQ ID NO: 267550 - DNA, 707 bp, Artificial Sequence
  derived and/or modified sequence
atggttggaaattgggcatctgttcctttaaacaggaaacatttcttgttcgaattatattctcctgccttttaaaaagatggacttcagcagaaatctttatgatattggggaacaactggacagtgaagatctggcctccctcaagttcctgagcctggactacattccgcaaaggaagcaagaacccatcaaggatgccttgatgttattccagagactccaggaaaagagaatgttggaggaaagcaatctgtccttcctgaaggagctgctcttccgaattaatagactggatttgctgattacctacctaaacactagaaaggaggagatggaaagggaacttcagacaccaggcagggctcaaatttctgcctacagggtcatgctctatcagatttcagaagaagtgagcagatcagaattgaggtcttttaagtttcttttgcaagaggaaatctccaaatgcaaactggatgatgacatgaacctgctggatattttcatagagatggagaagagggtcatcctgggagaaggaaagttggacatcctgaaaagagtctgtgcccaaatcaacaagagcctgctgaagataatcaacgactatgaagaattcagcaaagactttggacaaagtttaccaaatgaaaagcaaacctcggggatactgtctgatcatcaacaatcacaattttgcaaaa

SEQ ID NO: 267551 - DNA, 663 bp, Artificial Sequence
  derived and/or modified sequence
atggacttcagcagaaacctgtacgacatcggcgagcagctggacagcgaggacctggccagcctgaagttcctgagcctggactacatcccccagagaaagcaggagcccatcaaggacgccctgatgctgttccagagactgcaggagaagagaatgctggaggagagcaacctgagcttcctgaaggagctgctgttcagaatcaacagactggacctgctgatcacctacctgaacaccagaaaggaggagatggagagagagctgcagacccccggcagagcccagatcagcgcctacagagtgatgctgtaccagatcagcgaggaggtgagcagaagcgagctgagaagcttcaagttcctgctgcaggaggagatcagcaagtgcaagctggacgacgacatgaacctgctggacatcttcatcgagatggagaagagagtgatcctgggcgagggcaagctggacatcctgaagagagtgtgcgcccagatcaacaagagcctgctgaagatcatcaacgactacgaggagttcagcaaggacttcggccagagcctgcccaacgagaagcagaccagcggcatcctgagcgaccaccagcagagccagttctgcaagagcaccggcgagagcgcccagaccagccagcactag

SEQ ID NO: 267552 - DNA, 630 bp, Artificial Sequence
  derived and/or modified sequence
atggacttcagcagaaacctgtacgacatcggcgagcagctggacagcgaggacctggccagcctgaagttcctgagcctggactacatcccccagagaaagcaggagcccatcaaggacgccctgatgctgttccagagactgcaggagaagagaatgctggaggagagcaacctgagcttcctgaaggagctgctgttcagaatcaacagactggacctgctgatcacctacctgaacaccagaaaggaggagatggagagagagctgcagacccccggcagagcccagatcagcgcctacagagtgatgctgtaccagatcagcgaggaggtgagcagaagcgagctgagaagcttcaagttcctgctgcaggaggagatcagcaagtgcaagctggacgacgacatgaacctgctggacatcttcatcgagatggagaagagagtgatcctgggcgagggcaagctggacatcctgaagagagtgtgcgcccagatcaacaagagcctgctgaagatcatcaacgactacgaggagttcagcaaggacttcggccagagcctgcccaacgagaagcagaccagcggcatcctgagcgaccaccagcagagccagttctgcaagtag

SEQ ID NO: 267553 - protein, 99 aa, Artificial Sequence
  derived and/or modified sequence
MASLLQDQLTTDQDLLLMQEGMPMRKVRSKSWKKLRYFRLQNDGMTVWHARQARGSAKPSFSISDVETIRNGHDSELLRSLAEELPLEQGFTIVFHGRR

SEQ ID NO: 267554 - DNA, 300 bp, Artificial Sequence
  derived and/or modified sequence
atggccagcctgctgcaggaccagctgaccaccgaccaggacctgctgctgatgcaggagggcatgcccatgagaaaggtgagaagcaagagctggaagaagctgagatacttcagactgcagaacgacggcatgaccgtgtggcacgccagacaggccagaggcagcgccaagcccagcttcagcatcagcgacgtggagaccatcagaaacggccacgacagcgagctgctgagaagcctggccgaggagctgcccctggagcagggcttcaccatcgtgttccacggcagaagatag

SEQ ID NO: 267555 - DNA, 819 bp, Artificial Sequence
  derived and/or modified sequence
atggccagcctgctgcaggaccagctgaccaccgaccaggacctgctgctgatgcaggagggcatgcccatgagaaaggtgagaagcaagagctggaagaagctgagatacttcagactgcagaacgacggcatgaccgtgtggcacgccagacaggccagaggcagcgccaagcccagcttcagcatcagcgacgtggagaccatcagaaacggccacgacagcgagctgctgagaagcctggccgaggagctgcccctggagcagggcttcaccatcgtgttccacggcagaagaagcaacctggacctgatggccaacagcgtggaggaggcccagatctggatgagaggcctgcagctgctggtggacctggtgaccagcatggaccaccaggagagactggacagatggctgagcgactggttccagagaggcgacaagaaccaggacggcaagatgagcttccaggaggtgcagagactgctgcacctgatgaacgtggagatggaccaggagtacgccttcagcctgttccaggccgccgacaccagccagagcggcaccctggagggcgaggagttcgtgcagttctacaaggccctgaccaagagagccgaggtgcaggagctgttcgagagcttcagcgccgacggccagaagctgaccctgctggagttcctggacttcctgcaggaggagcagaaggagagagactgcaccagcgagctggccctggagctgatcgacagatacgagcccagcgacagcggcgccagcgaggaggaccccggcgagggcgaggaggtgaacacctag

SEQ ID NO: 267556 - DNA, 300 bp, Artificial Sequence
  derived and/or modified sequence
atggcttctcttctacaagaccagctcactaccgaccaggatctgctcctgatgcaggagggaatgcccatgcggaaggtcaggtccaaatcctggaagaagttgcgctatttccggttacagaacgatgggatgaccgtctggcacgcgagacaagccaggggatcggcgaaaccctctttttccatcagtgatgtggagacaattcggaacggccacgattccgagctgcttcgcagcctagctgaggagttgcccctcgagcaggggttcaccatcgttttccacggtaggcggtag

SEQ ID NO: 267557 - DNA, 819 bp, Artificial Sequence
  derived and/or modified sequence
atggcaagtctgctccaggatcaactgaccaccgatcaagatctacttctgatgcaggagggtatgccaatgcgaaaggtgaggtcaaaaagctggaagaaactgagatacttccgccttcagaatgacggaatgaccgtttggcatgccagacaggctcgtggaagtgctaagccttctttctccatatccgacgtggagaccatcaggaatggacatgactctgagctactacgctctcttgctgaagagctccccttggagcagggctttaccattgtgtttcacggaagacgctccaacttggacctgatggcgaattcggtggaagaggcccagatctggatgaggggtctgcagctcttagtagacctggtcactagcatggaccaccaggaaagattggaccgctggctgtcggactggtttcagagaggtgacaagaatcaggacgggaagatgtcattccaggaggtgcaaaggctgttacatctcatgaatgtggaaatggatcaggaatacgcctttagtctctttcaagctgccgatacttcccaaagcggtaccctggagggcgaagaattcgtccagttttacaaagctcttaccaaaagggccgaagtccaggagctgtttgaatctttttctgccgatggccagaagttgacactgttagagtttcttgatttcctgcaggaggagcaaaaggagagggactgcacttcagaactggctctggaactgatcgacagatatgaaccctcggatagcggggcctcagaagaggatcctggggagggggaggaggtgaacacttag

SEQ ID NO: 267558 - DNA, 300 bp, Artificial Sequence
  derived and/or modified sequence
atggccagcctgctgcaggaccagctgaccacagaccaggacctgctgctgatgcaggagggcatgcccatgaggaaggtgcgcagcaagtcctggaagaagctgcgctacttccggctgcagaatgatggcatgacagtgtggcacgcccggcaggcccggggcagcgccaagcccagcttcagcatcagtgatgtggagaccatcagaaatggacatgattctgagctgctgcggagcctggccgaggagctgcccctggagcagggcttcaccatcgtgttccacggcagaagatag

SEQ ID NO: 267559 - DNA, 819 bp, Artificial Sequence
  derived and/or modified sequence
atggccagcctgctgcaggaccagctgaccacagaccaggacctgctgctgatgcaggagggcatgcccatgaggaaggtgcgcagcaagtcctggaagaagctgcgctacttccggctgcagaatgatggcatgacagtgtggcacgcccggcaggcccggggcagcgccaagcccagcttcagcatcagtgatgtggagaccatcagaaatggacatgattctgagctgctgcggagcctggccgaggagctgcccctggagcagggcttcaccatcgtgttccacggccgccgcagcaacctggacctgatggccaacagcgtggaggaggcccagatctggatgaggggcctgcagctgctggtggacctggtgacctccatggaccaccaggagcggctggaccgctggctgagtgactggttccagagaggagacaagaaccaggacggcaagatgtccttccaggaggtgcagaggctgctgcacctgatgaatgtggagatggaccaggagtatgccttcagcctcttccaggccgctgacaccagccagagcggcaccctggagggggaggagtttgtgcagttctacaaggccctgaccaagagagctgaggtgcaggagctgtttgagagcttcagcgcagatggccagaagctgaccctgctggagttcctggacttcctgcaggaggagcagaaggagcgggactgcaccagcgagctggccctggagctgattgacagatatgagcccagcgacagcggggccagcgaggaggaccccggggagggggaggaggtgaacacctag

SEQ ID NO: 267560 - DNA, 300 bp, Artificial Sequence
  derived and/or modified sequence
atggccagcctgctgcaggaccagctgaccaccgaccaggacctgctccttatgcaggagggaatgcccatgcgcaaggttagaagcaaaagctggaaaaagctgcgttacttcagactccagaatgatggcatgactgtctggcacgctcggcaggcccgcgggagcgctaaaccaagttttagcattagtgatgttgagacaattaggaacggtcacgactctgagcttttgagatctctcgcagaagaacttcccctggaacagggattcacgatcgtgttccacggccgcaggtag

SEQ ID NO: 267561 - DNA, 819 bp, Artificial Sequence
  derived and/or modified sequence
atggccagcctgctgcaggaccagctgaccaccgaccaggacctgctgctcatgcaggaaggcatgccgatgaggaaagtccgatcgaagtcctggaagaagctccggtatttccgtttgcaaaacgatggtatgaccgtgtggcacgcacggcaggccaggggatctgccaagccatccttcagcatttccgacgtggaaacaattcgaaacggtcacgatagcgagttgctcaggtcgctggcagaagagctgccgcttgagcaggggtttaccattgttttccatggcaggcgctccaacctggacctaatggccaactccgtagaggaggcacagatctggatgcgcggcctgcagttgctcgttgatttggtgaccagcatggatcaccaggaacggctagaccggtggctgtccgactggtttcagcggggcgataaaaaccaggacggtaagatgagtttccaggaggttcagcggcttctgcacctgatgaatgtcgaaatggaccaggaatacgctttttctctgttccaggccgctgacacttctcagtcaggaacactggagggggaagaattcgtgcagttttacaaggccctcaccaagcgagccgaggttcaggagctttttgaatccttctccgctgacggacagaagcttacattgctggagttcctcgacttcctgcaagaagagcagaaagagcgggactgtacaagcgagcttgccctggagttgattgataggtacgagccgagcgacagcggagccagtgaggaggatcctggcgagggcgaagaggtcaacacatag

SEQ ID NO: 267562 - DNA, 556 bp, Artificial Sequence
  derived and/or modified sequence
agaagcaagggagtagacaaaatgattctcttctttcttgcccctcagagagacctgagacaccctgaatcccactgtaatctccttggtgccattggtaactctgccaaagtccatctctaggtgacatgaagtctcttagaaattgaggaccaaattgcgctctgcagctctgggctacttcccatctcattttgtgtccctattttcgtatctgtattagagaggtgatctggtgccagctggtggaacagtgggtgatggcgtccctgctgcaagaccagctgaccactgatcaggacttgctgctgatgcaggaaggcatgccgatgcgcaaggtgaggtccaaaagctggaagaagctaagatacttcagacttcagaatgacggcatgacagtctggcatgcacggcaggccaggggcagtgccaagcccagcttctcaatctctgatgtggagacaatacgtaatggccatgattccgagttgctgcgtagcctggcagaggagctccccctggagcagggcttcaccattgtcttccatggccgccg

SEQ ID NO: 267563 - DNA, 300 bp, Artificial Sequence
  derived and/or modified sequence
atggcatcactgctgcaagatcaactcaccacggatcaggatctgctgctgatgcaagagggcatgcccatgaggaaagtgaggagtaagtcctggaaaaagttaaggtattttcgcttgcaaaatgatggcatgaccgtgtggcatgccagacaggcgcgtggatctgctaagcccagctttagtattagcgacgtggagacaatccgaaatggccacgactcagagctgctgcggtcactggccgaggaactgcccctggaacaggggttcacaatcgtattccatggccgtcgttag

SEQ ID NO: 267564 - DNA, 819 bp, Artificial Sequence
  derived and/or modified sequence
atggctagccttctccaggatcaacttacgacagatcaggatctcctattaatgcaagaagggatgcccatgaggaaagtgaggtcgaagtcctggaagaagcttagatattttcgcttacagaatgacgggatgaccgtgtggcacgccaggcaggccagggggagcgcgaaaccttcattttcaatcagcgatgtggaaactatcaggaatggccatgactctgagctgctgaggtctctggccgaggaactacctttagagcagggctttactatcgtctttcacggccgtcgatccaacctcgatctgatggccaattctgtcgaagaggcccaaatttggatgagaggacttcaacttctcgttgaccttgtgactagtatggaccatcaggagcgcctggaccgctggctgtcagactggttccagcggggagataagaatcaggacggtaagatgtcttttcaagaggtgcagagactgctccaccttatgaatgtggagatggaccaggagtatgccttcagtctgttccaggctgccgacaccagccaatctggcacactcgaaggtgaggaattcgtacagttttacaaggccctcacaaagagggctgaggtacaagagctctttgagtctttttctgcagacgggcagaaattaacgctgttagagttcctggacttcctgcaggaggaacagaaagagcgagactgcacctctgaactggcgttggaattaatcgatagatatgagcccagcgattcgggggcttcagaagaagaccccggagagggcgaagaggtcaacacgtag

SEQ ID NO: 267565 - DNA, 1024 bp, Artificial Sequence
  derived and/or modified sequence
agtcacagcagccagctgctgtagaagaggggaggaaacaagccagtgcaaggggagcaaaagagaaaaggagccaggctgggcttcctgatcccacagcatcgcagagctcgggaggcacagctcacagacacaggaaacacaggactgctattctgctctcctgcccacggtgatctggtgccagctggtggaacagtgggtgatggcgtccctgctgcaagaccagctgaccactgatcaggacttgctgctgatgcaggaaggcatgccgatgcgcaaggtgaggtccaaaagctggaagaagctaagatacttcagacttcagaatgacggcatgacagtctggcatgcacggcaggccaggggcagtgccaagcccagcttctcaatctctgatgtggagacaatacgtaatggccatgattccgagttgctgcgtagcctggcagaggagctccccctggagcagggcttcaccattgtcttccatggccgccgctccaacctggacctgatggccaacagtgttgaggaggcccagatatggatgcgagggctccagctgttggtggatcttgtcaccagcatggaccatcaggagcgcctggaccgatggctgagcgattggtttcaacgtggagacaaaaatcaggatggtaagatgagtttccaagaagttcagcggttattgcacctaatgaatgtggaaatggaccaagaatatgccttcagtctttttcaggcagcagacacgtcccagtctggaaccctggaaggagaagaattcgtacagttctataaggcattgactaaacgtgctgaggtgcaggaactgtttgaaagtttttcagctgatgggcagaagctgactctgctggaatttttggatttcctccaagaggagcagaaggagagagactgcacctctgagcttgctctggaactcattgaccgctatgaaccttcagacagtggagcttcggaggaagatcctggtgaaggggaagaagttaacacttga

SEQ ID NO: 267566 - DNA, 384 bp, Artificial Sequence
  derived and/or modified sequence
atggagaccagcagcagagagctgcaggccgccgagtacctggagaagcaccagatcaaggaggtggtgagctacctgaccagcgccctgctgttcttcagacccgagaagcccaaggagtacctgatcagcctgctggagagactgagaatcgccaaggtgaccggcgtggccttccccttcttcatggacaacagcaacatcgtggccatgttcgagatgatggacagcagcggcagaggcaccatcagcttcgtgcagtacaaggaggccctgaagaccctgggcctgtgcaccgaggacgaggacctgcaggacgacggccacaagatcaccctggacaagttcaaggaggaggtgaacaagagaatgaaggagatctag

SEQ ID NO: 267567 - DNA, 384 bp, Artificial Sequence
  derived and/or modified sequence
atggagactagttcacgggaacttcaggccgcagaatacctggaaaaacatcagataaaggaggtggtctcttacttgacaagcgctttgctgtttttccggcccgaaaaaccgaaagagtatctgattagcctgctggaaaggcttcgtatcgctaaggtgaccggggttgccttcccattctttatggataatagcaacatcgtcgccatgttcgaaatgatggattcatccggacggggaacaatctcgttcgtccagtacaaagaagcgctcaaaacccttggcctgtgtacggaggatgaagacctccaggacgacgggcataaaattactctggacaaattcaaagaggaggtgaacaagagaatgaaggagatttag

SEQ ID NO: 267568 - DNA, 384 bp, Artificial Sequence
  derived and/or modified sequence
atggagaccagcagccgggagctgcaggccgctgagtacctggagaagcaccagatcaaggaggtggtgtcctacctgaccagcgccctgctcttcttccggcctgagaagcccaaggagtacctgatcagcctgctggagcggctgagaattgccaaggtgactggagtggccttccccttcttcatggacaacagcaacatcgtggccatgtttgagatgatggacagcagcggccggggcaccatcagctttgtgcagtacaaggaggccctgaagaccctgggcctgtgcacagaagatgaggacctgcaggatgatggccacaagatcaccctggacaagttcaaggaggaggtgaacaagaggatgaaggagatctag

SEQ ID NO: 267569 - DNA, 384 bp, Artificial Sequence
  derived and/or modified sequence
atggagaccagcagccgggagctgcaggccgccgagtacctggagaaacatcagatcaaggaagtggtctcttaccttacttcggctctcctgttcttccgacccgagaagccaaaggaatacttgatctccctgctggagcggctgcgaatagccaaggtcaccggggtcgcattccccttcttcatggacaattccaacattgttgcaatgtttgaaatgatggacagttcaggacgaggaacaatcagttttgtgcagtacaaggaggcacttaagactttgggtctgtgcaccgaggacgaggatctgcaggacgatggacataagattacattggacaagtttaaagaagaagtgaataaacggatgaaggaaatttag

SEQ ID NO: 267570 - DNA, 384 bp, Artificial Sequence
  derived and/or modified sequence
atggaaacttcatccagggagctgcaggcggcagaatatcttgaaaaacaccagattaaagaagtggtttcatacttgacttcagcgctcctgtttttccggcctgaaaagccaaaagaatatcttatctctctgctggagcgtttgcggatcgctaaagttactggcgtcgcattccccttctttatggacaatagtaacatcgttgccatgttcgaaatgatggactcctccggacggggaaccatatcattcgttcagtacaaggaagcgttaaagactttgggactgtgtacagaggacgaggacctccaggacgatggacacaaaataaccctggataaattcaaagaggaggtcaataagaggatgaaagagatttag

SEQ ID NO: 267571 - protein, 93 aa, Artificial Sequence
  derived and/or modified sequence
AVSCGDVTSSIAPCLSYVMGRESSPSSSCCSGVRTLNGKASSSADRRTACSCLKNMASSFRNLNMGNAASIPSKCGVSVAFPISTSVDCSKIN

SEQ ID NO: 267572 - protein, 1861 aa, Artificial Sequence
  derived and/or modified sequence
MLKAVLKKSREGGKGGKKEAGSDFGPETSPVLHLDHSADSPVSSLPTAEDTYRVSLAKGVSMSLPSSPLLPRQSHLVQSRVNKKSPGPVRKPKYVESPRVPGDAVIMPFREVAKPTEPDEHEAKADNEPSCSPAAQELLTRLGFLLGEGIPSATHITIEDKNETMCTALSQGISPCSTLTSSTASPSTDSPCSTLNSCVSKTAANKSPCETISSPSSTLESKDSGIIATITSSSENDDRSGSSLEWNKDGNLRLGVQKGVLHDRRADNCSPVAEEETTGSAESTLPKAESSAGDGPVPYSQGSSSLIMPRPNSVAATSSTKLEDLSYLDGQRNAPLRTSIRLPWHNTAGGRAQEVKARFAPYKPQDILLKPLLFEVPSITTDSVFVGRDWLFHQIEENLRNTELAENRGAVVVGNVGFGKTAIISKLVALSCHGSRMRQIASNSPGSSPKTSDPTQDLHFTPLLSPSSSTSASSTAKTPLGSISAENQRPREDAVKYLASKVVAYHYCQADNTYTCLVPEFVHSIAALLCRSHQLAAYRDLLIKEPQLQSMLSLRSCVQDPVAAFKRGVLEPLTNLRNEQKIPEEEYIILIDGLNEAEFHKPDYGDTLSSFITKIISKFPAWLKLIVTVRANFQEIISALPFVKLSLDDFPDNKDIHSDLHAYVQHRVHSSQDILSNISLNGKADATLIGKVSSHLVLRSLGSYLYLKLTLDLFQRGHLVIKSASYKVVPVSLSELYLLQCNMKFMTQSAFERALPILNVALASLHPMTDEQIFQAINAGHIQGEQGWEDFQQRMDALSCFLIKRRDKTRMFCHPSFREWLVWRADGENTAFLCEPRNGHALLAFMFSRQEGKLNRQQTMELGHHILKAHIFKGLSKKTGISSSHLQALWIGYSTEGLSAALASLRNLYTPNVKVSRLLILGGANVNYRTEVLNNAPILCVQSHLGHEEVVTLLLEFGACLDGTSENGMTALCYAAAAGHMKLVCLLTKKGVRVDHLDKKGQCALVHSALRGHGDILQYLLTCEWSPGPPQPGTLRKSHALQQALTAAASMGHSSVVQCLLGMEKEHEVEVNGTDTLWGETALTAAAGRGKLEVCELLLGHGAAVSRTNRRGVPPLFCAARQGHWQIVRLLLERGCDVNLSDKQGRTPLMVAACEGHLSTVEFLLSKGAALSSLDKEGLSALSWACLKGHRAVVQYLVEEGAAIDQTDKNGRTPLDLAAFYGDAETVLYLVEKGAVIEHVDHSGMRPLDRAIGCRNTSVVVALLRKGAKLGNAAWAMATSKPDILIILLQKLMEEGNVMYKKGKMKEAAQRYQYALRKFPREGFGEDMRPFNELRVSLYLNLSRCRRKTNDFGMAEEFASKALELKPKSYEAFYARARAKRNSRQFVAALADLQEAVKLCPTNQEVKRLLARVEEECKQLQRSQQQKQQGPLPAPLNDSENEEDTPTPGLSDHFHSEETEEEETSPQEESVSPTPRSQPSSSVPSSYIRNLQEGLQSKGRPVSPQSRAGIGKSLREPVAQPGLLLQPSKQAQIVKTSQHLGSGQSAVRNGSMKVQISSQNPPPSPMPGRIAATPAGSRTQHLEGTGTFTTRAGCGHFGDRLGPSQNVRLQCGENGPAHPLPSKTKTTERLLSHSSVAVDAAPPNQGGLATCSDVRHPASLTSSGSSGSPSSSIKMSSSTSSLTSSSSFSDGFKVQGPDTRIKDKVVTHVQSGTAEHRPRNTPFMGIMDKTARFQQQSNPPSRSWHCPAPEGLLTNTSSAAGLQSANTEKPSLMQVGGYNNQAKTCSVSTLSASVHNGAQVKELEESKCQIPVHSQENRITKTVSHLYQESISKQQPHISNEAHRSHLTAAKPKRSFIESNV

SEQ ID NO: 267573 - DNA, 7470 bp, Artificial Sequence
  derived and/or modified sequence
ccgcctcgggagccggaggagaggcagccgcggagcgccgagctggcctcgccccgaggcccggccctgggtgtggggaaccgcgctgaggagctggaaactttcccggcaggagctgactgctgggcaggaacgtctctcaggagaaagagtggaagagaaaattgtgaactaaggccccctgcccccttttcctggtgcatgtgaagttatcaaaaacagaaacaagtgttgaaaatgttaaaggctgtgctgaagaagagccgagagggaggaaagggaggcaagaaggaagcaggaagtgactttggtccagagacttctccagtcctgcaccttgaccacagtgctgactctcctgtgagcagtcttcccacagcagaggacacctatagggtgagcttggccaaaggtgtctcgatgtctctgccttcctcacctttgctgcctcgacagtctcacttggtgcaatcaagagtgaacaaaaaatccccaggtcccgtcaggaagcccaagtatgtggaaagccccagagtgcctggagatgcagttataatgccattcagagaagtagccaagccaacagagcctgatgagcatgaagcaaaggccgataatgaaccgagctgttcgccggcagctcaagaactgttgacaaggctgggatttttactgggagaagggatcccaagtgccacacacataaccattgaagacaaaaatgaaaccatgtgcacagctctgagtcaaggcatcagtccttgctccacactaacaagcagcaccgcatctcctagcaccgatagcccctgctcaaccttgaatagctgtgtcagcaagacggcagccaacaaaagtccctgtgagaccattagcagccctagttccaccctggaaagcaaggacagtggaattatagccacaattacaagttcatccgaaaatgatgaccggagtggctccagtttggaatggaataaagatggaaacctaagattaggggttcagaagggagtgcttcatgaccgcagggcagataactgctccccagtggcagaagaggagaccaccgggtcagcagagagcacgctgcccaaagcagaatcctcagctggagatggtccagtcccttattctcagggctccagctcactaataatgccacggcccaactcagttgcagcaacaagctcaaccaaattggaagatctgagttatttagacgggcagagaaatgctcctctacggacgtcaattagattaccatggcacaatacggccggaggtagggcacaggaagttaaagcacgatttgctccctacaagccacaagacattttgttgaaacccttgttgtttgaagtaccaagcataacaacagactctgtgtttgtgggaagggattggctctttcaccagatagaagaaaacttgaggaacacagaactggcagaaaacagaggcgcggtggtggttggcaatgtgggatttgggaagacggcaatcatttccaagttggtggccctgagctgccacggaagccgcatgaggcagattgcttccaacagcccgggttcatcacctaaaacctctgaccccactcaggatcttcatttcactccgttgctttcaccgagttcttccacaagtgcttccagcacagctaaaacacctcttgggtctatcagtgctgaaaaccagagaccaagagaggatgcagtgaaatatcttgcttctaaggtggtggcctaccactactgccaggctgacaacacgtacacttgcctggtgcccgagtttgtgcacagcatcgcagctttgctctgccggtcccatcagctggccgcctacagagaccttctgataaaggagccccaactacagagcatgctgagcctccgatcctgtgtgcaggacccggtggcagctttcaagaggggagtgctggagccactcacaaacctgagaaatgagcagaaaattcctgaagaagaatacattattttgatagatggcttaaatgaagctgagtttcataaacctgattatggagatacgctttcttcatttattaccaaaattatttctaaatttcctgcctggttgaagttgattgtgactgtaagagcaaattttcaggaaatcataagtgcgctgccatttgtcaagctttccttagatgacttcccagacaacaaagacatccacagtgacctgcacgcctacgtccagcacagggtgcacagcagccaggacatcctcagcaacatctccctgaatggcaaggccgatgccacactcattggaaaagtgagcagccacctggtgctgcggagcctcggctcctacctgtacctcaagctcaccctggaccttttccagaggggccacttggtcattaagagtgccagctacaaggtggtgcccgtgtctctctctgagctctatttgcttcagtgcaacatgaagttcatgacccagtccgcctttgagagggcacttccgattctcaacgtggccctcgcatccctccaccccatgacagacgagcagatctttcaggctattaatgctggccacatccagggggagcagggatgggaagactttcagcagaggatggacgccctctcctgcttcctcattaagaggcgagacaaaacccgcatgttctgccacccgtccttcagggagtggcttgtatggagagcagacggggaaaacacggccttcctgtgtgagcccaggaacgggcacgcgctcttggcattcatgttctcgcgtcaggagggcaagttgaaccgccagcagaccatggagcttggccaccacatcctgaaggcgcacattttcaagggcctcagtaagaagacgggaatttcttcaagccatctccaagccctgtggatcggctacagcaccgaggggctgtccgccgccctggcctctctcaggaatctctatactcccaacgtgaaggtgagccgtctcctgattttgggaggggccaacgtgaactacaggacagaagtgttaaataatgccccaatcctgtgcgtccagtctcaccttggccacgaggaagttgtcactctgctcctggaatttggtgcctgcctggacggaacgtcagagaacggcatgactgccctctgttacgcagcagctgctggccacatgaagctggtgtgtctgctgaccaagaagggagtgagagtggaccacttggataagaagggccagtgtgcgcttgtccacagtgccctacggggccacggtgacattctccagtacctgctgacttgtgagtggtcgccgggtcctccccagccaggcaccctgaggaagagccacgccctgcagcaggcgctgaccgcggcggccagcatgggccacagctcggtggtccagtgcttgctggggatggagaaggaacatgaagtagaagtcaatggcaccgacacattgtggggagaaacagccctgactgccgccgcaggaagagggaagctggaggtctgtgagctgctgctggggcatggagctgctgtgtcgcggacaaacaggagaggggttccacctttgttttgtgcagcacgccaggggcattggcagattgttagactgctgttggaacgcggctgtgatgtgaacctaagtgacaagcaaggccggacgcccctcatggtggctgcttgtgaagggcacttgagcaccgtggaattcctcctttcaaaaggtgcagccctttcttctctagacaaagagggtctgtcagcattaagctgggcttgtctgaaaggtcacagggcagtggtccagtatctggttgaagaaggagctgcaatagaccagacagacaagaatggccgcacacccttggacctggctgccttctatggcgatgccgagactgtgctgtacctggtggagaagggagccgtgatcgagcatgtggaccacagcgggatgcggcccttggacagagccatcggctgccggaacacatctgtagtggtggcgctactcagaaagggagccaagttaggaaatgctgcttgggcgatggccacttccaaacctgatatcttgattatacttttacagaaattaatggaggaaggaaatgtgatgtacaaaaaagggaaaatgaaagaggcagcccagaggtaccagtatgccttaagaaagtttcctcgagaaggattcggagaggacatgagacccttcaatgaattaagggtttccctctatctcaatttgtcgcgatgccgaagaaaaacaaatgactttggcatggcagaggaatttgcttccaaggctctcgaattgaagcccaagtcctatgaagccttttatgccagagcaagagcgaagagaaatagcaggcaattcgtggcagctctggctgacctgcaagaggctgtgaaactctgtcccaccaatcaggaagtcaagaggcttctggcccgcgtagaagaggagtgcaaacaactccagaggagtcaacagcaaaaacagcagggcccgctaccagctccactcaacgactccgagaacgaagaggacaccccaacccctggcttaagtgaccactttcactctgaggagactgaagaggaagaaacttctccccaggaagaatctgtttccccaactcccaggtcccagccatcctcatctgtcccttcctcatacatccgaaaccttcaagaagggttacagtccaaaggaaggccggtatcgccacagagcagggcaggaatcggcaagtccctgagagagcctgtggcccagccagggctgctcctgcagccctccaagcaggcccagatcgtgaaaaccagccagcacctgggctctggccagtcggcagtgagaaatggcagtatgaaagttcagatctcttctcagaaccctcctccaagtcccatgccagggagaatcgctgccactcctgctgggagcagaacccagcatttagagggaacaggtactttcactacaagagctggttgtggccactttggggatcggctgggccccagccagaatgtccgcctgcagtgtggtgagaatggccctgcacaccctttaccaagtaagacgaaaaccacagagaggcttctgtctcattcctccgtggctgtggacgcagcccctccaaaccaaggtgggctggcgacctgcagcgacgtgcgacacccagcttccctcaccagctcaggctcttctggttctccatccagcagcataaagatgtcaagttcaaccagtagtttgacttcgagcagcagtttttcagatggcttcaaggtccaaggaccagatactagaattaaagacaaggttgtaacccacgttcagagcggtacagctgagcacagaccccgcaacacgccgttcatgggcatcatggataagactgcgaggttccaacagcagagcaatcctccaagccgcagctggcactgtccggcaccagaggggctgctgacaaacacgtcttctgcagctggcctgcagtctgctaacactgagaagccctctctcatgcaagtgggaggatataataaccaagccaaaacctgttctgtttctaccctgagtgcaagtgtccacaatggggcacaagtgaaggagctagaagaaagcaagtgccaaattccagtccactctcaagagaacaggataactaagactgtttctcatctgtaccaggaaagtatctccaaacagcagcctcatattagtaatgaagcccacaggagccacctcactgcagccaaaccaaagcgatcatttatagagtcaaatgtgtgaaccttaagaaatccccatttgtggaatttggaaacgtgtgttgactcctggtggtaaattaaatagtttttttcatcagaaaaattattttttagccattttttttctttggggtggatctgatgccattgatatatctaaaatgtgggataaaacttctttaatagctagaaatcaccataaataagaatgctaaacagaattgaaaattatatcaacttaaaattttaagacagcccagaagacattaatgactctcacttatgaaattgtttggcttttgccactttcttccttgcctttgctatatggtagaatcacagaacttacttagagaataaatatgtctattgttcaagagtaacaggtttaactcatgaccaagtgatgtacatccaagtgatgtattctggaaacgatggaattttacagttacagttccattgagtcaaatcccattttatatatacataaaaattaagttctgagtgagttctagctaaatataagtgcgactgtaaacgcagccaatttttttaagcagaatatgagaacacctaagtattctcttcatagcagttcctataaagggattaaacacttatttctgtgttatggttcttattcatatatttttatagcacttttggaacctatatttgtgcttgaaggtgtttttgatatttggaaacagtataagccatttggagtcatgattggtggtcaagtggattcaagctaaaatactaagaccagcattcttagtggcgcttataaattagctctcacctggtttccaaactgcttttaacaatggtagtgctcctggaacaatccttccaagctcctctaaggacaatatttaattcagatactaaaggtaagactggttgttacttttgttttgttgtacaattagtactttatagtcacatgttgtatatattaaatagcccagttttattcagacttgtaaatagaactatttcaatgtagttaatctaaaaacaaaaaagaaaaccccagtcacgatttgcatgttctctgtaagcttcatccatgctggttattgcactgaatgatatattattagggcatgttaacagtataccagtaacagcactttatctcatttatatgaacacctttgaggtgctacttaagtccaagctctgatgtattattcatttgtaaagataaggtacaggaatgaaccttggtttaaaggtatttttatatgaaaatggtgtgttattggaagatgttaaaatgctaatttgagagaagtaggagtgtatctgttttatatgttgggatgtgaaatttattttctaaaattgaggagaaggaagttatatatttgcagaatgttttaaagtgaattgttgtaatgaagttcctgtgaacatcattatggttttgtacaaataggaacctctgatgtcattcttcaacgtttgttcctgtgtgtacaattgtactttgtatgaacagctttatcatttttataggctttccatgagttttgctgtaactactatggcttatttattttctttaatatttgtgaaagtcttactcctttgttagttttgtttctgcacaactactgtacttttccatatggaataaagactattaatagaa

SEQ ID NO: 267574 - protein, 832 aa, Artificial Sequence
  derived and/or modified sequence
MKPPGSSSRQPPLAGCSLAGASCGPQRGPAGSVPASAPARTPPCRLLLVLLLLPPLAASSRPRAWGAAAPSAPHWNETAEKNLGVLADEDNTLQQNSSSNISYSNAMQKEITLPSRLIYYINQDSESPYHVLDTKARHQQKHNKAVHLAQASFQIEAFGSKFILDLILNNGLLSSDYVEIHYENGKPQYSKGGEHCYYHGSIRGVKDSKVALSTCNGLHGMFEDDTFVYMIEPLELVHDEKSTGRPHIIQKTLAGQYSKQMKNLTMERGDQWPFLSELQWLKRRKRAVNPSRGIFEEMKYLELMIVNDHKTYKKHRSSHAHTNNFAKSVVNLVDSIYKEQLNTRVVLVAVETWTEKDQIDITTNPVQMLHEFSKYRQRIKQHADAVHLISRVTFHYKRSSLSYFGGVCSRTRGVGVNEYGLPMAVAQVLSQSLAQNLGIQWEPSSRKPKCDCTESWGGCIMEETGVSHSRKFSKCSILEYRDFLQRGGGACLFNRPTKLFEPTECGNGYVEAGEECDCGFHVECYGLCCKKCSLSNGAHCSDGPCCNNTSCLFQPRGYECRDAVNECDITEYCTGDSGQCPPNLHKQDGYACNQNQGRCYNGECKTRDNQCQYIWGTKAAGSDKFCYEKLNTEGTEKGNCGKDGDRWIQCSKHDVFCGFLLCTNLTRAPRIGQLQGEIIPTSFYHQGRVIDCSGAHVVLDDDTDVGYVEDGTPCGPSMMCLDRKCLQIQALNMSSCPLDSKGKVCSGHGVCSNEATCICDFTWAGTDCSIRDPVRNLHPPKDEGPKEMSRREGSILLSKAPSESAALDGHRLALLDSGYDILAAVLLELLSL

SEQ ID NO: 267575 - protein, 699 aa, Artificial Sequence
  derived and/or modified sequence
MQKEITLPSRLIYYINQDSESPYHVLDTKARHQQKHNKAVHLAQASFQIEAFGSKFILDLILNNGLLSSDYVEIHYENGKPQYSKGGEHCYYHGSIRGVKDSKVALSTCNGLHGMFEDDTFVYMIEPLELVHDEKSTGRPHIIQKTLAGQYSKQMKNLTMERGDQWPFLSELQWLKRRKRAVNPSRGIFEEMKYLELMIVNDHKTYKKHRSSHAHTNNFAKSVVNLVDSIYKEQLNTRVVLVAVETWTEKDQIDITTNPVQMLHEFSKYRQRIKQHADAVHLISRVTFHYKRSSLSYFGGVCSRTRGVGVNEYGLPMAVAQVLSQSLAQNLGIQWEPSSRKPKCDCTESWGGCIMEETGVSHSRKFSKCSILEYRDFLQRGGGACLFNRPTKLFEPTECGNGYVEAGEECDCGFHVECYGLCCKKCSLSNGAHCSDGPCCNNTSCLFQPRGYECRDAVNECDITEYCTGDSGQCPPNLHKQDGYACNQNQGRCYNGECKTRDNQCQYIWGTKAAGSDKFCYEKLNTEGTEKGNCGKDGDRWIQCSKHDVFCGFLLCTNLTRAPRIGQLQGEIIPTSFYHQGRVIDCSGAHVVLDDDTDVGYVEDGTPCGPSMMCLDRKCLQIQALNMSSCPLDSKDEGPKACFLKRTKCKSYPKHRKCQEEKVRSYSARPHLNQLRWMDTALHCWILGMTYSQQCYWNY

SEQ ID NO: 267576 - protein, 107 aa, Artificial Sequence
  derived and/or modified sequence
  misc_feature (1)..(1): Xaa can be any naturally occurring amino acid
XQIQALNMSSCPLDSKGKVCSGHGVCSNEATCICDFTWAGTDCSIRDPVRNLHPPKDEGPKEMSRREGSILLSKAPSESAALDGHRLALLDSGYDILAAVLLELLSL

SEQ ID NO: 267577 - DNA, 2499 bp, Artificial Sequence
  derived and/or modified sequence
atgaagcccccagggtcctcctcacgccagccccctctagctgggtgttctttagccggcgcttcctgcggcccacaaaggggccccgccggcagtgtcccagcgagtgcaccggccagaacacctccctgcaggctgctcctggtcctcctcctcctgcccccgctggccgccagcagccgtccaagagcatggggggccgctgctcctagcgcgccacactggaatgaaaccgcagagaagaacctgggggtgctggcagacgaggacaataccctgcagcagaatagctcctccaacatatcatacagcaatgccatgcagaaggagatcactctccccagccggctgatttattacataaaccaggattcagaatcaccttaccatgtgctggacactaaggcaaggcaccagcaaaaacacaacaaagctgtgcacttggcccaggcgagttttcagattgaagcctttggatccaaatttatccttgatctcattctgaacaacggcctgctcagcagcgactatgtcgaaattcactatgaaaatggcaagccacagtactcaaagggcggagaacattgttattaccatggctcaatccgcggagttaaggattctaaggtggctctgtcaacgtgcaacggcctgcacggtatgtttgaagacgacacattcgtttatatgatcgagccgcttgaactagtgcatgatgagaagagtacaggacgtccccatattatacaaaagactcttgcgggacagtactcaaaacagatgaagaacctcaccatggagagaggtgaccaatggccgttcctgtcggagctgcagtggctgaagcggcgaaagcgggcagtgaacccctcccgcgggattttcgaggaaatgaaatatctggagttgatgatagtgaacgaccataaaacatataaaaaacataggtctagccacgcacacaccaataactttgcgaaatcagttgtgaacctcgtagatagcatatataaggaacaactgaacactagagtggttttggtagcagttgaaacttggaccgagaaagatcagatcgacataaccactaaccctgtgcagatgctccacgagttctccaaatataggcaaaggatcaagcagcatgccgatgctgtccatttgatctctcgggtcactttccactataaaagatcctctttatcctatttcggcggcgtgtgtagcagaacacggggcgtgggggtaaacgagtatggtttacccatggccgtggctcaggtcctgagccagagccttgcgcagaacctggggatccagtgggagccgtccagtcgcaagcccaagtgcgactgcactgagtcctggggaggatgcatcatggaggagacgggcgtttcacactcacgcaaattcagtaagtgtagcatcctggagtacagggactttttacagcgggggggaggcgcctgcctgtttaaccgcccaaccaagctgtttgaacctactgagtgcggcaatggatacgtggaggctggagaagagtgtgactgtggctttcacgtggagtgttacggcctctgctgtaagaagtgtagtctgtccaatggcgcccactgttcagacgggccctgttgcaacaacacttcttgcctgttccagcctagaggctacgagtgtagagatgcggtgaatgagtgtgacattactgagtattgcaccggggattcaggtcagtgtcctcccaatctgcataagcaagacggatacgcctgtaatcagaatcagggcaggtgttacaatggcgaatgcaagacccgtgataaccagtgtcagtacatttggggtaccaaagccgccgggtccgacaaattctgctacgagaagctgaacacagaaggtacagagaaggggaactgcggtaaggatggcgatcggtggatccagtgttcgaagcacgatgtgttttgcgggttcctactgtgcaccaacttaacccgcgctccacggataggtcagctccagggcgaaattatacccacaagcttctatcatcagggtagggtgattgactgcagcggcgcgcatgttgtgttggacgacgataccgacgtgggatacgtagaagacggaactccatgcggcccttccatgatgtgcttagatcgtaaatgcttgcagatccaagcccttaatatgtcctcatgccctctggacagcaaaggcaaagtgtgttccggacatggggtgtgttcgaacgaagcaacttgtatttgcgatttcacctgggctggcaccgactgcagtatccgagacccagtacgcaatctgcaccctccaaaggatgagggacctaaggaaatgtccaggagagagggctccatcctactgagtaaggctcccagtgagtccgccgccttagacggccaccgcctcgcactcctcgattcagggtatgatatcctagctgcagtactcctggagctgctgtccctgtag

SEQ ID NO: 267578 - DNA, 324 bp, Artificial Sequence
  derived and/or modified sequence
taacagatccaggcccttaatatgtcatcttgccccctggattctaaaggtaaggtgtgcagcggccatggagtgtgctctaacgaagccacgtgtatctgtgacttcacatgggcgggaacagactgcagcattagagatcccgttcgcaatcttcatccaccaaaggatgaaggtcctaaggaaatgagccggcgcgaggggagcattttgctatcaaaggctccctcggagagtgcagctctggatggccaccgccttgcactactcgacagcggctacgacatcctggccgctgttctactggaacttttgtccctgtag

SEQ ID NO: 267579 - DNA, 2499 bp, Artificial Sequence
  derived and/or modified sequence
atgaagcccccaggcagcagcagccggcagccccccctggccggctgcagcctggccggggccagctgtggcccccagaggggccctgctggctctgtgcctgccagcgccccagcccggaccccaccctgccgcctgctgctggtgctgctgctgctgccccccctggccgccagcagccggccccgggcctggggcgccgccgcccccagcgccccccactggaatgaaacagctgagaagaacctgggcgtgctggctgatgaggacaacaccctgcagcagaacagcagcagcaacatctcctacagcaatgccatgcagaaggagatcaccctgcccagccgcctcatctactacatcaaccaggacagcgagagcccctaccacgtgctggacaccaaggcccggcaccagcagaagcacaacaaggctgtgcacctggcccaggccagcttccagatcgaggccttcggcagcaagttcatcctggacctgatcctgaacaacggcctgctgagcagtgactatgtggagatccactatgaaaatggcaagccccagtacagcaaaggaggagagcactgctactaccacggcagcatccggggcgtgaaggacagcaaggtggccctgagcacctgcaatggcctgcacggcatgtttgaagatgacacctttgtgtacatgattgagcccctggagctggtgcatgatgagaagagcacaggccggccccacatcatccagaagaccctggccggccagtacagcaagcagatgaagaacctgaccatggagcggggggaccagtggcccttcctgtctgagctgcagtggctgaagaggaggaagagagctgtgaaccccagccggggcatctttgaggagatgaagtacctggagctgatgattgtgaatgaccacaagacctacaagaagcacaggagcagccacgcccacaccaacaactttgccaagtctgtggtgaacctggtggacagcatctacaaggagcagctgaacaccagggtggtgctggtggccgtggagacctggacagagaaggaccagattgacatcaccaccaaccctgtgcagatgctgcacgagttcagcaagtaccggcagaggatcaagcagcacgcagatgctgtgcacctgatcagccgggtgaccttccactacaagaggagcagcctgagctactttggaggagtgtgcagcaggacccggggcgtgggcgtgaatgaatatggcctgcccatggctgtggcccaggtgctgagccagagcctggcccagaacctgggcatccagtgggagcccagcagcaggaagcccaagtgtgactgcacagagagctggggcggctgcatcatggaggagaccggggtgagccacagcaggaagttcagcaagtgcagcatcctggagtacagagacttcctgcagagaggaggaggagcctgcctcttcaaccggcccaccaagctgtttgagcccacagaatgtggaaatggctacgtggaggccggggaggagtgtgactgtggcttccacgtggagtgctacggcctgtgctgcaagaagtgcagcctgagcaatggagcccactgcagtgatggcccctgctgcaacaacaccagctgcctcttccagccccggggctatgaatgtagagatgctgtgaatgaatgtgacatcacagagtactgcaccggggacagcggccagtgcccccccaacctgcacaagcaggacggctacgcctgcaaccagaaccagggccgctgctacaatggagagtgcaagacccgggacaaccagtgccagtacatctggggcaccaaggccgccggcagtgacaagttctgctatgagaagctgaacacagagggcacagagaagggcaactgtgggaaggatggagaccgctggatccagtgcagcaagcatgatgtgttctgtggcttcctgctgtgcaccaacctgacccgggcccccagaattggccagctgcagggcgagatcatccccaccagcttctaccaccagggccgggtcatcgactgcagcggggcccacgtggtgctggatgatgacacagatgtgggctacgtggaggatggcaccccctgtggccccagcatgatgtgcctggacaggaagtgcctgcagatccaggccctgaacatgagcagctgccccctggacagcaagggcaaggtgtgcagcggccacggcgtgtgcagcaatgaggccacctgcatctgtgacttcacctgggccggcacagactgcagcatccgggaccctgtgaggaacctgcacccccccaaggatgagggccccaaggagatgagccggcgggagggcagcatcctgctgagcaaggcccccagcgagagcgctgccctggatggccaccggctggccctgctggacagcggctatgacatcctggccgctgtgctgctggagctgctgagcctgtag

SEQ ID NO: 267580 - DNA, 324 bp, Artificial Sequence
  derived and/or modified sequence
tgacagatccaggccctgaacatgagcagctgccccctggacagcaagggcaaggtgtgcagcggccatggagtgtgcagcaatgaggccacctgcatctgtgacttcacctgggccggcacagactgcagcatccgggaccctgtgaggaacctgcacccccccaaggatgagggccccaaggagatgagcagaagagagggcagcatcctgctgagcaaggcccccagcgagagcgctgccctggatggccaccggctggccctgctggacagcggctatgacatcctggccgctgtgctgctggagctgctgagcctgtag

SEQ ID NO: 267581 - DNA, 2499 bp, Artificial Sequence
  derived and/or modified sequence
atgaagccccccggcagcagcagccggcagccccccctggccggctgctccctagccggagcttcatgcggaccccagaggggaccagccggcagcgtgcccgcctccgcaccagcaaggactccaccctgtagattacttctggtcctgctgctgctgcccccactggcggcctcatctaggccccgagcttggggagccgctgcaccctccgcaccccattggaatgaaacagccgagaaaaacctgggtgtgctggccgacgaagataacaccctccagcagaatagttcctcaaatatcagctatagcaacgctatgcaaaaggagatcacattaccatcgcggctaatttactacatcaaccaggactcagagtccccatatcacgtgctggataccaaagcgcgacaccagcagaagcacaataaggccgtgcacttagcacaggcgagcttccagatcgaagcattcgggtccaagtttatcctagacctgatactaaacaatggcctgctgtcctccgattacgtggagatacactatgagaatggcaaaccacagtattcaaaaggcggtgaacactgttactatcatgggtcaatacgcggtgtgaaggacagcaaagtagcattgtcaacttgcaacggtttgcacggaatgtttgaggatgatactttcgtgtacatgatcgagcctctggagctggtacacgacgagaagtccacaggtcgcccccatatcatccagaaaacactggctggacagtacagcaaacagatgaagaatttaactatggagagaggagaccagtggcctttcctttccgaacttcaatggctgaaacgcagaaagcgggccgtgaacccatccaggggaattttcgaggagatgaagtacctagagctgatgattgtgaatgatcataagacatacaagaaacaccgatccagccacgcccatactaacaatttcgcaaagagcgttgttaatttggttgacagcatttacaaggaacaactcaacaccagggtggtgctggttgctgtggaaacatggacggagaaggatcagatcgacatcaccactaacccggtccaaatgctgcatgagttttcaaaatataggcaacggatcaagcagcacgccgatgcagtgcacttgatctctcgcgtcaccttccattataaacgcagcagcctgtcttactttggtggcgtctgtagcaggacacggggcgtaggcgttaatgaatatggactgccaatggccgttgctcaggtgctgtcccagtctttggctcagaatctcggaattcagtgggagccttcaagccgaaaacccaaatgcgactgtacggagagctggggcgggtgcataatggaggagaccggagtgagccactctagaaagtttagtaaatgcagcatcctcgaataccgggatttccttcagcgcggtgggggcgcctgtctcttcaatcgacccaccaaactttttgagcccacagaatgtggtaatggatacgtggaagccggtgaggagtgtgactgtggcttccacgtggaatgttatggactgtgttgtaagaagtgtagtttatccaacggagctcactgttctgatggtccatgctgcaacaacacttcctgtctgtttcagccacgcggttatgagtgcagggatgctgttaacgaatgcgacatcaccgagtactgcacaggagacagcggacagtgtcctccaaacctgcataagcaggatgggtatgcttgtaaccagaaccaaggtcggtgctataatggggagtgtaagacgcgggacaatcagtgccagtacatctggggcactaaagccgctggaagcgacaagttttgttacgaaaaattgaacaccgagggaactgagaagggtaactgcggaaaagatggagaccgttggattcagtgtagcaaacatgacgtgttttgtggtttcctcctctgcaccaatttgaccagggcgccacggataggccagctgcagggagagataatcccgacttccttttaccatcagggtcgtgttatcgattgcagcggcgctcacgtagtgctggacgacgataccgacgtgggatacgtggaagatggcacaccatgcggaccctcaatgatgtgtctggatcgcaagtgtttgcagatccaggccttgaacatgagtagctgccctctcgactcaaagggaaaggtctgtagcgggcacggggtctgctcaaacgaggccacctgtatttgtgatttcacttgggcaggtaccgattgttcgataagagatccagtccgcaatttgcaccccccaaaagacgagggccctaaggagatgtccaggcgggaggggtcaatccttctgtcaaaagccccatcagagagcgcggccctggatgggcaccgcctggcacttctcgactcagggtacgatatactggccgcggtgctgctggaattgctaagcctgtag

SEQ ID NO: 267582 - DNA, 324 bp, Artificial Sequence
  derived and/or modified sequence
tgacagatccaggccctgaacatgagcagctgccccctggacagcaagggtaaagtgtgttcaggccacggcgtgtgcagtaacgaggccacctgcatttgcgacttcacatgggccggcaccgactgcagtattcgggatcccgtgcggaatctccatccaccgaaggacgagggacccaaagagatgtcccggagagaagggagcatcctcctgtctaaggcccccagcgagtctgccgccctggatggccaccgtctggccctgctagattctggctatgatatactggcggccgtgttactggaacttttgagcctgtag

SEQ ID NO: 267583 - DNA, 2988 bp, Artificial Sequence
  derived and/or modified sequence
tagcccggcgctctcgccggccacacggagcggcgcccgggagctatgagccatgaagccgcccggcagcagctcgcggcagccgcccctggcgggctgcagccttgccggcgcttcctgcggcccccaacgcggccccgccggctcggtgcctgccagcgccccggcccgcacgccgccctgccgcctgcttctcgtccttctcctgctgcctccgctcgccgcctcgtcccggccccgcgcctggggggctgctgcgcccagcgctccgcattggaatgaaactgcagaaaaaaatttgggagtcctggcagatgaagacaatacattgcaacagaatagcagcagtaatatcagttacagcaatgcaatgcagaaagaaatcacactgccttcaagactcatatattacatcaaccaagactcggaaagcccttatcacgttcttgacacaaaggcaagacaccagcaaaaacataataaggctgtccatctggcccaggcaagcttccagattgaagccttcggctccaaattcattcttgacctcatactgaacaatggtttgttgtcttctgattatgtggagattcactacgaaaatgggaaaccacagtactctaagggtggagagcactgttactaccatggaagcatcagaggcgtcaaagactccaaggtggctctgtcaacctgcaatggacttcatggcatgtttgaagatgataccttcgtgtatatgatagagccactagagctggttcatgatgagaaaagcacaggtcgaccacatataatccagaaaaccttggcaggacagtattctaagcaaatgaagaatctcactatggaaagaggtgaccagtggccctttctctctgaattacagtggttgaaaagaaggaagagagcagtgaatccatcacgtggtatatttgaagaaatgaaatatttggaacttatgattgttaatgatcacaaaacgtataagaagcatcgctcttctcatgcacataccaacaactttgcaaagtccgtggtcaaccttgtggattctatttacaaggagcagctcaacaccagggttgtcctggtggctgtagagacctggactgagaaggatcagattgacatcaccaccaaccctgtgcagatgctccatgagttctcaaaataccggcagcgcattaagcagcatgctgatgctgtgcacctcatctcgcgggtgacatttcactataagagaagcagtctgagttactttggaggtgtctgttctcgcacaagaggagttggtgtgaatgagtatggtcttccaatggcagtggcacaagtattatcgcagagcctggctcaaaaccttggaatccaatgggaaccttctagcagaaagccaaaatgtgactgcacagaatcctggggtggctgcatcatggaggaaacaggggtgtcccattctcgaaaattttcaaagtgcagcattttggagtatagagactttttacagagaggaggtggagcctgccttttcaacaggccaacaaagctatttgagcccacggaatgtggaaatggatacgtggaagctggggaggagtgtgattgtggttttcatgtggaatgctatggattatgctgtaagaaatgttccctctccaacggggctcactgcagcgacgggccctgctgtaacaatacctcatgtctttttcagccacgagggtatgaatgccgggatgctgtgaacgagtgtgatattactgaatattgtactggagactctggtcagtgcccaccaaatcttcataagcaagacggatatgcatgcaatcaaaatcagggccgctgctacaatggcgagtgcaagaccagagacaaccagtgtcagtacatctggggaacaaaggctgcagggtctgacaagttctgctatgaaaagctgaatacagaaggcactgagaagggaaactgcgggaaggatggagaccggtggattcagtgcagcaaacatgatgtgttctgtggattcttactctgtaccaatcttactcgagctccacgtattggtcaacttcagggtgagatcattccaacttccttctaccatcaaggccgggtgattgactgcagtggtgcccatgtagttttagatgatgatacggatgtgggctatgtagaagatggaacgccatgtggcccgtctatgatgtgtttagatcggaagtgcctacaaattcaagccctaaatatgagcagctgtccactcgattccaagggtaaagtctgttcgggccatggggtgtgtagtaatgaagccacctgcatttgtgatttcacctgggcagggacagattgcagtatccgggatccagttaggaaccttcacccccccaaggatgaaggacccaaggaaatgtcaagaagagaaggttcgatcctactcagcaaggccccatctgaatcagctgcgctggatggacaccgccttgcactgttggattctgggtatgacatactcgcagcagtgttactggaactattaagtttgtaaacaaaacctttgggtggtaatgactacggagctaaagttggggtgacaaggatggggtaaaagaaaactgtctcttttggaaataatgtcaaagaacacctttcaccacctgtcagtaaacgggggagggggcaaaagaccatgctataaaaagaactgttccagaatcttttttttccctaatggacgaaggaacaacacacacacaaaaattaaatgcaataaaggaatcattaaaaaaaatagtaaatgattttttttccctcagcctgctggcacttaatatcttctaaatgatttggcatgatttttttttctttactaccgatgacaaactccagtggcatgaagatctaattttcaaaagggtaaaaactgcatggcatatatacaacaagctagcaagccaattctcagcaaaacctgcaacagaattc

SEQ ID NO: 267584 - DNA, 460 bp, Artificial Sequence
  derived and/or modified sequence
tacaaattcaagccctaaatatgagcagctgtccactcgattccaagggtaaagtctgttcgggccatggggtgtgtagtaatgaagccacctgcatttgtgatttcacctgggcagggacagattgcagtatccgggatccagttaggaaccttcacccccccaaggatgaaggacccaaggaaatgtcaagaagagaaggttcgatcctactcagcaaggccccatctgaatcagctgcgctggatggacaccgccttgcactgttggattctgggtatgacatactcgcagcagtgttactggaactattaagtttgtaaacaaaacctttgggtggtaatgactacggagctaaagttggggtgacaaggatggggtaaaagaaaactgtctcttttggaaataatgtcaaagaacacctttcaccacctgtcagtaaacgggggagggggcaaaa

SEQ ID NO: 267585 - DNA, 2499 bp, Artificial Sequence
  derived and/or modified sequence
atgaaacctcccggaagttcaagtcggcaaccccctttggcaggatgcagtctggccggagctagctgtggtccccagcgcggtcccgctggttccgtgccagcgtcagcgccagcacgtactccaccttgtaggttgcttctggtgctccttcttctgccaccccttgcggcaagctctaggcccagggcctggggcgctgccgcaccgagtgcccctcattggaatgaaaccgccgagaaaaaccttggggtattagctgacgaggacaacacactccaacaaaactcaagctctaacatctcatattccaacgctatgcagaaagagatcacccttccgtccaggctgatctactacatcaatcaggactccgaaagcccctaccatgtgctggatacgaaagctcgccaccagcaaaagcacaacaaagccgtacatctggctcaggcctcatttcagattgaagcatttggttctaagttcattcttgatctaatactgaacaacgggttactgtccagtgattatgtcgaaatccattatgagaacggtaagccccagtactctaaagggggtgaacactgctactatcacggttccatcagaggggtgaaagacagtaaggttgctttgtcaacatgcaatggcctgcacggaatgtttgaggatgacacattcgtgtatatgattgagcctctggagctggtacacgacgagaagtctactggcaggcctcacatcatacaaaagactctggctggtcagtactctaagcagatgaagaacttaactatggagcggggagatcagtggccctttctgtccgagctgcaatggctgaagagacgaaagcgagccgtcaacccttcccggggaatttttgaagaaatgaagtacctcgaattaatgatcgtgaatgaccataagacctataaaaagcaccggagctcccacgcacacacgaataattttgccaagtcagtggtcaatcttgtcgattcaatatataaggagcaattgaacacaagagttgtactggtagccgttgagacgtggaccgagaaagaccagatcgacatcactaccaaccccgttcagatgttgcacgaattcagtaagtaccgtcaaagaataaaacagcacgcagacgctgtgcacctgatttctcgcgtcacctttcactataagcggtcaagcctctcttatttcggtggcgtgtgctcaagaaccagaggggtcggagtcaacgaatatgggctaccaatggcagtcgctcaggtgctcagtcaatcactcgctcaaaacctaggcatccagtgggagccctcatcacgcaaacccaaatgcgattgtaccgagtcctggggtggctgcatcatggaggagacaggagtgagtcattcccgcaagttttccaaatgttcaatcctggaatacagggacttcctccagagaggcggtggggcttgtttatttaatcgaccgacaaaactgtttgaacccacagaatgcgggaatggatatgtggaggcaggcgaagagtgcgactgcggcttccacgtcgaatgctatgggctgtgttgtaaaaagtgctcactctctaatggcgctcactgtagcgacggaccctgttgcaacaacacatcttgtctcttccagcctaggggatatgaatgcagagacgcagtgaacgaatgcgacattaccgagtattgtaccggggatagcggccagtgtcccccaaaccttcataaacaggacggctacgcttgtaatcagaatcaggggagatgctacaacggtgagtgtaagacccgcgacaaccagtgtcagtatatatggggtactaaggcggcaggctctgacaagttctgttacgagaaactcaatactgaggggaccgaaaagggaaactgcggaaaagacggtgaccgctggattcagtgtagtaaacacgacgtgttctgcgggtttctgctctgcactaaccttacacgcgctccacggattggccagctgcagggagaaataatcccgactagcttttaccaccagggtcgggttattgattgtagtggagcccacgtcgttctggatgatgatacggatgttggctacgtagaggatggaactccttgtggccctagtatgatgtgcctcgacaggaaatgtctacagatacaggcactgaacatgagttcttgtcctttagactcgaagggtaaggtgtgctctggccatggcgtgtgttctaacgaagctacatgcatatgcgatttcacatgggccggaactgactgctccattcgggacccagtccgtaatctacatccgccaaaggacgaagggcctaaggagatgtcccggcgagaagggtccattctcttaagtaaagccccttctgagagcgccgcactggacggccacaggctagcactgctagacagcggatacgacatcctcgccgcagtgctgctggagctgttatccctgtag

SEQ ID NO: 267586 - DNA, 324 bp, Artificial Sequence
  derived and/or modified sequence
taacagatccaggccctgaacatgtcctcctgcccactggacagtaagggaaaagtgtgctccggccatggcgtatgttctaatgaggccacatgcatttgcgattttacttgggccggaactgattgttccattcgggacccagtccgcaaccttcaccctcccaaggacgaggggcctaaggaaatgagcaggcgggagggatccattcttctttccaaagcgccttcagagagtgccgcactggacggacacagattagctctgttagatagtggatatgatattctggccgcagtgcttttggaactgctctctctgtag

SEQ ID NO: 267587 - DNA, 2499 bp, Artificial Sequence
  derived and/or modified sequence
atgaagccccccggcagcagcagcagacagccccccctggccggctgcagcctggccggcgccagctgcggcccccagagaggccccgccggcagcgtgcccgccagcgcccccgccagaacccccccctgcagactgctgctggtgctgctgctgctgccccccctggccgccagcagcagacccagagcctggggcgccgccgcccccagcgccccccactggaacgagaccgccgagaagaacctgggcgtgctggccgacgaggacaacaccctgcagcagaacagcagcagcaacatcagctacagcaacgccatgcagaaggagatcaccctgcccagcagactgatctactacatcaaccaggacagcgagagcccctaccacgtgctggacaccaaggccagacaccagcagaagcacaacaaggccgtgcacctggcccaggccagcttccagatcgaggccttcggcagcaagttcatcctggacctgatcctgaacaacggcctgctgagcagcgactacgtggagatccactacgagaacggcaagccccagtacagcaagggcggcgagcactgctactaccacggcagcatcagaggcgtgaaggacagcaaggtggccctgagcacctgcaacggcctgcacggcatgttcgaggacgacaccttcgtgtacatgatcgagcccctggagctggtgcacgacgagaagagcaccggcagaccccacatcatccagaagaccctggccggccagtacagcaagcagatgaagaacctgaccatggagagaggcgaccagtggcccttcctgagcgagctgcagtggctgaagagaagaaagagagccgtgaaccccagcagaggcatcttcgaggagatgaagtacctggagctgatgatcgtgaacgaccacaagacctacaagaagcacagaagcagccacgcccacaccaacaacttcgccaagagcgtggtgaacctggtggacagcatctacaaggagcagctgaacaccagagtggtgctggtggccgtggagacctggaccgagaaggaccagatcgacatcaccaccaaccccgtgcagatgctgcacgagttcagcaagtacagacagagaatcaagcagcacgccgacgccgtgcacctgatcagcagagtgaccttccactacaagagaagcagcctgagctacttcggcggcgtgtgcagcagaaccagaggcgtgggcgtgaacgagtacggcctgcccatggccgtggcccaggtgctgagccagagcctggcccagaacctgggcatccagtgggagcccagcagcagaaagcccaagtgcgactgcaccgagagctggggcggctgcatcatggaggagaccggcgtgagccacagcagaaagttcagcaagtgcagcatcctggagtacagagacttcctgcagagaggcggcggcgcctgcctgttcaacagacccaccaagctgttcgagcccaccgagtgcggcaacggctacgtggaggccggcgaggagtgcgactgcggcttccacgtggagtgctacggcctgtgctgcaagaagtgcagcctgagcaacggcgcccactgcagcgacggcccctgctgcaacaacaccagctgcctgttccagcccagaggctacgagtgcagagacgccgtgaacgagtgcgacatcaccgagtactgcaccggcgacagcggccagtgcccccccaacctgcacaagcaggacggctacgcctgcaaccagaaccagggcagatgctacaacggcgagtgcaagaccagagacaaccagtgccagtacatctggggcaccaaggccgccggcagcgacaagttctgctacgagaagctgaacaccgagggcaccgagaagggcaactgcggcaaggacggcgacagatggatccagtgcagcaagcacgacgtgttctgcggcttcctgctgtgcaccaacctgaccagagcccccagaatcggccagctgcagggcgagatcatccccaccagcttctaccaccagggcagagtgatcgactgcagcggcgcccacgtggtgctggacgacgacaccgacgtgggctacgtggaggacggcaccccctgcggccccagcatgatgtgcctggacagaaagtgcctgcagatccaggccctgaacatgagcagctgccccctggacagcaagggcaaggtgtgcagcggccacggcgtgtgcagcaacgaggccacctgcatctgcgacttcacctgggccggcaccgactgcagcatcagagaccccgtgagaaacctgcacccccccaaggacgagggccccaaggagatgagcagaagagagggcagcatcctgctgagcaaggcccccagcgagagcgccgccctggacggccacagactggccctgctggacagcggctacgacatcctggccgccgtgctgctggagctgctgagcctgtag

SEQ ID NO: 267588 - DNA, 324 bp, Artificial Sequence
  derived and/or modified sequence
tgacagatccaggccctgaacatgagcagctgccccctggacagcaagggcaaggtgtgcagcggccacggcgtgtgcagcaacgaggccacctgcatctgcgacttcacctgggccggcaccgactgcagcatcagagaccccgtgagaaacctgcacccccccaaggacgagggccccaaggagatgagcagaagagagggcagcatcctgctgagcaaggcccccagcgagagcgccgccctggacggccacagactggccctgctggacagcggctacgacatcctggccgccgtgctgctggagctgctgagcctgtag

SEQ ID NO: 267589 - protein, 367 aa, Artificial Sequence
  derived and/or modified sequence
MAVLKLTDQPPLVQAIFSGDPEEIRMLIHKTEDVNTLDSEKRTPLHVAAFLGDAEIIELLILSGARVNAKDNMWLTPLHRAVASRSEEAVQVLIKHSADVNARDKNWQTPLHVAAANKAVKCAEVIIPLLSSVNVSDRGGRTALHHAALNGHVEMVNLLLAKGANINAFDKKDRRALHWAAYMGHLDVVALLINHGAEVTCKDKKGYTPLHAAASNGQINVVKHLLNLGVEIDEINVYGNTALHIACYNGQDAVVNELIDYGANVNQPNNNGFTPLHFAAASTHGALCLELLVNNGADVNIQSKDGKSPLHMTAVHGRFTRSQTLIQNGGEIDCVDKDGNTPLHVAARYGHELLINTLITSGADTAK

SEQ ID NO: 267590 - protein, 919 aa, Artificial Sequence
  derived and/or modified sequence
MLIHKTEDVNTLDSEKRTPLHVAAFLGDAEIIELLILSGARVNAKDNMWLTPLHRAVASRSEEAVQVLIKHSADVNARDKNWQTPLHVAAANKAVKCAEVIIPLLSSVNVSDRGGRTALHHAALNGHVEMVNLLLAKGANINAFDKKDRRALHWAAYMGHLDVVALLINHGAEVTCKDKKGYTPLHAAASNGQINVVKHLLNLGVEIDEINVYGNTALHIACYNGQDAVVNELIDYGANVNQPNNNGFTPLHFAAASTHGALCLELLVNNGADVNIQSKDGKSPLHMTAVHGRFTRSQTLIQNGGEIDCVDKDGNTPLHVAARYGHELLINTLITSGADTAKCGIHSMFPLHLAALNAHSDCCRKLLSSGFEIDTPDKFGRTCLHAAAAGGNVECIKLLQSSGADFHKKDKCGRTPLHYAAANCHFHCIETLVTTGANVNETDDWGRTALHYAAASDMDRNKTILGNAHDNSEELERARELKEKEATLCLEFLLQNDANPSIRDKEGYNSIHYAAAYGHRQCLELLLERTNSGFEESDSGATKSPLHLAAYNGHHQALEVLLQSLVDLDIRDEKGRTALDLAAFKGHTECVEALINQGASIFVKDNVTKRTPLHASVINGHTLCLRLLLEIADNPEAVDVKDAKGQTPLMLAVAYGHIDAVSLLLEKEANVDTVDILGCTALHRGIMTGHEECVQMLLEQEVSILCKDSRGRTPLHYAAARGHATWLSELLQMALSEEDCCFKDNQGYTPLHWACYNGNENCIEVLLEQKCFRKFIGNPFTPLHCAIINDHGNCASLLLGAIDSSIVSCRDDKGRTPLHAAAFADHVECLQLLLRHSAPVNAVDNSGKTALMMAAENGQAGAVDILVNSAQADLTVKDKDLNTPLHLACSKGHEKCALLILDKIQDESLINEKNNALQT

SEQ ID NO: 267591 - protein, 919 aa, Artificial Sequence
  derived and/or modified sequence
LLIYKTEIISTLDSEKRTPLHVAAFLGDAEIIELLILSGARVNAKDNMWLTPLHRAVASRSEEAVQVLIKHSADVNARDKNWQTPLHVAAANKAVKCAEVIIPLLSSVNVSDRGGRTALHHAALNGHVEMVNLLLAKGANINAFDKKDRRALHWAAYMGHLDVVALLINHGAEVTCKDKKGYTPLHAAASNGQINVVKHLLNLGVEIDEINVYGNTALHIACYNGQDAVVNELIDYGANVNQPNNNGFTPLHFAAASTHGALCLELLVNNGADVNIQSKDGKSPLHMTAVHGRFTRSQTLIQNGGEIDCVDKDGNTPLHVAARYGHELLINTLITSGADTAKCGIHSMFPLHLAALNAHSDCCRKLLSSGFEIDTPDKFGRTCLHAAAAGGNVECIKLLQSSGADFHKKDKCGRTPLHYAAANCHFHCIETLVTTGANVNETDDWGRTALHYAAASDMDRNKTILGNAHDNSEELERARELKEKEATLCLEFLLQNDANPSIRDKEGYNSIHYAAAYGHRQCLELLLERTNSGFEESDSGATKSPLHLAAYNGHHQALEVLLQSLVDLDIRDEKGRTALDLAAFKGHTECVEALINQGASIFVKDNVTKRTPLHASVINGHTLCLRLLLEIADNPEAVDVKDAKGQTPLMLAVAYGHIDAVSLLLEKEANVDTVDILGCTALHRGIMTGHEECVQMLLEQEVSILCKDSRGRTPLHYAAARGHATWLSELLQMALSEEDCCFKDNQGYTPLHWACYNGNENCIEVLLEQKCFRKFIGNPFTPLHCAIINDHGNCASLLLGAIDSSIVSCRDDKGRTPLHAAAFADHVECLQLLLRHSAPVNAVDNSGKTALMMAAENGQAGAVDILVNSAQADLTVKDKDLNTPLHLACSKGHEKCALLILDKIQDESLINEKNNALQT

SEQ ID NO: 267592 - protein, 579 aa, Artificial Sequence
  derived and/or modified sequence
MAVLKLTDQPPLVQAIFSGDPEEIRMLIHKTEDVNTLDSEKRTPLHVAAFLGDAEIIELLILSGARVNAKDNMWLTPLHRAVASRSEEAVQVLIKHSADVNARDKNWQTPLHVAAANKAVKCAEVIIPLLSSVNVSDRGGRTALHHAALNGHVEMVNLLLAKGANINAFDKKDRRALHWAAYMGHLDVVALLINHGAEVTCKDKKGYTPLHAAASNGQINVVKHLLNLGVEIDEINVYGNTALHIACYNGQDAVVNELIDYGANVNQPNNNGFTPLHFAAASTHGALCLELLVNNGADVNIQSKDGKSPLHMTAVHGRFTRSQTLIQNGGEIDCVDKDGNTPLHVAARYGHELLINTLITSGADTAKCGIHSMFPLHLAALNAHSDCCRKLLSSGFEIDTPDKFGRTCLHAAAAGGNVECIKLLQSSGADFHKKDKCGRTPLHYAAANCHFHCIETLVTTGANVNETDDWGRTALHYAAASDMDRNKTILGNAHDNSEELERARELKEKEATLCLEFLLQNDANPSIRDKEGYNSIHYAAAYGHRQCLELVSCFVLFSLTHTHTHTPNHRGINCFFPEL

SEQ ID NO: 267593 - DNA, 375 bp, Artificial Sequence
  derived and/or modified sequence
tatcttctgttagaatactgcgagggtaacgatcttgacttttacctgaagcaacacaagctcatgagcgagaaggaggcgcgaagcatagtaatgcagatcgtaaatgcgctccgatatcttaacgagatcaagccaccgataattcactacgacctcaaaccaggcaatatcctgctggtcgatgggaccgcctgcggagaaatcaagatcacagacttcggcttgtccaagatcatggacgatgactcctatggagtcgatggtatggatctaaccagccagggtgccggcacctactggtaccttcctcccgagtgtttcgtcgtgggaaaggagcctcccaaaatcagtaataaggttgacgtgtggtag

SEQ ID NO: 267594 - DNA, 375 bp, Artificial Sequence
  derived and/or modified sequence
tacctgctgctggagtactgtgagggcaatgacctggacttctacctgaagcagcacaagctgatgtctgagaaggaggcccggagcatcgtgatgcagatcgtgaatgccctgcgctacctgaatgagatcaagccacccatcatccactatgacctgaagccaggcaacatcctgctggtggatggaacagcctgtggggagatcaagatcacagactttggcctgagcaagatcatggatgatgacagctatggagtggatggcatggacctgaccagccagggcgccggcacctactggtacctgcccccagagtgctttgtggtgggcaaggagccccccaagatcagcaacaaggtggatgtgtggtag

SEQ ID NO: 267595 - DNA, 375 bp, Artificial Sequence
  derived and/or modified sequence
tacctgctgctggagtactgcgagggcaacgacctggacttctacttaaaacagcacaagcttatgagcgaaaaggaggccagatcgatcgtcatgcagattgtgaacgctcttaggtacctgaacgaaataaaacctccgattattcactatgatcttaaaccagggaacatcctgctcgtggacggcaccgcttgtggcgagatcaagatcaccgacttcgggctttcgaaaatcatggacgatgattcatatggagtggacggcatggatctgacctcccagggcgccggaacttattggtaccttccccctgagtgtttcgtggtgggaaaggagccacctaagatctctaacaaagtcgatgtgtggtag

SEQ ID NO: 267596 - DNA, 982 bp, Artificial Sequence
  derived and/or modified sequence
tacttattgttagaatactgtgaaggcaatgacttggatttctatctgaagcaacacaagttaatgtcagagaaagaagctcggtctattgtaatgcagattgtaaatgcactaagatatctcaatgagatcaaaccccctattatacattatgatcttaagccaggaaacatcctactggtagatggaacagcatgtggtgaaatcaaaatcactgattttggtctgtccaagattatggatgatgatagctatggtgtagatggaatggatctaacttcccagggggcaggcacttactggtatttacctcctgagtgttttgtagttggaaaagagccaccaaagatttccaacaaggttgatgtatggtcggttggagtcatcttctttcagtgtctttatggtagaaagccatttggtcacaatcaatctcaacaagacattcttcaagaaaatacaatattaaaagccacagaagtccagttccctgtaaaaccggttgtaagcagtgaagccaaggcatttataagacgctgtttggcatatcgaaaagaagatcgatttgatgtgcaccagctggcaaatgacccataccttctcccacacatgagaagatcaaattcttcaggaaacctacacatggctgggctgacagcatcccctacacccccttcttcaagcataattacttactgactttcctccaagattggcatgatatctttgaatttgcttccagatgcacacttaagtttgagagcatttgagtgtttgttttctttttcttttttttttttttttttttttacacaagacgtggttaagaactgtttgtgaactgaagttcctcatagtgtcatttgtatgagagaggatcatggacaatgaataaatgcacacttctgactataattttgagcagtgaaggaaggatgactgcctgttacacagaaacaggaataccatgttaagatagagg

SEQ ID NO: 267597 - DNA, 375 bp, Artificial Sequence
  derived and/or modified sequence
taccttctgcttgagtactgcgaaggaaacgatctcgatttttatctgaagcagcacaaactgatgagcgagaaggaggctcggtccatcgtcatgcagatcgtcaatgccctgaggtacttaaacgagattaagccacccatcattcactacgacctgaaacccggtaacatcctgctggtagacggtacagcatgcggcgagattaagataaccgatttcggtcttagcaaaatcatggacgacgactcttatggggtggacgggatggaccttaccagccaaggagcaggaacgtattggtacttgccacctgaatgtttcgtggtcggcaaggagccacctaagatttctaacaaagtagatgtatggtag

SEQ ID NO: 267598 - DNA, 375 bp, Artificial Sequence
  derived and/or modified sequence
tacctgctgctggagtactgcgagggcaacgacctggacttctacctgaagcagcacaagctgatgagcgagaaggaggccagaagcatcgtgatgcagatcgtgaacgccctgagatacctgaacgagatcaagccccccatcatccactacgacctgaagcccggcaacatcctgctggtggacggcaccgcctgcggcgagatcaagatcaccgacttcggcctgagcaagatcatggacgacgacagctacggcgtggacggcatggacctgaccagccagggcgccggcacctactggtacctgccccccgagtgcttcgtggtgggcaaggagccccccaagatcagcaacaaggtggacgtgtggtag

SEQ ID NO: 267599 - protein, 331 aa, Artificial Sequence
  derived and/or modified sequence
MLRCGQMIFAQALVCRHLGRDWRWTQRKRQPDSYFSVLNAFIDRKDSYYSIHQIAQMGVGEGKSIGQWYGPNTVAQVLKKLAVFDTWSSLAVHIAMDNTVVMEEIRRLCRTSVPCAGATAFPADSDRHCNGFPAGAEVTNRPSPWRPLVLLIPLRLGLTDINEAYVETLKHCFMMPQSLGVIGGKPNSAHYFIGYVGEELIYLDPHTTQPAVEPTDGCFIPDESFHCQHPPCRMSIAELDPSIAVGFFCKTEDDFNDWCQQVKKLSLLGGALPMFELVELQPSHLACPDVLNLSLGESCQVQVGSLGDSSDVERLERFFDSEDEDFEILSL

SEQ ID NO: 267600 - DNA, 996 bp, Artificial Sequence
  derived and/or modified sequence
atgctgagatgcggccagatgatcttcgcccaggccctggtgtgcagacacctgggcagagactggagatggacccagagaaagagacagcccgacagctacttcagcgtgctgaacgccttcatcgacagaaaggacagctactacagcatccaccagatcgcccagatgggcgtgggcgagggcaagagcatcggccagtggtacggccccaacaccgtggcccaggtgctgaagaagctggccgtgttcgacacctggagcagcctggccgtgcacatcgccatggacaacaccgtggtgatggaggagatcagaagactgtgcagaaccagcgtgccctgcgccggcgccaccgccttccccgccgacagcgacagacactgcaacggcttccccgccggcgccgaggtgaccaacagacccagcccctggagacccctggtgctgctgatccccctgagactgggcctgaccgacatcaacgaggcctacgtggagaccctgaagcactgcttcatgatgccccagagcctgggcgtgatcggcggcaagcccaacagcgcccactacttcatcggctacgtgggcgaggagctgatctacctggacccccacaccacccagcccgccgtggagcccaccgacggctgcttcatccccgacgagagcttccactgccagcaccccccctgcagaatgagcatcgccgagctggaccccagcatcgccgtgggcttcttctgcaagaccgaggacgacttcaacgactggtgccagcaggtgaagaagctgagcctgctgggcggcgccctgcccatgttcgagctggtggagctgcagcccagccacctggcctgccccgacgtgctgaacctgagcctgggcgagagctgccaggtgcaggtgggcagcctgggcgacagcagcgacgtggagagactggagagattcttcgacagcgaggacgaggacttcgagatcctgagcctgtag

SEQ ID NO: 267601 - DNA, 996 bp, Artificial Sequence
  derived and/or modified sequence
atgctcaggtgcggacagatgatcttcgcacaggcacttgtgtgtagacaccttggtcgggattggaggtggacccagcggaaacggcaacccgacagctacttctccgttctcaacgccttcattgaccgcaaagacagttactactctattcatcagatcgcgcagatgggcgtgggtgagggcaagagtattgggcagtggtacgggcctaacaccgttgcgcaagtgctgaagaagcttgccgtcttcgatacctggtcatctctggcagtccacattgccatggataatacggtcgtaatggaagagatcagacgtctgtgccggacctcagttccatgcgccggggccacagcctttcccgccgattcagatcgccattgtaacggctttccggcgggcgcagaggtgactaatcgtccctcaccttggcggcctctggtgttgctgatccctctaaggttgggtcttaccgacatcaacgaggcctacgtggagaccctgaagcattgcttcatgatgccacagagtctaggggtcataggtggcaaaccaaatagcgcacactatttcatagggtatgtcggcgaggagctcatctacctggatccccacaccacccagccggctgtggagccaacagatggatgtttcattcctgatgagtcctttcattgtcagcatccaccttgtagaatgagtattgccgagcttgacccctcaattgccgtcggatttttttgtaaaacggaggacgatttcaatgactggtgtcagcaggtgaaaaaactgagccttttgggcggcgctctccctatgttcgagctggttgagctgcagccctcccatctcgcgtgccctgacgtgctaaatttgtcacttggagagtcctgtcaggtacaagtgggcagtctcggggactctagcgatgtggagcgactggagcgatttttcgacagcgaagacgaggactttgagatcctgagcctctag

SEQ ID NO: 267602 - DNA, 996 bp, Artificial Sequence
  derived and/or modified sequence
atgctgcgctgtggccagatgatctttgcccaggccctggtgtgccgccacctgggccgggactggcgctggacccagaggaagaggcagcctgacagctacttctctgtgctgaatgccttcatcgacaggaaggacagctactacagcatccaccagatcgcccagatgggcgtgggggagggcaagagcatcggccagtggtacggccccaacacagtggcccaggtgctgaagaagctggccgtgtttgacacctggagcagcctggccgtgcacatcgccatggacaacacagtggtgatggaggagatccggcggctgtgcaggacctctgtgccctgtgccggggccacagccttccctgctgacagcgacagacactgcaatggcttccctgctggagctgaggtgaccaaccggcccagcccctggaggcccctggtgctgctgatccccctgcggctgggcctgacagacatcaatgaggcctacgtggagaccctgaagcactgcttcatgatgccccagagcctgggcgtcatcggcggcaagcccaacagcgcccactacttcatcggctacgtgggggaggagctgatctacctggacccccacaccacccagcctgctgtggagcccacagatggctgcttcatcccagatgagagcttccactgccagcaccccccctgcaggatgagcattgctgagctggaccccagcattgctgtgggcttcttctgcaagacagaagatgacttcaatgactggtgccagcaggtgaagaagctgagcctgctgggcggggccctgcccatgtttgagctggtggagctgcagcccagccacctggcctgcccagatgtgctgaacctgagcctgggggagagctgccaggtgcaggtgggcagcctgggggacagcagtgatgtggagcggctggagcgcttctttgattctgaagatgaggactttgagatcctgagcctgtag

SEQ ID NO: 267603 - DNA, 996 bp, Artificial Sequence
  derived and/or modified sequence
atgctgcggtgcggccagatgatcttcgcccaggccctggtgtgccgacatctgggacgggattggcggtggacacagagaaaacgtcaacctgacagctactttagcgtgttgaatgcatttattgatcgtaaggactcctattattctatacaccaaattgcccagatgggggtgggcgaaggaaagagtatagggcaatggtacggacccaatacagttgctcaggtcctaaaaaagctggcggtatttgacacatggtcttcgctggcagtgcacatcgccatggataacaccgttgtgatggaagagattcgccgactgtgtcggaccagcgttccttgcgctggtgcgaccgcttttcccgctgactccgatcgtcattgtaatgggtttccggcaggcgcagaagtcactaataggcctagcccctggcgtccgctagtccttttaatcccattgcgtctcggcctgactgatatcaatgaagcatacgtggaaacactgaagcattgctttatgatgccccagagcctaggagtgattgggggcaaacctaattccgcccactacttcatagggtatgtgggggaagagctaatctacttagatccacacaccacgcagccagcagtcgagccaacagatggctgctttatcccagacgaaagtttccattgtcagcatcccccatgccgcatgagcatagccgagctcgacccgtccatcgccgttggatttttttgtaaaaccgaagacgattttaacgattggtgtcagcaggtcaaaaaattatctttgttgggcggtgcactgcctatgttcgaactagtggagctccagccatctcatctggcctgtcccgacgtgcttaatttgtcactgggggagtcctgtcaggttcaagttggcagcctgggggacagcagcgacgtagagcgactcgaacgattttttgattctgaggatgaggacttcgagattctgtcgctgtag

SEQ ID NO: 267604 - DNA, 1685 bp, Artificial Sequence
  derived and/or modified sequence
gcgccggcacacctattggcccccgcggcgtcccgtcgccgcgtcgcgttgctggcccgtcggagcgacgccgctcgggtcagtcggcggccggactgggaagatggacgcagctactctgacctacgacactctccggtttgctgagtttgaagattttcctgagacctcagagcccgtttggatactgggtagaaaatacagcattttcacagaaaaggacgagatcttgtctgatgtggcatctagactttggtttacatacaggaaaaactttccagccattggggggacaggccccacctcggacacaggctggggctgcatgctgcggtgtggacagatgatctttgcccaagccctggtgtgccggcacctaggccgagattggaggtggacacaaaggaagaggcagccagacagctacttcagcgtcctcaacgcattcatcgacaggaaggacagttactactccattcaccagatagcgcaaatgggagttggcgaaggcaagtccataggccagtggtacgggcccaacactgtcgcccaggtcctgaagaagcttgctgtcttcgatacgtggagctccttggcggtccacattgcaatggacaacactgttgtgatggaggaaatcagaaggttgtgcaggaccagcgttccctgtgcaggcgccactgcgtttcctgcagattccgaccggcactgcaacggattccctgccggagctgaggtcaccaacaggccgtcgccatggagacccctggtacttctcattcccctgcgcctggggctcacggacatcaacgaggcctacgtggagacgctgaagcactgcttcatgatgccccagtccctgggcgtcatcggagggaagcccaacagcgcccactacttcatcggctacgttggtgaggagctcatctacctggacccccacaccacgcagccagccgtggagcccactgatggctgcttcatcccggacgagagcttccactgccagcacccgccgtgccgcatgagcatcgcggagcttgacccgtccatcgctgtggggtttttctgtaagactgaagatgacttcaatgattggtgccagcaagtcaaaaagctgtctctgcttggaggtgccctgcccatgtttgagctggtggagctgcagccttcacatctggcctgccccgacgtcctgaacctgtccctaggtgagagctgccaagtccaggtggggtccctcggagattcttctgatgtagagcgactggaaagattcttcgactcagaagatgaagactttgaaatcctgtccctttgaaaatcctggggtcgggggtggcacctgtgagagcctggggctcctggtgccgctgcgtttcatccatcccgcccgctcgcctgccgagggctgcgccccgtgctgcctccccccagagggccacccgctgtgctcgtggactgaggctgcgctgcccgggaggccttactgcttggtgtcagactgcccagctcagagtgcccgtcagggcctgtgcatccgcacgcggagccgtctgttaggagcttccagagtgttctctcgacactgccagccccgtgttagcacctgggcctcagtcccacttgctcccaggcgccggttctgtggttggtttggaattaaagtcctgtttgaagttgtc

SEQ ID NO: 267605 - DNA, 996 bp, Artificial Sequence
  derived and/or modified sequence
atgcttcggtgtggtcagatgatttttgcgcaggcccttgtgtgtcggcatctgggtcgtgactggaggtggacacagagaaaacggcagcccgactcatatttcagtgtgttgaacgccttcattgaccgaaaagattcttactattccatccaccagatcgcccagatgggcgtgggcgagggtaagtcaattggtcagtggtatggccctaacaccgtagcccaagtgcttaaaaagcttgccgtgtttgatacatggagtagcctggctgtgcatattgccatggataatactgtcgttatggaagagatccggaggttgtgtcggacttctgtgccatgcgctggcgcaactgcgttccccgctgattcggatcggcactgtaatggcttccccgcaggcgctgaggtgacgaaccgcccatcaccttggcgtcccctggtgttactcattccgctccggcttggcctgacagatattaacgaagcatatgtcgagactctcaaacactgcttcatgatgccccagtctttaggcgtaattggcggtaagcccaactcagcccactatttcatcggctacgtgggggaagagctgatatacctcgacccacatacgacacagcctgccgtagagccaacagacgggtgcttcattcccgatgagtccttccactgtcagcatcccccttgtcggatgagcatcgccgagctggaccctagcattgcagtaggtttcttttgcaagaccgaagacgacttcaacgactggtgccagcaggtgaaaaaactgagtctattaggcggagccctgccaatgtttgagctggtggagctgcagccctctcacttggcctgtcctgatgtgcttaaccttagcctcggggaatcgtgtcaggtgcaggtaggctcactgggagacagctctgacgttgagaggttagagagattctttgattcggaggacgaagattttgagatactgagtctgtag

SEQ ID NO: 267606 - protein, 283 aa, Artificial Sequence
  derived and/or modified sequence
MLRCGQMIFAQALVCRHLGRDWRWTQRKRQPDSYFSVLNAFIDRKDSYYSIHQIAQMGVGEGKSIGQWYGPNTVAQVLKKLAVFDTWSSLAVHIAMDNTVVMEEIRRLCRTSVPCAGATAFPADSDRHCNGFPAGAEVTNRPSPWRPLVLLIPLRLGLTDINEAYVETLKHCFMMPQSLGVIGGKPNSAHYFIGYVGEELIYLDPHTTQPAVEPTDGCFIPDESFHCQHPPCRMSIAELDPSIAVVLGVGKQGRLVRSIPWAPRPSSWCAAVLGAAVVMCGTP

SEQ ID NO: 267607 - protein, 66 aa, Artificial Sequence
  derived and/or modified sequence
MLRCGQMIFAQALVCRHLGRDWRWTQRKRQPDSYFSVLNAFIDRKDSYYSIHQIAQMGVGEGKSIG

SEQ ID NO: 267608 - protein, 147 aa, Artificial Sequence
  derived and/or modified sequence
MLRCGQMIFAQALVCRHLGRDWRWTQRKRQPDSYFSVLNAFIDRKDSYYSIHQIAQMGVGEGKSIGQWYGPNTVAQVLKKLAVFDTWSSLAVHIAMDNTVVMEEIRRLCRTSVPCAGATAFPADSDRHCNGFPAGAEVTNRPSPWRP

SEQ ID NO: 267609 - protein, 105 aa, Artificial Sequence
  derived and/or modified sequence
MLRCGQMIFAQALVCRHLGRDWRWTQRKRQPDSYFSVLNAFIDRKDSYYSIHQIAQMGVGEGKSIGQWYGPNTVAQVLKKLAVFDTWSSLAVHIAMDNTVVMEEI

SEQ ID NO: 267610 - DNA, 960 bp, Artificial Sequence
  derived and/or modified sequence
atgctgagatgcggccagatgatcttcgcccaggccctggtgtgcagacacctgggcagagactggagatggacccagagaaagagacagcccgacagctacttcagcgtgctgaacgccttcatcgacagaaaggacagctactacagcatccaccagatcgcccagatgggcgtgggcgagggcaagagcatcggccagtggtacggccccaacaccgtggcccaggtgctgaagaagctggccgtgttcgacacctggagcagcctggccgtgcacatcgccatggacaacaccgtggtgatggaggagatcagaagactgtgcagaaccagcgtgccctgcgccggcgccaccgccttccccgccgacagcgacagacactgcaacggcttccccgccggcgccgaggtgaccaacagacccagcccctggagacccctggtgctgctgatccccctgagactgggcctgaccgacatcaacgaggcctacgtggagaccctgaagcactgcttcatgatgccccagagcctgggcgtgatcggcggcaagcccaacagcgcccactacttcatcggctacgtgggcgaggagctgatctacctggacccccacaccacccagcccgccgtggagcccaccgacggctgcttcatccccgacgagagcttccactgccagcaccccccctgcagaatgagcatcgccgagctggaccccagcatcgccgtgggcttcttctgcaagaccgaggacgacttcaacgactggtgccagcaggtgaagaagctgagcctgctgggcggcgccctgcccatgttcgagctggtggagctgcagcccagccacctggcctgccccgacgtgctgaacctgagcctggacagcagcgacgtggagagactggagagattcttcgacagcgaggacgaggacttcgagatcctgagcctgtag

SEQ ID NO: 267611 - DNA, 201 bp, Artificial Sequence
  derived and/or modified sequence
atgctgagatgcggccagatgatcttcgcccaggccctggtgtgcagacacctgggcagagactggagatggacccagagaaagagacagcccgacagctacttcagcgtgctgaacgccttcatcgacagaaaggacagctactacagcatccaccagatcgcccagatgggcgtgggcgagggcaagagcatcggctag

SEQ ID NO: 267612 - DNA, 444 bp, Artificial Sequence
  derived and/or modified sequence
atgctgagatgcggccagatgatcttcgcccaggccctggtgtgcagacacctgggcagagactggagatggacccagagaaagagacagcccgacagctacttcagcgtgctgaacgccttcatcgacagaaaggacagctactacagcatccaccagatcgcccagatgggcgtgggcgagggcaagagcatcggccagtggtacggccccaacaccgtggcccaggtgctgaagaagctggccgtgttcgacacctggagcagcctggccgtgcacatcgccatggacaacaccgtggtgatggaggagatcagaagactgtgcagaaccagcgtgccctgcgccggcgccaccgccttccccgccgacagcgacagacactgcaacggcttccccgccggcgccgaggtgaccaacagacccagcccctggagaccctag

SEQ ID NO: 267613 - DNA, 318 bp, Artificial Sequence
  derived and/or modified sequence
atgctgagatgcggccagatgatcttcgcccaggccctggtgtgcagacacctgggcagagactggagatggacccagagaaagagacagcccgacagctacttcagcgtgctgaacgccttcatcgacagaaaggacagctactacagcatccaccagatcgcccagatgggcgtgggcgagggcaagagcatcggccagtggtacggccccaacaccgtggcccaggtgctgaagaagctggccgtgttcgacacctggagcagcctggccgtgcacatcgccatggacaacaccgtggtgatggaggagatctag

SEQ ID NO: 267614 - DNA, 852 bp, Artificial Sequence
  derived and/or modified sequence
atgctcagatgcggccagatgatcttcgcacaggccctcgtgtgtcgtcacctggggagggattggcggtggacccagcggaagcgtcagccagactcatatttttctgttctgaacgcctttatagatagaaaagattcttactatagcatacaccaaatcgcacagatgggcgttggggagggaaaatccatcggacagtggtacggcccaaatactgtggctcaagtgctgaaaaagctcgccgtgttcgacacttggtcctcattagcagttcatatagctatggataatacagtggttatggaggagatcagaagactttgcaggacaagtgtgccatgcgccggcgctacagcctttccagccgactctgaccggcattgcaacggctttccggctggggctgaggttacgaaccgacccagcccctggagacccctggttctcctgataccactgaggctgggattgacagatattaatgaggcttacgtcgaaacccttaagcattgcttcatgatgccccagtccttaggggtgataggcggaaagccaaactccgcgcactatttcattggttacgtcggcgaggagctaatctatctggatccacatacgacccagccagcggtggaacctactgacggctgcttcataccggacgagtcattccactgtcaacacccaccgtgtcgtatgtcaatcgccgaactggacccgtctattgctgttgtgctcggggtcgggaagcagggccgcttagtgcggtccatcccatgggccccgcgaccatctagctggtgcgccgccgtgttaggggctgcagtcgtgatgtgcggcactccttag

SEQ ID NO: 267615 - DNA, 960 bp, Artificial Sequence
  derived and/or modified sequence
atgctgaggtgcggtcagatgattttcgcccaagcattggtttgccgccacctgggaagggattggagatggactcagcgcaagagacagcctgatagctatttctccgtacttaacgctttcattgaccgaaaagatagctattatagtattcaccaaatagctcagatgggcgttggcgaagggaagtcaattggccaatggtatggcccgaatactgtggcccaggtgctaaaaaagctcgctgttttcgacacgtggtcaagtcttgcggtccacatcgcaatggataacacagtggtgatggaggaaattcgtcgtttatgtagaacctccgtgccgtgcgcaggtgctaccgccttcccagctgactctgatcgtcactgtaatggcttcccagcaggcgcggaggttacaaatagaccatcgccatggcgccccctggttttgctgatacccctccgactgggcctcacggatatcaacgaggcttatgtggaaacactcaagcactgtttcatgatgccgcaaagcttaggcgtgatcggcggcaagccaaatagcgcacactactttattgggtacgtcggagaggaactcatctatctggacccgcacaccacccaaccagctgtcgagcccactgatgggtgttttatccccgacgaatcctttcactgccaacatccaccatgccggatgtcaatcgcggagttggatccctcaattgctgtggggttcttttgtaagacagaggacgactttaacgattggtgccagcaggtaaagaagctgtcactgctgggcggagctctgcctatgttcgagctcgtagaactccagccctcccatctggcatgcccagacgtactcaacctatctctagattctagcgatgttgaaaggctcgagagattcttcgattcagaggatgaagatttcgagattcttagtctgtag

SEQ ID NO: 267616 - DNA, 201 bp, Artificial Sequence
  derived and/or modified sequence
atgttgcgctgtggccagatgatcttcgctcaagcgctagtttgccgccatctgggcagggattggcgttggacgcagcgcaaaaggcagcccgattcttacttttctgtcctgaatgcattcattgaccgcaaggacagctattatagcattcaccagattgctcagatgggggtgggggaggggaaaagtatcgggtag

SEQ ID NO: 267617 - DNA, 444 bp, Artificial Sequence
  derived and/or modified sequence
atgttgaggtgtggccagatgatattcgcgcaggctctggtctgtcgacacctaggccgggactggaggtggacccagcgaaaacgacaacctgacagttatttttctgtactcaatgcgttcattgatcgcaaggactcctactactcaattcaccagatcgctcagatgggagtgggggaaggcaagtccatagggcagtggtacgggcccaatactgtggcacaagttctgaagaaattagcggtctttgacacatggtcctcccttgccgtgcatatcgcaatggacaacacggtcgtgatggaagagatcaggcgactgtgcagaacatccgtcccatgtgccggcgccacagcatttcccgcggattccgatagacattgcaatggcttccccgcgggagccgaggtcactaatcgaccaagcccctggagaccctag

SEQ ID NO: 267618 - DNA, 318 bp, Artificial Sequence
  derived and/or modified sequence
atgttaagatgtggacaaatgatatttgcgcaggcactggtttgcagacacctggggagggattggagatggactcagcgcaaaagacaaccagacagctatttttccgtgcttaacgcatttatcgaccggaaggacagttactactccatccaccagatcgcgcagatgggggtgggagaaggaaaatccattggccagtggtatggtccaaacactgtcgcccaggttctcaaaaagcttgctgtattcgacacatggtcttctctcgcagttcatatcgccatggacaataccgtggtgatggaggaaatctag

SEQ ID NO: 267619 - DNA, 852 bp, Artificial Sequence
  derived and/or modified sequence
atgctgcgctgtggccagatgatctttgcccaggccctggtgtgccgccacctgggccgggactggcgctggacccagaggaagaggcagcctgacagctacttctctgtgctgaatgccttcatcgacaggaaggacagctactacagcatccaccagatcgcccagatgggcgtgggggagggcaagagcatcggccagtggtacggccccaacacagtggcccaggtgctgaagaagctggccgtgtttgacacctggagcagcctggccgtgcacatcgccatggacaacacagtggtgatggaggagatccggcggctgtgcaggacctctgtgccctgtgccggggccacagccttccctgctgacagcgacagacactgcaatggcttccctgctggagctgaggtgaccaaccggcccagcccctggaggcccctggtgctgctgatccccctgcggctgggcctgacagacatcaatgaggcctacgtggagaccctgaagcactgcttcatgatgccccagagcctgggcgtcatcggcggcaagcccaacagcgcccactacttcatcggctacgtgggggaggagctgatctacctggacccccacaccacccagcctgctgtggagcccacagatggctgcttcatcccagatgagagcttccactgccagcaccccccctgcaggatgagcattgctgagctggaccccagcattgctgtggtgctgggcgtgggcaagcagggccgcctggtgcgcagcatcccctgggccccccggcccagctcctggtgtgccgctgtgctgggcgctgctgtggtgatgtgtggcaccccctag

SEQ ID NO: 267620 - DNA, 960 bp, Artificial Sequence
  derived and/or modified sequence
atgctgcgctgtggccagatgatctttgcccaggccctggtgtgccgccacctgggccgggactggcgctggacccagaggaagaggcagcctgacagctacttctctgtgctgaatgccttcatcgacaggaaggacagctactacagcatccaccagatcgcccagatgggcgtgggggagggcaagagcatcggccagtggtacggccccaacacagtggcccaggtgctgaagaagctggccgtgtttgacacctggagcagcctggccgtgcacatcgccatggacaacacagtggtgatggaggagatccggcggctgtgcaggacctctgtgccctgtgccggggccacagccttccctgctgacagcgacagacactgcaatggcttccctgctggagctgaggtgaccaaccggcccagcccctggaggcccctggtgctgctgatccccctgcggctgggcctgacagacatcaatgaggcctacgtggagaccctgaagcactgcttcatgatgccccagagcctgggcgtcatcggcggcaagcccaacagcgcccactacttcatcggctacgtgggggaggagctgatctacctggacccccacaccacccagcctgctgtggagcccacagatggctgcttcatcccagatgagagcttccactgccagcaccccccctgcaggatgagcattgctgagctggaccccagcattgctgtgggcttcttctgcaagacagaagatgacttcaatgactggtgccagcaggtgaagaagctgagcctgctgggcggggccctgcccatgtttgagctggtggagctgcagcccagccacctggcctgcccagatgtgctgaacctgagcctggacagcagtgatgtggagcggctggagcgcttctttgattctgaagatgaggactttgagatcctgagcctgtag

SEQ ID NO: 267621 - DNA, 201 bp, Artificial Sequence
  derived and/or modified sequence
atgctgcgctgtggccagatgatctttgcccaggccctggtgtgccgccacctgggccgggactggcgctggacccagaggaagaggcagcctgacagctacttctctgtgctgaatgccttcatcgacaggaaggacagctactacagcatccaccagatcgcccagatgggcgtgggggagggcaagagcattggatag

SEQ ID NO: 267622 - DNA, 444 bp, Artificial Sequence
  derived and/or modified sequence
atgctgcgctgtggccagatgatctttgcccaggccctggtgtgccgccacctgggccgggactggcgctggacccagaggaagaggcagcctgacagctacttctctgtgctgaatgccttcatcgacaggaaggacagctactacagcatccaccagatcgcccagatgggcgtgggggagggcaagagcatcggccagtggtacggccccaacacagtggcccaggtgctgaagaagctggccgtgtttgacacctggagcagcctggccgtgcacatcgccatggacaacacagtggtgatggaggagatccggcggctgtgcaggacctctgtgccctgtgccggggccacagccttccctgctgacagcgacagacactgcaatggcttccctgctggagctgaggtgaccaaccggcccagcccctggaggccctag

SEQ ID NO: 267623 - DNA, 318 bp, Artificial Sequence
  derived and/or modified sequence
atgctgcgctgtggccagatgatctttgcccaggccctggtgtgccgccacctgggccgggactggcgctggacccagaggaagaggcagcctgacagctacttctctgtgctgaatgccttcatcgacaggaaggacagctactacagcatccaccagatcgcccagatgggcgtgggggagggcaagagcatcggccagtggtacggccccaacacagtggcccaggtgctgaagaagctggccgtgtttgacacctggagcagcctggccgtgcacatcgccatggacaacacagtggtgatggaggagatctag

SEQ ID NO: 267624 - DNA, 852 bp, Artificial Sequence
  derived and/or modified sequence
atgctgcggtgcggccagatgatcttcgcccaggccctggtgtgccggcacctaggcagggactggcgatggacccagagaaagagacagccagattcctactttagtgtgctgaacgcattcatagaccgcaaagattcctattacagtattcatcagatcgctcagatgggcgtcggagagggaaaatccattggacagtggtacggaccaaatactgtggcccaagtgctgaaaaaactagctgtgtttgatacctggagcagcctcgctgtgcatattgccatggacaatacagtggtaatggaggagatcagaaggttgtgtcgaacctcagttccgtgcgctggggccaccgcatttcccgcagactcagacagacattgtaatggctttcccgccggagctgaggtgaccaatcgtccttctccatggcgccctcttgttttactgatccctctccgccttgggctgaccgacataaacgaagcttacgtcgaaaccctgaaacactgcttcatgatgcctcagagtttgggagttattggaggaaagcccaattccgctcactatttcattggatacgtgggtgaagagttgatctaccttgacccccataccacacagcccgcggtggagcctaccgacgggtgtttcatccccgatgagagcttccattgtcagcacccgccatgtagaatgtctattgctgaactggacccttcgatagccgttgtgctgggcgtcggaaagcagggtaggctcgtgcgttcaattccttgggcaccccggcctagttcttggtgtgctgcggtcttgggtgcggccgtggtgatgtgtggcacaccttag

SEQ ID NO: 267625 - DNA, 960 bp, Artificial Sequence
  derived and/or modified sequence
atgctgcggtgcggccagatgatcttcgcccaggccctggtgtgccgccacctcggccgcgactggagatggacacagcgtaagaggcaaccagatagctactttagcgtgctgaacgcattcatcgatcgaaaagactcatattatagcatccatcagatcgcacaaatgggagtgggggaagggaaaagcattggtcagtggtatggcccaaacacagtagcacaggtacttaaaaaacttgcggtgttcgatacttggtcttctctagccgtgcacatagccatggataacaccgtcgttatggaggaaataagaagactgtgcagaacaagtgtgccatgcgcaggggcgaccgctttccccgccgactcagatcgccattgtaacgggtttccagctggggcagaggtgaccaatagaccttctccctggaggcctctggtgctgctcatacctctgcgccttgggctgacagatattaacgaggcctacgtggaaactctcaagcactgctttatgatgccccagtctctgggtgtgattggaggtaagcccaactccgcccactatttcattgggtacgtcggcgaagaactgatttatctggacccacataccacccagccggcagtagagccaactgatgggtgtttcatccctgacgaaagctttcactgtcagcaccctccctgccgaatgagtattgccgagctggatcccagcatcgctgtgggctttttctgcaaaaccgaagatgacttcaatgattggtgtcagcaggtaaagaagttatcccttctgggaggagctctgccaatgtttgaactcgtagagttacaaccatctcacctcgcttgtccagacgtactgaacttgagcctggactccagcgatgtggagaggctcgagcgctttttcgatagcgaggatgaggactttgagatcctatccttgtag

SEQ ID NO: 267626 - DNA, 201 bp, Artificial Sequence
  derived and/or modified sequence
atgctgcggtgcggccagatgatcttcgcccaggccctggtgtgccgacacctggggcgcgactggaggtggacgcagcgaaaacgacagcctgattcttatttctcggtattgaatgcttttatagatagaaaagactcctattatagcatacatcagatcgcccaaatgggagtgggtgaaggtaagagtatcggctag

SEQ ID NO: 267627 - DNA, 444 bp, Artificial Sequence
  derived and/or modified sequence
atgctgcggtgcggccagatgatcttcgcccaggccctggtgtgcaggcatttaggtcgagactggagatggacccagcgaaagcgacagcccgatagttacttcagtgtgctgaacgccttcattgatcggaaagattcctactattccattcaccaaatcgcccaaatgggcgtgggtgagggcaagtcaattggacaatggtacggacccaacaccgtggcccaggtgcttaagaagctggcggtgtttgacacgtggtcttccctggcagtgcacatcgcgatggacaatacagttgtgatggaggagatcaggcgtctgtgtaggactagcgtcccttgcgccggagcaaccgcattccccgctgactcggataggcattgtaatgggtttcctgccggcgctgaggttaccaacaggcctagtccctggcgcccttag

SEQ ID NO: 267628 - DNA, 318 bp, Artificial Sequence
  derived and/or modified sequence
atgctgcggtgcggccagatgatcttcgcccaggccctggtgtgcagacacctgggtcgggattggagatggacccagagaaagagacagcctgattcatacttctcagtactaaacgccttcatagatcgtaaagattcctactatagtattcatcagatcgcccagatgggtgtcggtgaaggcaaatccataggtcaatggtacggcccaaatactgtggcccaggtcctcaagaaacttgccgtgtttgacacatggagctccctggctgttcacatagctatggataatacagttgtcatggaggagatatag

SEQ ID NO: 267629 - DNA, 852 bp, Artificial Sequence
  derived and/or modified sequence
atgctgaggtgcggtcaaatgattttcgctcaggcactggtgtgcagacatctgggaagagactggcgttggacacaacggaagagacagcccgacagctacttttctgtgcttaacgcttttatcgacaggaaggatagttactactctattcaccagattgctcagatgggagtcggggaggggaaaagcattggccagtggtatgggccaaacaccgtcgcccaggtgctgaagaagctggccgtgtttgatacctggagttcattggcggtgcatatcgctatggacaatactgtcgtaatggaggagatccgaaggctgtgtaggacaagcgtgccgtgtgcgggagcgactgcctttccagccgattccgataggcactgcaacggcttccccgctggggctgaggtgaccaaccggccttcaccttggcggcctctggtgttgcttattcctctgcgcctgggactgacagatattaacgaggcttacgtggagactctgaagcactgcttcatgatgccacagagcctgggcgtgattggcggtaagcctaattcagctcactatttcattggctacgtgggcgaggagctgatctatctggacccccacaccacccagcccgcagtggagcccacggatgggtgttttatacctgacgagtccttccactgccagcaccctccatgtaggatgtcaatagctgaacttgatcctagtatcgctgtcgtcttgggggttggtaagcagggcagactggtacgtagcataccctgggctccccgtccgtcatcatggtgcgccgctgtcctcggcgctgcagtggtgatgtgcgggacgccctag

SEQ ID NO: 267630 - DNA, 960 bp, Artificial Sequence
  derived and/or modified sequence
atgctcaggtgtgggcagatgatattcgctcaggccttggtctgccgccatctcggacgcgactggcgatggactcagcgcaagaggcagcctgattcttacttttcagtgctgaacgcatttatcgatcggaaggattcctattactccatacaccagatcgcacagatgggtgtgggagaaggtaagtcaatcggacagtggtatggtccaaataccgtggcccaggtattgaagaagttggctgtttttgacacctggtctagcctggctgttcatatcgctatggacaacaccgtggtgatggaggaaattcgtagactgtgcaggacatcagtgccttgtgccggagcaactgcttttcctgctgattcggaccgtcactgcaatggtttccctgccggtgcggaagtgacaaacagaccaagtccatggcgaccgctggtgctgctaatcccacttcggcttggccttacagacattaatgaggcgtatgtggaaacccttaaacactgctttatgatgcctcagagcttgggagtgataggaggcaagcctaactccgcgcattatttcatcggttatgtaggcgaggagctgatctatcttgacccccacaccactcagccagctgtcgagcctacagatgggtgtttcatccctgatgagtcttttcactgccaacacccaccttgtagaatgtcaatcgccgagcttgacccaagcattgccgtcggttttttctgcaaaaccgaagatgacttcaatgattggtgtcagcaggtcaaaaagttaagtttactggggggagctctccccatgtttgagctagtcgaactgcaacctagtcatctggcttgccctgacgtattgaatttaagtctcgactcgagcgatgtggaacggctcgagagattcttcgactccgaagatgaagattttgaaatcctcagcctttag

SEQ ID NO: 267631 - DNA, 201 bp, Artificial Sequence
  derived and/or modified sequence
atgctgcggtgcggccagatgatcttcgcacaggccctggtctgccggcacctaggtcgggattggcggtggacccagcggaaacgacaacccgatagctacttcagtgtgctgaacgccttcatcgatcgcaaagactcctactattctatccatcagattgctcagatgggagttggcgagggaaaatcgattgggtag

SEQ ID NO: 267632 - DNA, 444 bp, Artificial Sequence
  derived and/or modified sequence
atgctacgctgcggccaaatgatatttgcacaggccctcgtctgtcgacacctgggaagagactggaggtggacccagagaaagaggcagcctgactcctacttcagtgtgttgaacgcattcatcgacagaaaagatagttattactcaatccatcaaatagcccaaatgggcgtcggggaggggaagtccatcgggcagtggtatggacccaatacggtggcccaggttctcaagaagctggctgtgttcgatacctggagttcattagccgttcacatagcaatggacaacaccgtagttatggaagaaatcagaaggctgtgtcgcacatctgtgccctgtgcaggagcgacagcctttccagctgattctgaccgccactgcaatggatttcccgctggagcggaggtgactaataggccttccccatggcgcccttag

SEQ ID NO: 267633 - DNA, 318 bp, Artificial Sequence
  derived and/or modified sequence
atgctgcgatgcggtcagatgatcttcgctcaggccctggtttgcagacatctggggagggactggcgttggacacaaaggaagaggcagcctgatagctatttcagtgtcctgaacgcattcattgataggaaggatagttactattctattcaccagatcgctcagatgggtgttggagaaggcaaaagtattggccagtggtacgggccaaacactgtggctcaggtgctgaagaagctcgctgtgtttgatacatggtcctctttagctgtgcatattgcgatggataacaccgtggtcatggaagaaatatag

SEQ ID NO: 267634 - DNA, 852 bp, Artificial Sequence
  derived and/or modified sequence
atgctgcggtgtggacagatgatctttgcccaagccctggtgtgccggcacctaggccgagattggaggtggacacaaaggaagaggcagccagacagctacttcagcgtcctcaacgcattcatcgacaggaaggacagttactactccattcaccagatagcgcaaatgggagttggcgaaggcaagtccataggccagtggtacgggcccaacactgtcgcccaggtcctgaagaagcttgctgtcttcgatacgtggagctccttggcggtccacattgcaatggacaacactgttgtgatggaggaaatcagaaggttgtgcaggaccagcgttccctgtgcaggcgccactgcgtttcctgcagattccgaccggcactgcaacggattccctgccggagctgaggtcaccaacaggccgtcgccatggagacccctggtacttctcattcccctgcgcctggggctcacggacatcaacgaggcctacgtggagacgctgaagcactgcttcatgatgccccagtccctgggcgtcatcggagggaagcccaacagcgcccactacttcatcggctacgttggtgaggagctcatctacctggacccccacaccacgcagccagccgtggagcccactgatggctgcttcatcccggacgagagcttccactgccagcacccgccgtgccgcatgagcatcgcggagcttgacccgtccatcgctgtggtacttggggtggggaagcagggaaggctggtgcgatctattccttgggctccacgtccgagttcatggtgcgccgctgtgctgggagctgcagtggtaatgtgtgggacaccttga

SEQ ID NO: 267635 - DNA, 852 bp, Artificial Sequence
  derived and/or modified sequence
atgctgagatgcggccagatgatcttcgcccaggccctggtgtgcagacacctgggcagagactggagatggacccagagaaagagacagcccgacagctacttcagcgtgctgaacgccttcatcgacagaaaggacagctactacagcatccaccagatcgcccagatgggcgtgggcgagggcaagagcatcggccagtggtacggccccaacaccgtggcccaggtgctgaagaagctggccgtgttcgacacctggagcagcctggccgtgcacatcgccatggacaacaccgtggtgatggaggagatcagaagactgtgcagaaccagcgtgccctgcgccggcgccaccgccttccccgccgacagcgacagacactgcaacggcttccccgccggcgccgaggtgaccaacagacccagcccctggagacccctggtgctgctgatccccctgagactgggcctgaccgacatcaacgaggcctacgtggagaccctgaagcactgcttcatgatgccccagagcctgggcgtgatcggcggcaagcccaacagcgcccactacttcatcggctacgtgggcgaggagctgatctacctggacccccacaccacccagcccgccgtggagcccaccgacggctgcttcatccccgacgagagcttccactgccagcaccccccctgcagaatgagcatcgccgagctggaccccagcatcgccgtggtgctgggcgtgggcaagcagggcagactggtgagaagcatcccctgggcccccagacccagcagctggtgcgccgccgtgctgggcgccgccgtggtgatgtgcggcaccccctag

SEQ ID NO: 267636 - DNA, 1066 bp, Artificial Sequence
  derived and/or modified sequence
gcagccctttcctcttgctctttgatgttttgtaggcctgcagctcccaagcacagaggcatgagtggggagaatgtcaccaaggtcagcaccttcatcctggtgggcctccccacggccccagggctgcagtacctgctcttcctcctcttcctgctcacctacctctttgtcctggtggagaacctggccatcatcctcatcgtctggagcagcacctccctccacaggcccatgtactactttctgagctccatgtctttcctggagatctggtacgtgtctgacatcacccccaagatgctggagggcttcctcctccagcagaaacgcatctctttcgtcgggtgcatgacgcagctctacttcttcagctccctggtgtgcaccgagtgtgtgcttctggcctccatggcctacgaccgctacgtggccatctgccacccgctgcgctaccacgtccttgtgaccccggggctgtgcctccagctggtgggcttctcctttgtgagtggcttcaccatctccatgatcaaggtctgttttatctccagcgtcacgttctgtggctccaacgtcttgaaccacttcttctgtgacatttcccccatcctcaagctggcctgcacggacttctccactgcagagctggtggatttcatcctggccttcatcatcctggtgtttccgctcctggccaccatactgtcatattggcacatcaccctggctgtcctgcgcatcccctcggccaccggctgctggagagccttctctacctgcgcctctcacctcaccgtggtcaccgtcttctatacagccttgcttttcatgtatgtccggccccaagccattgattcccagagctccaacaagctcatctctgccgtgtacactgttgtcacgccaataattaaccctttgatttactgcctgaggaacaaggaatttaaggacgccttgaaaaaggccttgggcttgggtcaaacttcacactaagacaactaaatgtcctagagtaaaatctgtagtgatgaaacaacattgtatgtggcactttgtgctc

SEQ ID NO: 267637 - protein, 1799 aa, Artificial Sequence
  derived and/or modified sequence
MAGASVKVAVRVRPFNSREMSRDSKCIIQMSGSTTTIVNPKQPKETPKSFSFDYSYWSHTSPEDINYASQKQVYRDIGEEMLQHAFEGYNVCIFAYGQTGAGKSYTMMGKQEKDQQGIIPQLCEDLFSRINDTTNDNMSYSVEVSYMEIYCERVRDLLNPKNKGNLRVREHPLLGPYVEDLSKLAVTSYNDIQDLMDSGNKARTVAATNMNETSSRSHAVFNIIFTQKRHDAETNITTEKVSKISLVDLAGSERADSTGAKGTRLKEGANINKSLTTLGKVISALAEMVSGPARNKKKKKTDFIPYRDSVLTWLLRENLGGNSRTAMVAALSPADINYDETLSTLRYADRAKQIRCNAVINEDPNNKLIRELKDEVTRLRDLLYAQGLGDITDTNTVPGGPKLTNALVGMSPSSSLSALSSRAASVSSLHERILFAPGSEEAIERLKETEKIIAELNETWEEKLRRTEAIRMEREALLAEMGVAMREDGGTLGVFSPKKTPHLVNLNEDPLMSECLLYYIKDGITRVGREDGERRQDIVLSGHFIKEEHCVFRSDSRGGSEAVVTLEPCEGADTYVNGKKVTEPSILRSGNRIIMGKSHVFRFNHPEQARQERERTPCAETPAEPVDWAFAQRELLEKQGIDMKQEMEQRLQELEDQYRREREEATYLLEQQRLDYESKLEALQKQMDSRYYPEVNEEEEEPEDEVQWTERECELALWAFRKWKWYQFTSLRDLLWGNAIFLKEANAISVELKKKVQFQFVLLTDTLYSPLPPDLLPPEAAKDRETRPFPRTIVAVEVQDQKNGATHYWTLEKLRQRLDLMREMYDRAAEVPSSVIEDCDNVVTGGDPFYDRFPWFRLVGSSAISGCNSYPLLNTCMSERMAALTPSPTFSSPDSDATEPAEEQSVGEEEEEEEEEEDEEEEDLEDDVFPEHALCDGRDPFYDRPPLFSLVGRAFVYLSNLLYPVPLVHRVAIVSEKGEVKGFLRVAVQAISADEEAPDYGSGVRQSGTAKISFDDQHFEKFQSESCPVVGMSRSGTSQEELRIVEGQGQGADVGPSADEVNNNTCSAVPPEGLLLDSSEKAALDGPLDAALDHLRLGNTFTFRVTVLQASSISAEYADIFCQFNFIHRHDEAFSTEPLKNTGRGPPLGFYHVQNIAVEVTKSFIEYIKSQPIVFEVFGHYQQHPFPPLCKDVLSPLRPSRRHFPRVMPLSKPVPATKLSTLTRPCPGPCHCKYDLLVYFEICELEANGDYIPAVVDHRGGMPCMGTFLLHQGIQRRITVTLLHETGSHIRWKEVRELVVGRIRNTPETDESLIDPNILSLNILSSGYIHPAQDDRVSLGNDTRTFYQFEAAWDSSMHNSLLLNRVTPYREKIYMTLSAYIEMENCTQPAVVTKDFCMVFYSRDAKLPASRSIRNLFGSGSLRASESNRVTGVYELSLCHVADAGSPGMQRRRRRVLDTSVAYVRGEENLAGWRPRSDSLILDHQWELEKLSLLQEVEKTRHYLLLREKLETAQRPVPEALSPAFSEDSESHGSSSASSPLSAEGRPSPLEAPNERQRELAVKCLRLLTHTFNREYTHSHVCVSASESKLSEMSVTLLRDPSMSPLGVATLTPSSTCPSLVEGRYGATDLRTPQPCSRPASPEPELLPEADSKKLPSPARATETDKEPQRLLVPDIQEIRVSPIVSKKGYLHFLEPHTSGWARRFVVVRRPYAYMYNSDKDTVERFVLNLATAQVEYSEDQQAMLKTPNTFAVCTEHRGILLQAASDKDMHDWLYAFNPLLAGTIRSKLSRRRSAQMRV

SEQ ID NO: 267638 - DNA, 5400 bp, Artificial Sequence
  derived and/or modified sequence
atggccggtgcatccgtgaaggtggccgtacgcgtgaggccttttaattcgcgcgaaatgtctcgggacagcaagtgcataatccagatgagcggatcgacgacaacaattgtgaatcctaagcagcctaaagagacgccgaaaagcttcagctttgattattcttactggtcacacacctcccccgaagatatcaattacgccagccagaaacaggtgtatagggatatcggggaggagatgcttcagcatgcgtttgagggctataacgtgtgtatcttcgcttatggacagaccggcgcgggtaaaagctataccatgatgggaaagcaagagaaagaccagcagggtatcatcccacaactgtgcgaagacctcttctcccggatcaacgatacgacaaacgacaacatgtcttattccgtggaggtttcatacatggagatttattgcgagcgagtgagggatctgctgaatcccaagaacaagggcaatctgcgggtgagagaacacccgctgttagggccctacgtcgaagatctatcaaaactggcggtgacgagctacaacgacatacaggacctgatggattccggcaataaggctcggacagtagccgctacgaacatgaacgagacttccagcagatcccacgcagttttcaacattatttttactcagaagcgccatgacgcagaaaccaacatcactactgagaaggtttctaagatttccctggtggacctggcaggttctgagcgagccgacagcaccggagcaaaggggactcgtcttaaagagggtgcaaacatcaacaagtctctgacgaccctggggaaggtgatcagcgccctggccgagatggtatcagggccagctcggaataagaagaagaagaaaacagacttcataccatatcgggattcagtgctgacatggctgcttagggaaaatctcggaggcaattcaaggactgctatggtggctgcactgtcaccagccgatataaattacgatgaaaccctctcaacattacggtatgcagatcgcgcaaagcaaatcaggtgtaacgccgtcatcaacgaagatcctaataacaagttaatccgtgaattgaaggatgaagttacacggctccgcgatttactatatgcacagggactgggggatatcaccgacaccaacacagtgcccggcggccccaagcttactaatgccttggtgggaatgtcgccctcctcttccctcagcgctttgtcctctagagccgctagtgtttcttccctgcacgagcgtattctcttcgcccctggaagcgaggaagccattgaacggctcaaggaaacagaaaagatcatcgctgagctcaacgaaacatgggaggagaaactgagacggacagaagccatacgtatggaacgcgaggctttgctcgctgagatgggagtggctatgcgggaagatgggggcactctaggagtgttctcccctaagaagactcctcatttggtgaaccttaacgaggacccccttatgagcgaatgcctgctctactacatcaaggacgggatcacaagggtgggccgcgaggacggggaacgtcgacaggatattgtgttgagcggacatttcattaaggaggagcattgcgttttccgatctgattcccgtgggggatcagaggcggtggtaactctagagccttgcgaaggggctgatacctacgtaaacggaaaaaaggtaaccgagcctagcatactgaggagtggaaaccgaatcattatgggcaaatctcatgtgttccgtttcaaccacccggagcaagctcgccaagagagagaacggacaccgtgcgcagagacacccgccgagcctgtggattgggcgtttgcccagcgcgagctgctcgagaagcagggcatcgacatgaagcaggagatggaacagcggctgcaggagctggaagatcaatatcggagagagagggaggaggctacttacctgctggagcagcagcggctggactacgagtcaaagctagaagccctgcagaaacaaatggacagcaggtattaccctgaggtgaatgaggaggaagaagaacccgaggacgaggtgcagtggaccgaaagagaatgcgagctagccctttgggcatttcgcaaatggaaatggtatcagttcacatcacttagagatctcttatggggcaatgccattttcctgaaagaggcaaatgcgatttctgtggagctcaagaagaaagtccagtttcagttcgtcctcctcactgacacactgtacagcccactgcctcccgacctattaccccctgaagccgccaaggaccgcgagacacggcctttcccgaggacgatcgtggcagtcgaagttcaggatcagaagaacggggctacgcactattggacactggaaaagcttcgacagagactcgacctgatgcgcgagatgtatgatcgcgcagccgaagtcccttcgagcgtgatcgaagactgtgataatgttgtcacgggaggagatccattttacgacagattcccttggttccggttagtgggatcctcagctattagtggctgtaacagttatcctctcttgaatacttgtatgagcgagaggatggctgcgctcaccccctcgccaacctttagtagtcctgatagcgatgctactgagcctgctgaagagcagtcagttggtgaggaagaagaggaggaagaagaagaagaggatgaggaggaggaggatctggaagacgatgtgtttcctgaacacgctctgtgcgacggcagagaccccttctatgacaggcctcccttgttcagcttggtgggaagggctttcgtctatcttagcaacttgctttatcctgtgcccttagtccatcgcgtggctattgttagcgagaagggagaggtgaaaggctttctgcgtgtagccgtccaggctatctcagcggacgaagaagctccggactatggctccggggttaggcagtccgggacggctaaaattagtttcgacgatcagcacttcgagaagtttcaatcagagtcatgcccagtagttgggatgtcacgcagcgggacctctcaggaggaactgaggattgttgagggccagggccagggagctgacgtcggtccaagtgctgacgaggtgaataacaacacgtgcagcgctgttcctcctgagggcctgcttttggactcgagtgagaaagctgctctcgatggccctctggacgccgccctggatcatttgcgtctggggaacaccttcactttccgagtaactgtacttcaggcttcttccatttctgccgaatatgccgacattttctgtcagtttaacttcattcatagacacgacgaggccttctccacagagcccctcaagaacaccgggcgcggccctccgcttggtttttaccacgtgcagaacattgccgttgaggttaccaaatcatttatagagtacattaagtcccaacctattgtttttgaggtgttcggccactatcagcagcatccctttcctccactctgcaaagatgtgttatctccgcttcgccccagccggagacatttcccccgtgtgatgcccttgtccaaaccagtacccgctacaaaactctctacactgaccaggccttgtcccgggccatgtcattgtaagtacgacctgctggtttactttgagatctgcgaactcgaagccaatggcgattacattcccgctgtggtcgatcacagaggaggcatgccgtgtatgggcacttttcttctgcaccagggaatccagaggaggatcacagttaccctgctccacgagactggaagtcatattaggtggaaggaagtacgagagctggtggtggggaggattcggaatacaccggagaccgacgagagtctaattgatccgaatattctgtctcttaatattctctctagcggttacatccatcctgcacaagatgatcgcgtaagcctcggaaatgatacgcgtaccttttaccagtttgaggcagcgtgggactcaagcatgcataactcactactgctgaaccgggtgacaccctatcgagagaagatctatatgaccctgtcagcttacatcgagatggaaaactgcacacagccggcagtagtcactaaagatttctgcatggtgttttacagcagagatgcaaagcttccagcatcgcgctccattcgcaatctgttcggctccggcagtctgagagcgagcgaaagtaatcgggttaccggcgtgtatgaattaagcttatgccacgtcgccgatgcgggcagtccaggaatgcagcgccggcgtagaagagtgctcgacactagcgtggcctatgtccggggagaggagaacctggctggctggaggccgcgctcagactcactcattctggatcaccaatgggagctggagaaactgagtctactccaggaggttgaaaagaccagacattatctacttctgcgcgagaagttggagacagcccagagacccgtgccggaggctctgtctcccgcattttccgaggacagcgagtctcacggctcgagctcagcgtcatcccctctgagcgcggagggtcgaccctcacctctcgaagcgcccaatgagcgtcaacgcgagcttgctgtgaagtgtctgcgattactgacgcatacattcaacagggaatacacccattctcatgtctgcgtaagtgcctccgaatcaaaactcagtgaaatgagcgtaactctgttacgagaccctagcatgagtccactcggggtggccaccctgactccaagttccacatgcccaagcctggtggaagggcggtacggggcaacagacctgagaacgcctcagccttgctctagacctgctagcccagaacctgagttgttaccagaagctgatagtaagaaacttccatctcctgctagagctaccgaaaccgataaagagccacaacgtctcctagtacccgacatccaggagattcgggtctcacctatcgttagtaaaaaaggctatctgcactttctggagcctcatacgtctggttgggcacgtagatttgtggttgtccgacgcccttatgcttatatgtataatagtgacaaggacaccgtggagcggtttgtccttaatctggcaacagcacaggtagaatactccgaggatcaacaggctatgctgaaaacacccaacacctttgcagtgtgcacagaacatagggggatactgttgcaggcagccagcgacaaggatatgcatgattggttatacgctttcaaccctctgcttgcaggtacgattagatcgaagttgtccaggcggcgaagcgcccagatgagggtgtag

SEQ ID NO: 267639 - DNA, 9140 bp, Artificial Sequence
  derived and/or modified sequence
agccggcgagcggcagcagctccgggctcgagagcccgcgcccatgccagtgcccatgcggggccgccgccagtgacgccggagaggtgttccccccacactggggctcccactactgcgaggagtgacccacgaaggccacagagatggccggggcttcggtgaaggtggcggtgcgggtccgccccttcaattcccgggaaatgagccgtgactccaagtgcatcattcagatgtctggaagcaccaccaccattgttaaccccaaacagcccaaggagacgcccaaaagcttcagctttgactactcctactggtcgcacacctcacctgaggacatcaactacgcgtcgcagaagcaggtgtaccgggacatcggcgaggagatgctgcagcatgcctttgagggatacaacgtgtgcatcttcgcctatgggcagacgggtgccggcaagtcctacaccatgatgggcaagcaggagaaggaccagcagggcatcatcccacagctctgcgaggacctcttctctcggatcaacgacacgaccaacgacaacatgtcctactccgtggaggtcagctacatggagatttactgtgagcgcgtccgtgacctcctgaaccccaagaacaagggcaaccttcgcgtgagggagcacccactgctggggccctacgtggaggacctctccaagctggctgtcacctcctacaatgacatccaggacctcatggactcagggaacaaggccaggaccgtggcggccaccaacatgaatgagaccagcagtcgctcccacgccgtcttcaacatcatcttcacccagaagcgccatgacgcagagaccaatatcaccacggagaaggtgagcaaaatcagcctggtggacctggctgggagcgagcgggctgactccacgggagccaagggcacgcgcctcaaggagggggccaacatcaacaagtcgctgaccaccctgggcaaggtcatctccgccctggctgaaatggtgagtggcccggcccggaacaagaaaaagaagaagacagatttcattccgtaccgagattccgtgttgacctggctcctccgggaaaacctgggcggtaactcaaggacagctatggtggcagccttgagtcctgcagacatcaactacgatgagacccttagcacgctgaggtatgctgaccgggccaagcagatccgctgcaatgctgtcatcaatgaggaccccaacaacaagctgatccgcgagctgaaggatgaggtgacccggctgcgggaccttctgtacgcccagggtcttggcgacatcactgacaccaacactgtgcctggaggacccaaattgaccaatgccctggtgggtatgagcccctcatcctcgctctcagccctgtccagccgcgcggcctccgtgtccagcctccacgagcgcatcttgtttgccccgggcagcgaggaggccattgaaagactgaaggaaacagagaagatcatagctgagctcaatgagacctgggaggagaagctgcggcggacagaagccatccggatggagagggaagccctgctggccgagatgggtgtggccatgagggaggatggcggcaccttgggcgtattctctcccaaaaagacaccacacctcgtcaacctgaacgaggacccgctgatgtctgagtgcctgctctactacatcaaggatgggatcaccagagtgggcagggaggatggcgagaggcggcaggacattgttctgagtgggcacttcatcaaggaggagcactgcgtcttccggagcgactccaggggaggcagcgaagctgtggtgaccttggagccctgtgagggggcagacacctacgtcaatggcaagaaagtcacagagcccagcatcctgcgttcaggaaaccgcatcatcatgggtaagagccatgtgttccggttcaaccaccccgagcaggcccggcaggagcgtgagcgcacgccttgtgcggagacgccagctgagcctgtggactgggccttcgcccagcgtgagctgctggagaagcagggcatcgacatgaagcaggagatggagcagaggctccaggaactggaggaccagtaccgccgcgagcgggaggaggccacctacctgctggagcagcagcggctggactatgagagcaagctggaggctctgcagaagcagatggactccaggtactacccggaggtgaacgaggaggaggaggagcccgaggatgaagtccagtggacagagcgggagtgtgagctggcgctctgggccttccggaagtggaagtggtaccagttcacgtctctgcgggacctgctgtggggcaacgccatcttcctcaaggaggccaatgccatcagcgtggagctgaaaaagaaggtacaattccagtttgtcctcctgacggacacactctactcccctctgccacccgacctgctgcccccagaggccgccaaagaccgagagacgcggcccttcccccgcaccattgtggccgtggaggtccaggaccagaagaacggggccacccactactggacgctggagaagctcaggcagcgtctggacctgatgcgggagatgtacgaccgcgctgcagaggtgccctccagtgtcatcgaggactgtgacaacgtggtgaccggcggagaccccttctatgaccgcttcccctggttccggctggtgggcagttcagccatctctggctgcaacagctaccctcttctcaacacatgcatgagcgagcgcatggctgctctcaccccctcccccaccttctcgagccccgactccgacgccaccgagcctgccgaggagcagagcgtgggggaggaggaggaggaggaggaggaggaggaggatgaggaggaggaggacctggaggacgacgtctttccggagcacgcgctgtgcgacggccgggacccgttttacgaccggccccccctgttcagtttagtaggaagggccttcgtgtacctgagcaacctgctgtaccccgttcccctggtacaccgtgtggcaatcgtcagcgagaagggcgaggtgaagggcttcctccgcgtggccgtccaggccatctcagccgatgaagaggcccctgattatggctctggcgtccgccagtcgggaactgctaaaatctcctttgatgaccagcattttgaaaagttccagtccgagtcttgccccgtggtggggatgtcccgctcgggaacctcccaggaagagcttcgcatcgtggagggccagggccagggtgcagacgtggggccctcagccgatgaagtcaacaacaacacctgttcagcagtgcccccagaaggcctcctcctagacagctctgagaaagccgccctggatgggcccctggatgctgccctggaccacctccgcctgggcaacaccttcaccttccgtgtgacagtcctgcaggcgtccagcatctctgccgaatatgccgacatcttctgccagttcaacttcatccaccgccacgacgaggccttctccacagagcccctgaagaacacaggcagaggccccccacttggcttctaccacgtccagaacatcgcagtggaggtgaccaagtccttcattgagtacatcaagagccagcccattgttttcgaggtctttggccactaccagcagcacccgttcccgcccctctgcaaggacgtgctcagccccctgaggccctcgcgccgccacttccctcgggtcatgccactgtccaagccagtgcccgccaccaagctcagcacactgacgcggccctgtccgggaccctgccactgcaagtacgacctgctggtctacttcgagatctgtgagctggaggccaacggcgattacatcccggccgtggtggaccaccgtgggggcatgccatgcatggggaccttcctcctccaccagggcatccagcgacggattacggtgacactactgcatgagacaggcagccatatccgctggaaggaagtgcgcgagctggtcgtgggccgcatccgaaacactccagagaccgacgagtccctgatcgaccccaacatcttgtctctcaacatcctctcttccggatacatccacccagcccaagatgaccgcgtttcattgggaaatgacactaggaccttttaccaatttgaggctgcgtgggacagctccatgcacaactctctcctgctgaaccgggtcaccccttatcgagagaaaatctacatgacactctccgcttatatcgagatggagaactgcacccagccggctgttgtcaccaaggacttctgcatggtcttctattcccgtgatgccaagctgccagcctcgcgctccatccgcaacctctttggcagtgggagccttcgggcctcagagagtaaccgtgtgactggtgtgtacgagctcagcctgtgccacgtggctgacgcgggcagcccagggatgcagcgccggcgccgacgagtcctggacacatctgtggcctatgtccggggcgaggagaacctggcaggctggaggccccggagtgacagtctcattctggaccaccagtgggagctggagaagctgagcctcctgcaggaggtggagaagactaggcactacctgctcctgcgggagaagctggagaccgcccagcggcctgtcccggaggcactgtccccggccttcagcgaggactctgagtcccatggctcctccagcgcctcctccccgctctcggctgagggccgcccatcacccctggaggctcccaacgagaggcagcgggagctggccgtcaagtgcttgcgcctgctcacgcacacattcaacagagagtacacacacagccacgtctgcgtcagtgccagcgagagcaagctctccgagatgtctgtcaccctgctccgggacccgtcgatgtcccctctaggggtggccactctcaccccctcctccacttgcccctctctggttgaagggcggtacggtgccactgacctgaggaccccgcagccctgctcccggccagccagcccagagcccgagctgctgccagaggccgactccaagaagctcccttcccctgcccgggcaacagagacagacaaggagccccagcgcctgctggtccctgacatccaggagatccgagtcagcccgatcgtttccaagaaggggtacctgcacttcctggagccgcacacgtcaggctgggccaggcgcttcgtggtggtgcggcgcccctatgcctacatgtacaacagcgacaaggacaccgtggagcggttcgtgctcaacctggccactgcccaggtggagtacagtgaggaccagcaggctatgctcaagacacccaacacattcgcggtgtgcacggaacaccgcggcatcctgctgcaggccgccagcgacaaggacatgcatgactggctgtacgccttcaaccccctcctggccgggaccatacggtccaagctctccagaaggaggtctgcccagatgcgggtctgaacctgagccctcccgtgacagccggcaggcccagcccatcccctccctcatcctcgtctgtcctgtcacctgccgcccagcccctctcctgccagacagcccacgaccgggtcgaccccccaggggacgcccatgccaggcccggggacctgtgccacacgaccagctgtgctcccagcagaggctgtgcgtgtcagttcttcttgcagaatgtgctctggtggaacaagttgggagaggctgggggggccaagggcacaggttacgggggttcttgctgccgttctaatatttttttaagcatagacagacttataattaatatacgttagttagtgacattgaaacagtcaactcggaaattaactataagacttgttctatttataagtatttatttctaatgcctccacatagccctgtaatattcagatggaacccccaaccacctccaccctgtttgttcccacatgtgtctcccaagcctgctagggacaggcagggcagggacagccaccttggaaggccgcagtgaggagctgtctggaccagtggggcaccttggggctagcacacgggtgtatcgcctgggccccaggcttctccatggccacatgggtcctgggtgtatgtgtgggagagtgggggggtgtctttggtgcctgaagtctgcgcggcatggagggtggtgtgagttcctctggtgggagggagaacgcacatctcttctgggcggccacctgaggagtgactccaagaagagttccggcagctttccccaggaaagggtgaggggtgacactcggctctggctctgagatgaggcagacggcacccaggctgtgatctgtcctgggcggggaccaggagggagcggggtcgggatcacctgccagtgtgcagactctgggactgcgtgctgtctccggaccatcagggtagggtggtgggttgagaccaggaagtcagggaagatcggaattcagggcgacggtctaggtgtcgagggctgtggcgcagcctcttcagctgcggcgagaaatggagtgagtcaaggtagcttctgggaagaaatgctgccattagcaggtttcttgcaaagactttcctctctttgttcccagggcagagagtttctgtgagtcccactgagaaaatcccatggggtgggggtatcctggtcggtcggcaatggagggtggctggcttggtggttattgtcttcaaggagctcttcgctgctgcatctgcggtgtccctttgttcttgtcccatttcaccccctctgcagacaccaatgtccgagggccacccaggacaggacgggggtcagccccaagctgagagtctggtcataggagtcatgtccagaggcctagggaggttttagggccctccccacccacacccacaggtcgatttggtctctttttagctcaaggaaagacagtagccaagcaacagagcccctctcccgccgtggcccgtgggagcagttacatcgggtctggtgctccagacctagggcccagcactttcatcagatcctgcctcctggagtgggggaaacgcagcaccccactggttctgaggcccctaccctcccaggctgtcccacgtgatgctgacatgagcctcagagaccccaatcccatgcctgggggagagacagcggctcaggagtgggggagcacgggccttctacaccacatgggaaggctctggcatgaggttttcctttgggaaggttgtttgggcccctgaagttccatctccgagagtggtgtgcagggcaggccagggcccatgctggctgcagtctctgtggctgcctgcctgggccagcctgtttgggagctgggactgtgggctcgccttttcgtacctgggctcaggtgcggtgtggccaccgccaccctcatcccctgcctgggaggctctcccaggggctgatgggggggttctgtgagggagaatcagggctcgggaagccacgcctgggaaggcaggacacaggacacagcagctttctttggaaatctcccaggtgaggattcacatcccaaaataaaattcagaagccaggtggcctgtgctccccatgggtgacctctggaggcagtggaccaagatgcagcaaggagaggatgcagaacagcttcttgcagaagcacctgctccggcatccagcgctgcctggaggcaggaaggagaggcagggcaggacacgctggtctgagatgagggggagccccacgggccccaggcaggctagaggaggcacaggccctgccacggccaactcaggtcagccagcctgaggctgtggcctccaaagggtctgggcgcaccccccaggtcgcaggtgtctgaggccagccaacctgcagagcactcgcggcgtgggtgggctgagtggaggtgcctgggagctgcctaaattcagaagcctccactgccatggagactgcctggctgtgtcctctcagccaggtgccgtgttggccttggctaggacccagagccacactgcagcctccgccgactccctccttccgggcctgctctagtgaggagtgcctaagccaggacccagaaactcagagttgatggtgagaggaggccgcctgagtcaggacacctggcttcttgaaaagttcgctctgccagaaaccacctagggaccacgttagctgccttccttgagctccccaggagtcggtttccacatctgtgaggtggagggctggtgtggaggtgctcatggggtgcggtgcttgggagacagccaggcccagggtggctgctgcttcctgctaagtgggggaggtgagacagatctggaaagccgtctccctcagatggtttcatttaatgctttatactgccgagtctgggggcttgttttggtttgggggcagccatcctccaccagaaagggggagctccttccgctgcggctccagatagatggggatgccgggctccaggccgaccagcacttgggatctgatgggacacggccagtgcctaggggtgccaagtccaaggcctcccactgggagtcatcgctgagaagatgccaatgtttcatccaccggctgcacaggcacaaactcccccacccaggacggctgtgatgaggtggccctccctgtcaaccctggtccctggagtccccagcacctggggccctggtggggctgatgtcacaggtgtttactgtgctgctgcactggtcctatgccagcctcacccatgtggggaccacggaaggcacactcccttacccccggtgccgggccgtgcggtcccccagacggacagcagctgtggcgacctgcgtttctccctgggcctgtgcttcctgtagttagtccgtcccctggttcccctgtggctcagaggccgcgtccctggcttgtacatatgtgattgctgtgggcacaccccagaccccatgtcatagctgccgtcccgacgtcacgacgcctgtcccgatgtcttacacccgagtgttagccctaggctcctgtactgtgcgtgcacttgaggctctgtccaattaagaaataaatgtggctcttactcaac

SEQ ID NO: 267640 - DNA, 5400 bp, Artificial Sequence
  derived and/or modified sequence
atggccggggcctctgtgaaggtggccgtgcgggtgcggcccttcaacagccgggagatgagccgggacagcaagtgcatcatccagatgagcggcagcaccaccaccatcgtgaaccccaagcagcccaaggagacccccaagagcttctcctttgactacagctactggagccacaccagccctgaggacatcaactatgccagccagaagcaggtgtacagagacattggagaggagatgctgcagcacgcctttgagggctacaacgtgtgcatctttgcctacggccagacaggagctgggaagagctacaccatgatgggcaagcaggagaaggaccagcagggcatcatcccccagctgtgtgaggacctcttcagccgcatcaatgacaccaccaatgacaacatgagctacagcgtggaggtgtcctacatggagatctactgtgagcgggtgcgggacctgctgaaccccaagaacaagggcaacctgcgggtgcgggagcaccccctgctgggcccctacgtggaggacctgagcaagctggccgtgaccagctacaatgacatccaggacctgatggacagcggcaacaaggccaggacagtggccgccaccaacatgaatgagaccagcagccgcagccatgctgtgttcaacatcatcttcacccagaagagacatgatgctgagaccaacatcaccacagagaaggtgtccaagatcagcctggtggacctggccggcagcgagagagctgacagcactggagccaagggcacccggctgaaggagggcgccaacatcaacaagagcctgaccaccctgggcaaggtgatcagcgccctggccgagatggtgtctggccctgccaggaacaagaagaagaagaagacagacttcatcccctacagagattctgtgctgacctggctgctgcgggagaacctgggcggcaacagcaggacagccatggtggccgccctgagccctgctgacatcaactatgatgagaccctgagcaccctgcgctatgctgaccgggccaagcagatccgctgcaatgctgtgatcaatgaagaccccaacaacaagctgatccgggagctgaaggatgaggtgacccggctgcgggacctgctgtatgcccagggcctgggggacatcacagacaccaacacagtgcctgggggccccaagctgaccaatgccctggtgggcatgagccccagcagcagcctgagcgccctgagcagcagagctgcctctgtgagcagcctgcacgagcgcatcctgtttgcccctggcagcgaggaggccatcgagcggctgaaggagacagagaagatcatcgccgagctgaatgagacctgggaggagaagctgcggaggacagaggccatccgcatggagcgggaggccctgctggccgagatgggcgtggccatgagagaagatggcggcaccctgggcgtcttcagccccaagaagaccccccacctggtgaacctgaatgaagaccccctgatgtctgagtgcctgctgtactacatcaaggatggcatcaccagggtgggccgggaggatggagagcggcggcaggacatcgtgctgagcggccacttcatcaaggaggagcactgtgtgttcagaagtgacagccggggcggcagcgaggccgtggtgaccctggagccctgtgagggcgctgacacctacgtgaatggcaagaaggtgacagagcccagcatcctgcggagcggcaaccgcatcatcatgggcaagagccacgtgttccgcttcaaccaccctgagcaggcccggcaggagcgggagaggaccccctgtgccgagaccccagctgagcctgtggactgggcctttgcccagcgggagctgctggagaagcagggcatcgacatgaagcaggagatggagcagaggctgcaggagctggaggaccagtacagaagagagcgggaggaggccacctacctgctggagcagcagaggctggactatgagagcaagctggaggccctgcagaagcagatggacagccgctactacccagaggtgaatgaggaggaggaggagccagaagatgaggtgcagtggacagagcgggagtgtgagctggccctgtgggccttcaggaagtggaagtggtaccagttcaccagcctgcgggacctgctgtggggcaatgccatcttcctgaaggaggccaatgccatctctgtggagctgaagaagaaggtgcagttccagtttgtgctgctgacagacaccctgtacagccccctgcccccagacctgctgcccccagaggccgccaaggaccgggagacccggcccttccccaggaccatcgtggccgtggaggtgcaggaccagaagaatggagccacccactactggaccctggagaagctgcggcagaggctggacctgatgagggagatgtatgacagagctgctgaggtgcccagctctgtgattgaggactgtgacaacgtggtgactggaggagaccccttctatgaccgcttcccctggttccggctggtgggcagcagcgccatcagcggctgcaacagctaccccctgctgaacacctgcatgtctgagaggatggccgccctgacccccagccccaccttcagcagcccagacagtgatgccacagagcctgctgaggagcagagcgtgggggaggaggaggaggaggaggaggaggaggaggatgaggaggaggaggacctggaggatgatgtgtttcctgagcacgccctgtgtgatggccgggaccccttctatgacaggcctcctctcttcagcctggtgggccgggcctttgtgtacctgagcaacctgctgtaccctgtgcccctggtgcaccgggtggccatcgtgtctgagaagggggaggtgaagggcttcctgcgggtggccgtgcaggccatctctgcagatgaggaggccccagactatggcagcggcgtgcggcagagcggcacagccaagatcagctttgatgaccagcactttgagaagttccagagcgagagctgccctgtggtgggcatgagccgcagcggcaccagccaggaggagctgcgcatcgtggagggccagggccagggcgcagatgtgggccccagcgcagatgaggtgaacaacaacacctgcagcgctgtgcccccagagggcctgctgctggacagcagcgagaaggccgccctggatggccccctggatgctgccctggaccacctgcggctgggcaacaccttcaccttccgggtgacagtgctgcaggccagcagcatctctgcagaatatgctgacatcttctgccagttcaacttcatccacagacatgatgaggccttcagcacagagcccctgaagaacacaggccggggcccccccctgggcttctaccacgtgcagaacattgctgtggaggtgaccaagagcttcatcgagtacatcaagagccagcccatcgtgtttgaggtgtttggccactaccagcagcaccccttcccccccctgtgcaaggatgtgctgagccccctgcggcccagcagaagacacttcccccgggtgatgcccctgagcaagcctgtgcctgccaccaagctgagcaccctgacccggccctgccccggcccctgccactgcaagtatgacctgctggtgtactttgagatctgtgagctggaggccaacggggactacatcccagctgtggtggaccaccggggcggcatgccctgcatgggcaccttcctgctgcaccagggcatccagaggcgcatcaccgtgaccctgctgcacgagaccggcagccacatccgctggaaggaggtgcgggagctggtggtgggccgcatccggaacaccccagagacagatgagagcctgattgaccccaacatcctgagcctgaacatcctgagcagcggctacatccacccagcccaggatgacagagtgtccctgggcaatgacaccaggaccttctaccagtttgaagctgcctgggacagctccatgcacaacagcctgctgctgaacagagtgaccccctaccgggagaagatctacatgaccctgagcgcctacatcgagatggagaactgcacccagcctgctgtggtgaccaaggacttctgcatggtgttctacagcagagatgccaagctgcctgccagccgcagcatccggaacctgtttggaagtggcagcctgcgggccagcgagagcaacagagtgactggagtgtatgagctgagcctgtgccacgtggctgatgctggcagccctggcatgcagaggagaagaagaagagtgctggacacctctgtggcctacgtgcggggggaggagaacctggccggctggaggcccaggagtgacagcctcatcctggaccaccagtgggagctggagaagctgagcctgctgcaggaggtggagaagaccaggcactacctgctgctgcgggagaagctggagacagcccagaggcctgtgcctgaggccctgagccctgccttctctgaagattctgagagccacggcagcagcagcgccagcagccccctgtctgctgagggccggcccagccccctggaggccccaaatgaaaggcagcgggagctggccgtgaagtgcctgcggctgctgacccacaccttcaaccgggagtacacccacagccacgtgtgtgtgtctgccagcgagagcaagctgtctgagatgtctgtgaccctgctgcgggaccccagcatgagccccctgggcgtggccaccctgacccccagcagcacctgccccagcctggtggagggccgctatggagccacagacctgcggaccccccagccctgcagcaggcctgccagccctgagcctgagctgctgcctgaggccgacagcaagaagctgcccagccctgcccgggccacagaaacagacaaggagccccagaggctgctggtgcctgacatccaggagatccgggtgagccccatcgtgtccaagaagggctacctgcacttcctggagccccacaccagcggctgggccaggagatttgtggtggtgagaagaccctatgcctacatgtacaacagcgacaaggacacagtggagagatttgtgctgaacctggccacagcccaggtggagtacagcgaggaccagcaggccatgctgaagacccccaacacctttgctgtgtgcacagagcaccggggcatcctgctgcaggccgccagtgacaaggacatgcatgactggctgtatgccttcaaccccctgctggccggcaccatccgcagcaagctgagcagaagaagaagtgcccagatgagggtgtag

SEQ ID NO: 267641 - DNA, 5400 bp, Artificial Sequence
  derived and/or modified sequence
atggccggcgccagcgtgaaggtggccgtgcgggtgcggcccttcaacagcagagagatgagccgagacagcaagtgtattatccagatgagtgggtctaccacaactattgtcaaccccaaacagcctaaggaaacgcccaaatcttttagttttgattattcttactggtcacacacttcccccgaggacatcaactacgcaagtcagaagcaggtgtacagagatatcggcgaagagatgctgcagcacgctttcgagggctacaacgtgtgcatcttcgcttacggacaaactggggctggcaaatcctatacaatgatgggcaaacaggagaaggaccaacagggcattatccctcagttgtgcgaggatctgttcagtcgtatcaacgatacaacaaacgacaacatgtcttacagtgtggaagtgtcctacatggaaatttattgcgaaagggttagggatctgctcaacccaaagaacaaggggaacctgagggtgcgtgaacacccgcttcttgggccatatgtggaagaccttagtaaactagcagtgacctcctacaacgatatccaggatctgatggattctggcaacaaggctagaacagtggctgctacaaatatgaatgagacttcctcacggtctcacgccgttttcaacatcatctttacgcagaagcgccatgatgctgagacaaatattacaactgagaaggtgtccaagatcagtctagtcgatctggccggaagcgaacgcgccgattctacgggcgctaagggtacacgactgaaggaaggtgctaacattaacaagtcactcactactcttggaaaggtcatcagcgcgttggctgagatggttagcggccctgccagaaacaagaaaaagaaaaaaaccgatttcatcccttacagggactctgttctaacctggctgcttagggagaatttgggtggcaacagcaggaccgctatggtggccgccctttctcctgccgacattaattacgacgagactttatcaacactccgatatgctgatcgggccaagcagatccggtgtaatgcggttatcaatgaggatcctaataacaaactaatccgcgagctgaaggacgaggtaacaagactccgggaccttctgtacgcccaggggctgggcgacatcacagacacaaatactgtgccgggcggccccaagcttaccaacgctctggtggggatgagtccttcctcctcactctcggcgttgtccagtcgtgcggccagtgtctcatcactgcacgaacgcatcctgttcgcccccggctctgaggaggccattgaaaggctaaaggagacagaaaaaatcatagcggaactcaacgaaacatgggaggagaaacttcgtcggacagaggcaatcaggatggagcgagaggccctgctggccgaaatgggcgtcgccatgcgagaggacggaggaaccctgggagttttcagtcctaaaaaaacacctcacttagtcaacttgaacgaggatccactaatgagcgagtgtcttctgtactatatcaaagacggcatcacacgggttggtagggaggacggcgaacgccgccaggatattgtgctgtctggacattttatcaaggaggagcactgtgtcttcagatcggatagcaggggtggatctgaggctgttgttacattagagccctgcgagggcgcagacacatatgtaaacggcaaaaaggtcactgagcccagcatcctgcgatcaggcaacaggatcatcatgggcaagtcccacgtcttccgatttaatcatcccgagcaggcgagacaagaacgtgaaaggaccccttgcgccgaaaccccggcggagcctgtggactgggccttcgcacagcgtgaactgctggaaaaacagggcatcgacatgaaacaggagatggaacagaggctccaagagctggaggaccagtaccgccgcgagcgtgaagaggcaacttatctcctggagcagcagagactggactatgaaagcaaattggaggctctgcagaagcagatggactcacgttactatcccgaggtgaatgaggaagaagaggaacctgaagacgaggttcaatggacagaaagagaatgtgaacttgcgctgtgggcctttaggaagtggaaatggtatcagttcacctctctgagagacctactgtggggtaatgccatttttctaaaagaagccaatgctatctccgtggagctgaagaagaaagtccagtttcaattcgtcctgctgacggatactttatatagccctttgccacctgatttactgccccctgaagccgccaaagatcgggaaactcggccatttccaaggactatcgtcgcagtggaggttcaggaccagaagaacggcgctacgcactactggactttggagaaattgcgccaaagattagatctcatgcgagagatgtacgatcgtgctgcagaggtgccttcaagtgtgattgaggattgtgataatgtagtgaccgggggtgatcctttctacgaccggttcccctggtttcggctggtcggctcctctgctatatcaggatgtaattcatacccccttctgaacacctgcatgtcagagagaatggctgcactgaccccgtctcccaccttcagctcccctgactcagatgccaccgagcccgcggaggaacaaagtgttggagaggaggaagaggaggaggaagaggaggaagatgaagaggaagaagacctcgaagacgatgtcttcccggagcacgcactgtgcgacggaagggatccattctacgatagaccaccactcttcagtctcgtgggaagagcgtttgtgtacctaagcaatctgctttacccggtgccactggtgcaccgagtggcgatcgtgtccgagaagggggaggtcaagggatttttgcgcgtcgcggtacaggctattagcgccgatgaggaggctcctgactacgggagcggtgtacgacaaagcggaaccgccaagatcagcttcgatgatcagcactttgaaaaatttcagtctgagagttgccccgtcgtggggatgagcagatccggcacctctcaggaagaactccgcatcgtggagggccagggacagggtgcagacgtgggcccatccgctgacgaggtgaataacaatacctgctcagcagttcccccagagggcctgcttcttgactctagcgaaaaggctgccttggacggacccttggatgcagctctggatcatctgcgcctgggcaacacctttacatttagagtcacagttttacaggccagctccatttccgccgagtacgccgatattttttgccagttcaacttcattcatcggcacgatgaagccttctccaccgagcctctcaagaatacaggacggggacccccactggggttctatcacgtgcagaatatcgcagtggaggttactaaatccttcatagagtacatcaaatcgcagcccatagtgtttgaagtctttggccactaccagcaacacccatttccacccctatgtaaggacgtccttagccccttgagaccgtcaaggcgacacttcccaagagttatgccactgtctaagcctgttccagctacaaaactgtctaccctcacacggccgtgccctgggccttgccattgtaaatacgatctgctcgtgtacttcgaaatttgtgagctggaggctaatggagactatatacctgctgtggtagatcataggggcggcatgccctgtatgggaacttttctgctacaccagggaatacagagacgtattacagtgaccctcctgcatgaaacagggtctcacattcggtggaaagaggtgcgcgagcttgtggtaggccgaatcagaaacactcctgagactgatgaatctctcatcgacccaaatatcctgtcacttaacatcttatctagcggctacatccacccggctcaggacgacagagtatccttgggcaacgacacccgtacattttatcagtttgaggctgcctgggacagctcgatgcacaactctctactgctgaaccgcgtcaccccctaccgagagaaaatctatatgactctctcagcatacatagaaatggagaactgtacgcagccggccgtggttacgaaggatttttgcatggtgttctatagcagggacgctaagctaccggcctcccggtccatcaggaacttgtttgggagcggatctctgcgcgcaagcgagtcaaatagagtgactggcgtctatgaactgagcctgtgtcatgtggccgatgcaggaagcccaggtatgcagaggcggagacgcagggttttggatacaagtgttgcgtacgttcggggagaagaaaatctggccggctggcgccctcgaagcgacagcctcattttagatcaccagtgggagctagagaaactctctctcctgcaggaagtcgaaaaaacccgtcactaccttctgttgagggagaagctagaaaccgcccagagaccagttcctgaggcgctgtcgccagcattctctgaagactcagaatcacatggatcaagttctgcctcatcgcccttgagtgccgaaggtagaccctcgcctctggaagctcccaacgaaaggcagagagaacttgcagttaaatgcctacggcttctgacacacacgttcaatcgagagtacacacactcccacgtgtgtgtgtcagcttcggaatccaaactctccgagatgagcgtaaccctgctgcgggatccctccatgtctcctctgggtgttgccactctgactcctagcagcacttgccctagtctggtggaggggcgttatggcgcaactgacctcaggacaccccagccatgtagccggcctgcgtctccagagcccgaattgctgcctgaggctgattctaagaagcttcccagcccagctcgcgccactgagactgacaaggaacctcagagattgctggtgcccgatatccaggaaatacgggtgagtccgatagtatccaagaaaggctacctccacttcttagagccacatacaagtgggtgggccaggaggttcgtggttgttcgtcggccttatgcttatatgtataattctgacaaagacaccgtggagcgctttgtccttaatctggccacagcgcaggtcgaatactccgaggaccaacaggcaatgttgaagacccctaacaccttcgccgtgtgtacggaacaccgcggaattcttctgcaggcagcttccgacaaggatatgcacgactggctgtacgcttttaatccactgctggcagggaccatccggagtaagctgtctaggaggcggtctgcacagatgcgtgtctag

SEQ ID NO: 267642 - DNA, 5399 bp, Artificial Sequence
  derived and/or modified sequence
atggccggagcatccgtcaaggtggccgtgcgagtaaggccatttaactccagagaaatgtccagagatagtaagtgcataatccagatgtcgggtagcactaccactatcgtaaaccctaaacagcccaaggagaccccaaaaagtttcagctttgattattcttactggagtcacacgagccctgaggatataaattatgcctctcagaaacaggtatacagagatattggtgaagagatgctgcagcatgctttcgaaggctacaacgtgtgtatttttgcgtacgggcagaccggggctggaaaaagctacaccatgatggggaaacaagagaaagatcagcaaggcataatcccacagctgtgcgaagatttattttcacgaattaatgatactactaacgacaatatgtcttatagtgtcgaggtaagctacatggaaatttactgtgagagagtgcgtgaccttctgaatcctaaaaacaaaggcaatttaagagtcagggaacacccgctcctcggtccctacgttgaggatcttagcaaattggccgtgacaagttacaacgatatccaagatttgatggatagtggtaacaaggcacgtactgtggctgcaactaacatgaatgagacgtcctcccgaagccacgccgtgtttaacattattttcactcagaagaggcacgatgccgagactaatataactactgaaaaggtgtctaagatttccctagtagatttagccggttccgagagggcagattcaaccggagcgaaaggcacaagactcaaagagggggcaaatatcaataaaagtctcaccaccctgggaaaagtaatctccgctctggcagaaatggtgagcggaccggctagaaacaaaaaaaaaaagaagacagatttcatcccttacagagatagcgtcctgacttggctgctgagagaaaacttaggcggaaactctcgcactgcaatggtagccgctctcagccctgcagacataaactacgatgagacattatcaacccttagatatgcggaccgggcaaaacagatccggtgcaatgccgtgattaacgaagatccaaacaataaactgatccgggagcttaaggacgaggtgacacgactgcgtgatctcctctacgcccaggggctcggggacattaccgacaccaatactgtccctgggggacccaagcttacgaacgctctggtcggaatgtctccatccagctctctctcagcactgtccagtcgagcggctagcgtctcttccctacacgaacgaatactgttcgctcctgggagtgaagaagccatagagcggctcaaggagacggagaagatcatagctgagctaaacgagacctgggaggagaagctgcgaaggacagaagccatcaggatggagagggaagcccttctcgctgaaatgggcgtagccatgagagaggacgggggaacattaggtgtgttcagccccaaaaagacaccccatctggtgaacttgaatgaagatcccctcatgagtgaatgcctcctctattatataaaggatggcattacgagggtcggcagagaggatggcgaacgccgtcaggatatagtgttatccggccacttcatcaaagaagagcattgcgtgttcagatccgactctagaggtggatcagaggccgttgtcacccttgagccctgcgaaggtgccgacacatacgtcaatggcaagaaagtaacagagccctccatactacgctctgggaataggattattatgggtaagtcccatgtatttcgcttcaaccacccagagcaggctaggcaagaacgcgaacgcacaccttgcgctgagaccccagccgagcctgtcgactgggcatttgcccagcgtgagttgctcgagaaacaggggatcgatatgaaacaggaaatggaacaacggctgcaagaactggaggatcagtatagaagagagcgcgaggaagccacttacctgctggaacagcaacgcctggattatgagagtaagctggaggcactgcagaagcagatggatagtcgctactaccctgaggtgaatgaggaagaggaagagcccgaggatgaagtgcagtggactgagagggaatgcgaattagccctgtgggctttcagaaagtggaaatggtatcagttcacgagcctgcgggacctgctctggggcaacgcaatcttcctaaaagaagctaacgctatctctgttgaattgaagaaaaaggtgcagtttcagtttgtactgttgaccgataccttgtattcccccctcccacccgatttgttaccccctgaggccgctaaggatcgcgagactcgcccttttcctcgcaccattgtagctgtggaagtccaagaccagaagaacggagcaacccattattggacactcgagaagctgcgccaaagactggacctaatgcgcgagatgtatgatagagctgcagaggtgccatcatccgtcattgaggattgcgataacgtcgtgaccgggggagaccctttttacgatcgattcccatggttccggctggttggttctagcgctataagtggttgcaactcttacccactattgaatacatgcatgagtgagcgcatggccgcactaacgccatctccgacattcagctcgcccgactccgatgcgaccgagcccgcagaagaacaatcggttggcgaagaagaggaggaggaagaagaagaagaggatgaagaggaagaagatttggaggacgacgtcttccccgaacacgcactttgtgacggacgggatccattctatgatagaccaccgctcttctcactcgttgggagagctttcgtctacttatcaaacctgctttatcccgtccctttggtacacagagttgcgatcgtgtctgaaaaaggtgaagtaaagggtttcctcagagtggccgtgcaggcaatctccgccgatgaggaagccccagactacggaagtggagtccgccaatcgggaaccgctaaaataagcttcgatgatcagcactttgaaaaattccagagtgaatcatgtccggtggtgggcatgagccgcagcggaacgtctcaggaggaactgcggattgtcgaggggcaggggcagggggctgacgtggggccatcagcagacgaggtgaataataacacgtgttctgccgtcccaccggagggattgttgcttgacagctcggagaaggctgctctggacggaccactggatgccgcactcgaccatctgaggttgggcaatacattcacttttcgagtaaccgtgctgcaggcaagctccatctccgcggagtatgccgacatcttttgccagttcaactttattcatcggcacgacgaagccttttcaactgagcctctgaaaaacacaggtcgcggtccgcctctcggcttttaccacgtccagaatattgccgtcgaagtcaccaagtcttttatcgaatacatcaagtcccagccaatagtatttgaggtcttcggccactatcagcagcacccctttccaccactgtgcaaagacgtgctcagcccactgaggccttcccggaggcatttcccacgtgtgatgcccctaagcaaaccagtgcccgcaactaagctctcgacacttacccgaccctgcccaggcccatgccactgtaaatacgacctcctggtgtacttcgagatctgcgagctggaggccaatggcgactatattccggctgtagttgaccatcggggaggcatgccttgtatggggacattcctcctccatcaaggaatccaacggcgaatcacagtgactctactgcatgagaccggctctcacatacgatggaaggaggtacgcgagctggtcgttggtagaattaggaacaccccagaaacagacgaatcccttatcgatccaaacattttgagcctgaacatcttgtcatccggatacatccaccccgctcaggacgacagggttagtctgggcaacgacactcgaactttctaccaattcgaggctgcttgggactcttctatgcacaattccttgctgctgaatagagtaaccccataccgggaaaagatttacatgaccctttcagcctatattgagatggaaaattgcactcagcccgctgtggtcaccaaagacttttgtatggttttttacagccgcgacgccaaactgcccgcttcgagaagcatacgcaacttgtttggcagtggcagcctccgggcatctgaatcgaacagggtaaccggagtgtacgaactcagcctctgccacgtggcagatgctggctctcctgggatgcagcggagaaggcggagggtactggacactagtgtcgcttacgttcgcggagaagaaaatctggcagggtggagacctcgctctgatagcctgatcctcgatcaccagtgggagctagaaaagttgagcctgctccaggaagttgagaagacaaggcattacctgctgttaagggaaaagctggagacagcacaaagacctgttcctgaggctttaagtcctgcgttctccgaggactctgagagccacgggtcttcgagtgcctcgagccccctgagtgctgaggggagaccatcaccactggaggcgcctaacgagagacaacgcgagctggcggttaagtgtcttcgcctattaactcatacctttaatcgggagtacacgcacagtcacgtctgcgtttctgcaagtgaatctaagctgagcgaaatgagcgtcacccttttgcgcgacccttctatgtccccactcggagtggcaaccttgacaccttccagcacatgcccttcactggttgagggcaggtacggcgcaactgatctgcggacccctcaaccctgttccagaccagcttctcctgaacccgaattgctgccagaggccgattccaaaaagctcccaagtccagcacgagccaccgagaccgacaaggaaccccagcgactactcgtgccagatatacaggagataagagtttctccaatagtctcaaagaaggggtacctacacttcctggagcctcataccagcgggtgggcccgtcgattcgtcgtcgttcgacgtccctatgcctatatgtataatagcgacaaagacaccgtggaacgttttgttttgaacctggccacagcccaggtggagtacagtgaggatcaacaggccatgttgaaaacccctaacacatttgctgtatgcaccgagcaccggggtattctcttacaggcagccagcgacaaagacatgcatgactggttatatgcctttaaccccttgctggccggaactattaggtctaagctgagcaggagacggtccgcgcagatgagagttta

SEQ ID NO: 267643 - DNA, 5400 bp, Artificial Sequence
  derived and/or modified sequence
atggccggcgccagcgtgaaggtggccgtgagagtgagacccttcaacagcagagagatgagcagagacagcaagtgcatcatccagatgagcggcagcaccaccaccatcgtgaaccccaagcagcccaaggagacccccaagagcttcagcttcgactacagctactggagccacaccagccccgaggacatcaactacgccagccagaagcaggtgtacagagacatcggcgaggagatgctgcagcacgccttcgagggctacaacgtgtgcatcttcgcctacggccagaccggcgccggcaagagctacaccatgatgggcaagcaggagaaggaccagcagggcatcatcccccagctgtgcgaggacctgttcagcagaatcaacgacaccaccaacgacaacatgagctacagcgtggaggtgagctacatggagatctactgcgagagagtgagagacctgctgaaccccaagaacaagggcaacctgagagtgagagagcaccccctgctgggcccctacgtggaggacctgagcaagctggccgtgaccagctacaacgacatccaggacctgatggacagcggcaacaaggccagaaccgtggccgccaccaacatgaacgagaccagcagcagaagccacgccgtgttcaacatcatcttcacccagaagagacacgacgccgagaccaacatcaccaccgagaaggtgagcaagatcagcctggtggacctggccggcagcgagagagccgacagcaccggcgccaagggcaccagactgaaggagggcgccaacatcaacaagagcctgaccaccctgggcaaggtgatcagcgccctggccgagatggtgagcggccccgccagaaacaagaagaagaagaagaccgacttcatcccctacagagacagcgtgctgacctggctgctgagagagaacctgggcggcaacagcagaaccgccatggtggccgccctgagccccgccgacatcaactacgacgagaccctgagcaccctgagatacgccgacagagccaagcagatcagatgcaacgccgtgatcaacgaggaccccaacaacaagctgatcagagagctgaaggacgaggtgaccagactgagagacctgctgtacgcccagggcctgggcgacatcaccgacaccaacaccgtgcccggcggccccaagctgaccaacgccctggtgggcatgagccccagcagcagcctgagcgccctgagcagcagagccgccagcgtgagcagcctgcacgagagaatcctgttcgcccccggcagcgaggaggccatcgagagactgaaggagaccgagaagatcatcgccgagctgaacgagacctgggaggagaagctgagaagaaccgaggccatcagaatggagagagaggccctgctggccgagatgggcgtggccatgagagaggacggcggcaccctgggcgtgttcagccccaagaagaccccccacctggtgaacctgaacgaggaccccctgatgagcgagtgcctgctgtactacatcaaggacggcatcaccagagtgggcagagaggacggcgagagaagacaggacatcgtgctgagcggccacttcatcaaggaggagcactgcgtgttcagaagcgacagcagaggcggcagcgaggccgtggtgaccctggagccctgcgagggcgccgacacctacgtgaacggcaagaaggtgaccgagcccagcatcctgagaagcggcaacagaatcatcatgggcaagagccacgtgttcagattcaaccaccccgagcaggccagacaggagagagagagaaccccctgcgccgagacccccgccgagcccgtggactgggccttcgcccagagagagctgctggagaagcagggcatcgacatgaagcaggagatggagcagagactgcaggagctggaggaccagtacagaagagagagagaggaggccacctacctgctggagcagcagagactggactacgagagcaagctggaggccctgcagaagcagatggacagcagatactaccccgaggtgaacgaggaggaggaggagcccgaggacgaggtgcagtggaccgagagagagtgcgagctggccctgtgggccttcagaaagtggaagtggtaccagttcaccagcctgagagacctgctgtggggcaacgccatcttcctgaaggaggccaacgccatcagcgtggagctgaagaagaaggtgcagttccagttcgtgctgctgaccgacaccctgtacagccccctgccccccgacctgctgccccccgaggccgccaaggacagagagaccagacccttccccagaaccatcgtggccgtggaggtgcaggaccagaagaacggcgccacccactactggaccctggagaagctgagacagagactggacctgatgagagagatgtacgacagagccgccgaggtgcccagcagcgtgatcgaggactgcgacaacgtggtgaccggcggcgaccccttctacgacagattcccctggttcagactggtgggcagcagcgccatcagcggctgcaacagctaccccctgctgaacacctgcatgagcgagagaatggccgccctgacccccagccccaccttcagcagccccgacagcgacgccaccgagcccgccgaggagcagagcgtgggcgaggaggaggaggaggaggaggaggaggaggacgaggaggaggaggacctggaggacgacgtgttccccgagcacgccctgtgcgacggcagagaccccttctacgacagaccccccctgttcagcctggtgggcagagccttcgtgtacctgagcaacctgctgtaccccgtgcccctggtgcacagagtggccatcgtgagcgagaagggcgaggtgaagggcttcctgagagtggccgtgcaggccatcagcgccgacgaggaggcccccgactacggcagcggcgtgagacagagcggcaccgccaagatcagcttcgacgaccagcacttcgagaagttccagagcgagagctgccccgtggtgggcatgagcagaagcggcaccagccaggaggagctgagaatcgtggagggccagggccagggcgccgacgtgggccccagcgccgacgaggtgaacaacaacacctgcagcgccgtgccccccgagggcctgctgctggacagcagcgagaaggccgccctggacggccccctggacgccgccctggaccacctgagactgggcaacaccttcaccttcagagtgaccgtgctgcaggccagcagcatcagcgccgagtacgccgacatcttctgccagttcaacttcatccacagacacgacgaggccttcagcaccgagcccctgaagaacaccggcagaggcccccccctgggcttctaccacgtgcagaacatcgccgtggaggtgaccaagagcttcatcgagtacatcaagagccagcccatcgtgttcgaggtgttcggccactaccagcagcaccccttcccccccctgtgcaaggacgtgctgagccccctgagacccagcagaagacacttccccagagtgatgcccctgagcaagcccgtgcccgccaccaagctgagcaccctgaccagaccctgccccggcccctgccactgcaagtacgacctgctggtgtacttcgagatctgcgagctggaggccaacggcgactacatccccgccgtggtggaccacagaggcggcatgccctgcatgggcaccttcctgctgcaccagggcatccagagaagaatcaccgtgaccctgctgcacgagaccggcagccacatcagatggaaggaggtgagagagctggtggtgggcagaatcagaaacacccccgagaccgacgagagcctgatcgaccccaacatcctgagcctgaacatcctgagcagcggctacatccaccccgcccaggacgacagagtgagcctgggcaacgacaccagaaccttctaccagttcgaggccgcctgggacagcagcatgcacaacagcctgctgctgaacagagtgaccccctacagagagaagatctacatgaccctgagcgcctacatcgagatggagaactgcacccagcccgccgtggtgaccaaggacttctgcatggtgttctacagcagagacgccaagctgcccgccagcagaagcatcagaaacctgttcggcagcggcagcctgagagccagcgagagcaacagagtgaccggcgtgtacgagctgagcctgtgccacgtggccgacgccggcagccccggcatgcagagaagaagaagaagagtgctggacaccagcgtggcctacgtgagaggcgaggagaacctggccggctggagacccagaagcgacagcctgatcctggaccaccagtgggagctggagaagctgagcctgctgcaggaggtggagaagaccagacactacctgctgctgagagagaagctggagaccgcccagagacccgtgcccgaggccctgagccccgccttcagcgaggacagcgagagccacggcagcagcagcgccagcagccccctgagcgccgagggcagacccagccccctggaggcccccaacgagagacagagagagctggccgtgaagtgcctgagactgctgacccacaccttcaacagagagtacacccacagccacgtgtgcgtgagcgccagcgagagcaagctgagcgagatgagcgtgaccctgctgagagaccccagcatgagccccctgggcgtggccaccctgacccccagcagcacctgccccagcctggtggagggcagatacggcgccaccgacctgagaaccccccagccctgcagcagacccgccagccccgagcccgagctgctgcccgaggccgacagcaagaagctgcccagccccgccagagccaccgagaccgacaaggagccccagagactgctggtgcccgacatccaggagatcagagtgagccccatcgtgagcaagaagggctacctgcacttcctggagccccacaccagcggctgggccagaagattcgtggtggtgagaagaccctacgcctacatgtacaacagcgacaaggacaccgtggagagattcgtgctgaacctggccaccgcccaggtggagtacagcgaggaccagcaggccatgctgaagacccccaacaccttcgccgtgtgcaccgagcacagaggcatcctgctgcaggccgccagcgacaaggacatgcacgactggctgtacgccttcaaccccctgctggccggcaccatcagaagcaagctgagcagaagaagaagcgcccagatgagagtgtag

SEQ ID NO: 267644 - protein, 1690 aa, Artificial Sequence
  derived and/or modified sequence
MAGASVKVAVRVRPFNSREMSRDSKCIIQMSGSTTTIVNPKQPKETPKSFSFDYSYWSHTSPEDINYASQKQVYRDIGEEMLQHAFEGYNVCIFAYGQTGAGKSYTMMGKQEKDQQGIIPQLCEDLFSRINDTTNDNMSYSVEVSYMEIYCERVRDLLNPKNKGNLRVREHPLLGPYVEDLSKLAVTSYNDIQDLMDSGNKARTVAATNMNETSSRSHAVFNIIFTQKRHDAETNITTEKVSKISLVDLAGSERADSTGAKGTRLKEGANINKSLTTLGKVISALAEMDSGPNKNKKKKKTDFIPYRDSVLTWLLRENLGGNSRTAMVAALSPADINYDETLSTLRYADRAKQIRCNAVINEDPNNKLIRELKDEVTRLRDLLYAQGLGDITDMTNALVGMSPSSSLSALSSRAASVSSLHERILFAPGSEEAIERLKETEKIIAELNETWEEKLRRTEAIRMEREALLAEMGVAMREDGGTLGVFSPKKTPHLVNLNEDPLMSECLLYYIKDGITRVGREDGERRQDIVLSGHFIKEEHCVFRSDSRGGSEAVVTLEPCEGADTYVNGKKVTEPSILRSGNRIIMGKSHVFRFNHPEQARQERERTPCAETPAEPVDWAFAQRELLEKQGIDMKQEMEQRLQELEDQYRREREEATYLLEQQRLDYESKLEALQKQMDSRYYPEVNEEEEEPEDEVQWTERECELALWAFRKWKWYQFTSLRDLLWGNAIFLKEANAISVELKKKVQFQFVLLTDTLYSPLPPDLLPPEAAKDRETRPFPRTIVAVEVQDQKNGATHYWTLEKLRQRLDLMREMYDRAAEVPSSVIEDCDNVVTGGDPFYDRFPWFRLVGRAFVYLSNLLYPVPLVHRVAIVSEKGEVKGFLRVAVQAISADEEAPDYGSGVRQSGTAKISFDDQHFEKFQSESCPVVGMSRSGTSQEELRIVEGQGQGADVGPSADEVNNNTCSAVPPEGLLLDSSEKAALDGPLDAALDHLRLGNTFTFRVTVLQASSISAEYADIFCQFNFIHRHDEAFSTEPLKNTGRGPPLGFYHVQNIAVEVTKSFIEYIKSQPIVFEVFGHYQQHPFPPLCKDVLSPLRPSRRHFPRVMPLSKPVPATKLSTLTRPCPGPCHCKYDLLVYFEICELEANGDYIPAVVDHRGGMPCMGTFLLHQGIQRRITVTLLHETGSHIRWKEVRELVVGRIRNTPETDESLIDPNILSLNILSSGYIHPAQDDRTFYQFEAAWDSSMHNSLLLNRVTPYREKIYMTLSAYIEMENCTQPAVVTKDFCMVFYSRDAKLPASRSIRNLFGSGSLRASESNRVTGVYELSLCHVADAGSPGMQRRRRRVLDTSVAYVRGEENLAGWRPRSDSLILDHQWELEKLSLLQEVEKTRHYLLLREKLETAQRPVPEALSPAFSEDSESHGSSSASSPLSAEGRPSPLEAPNERQRELAVKCLRLLTHTFNREYTHSHVCVSASESKLSEMSVTLLRDPSMSPLGVATLTPSSTCPSLVEGRYGATDLRTPQPCSRPASPEPELLPEADSKKLPSPARATETDKEPQRLLVPDIQEIRVSPIVSKKGYLHFLEPHTSGWARRFVVVRRPYAYMYNSDKDTVERFVLNLATAQVEYSEDQQAMLKTPNTFAVCTEHRGILLQAASDKDMHDWLYAFNPLLAGTIRSKLSRRRSAQMRV

SEQ ID NO: 267645 - DNA, 5073 bp, Artificial Sequence
  derived and/or modified sequence
atggcgggggcctctgtcaaggtcgccgtgcgggttaggccatttaacagtagggaaatgagcagggattcaaaatgtatcattcagatgtccgggagcactactactatagtgaaccccaagcagcctaaggagactccgaagtcttttagttttgattactcctactggagccatacttctcctgaagatataaactatgccagtcagaagcaggtgtacagggatatcggcgaagaaatgttacagcacgcctttgaaggatataacgtttgtatatttgcttatggtcagacaggtgcgggaaagtcttatactatgatgggaaagcaagagaaagatcaacaggggataataccccagctgtgtgaagacctcttctccagaatcaatgacactactaatgataacatgagttacagtgtcgaggtgtcttatatggagatttactgtgagcgtgtgagggatctgctcaacccaaaaaataagggaaacctcagagtgcgggaacaccctctgctgggaccctatgtcgaggacctgtctaagttggccgttaccagttataacgacatccaggacctgatggatagtggaaataaagccagaacagttgccgcaacaaacatgaacgagaccagttcacggtcacacgctgtgttcaacattatcttcactcagaaacgccatgacgctgaaacgaatatcacaacggaaaaggtgtcaaagatttcgttagtggacttagctggctctgaaagggctgattctaccggggctaagggaacgaggttgaaagagggcgcaaatattaacaagtccctgaccaccctggggaaagttatctccgcattggccgagatggactctgggcccaataaaaataaaaaaaagaagaagacggactttatcccctacagggattccgttctgacatggctgttgcgcgaaaacttaggaggtaattcgcggaccgccatggtggctgcgctttccccggccgatattaattatgatgaaaccctgtccacgctcagatatgcggaccgtgctaaacagattcgctgtaatgcggttattaacgaggatcctaataataaactgattcgggaactgaaggatgaagtgacaagactgagagatctgctctatgcacagggcctgggtgacattacggacatgacaaacgccctggtaggcatgtcgcccagctcatccctctccgcccttagtagtagagcagctagcgtgtccagtctgcacgagcggatcctgtttgcaccaggttccgaagaagcaatagagcggctgaaggagacagagaaaattatcgctgagcttaatgagacatgggaggaaaagctgagaagaactgaggctattcgcatggagcgcgaggcattattggctgaaatgggggtggccatgagggaagatggaggcactctcggagtcttctctcccaaaaagaccccacacctcgtcaatttgaatgaagatcccttaatgagtgaatgtcttctgtattacattaaagatggcatcacacgcgttggccgcgaagacggagaacggcggcaggatatcgtactttctggtcactttatcaaagaggagcattgtgtttttcggagcgactcccgaggcggctcggaagctgttgtcacactggagccatgtgaaggagcagacacttacgttaacggaaagaaggtcacagagccgtctattctgagatctggcaatagaatcattatgggaaaatcccacgtcttccgcttcaatcatccagaacaggctaggcaggagagggaacggacaccctgcgcagagacacccgctgagccagtggactgggcctttgcgcagcgcgaattattggaaaagcagggtatagacatgaagcaggagatggagcagcgcttgcaggagctcgaagatcagtacaggagggagcgagaggaagccacttacctcttagagcagcaaagactggattatgagtcaaagctcgaggctttgcagaagcagatggactctcggtattatcccgaggtaaacgaagaagaagaggaaccggaggatgaggtccaatggactgagcgagagtgtgagctggctctttgggccttccgtaagtggaaatggtaccaatttacctccctgcgcgacctgctctggggaaatgctatcttcctcaaggaagctaacgcaatctccgtggaattgaaaaagaaggtgcagttccagtttgtcctcctaactgatacactgtacagcccacttccacctgacttgctgccgcccgaggctgcgaaggaccgagagactaggccttttcctcgtactattgtggccgtcgaggtgcaggaccaaaagaatggggccacccactattggacattagagaaattacggcaacgcctggatctgatgagagagatgtatgatagagcagcagaggtccctagctcagtgatcgaggattgcgataacgtggtaaccggcggagatcctttttatgacagattcccttggttccggctggtgggccgggcatttgtctacctaagcaacctgctatacccagtgccactggtgcatagggtcgcaattgtgagcgagaagggggaggtgaaaggattcctccgggtggctgtgcaggccatcagcgcagacgaagaggcaccagactatggctctggggttcgccagtccggaaccgcaaagatatcattcgacgaccagcattttgaaaaatttcagagcgaatcatgccccgtggtgggaatgtccagaagcggcacctcccaagaggagttacgaatcgtagagggccaaggccaaggcgccgacgttgggccctctgctgacgaagtaaataataacacctgttctgccgtgccccccgaaggcttgctgctcgattcctctgagaaggctgcactggacggccctctggatgccgctctggatcacttaaggctcggaaatacatttacattcagagtcaccgtgcttcaggcgtcttctataagcgctgagtatgccgacatcttttgtcagttcaactttattcaccgtcatgacgaggccttcagcaccgaaccactcaaaaacaccgggagaggcccgcctcttgggttttatcacgtccagaatatcgcggttgaggttaccaaatcattcattgagtacatcaagtctcagcccatcgtgtttgaagtattcggacactaccagcagcacccgtttccacctttgtgcaaggatgtgctgtctcccttaaggccctctaggcggcacttcccaagagtgatgcccttatcaaaacccgttcccgcgacaaaactgtcaacactcactcgcccatgccctggaccatgtcattgcaagtacgatctcctcgtttacttcgagatctgtgagttggaagccaacggtgattacattcccgccgtagtggatcatagaggcgggatgccctgtatggggactttcttgctgcaccaggggatccagaggaggattacggtcacactcctgcacgagacagggagtcacatccgctggaaggaagtgcgggaactggttgtcggacgcatccgtaatactccagaaactgatgagagccttatcgaccctaacatattgagtctgaatatcctgagctctgggtatatccatcccgcacaggacgatagaaccttttatcaatttgaagctgcttgggacagtagcatgcataatagccttctcctgaatcgagtcacaccctaccgcgaaaagatctacatgactctctctgcatacatcgagatggaaaactgtacacagcccgcagttgtcacgaaggacttttgcatggtgttctattcaagggacgcaaagcttcctgcctctaggagcattcggaacctcttcggcagcggctctcttagagcgagtgagtccaatcgcgttactggcgtttatgaactgtcgctgtgccacgtggcagacgccggaagtccaggcatgcagcggaggcgcaggcgggtgctcgacacatcagttgcatatgtgaggggggaggagaatctcgcgggatggaggcctaggtctgactcattgattttggaccaccagtgggaactggaaaagctgagcttactacaggaagtcgaaaaaacaaggcattacttactgctccgagagaagctcgagacggcgcagcggcctgttccggaagcgttgagccccgccttctcagaggactccgagtcacacggcagttccagcgcaagcagtcccctgtcagcagagggtcgaccaagtcctttggaggcaccaaatgagcggcagcgggaacttgcagtcaaatgcctcagactgctgacccataccttcaatcgcgagtacacacactcccacgtgtgcgtgtccgcctcagaaagcaagctcagcgaaatgagtgtaacgctgctccgggatccttctatgagccccctgggagttgccactctaacccccagcagcacctgtccctctctggttgagggccgctacggtgcgacagacctgagaacgccacagccctgttcgcggccagcttccccagaacccgagctgctgccggaggcagattccaaaaaactccccagccctgcccgcgccaccgaaacagacaaggaaccccagcggcttttggtgccagatatccaggagatcagagtctcccccatagtaagtaaaaagggctacctgcatttccttgagccccacacctctggctgggcccggcggtttgtagttgtacgtaggccctacgcctacatgtataactccgacaaagatacagtcgaaaggtttgtcctgaacctggcgacggcccaggtcgaatactctgaggaccagcaggcaatgcttaagactcccaatacttttgcagtgtgcaccgaacatagagggatcttactgcaggcagcctcggataaagatatgcatgactggttgtacgccttcaatcccctgctagccggcaccattcgtagcaagttatcacgaagacggtccgcccaaatgagagtgtag

SEQ ID NO: 267646 - DNA, 8832 bp, Artificial Sequence
  derived and/or modified sequence
cacagcgcagagcagccggcgagcggcagcagctccgggctcgagagcccgcgcccatgccagtgcccatgcggggccgccgccagtgacgccggagaggtgttccccccacactggggctcccactactgcgaggagtgacccacgaaggccacagagatggccggggcttcggtgaaggtggcggtgcgggtccgccccttcaattcccgggaaatgagccgtgactccaagtgcatcattcagatgtctggaagcaccaccaccattgttaaccccaaacagcccaaggagacgcccaaaagcttcagctttgactactcctactggtcgcacacctcacctgaggacatcaactacgcgtcgcagaagcaggtgtaccgggacatcggcgaggagatgctgcagcatgcctttgagggatacaacgtgtgcatcttcgcctatgggcagacgggtgccggcaagtcctacaccatgatgggcaagcaggagaaggaccagcagggcatcatcccacagctctgcgaggacctcttctctcggatcaacgacacgaccaacgacaacatgtcctactccgtggaggtcagctacatggagatttactgtgagcgcgtccgtgacctcctgaaccccaagaacaagggcaaccttcgcgtgagggagcacccactgctggggccctacgtggaggacctctccaagctggctgtcacctcctacaatgacatccaggacctcatggactcagggaacaaggccaggaccgtggcggccaccaacatgaatgagaccagcagtcgctcccacgccgtcttcaacatcatcttcacccagaagcgccatgacgcagagaccaatatcaccacggagaaggtgagcaaaatcagcctggtggacctggctgggagcgagcgggctgactccacgggagccaagggcacgcgcctcaaggagggggccaacatcaacaagtcgctgaccaccctgggcaaggtcatctccgccctggctgaaatggactccggacccaacaagaacaagaaaaagaagaagacagatttcattccgtaccgagattccgtgttgacctggctcctccgggaaaacctgggcggtaactcaaggacagctatggtggcagccttgagtcctgcagacatcaactacgatgagacccttagcacgctgaggtatgctgaccgggccaagcagatccgctgcaatgctgtcatcaatgaggaccccaacaacaagctgatccgcgagctgaaggatgaggtgacccggctgcgggaccttctgtacgcccagggtcttggcgacatcactgacatgaccaatgccctggtgggtatgagcccctcatcctcgctctcagccctgtccagccgcgcggcctccgtgtccagcctccacgagcgcatcttgtttgccccgggcagcgaggaggccattgaaagactgaaggaaacagagaagatcatagctgagctcaatgagacctgggaggagaagctgcggcggacagaagccatccggatggagagggaagccctgctggccgagatgggtgtggccatgagggaggatggcggcaccttgggcgtattctctcccaaaaagacaccacacctcgtcaacctgaacgaggacccgctgatgtctgagtgcctgctctactacatcaaggatgggatcaccagagtgggcagggaggatggcgagaggcggcaggacattgttctgagtgggcacttcatcaaggaggagcactgcgtcttccggagcgactccaggggaggcagcgaagctgtggtgaccttggagccctgtgagggggcagacacctacgtcaatggcaagaaagtcacagagcccagcatcctgcgttcaggaaaccgcatcatcatgggtaagagccatgtgttccggttcaaccaccccgagcaggcccggcaggagcgtgagcgcacgccttgtgcggagacgccagctgagcctgtggactgggccttcgcccagcgtgagctgctggagaagcagggcatcgacatgaagcaggagatggagcagaggctccaggaactggaggaccagtaccgccgcgagcgggaggaggccacctacctgctggagcagcagcggctggactatgagagcaagctggaggctctgcagaagcagatggactccaggtactacccggaggtgaacgaggaggaggaggagcccgaggatgaagtccagtggacagagcgggagtgtgagctggcgctctgggccttccggaagtggaagtggtaccagttcacgtctctgcgggacctgctgtggggcaacgccatcttcctcaaggaggccaatgccatcagcgtggagctgaaaaagaaggtacaattccagtttgtcctcctgacggacacactctactcccctctgccacccgacctgctgcccccagaggccgccaaagaccgagagacgcggcccttcccccgcaccattgtggccgtggaggtccaggaccagaagaacggggccacccactactggacgctggagaagctcaggcagcgtctggacctgatgcgggagatgtacgaccgcgctgcagaggtgccctccagtgtcatcgaggactgtgacaacgtggtgaccggcggagaccccttctatgaccgcttcccctggttccggctggtgggcagggccttcgtgtacctgagcaacctgctgtaccccgttcccctggtacaccgtgtggcaatcgtcagcgagaagggcgaggtgaagggcttcctccgcgtggccgtccaggccatctcagccgatgaagaggcccctgattatggctctggcgtccgccagtcgggaactgctaaaatctcctttgatgaccagcattttgaaaagttccagtccgagtcttgccccgtggtggggatgtcccgctcgggaacctcccaggaagagcttcgcatcgtggagggccagggccagggtgcagacgtggggccctcagccgatgaagtcaacaacaacacctgttcagcagtgcccccagaaggcctcctcctagacagctctgagaaagccgccctggatgggcccctggatgctgccctggaccacctccgcctgggcaacaccttcaccttccgtgtgacagtcctgcaggcgtccagcatctctgccgaatatgccgacatcttctgccagttcaacttcatccaccgccacgacgaggccttctccacagagcccctgaagaacacaggcagaggccccccacttggcttctaccacgtccagaacatcgcagtggaggtgaccaagtccttcattgagtacatcaagagccagcccattgttttcgaggtctttggccactaccagcagcacccgttcccgcccctctgcaaggacgtgctcagccccctgaggccctcgcgccgccacttccctcgggtcatgccactgtccaagccagtgcccgccaccaagctcagcacactgacgcggccctgtccgggaccctgccactgcaagtacgacctgctggtctacttcgagatctgtgagctggaggccaacggcgattacatcccggccgtggtggaccaccgtgggggcatgccatgcatggggaccttcctcctccaccagggcatccagcgacggattacggtgacactactgcatgagacaggcagccatatccgctggaaggaagtgcgcgagctggtcgtgggccgcatccgaaacactccagagaccgacgagtccctgatcgaccccaacatcttgtctctcaacatcctctcttccggatacatccacccagcccaagatgaccggaccttttaccaatttgaggctgcgtgggacagctccatgcacaactctctcctgctgaaccgggtcaccccttatcgagagaaaatctacatgacactctccgcttatatcgagatggagaactgcacccagccggctgttgtcaccaaggacttctgcatggtcttctattcccgtgatgccaagctgccagcctcgcgctccatccgcaacctctttggcagtgggagccttcgggcctcagagagtaaccgtgtgactggtgtgtacgagctcagcctgtgccacgtggctgacgcgggcagcccagggatgcagcgccggcgccgacgagtcctggacacatctgtggcctatgtccggggcgaggagaacctggcaggctggaggccccggagtgacagtctcattctggaccaccagtgggagctggagaagctgagcctcctgcaggaggtggagaagactaggcactacctgctcctgcgggagaagctggagaccgcccagcggcctgtcccggaggcactgtccccggccttcagcgaggactctgagtcccatggctcctccagcgcctcctccccgctctcggctgagggccgcccatcacccctggaggctcccaacgagaggcagcgggagctggccgtcaagtgcttgcgcctgctcacgcacacattcaacagagagtacacacacagccacgtctgcgtcagtgccagcgagagcaagctctccgagatgtctgtcaccctgctccgggacccgtcgatgtcccctctaggggtggccactctcaccccctcctccacttgcccctctctggttgaagggcggtacggtgccactgacctgaggaccccgcagccctgctcccggccagccagcccagagcccgagctgctgccagaggccgactccaagaagctcccttcccctgcccgggcaacagagacagacaaggagccccagcgcctgctggtccctgacatccaggagatccgagtcagcccgatcgtttccaagaaggggtacctgcacttcctggagccgcacacgtcaggctgggccaggcgcttcgtggtggtgcggcgcccctatgcctacatgtacaacagcgacaaggacaccgtggagcggttcgtgctcaacctggccactgcccaggtggagtacagtgaggaccagcaggctatgctcaagacacccaacacattcgcggtgtgcacggaacaccgcggcatcctgctgcaggccgccagcgacaaggacatgcatgactggctgtacgccttcaaccccctcctggccgggaccatacggtccaagctctccagaaggaggtctgcccagatgcgggtctgaacctgagccctcccgtgacagccggcaggcccagcccatcccctccctcatcctcgtctgtcctgtcacctgccgcccagcccctctcctgccagacagcccacgaccgggtcgaccccccaggggacgcccatgccaggcccggggacctgtgccacacgaccagctgtgctcccagcagaggctgtgcgtgtcagttcttcttgcagaatgtgctctggtggaacaagttgggagaggctgggggggccaagggcacaggttacgggggttcttgctgccgttctaatatttttttaagcatagacagacttataattaatatacgttagttagtgacattgaaacagtcaactcggaaattaactataagacttgttctatttataagtatttatttctaatgcctccacatagccctgtaatattcagatggaacccccaaccacctccaccctgtttgttcccacatgtgtctcccaagcctgctagggacaggcagggcagggacagccaccttggaaggccgcagtgaggagctgtctggaccagtggggcaccttggggctagcacacgggtgtatcgcctgggccccaggcttctccatggccacatgggtcctgggtgtatgtgtgggagagtgggggggtgtctttggtgcctgaagtctgcgcggcatggagggtggtgtgagttcctctggtgggagggagaacgcacatctcttctgggcggccacctgaggagtgactccaagaagagttccggcagctttccccaggaaagggtgaggggtgacactcggctctggctctgagatgaggcagacggcacccaggctgtgatctgtcctgggcggggaccaggagggagcggggtcgggatcacctgccagtgtgcagactctgggactgcgtgctgtctccggaccatcagggtagggtggtgggttgagaccaggaagtcagggaagatcggaattcagggcgacggtctaggtgtcgagggctgtggcgcagcctcttcagctgcggcgagaaatggagtgagtcaaggtagcttctgggaagaaatgctgccattagcaggtttcttgcaaagactttcctctctttgttcccagggcagagagtttctgtgagtcccactgagaaaatcccatggggtgggggtatcctggtcggtcggcaatggagggtggctggcttggtggttattgtcttcaaggagctcttcgctgctgcatctgcggtgtccctttgttcttgtcccatttcaccccctctgcagacaccaatgtccgagggccacccaggacaggacgggggtcagccccaagctgagagtctggtcataggagtcatgtccagaggcctagggaggttttagggccctccccacccacacccacaggtcgatttggtctctttttagctcaaggaaagacagtagccaagcaacagagcccctctcccgccgtggcccgtgggagcagttacatcgggtctggtgctccagacctagggcccagcactttcatcagatcctgcctcctggagtgggggaaacgcagcaccccactggttctgaggcccctaccctcccaggctgtcccacgtgatgctgacatgagcctcagagaccccaatcccatgcctgggggagagacagcggctcaggagtgggggagcacgggccttctacaccacatgggaaggctctggcatgaggttttcctttgggaaggttgtttgggcccctgaagttccatctccgagagtggtgtgcagggcaggccagggcccatgctggctgcagtctctgtggctgcctgcctgggccagcctgtttgggagctgggactgtgggctcgccttttcgtacctgggctcaggtgcggtgtggccaccgccaccctcatcccctgcctgggaggctctcccaggggctgatgggggggttctgtgagggagaatcagggctcgggaagccacgcctgggaaggcaggacacaggacacagcagctttctttggaaatctcccaggtgaggattcacatcccaaaataaaattcagaagccaggtggcctgtgctccccatgggtgacctctggaggcagtggaccaagatgcagcaaggagaggatgcagaacagcttcttgcagaagcacctgctccggcatccagcgctgcctggaggcaggaaggagaggcagggcaggacacgctggtctgagatgagggggagccccacgggccccaggcaggctagaggaggcacaggccctgccacggccaactcaggtcagccagcctgaggctgtggcctccaaagggtctgggcgcaccccccaggtcgcaggtgtctgaggccagccaacctgcagagcactcgcggcgtgggtgggctgagtggaggtgcctgggagctgcctaaattcagaagcctccactgccatggagactgcctggctgtgtcctctcagccaggtgccgtgttggccttggctaggacccagagccacactgcagcctccgccgactccctccttccgggcctgctctagtgaggagtgcctaagccaggacccagaaactcagagttgatggtgagaggaggccgcctgagtcaggacacctggcttcttgaaaagttcgctctgccagaaaccacctagggaccacgttagctgccttccttgagctccccaggagtcggtttccacatctgtgaggtggagggctggtgtggaggtgctcatggggtgcggtgcttgggagacagccaggcccagggtggctgctgcttcctgctaagtgggggaggtgagacagatctggaaagccgtctccctcagatggtttcatttaatgctttatactgccgagtctgggggcttgttttggtttgggggcagccatcctccaccagaaagggggagctccttccgctgcggctccagatagatggggatgccgggctccaggccgaccagcacttgggatctgatgggacacggccagtgcctaggggtgccaagtccaaggcctcccactgggagtcatcgctgagaagatgccaatgtttcatccaccggctgcacaggcacaaactcccccacccaggacggctgtgatgaggtggccctccctgtcaaccctggtccctggagtccccagcacctggggccctggtggggctgatgtcacaggtgtttactgtgctgctgcactggtcctatgccagcctcacccatgtggggaccacggaaggcacactcccttacccccggtgccgggccgtgcggtcccccagacggacagcagctgtggcgacctgcgtttctccctgggcctgtgcttcctgtagttagtccgtcccctggttcccctgtggctcagaggccgcgtccctggcttgtacatatgtgattgctgtgggcacaccccagaccccatgtcatagctgccgtcccgacgtcacgacgcctgtcccgatgtcttacacccgagtgttagccctaggctcctgtactgtgcgtgcacttgaggctctgtccaattaagaaataaatgtggctcttactcaacacagtc

SEQ ID NO: 267647 - DNA, 585 bp, Artificial Sequence
  derived and/or modified sequence
acgtccccgggaatagggactttcccccagagactggaggaccccttccccaagcgtcagccctttccaaggggtgcctgcattgctggaattaaaggcctgccagggcaagcggattggatcttgcggctgcggagaggaggcggtgcggagaggcccctgcctcgcagggctggcactggcctcaccctggggacgcacagcgcgacaccgtgctcggctctgcgggacaccaggtcgcactcaggctggcggggcctttgccagggaagccatgccagcaccctcgtggtgtgagaaggcagcagaggcttcctcaggcttgcgaagctgggttccactggtcccgctgggctcctgctttctagaattatctgcgctgcctcctctccttgtggattccaccccatgtgttccccccacactggggctcccactactgcgaggagtgacccacgaaggccacagagatggccggggcttcggtgaaggtggcggtgcgggtccgccccttcaattcccgggaaatgagccgtgactccaagtgcatcattcagatgtctggaagcaccaccaccattgtta

SEQ ID NO: 267648 - DNA, 5073 bp, Artificial Sequence
  derived and/or modified sequence
atggccggggcctctgtgaaggtggccgtgcgggtgcggcccttcaacagccgggagatgagccgggacagcaagtgcatcatccagatgagcggcagcaccaccaccatcgtgaaccccaagcagcccaaggagacccccaagagcttctcctttgactacagctactggagccacaccagccctgaggacatcaactatgccagccagaagcaggtgtacagagacattggagaggagatgctgcagcacgcctttgagggctacaacgtgtgcatctttgcctacggccagacaggagctgggaagagctacaccatgatgggcaagcaggagaaggaccagcagggcatcatcccccagctgtgtgaggacctcttcagccgcatcaatgacaccaccaatgacaacatgagctacagcgtggaggtgtcctacatggagatctactgtgagcgggtgcgggacctgctgaaccccaagaacaagggcaacctgcgggtgcgggagcaccccctgctgggcccctacgtggaggacctgagcaagctggccgtgaccagctacaatgacatccaggacctgatggacagcggcaacaaggccaggacagtggccgccaccaacatgaatgagaccagcagccgcagccatgctgtgttcaacatcatcttcacccagaagagacatgatgctgagaccaacatcaccacagagaaggtgtccaagatcagcctggtggacctggccggcagcgagagagctgacagcactggagccaagggcacccggctgaaggagggcgccaacatcaacaagagcctgaccaccctgggcaaggtgatcagcgccctggccgagatggacagcggccccaacaagaacaagaagaagaagaagacagacttcatcccctacagagattctgtgctgacctggctgctgcgggagaacctgggcggcaacagcaggacagccatggtggccgccctgagccctgctgacatcaactatgatgagaccctgagcaccctgcgctatgctgaccgggccaagcagatccgctgcaatgctgtgatcaatgaagaccccaacaacaagctgatccgggagctgaaggatgaggtgacccggctgcgggacctgctgtatgcccagggcctgggggacatcacagacatgaccaatgccctggtgggcatgagccccagcagcagcctgagcgccctgagcagccgggccgcctctgtgagcagcctgcacgagcgcatcctgtttgcccctggcagcgaggaggccatcgagcggctgaaggagacagagaagatcatcgccgagctgaatgagacctgggaggagaagctgcggaggacagaggccatccgcatggagcgggaggccctgctggccgagatgggcgtggccatgagagaagatggcggcaccctgggcgtcttcagccccaagaagaccccccacctggtgaacctgaatgaagaccccctgatgtctgaatgtctgctgtactacatcaaggatggcatcaccagggtgggcagagaagatggagagcggcggcaggacatcgtgctgagcggccacttcatcaaggaggagcactgtgtgttcagaagtgacagcagaggaggcagcgaggccgtggtgaccctggagccctgtgagggcgctgacacctacgtgaatggcaagaaggtgacagagcccagcatcctgcggagcggcaaccgcatcatcatgggcaagagccacgtgttccgcttcaaccaccctgagcaggcccggcaggagcgggagaggaccccctgtgccgagaccccagctgagcctgtggactgggcctttgcccagcgggagctgctggagaagcagggcatcgacatgaagcaggagatggagcagaggctgcaggagctggaggaccagtaccgccgggagcgggaggaggccacctacctgctggagcagcagaggctggactatgagagcaagctggaggccctgcagaagcagatggacagccgctactacccagaggtgaatgaggaggaggaggagccagaagatgaggtgcagtggacagaaagagaatgtgagctggccctgtgggccttcaggaagtggaagtggtaccagttcaccagcctgcgggacctgctgtggggcaatgccatcttcctgaaggaggccaatgccatctctgtggagctgaagaagaaggtgcagttccagtttgtgctgctgacagacaccctgtacagccccctgcccccagacctgctgcccccagaggccgccaaggaccgggagacccggcccttccccaggaccatcgtggccgtggaggtgcaggaccagaagaatggagccacccactactggaccctggagaagctgcggcagaggctggacctgatgagggagatgtatgacagagctgctgaggtgcccagctctgtgattgaggactgtgacaacgtggtgactggaggagaccccttctatgaccgcttcccctggttccggctggtgggccgggcctttgtgtacctgagcaacctgctgtaccctgtgcccctggtgcaccgggtggccatcgtgtctgagaagggggaggtgaagggcttcctgcgggtggccgtgcaggccatctctgcagatgaggaggccccagactatggcagcggcgtgcggcagagcggcacagccaagatcagctttgatgaccagcactttgagaagttccagagcgagagctgccctgtggtgggcatgagccgcagcggcaccagccaggaggagctgagaattgtggagggccagggccagggcgcagatgtgggccccagcgcagatgaggtgaacaacaacacctgcagcgctgtgcccccagagggcctgctgctggacagcagcgagaaggccgccctggatggccccctggatgctgccctggaccacctgcggctgggcaacaccttcaccttccgggtgacagtgctgcaggccagcagcatctctgcagaatatgctgacatcttctgccagttcaacttcatccacagacatgatgaggccttcagcacagagcccctgaagaacacaggccggggcccccccctgggcttctaccacgtgcagaacattgctgtggaggtgaccaagagcttcatcgagtacatcaagagccagcccatcgtgtttgaggtgtttggccactaccagcagcaccccttcccccccctgtgcaaggatgtgctgagccccctgcggcccagccgccgccacttcccccgggtgatgcccctgagcaagcctgtgcctgccaccaagctgagcaccctgacccggccctgccccggcccctgccactgcaagtatgacctgctggtgtactttgagatctgtgagctggaggccaatggagactacatcccagctgtggtggaccacagaggaggcatgccctgcatgggcaccttcctgctgcaccagggcatccagaggcgcatcaccgtgaccctgctgcatgaaacaggcagccacatccgctggaaggaggtgcgggagctggtggtgggccgcatccggaacaccccagagacagatgagagcctgattgaccccaacatcctgagcctgaacatcctgagcagcggctacatccacccagcccaggatgacaggaccttctaccagtttgaggccgcctgggacagctccatgcacaacagcctgctgctgaacagagtgaccccctaccgggagaagatctacatgaccctgagcgcctacatcgagatggagaactgcacccagcctgctgtggtgaccaaggacttctgcatggtgttctacagcagagatgccaagctgcctgccagccgcagcatccggaacctgtttggcagcggcagcctgcgggccagcgagagcaacagagtgactggagtgtatgagctgagcctgtgccacgtggctgatgctggcagccctggcatgcagaggagaagaagaagagtgctggacacctctgtggcctacgtgcggggggaggagaacctggccggctggaggcccaggagtgacagcctcatcctggaccaccagtgggagctggagaagctgagcctgctgcaggaggtggagaagaccaggcactacctgctgctgcgggagaagctggagacagcccagaggcctgtgcctgaggccctgagccctgccttcagcgaggacagcgagagccacggcagcagcagcgccagcagccccctgtctgctgagggccggcccagccccctggaggccccaaatgaaaggcagcgggagctggccgtgaagtgcctgcggctgctgacccacaccttcaaccgggagtacacccacagccacgtgtgtgtgtctgccagcgagagcaagctgtctgagatgtctgtgaccctgctgcgggaccccagcatgagccccctgggcgtggccaccctgacccccagcagcacctgccccagcctggtggagggccgctacggggccacagacctgcggaccccccagccctgcagcaggcctgccagccctgagcctgagctgctgcctgaggccgacagcaagaagctgcccagccctgcccgggccacagaaacagacaaggagccccagaggctgctggtgcctgacatccaggagatccgggtgagccccatcgtgtccaagaagggctacctgcacttcctggagccccacaccagcggctgggccaggagatttgtggtggtgcggcggccctatgcctacatgtacaacagcgacaaggacacagtggagagatttgtgctgaacctggccacagcccaggtggagtacagcgaggaccagcaggccatgctgaagacccccaacacctttgctgtgtgcacagagcaccggggcatcctgctgcaggccgccagtgacaaggacatgcatgactggctgtatgccttcaaccccctgctggccggcaccatccgcagcaagctgagcagaagaagaagtgcccagatgagggtgtag

SEQ ID NO: 267649 - DNA, 5073 bp, Artificial Sequence
  derived and/or modified sequence
atggccggcgccagcgtgaaggtggccgtgcgggtgcggcccttcaatagccgcgaaatgtctcgcgactccaaatgtatcatccagatgtctggctctaccactaccatcgttaatccaaaacagcccaaagaaacgccaaaatctttctcctttgattactcctactggtcccacactagtccggaggatatcaattacgcctcacaaaaacaagtgtacagagacattggcgaagaaatgctccaacacgcattcgagggttacaacgtgtgcatatttgcctatggccagacaggagccggaaaaagctacaccatgatgggcaaacaggagaaggaccagcaaggaataatcccacagctgtgcgaggatctcttctcgagaatcaacgacaccacaaatgataacatgtcttactccgtggaggtctcctatatggagatttattgtgagcgtgtgcgtgatctcttgaatcctaagaacaaagggaatctcagggtgcgggagcaccccttactagggccctatgtggaggatctgtctaagttagccgtgacatcttacaatgatatccaagacttaatggattccggaaataaggccagaacagttgctgccacgaatatgaatgaaaccagcagtaggtcacatgccgtgttcaacataatctttactcaaaaaaggcacgatgccgagaccaacatcacaaccgagaaggtatcgaagatttcccttgtggatctggccggcagcgaaagagctgattcgaccggtgcgaaaggaacacgcttgaaggagggcgccaatattaataagagcctgaccaccctggggaaggtcattagcgccctggccgagatggattccgggccgaacaaaaacaaaaaaaaaaagaagacagactttatcccctatcgcgactccgtgctgacttggctacttagagagaacctgggtgggaacagccggacagccatggtagcagctctgagccccgccgacattaattacgatgaaactctgagcacactgcgctacgccgaccgggccaagcaaatcagatgcaatgctgtgataaacgaggatccaaacaataaacttatacgcgagttaaaagatgaggtgacccggcttcgggacttactgtacgctcagggcctgggggatatcacggatatgacaaacgccctcgtaggtatgtcaccctcatcctcactgagcgccctctctagccgcgctgccagtgtcagttctctccacgaaagaatcctgtttgcacctggatccgaagaagccatcgagcgcctcaaggagacagagaagattattgctgaactgaatgagacatgggaggagaagctacgaagaactgaggctataagaatggagcgtgaagcgctcctggctgagatgggggttgccatgcgggaagacggagggaccctcggcgtattctccccaaagaagacaccccacttagtcaacctgaacgaggatcctctgatgtctgagtgtctgctctactatattaaagatggcattacccgcgtgggtagggaagatggggaaagaaggcaggacatagttttgtctggtcacttcatcaaagaggaacattgtgtttttaggtcagactcccgcggaggcagtgaggcggtggtaaccttggagccatgtgaaggggctgacacgtatgtgaatggtaagaaagttacagagccctcaatcctccggagtggaaatagaatcattatgggcaagagccacgtgtttcgcttcaaccatccagagcaggcccggcaggagcgcgaacgcaccccctgcgccgagacacctgccgaaccggtcgactgggcattcgcccagagagagctcctggaaaaacagggaatagatatgaaacaagagatggaacagagactgcaggaactggaggaccaatataggcgcgagcgagaggaggctacctacctgctggaacagcagcggttggactacgagagcaaactggaggcactgcaaaaacaaatggacagcaggtactatccagaggttaatgaggaggaagaggagccagaggatgaggtgcagtggactgaaagggaatgtgaattggcactttgggcctttcggaagtggaaatggtatcagtttacatctctgagagatcttttatggggcaacgccatctttcttaaagaagccaacgctatttctgtggagcttaaaaaaaaggtgcagtttcaattcgtgttacttactgatacgctatactccccacttcctcctgatcttttaccccccgaagccgctaaggatagggaaacgcggccttttcccaggaccatcgtggccgttgaagtgcaggaccagaagaacggagcaactcattattggactctggaaaagttaaggcaaaggctagatcttatgagagagatgtacgacagagcagctgaggtgcccagctctgttatcgaggattgtgacaacgtcgtgactggaggcgaccccttttacgatcggttcccttggttccgactggtcgggcgtgcctttgtatacctctctaatctgttatacccagtgcccctggtccaccgtgtggctattgtgagcgagaagggggaggtgaagggctttctgcgcgtggccgtgcaggcaataagcgctgatgaggaggcacccgattatggtagtggcgttcggcagtctggtacagccaaaatctctttcgacgaccagcattttgaaaagtttcaatctgaaagctgtcccgtcgttggaatgtcacggtccggcacatctcaggaagagttgcggattgtcgaaggccaggggcaaggtgccgatgttggcccatcggccgatgaagtgaacaacaatacctgctctgcagtacccccagagggtcttctgctggactctagcgagaaggcagctttagacgggcccctagacgcagcactggatcatctccgcctcggaaatacttttaccttccgggtgactgtcctacaggccagctcaattagcgcggagtatgctgatattttttgtcagtttaacttcatccaccgacacgatgaagcgttctcgaccgaaccactaaagaacacgggcaggggtcctccattggggttctaccatgtccaaaatattgctgtcgaggtgaccaaatcttttatcgaatatatcaagtcgcagccaatagtatttgaggtcttcggtcattatcagcaacacccgttcccccctctttgcaaagacgtgctcagtcccttgagaccaagtcgaagacactttccccgggtgatgccgcttagcaagccggtgccggcaaccaagttgagtaccctgacaagaccatgccccgggccctgccactgcaagtacgacctcctggtttatttcgagatctgtgagcttgaggccaacggtgattacatccctgctgttgtggaccaccgcggaggcatgccatgcatgggtacctttctcctccaccaaggaatacagaggagaatcaccgttaccttactgcacgagactggatcacatattcgctggaaggaagtgcgtgaactagtcgtggggcgcatcagaaatacacccgaaacagacgagtctctgatcgatccaaacatcctgtctcttaatattctatcctctggttacattcacccagctcaggatgatcgcactttctaccagttcgaagctgcgtgggactcttcaatgcataactcgcttctgttaaacagggtgaccccttatcgcgagaagatctacatgaccctttcagcctatatcgagatggagaactgtacacagcccgccgtcgtcacgaaagacttctgcatggtgttttattctagggatgccaagctccccgcatctcgctccattaggaacctgttcggcagcggctccctgcgggccagtgaatcgaaccgcgtgactggcgtttacgagctttctctgtgtcacgtggccgacgcggggagcccaggaatgcaacgcaggagacgacgagtgctggacactagtgtggcctatgtgcgcggagaagagaacttagccgggtggaggccccgcagtgactctttaattctggatcaccagtgggagctcgaaaaactgagccttctccaagaggtcgagaaaactcgtcattacctgcttcttcgggaaaagctggaaaccgcccagaggcctgttccagaagcattgtcccctgcgttctctgaagattccgagtctcacggatctagtagtgcctcatcccctttgtccgcggaaggaagaccgtccccacttgaggccccaaatgaacgccagcgagagctggctgtgaaatgcctgaggctgttaacacatacatttaatcgtgagtacacgcattcccatgtctgtgtgtctgcatctgagtctaagctatcggaaatgtctgtcactttgctgcgggaccccagcatgtcccccctaggcgtcgccactctcaccccctccagcacatgtcccagccttgtcgaagggcggtatggcgccacagatctgcggactccccagccatgctctcgccctgcaagccccgagcccgagcttctgcccgaagccgactctaagaaattgcccagtcctgcccgtgctacagagaccgacaaggaaccacaacgcctgctggtgcccgacattcaggaaataagggtgagtcctattgtttcaaagaagggctacctccatttcctggagcctcacacgtccggctgggcgagaagattcgtggtggtgcgccggccatacgcctacatgtacaattctgataaggatactgtggagcggtttgtactgaacttagcgaccgcccaggtggagtactctgaggaccagcaggcaatgttgaagacacccaacacatttgcagtctgtactgagcaccggggcatccttcttcaggctgcttcagataaagacatgcacgattggctgtatgcctttaatcccctgctcgctggtacaattaggagtaaactctcacgccgccggagcgcacagatgagggtctag

SEQ ID NO: 267650 - DNA, 5072 bp, Artificial Sequence
  derived and/or modified sequence
atggctggagctagcgtgaaagttgccgtgagggtgcggccatttaatagtcgtgaaatgtcgagggactccaaatgtattattcagatgagtgggagcaccaccaccatcgtcaacccaaaacagcccaaagagactcccaaaagtttctcttttgactactcttactggtctcatacctcccccgaggatattaattacgctagccagaagcaggtttatagagatatcggcgaggagatgctccagcacgcctttgaaggatataatgtctgcatcttcgcgtacggccagaccggtgccggaaagtcatacacaatgatgggcaaacaggagaaggaccagcaggggatcataccccagttgtgtgaggacttgttctcaaggatcaatgacactacgaatgataatatgagctatagcgtagaagtgtcgtatatggagatatactgtgaaagagtccgagatctcctcaatcccaagaataagggaaaccttcgggtgcgagaacaccctttgctgggaccctacgtggaggatttgtccaaactggctgttaccagctataatgatatccaggatttgatggactccggtaacaaggccaggacagtggccgcaacaaatatgaatgagactagtagccgctctcacgcagtttttaacatcattttcacgcagaagagacacgatgccgaaactaacatcactaccgaaaaggtgtccaagatctcccttgtcgacctggctggaagcgagagggcagattcaacaggagccaaaggtacaaggctgaaggagggcgctaacattaacaagagcctgacaaccttggggaaagtcatctcggcattggctgagatggattccggccctaacaagaataaaaagaaaaagaaaactgatttcatcccttatagagattccgtcctcacatggctgcttagagagaatctggggggtaacagtaggaccgccatggtggcggctcttagcccagctgacatcaattacgacgaaaccttgtccactctgcgctatgcagacagggccaaacaaataagatgtaacgccgtaataaacgaggaccccaacaacaaattgattcgagagttgaaagatgaggtaaccagattacgcgaccttctttatgctcaggggctgggtgatatcacagacatgaccaatgctcttgtcggaatgagcccctcatcatccttgtctgctctgagctctcgcgctgcgagcgtctcttccctgcacgagagaatattatttgccccaggctctgaggaagccatcgaacggctgaaggagacagaaaagattatagcagagttgaacgagacctgggaggaaaaactgagaaggacagaggccatcagaatggagcgcgaggcattgctggctgaaatgggtgtggcgatgcgagaggacggaggaactctgggagtgtttagccctaaaaaaactccccacctggttaacctgaatgaggatcccctgatgagtgagtgccttctttattacattaaagatggcataacccgtgtcggacgagaggatggagagcgacggcaggacatcgtgctttccggacattttattaaagaggagcactgcgtgtttagaagcgactcaagagggggaagtgaggccgtcgttacgctggagccctgcgagggagcagacacctatgtcaacggaaagaaggttaccgaaccatccatccttcgctcaggcaaccgcatcatcatggggaaatcacatgtttttcgattcaaccatcctgagcaggctagacaagaaagggagcgtaccccatgcgccgaaacacccgctgaacccgtggactgggcatttgctcaaagggaactgctagaaaaacagggtatcgacatgaaacaagaaatggagcagcgactccaggagctcgaagatcagtataggagggaacgcgaggaggccacctatctactggaacagcagagactggattacgagagtaaattagaggctctgcagaaacagatggacagccgttattatcctgaagttaacgaggaagaagaggagccggaggacgaggtccagtggaccgaaagagagtgtgagctggcactgtgggccttccggaagtggaagtggtaccaattcacgtctttgcgggatctcctctggggcaatgccatttttcttaaggaagccaacgccataagcgtggaattgaagaaaaaagtccaattccaattcgtactgctcacagacacactgtattctcccctccctcccgatctgcttccacctgaggccgctaaagaccgagagactcggccattcccccgaaccatagtcgcagttgaagtccaggaccaaaagaacggagccactcactattggacactcgagaaattacgacaacgcttagaccttatgcgtgagatgtacgatagagccgcagaggtgccgtctagcgtgatcgaggactgcgataatgtggtgaccgggggagaccccttttatgacaggttcccatggtttcggttagtcggccgtgccttcgtatacttgtccaatcttctgtaccctgtgcccctggtgcaccgagtggccattgtgtctgaaaagggggaagtaaaaggattcctacgggtagccgtgcaagctatatccgcagacgaggaggccccagattacggatccggtgtacgtcaaagtggaaccgctaaaatctctttcgacgaccaacactttgagaagttccagtcagagagctgccccgtggttggtatgtcccgctctggaacgtcccaagaggagctgaggatcgttgaggggcaaggtcaaggggcagacgtgggcccaagcgccgatgaggttaacaataatacctgtagcgcggtcccgcctgagggtctgctgctggattccagcgagaaagcagccctggatggcccactagacgctgcacttgatcatctgcggctggggaatacattcaccttcagggtaaccgtgttgcaggctagcagcatttctgccgagtatgcagatatcttctgtcagtttaatttcatccacagacacgatgaggccttttcaacggaacccctcaaaaacactggacgcggacctcccctaggcttctatcatgtccagaatattgcagtcgaagtgaccaaaagtttcattgagtatattaaaagtcagccaattgtctttgaagtgtttggacactaccagcaacatcctttcccaccgctgtgcaaagacgttctaagcccactcaggccttcacgaaggcatttccctcgggtgatgccactgagcaaaccagttcccgcaacgaaattatccacattgactcggccttgccccggaccatgtcattgcaagtacgacctgttggtctacttcgagatatgcgagctggaagctaacggcgattacatccccgcagtggtggaccatagaggaggtatgccatgtatggggacgtttctgttacaccaaggaatacagcgaaggataaccgtgaccttgctccatgaaacagggagtcatataaggtggaaggaagtgagagagctcgtggtcggccgaattcgcaacacccccgaaactgacgagagtcttatagaccccaacattctctccctgaatatcctgtcttctgggtacatacaccccgctcaggatgataggacgttctatcagttcgaggctgcatgggacagtagcatgcataacagcttattgctgaatcgcgtaacgccctatcgggaaaagatttacatgaccctctccgcctacattgagatggagaactgcacccaacctgccgtcgtaacgaaggatttttgtatggtgttctatagtagagatgccaagctacccgctagccgttcaatacgaaatctcttcggcagtgggtctcttcgggcatcagaaagtaatcgcgtgaccggagtgtacgagctcagcctgtgccacgtggccgacgccggatcccccggaatgcaacgtcggagacggcgagttttagatacatccgttgcttacgtcagaggagaagagaatttggcaggatggcgccctcgcagcgacagccttattctggatcaccagtgggagctggagaagttaagcctcctgcaggaggtggaaaaaacgaggcactatcttctccttcgggaaaagttggagactgcccaacgacccgtcccggaagctctttcaccagccttttccgaagacagtgagtcccacggtagttccagcgcctccagccccctgtcagccgaagggcgacccagcccactggaagcaccaaatgagcggcagagggaactggcagttaagtgtttgcggcttctcacacacacattcaatcgcgagtatacccactctcacgtctgtgtgtccgcttccgagagtaaattatccgaaatgagtgtcactctgctgcgggatccatccatgtccccacttggtgtggccaccctgactcctagttccacctgcccaagtctggtcgaagggaggtacggagcaaccgatctgcgcacaccccagccctgctcacgcccagctagccctgagcccgaattgctccccgaggccgactctaaaaagctgcccagcccagctcgagcaaccgaaaccgacaaagagcctcagcgactcttagtgcccgacatccaagaaattcgcgtgtcaccaatcgtgtccaagaaaggttacttacattttttggagccgcatacctctggctgggcccgacggttcgtagtcgtccgccgtccctacgcctatatgtacaatagcgataaagatactgttgagcgattcgtgcttaaccttgctaccgcacaggttgagtactccgaagatcaacaagctatgctcaaaacacccaataccttcgccgtttgcacagaacacaggggcatcctgttgcaggcggcaagcgacaaggacatgcacgattggttgtacgcctttaacccactgctcgccggtaccatccggtctaaactctcaaggcgacggtctgcccagatgcgcgtata

SEQ ID NO: 267651 - DNA, 5073 bp, Artificial Sequence
  derived and/or modified sequence
atggccggcgccagcgtgaaggtggccgtgagagtgagacccttcaacagcagagagatgagcagagacagcaagtgcatcatccagatgagcggcagcaccaccaccatcgtgaaccccaagcagcccaaggagacccccaagagcttcagcttcgactacagctactggagccacaccagccccgaggacatcaactacgccagccagaagcaggtgtacagagacatcggcgaggagatgctgcagcacgccttcgagggctacaacgtgtgcatcttcgcctacggccagaccggcgccggcaagagctacaccatgatgggcaagcaggagaaggaccagcagggcatcatcccccagctgtgcgaggacctgttcagcagaatcaacgacaccaccaacgacaacatgagctacagcgtggaggtgagctacatggagatctactgcgagagagtgagagacctgctgaaccccaagaacaagggcaacctgagagtgagagagcaccccctgctgggcccctacgtggaggacctgagcaagctggccgtgaccagctacaacgacatccaggacctgatggacagcggcaacaaggccagaaccgtggccgccaccaacatgaacgagaccagcagcagaagccacgccgtgttcaacatcatcttcacccagaagagacacgacgccgagaccaacatcaccaccgagaaggtgagcaagatcagcctggtggacctggccggcagcgagagagccgacagcaccggcgccaagggcaccagactgaaggagggcgccaacatcaacaagagcctgaccaccctgggcaaggtgatcagcgccctggccgagatggacagcggccccaacaagaacaagaagaagaagaagaccgacttcatcccctacagagacagcgtgctgacctggctgctgagagagaacctgggcggcaacagcagaaccgccatggtggccgccctgagccccgccgacatcaactacgacgagaccctgagcaccctgagatacgccgacagagccaagcagatcagatgcaacgccgtgatcaacgaggaccccaacaacaagctgatcagagagctgaaggacgaggtgaccagactgagagacctgctgtacgcccagggcctgggcgacatcaccgacatgaccaacgccctggtgggcatgagccccagcagcagcctgagcgccctgagcagcagagccgccagcgtgagcagcctgcacgagagaatcctgttcgcccccggcagcgaggaggccatcgagagactgaaggagaccgagaagatcatcgccgagctgaacgagacctgggaggagaagctgagaagaaccgaggccatcagaatggagagagaggccctgctggccgagatgggcgtggccatgagagaggacggcggcaccctgggcgtgttcagccccaagaagaccccccacctggtgaacctgaacgaggaccccctgatgagcgagtgcctgctgtactacatcaaggacggcatcaccagagtgggcagagaggacggcgagagaagacaggacatcgtgctgagcggccacttcatcaaggaggagcactgcgtgttcagaagcgacagcagaggcggcagcgaggccgtggtgaccctggagccctgcgagggcgccgacacctacgtgaacggcaagaaggtgaccgagcccagcatcctgagaagcggcaacagaatcatcatgggcaagagccacgtgttcagattcaaccaccccgagcaggccagacaggagagagagagaaccccctgcgccgagacccccgccgagcccgtggactgggccttcgcccagagagagctgctggagaagcagggcatcgacatgaagcaggagatggagcagagactgcaggagctggaggaccagtacagaagagagagagaggaggccacctacctgctggagcagcagagactggactacgagagcaagctggaggccctgcagaagcagatggacagcagatactaccccgaggtgaacgaggaggaggaggagcccgaggacgaggtgcagtggaccgagagagagtgcgagctggccctgtgggccttcagaaagtggaagtggtaccagttcaccagcctgagagacctgctgtggggcaacgccatcttcctgaaggaggccaacgccatcagcgtggagctgaagaagaaggtgcagttccagttcgtgctgctgaccgacaccctgtacagccccctgccccccgacctgctgccccccgaggccgccaaggacagagagaccagacccttccccagaaccatcgtggccgtggaggtgcaggaccagaagaacggcgccacccactactggaccctggagaagctgagacagagactggacctgatgagagagatgtacgacagagccgccgaggtgcccagcagcgtgatcgaggactgcgacaacgtggtgaccggcggcgaccccttctacgacagattcccctggttcagactggtgggcagagccttcgtgtacctgagcaacctgctgtaccccgtgcccctggtgcacagagtggccatcgtgagcgagaagggcgaggtgaagggcttcctgagagtggccgtgcaggccatcagcgccgacgaggaggcccccgactacggcagcggcgtgagacagagcggcaccgccaagatcagcttcgacgaccagcacttcgagaagttccagagcgagagctgccccgtggtgggcatgagcagaagcggcaccagccaggaggagctgagaatcgtggagggccagggccagggcgccgacgtgggccccagcgccgacgaggtgaacaacaacacctgcagcgccgtgccccccgagggcctgctgctggacagcagcgagaaggccgccctggacggccccctggacgccgccctggaccacctgagactgggcaacaccttcaccttcagagtgaccgtgctgcaggccagcagcatcagcgccgagtacgccgacatcttctgccagttcaacttcatccacagacacgacgaggccttcagcaccgagcccctgaagaacaccggcagaggcccccccctgggcttctaccacgtgcagaacatcgccgtggaggtgaccaagagcttcatcgagtacatcaagagccagcccatcgtgttcgaggtgttcggccactaccagcagcaccccttcccccccctgtgcaaggacgtgctgagccccctgagacccagcagaagacacttccccagagtgatgcccctgagcaagcccgtgcccgccaccaagctgagcaccctgaccagaccctgccccggcccctgccactgcaagtacgacctgctggtgtacttcgagatctgcgagctggaggccaacggcgactacatccccgccgtggtggaccacagaggcggcatgccctgcatgggcaccttcctgctgcaccagggcatccagagaagaatcaccgtgaccctgctgcacgagaccggcagccacatcagatggaaggaggtgagagagctggtggtgggcagaatcagaaacacccccgagaccgacgagagcctgatcgaccccaacatcctgagcctgaacatcctgagcagcggctacatccaccccgcccaggacgacagaaccttctaccagttcgaggccgcctgggacagcagcatgcacaacagcctgctgctgaacagagtgaccccctacagagagaagatctacatgaccctgagcgcctacatcgagatggagaactgcacccagcccgccgtggtgaccaaggacttctgcatggtgttctacagcagagacgccaagctgcccgccagcagaagcatcagaaacctgttcggcagcggcagcctgagagccagcgagagcaacagagtgaccggcgtgtacgagctgagcctgtgccacgtggccgacgccggcagccccggcatgcagagaagaagaagaagagtgctggacaccagcgtggcctacgtgagaggcgaggagaacctggccggctggagacccagaagcgacagcctgatcctggaccaccagtgggagctggagaagctgagcctgctgcaggaggtggagaagaccagacactacctgctgctgagagagaagctggagaccgcccagagacccgtgcccgaggccctgagccccgccttcagcgaggacagcgagagccacggcagcagcagcgccagcagccccctgagcgccgagggcagacccagccccctggaggcccccaacgagagacagagagagctggccgtgaagtgcctgagactgctgacccacaccttcaacagagagtacacccacagccacgtgtgcgtgagcgccagcgagagcaagctgagcgagatgagcgtgaccctgctgagagaccccagcatgagccccctgggcgtggccaccctgacccccagcagcacctgccccagcctggtggagggcagatacggcgccaccgacctgagaaccccccagccctgcagcagacccgccagccccgagcccgagctgctgcccgaggccgacagcaagaagctgcccagccccgccagagccaccgagaccgacaaggagccccagagactgctggtgcccgacatccaggagatcagagtgagccccatcgtgagcaagaagggctacctgcacttcctggagccccacaccagcggctgggccagaagattcgtggtggtgagaagaccctacgcctacatgtacaacagcgacaaggacaccgtggagagattcgtgctgaacctggccaccgcccaggtggagtacagcgaggaccagcaggccatgctgaagacccccaacaccttcgccgtgtgcaccgagcacagaggcatcctgctgcaggccgccagcgacaaggacatgcacgactggctgtacgccttcaaccccctgctggccggcaccatcagaagcaagctgagcagaagaagaagcgcccagatgagagtgtag

SEQ ID NO: 267652 - protein, 366 aa, Artificial Sequence
  derived and/or modified sequence
MNGQLDLSGKLIIKAQLGEDIRRIPIHNEDITYDELVLMMQRVFRGKLLSNDEVTIKYKDEDGDLITIFDSSDLSFAIQCSRILKLTLFVNGQPRPLESSQVKYLRRELIELRNKVNRLLDSLEPPGEPGPSTNIPENDTVDGREEKSASDSSGKQSTQVMAASMSAFDPLKNQDEINKNVMSAFGLTDDQVSGPPSAPAEDRSGTPDSIASSSSAAHPPGVQPQQPPYTGAQTQAGQMYQQYSNRPAMVHSSRRLHLSSLNSMVFSIQQAIVSRLDLNNLSSSRDMASNQLPRHQLLPFLVSLNNCLLSRHSSTRRAIILHKLTLPKLLSLLIILWLLPLNLEWLQANLGPINQDQVLLHFLEVP

SEQ ID NO: 267653 - protein, 157 aa, Artificial Sequence
  derived and/or modified sequence
MNGQLDLSGKLIIKAQLGEDIRRIPIHNEDITYDELVLMMQRVFRGKLLSNDEVTIKYKDEDGDLITIFDSSDLSFAIQCSRILKLTLFVNGQPRPLESSQVKYLRRELIELRNKVNRLLDSLEPPGEPGPSTNIPENDTVDGREEKSASDSSGKQS

SEQ ID NO: 267654 - protein, 128 aa, Artificial Sequence
  derived and/or modified sequence
MNGQLDLSGKLIIKAQLGEDIRRIPIHNEDITYDELVLMMQRVFRGKLLSNDEVTIKYKDEDGDLITIFDSSDLSFAIQCSRILKLTLFVNGQPRPLESSQVKYLRRELIELRNKVNRLLDSLEPPGE

SEQ ID NO: 267655 - protein, 181 aa, Artificial Sequence
  derived and/or modified sequence
MNGQLDLSGKLIIKAQLGEDIRRIPIHNEDITYDELVLMMQRVFRGKLLSNDEVTIKYKDEDGDLITIFDSSDLSFAIQCSRILKLTLFVNGQPRPLESSQVKYLRRELIELRNKVNRLLDSLEPPGEPGPSTNIPENDTVDGREEKSASDSSGKQSTQVMAASMSAFDPLKNQDEINKNV

SEQ ID NO: 267656 - protein, 396 aa, Artificial Sequence
  derived and/or modified sequence
MNGQLDLSGKLIIKAQLGEDIRRIPIHNEDITYDELVLMMQRVFRGKLLSNDEVTIKYKDEDGDLITIFDSSDLSFAIQCSRILKLTLFVNGQPRPLESSQVKYLRRELIELRNKVNRLLDSLEPPGEPGPSTNIPENDTVDGREEKSASDSSGKQSTQVMAASMSAFDPLKNQDEINKNVMSAFGLTDDQVSGPPSAPAEDRSGTPDSIASSSSAAHPPGVQPQQPPYTGAQTQAGQMYQQYQQQAGYGAQQPQAPPQQPQQYGIQYSASYSQQTGPQQPQQFQGYGQQPTSQAPAPAFSGQPQQLPAQPPQQYQASNYPAQTYTAQTSQPTNYTVAPASQPGMAPSQPGAYQPRPGFTSLPGSTMTPPPSGPNPYARNRPPFGQGYTQPGPGYR

SEQ ID NO: 267657 - DNA, 1101 bp, Artificial Sequence
  derived and/or modified sequence
atgaacggccagctggacctgagcggcaagctgatcatcaaggcccagctgggcgaggacatcagaagaatccccatccacaacgaggacatcacctacgacgagctggtgctgatgatgcagagagtgttcagaggcaagctgctgagcaacgacgaggtgaccatcaagtacaaggacgaggacggcgacctgatcaccatcttcgacagcagcgacctgagcttcgccatccagtgcagcagaatcctgaagctgaccctgttcgtgaacggccagcccagacccctggagagcagccaggtgaagtacctgagaagagagctgatcgagctgagaaacaaggtgaacagactgctggacagcctggagccccccggcgagcccggccccagcaccaacatccccgagaacgacaccgtggacggcagagaggagaagagcgccagcgacagcagcggcaagcagagcacccaggtgatggccgccagcatgagcgccttcgaccccctgaagaaccaggacgagatcaacaagaacgtgatgagcgccttcggcctgaccgacgaccaggtgagcggcccccccagcgcccccgccgaggacagaagcggcacccccgacagcatcgccagcagcagcagcgccgcccacccccccggcgtgcagccccagcagcccccctacaccggcgcccagacccaggccggccagatgtaccagcagtacagcaacagacccgccatggtgcacagcagcagaagactgcacctgagcagcctgaacagcatggtgttcagcatccagcaggccatcgtgagcagactggacctgaacaacctgagcagcagcagagacatggccagcaaccagctgcccagacaccagctgctgcccttcctggtgagcctgaacaactgcctgctgagcagacacagcagcaccagaagagccatcatcctgcacaagctgaccctgcccaagctgctgagcctgctgatcatcctgtggctgctgcccctgaacctggagtggctgcaggccaacctgggccccatcaaccaggaccaggtgctgctgcacttcctggaggtgccctag

SEQ ID NO: 267658 - DNA, 474 bp, Artificial Sequence
  derived and/or modified sequence
atgaacggccagctggacctgagcggcaagctgatcatcaaggcccagctgggcgaggacatcagaagaatccccatccacaacgaggacatcacctacgacgagctggtgctgatgatgcagagagtgttcagaggcaagctgctgagcaacgacgaggtgaccatcaagtacaaggacgaggacggcgacctgatcaccatcttcgacagcagcgacctgagcttcgccatccagtgcagcagaatcctgaagctgaccctgttcgtgaacggccagcccagacccctggagagcagccaggtgaagtacctgagaagagagctgatcgagctgagaaacaaggtgaacagactgctggacagcctggagccccccggcgagcccggccccagcaccaacatccccgagaacgacaccgtggacggcagagaggagaagagcgccagcgacagcagcggcaagcagagctag

SEQ ID NO: 267659 - DNA, 387 bp, Artificial Sequence
  derived and/or modified sequence
atgaacggccagctggacctgagcggcaagctgatcatcaaggcccagctgggcgaggacatcagaagaatccccatccacaacgaggacatcacctacgacgagctggtgctgatgatgcagagagtgttcagaggcaagctgctgagcaacgacgaggtgaccatcaagtacaaggacgaggacggcgacctgatcaccatcttcgacagcagcgacctgagcttcgccatccagtgcagcagaatcctgaagctgaccctgttcgtgaacggccagcccagacccctggagagcagccaggtgaagtacctgagaagagagctgatcgagctgagaaacaaggtgaacagactgctggacagcctggagccccccggcgagtag

SEQ ID NO: 267660 - DNA, 546 bp, Artificial Sequence
  derived and/or modified sequence
atgaacggccagctggacctgagcggcaagctgatcatcaaggcccagctgggcgaggacatcagaagaatccccatccacaacgaggacatcacctacgacgagctggtgctgatgatgcagagagtgttcagaggcaagctgctgagcaacgacgaggtgaccatcaagtacaaggacgaggacggcgacctgatcaccatcttcgacagcagcgacctgagcttcgccatccagtgcagcagaatcctgaagctgaccctgttcgtgaacggccagcccagacccctggagagcagccaggtgaagtacctgagaagagagctgatcgagctgagaaacaaggtgaacagactgctggacagcctggagccccccggcgagcccggccccagcaccaacatccccgagaacgacaccgtggacggcagagaggagaagagcgccagcgacagcagcggcaagcagagcacccaggtgatggccgccagcatgagcgccttcgaccccctgaagaaccaggacgagatcaacaagaacgtgtag

SEQ ID NO: 267661 - DNA, 1191 bp, Artificial Sequence
  derived and/or modified sequence
atgaacggccagctggacctgagcggcaagctgatcatcaaggcccagctgggcgaggacatcagaagaatccccatccacaacgaggacatcacctacgacgagctggtgctgatgatgcagagagtgttcagaggcaagctgctgagcaacgacgaggtgaccatcaagtacaaggacgaggacggcgacctgatcaccatcttcgacagcagcgacctgagcttcgccatccagtgcagcagaatcctgaagctgaccctgttcgtgaacggccagcccagacccctggagagcagccaggtgaagtacctgagaagagagctgatcgagctgagaaacaaggtgaacagactgctggacagcctggagccccccggcgagcccggccccagcaccaacatccccgagaacgacaccgtggacggcagagaggagaagagcgccagcgacagcagcggcaagcagagcacccaggtgatggccgccagcatgagcgccttcgaccccctgaagaaccaggacgagatcaacaagaacgtgatgagcgccttcggcctgaccgacgaccaggtgagcggcccccccagcgcccccgccgaggacagaagcggcacccccgacagcatcgccagcagcagcagcgccgcccacccccccggcgtgcagccccagcagcccccctacaccggcgcccagacccaggccggccagatgtaccagcagtaccagcagcaggccggctacggcgcccagcagccccaggcccccccccagcagccccagcagtacggcatccagtacagcgccagctacagccagcagaccggcccccagcagccccagcagttccagggctacggccagcagcccaccagccaggcccccgcccccgccttcagcggccagccccagcagctgcccgcccagcccccccagcagtaccaggccagcaactaccccgcccagacctacaccgcccagaccagccagcccaccaactacaccgtggcccccgccagccagcccggcatggcccccagccagcccggcgcctaccagcccagacccggcttcaccagcctgcccggcagcaccatgacccccccccccagcggccccaacccctacgccagaaacagaccccccttcggccagggctacacccagcccggccccggctacagatag

SEQ ID NO: 267662 - DNA, 1101 bp, Artificial Sequence
  derived and/or modified sequence
atgaatggccaattagacttatccggtaagctaattattaaggcacagctgggcgaagacattcggcgcatccccatccacaacgaggatatcacctacgatgagcttgtgttgatgatgcaacgcgtcttccgcggcaaactcctgagcaatgacgaggtcaccataaagtacaaagatgaggatggggacctgatcacgatatttgattcctccgacctgtcttttgcaatccaatgctcaaggatcctcaaattgaccctgtttgtgaacggccaaccccgaccgctggagagcagccaggtgaaatatctgcggagagaactgatagaactgcgcaacaaggtgaatcgactgctggattcactggaaccccctggtgagcctggaccaagcacgaacatccccgaaaacgatacagtagacggccgcgaggagaagagcgcctcagacagttccggcaaacagtcaacacaggtgatggccgcctctatgtcagcttttgaccccttaaagaatcaagacgagattaacaaaaacgtgatgtccgctttcggtctaactgacgatcaagtctcaggaccacctagcgctcccgctgaggatcggtccggcaccccagattctattgcctcgtcatcatccgcggcccacccgccaggggttcaaccacaacagccgccatatactggcgcccaaacccaggccggccaaatgtatcaacagtacagcaatagacctgccatggtccattccagccgaaggctgcacttatcttcactcaatagtatggttttctctatccaacaagccattgtctcccgcctggacctaaacaatctgtcctcatcacgggacatggcgagcaatcagctgcctagacatcaactgctccctttcttagtgtcattgaacaattgtctactgtctcggcattcctccactcggcgagctattatcctgcacaagctaacgcttcctaaactgctttccctcctgatcatcctgtggttgctgcccttgaatctcgaatggctgcaggccaacttgggtcctatcaaccaggatcaagtgctcctgcatttcctggaagttccttag

SEQ ID NO: 267663 - DNA, 474 bp, Artificial Sequence
  derived and/or modified sequence
atgaatggtcaacttgacctgtctgggaagcttataatcaaggcccagttaggcgaagacatacgccggatcccaatccacaacgaagatataacttacgatgagctggtcctgatgatgcagcgggttttcagaggaaagctgctgagtaatgacgaagtgacaatcaagtataaggacgaagacggtgacctgattactatatttgacagctccgacctgtcgttcgcaatccagtgctcccgtattcttaagctgacactgttcgttaacggccagccccggcctttagagagttcccaggtgaaatatctcagaagagagcttatcgagttgcggaacaaggtcaacaggctactggacagccttgaacctcccggagagcctggaccctccacgaacattcctgaaaatgatactgttgatggtcgtgaggagaagagcgcctcagactcaagcggtaaacagtcgtag

SEQ ID NO: 267664 - DNA, 387 bp, Artificial Sequence
  derived and/or modified sequence
atgaatggacagcttgatctgtctgggaagttaattattaaggcccagctcggcgaagatattagacggatcccaatccataatgaggatatcacctacgacgagctggtgctcatgatgcagagagtgttcagagggaagctcttgagcaatgatgaggtaactatcaagtacaaggacgaagatggcgatttaattaccatttttgatagcagtgacctcagctttgctattcagtgtagcagaattttgaaattgacactgtttgtcaacgggcaaccacggcctctggaatcctctcaggtcaaatatctccgccgagaattgattgaattgcgaaacaaagtgaacaggctgctcgactccttggagccgccaggggaatag

SEQ ID NO: 267665 - DNA, 546 bp, Artificial Sequence
  derived and/or modified sequence
atgaatgggcagctggatctgagtgggaaactaatcatcaaggcccaattgggggaggatatccgtcggattccgatccataatgaggacattacatatgacgagctggttctgatgatgcagcgtgtgtttcgaggcaagctgttatctaacgacgaggttacaatcaagtacaaagacgaggacggcgacctgatcacgatcttcgactcatcagatctgtccttcgcgattcagtgttccagaattctcaaacttactctgttcgtcaatggacagccccggcctttagaaagtagccaggttaaatatctacggcgggagctgattgagctgaggaacaaagtgaatcggctacttgactcactcgaacccccaggcgaacctggcccaagtactaacatccctgagaatgacactgtagacgggcgagaggaaaagtcagctagcgacagttccggtaaacagtccacgcaggtcatggccgcttccatgtccgcctttgacccgctcaagaaccaagatgagattaacaagaatgtctag

SEQ ID NO: 267666 - DNA, 1191 bp, Artificial Sequence
  derived and/or modified sequence
atgaatggccaactggatctgagcggaaaattaattattaaagcacagctcggcgaggacattaggagaattcctattcacaatgaagatatcacatacgatgagcttgttctcatgatgcagcgggtctttaggggtaaactcctgagcaatgacgaggtcaccattaagtacaaggacgaagatggggacctcatcaccatcttcgattcctccgatctcagttttgccatccaatgttctcggatacttaaactcaccctatttgtaaacgggcagcctcgacctctggagtcatcacaggttaaatatcttaggagggagctcatagaattaaggaataaggtgaatcgtcttcttgactccttggagcctccaggggagccaggtccttctactaacatacctgagaatgacactgtggacggaagggaggagaagtctgctagcgactccagcgggaagcagtcgacacaagtaatggccgccagcatgtcagctttcgatccactgaaaaatcaggacgagattaacaaaaatgtcatgtccgcattcggactgaccgacgaccaggtttcaggccccccttctgcacccgcagaggaccggtccggtacaccggacagcattgcttcctcgtcctcagccgctcaccccccgggcgtgcagccacagcaacctccatacacaggcgcccagacccaggccggccagatgtatcagcaataccagcagcaggctggatacggtgcccagcagcctcaggcccctccccaacagccccagcagtacggcatccagtactcagcgagttattcccagcagacgggcccgcagcagccacagcagttccaggggtatgggcaacagccgacatcccaggccccagcccctgcatttagtggacagccacaacagctgccggcccagccacctcagcagtaccaggcatcgaattaccctgctcagacttacaccgcgcagaccagtcagccaactaactacacagtcgcacctgcctcacagccaggcatggccccctcccaacctggtgcatatcagccccggcccggctttacgtccctcccaggatccaccatgacccctcctccttctggccctaacccctacgcccgtaataggccaccctttggccagggctacactcagcccgggccggggtataggtag

SEQ ID NO: 267667 - DNA, 1101 bp, Artificial Sequence
  derived and/or modified sequence
atgaatggccagctggacctgagcggcaagctgatcatcaaggcccagctgggggaggacatccgccgcatccccatccacaatgaagacatcacctatgatgagctggtgctgatgatgcagagggtcttccggggcaagctgctgagcaatgatgaggtgaccatcaagtacaaggatgaagatggagacctgatcaccatctttgacagcagtgacctgagctttgccatccagtgcagccgcatcctgaagctgaccctgtttgtgaatggccagccccggcccctggagagcagccaggtgaagtacctgcggcgggagctgattgagctgaggaacaaggtgaaccggctgctggacagcctggagcccccaggagagcccggccccagcaccaacatcccagaaaatgacacagtggatggccgggaggagaagagcgccagtgacagcagcggcaagcagagcacccaggtgatggccgcctccatgtctgcctttgaccccctgaagaaccaggatgagatcaacaagaatgtgatgtctgccttcggcctgacagatgaccaggtgtctggccccccatctgccccagcagaagatagaagtggcaccccagacagcatcgccagcagcagcagcgctgcccaccccccaggagtgcagccccagcagcccccctacaccggggcccagacccaggccggccagatgtaccagcagtacagcaacagacctgccatggtgcacagcagccggcggctgcacctgagcagcctgaacagcatggtgttcagcatccagcaggccatcgtgtcccggctggacctgaacaacctgagcagcagccgggacatggccagcaaccagctgcccaggcaccagctgctgcccttcctggtgtccctgaacaactgcctgctgagccgccacagcagcacccggcgggccatcatcctgcacaagctgaccctgcccaagctgctgagcctgctgatcatcctgtggctgctgcccctgaacctggagtggctgcaggccaacctgggccccatcaaccaggaccaggtgctgctgcacttcctggaggtgccctag

SEQ ID NO: 267668 - DNA, 474 bp, Artificial Sequence
  derived and/or modified sequence
atgaatggccagctggacctgagcggcaagctgatcatcaaggcccagctgggggaggacatccgccgcatccccatccacaatgaagacatcacctatgatgagctggtgctgatgatgcagagggtcttccggggcaagctgctgagcaatgatgaggtgaccatcaagtacaaggatgaagatggagacctgatcaccatctttgacagcagtgacctgagctttgccatccagtgcagccgcatcctgaagctgaccctgtttgtgaatggccagccccggcccctggagagcagccaggtgaagtacctgcggcgggagctgattgagctgaggaacaaggtgaaccggctgctggacagcctggagcccccaggagagcccggccccagcaccaacatcccagaaaatgacacagtggatggccgggaggagaagagcgccagtgacagcagcggcaagcagagctag

SEQ ID NO: 267669 - DNA, 387 bp, Artificial Sequence
  derived and/or modified sequence
atgaatggccagctggacctgagcggcaagctgatcatcaaggcccagctgggggaggacatccgccgcatccccatccacaatgaagacatcacctatgatgagctggtgctgatgatgcagagggtcttccggggcaagctgctgagcaatgatgaggtgaccatcaagtacaaggatgaagatggagacctgatcaccatctttgacagcagtgacctgagctttgccatccagtgcagccgcatcctgaagctgaccctgtttgtgaatggccagccccggcccctggagagcagccaggtgaagtacctgcggcgggagctgattgagctgaggaacaaggtgaaccggctgctggacagcctggagcccccaggagagtag

SEQ ID NO: 267670 - DNA, 546 bp, Artificial Sequence
  derived and/or modified sequence
atgaatggccagctggacctgagcggcaagctgatcatcaaggcccagctgggggaggacatccgccgcatccccatccacaatgaagacatcacctatgatgagctggtgctgatgatgcagagggtcttccggggcaagctgctgagcaatgatgaggtgaccatcaagtacaaggatgaagatggagacctgatcaccatctttgacagcagtgacctgagctttgccatccagtgcagccgcatcctgaagctgaccctgtttgtgaatggccagccccggcccctggagagcagccaggtgaagtacctgcggcgggagctgattgagctgaggaacaaggtgaaccggctgctggacagcctggagcccccaggagagcccggccccagcaccaacatcccagaaaatgacacagtggatggccgggaggagaagagcgccagtgacagcagcggcaagcagagcacccaggtgatggccgcctccatgtctgcctttgaccccctgaagaaccaggatgagatcaacaagaatgtgtag

SEQ ID NO: 267671 - DNA, 1191 bp, Artificial Sequence
  derived and/or modified sequence
atgaatggccagctggacctgagcggcaagctgatcatcaaggcccagctgggggaggacatccgccgcatccccatccacaatgaagacatcacctatgatgagctggtgctgatgatgcagagggtcttccggggcaagctgctgagcaatgatgaggtgaccatcaagtacaaggatgaagatggagacctgatcaccatctttgacagcagtgacctgagctttgccatccagtgcagccgcatcctgaagctgaccctgtttgtgaatggccagccccggcccctggagagcagccaggtgaagtacctgcggcgggagctgattgagctgaggaacaaggtgaaccggctgctggacagcctggagcccccaggagagcccggccccagcaccaacatcccagaaaatgacacagtggatggccgggaggagaagagcgccagtgacagcagcggcaagcagagcacccaggtgatggccgcctccatgtctgcctttgaccccctgaagaaccaggatgagatcaacaagaatgtgatgtctgccttcggcctgacagatgaccaggtgtctggccccccatctgccccagcagaagatagaagtggcaccccagacagcatcgccagcagcagcagcgctgcccaccccccaggagtgcagccccagcagcccccctacaccggggcccagacccaggccggccagatgtaccagcagtaccagcagcaggccggctatggagcccagcagccccaggccccaccccagcagccccagcagtatggcatccagtacagcgccagctacagccagcagacaggcccccagcagccccagcagttccagggctacggccagcagcccaccagccaggccccagccccagccttcagcggccagccccagcagctgcctgcccagcccccccagcagtaccaggccagcaactacccagcccagacctacacagcccagaccagccagcccaccaactacacagtggccccagccagccagcccggcatggcccccagccagcccggggcctaccagcccaggcctggcttcaccagcctgcccggcagcaccatgaccccaccacccagcggccccaacccctatgccaggaaccggccccccttcggccagggctacacccagcccggccctggctacagatag

SEQ ID NO: 267672 - DNA, 1101 bp, Artificial Sequence
  derived and/or modified sequence
atgaacggccagctggacctgagcggcaagctgatcatcaaggcccaattaggcgaagacataagaagaatcccaatccacaatgaagatatcacctatgatgagctcgtgctgatgatgcagcgcgtgtttcggggaaagctgctgtcgaacgatgaggtgaccatcaaatataaagacgaagatggagatttaatcacgatttttgacagtagcgatttgtcatttgccatccagtgctcgaggatcctgaaactaaccctctttgtaaacggtcagccgaggccactcgaaagcagccaggtgaaatatctaagacgagaattaattgagttgaggaataaagtgaacagattactggactctttggagccccccggggaacccggaccctctacgaatattcctgagaacgacacagtggatggccgtgaagaaaagagcgcatctgattcctctggaaagcagagcacccaggttatggccgcgagtatgagtgcatttgatccacttaaaaatcaggatgaaatcaacaaaaatgttatgtcagccttcggcctgaccgacgatcaggtctccggaccgccgtctgcacccgcggaagacagatctggcaccccagactctatcgcttcctcttccagcgccgcccatccccctggggtccagccccagcaacctccttacaccggtgctcaaacacaggctggacagatgtatcagcagtattcaaacaggcccgcgatggtgcattcatcacgtcgccttcacctcagcagcttaaacagcatggttttttctatacagcaggcaattgtttcaagattagacctcaacaatctgtcctccagccgcgatatggcatcgaaccagttgccacggcatcagctgctcccatttctcgtatcactaaataattgcctgctatcccggcactcctcaacaaggcgtgcgataattctccacaaattgactctgcctaaacttctcagcttattaatcatcctgtggctgctgccccttaatttggagtggttacaggcaaacttaggcccgataaaccaggaccaagtcttgttgcattttctcgaggtgccttag

SEQ ID NO: 267673 - DNA, 474 bp, Artificial Sequence
  derived and/or modified sequence
atgaacggccagctggacctgagcggcaagctgatcatcaaggcccagctcggcgaggatatcagaaggattccgattcataatgaagacattacatatgatgagttagtgctgatgatgcagagggtgtttagagggaaactgttgtcaaacgatgaagtgaccatcaaatacaaggatgaggatggtgatctgataaccatattcgacagttctgacctatctttcgccatccaatgttctaggatcttaaagttgaccctctttgtcaatggacagccacgacctttagagtcttctcaggtgaagtacttaagacgggagctaatcgaattgagaaacaaggtcaacaggctgctggattcgctggagcccccgggcgagcctggcccatctactaatatacccgagaatgacactgttgacggaagggaggaaaagtcagcttcggattccagcggtaagcagagctag

SEQ ID NO: 267674 - DNA, 387 bp, Artificial Sequence
  derived and/or modified sequence
atgaacggccagctggacctgagcggcaagctgatcatcaaggcccagcttggggaggatatccgccggatcccaatccataatgaagacatcacatatgacgaattggttctgatgatgcagcgtgtatttagagggaaactactgtccaacgatgaggtgaccataaagtataaagacgaggatggggacctgataacaatcttcgacagctctgatttgtcatttgccattcagtgctctaggatcctgaagttaactctattcgtaaatggacaacccagacccctggaatcatcacaggtgaagtatctacgtagggagctgattgagctgagaaataaggtaaatcgcttattggatagcctggaaccccctggtgaatag

SEQ ID NO: 267675 - DNA, 546 bp, Artificial Sequence
  derived and/or modified sequence
atgaacggccagctggacctgagcggcaagctgatcatcaaggcccaactgggcgaggacattcgcaggattccaattcataacgaggacataacttacgatgagctggttctaatgatgcaacgcgtctttagaggaaaacttctgtccaacgacgaggtgaccatcaaatacaaggacgaagatggagacctcattaccatcttcgacagcagtgatctcagttttgccatccagtgctcccgaatcttaaagctgaccctcttcgtgaacggccagcccagaccattggagtcttctcaagtgaaatacttacggcgcgagctgatcgaactgagaaataaagtgaatagacttcttgacagtctggaacctccaggggaacctggaccctcaaccaacatccctgagaacgacacagtggatggcagggaagagaagtcagccagtgactcttctgggaaacagtctactcaggtcatggccgcaagcatgtctgcatttgacccactgaagaatcaggatgaaatcaataaaaacgtgtag

SEQ ID NO: 267676 - DNA, 1191 bp, Artificial Sequence
  derived and/or modified sequence
atgaacggccagctggacctgagcggcaagctgatcatcaaggcccagctgggcgaggatatcagacggattcccatccacaatgaggatattacatacgatgagttagttctcatgatgcagcgagtcttcaggggaaagcttctaagtaatgacgaggttaccattaaatacaaggacgaagacggagatttaatcacaatttttgactcctctgacctctcctttgccatacagtgttcccgaattctgaaattgacactgtttgtcaatggccagccccgccccctggagtctagtcaggtcaagtatctgcggagggagctgatcgagttgcgaaacaaggttaacagactccttgacagcttagagccaccaggggaacccggaccttccacaaatattccagaaaatgatactgtggatggacgcgaggagaagtccgcctccgattccagtggcaagcagagcacccaggtgatggctgcatccatgagcgcattcgatccgctcaaaaatcaagatgaaatcaacaaaaatgtgatgtcggccttcggactgacagacgatcaggtgagtggcccgccgtcagcccctgccgaggacagatcaggcacacccgatagtatagcatcaagctcttctgccgcccacccacccggggttcagccacaacagccaccttacaccggggcccagactcaggctgggcagatgtatcagcagtatcaacaacaggcaggctacggcgcccagcaaccgcaggcccctccacagcagccccagcagtatggtatccagtactccgccagctactcccaacagactggaccgcagcagccccagcagtttcagggttatggccagcagcctacatctcaagcgcctgctcctgccttttctggccaacctcaacagctgcccgcccagccacctcagcaatatcaggcttcaaattaccctgcacagacctataccgcgcagactagccaacccaccaattacacggttgcccccgcatcacagccgggtatggcacccagccagccaggtgcctatcagccgcgtccgggcttcactagtctccccggatcaacgatgaccccccctccgagcggccctaacccctatgcacgcaatcgtcccccgtttggtcagggctacacccagcctggaccgggttatagatag

SEQ ID NO: 267677 - DNA, 1101 bp, Artificial Sequence
  derived and/or modified sequence
atgaatggacagcttgatctgtctggcaaactgataattaaggcccagctcggggaagatattcgaaggattcctattcataacgaagatattacctacgatgaactggtgctgatgatgcaacgggtgtttcggggaaaactgctaagcaatgacgaagttacaatcaaatacaaagatgaggacggtgacctgattacaatctttgactcaagcgacctctcctttgccatccagtgctcccgcatccttaaattgacactcttcgtgaacgggcagcctcgtcctctcgaaagcagtcaggttaagtacttacgcagagaactgatcgaactacggaataaggtaaaccgccttctggactcccttgaacctcctggggaacccggaccaagtaccaatatcccagagaatgataccgttgacggacgggaggaaaagtccgcgtctgactcttctggcaagcagtcgacccaagtgatggccgcaagtatgagcgcattcgaccctctcaaaaatcaggatgagatcaacaaaaacgtgatgagcgctttcggactaactgacgatcaggtctctggccctccttccgccccagccgaggaccgtagcgggacccccgattctattgcgtccagctcctccgccgcacaccctcctggggtgcagccccagcagcctccctacaccggcgctcagacccaggctggccaaatgtaccaacagtacagcaatcgcccagcaatggttcatagttcccgacggctgcatctcagttcgttaaactctatggtgtttagcatccagcaggccattgtaagcagactggacctcaataatctgagctcttctcgggacatggcctctaaccaattaccacggcatcaactgcttcctttcctggtgtcactgaacaattgcctgttgtccaggcacagtagcacgcggagagcaattatcctacataaactcaccctccctaaactcctctcgctcctcattatcctgtggctcctaccactcaacttggaatggctgcaggcgaacctaggccctattaatcaagaccaagtcctgctgcactttctggaagtcccctag

SEQ ID NO: 267678 - DNA, 474 bp, Artificial Sequence
  derived and/or modified sequence
atgaacggtcagctagacctctctgggaagttgatcatcaaggctcaacttggagaggacattcggcgaatccccatccacaatgaagacatcacctacgatgagcttgtgctgatgatgcagcgtgtttttcggggaaagctcctgtctaacgacgaagtgaccattaaatacaaagacgaagacggagatctcatcacaatcttcgactccagcgatctgtcattcgccattcagtgctcgagaatactgaagctcaccctattcgtgaacggacagccccgacccttggagtcatctcaggtgaagtacctcagaagggaactgattgagctgaggaacaaagttaacaggctgctggactccctcgaacctccaggagagcctggcccaagcactaatattcctgaaaacgacaccgtggatggccgtgaggagaagtcagccagtgactccagcgggaagcagtcctag

SEQ ID NO: 267679 - DNA, 387 bp, Artificial Sequence
  derived and/or modified sequence
atgaatgggcaactggatttgagcggaaagctcatcatcaaagctcagttgggagaggatattaggcgcatacctatccataacgaggatattacctacgacgagctcgtgctgatgatgcagcgtgtgttcaggggcaaattactgtccaacgatgaggtcacaatcaaatacaaggatgaagacggagatctgataaccatattcgacagtagtgatctgtctttcgctattcaatgcagtcgaatcctcaaattgacactcttcgtcaatgggcagcctaggcccctggaaagtagccaagtgaagtacttacgccgtgaactgatcgaactacgcaacaaggtcaaccgactgctggactctcttgaaccccctggagagtag

SEQ ID NO: 267680 - DNA, 546 bp, Artificial Sequence
  derived and/or modified sequence
atgaatggtcagcttgatctttcgggcaaactgatcattaaggcacagctgggtgaggacatccggagaattcccatacacaatgaagacatcacctatgacgaactcgtgctgatgatgcagcgtgtatttaggggaaaacttctgagcaatgacgaggtaaccatcaaatacaaagatgaagacggggacttgattaccatttttgacagctctgacctatcattcgctattcagtgttcacgtattcttaaactcactctcttcgtcaacggccagcctcggccactagaatcctcccaagttaagtacctgcgtcgagaactgattgagctgagaaataaggttaaccgattattagattctctcgagccacctggggaacccggtccctctaccaacatccccgaaaacgatactgtagatggccgagaagagaaaagcgcgtctgactcctccggaaaacaatcaacacaggtcatggccgcaagtatgtctgccttcgacccgctcaaaaatcaggacgaaattaacaaaaacgtgtag

SEQ ID NO: 267681 - DNA, 1191 bp, Artificial Sequence
  derived and/or modified sequence
atgaatgggcagctggatctcagcggaaaattaatcattaaagcgcagttgggcgaggacataaggaggatacccatacataatgaggatatcacctatgatgagcttgtcctgatgatgcaaagagtatttcggggtaaactcctgtccaacgacgaggtcaccattaagtataaagacgaagacggcgacctgattaccatcttcgattctagcgacctgagttttgccattcagtgcagcaggattctgaagttaacattattcgtgaatggccagccgagacccctcgagtcgtcacaggtgaaatacctaaggagagaattgatcgagctgcgcaataaggttaatcgtttgctggactcattggagccaccgggagagcctggtcctagtacaaatattccagagaatgatacagtggatggtcgagaagaaaaatctgcctctgacagctccggcaagcaatccactcaggtgatggcagcatccatgtctgctttcgacccgttaaaaaatcaagatgagatcaataagaatgttatgtcggcattcggcctgaccgatgatcaggtgtctggacccccaagcgcgccagcggaggaccgatcagggacacctgatagcatcgcgtcctcgagcagcgccgctcatcctcccggagttcaaccccagcagccaccgtacacaggtgcccaaacacaggcaggtcagatgtaccagcagtatcaacagcaggcgggttatggcgctcagcagccacaggccccacctcagcagccacagcagtacgggatacagtattccgcctcctactcacagcagaccggaccccagcagcctcagcagtttcaggggtacggccagcagcccaccagccaggcccctgccccagctttttccgggcaacctcagcaacttccagcgcagccgcctcaacaatatcaggcttccaattaccccgcacagacttacaccgcccaaacatctcagcccactaattacacagtggccccagctagccagccagggatggcccctagtcagccaggcgcttatcagcccagacccggatttacctcccttcccggatctaccatgaccccgcctccctcggggcctaatccctacgcaagaaaccgtcctccattcgggcagggatacacccaacccggacccggttataggtag

SEQ ID NO: 267682 - DNA, 1781 bp, Artificial Sequence
  derived and/or modified sequence
ggcaaccgagggggccgtgaccaccgcctccccgcgacgccccagtccagtggcctcgcgtccgcccattcagcggagacctgcggagaggcggcggccgcggcctccgcaagccgtctttctctagagttgtatatatagaacatcctggagtccaccatgaacggacagttggatctaagtgggaagctaatcatcaaagctcaacttggggaggatattcggcgaattcctattcataatgaagatattacttatgatgaattagtgctaatgatgcaacgagttttcagaggaaaacttctgagtaatgatgaagtaacaataaagtataaagatgaagatggagatcttataacaatttttgatagttctgacctttcctttgcaattcagtgcagtaggatactgaaactgacattatttgttaatggccagccaagaccccttgaatcaagtcaggtgaaatatctccgtcgagaactgatagaacttcgaaataaagtgaatcgtttattggatagcttggaaccacctggagaaccaggaccttccaccaatattcctgaaaatgatactgtggatggtagggaagaaaagtctgcttctgattcttctggaaaacagtctactcaggttatggcagcaagtatgtctgcttttgatcctttaaaaaaccaagatgaaatcaataaaaatgttatgtcagcgtttggcttaacagatgatcaggtttcagggccacccagtgctcctgcagaagatcgttcaggaacacccgacagcattgcttcctcctcctcagcagctcacccaccaggcgttcagccacagcagccaccatatacaggagctcagactcaagcaggtcagatgtaccaacagtacagcaacaggccggctatggtgcacagcagccgcaggctccacctcagcagcctcaacagtatggtattcagtattcagcaagctatagtcagcagactggacctcaacaacctcagcagttccagggatatggccagcaaccaacttcccaggcaccagctcctgccttttctggtcagcctcaacaactgcctgctcagccgccacagcagtaccaggcgagcaattatcctgcacaaacttacactgcccaaacttctcagcctactaattatactgtggctcctgcctctcaacctggaatggctccaagccaacctggggcctatcaaccaagaccaggttttacttcacttcctggaagtaccatgacccctcctccaagtgggcctaatccttatgcgcgtaaccgtcctccctttggtcagggctatacccaacctggacctggttatcgataaggaggctcctctacaccaattaatgtagctgctagctattggcctcccaaaagactccagtactattttaatttgtattgaagaagttcagaaatttaaaagcagagcattttttatgatatcattgttggtgttaattgaaagtataatttgctggaacacaaagaccaaaatgaaagttttttcctccctgcttaaaaatgtagcagcttcttagttactttggaacactactcttacatgtataaagtgattgacttgactttctagcttcccttgtccggaggatattaaaatgctagggtgaggtttagccatcttacttggctttttactattaacatgatgtactaaagtagagccctttgagaatacaagatattatgtataaaatgtaacactgatgataggttaataaagatgattgaatcc

SEQ ID NO: 267683 - DNA, 723 bp, Artificial Sequence
  derived and/or modified sequence
gagggggccgtgaccaccgcctccccgcgacgccccagtccagtggcctcgcgtccgcccattcagcggagacctgcggagaggcggcggccgcggcctccgcaagccggtatggccactggagacgggggttgcgggcgctctgtccgaggaggccgggagactaggaggcgctgggagggcctcgttcgaaccgcgcggcagctgggtctttctctagagttgtatatatagaacatcctggagtccaccatgaacggacagttggatctaagtgggaagctaatcatcaaagctcaacttggggaggatattcggcgaattcctattcataatgaagatattacttatgatgaattagtgctaatgatgcaacgagttttcagaggaaaacttctgagtaatgatgaagtaacaataaagtataaagatgaagatggagatcttataacaatttttgatagttctgacctttcctttgcaattcagtgcagtaggatactgaaactgacattatttgttaatggccagccaagaccccttgaatcaagtcaggtgaaatatctccgtcgagaactgatagaacttcgaaataaagtgaatcgtttattggatagcttggaaccacctggagaaccaggaccttccaccaatattcctgaaaatgatactgtggatggtagggaagaaaagtctgcttctgattcttctggaaaacagtct

SEQ ID NO: 267684 - DNA, 776 bp, Artificial Sequence
  derived and/or modified sequence
tttttttcttgctcccgcctctgttcttcccccacctgccacgtacagagcccaagttctcgctaggcttgttgggtcagcgcgattggccggggcccgcgcgagcctgcgagcgaggtgcggcggtcgcgaagggcaaccgagggggccgtgaccaccgcctccccgcgacgccccagtccagtggcctcgcgtccgcccattcagcggagacctgcggagaggcggcggccgcggcctccgcaagccgatgactgcaagagcaaacgacagctttaggaaagaagcactggttcctggccacaagatgtttacagtcaataggaaacacaaaaagtgaatttgcagtctttctctagagttgtatatatagaacatcctggagtccaccatgaacggacagttggatctaagtgggaagctaatcatcaaagctcaacttggggaggatattcggcgaattcctattcataatgaagatattacttatgatgaattagtgctaatgatgcaacgagttttcagaggaaaacttctgagtaatgatgaagtaacaataaagtataaagatgaagatggagatcttataacaatttttgatagttctgacctttcctttgcaattcagtgcagtaggatactgaaactgacattatttgttaatggccagccaagaccccttgaatcaagtcaggtgaaatatctccgtcgagaactgatagaacttcgaaataaagtgaatcgtttattggatagcttggaaccacctggagaac

SEQ ID NO: 267685 - DNA, 913 bp, Artificial Sequence
  derived and/or modified sequence
aacccctggctgcggtggccaggaggcgcgcctggggggctccgggaggggagtgcgccagctaatgccttggtgcagcctgcctccaagcgtttggattgagaggagaggggctttgggaggtttggggcggccggcgcccaatacccgaaggagctcggaagggtgtggagtggcgcctacgggaataagttgattggggtcatagaatcggagcctagttccttggctaagtcagcgcttaatcaagcgccggctggaggcccagcctggtttatagtgatgattctagctaactttaagagtttgctttgctggacactacatctttctctagagttgtatatatagaacatcctggagtccaccatgaacggacagttggatctaagtgggaagctaatcatcaaagctcaacttggggaggatattcggcgaattcctattcataatgaagatattacttatgatgaattagtgctaatgatgcaacgagttttcagaggaaaacttctgagtaatgatgaagtaacaataaagtataaagatgaagatggagatcttataacaatttttgatagttctgacctttcctttgcaattcagtgcagtaggatactgaaactgacattatttgttaatggccagccaagaccccttgaatcaagtcaggtgaaatatctccgtcgagaactgatagaacttcgaaataaagtgaatcgtttattggatagcttggaaccacctggagaaccaggaccttccaccaatattcctgaaaatgatactgtggatggtagggaagaaaagtctgcttctgattcttctggaaaacagtctactcaggttatggcagcaagtatgtctgcttttgatcctttaaaaaaccaagatgaaatcaataaaaatgtta

SEQ ID NO: 267686 - DNA, 1716 bp, Artificial Sequence
  derived and/or modified sequence
agggactcttcggcctaggcagccgggacccagccagccctgcgcctcgcgccgtcgcgcatgcgtcctggtctttctctagagttgtatatatagaacatcctggagtccaccatgaacggacagttggatctaagtgggaagctaatcatcaaagctcaacttggggaggatattcggcgaattcctattcataatgaagatattacttatgatgaattagtgctaatgatgcaacgagttttcagaggaaaacttctgagtaatgatgaagtaacaataaagtataaagatgaagatggagatcttataacaatttttgatagttctgacctttcctttgcaattcagtgcagtaggatactgaaactgacattatttgttaatggccagccaagaccccttgaatcaagtcaggtgaaatatctccgtcgagaactgatagaacttcgaaataaagtgaatcgtttattggatagcttggaaccacctggagaaccaggaccttccaccaatattcctgaaaatgatactgtggatggtagggaagaaaagtctgcttctgattcttctggaaaacagtctactcaggttatggcagcaagtatgtctgcttttgatcctttaaaaaaccaagatgaaatcaataaaaatgttatgtcagcgtttggcttaacagatgatcaggtttcagggccacccagtgctcctgcagaagatcgttcaggaacacccgacagcattgcttcctcctcctcagcagctcacccaccaggcgttcagccacagcagccaccatatacaggagctcagactcaagcaggtcagatgtaccaacagtaccagcaacaggccggctatggtgcacagcagccgcaggctccacctcagcagcctcaacagtatggtattcagtattcagcaagctatagtcagcagactggacctcaacaacctcagcagttccagggatatggccagcaaccaacttcccaggcaccagctcctgccttttctggtcagcctcaacaactgcctgctcagccgccacagcagtaccaggcgagcaattatcctgcacaaacttacactgcccaaacttctcagcctactaattatactgtggctcctgcctctcaacctggaatggctccaagccaacctggggcctatcaaccaagaccaggttttacttcacttcctggaagtaccatgacccctcctccaagtgggcctaatccttatgcgcgtaaccgtcctccctttggtcagggctatacccaacctggacctggttatcgataaggaggctcctctacaccaattaatgtagctgctagctattggcctcccaaaagactccagtactattttaatttgtattgaagaagttcagaaatttaaaagcagagcattttttatgatatcattgttggtgttaattgaaagtataatttgctggaacacaaagaccaaaatgaaagttttttcctccctgcttaaaaatgtagcagcttcttagttactttggaacactactcttacatgtataaagtgattgacttgactttctagcttcccttgtccggaggatattaaaatgctagggtgaggtttagccatcttacttggctttttactattaacatgatgtactaaagtagagccctttgagaatacaagatattatgtataaaatgtaacactgatgatagg

SEQ ID NO: 267687 - protein, 90 aa, Artificial Sequence
  derived and/or modified sequence
MRGYLVAIFLSAVFLYYVLHCILWGTNVYWVAPVEMKRRNKIQPCLSKPAFASLLSQSSAYILRKGIEELNQTSILFTQVSSVSPFSVCG

SEQ ID NO: 267688 - DNA, 2092 bp, Artificial Sequence
  derived and/or modified sequence
gagcctgagactccgggcagggctgctccctcctctgctcccccgccagatccgcggggaaggaatcgtgcccgcgccgcccctggcccgcgccaccttcctttggtttctgccggcctcgggcttctgcggcccgatgtggcaggcgccgcgagagaggcagcagccggctggagcagcggcccctcaggtctcggagcccggtgcgcctctgcggtcgtcgctcctgggcctcggcgggtcactcttgccggccggcttcgctgcgggtttgcactgcccggcatttgcaagtgaggaagcagcacaaccctgggttttagataatttctaacagagaggccccagcaattcagcaggcagcgtcctgagtctttggcagcctggtccctctttcgcaaattctccacctttgcgaacagagggtctttaggacacagattcttaaaagtgcaggtgagccagccatgagagggtatcttgtggccatattcctgagtgctgtcttcctctattatgtactgcattgcatattatggggaacgaatgtctattgggtggcacctgtggaaatgaaacggagaaataagatccagccttgtttatcaaagccagcttttgcctctctgctgaggtttcatcagtttcacccttttctgtgtgcggctgattttagaaagattgcttccttgtatggtagcgataagtttgatttgccctatgggatgagaacatcagcggaatattttcgacttgctctttcaaaactgcagagttgtgatctctttgatgagtttgacaacataccctgtaaaaagtgtgtggtggttggtaatggaggagttttgaagaataagacattaggagaaaaaatcgactcctatgatgtaataataagaatgaataatggtcctgttttaggacatgaagaagaagttgggagaaggacaaccttccgacttttttatccagaatctgttttttcagatcctattcacaatgaccctaatacgacagtgattctcactgcttttaagccacatgatttaaggtggctgttggaattgttgatgggtgacaaaataaacactaatggtttttggaagaaaccagccttaaacctgatttataaaccttatcaaatccgaatattagatcctttcattatcagaacagcagcttatgaactgcttcattttccaaaagtgtttcccaaaaatcagaaacctaaacacccaacaacaggaattattgccatcacattggcgttttacatatgtcacgaagttcacctagctggttttaaatacaacttttctgacctcaagagtcctttgcactactatgggaatgccaccatgtctttgatgaataagaacgcgtatcacaatgtgactgcagagcagctctttttgaaggacattatagaaaaaaacctcgtaatcaacttgactcaagattgactctacagactcagaagatgatgctaacagtgttagttttatttttgtactgcaatttttagtttaaaatatgttggatgcactcgtcaaataattatgtatactgtctgttgctgcctggtgattcataaccaccagcttaatttctgtgaatactgtatatttaacttatgaaaaccaagaaatgtaaagataacaggaaaataagttttgattgcattgtttttaaaataagctagttttctgaggtgttttcacacgtctttttatagttacttcatcttagatttttgaagggatatgacttcctactaaggatttagtttaccacaacaattctgactacaataagacattttgaggaggatatttggctactgtaaacatggctggtggaaaatcacgattgtggcttgatgtggcaagccgaaaccacttggctctggaaatctaagttcatactggtttaattaagctctctcctgacaacccccagaattaaatgaaccatgattgtgaagagtaatttggtacaatgaaggcagtgtttgtttttaagttaaaggaaatgggctaaacataaagttcttattagataagtaaataactaaagaaagaatacaattact

SEQ ID NO: 267689 - DNA, 1886 bp, Artificial Sequence
  derived and/or modified sequence
gtgtcacagtcagtccgcggcgccacaagcctcagtgtttacttctgccgcctgccagccgggcggggaaggggagtacccggccacccctcactttagctcctgcagctttccaaacaaaccagggcgggatgggagtgtcttcttggctgtggaaatcgatcctcctaccttgtcctgaagccacccgccgcctttcctcgtccctcccttcgcggtgattttccggtcccggcgcccggcgagggcgcgcggctggtgtccgccccgcccgaaaggtgagccagccatgagagggtatcttgtggccatattcctgagtgctgtcttcctctattatgtactgcattgcatattatggggaacgaatgtctattgggtggcacctgtggaaatgaaacggagaaataagatccagccttgtttatcaaagccagcttttgcctctctgctgaggtttcatcagtttcacccttttctgtgtgcggctgattttagaaagattgcttccttgtatggtagcgataagtttgatttgccctatgggatgagaacatcagcggaatattttcgacttgctctttcaaaactgcagagttgtgatctctttgatgagtttgacaacataccctgtaaaaagtgtgtggtggttggtaatggaggagttttgaagaataagacattaggagaaaaaatcgactcctatgatgtaataataagaatgaataatggtcctgttttaggacatgaagaagaagttgggagaaggacaaccttccgacttttttatccagaatctgttttttcagatcctattcacaatgaccctaatacgacagtgattctcactgcttttaagccacatgatttaaggtggctgttggaattgttgatgggtgacaaaataaacactaatggtttttggaagaaaccagccttaaacctgatttataaaccttatcaaatccgaatattagatcctttcattatcagaacagcagcttatgaactgcttcattttccaaaagtgtttcccaaaaatcagaaacctaaacacccaacaacaggaattattgccatcacattggcgttttacatatgtcacgaagttcacctagctggttttaaatacaacttttctgacctcaagagtcctttgcactactatgggaatgccaccatgtctttgatgaataagaacgcgtatcacaatgtgactgcagagcagctctttttgaaggacattatagaaaaaaacctcgtaatcaacttgactcaagattgactctacagactcagaagatgatgctaacagtgttagttttatttttgtactgcaatttttagtttaaaatatgttggatgcactcgtcaaataattatgtatactgtctgttgctgcctggtgattcataaccaccagcttaatttctgtgaatactgtatatttaacttatgaaaaccaagaaatgtaaagataacaggaaaataagttttgattgcattgtttttaaaataagctagttttctgaggtgttttcacacgtctttttatagttacttcatcttagatttttgaagggatatgacttcctactaaggatttagtttaccacaacaattctgactacaataagacattttgaggaggatatttggctactgtaaacatggctggtggaaaatcacgattgtggcttgatgtggcaagccgaaaccacttggctctggaaatctaagttcatactggtttaattaagctctctcctgacaacccccagaattaaatgaaccatgattgtgaagagtaatttggtacaatgaaggcagtgtttgtttttaagttaaaggaaatgggctaaacataaagttcttattagataagt

SEQ ID NO: 267690 - DNA, 363 bp, Artificial Sequence
  derived and/or modified sequence
atgtggaaggtggtgaacctgcccaccgacctgttcaacagcgtgatgaacgtgggcagattcaccgaggagatcgagtggctgaagttcctggccctggcctgcagcgccctgggcgtgaccatcaccaagaccctgaagatcgtgtgcgaggtgctgagctgcgaccacaacggcggcctgcccagaatccccttcagcaccttccagttcctgtacacctacatcgccgaggtggacggcgagatctgcgccagccacgtgagcagaatgctgaactacatcgagcaggaggtgatcggccccgacggcctgatcaccgtgaacgacttcacccagaaccccagagtgtggctggagtag

SEQ ID NO: 267691 - DNA, 363 bp, Artificial Sequence
  derived and/or modified sequence
atgtggaaggtggtgaacctcccaactgacctgttcaacagcgttatgaatgttggaaggtttactgaggaaatcgaatggctgaaatttctcgcactagcctgttcagcactgggcgtgacaattacaaagaccctgaaaatcgtgtgtgaggttctctcttgcgaccataatgggggactgccacgcattcctttttccacatttcagttcctgtatacatatattgcggaggttgacggagagatctgtgcgagccacgtcagcagaatgctcaactatattgaacaggaggttattggccctgacggtttgataacagtaaatgacttcacccaaaacccacgtgtgtggctggagtag

SEQ ID NO: 267692 - DNA, 363 bp, Artificial Sequence
  derived and/or modified sequence
atgtggaaagtggttaacctgccaacagatcttttcaactcagtcatgaatgtcgggcgctttaccgaggagattgaatggctgaagttcttggctctggcctgtagcgccctcggagtaactattacaaagacactgaagatcgtgtgcgaggtccttagttgcgaccataatgggggcctacctcgaattccattttcaaccttccagtttctctacacttatattgcagaggtggacggcgagatctgcgcatctcacgtgagcagaatgctcaattacattgagcaggaggtgatcgggcccgacggtttgataaccgttaatgactttacacaaaatccaagggtatggctcgaatag

SEQ ID NO: 267693 - DNA, 363 bp, Artificial Sequence
  derived and/or modified sequence
atgtggaaggtggtgaacctgcccacagacctcttcaacagcgtgatgaatgtgggccgcttcacagaggagattgagtggctgaagttcctggccctggcctgcagcgccctgggcgtgaccatcaccaagaccctgaagatcgtgtgtgaggtgctgagctgtgaccacaacggcggcctgccccgcatccccttcagcaccttccagttcctgtacacctacatcgccgaggtggatggagagatctgtgccagccacgtgtccaggatgctgaactacatcgagcaggaggtgattggaccagatggcctcatcaccgtgaatgacttcacccagaacccccgggtgtggctggagtag

SEQ ID NO: 267694 - DNA, 363 bp, Artificial Sequence
  derived and/or modified sequence
atgtggaaggtggtgaacctgcccaccgacctgttcaacagcgtgatgaacgtaggaaggttcactgaggagatcgagtggctcaaatttctggcattagcctgctcagccctgggagtcaccattactaaaactcttaagatagtatgtgaagtgttgagctgtgaccataatggcggtctaccacgtatacctttttctacatttcagttcctgtacacttatatcgccgaggtcgacggagagatttgcgccagccacgtgtctcggatgctgaattatatcgagcaggaggtgatcggccctgatggtctgattaccgtcaacgactttacccagaaccccagggtgtggttagaatag

SEQ ID NO: 267695 - DNA, 363 bp, Artificial Sequence
  derived and/or modified sequence
atgtggaaggtggtgaacctgcccaccgacctgttcaacagcgtgatgaatgtcgggcggtttactgaggagattgaatggcttaagtttttagctttagcatgttcggccttgggtgtcaccatcacaaaaacacttaagatcgtctgcgaagtactctcctgcgaccacaacggaggacttcctcgtatccccttctccactttccagttcctctacacatacattgccgaggtcgacggagagatctgcgcttcccacgtcagccgaatgcttaactacatcgagcaggaagttatcggtcccgacggtctgataactgtgaacgactttactcagaacccacgagtgtggcttgagtag

SEQ ID NO: 267696 - DNA, 363 bp, Artificial Sequence
  derived and/or modified sequence
atgtggaaggtcgtgaatctgcctacagacctcttcaattcggtcatgaatgtgggccgattcaccgaagaaatcgagtggctgaagttcctagccttggcatgctctgccttgggggtgaccattacaaagaccctaaagattgtgtgcgaggtgttgtcctgtgatcacaacggtggactgccaaggattccgttttccacattccagttcctgtacacgtatatcgcggaagtcgacggcgagatttgcgcatcccacgtgtctagaatgcttaattacatcgaacaggaggtaatcggacctgatggattgataacggtgaacgacttcacccagaatccgagggtttggctagagtag

SEQ ID NO: 267697 - DNA, 363 bp, Artificial Sequence
  derived and/or modified sequence
atgtggaaggtcgttaacctgcctactgatttgttcaacagtgtgatgaatgtcgggaggttcacagaagaaattgaatggcttaaatttctggcactggcttgcagtgccttaggcgtcactatcacaaagactttgaagattgtttgtgaggtgctcagctgcgatcacaatggtggcctgccacggatccctttctcgactttccagttcctttacacatatattgccgaggtcgacggggagatctgcgcctcgcacgtatctaggatgttgaactacatcgagcaggaggttattggtcccgacggactgattaccgtcaacgattttacccagaacccaagggtttggctcgaatag

SEQ ID NO: 267698 - DNA, 3593 bp, Artificial Sequence
  derived and/or modified sequence
ccttgccaagtaacagctttgctgtccaacatcgtgtgctgcttcgcgagaaagtcacattcggaccctttggctagattatcttagacgaattttacaatgtgaagttctgcatagatgccagtcaaccagatgttggaagctggctcaagtacattagattcgctggctgttatgatcagcacaaccttgttgcatgccagataaatgatcagatattctatagagtagttgcagacattgcgccgggagaggagcttctgctgttcatgaagagcgaagactatccccatgaaactatggcgccggatatccacgaagaacggcaatatcgctgcgaagactgtgaccagctctttgaatctaaggctgaactagcagatcaccaaaagtttccatgcagtactcctcactcagcattttcaatggttgaagaggactttcagcaaaaactcgaaagcgagaatgatctccaagagatacacacgatccaggagtgtaaggaatgtgaccaagtttttcctgatttgcaaagcctggagaaacacatgctgtcacatactgaagagagggaatacaagtgtgatcagtgtcccaaggcatttaactggaagtccaatttaattcgccaccagatgtcacatgacagtggaaagcactatgaatgtgaaaactgtgccaagcaggttttcacggaccctagcaaccttcagcggcacattcgctctcagcatgtcggtgcccgggcccatgcatgcccggagtgtggcaaaacgtttgccacttcgtcgggcctcaaacaacacaagcacatccacagcagtgtgaagccctttatctgtgaggtctgccataaatcctatactcagttttcaaacctttgccgtcataagcgcatgcatgctgattgcagaacccaaatcaagtgcaaagactgtggacaaatgttcagcactacgtcttccttaaataaacacaggaggttttgtgagggcaagaaccattttgcggcaggtggattttttggccaaggcatttcacttcctggaaccccagctatggataaaacgtccatggttaatatgagtcatgccaacccgggccttgctgactattttggcgccaataggcatcctgctggtcttacctttccaacagctcctggattttcttttagcttccctggtctgtttccttccggcttgtaccacaggcctcctttgatacctgctagttctcctgttaaaggactatcaagtactgaacagacaaacaaaagtcaaagtcccctcatgacacatcctcagatactgccagctacacaggatattttgaaggcactatctaaacacccatctgtaggggacaataagccagtggagctccagcccgagaggtcctctgaagagaggccctttgagaaaatcagtgaccagtcagagagtagtgaccttgatgatgtcagtacaccaagtggcagtgacctggaaacaacctcgggctctgatctggaaagtgacattgaaagtgataaagagaaatttaaagaaaatggtaaaatgttcaaagacaaagtaagccctcttcagaatctggcttcaataaataataagaaagaatacagcaatcattccattttctcaccatctttagaggagcagactgcggtgtcaggagctgtgaatgattctataaaggctattgcttctattgctgaaaaatactttggttcaacaggactggtggggctgcaagacaaaaaagttggagctttaccttacccttccatgtttcccctcccattttttccagcattctctcaatcaatgtacccatttcctgatagagacttgagatcgttacctttgaaaatggaaccccaatcaccaggtgaagtaaagaaactgcagaagggcagctctgagtccccctttgatctcaccactaagcgaaaggatgagaagcccttgactccagtcccctccaagcctccagtgacacctgccacaagccaagaccagcccctggatctaagtatgggcagtaggagtagagccagtgggacaaagctgactgagcctcgaaaaaaccacgtgtttgggggaaaaaaaggaagcaacgtcgaatcaagacctgcttcagatggttccttgcagcatgcaagacccactcctttctttatggaccctatttacagagtagagaaaagaaaactaactgacccacttgaagctttaaaagagaaatacttgaggccttctccaggattcttgtttcacccacaattccaactgcctgatcagagaacttggatgtcagctattgaaaacatggcagaaaagctagagagcttcagtgccctgaaacctgaggccagtgagctcttacagtcagtgccctctatgttcaacttcagggcgcctcccaatgccctgccagagaaccttctgcggaagggaaaggagcgctatacctgcagatactgtggcaagatttttccaaggtctgcaaacctaacacggcacttgagaacccacacaggagagcagccttacagatgcaaatactgtgacagatcatttagcatatcttctaacttgcaaaggcatgttcgcaacatccacaataaagagaagccatttaagtgtcacttatgtgataggtgttttggtcaacaaaccaatttagacagacacctaaagaaacatgagaatgggaacatgtccggtacagcaacatcgtcgcctcattctgaactggaaagtacaggtgcgattctggatgacaaagaagatgcttacttcacagaaattcgaaatttcattgggaacagcaaccatggcagccaatctcccaggaatgtggaggagagaatgaatggcagtcattttaaagatgaaaaggctttggtgaccagtcaaaattcagacttgctggatgatgaagaagttgaagatgaggtgttgttagatgaggaggatgaagacaatgatattactggaaaaacaggaaaggaaccagtgacaagtaatttacatgaaggaaaccctgaggatgactatgaagaaaccagtgccctggagatgagttgcaagacatccccagtgaggtataaagaggaagaatataaaagtggactttctgctctagatcatataaggcacttcacagatagcctcaaaatgaggaaaatggaagataatcaatattctgaagctgagctgtcttcttttagtacttcccatgtgccagaggaacttaagcagccgttacacagaaagtccaaatcgcaggcatatgctatgatgctgtcactgtctgacaaggagtccctccattctacatcccacagttcttccaacgtgtggcacagtatggccagggctgcggcggaatccagtgctatccagtccataagccacgtatgacgttatcaaggttgaccagagtgggaccaagtccaacagtagcatggctctttcatataggactatttacaagactgctgagcagaatgccttataaacctgcagggtcactcatctaaagtctagtgaccttaaactgaatgatttaaaaaagaaaagaaagaa

SEQ ID NO: 267699 - DNA, 580 bp, Artificial Sequence
  derived and/or modified sequence
cttgttcctcctgcgaaacggtgcggtctggacacgtctccggggtgggtcgtccggccttcgatcttagacgaattttacaatgtgaagttctgcatagatgccagtcaaccagatgttggaagctggctcaagtacattagattcgctggctgttatgatcagcacaaccttgttgcatgccagataaatgatcaggaaagaagctaagcagaaaatactcctcattaagttatttttcaaatttagcacaattttgtgctccggtcttgttatagaaaaataaacaattggactttagagccacctactggaataaagagatattctatagagtagttgcagacattgcgccgggagaggagcttctgctgttcatgaagagcgaagactatccccatgaaactatggcgccggatatccacgaagaacggcaatatcgctgcgaagactgtgaccagctctttgaatctaaggctgaactagcagatcaccaaaagtttccatgcagtactcctcactcagcattttcaatggttgaagaggactttcagcaaaaactcgaaagcgagaatgatct

SEQ ID NO: 267700 - DNA, 69 bp, Artificial Sequence
  derived and/or modified sequence
atgaagagtgaagattaccctcatgaaacaatggctccagatattcacgaggagcggcagtatcggtag

SEQ ID NO: 267701 - DNA, 90 bp, Artificial Sequence
  derived and/or modified sequence
atgaaatccgaggattaccctcacgagaccatggctcctgacattcacgaagaacgccagtatcgctgtgaggattgtgatcaactgtag

SEQ ID NO: 267702 - DNA, 69 bp, Artificial Sequence
  derived and/or modified sequence
atgaagtctgaggactacccccatgagaccatggccccagacatccacgaggagcggcagtacagatag

SEQ ID NO: 267703 - DNA, 90 bp, Artificial Sequence
  derived and/or modified sequence
atgaagtctgaggactacccccatgagaccatggccccagacatccacgaggagcggcagtaccgctgtgaggactgtgaccagctgtag

SEQ ID NO: 267704 - DNA, 69 bp, Artificial Sequence
  derived and/or modified sequence
atgaagagcgaggactacccccacgagaccatggcccccgacatccatgaagaacgccaatatcgctag

SEQ ID NO: 267705 - DNA, 90 bp, Artificial Sequence
  derived and/or modified sequence
atgaagagcgaggactacccccacgagaccatggcccccgacatccatgaggagagacagtacagatgtgaagactgcgaccagctctag

SEQ ID NO: 267706 - DNA, 69 bp, Artificial Sequence
  derived and/or modified sequence
atgaaaagcgaggattatccacacgagacaatggcccctgatatccatgaagaacgtcagtaccggtag

SEQ ID NO: 267707 - DNA, 90 bp, Artificial Sequence
  derived and/or modified sequence
atgaaatccgaggattatccccatgagacaatggcccctgacattcacgaggaacggcagtatcggtgcgaggattgcgatcaactatag

SEQ ID NO: 267708 - DNA, 69 bp, Artificial Sequence
  derived and/or modified sequence
atgaagagcgaggactacccccacgagaccatggcccccgacatccacgaggagagacagtacagatag

SEQ ID NO: 267709 - DNA, 90 bp, Artificial Sequence
  derived and/or modified sequence
atgaagagcgaggactacccccacgagaccatggcccccgacatccacgaggagagacagtacagatgcgaggactgcgaccagctgtag

SEQ ID NO: 267710 - protein, 1230 aa, Artificial Sequence
  derived and/or modified sequence
MRSKGRARKLATNNECVYGNYPEIPLEEMPDADGVASTPSLNIQEPCSPATSSEAFTPKEGSPYKAPIYIPDDIPIPAEFELRESNMPGAGLGIWTKRKIEVGEKFGPYVGEQRSNLKDPSYGWEILDEFYNVKFCIDASQPDVGSWLKYIRFAGCYDQHNLVACQINDQIFYRVVADIAPGEELLLFMKSEDYPHETMAPDIHEERQYRCEDCDQLFESKAELADHQKFPCSTPHSAFSMVEEDFQQKLESENDLQEIHTIQECKECDQVFPDLQSLEKHMLSHTEEREYKCDQCPKAFNWKSNLIRHQMSHDSGKHYECENCAKVFTDPSNLQRHIRSQHVGARAHACPECGKTFATSSGLKQHKHIHSSVKPFICEVCHKSYTQFSNLCRHKRMHADCRTQIKCKDCGQMFSTTSSLNKHRRFCEGKNHFAAGGFFGQGISLPGTPAMDKTSMVNMSHANPGLADYFGANRHPAGLTFPTAPGFSFSFPGLFPSGLYHRPPLIPASSPVKGLSSTEQTNKSQSPLMTHPQILPATQDILKALSKHPSVGDNKPVELQPERSSEERPFEKISDQSESSDLDDVSTPSGSDLETTSGSDLESDIESDKEKFKENGKMFKDKVSPLQNLASINNKKEYSNHSIFSPSLEEQTAVSGAVNDSIKAIASIAEKYFGSTGLVGLQDKKVGALPYPSMFPLPFFPAFSQSMYPFPDRDLRSLPLKMEPQSPGEVKKLQKGSSESPFDLTTKRKDEKPLTPVPSKPPVTPATSQDQPLDLSMGSRSRASGTKLTEPRKNHVFGGKKGSNVESRPASDGSLQHARPTPFFMDPIYRVEKRKLTDPLEALKEKYLRPSPGFLFHPQMSAIENMAEKLESFSALKPEASELLQSVPSMFNFRAPPNALPENLLRKGKERYTCRYCGKIFPRSANLTRHLRTHTGEQPYRCKYCDRSFSISSNLQRHVRNIHNKEKPFKCHLCDRCFGQQTNLDRHLKKHENGNMSGTATSSPHSELESTGAILDDKEDAYFTEIRNFIGNSNHGSQSPRNVEERMNGSHFKDEKALVTSQNSDLLDDEEVEDEVLLDEEDEDNDITGKTGKEPVTSNLHEGNPEDDYEETSALEMSCKTSPVRYKEEEYKSGLSALDHIRHFTDSLKMRKMEDNQYSEAELSSFSTSHVPEELKQPLHRKSKSQAYAMMLSLSDKESLHSTSHSSSNVWHSMARAAAESSAIQSISHV

SEQ ID NO: 267711 - DNA, 3374 bp, Artificial Sequence
  derived and/or modified sequence
aacatgttgttggaaaggaagctaataagttaaacctttgagagatgccaaaaaaagagatattctatagagtagttgcagacattgcgccgggagaggagcttctgctgttcatgaagagcgaagactatccccatgaaactatggcgccggatatccacgaagaacggcaatatcgctgcgaagactgtgaccagctctttgaatctaaggctgaactagcagatcaccaaaagtttccatgcagtactcctcactcagcattttcaatggttgaagaggactttcagcaaaaactcgaaagcgagaatgatctccaagagatacacacgatccaggagtgtaaggaatgtgaccaagtttttcctgatttgcaaagcctggagaaacacatgctgtcacatactgaagagagggaatacaagtgtgatcagtgtcccaaggcatttaactggaagtccaatttaattcgccaccagatgtcacatgacagtggaaagcactatgaatgtgaaaactgtgccaaggttttcacggaccctagcaaccttcagcggcacattcgctctcagcatgtcggtgcccgggcccatgcatgcccggagtgtggcaaaacgtttgccacttcgtcgggcctcaaacaacacaagcacatccacagcagtgtgaagccctttatctgtgaggtctgccataaatcctatactcagttttcaaacctttgccgtcataagcgcatgcatgctgattgcagaacccaaatcaagtgcaaagactgtggacaaatgttcagcactacgtcttccttaaataaacacaggaggttttgtgagggcaagaaccattttgcggcaggtggattttttggccaaggcatttcacttcctggaaccccagctatggataaaacgtccatggttaatatgagtcatgccaacccgggccttgctgactattttggcgccaataggcatcctgctggtcttacctttccaacagctcctggattttcttttagcttccctggtctgtttccttccggcttgtaccacaggcctcctttgatacctgctagttctcctgttaaaggactatcaagtactgaacagacaaacaaaagtcaaagtcccctcatgacacatcctcagatactgccagctacacaggatattttgaaggcactatctaaacacccatctgtaggggacaataagccagtggagctccagcccgagaggtcctctgaagagaggccctttgagaaaatcagtgaccagtcagagagtagtgaccttgatgatgtcagtacaccaagtggcagtgacctggaaacaacctcgggctctgatctggaaagtgacattgaaagtgataaagagaaatttaaagaaaatggtaaaatgttcaaagacaaagtaagccctcttcagaatctggcttcaataaataataagaaagaatacagcaatcattccattttctcaccatctttagaggagcagactgcggtgtcaggagctgtgaatgattctataaaggctattgcttctattgctgaaaaatactttggttcaacaggactggtggggctgcaagacaaaaaagttggagctttaccttacccttccatgtttcccctcccattttttccagcattctctcaatcaatgtacccatttcctgatagagacttgagatcgttacctttgaaaatggaaccccaatcaccaggtgaagtaaagaaactgcagaagggcagctctgagtccccctttgatctcaccactaagcgaaaggatgagaagcccttgactccagtcccctccaagcctccagtgacacctgccacaagccaagaccagcccctggatctaagtatgggcagtaggagtagagccagtgggacaaagctgactgagcctcgaaaaaaccacgtgtttgggggaaaaaaaggaagcaacgtcgaatcaagacctgcttcagatggttccttgcagcatgcaagacccactcctttctttatggaccctatttacagagtagagaaaagaaaactaactgacccacttgaagctttaaaagagaaatacttgaggccttctccaggattcttgtttcacccacaaatgtcagctattgaaaacatggcagaaaagctagagagcttcagtgccctgaaacctgaggccagtgagctcttacagtcagtgccctctatgttcaacttcagggcgcctcccaatgccctgccagagaaccttctgcggaagggaaaggagcgctatacctgcagatactgtggcaagatttttccaaggtctgcaaacctaacacggcacttgagaacccacacaggagagcagccttacagatgcaaatactgtgacagatcatttagcatatcttctaacttgcaaaggcatgttcgcaacatccacaataaagagaagccatttaagtgtcacttatgtgataggtgttttggtcaacaaaccaatttagacagacacctaaagaaacatgagaatgggaacatgtccggtacagcaacatcgtcgcctcattctgaactggaaagtacaggtgcgattctggatgacaaagaagatgcttacttcacagaaattcgaaatttcattgggaacagcaaccatggcagccaatctcccaggaatgtggaggagagaatgaatggcagtcattttaaagatgaaaaggctttggtgaccagtcaaaattcagacttgctggatgatgaagaagttgaagatgaggtgttgttagatgaggaggatgaagacaatgatattactggaaaaacaggaaaggaaccagtgacaagtaatttacatgaaggaaaccctgaggatgactatgaagaaaccagtgccctggagatgagttgcaagacatccccagtgaggtataaagaggaagaatataaaagtggactttctgctctagatcatataaggcacttcacagatagcctcaaaatgaggaaaatggaagataatcaatattctgaagctgagctgtcttcttttagtacttcccatgtgccagaggaacttaagcagccgttacacagaaagtccaaatcgcaggaggaaagtaaagcttaaaaggttaagcaacttgctcaagatcacacagctaggcatatgctatgatgctgtcactgtctgacaaggagtccctccattctacatcccacagttcttccaacgtgtggcacagtatggccagggctgcggcggaatccagtgctatccagtccataagccacgtatgacgttatcaaggttgaccagagtgggaccaagtccaacagtagcatggctctttcatataggactatttacaagactgct

SEQ ID NO: 267712 - DNA, 5732 bp, Artificial Sequence
  derived and/or modified sequence
cacacacacacacacacaccacacttgtgctttcaagacatcgaaacggaggctatttccctggggaaagaaatcctgcctggcgagatctccccattggttgtttacccggagaaatctacatgtttaagggggatggtgcatccataatcagtctgtccctataggacttgggtcttggcgacctttttgtgacctctcccgccagaggaggctgctgtcactttaaaaatttaaaagaggagcccgtctggcttccgatcagatcactctgggcggcgggagatagctccctttctccctcgccccgggttctttctggatggccgagcagatcctctttaaagagacagttcatgaaatagaaacccggcggctgagcttggagttgcgaaaggggacgatcccgtgagggtccaggacccgcgaaggcgctgcggaggatctgaaagggggatagagctcccctcgcctccccaggccccccaccttttcaaactctcctcctcctgcttgttttcccccattggaactgggaaggagaagtagaagttttagtgggtttcagataactttcattacacatcgggctgataagagcaagagaaagtgagaaaagagggaggtgatgtgaaccagaaggaatagctccgagctcatttaggaagggggaaaaagccaaaacacaccaaacccgggtcacccagacgaaagaagacttcatttcttgtattaaaaatacactgttggcggacaataaatccgaaacgcgtggtcctggagagcagatcctagagacggacaaagttgtcagagacccatttggaaatcgagacgcgaggcttttaaaaaattattattattatttttaaacatctctaaatgttgctcgggatcgtttgaaaggattttcgtgcaggagcgttgggggctgctgattattttattttgtttattttgattcttctgtgaatgcctattattgctgagttgaggccatagaaatctaaagatcttagacgaattttacaatgtgaagttctgcatagatgccagtcaaccagatgttggaagctggctcaagtacattagattcgctggctgttatgatcagcacaaccttgttgcatgccagataaatgatcagatattctatagagtagttgcagacattgcgccgggagaggagcttctgctgttcatgaagagcgaagactatccccatgaaactatggcgccggatatccacgaagaacggcaatatcgctgcgaagactgtgaccagctctttgaatctaaggctgaactagcagatcaccaaaagtttccatgcagtactcctcactcagcattttcaatggttgaagaggactttcagcaaaaactcgaaagcgagaatgatctccaagagatacacacgatccaggagtgtaaggaatgtgaccaagtttttcctgatttgcaaagcctggagaaacacatgctgtcacatactgaagagagggaatacaagtgtgatcagtgtcccaaggcatttaactggaagtccaatttaattcgccaccagatgtcacatgacagtggaaagcactatgaatgtgaaaactgtgccaaggttttcacggaccctagcaaccttcagcggcacattcgctctcagcatgtcggtgcccgggcccatgcatgcccggagtgtggcaaaacgtttgccacttcgtcgggcctcaaacaacacaagcacatccacagcagtgtgaagccctttatctgtgaggtctgccataaatcctatactcagttttcaaacctttgccgtcataagcgcatgcatgctgattgcagaacccaaatcaagtgcaaagactgtggacaaatgttcagcactacgtcttccttaaataaacacaggaggttttgtgagggcaagaaccattttgcggcaggtggattttttggccaaggcatttcacttcctggaaccccagctatggataaaacgtccatggttaatatgagtcatgccaacccgggccttgctgactattttggcgccaataggcatcctgctggtcttacctttccaacagctcctggattttcttttagcttccctggtctgtttccttccggcttgtaccacaggcctcctttgatacctgctagttctcctgttaaaggactatcaagtactgaacagacaaacaaaagtcaaagtcccctcatgacacatcctcagatactgccagctacacaggatattttgaaggcactatctaaacacccatctgtaggggacaataagccagtggagctccagcccgagaggtcctctgaagagaggccctttgagaaaatcagtgaccagtcagagagtagtgaccttgatgatgtcagtacaccaagtggcagtgacctggaaacaacctcgggctctgatctggaaagtgacattgaaagtgataaagagaaatttaaagaaaatggtaaaatgttcaaagacaaagtaagccctcttcagaatctggcttcaataaataataagaaagaatacagcaatcattccattttctcaccatctttagaggagcagactgcggtgtcaggagctgtgaatgattctataaaggctattgcttctattgctgaaaaatactttggttcaacaggactggtggggctgcaagacaaaaaagttggagctttaccttacccttccatgtttcccctcccattttttccagcattctctcaatcaatgtacccatttcctgatagagacttgagatcgttacctttgaaaatggaaccccaatcaccaggtgaagtaaagaaactgcagaagggcagctctgagtccccctttgatctcaccactaagcgaaaggatgagaagcccttgactccagtcccctccaagcctccagtgacacctgccacaagccaagaccagcccctggatctaagtatgggcagtaggagtagagccagtgggacaaagctgactgagcctcgaaaaaaccacgtgtttgggggaaaaaaaggaagcaacgtcgaatcaagacctgcttcagatggttccttgcagcatgcaagacccactcctttctttatggaccctatttacagagtagagaaaagaaaactaactgacccacttgaagctttaaaagagaaatacttgaggccttctccaggattcttgtttcacccacaaatgtcagctattgaaaacatggcagaaaagctagagagcttcagtgccctgaaacctgaggccagtgagctcttacagtcagtgccctctatgttcaacttcagggcgcctcccaatgccctgccagagaaccttctgcggaagggaaaggagcgctatacctgcagatactgtggcaagatttttccaaggtctgcaaacctaacacggcacttgagaacccacacaggagagcagccttacagatgcaaatactgtgacagatcatttagcatatcttctaacttgcaaaggcatgttcgcaacatccacaataaagagaagccatttaagtgtcacttatgtgataggtgttttggtcaacaaaccaatttagacagacacctaaagaaacatgagaatgggaacatgtccggtacagcaacatcgtcgcctcattctgaactggaaagtacaggtgcgattctggatgacaaagaagatgcttacttcacagaaattcgaaatttcattgggaacagcaaccatggcagccaatctcccaggaatgtggaggagagaatgaatggcagtcattttaaagatgaaaaggctttggtgaccagtcaaaattcagacttgctggatgatgaagaagttgaagatgaggtgttgttagatgaggaggatgaagacaatgatattactggaaaaacaggaaaggaaccagtgacaagtaatttacatgaaggaaaccctgaggatgactatgaagaaaccagtgccctggagatgagttgcaagacatccccagtgaggtataaagaggaagaatataaaagtggactttctgctctagatcatataaggcacttcacagatagcctcaaaatgaggaaaatggaagataatcaatattctgaagctgagctgtcttcttttagtacttcccatgtgccagaggaacttaagcagccgttacacagaaagtccaaatcgcaggcatatgctatgatgctgtcactgtctgacaaggagtccctccattctacatcccacagttcttccaacgtgtggcacagtatggccagggctgcggcggaatccagtgctatccagtccataagccacgtatgacgttatcaaggttgaccagagtgggaccaagtccaacagtagcatggctctttcatataggactatttacaagactgctgagcagaatgccttataaacctgcagggtcactcatctaaagtctagtgaccttaaactgaatgatttaaaaaagaaaagaaagaaaaaagaaactatttattctcgatattttgttttgcacagcaaaggcagctgctgacttctggaagatcaatcaatgcgacttaaagtgattcagtgaaaacaaaaaacttggtgggctgaaggcatcttccagtttaccccaccttagggtatgggtgggtgagaagggcagttgagatggcagcattgatatgaatgaacactccatagaaactgaattctcttttgtacaagatcacctgacatgattgggaacagttgcttttaattacagatttaatttttttcttcgttaaagttttatgtaatttaaccctttgaagacagaagtagttggatgaaatgcacagtcaattattatagaaactgataacagggagtacttgttcccccttttgccttcttaagtacattgtttaaaactagggaaaaagggtatgtgtatattgtaaactatggatgttaacactcaaagaggttaagtcagtgaagtaacctattcatcaccagtaccgctgtaccactaataaattgtttgccaaatccttgtaataacatcttaattttagacaatcatgtcactgtttttaatgtttatttttttgtgtgtgttgcgtgtatcatgtatttatttgttggcaaactattgtttgttgattaaaatagcactgttccagtcagccactactttatgacgtctgaggcacacccctttccgaatttcaaggaccaaggtgacccgacctgtgtatgagagtgccaaatggtgtttggcttttcttaacattcctttttgtttgtttgttttgttttccttcttaatgaactaaatacgaatagatgcaacttagtttttgtaatactgaaatcgattcaattgtataaacgattataatttctttcatggaagcatgattcttctgattaaaaactgtactccatattttatgctggttgtctgcaagcttgtgcgatgttatgttcatgttaatcctatttgtaaaatgaagtgttcccaaccttatgttaaaagagagaagtaaataacagactgtattcagttattttgccctttattgaggaaccagatttgttttctttttgtttgtaatctcattttgaaataatcagcaagttgaggtactttcttcaaatgctttgtacaatataaactgttatgcctttcagtgcattactatgggaggagcaactaaaaaataaagacttacaaaaagga

SEQ ID NO: 267713 - DNA, 3939 bp, Artificial Sequence
  derived and/or modified sequence
agagagagggagggagcgagagggagagcaaaagaaggaaaggatccaagaaaaaaaagccccaaccacacaccagcggctgcaggactgggcacagcatgagatccaaaggcagggcaaggaaactggccacaaataatgagtgtgtatatggcaactaccctgaaatacctttggaagaaatgccagatgcagatggagtagccagcactccctccctcaatattcaagagccatgctctcctgccacatccagtgaagcattcactccaaaggagggttctccttacaaagcccccatctacatccctgatgatatccccattcctgctgagtttgaacttcgagagtcaaatatgcctggggcaggactaggaatatggaccaaaaggaagatcgaagtaggtgaaaagtttgggccttatgtgggagagcagaggtcaaacctgaaagaccccagttatggatgggagatcttagacgaattttacaatgtgaagttctgcatagatgccagtcaaccagatgttggaagctggctcaagtacattagattcgctggctgttatgatcagcacaaccttgttgcatgccagataaatgatcagatattctatagagtagttgcagacattgcgccgggagaggagcttctgctgttcatgaagagcgaagactatccccatgaaactatggcgccggatatccacgaagaacggcaatatcgctgcgaagactgtgaccagctctttgaatctaaggctgaactagcagatcaccaaaagtttccatgcagtactcctcactcagcattttcaatggttgaagaggactttcagcaaaaactcgaaagcgagaatgatctccaagagatacacacgatccaggagtgtaaggaatgtgaccaagtttttcctgatttgcaaagcctggagaaacacatgctgtcacatactgaagagagggaatacaagtgtgatcagtgtcccaaggcatttaactggaagtccaatttaattcgccaccagatgtcacatgacagtggaaagcactatgaatgtgaaaactgtgccaaggttttcacggaccctagcaaccttcagcggcacattcgctctcagcatgtcggtgcccgggcccatgcatgcccggagtgtggcaaaacgtttgccacttcgtcgggcctcaaacaacacaagcacatccacagcagtgtgaagccctttatctgtgaggtctgccataaatcctatactcagttttcaaacctttgccgtcataagcgcatgcatgctgattgcagaacccaaatcaagtgcaaagactgtggacaaatgttcagcactacgtcttccttaaataaacacaggaggttttgtgagggcaagaaccattttgcggcaggtggattttttggccaaggcatttcacttcctggaaccccagctatggataaaacgtccatggttaatatgagtcatgccaacccgggccttgctgactattttggcgccaataggcatcctgctggtcttacctttccaacagctcctggattttcttttagcttccctggtctgtttccttccggcttgtaccacaggcctcctttgatacctgctagttctcctgttaaaggactatcaagtactgaacagacaaacaaaagtcaaagtcccctcatgacacatcctcagatactgccagctacacaggatattttgaaggcactatctaaacacccatctgtaggggacaataagccagtggagctccagcccgagaggtcctctgaagagaggccctttgagaaaatcagtgaccagtcagagagtagtgaccttgatgatgtcagtacaccaagtggcagtgacctggaaacaacctcgggctctgatctggaaagtgacattgaaagtgataaagagaaatttaaagaaaatggtaaaatgttcaaagacaaagtaagccctcttcagaatctggcttcaataaataataagaaagaatacagcaatcattccattttctcaccatctttagaggagcagactgcggtgtcaggagctgtgaatgattctataaaggctattgcttctattgctgaaaaatactttggttcaacaggactggtggggctgcaagacaaaaaagttggagctttaccttacccttccatgtttcccctcccattttttccagcattctctcaatcaatgtacccatttcctgatagagacttgagatcgttacctttgaaaatggaaccccaatcaccaggtgaagtaaagaaactgcagaagggcagctctgagtccccctttgatctcaccactaagcgaaaggatgagaagcccttgactccagtcccctccaagcctccagtgacacctgccacaagccaagaccagcccctggatctaagtatgggcagtaggagtagagccagtgggacaaagctgactgagcctcgaaaaaaccacgtgtttgggggaaaaaaaggaagcaacgtcgaatcaagacctgcttcagatggttccttgcagcatgcaagacccactcctttctttatggaccctatttacagagtagagaaaagaaaactaactgacccacttgaagctttaaaagagaaatacttgaggccttctccaggattcttgtttcacccacaaatgtcagctattgaaaacatggcagaaaagctagagagcttcagtgccctgaaacctgaggccagtgagctcttacagtcagtgccctctatgttcaacttcagggcgcctcccaatgccctgccagagaaccttctgcggaagggaaaggagcgctatacctgcagatactgtggcaagatttttccaaggtctgcaaacctaacacggcacttgagaacccacacaggagagcagccttacagatgcaaatactgtgacagatcatttagcatatcttctaacttgcaaaggcatgttcgcaacatccacaataaagagaagccatttaagtgtcacttatgtgataggtgttttggtcaacaaaccaatttagacagacacctaaagaaacatgagaatgggaacatgtccggtacagcaacatcgtcgcctcattctgaactggaaagtacaggtgcgattctggatgacaaagaagatgcttacttcacagaaattcgaaatttcattgggaacagcaaccatggcagccaatctcccaggaatgtggaggagagaatgaatggcagtcattttaaagatgaaaaggctttggtgaccagtcaaaattcagacttgctggatgatgaagaagttgaagatgaggtgttgttagatgaggaggatgaagacaatgatattactggaaaaacaggaaaggaaccagtgacaagtaatttacatgaaggaaaccctgaggatgactatgaagaaaccagtgccctggagatgagttgcaagacatccccagtgaggtataaagaggaagaatataaaagtggactttctgctctagatcatataaggcacttcacagatagcctcaaaatgaggaaaatggaagataatcaatattctgaagctgagctgtcttcttttagtacttcccatgtgccagaggaacttaagcagccgttacacagaaagtccaaatcgcaggcatatgctatgatgctgtcactgtctgacaaggagtccctccattctacatcccacagttcttccaacgtgtggcacagtatggccagggctgcggcggaatccagtgctatccagtccataagccacgtatgacgttatcaaggttgaccagagtgggaccaagtccaacagtagcatggctctttcatataggactatttacaagactgctgagcagaatgccttataaacctgcagggtcactcatctaaagtctagtgaccttaaactgaatgattta

SEQ ID NO: 267714 - DNA, 3693 bp, Artificial Sequence
  derived and/or modified sequence
atgcgatcaaaggggcgcgctaggaagctggctacgaataacgagtgtgtgtatggaaactaccccgagatcccattggaggagatgcctgacgcagacggggtagcctcaaccccttctcttaatattcaagaaccttgctcgcccgcaaccagctctgaggccttcacaccaaaggaggggtcaccctacaaggcccctatatacattcctgacgacatcccaatccctgcagaatttgaactgcgagaaagcaatatgcccggcgcaggtctagggatctggactaagcggaagatagaggtaggagaaaagtttggaccgtacgttggcgaacaacgctccaacctcaaggaccccagctatgggtgggaaattcttgacgaattttataatgtgaagttttgcattgacgcctcccagcccgacgtgggatcttggcttaaatatatcagattcgctggttgctatgaccagcataacctcgtggcctgccaaatcaatgaccaaatcttctatcgagtcgtggcagatattgcccccggagaggagcttctgttgttcatgaaaagtgaagactacccgcatgaaaccatggccccagacatacatgaagaacgccagtaccggtgcgaagactgcgaccagctatttgaaagcaaagcagaactggcagatcatcaaaagttcccatgttcaacaccccacagtgcattctctatggtagaagaggactttcaacaaaaactggaatcagagaatgacctacaggagattcatacaatacaggaatgcaaggagtgcgatcaagttttcccagacctgcagtcccttgaaaaacatatgcttagtcatactgaggaaagggagtataagtgcgaccaatgccccaaagcttttaattggaaaagcaacctgattcgccaccaaatgagtcatgacagtggaaagcattacgagtgcgagaactgcgctaaagtcttcacagacccctcaaacctacagagacacattcgatctcagcatgttggcgccagagcgcatgcatgccctgagtgcggtaaaaccttcgctacttctagtggcctgaaacagcacaagcacatacatagtagcgttaaaccttttatttgcgaagtatgccataaatcttacacccagttttctaatctgtgccggcataagcgtatgcatgccgactgtcgaactcaaatcaaatgcaaagactgcgggcagatgttctccactacttcatctctgaacaagcaccggcgcttttgcgagggcaaaaaccatttcgctgctgggggcttttttggacagggaatctcccttcccggcacacccgccatggataaaacaagcatggtgaatatgagtcacgccaacccggggctagcggactactttggagctaacaggcacccagctggattgacctttccaaccgctcccgggttttccttttccttccctggactttttccatctggcctgtatcaccgccctccccttattccagccagctcaccagtcaaaggtctatcatcaacagaacagactaataaaagccagtcccccctgatgactcatccccagattctgcccgccacccaggacatcctcaaagctttatctaagcacccaagcgtgggagacaacaagcccgtcgagctccagccagagaggagctctgaagagcgaccatttgaaaagatctccgaccagtctgaatcttctgatctggatgatgtgagcaccccgagcggatctgatctcgaaactacgagtggctccgatttagaatctgatatagaatccgataaggagaagtttaaggagaacggtaaaatgtttaaagacaaggtcagcccactacagaacttagcgtcgatcaacaacaagaaagagtactccaatcactctattttctctcccagtctcgaggaacaaacggccgtgagtggcgccgtgaacgacagtataaaagcaattgccagtatcgccgaaaagtatttcggctccacaggtctggttggactgcaagacaagaaggtgggggccctcccttatccttccatgtttcctctccctttttttcctgcgttctcacagtctatgtacccctttccagatcgggacttaagatcattgcctctaaaaatggagccacaatcccccggcgaagtgaaaaaactgcagaaaggttcttcggagagcccctttgacctgaccaccaaaagaaaggacgaaaagccccttacacccgtgccttctaaacccccggtcactcctgccacgtcccaggatcaacctctcgacctcagtatggggagccggagtcgcgccagcggcaccaagctaaccgaaccacggaagaatcacgtttttggtggcaagaagggatcaaacgtggaatcaaggcctgctagcgatgggtctctgcagcatgcgagacctaccccattctttatggatcccatctaccgggtggagaaacgcaagctcacggatccgttggaagccttgaaggagaagtacttgcgccctagcccaggtttcctgtttcatccccagatgtccgcgatcgaaaacatggccgagaaacttgaaagtttttccgccttaaaaccagaggcctccgagctgctacagagcgtcccatcgatgttcaattttcgcgctcctcctaatgccctcccagagaacttgctcaggaagggtaaagagagatacacctgtcgatactgcggtaagatcttccccaggtctgcaaaccttactagacacttgcggacccacactggtgagcagccttaccgctgcaagtactgcgacagatcctttagcatatccagtaatctccagcggcacgtcaggaatatccacaataaggagaaaccatttaaatgtcatctgtgtgatcgctgctttggtcagcaaactaatcttgaccgacatttaaagaagcatgaaaacggcaatatgtctggcacagctacgtcctccccccatagcgaactggaatctactggcgcaatcctcgatgacaaggaagatgcctatttcacagagattcggaactttataggcaattcaaaccatgggagtcagtccccacgcaacgtggaggagcgtatgaatggctcacactttaaagatgaaaaagcccttgtgactagtcagaactcggacctgctggacgacgaggaggtagaggacgaggttctgctggacgaggaagatgaggacaatgacattaccggcaaaaccggcaaagagccggtgacaagtaacctgcatgaggggaaccccgaggatgactatgaggagacaagcgcgttggagatgagttgcaagacaagcccggtccgttataaggaagaagaatacaaaagcggtctctctgcactggaccatattaggcacttcactgactctctgaaaatgcgtaaaatggaggataaccagtactcagaagcagaactgagcagcttctctacaagtcatgtccccgaggagttaaagcagccgctccaccggaaatcaaagagccaggcttatgctatgatgctatccctgtcagacaaagagagcttgcattcaacaagccattcctctagcaacgtgtggcatagcatggcccgagccgcagctgagtcaagcgctatccagtcaattagccacgtgtag

SEQ ID NO: 267715 - DNA, 3693 bp, Artificial Sequence
  derived and/or modified sequence
atgaggagcaagggccgggccaggaagctggccaccaacaatgaatgtgtgtatggcaactacccagagatccccctggaggagatgccagatgctgatggagtggccagcacccccagcctgaacatccaggagccctgcagccctgccaccagcagcgaggccttcacccccaaggagggcagcccctacaaggcccccatctacatcccagatgacatccccatcccagctgagtttgagctgcgggagagcaacatgcctggggccggcctgggcatctggaccaagaggaagattgaggtgggggagaagtttggcccctacgtgggggagcagaggagcaacctgaaggaccccagctatggctgggagatcctggatgagttctacaacgtgaagttctgcattgatgccagccagccagatgtgggctcctggctgaagtacatccgctttgctggctgctatgaccagcacaacctggtggcctgccagatcaatgaccagatcttctacagagtggtggccgacatcgcccctggagaggagctgctgctcttcatgaagtctgaggactacccccatgagaccatggccccagacatccacgaggagcggcagtaccgctgtgaggactgtgaccagctgtttgagagcaaggccgagctggccgaccaccagaagttcccctgcagcaccccccacagcgccttctccatggtggaggaggacttccagcagaagctggagagtgaaaatgacctgcaggagatccacaccatccaggagtgcaaggaatgtgaccaggtgtttcctgacctgcagagcctggagaagcacatgctgagccacacagaggagcgggagtacaagtgtgaccagtgccccaaggccttcaactggaagagcaacctgatccgccaccagatgagccatgattctgggaagcactatgaatgtgagaactgtgccaaggtgttcacagaccccagcaacctgcagaggcacatccgcagccagcacgtgggcgcccgggcccacgcctgcccagaatgtgggaagacctttgccaccagcagcggcctgaagcagcacaagcacatccacagctctgtgaagcccttcatctgtgaggtgtgccacaagagctacacccagttcagcaacctgtgccgccacaagaggatgcatgctgactgcaggacccagatcaagtgcaaggactgtggccagatgttcagcaccaccagcagcctgaacaagcaccggcgcttctgtgagggcaagaaccactttgctgctgggggcttcttcggccagggcatcagcctgcccggcaccccagccatggacaagacctccatggtgaacatgagccacgccaaccctggcctggccgactactttggagccaacagacaccctgctggcctgaccttccccacagcccctggcttctccttctccttccctggcctcttccccagcggcctgtaccacaggcctcctctcatcccagccagcagccctgtgaagggcctgagcagcacagagcagaccaacaagagccagagccccctgatgacccacccccagatcctgcctgccacccaggacatcctgaaggccctgagcaagcaccccagcgtgggggacaacaagcctgtggagctgcagcctgagaggagcagcgaggagcggccctttgagaagatcagtgaccagagcgagagcagtgacctggatgatgtgtccaccccatctggcagtgacctggagaccaccagcggcagtgacctggagagtgacattgaaagtgacaaggagaagttcaaggaaaatggcaagatgttcaaggacaaggtgagccccctgcagaacctggccagcatcaacaacaagaaggagtacagcaaccacagcatcttcagccccagcctggaggagcagacagctgtgtctggagctgtgaatgacagcatcaaggccatcgccagcattgctgagaagtacttcggcagcacaggcctggtgggcctgcaggacaagaaggtgggcgccctgccctaccccagcatgttccccctgcccttcttccctgccttcagccagagcatgtaccccttcccagaccgggacctgcggagcctgcccctgaagatggagccccagagccctggagaggtgaagaagctgcagaagggcagcagcgagagcccctttgacctgaccaccaagaggaaggatgagaagcccctgacccctgtgcccagcaagccccctgtgaccccagccaccagccaggaccagcccctggacctgtccatgggcagccgcagccgggccagcggcaccaagctgacagagcccaggaagaaccacgtgtttggaggcaagaagggcagcaatgtggagagcaggcctgccagtgatggcagcctgcagcacgcccggcccacccccttcttcatggaccccatctacagagtggagaagaggaagctgacagaccccctggaggccctgaaggagaagtacctgcggcccagccctggcttcctgttccacccccagatgtctgccatcgagaacatggccgagaagctggagagcttcagcgccctgaagccagaggccagcgagctgctgcagagcgtgcccagcatgttcaacttccgggcccccccaaatgccctgcctgagaacctgctgaggaagggcaaggagcgctacacctgccgctactgcggcaagatcttccccaggtctgccaacctgaccaggcacctgcggacccacactggagagcagccctaccgctgcaagtactgtgacaggagcttcagcatcagcagcaacctgcagagacatgtgaggaacatccacaacaaggagaagcccttcaagtgccacctgtgtgaccgctgcttcggccagcagaccaacctggacagacacctgaagaagcatgaaaatggaaacatgtctggaacagccaccagcagcccccacagcgagctggagagcactggagccatcctggatgacaaggaggatgcctacttcacagagatccggaacttcatcggcaacagcaaccacggcagccagagccccagaaatgtggaggagaggatgaatggcagccacttcaaggatgagaaggccctggtgaccagccagaacagcgacctgctggatgatgaggaggtggaggatgaggtgctgctggatgaagaagatgaagataatgacatcaccgggaagacaggcaaggagcctgtgaccagcaacctgcacgagggcaacccagaagatgattatgaggagaccagcgccctggagatgagctgcaagaccagccctgtgcgctacaaggaggaggagtacaagagcggcctgagcgccctggaccacatccgccacttcacagacagcctgaagatgaggaagatggaggacaaccagtacagcgaggccgagctgagcagcttcagcaccagccacgtgcctgaggagctgaagcagcccctgcacaggaagagcaagagccaggcctatgccatgatgctgagcctgagtgacaaggagagcctgcacagcaccagccacagcagcagcaatgtgtggcacagcatggcccgggctgctgctgagagcagcgccatccagagcatcagccacgtgtag

SEQ ID NO: 267716 - DNA, 3693 bp, Artificial Sequence
  derived and/or modified sequence
atgcggagcaagggccgggcccggaagctggccaccaacaacgagtgtgtttatggcaattaccccgagatccctttagaagaaatgcccgacgctgatggagttgccagtacccctagtttaaacattcaggagccttgcagtcccgccacctcctcagaggcgtttacccccaaagaaggatcaccctacaaggcccctatctatatccctgatgacattccgatcccggccgagtttgaactcagagaaagtaacatgcctggcgcaggactagggatctggaccaaacgaaaaatcgaagtgggggagaagtttgggccttacgtgggtgaacagaggtccaacctaaaggacccgtcctacgggtgggagattcttgacgagttttacaacgttaagttttgtatagacgcgtcccaaccagatgtgggaagctggctcaaatatattcggttcgcagggtgctatgaccagcataacctggttgcatgccagattaatgaccagatcttctatcgggttgtggccgacattgcccctggggaggagctgctactttttatgaagagtgaggactaccctcacgaaactatggcccctgacattcatgaagagagacagtacaggtgcgaagactgcgatcagctgttcgagagcaaagccgagctcgcagaccaccagaaatttccgtgttccacgcctcattctgcattttcaatggtggaggaggactttcagcagaaactggagagcgaaaatgacctgcaggaaattcacaccatccaagagtgtaaagagtgcgaccaggtatttcccgatttgcagtccctggaaaagcacatgttatctcatacagaagagcgtgaatacaagtgcgaccagtgccccaaagccttcaactggaaaagcaacctcatccgtcaccagatgagccacgactcaggcaagcattacgaatgcgagaattgcgctaaagtcttcactgacccgtctaatctgcaacggcacatacgctcccagcacgtcggtgcccgcgctcacgcatgtcctgaatgcggcaagacgtttgcaacttcgagcggattgaaacagcataaacatatccatagtagtgtgaaaccttttatttgtgaggtatgtcataagtcatacacgcagttctctaatctgtgcaggcacaagcgtatgcatgccgactgccggacacagatcaagtgcaaagactgcgggcagatgtttagcaccacttcttctctaaacaaacaccgcaggttctgcgaggggaaaaaccacttcgcagccggagggttctttggtcaggggatttcacttcccgggactccagcaatggacaaaacctccatggttaatatgtcccacgcaaatcctgggctggcagattacttcggggccaaccggcaccctgctggactcactttcccaaccgcacccggcttttctttcagctttcctggcctattcccatcgggattatatcaccggccgcctctgataccagcttcctctcctgttaagggcctgagctccaccgagcagactaataagagccagtcaccccttatgacacacccacagatcctccccgccacgcaagacatcctcaaagcactttcgaaacacccgagcgttggggataacaagcccgtggagcttcagcccgagagatccagtgaggaacgccccttcgagaagatttccgatcaatcggagtcttccgaccttgatgacgtctctacaccgtctggatccgatctcgaaaccacctcaggttctgatcttgagagtgatatcgaaagtgacaaagagaaatttaaggaaaacggcaaaatgtttaaagacaaggtgtcacctctgcagaatctggcttctattaacaataagaaagagtactctaatcactctatttttagcccctcgctcgaagagcagactgccgttagcggagccgtcaatgacagcatcaaggccatcgcctccattgctgaaaaatacttcggcagcactggacttgtcggcctgcaagacaaaaaagtgggggccctcccgtacccttctatgttccccctgccgtttttccccgccttttctcagtctatgtaccctttccccgaccgcgatctgcgctctctccctcttaagatggagcctcagagtcctggagaggttaaaaaactgcagaaggggagcagcgagtcaccatttgatttgacgacaaaacggaaagacgagaagccactcacacctgtgccttccaaaccccccgttacacccgccaccagccaagatcagcccttggacctgagtatgggttcccgcagccgagcctccggcactaaactgacagaaccccggaaaaatcacgttttcggcggcaagaaaggctccaatgtggagtcccgtcctgccagtgatggaagcttacagcacgctcggcctacacctttcttcatggaccctatttatcgggtggagaaacgcaagctgaccgacccgctcgaagctctgaaagagaaatatttgcggccgtcgcctgggttcctttttcacccacagatgtccgccattgagaacatggctgagaagcttgagtcgttttccgcactgaaaccagaagcttctgagctcctgcaaagcgttccctctatgtttaatttcagagccccaccaaacgccctgccagaaaatctgctgcgaaagggcaaggaacggtacacatgcaggtactgcggtaagatctttccccgatcagccaacctgactaggcatttaagaacccataccggtgaacagccatatcgttgcaagtactgcgatcgttccttcagcatttctagtaacctgcagcgtcacgtgcgaaatattcacaacaaagaaaagccttttaagtgtcatctgtgtgatcgttgttttggccagcagaccaacctggacaggcatctcaagaagcatgagaacgggaacatgtccggcacagccacctcaagcccccattctgagctagagtcaactggtgctatactggacgacaaagaagacgcatactttactgaaatcagaaacttcattggcaacagcaaccacggtagccagtctcctagaaatgtggaagagagaatgaatgggtcacatttcaaagacgaaaaggcccttgtcacttctcagaactccgaccttctggacgacgaggaagtggaggacgaagtcctcctcgacgaggaggacgaggacaatgacatcactgggaagaccggaaaagagccagtgacttccaacctgcacgagggtaatcccgaggacgattacgaagaaacatctgcactcgagatgagctgcaaaacttctccagttcgctacaaggaggaagagtacaagtcgggactctcagccttggatcatatccggcacttcacggactcgttgaaaatgagaaagatggaagataatcagtactccgaagccgagttgtcaagcttcagcacgagccacgttccagaagagctaaaacaacccctgcatcgaaaaagcaagtcacaagcctacgccatgatgctgtcactatctgacaaagagagtctccacagtactagtcattcatcttccaatgtgtggcattccatggcccgggctgccgctgagagcagcgcaatccaaagtatcagccacgtgtag

SEQ ID NO: 267717 - DNA, 3693 bp, Artificial Sequence
  derived and/or modified sequence
atgcgctctaaagggagagcgaggaaacttgcgacaaataacgagtgtgtgtatggcaattaccctgagatacctctggaggagatgccagacgccgatggggtggcttcgacaccaagtcttaatattcaggagccctgctctccggctacatccagcgaggctttcacccccaaagaaggctccccctataaggcacccatttatatacctgacgacataccaatccccgctgaatttgagctgagagaatccaatatgcctggcgctggtctcggaatctggacaaaacggaagatcgaagtgggagaaaagttcggcccatatgtgggggaacaacgctccaaccttaaagatccttcctatggttgggagatcctagatgaattctacaatgtcaaattctgtatagatgcctcgcagccggacgtgggctcctggctaaagtacatccgttttgcgggatgttacgaccaacataacctagtggcatgtcagataaacgaccaaattttttacagagtggtcgccgatattgcccctggcgaggagctgctgctgtttatgaagtccgaggactatccacatgagacaatggctcctgatattcatgaagagaggcaataccgatgcgaagactgtgatcagctgtttgaatcaaaagcagagctggccgatcaccagaaatttccctgctctaccccccactccgcattctctatggtcgaagaggacttccagcagaagctggaaagtgagaacgacctccaggaaattcataccatacaggagtgcaaggagtgcgatcaggttttcccagatctccagagtctggagaaacacatgctgagccacactgaagaaagagaatacaagtgtgaccagtgtcctaaggccttcaactggaaatcgaacctgattagacatcaaatgtcacacgactcaggcaagcactacgagtgcgagaattgtgctaaggtgttcaccgatccaagcaatttacaaaggcatatacgcagccagcatgtgggagccagagcccacgcatgccctgaatgtggcaaaacattcgccacctcttcaggacttaagcagcacaagcacatacactcatccgttaaaccctttatttgcgaggtgtgtcacaaatcctatactcaattcagcaacctgtgcagacacaaacgcatgcacgccgattgccgaactcagattaagtgcaaagattgtggacagatgtttagcacgacctcatctcttaacaagcaccggagattttgcgaaggcaaaaatcattttgccgctggcggattttttggccaggggatatccttacccggaacaccagcaatggataagacttcaatggtgaacatgagccacgccaatcccggtttagctgattactttggagctaatcgtcacccggcaggcttaacattccccactgcccctggtttcagcttctcattcccaggcctttttccaagcggcctctaccaccgcccacccctgatacctgcctcatcaccggtcaaaggcctgtctagtacagaacagacgaacaaaagccagagcccacttatgacgcacccccaaattctgcctgccacccaagacattcttaaagctctgtccaagcatccgtctgttggggataacaaacccgtcgagctgcagcctgaacgctctagcgaggaaaggccattcgaaaaaatcagtgatcagagcgagtccagcgatctggatgacgtttccacccccagcgggagtgatctggagactacctctggatccgacttagagtccgacatagaatccgataaggaaaaatttaaggagaacggcaaaatgtttaaagataaggtgtctccactgcagaacttggcctcaattaataacaagaaagaatatagtaaccattcgatcttcagcccgtctttggaggaacaaactgccgtgagtggggctgtcaatgacagcattaaggccattgcctctatcgccgaaaaatactttggttcgactgggttggtgggcttgcaagataaaaaagttggcgctctaccatacccatccatgtttcccctcccctttttccccgctttttcgcaaagtatgtacccatttccagatagagacttacgcagtcttcccctgaaaatggaaccccagtctccgggagaggtgaaaaaactacagaagggcagctcagagtcgccttttgatttgactaccaaaagaaaggacgaaaaaccgttaacacccgttcccagtaagccccctgtgacccctgccacctcccaagatcagccattggacttatccatgggctcaagatctcgcgcttccggcactaaattgactgagcctcggaaaaatcacgtttttgggggaaaaaagggcagtaacgttgaatcaagacccgcttcagacgggtcgctgcagcacgcccgtcccacgcctttttttatggatccaatttatagggtcgagaaacggaagctaacagaccccctggaggccttgaaggaaaagtatctgcgcccttcacctggttttttgttccaccctcagatgagcgctatcgagaacatggcagagaaactcgagtcttttagtgcgctgaaaccagaagcatccgaactgctccagtccgtgccctccatgttcaatttccgggctccccctaatgctttgcctgaaaacctcctcaggaaggggaaggaacggtacacctgtcgctattgcggcaaaattttccctagatccgcaaacttgactcggcaccttcgcacacacactggcgagcagccataccgctgcaagtactgtgacagaagcttttccatatccagcaatctccagcgacatgttcggaatatccataataaagaaaaaccttttaagtgtcacctgtgtgaccggtgcttcgggcagcaaaccaatcttgatagacatttgaagaagcatgaaaacggtaatatgagtggtaccgcaacatcgtctccccactccgagcttgagtccactggggctatcctggatgataaagaggatgcatacttcacagagattcgtaacttcattggcaacagtaatcacgggtcgcaatcgcctcgcaatgtggaggagcgcatgaacggctcccattttaaggatgagaaggcactggtcacctcccaaaactcagacctgctcgacgacgaagaggtggaagacgaagtgcttttggatgaggaggatgaggataacgacatcaccggcaagaccggtaaagagcccgtgacttcgaatctgcatgaggggaatcctgaggatgactacgaggaaacaagcgcactggagatgagctgcaaaactagtcccgttagatacaaggaagaagagtataagagcgggctctcagccttagaccacattcgtcactttacagacagcctaaagatgaggaaaatggaagacaaccagtactctgaagctgaattatccagttttagtaccagtcatgtacccgaggaacttaagcagccactgcacagaaagtccaagtcccaggcctatgcaatgatgctatctctgtctgataaggaatctctccatagcacctcccatagctcatccaacgtttggcattccatggccagagctgccgctgagtcgagtgcaatccagagtatatctcatgtctag

SEQ ID NO: 267718 - DNA, 3693 bp, Artificial Sequence
  derived and/or modified sequence
atgagaagcaagggcagagccagaaagctggccaccaacaacgagtgcgtgtacggcaactaccccgagatccccctggaggagatgcccgacgccgacggcgtggccagcacccccagcctgaacatccaggagccctgcagccccgccaccagcagcgaggccttcacccccaaggagggcagcccctacaaggcccccatctacatccccgacgacatccccatccccgccgagttcgagctgagagagagcaacatgcccggcgccggcctgggcatctggaccaagagaaagatcgaggtgggcgagaagttcggcccctacgtgggcgagcagagaagcaacctgaaggaccccagctacggctgggagatcctggacgagttctacaacgtgaagttctgcatcgacgccagccagcccgacgtgggcagctggctgaagtacatcagattcgccggctgctacgaccagcacaacctggtggcctgccagatcaacgaccagatcttctacagagtggtggccgacatcgcccccggcgaggagctgctgctgttcatgaagagcgaggactacccccacgagaccatggcccccgacatccacgaggagagacagtacagatgcgaggactgcgaccagctgttcgagagcaaggccgagctggccgaccaccagaagttcccctgcagcaccccccacagcgccttcagcatggtggaggaggacttccagcagaagctggagagcgagaacgacctgcaggagatccacaccatccaggagtgcaaggagtgcgaccaggtgttccccgacctgcagagcctggagaagcacatgctgagccacaccgaggagagagagtacaagtgcgaccagtgccccaaggccttcaactggaagagcaacctgatcagacaccagatgagccacgacagcggcaagcactacgagtgcgagaactgcgccaaggtgttcaccgaccccagcaacctgcagagacacatcagaagccagcacgtgggcgccagagcccacgcctgccccgagtgcggcaagaccttcgccaccagcagcggcctgaagcagcacaagcacatccacagcagcgtgaagcccttcatctgcgaggtgtgccacaagagctacacccagttcagcaacctgtgcagacacaagagaatgcacgccgactgcagaacccagatcaagtgcaaggactgcggccagatgttcagcaccaccagcagcctgaacaagcacagaagattctgcgagggcaagaaccacttcgccgccggcggcttcttcggccagggcatcagcctgcccggcacccccgccatggacaagaccagcatggtgaacatgagccacgccaaccccggcctggccgactacttcggcgccaacagacaccccgccggcctgaccttccccaccgcccccggcttcagcttcagcttccccggcctgttccccagcggcctgtaccacagaccccccctgatccccgccagcagccccgtgaagggcctgagcagcaccgagcagaccaacaagagccagagccccctgatgacccacccccagatcctgcccgccacccaggacatcctgaaggccctgagcaagcaccccagcgtgggcgacaacaagcccgtggagctgcagcccgagagaagcagcgaggagagacccttcgagaagatcagcgaccagagcgagagcagcgacctggacgacgtgagcacccccagcggcagcgacctggagaccaccagcggcagcgacctggagagcgacatcgagagcgacaaggagaagttcaaggagaacggcaagatgttcaaggacaaggtgagccccctgcagaacctggccagcatcaacaacaagaaggagtacagcaaccacagcatcttcagccccagcctggaggagcagaccgccgtgagcggcgccgtgaacgacagcatcaaggccatcgccagcatcgccgagaagtacttcggcagcaccggcctggtgggcctgcaggacaagaaggtgggcgccctgccctaccccagcatgttccccctgcccttcttccccgccttcagccagagcatgtaccccttccccgacagagacctgagaagcctgcccctgaagatggagccccagagccccggcgaggtgaagaagctgcagaagggcagcagcgagagccccttcgacctgaccaccaagagaaaggacgagaagcccctgacccccgtgcccagcaagccccccgtgacccccgccaccagccaggaccagcccctggacctgagcatgggcagcagaagcagagccagcggcaccaagctgaccgagcccagaaagaaccacgtgttcggcggcaagaagggcagcaacgtggagagcagacccgccagcgacggcagcctgcagcacgccagacccacccccttcttcatggaccccatctacagagtggagaagagaaagctgaccgaccccctggaggccctgaaggagaagtacctgagacccagccccggcttcctgttccacccccagatgagcgccatcgagaacatggccgagaagctggagagcttcagcgccctgaagcccgaggccagcgagctgctgcagagcgtgcccagcatgttcaacttcagagccccccccaacgccctgcccgagaacctgctgagaaagggcaaggagagatacacctgcagatactgcggcaagatcttccccagaagcgccaacctgaccagacacctgagaacccacaccggcgagcagccctacagatgcaagtactgcgacagaagcttcagcatcagcagcaacctgcagagacacgtgagaaacatccacaacaaggagaagcccttcaagtgccacctgtgcgacagatgcttcggccagcagaccaacctggacagacacctgaagaagcacgagaacggcaacatgagcggcaccgccaccagcagcccccacagcgagctggagagcaccggcgccatcctggacgacaaggaggacgcctacttcaccgagatcagaaacttcatcggcaacagcaaccacggcagccagagccccagaaacgtggaggagagaatgaacggcagccacttcaaggacgagaaggccctggtgaccagccagaacagcgacctgctggacgacgaggaggtggaggacgaggtgctgctggacgaggaggacgaggacaacgacatcaccggcaagaccggcaaggagcccgtgaccagcaacctgcacgagggcaaccccgaggacgactacgaggagaccagcgccctggagatgagctgcaagaccagccccgtgagatacaaggaggaggagtacaagagcggcctgagcgccctggaccacatcagacacttcaccgacagcctgaagatgagaaagatggaggacaaccagtacagcgaggccgagctgagcagcttcagcaccagccacgtgcccgaggagctgaagcagcccctgcacagaaagagcaagagccaggcctacgccatgatgctgagcctgagcgacaaggagagcctgcacagcaccagccacagcagcagcaacgtgtggcacagcatggccagagccgccgccgagagcagcgccatccagagcatcagccacgtgtag

SEQ ID NO: 267719 - DNA, 1792 bp, Artificial Sequence
  derived and/or modified sequence
tttgctgtccaacatcgtgtgctgcttcgcgagaaagtcacattcggaccctttggctagattgtggggatttttttttttttccttttgctgttggttttttgaaagggcctttctctaaagtctacctaaacggtttttttttaagctatctttggaggttgacagcttttaaaaacacaggagtgtgttatatgaaatgactgaagatgtgtcgttactttattttattcgagatttccgacacgattaagacatttgggagacaaatgcagttctgctagcaaatcaaaagtgaataattcacccagggggcaaacgtttctggagaaagctaagcttttgtcttggggcaagaatattgagaggaagaatgttaatatgatggtgaaatctttgaataatcgtataacagattagtaaaaagacattctttggaaatgaacctttttaaaaattaattttgctgttgacagtggcaatgctaataatgttaacacggaataaaattacacctacaatttttatgtgcagtgtatgtaatacttaactccctgcccctgtgaaagggtatgcttgaaagctaaggggatggatgcttcttgactttgaaattaacaagttttccacgtctctctgcaaatatgaaatggaattagtattgcatttcactggctttattctatgtcctttattaaatatttctttggtgtgtcaggagaactgccttttctttttctttttttcttttttttcttttttttgccagtcaaggaaacaaacaacaaaagatcaaccagaaaccaaacagactgaacaaaccaacaaaacccagcaacaaactccaactttttactatttaaaaatgtgcattgctattatttatgtaccttctcaacatctgggatggggggaaatctcaagttgccatttgagttactcagcactgagagttgaagaaacatcttaaagtttgtaattttattgataacaaatttttagaatttgtcctcttaatagaaaggatgtttaagtgtacacttctgtcgttgttagtgtgaagaggcatccttgaaaaagaagagtttgatttctctctgtgtgtgtgtgtgtgtgtgtgtgtgtgtgtgtgtgtgtgtgtgtgtttaataatatccctatcttatgttcgatttttcttttttaaattttgggacgacttattgcccttcaatttcctcatggccaaaggcttattcatagggcttcttgactaaagcccttggagcactgggtttttcttgaagtatatgatcttagacgaattttacaatgtgaagttctgcatagatgccagtcaaccagatgttggaagctggctcaagtacattagattcgctggctgttatgatcagcacaaccttgttgcatgccagataaatgatcagatattctatagagtagttgcagacattgcgccgggagaggagcttctgctgttcatgaagagcgaagactatccccatgaaactatggcgccggatatccacgaagaacggcaatatcgctgcgaagactgtgaccagctctttgaatctaaggctgaactagcagatcaccaaaagtttccatgcagtactcctcactcagcattttcaatggttgaagaggactttcagcaaaaactcgaaagcgagaatgatctccaagagatacacacgatccaggagtgtaaggaatgtgaccaagtttttcctgatttgcaaagcctggagaaacacatgctgtcacatactgaagagagggaatacaa

SEQ ID NO: 267720 - DNA, 468 bp, Artificial Sequence
  derived and/or modified sequence
gtggtttgctagggtgctttgaggattcagagaagggaaagttcttcgttaaacattacacaggatatatgtgacgcagctagccttgcattaagaaaatttgatttgtgaagtaggatttggaaaagatttgtgaactggcttgagagtcacagctttccatttgtcaccagagggctggttttcaatatataaaacaggaaatcacacttcttttgataaaaaagaaaaagaaaaagatgtttgttaaggtgtttgtacaggtatcttagtgtatatcttgccctttgttaatatatatacatctctctctttcctgattccatccacctttattttgtctttaaagatattctatagagtagttgcagacattgcgccgggagaggagcttctgctgttcatgaagagcgaagactatccccatgaaactatggcgccggatatccacgaagaacggcaatatcg

SEQ ID NO: 267721 - DNA, 638 bp, Artificial Sequence
  derived and/or modified sequence
ttatctacgttgctaagccgggcgatttccttgttcctcctgcgaaacggtgcggtctggacacgtctccgggatcttagacgaattttacaatgtgaagttctgcatagatgccagtcaaccagatgttggaagctggctcaagtacattagattcgctggctgttatgatcagcacaaccttgttgcatgccagataaatgatcagatattctatagagtagttgcagacattgcgccgggagaggagcttctgctgttcatgaagagcgaagactatccccatgaaactatggcgccggatatccacgaagaacggcaatatcgctgcgaagactgtgaccagctctttgaatctaaggctgaactagcagatcaccaaaagtttccatgcagtactcctcactcagcattttcaatggttgaagaggactttcagcaaaaactcgaaagcgagaatgatctccaagagatacacacgatccaggagtgtaaggaatgtgaccaagtttttcctgatttgcaaagcctggagaaacacatgctgtcacatactgaagagagggaatacaagtgtgatcagtgtcccaaggcatttaactggaagtccaatttaattcgccaccagatgtcacatg

SEQ ID NO: 267722 - DNA, 1533 bp, Artificial Sequence
  derived and/or modified sequence
tttgctgtccaacatcgtgtgctgcttcgcgagaaagtcacattcggaccctttggctagattgtggggatttttttttttttccttttgctgttggttttttgaaagggcctttctctaaagtctacctaaacggtttttttttaagctatctttggaggttgacagcttttaaaaacacaggagtgtgttatatgaaatgactgaagatgtgtcgttactttattttattcgagatttccgacacgattaagacatttgggagacaaatgcagttctgctagcaaatcaaaagtgaataattcacccagggggcaaacgtttctggagaaagctaagcttttgtcttggggcaagaatattgagaggaagaatgttaatatgatggtgaaatctttgaataatcgtataacagattagtaaaaagacattctttggaaatgaacctttttaaaaattaattttgctgttgacagtggcaatgctaataatgttaacacggaataaaattacacctacaatttttatgtgcagtgtatgtaatacttaactccctgcccctgtgaaagggtatgcttgaaagctaaggggatggatgcttcttgactttgaaattaacaagttttccacgtctctctgcaaatatgaaatggaattagtattgcatttcactggctttattctatgtcctttattaaatatttctttggtgtgtcaggagaactgccttttctttttctttttttcttttttttcttttttttgccagtcaaggaaacaaacaacaaaagatcaaccagaaaccaaacagactgaacaaaccaacaaaacccagcaacaaactccaactttttactatttaaaaatgtgcattgctattatttatgtaccttctcaacatctgggatggggggaaatctcaagttgccatttgagttactcagcactgagagttgaagaaacatcttaaagcttattcatagggcttcttgactaaagcccttggagcactgggtttttcttgaagtatatgatcttagacgaattttacaatgtgaagttctgcatagatgccagtcaaccagatgttggaagctggctcaagtacattagattcgctggctgttatgatcagcacaaccttgttgcatgccagataaatgatcagatattctatagagtagttgcagacattgcgccgggagaggagcttctgctgttcatgaagagcgaagactatccccatgaaactatggcgccggatatccacgaagaacggcaatatcgctgcgaagactgtgaccagctctttgaatctaaggctgaactagcagatcaccaaaagtttccatgcagtactcctcactcagcattttcaatggttgaagaggactttcagcaaaaactcgaaagcgagaatgatctccaagagatacacacgatccaggagtgtaaggaatgtgaccaagtttttcctgatttgcaaagcctggagaaacacatgctgtcacatactgaagagagggaatacaa

SEQ ID NO: 267723 - DNA, 1097 bp, Artificial Sequence
  derived and/or modified sequence
tttgctgtccaacatcgtgtgctgcttcgcgagaaagtcacattcggaccctttggctagattgtggggatttttttttttttccttttgctgttggttttttgaaagggcctttctctaaagtctacctaaacggtttttttttaagctatctttggaggttgacagcttttaaaaacacaggagtgtgttatatgaaatgactgaagatgtgtcgttactttattttattcgagatttccgacacgattaagacatttgggagacaaatgcagttctgctagcaaatcaaaagtgaataattcacccagggggcaaacgtttctggagaaagctaagcttttgtcttggggcaagaatattgagaggaagaatgttaatatgatggtgaaatctttgaataatcgtataacagattagtaaaaagacattctttggaaatgaacctttttaaaaattaattttgctgttgacagtggcaatgctaataatgttaacacggaataaaattacacctacaatttttatgtgcagtgcttattcatagggcttcttgactaaagcccttggagcactgggtttttcttgaagtatatgatcttagacgaattttacaatgtgaagttctgcatagatgccagtcaaccagatgttggaagctggctcaagtacattagattcgctggctgttatgatcagcacaaccttgttgcatgccagataaatgatcagatattctatagagtagttgcagacattgcgccgggagaggagcttctgctgttcatgaagagcgaagactatccccatgaaactatggcgccggatatccacgaagaacggcaatatcgctgcgaagactgtgaccagctctttgaatctaaggctgaactagcagatcaccaaaagtttccatgcagtactcctcactcagcattttcaatggttgaagaggactttcagcaaaaactcgaaagcgagaatgatctccaagagatacacacgatccaggagtgtaaggaatgtgaccaagtttttcctgatttgcaaagcctggagaaacacatgctgtcacatactgaagagagggaatacaa

SEQ ID NO: 267724 - DNA, 312 bp, Artificial Sequence
  derived and/or modified sequence
atgaagagcgaggattatcctcatgagacgatggcccccgacattcatgaggagcgacagtacaggtgtgaggactgtgatcaactctttgagtctaaggccgagcttgccgaccatcagaagtttccatgttctacgcctcattccgccttctcgatggtggaagaagatttccagcagaagctcgaatcagagaacgacctccaagaaatacacactattcaagagtgcaaggagtgcgaccaggttttcccagatctccaatccctggagaagcatatgctgtcacacactgaagagcgtgagtattag

SEQ ID NO: 267725 - DNA, 207 bp, Artificial Sequence
  derived and/or modified sequence
atgaagagtgaagattatccacacgagacaatggcacctgacatccatgaagaacgccagtataggtgcgaggactgcgaccaactctttgagtcaaaggctgagttggctgaccatcagaaattcccctgttccactcctcactcggctttcagtatggtggaggaggacttccagcagaaactcgagtccgagaatgatctctag

SEQ ID NO: 267726 - DNA, 378 bp, Artificial Sequence
  derived and/or modified sequence
atgaagagcgaagattaccctcacgagacaatggcaccagatattcacgaggagcgccagtatcgttgcgaggactgcgatcagctcttcgaatccaaggctgaattggctgatcaccaaaagtttccctgcagtactccccacagcgcctttagcatggtggaagaggactttcagcaaaagctggaatcggaaaacgatctccaggaaatccataccattcaggagtgtaaggaatgtgatcaagtattccccgatctgcagagtctagagaagcatatgttgtctcacacggaagagcgtgagtacaaatgtgaccagtgcccaaaagcctttaactggaaatccaaccttattcggcatcagatgagccattag

SEQ ID NO: 267727 - DNA, 312 bp, Artificial Sequence
  derived and/or modified sequence
atgaaatcagaggattatccccacgaaacaatggcccctgatatccacgaggagcggcagtacagatgtgaggattgcgatcaattattcgagtccaaagccgagctcgccgatcaccagaagtttccttgctccacaccccatagcgccttttccatggtcgaagaagacttccaacagaagttggagagtgagaacgatctccaggaaatccacacaattcaggaatgcaaagagtgtgaccaggtctttcccgatctgcaatctctggagaagcacatgctgagtcatactgaagagagggaatattag

SEQ ID NO: 267728 - DNA, 312 bp, Artificial Sequence
  derived and/or modified sequence
atgaagtccgaagattatccgcacgaaacaatggcccccgacattcacgaggagaggcaatatcggtgtgaggactgcgatcagcttttcgagtccaaggcagaacttgccgaccaccagaaattcccctgcagcaccccacattcagccttctcaatggtggaagaggactttcagcagaagctggagagcgagaacgatctccaggagatccatacaatccaagagtgtaaagaatgtgatcaagtcttccccgacctacaaagtctcgagaaacatatgctttcacatacagaggagcgcgagtattag

SEQ ID NO: 267729 - DNA, 312 bp, Artificial Sequence
  derived and/or modified sequence
atgaagtctgaggactacccccatgagaccatggccccagacatccacgaggagcggcagtaccgctgtgaggactgtgaccagctgtttgagagcaaggccgagctggccgaccaccagaagttcccctgcagcaccccccacagcgccttctccatggtggaggaggacttccagcagaagctggagagtgaaaatgacctgcaggagatccacaccatccaggagtgcaaggaatgtgaccaggtgtttcctgacctgcagagcctggagaagcacatgctgagccacacagaggagcgggagtactag

SEQ ID NO: 267730 - DNA, 207 bp, Artificial Sequence
  derived and/or modified sequence
atgaagtctgaggactacccccatgagaccatggccccagacatccacgaggagcggcagtaccgctgtgaggactgtgaccagctgtttgagagcaaggccgagctggccgaccaccagaagttcccctgcagcaccccccacagcgccttctccatggtggaggaggacttccagcagaagctggagagtgaaaatgacctgtag

SEQ ID NO: 267731 - DNA, 378 bp, Artificial Sequence
  derived and/or modified sequence
atgaagtctgaggactacccccatgagaccatggccccagacatccacgaggagcggcagtaccgctgtgaggactgtgaccagctgtttgagagcaaggccgagctggccgaccaccagaagttcccctgcagcaccccccacagcgccttctccatggtggaggaggacttccagcagaagctggagagtgaaaatgacctgcaggagatccacaccatccaggagtgcaaggaatgtgaccaggtgtttcctgacctgcagagcctggagaagcacatgctgagccacacagaggagcgggagtacaagtgtgaccagtgccccaaggccttcaactggaagagcaacctgatccgccaccagatgagccactag

SEQ ID NO: 267732 - DNA, 312 bp, Artificial Sequence
  derived and/or modified sequence
atgaagagcgaggactacccccacgagaccatggcccccgacatccatgaggagcggcagtacaggtgcgaagattgtgatcagttgtttgagagcaaggcagagctggcggatcaccagaagtttccctgcagcacaccccattctgccttcagcatggtggaggaagacttccagcagaagctcgagagtgagaacgatctccaggagattcataccatccaagagtgtaaggaatgtgaccaggtgttcccagatctccaatcactagagaaacatatgctgtctcacacagaagagcgggaatactag

SEQ ID NO: 267733 - DNA, 207 bp, Artificial Sequence
  derived and/or modified sequence
atgaagagcgaggactacccccacgagaccatggcccccgacatccacgaggagcgccagtataggtgtgaagactgcgatcagttatttgagtccaaggccgagctggctgatcaccagaagttcccctgtagcacgccacactccgctttttccatggtggaggaggatttccagcagaagcttgaatcggaaaatgacctgtag

SEQ ID NO: 267734 - DNA, 378 bp, Artificial Sequence
  derived and/or modified sequence
atgaagagcgaggactacccccacgagaccatggcccccgacatccacgaagaaagacagtaccgctgcgaagactgtgaccagttgttcgagagcaaagctgagttggctgatcaccagaagttcccttgctccaccccccatagcgcctttagcatggtagaagaagatttccagcaaaagcttgagagtgagaacgacctacaggaaatccacactattcaggagtgtaaagaatgtgaccaggtgtttcccgatctgcagtcgctggagaaacatatgctgagccacacagaagaaagggagtataagtgcgaccagtgccctaaggcttttaattggaaaagtaatcttatcagacaccagatgtcacattag

SEQ ID NO: 267735 - DNA, 312 bp, Artificial Sequence
  derived and/or modified sequence
atgaagagcgaggactacccccacgagaccatggcccccgacatccatgaggaacgccaatacagatgcgaggactgtgatcagttatttgagtccaaggcagagctcgccgaccaccagaaatttccttgttctacgccacattcagccttctccatggtggaggaagactttcagcagaaactggaatctgagaatgacctccaagagatacatacaatccaggaatgcaaagaatgtgatcaagttttccctgacctgcaaagtttggaaaaacacatgctcagccacacagaggagagggaatactag

SEQ ID NO: 267736 - DNA, 312 bp, Artificial Sequence
  derived and/or modified sequence
atgaagagcgaggactacccccacgagaccatggcccccgacatccatgaagaaagacagtatcggtgtgaggactgtgaccagctgttcgaatctaaggccgaactcgccgaccatcagaagtttccttgtagcacaccccacagcgcatttagtatggtggaggaggacttccagcagaaattagaaagcgagaatgatttacaggaaattcacaccattcaggagtgcaaagaatgtgaccaggtgttccctgaccttcagtcactcgaaaaacatatgctgtcccacacggaggaacgagagtattag

SEQ ID NO: 267737 - DNA, 312 bp, Artificial Sequence
  derived and/or modified sequence
atgaaaagtgaggattatccacatgagactatggccccagacatccacgaggagcggcaataccgctgcgaggattgtgatcaacttttcgagtcaaaggccgagctagcagatcaccagaagtttccgtgctccacacctcatagcgctttttcaatggtggaggaagacttccagcagaagcttgaatccgagaacgatctccaggaaatccacacaattcaggagtgtaaagagtgcgatcaggtgttcccagacctgcaaagtctagaaaagcatatgctgtcccatacggaagagagagagtactag

SEQ ID NO: 267738 - DNA, 207 bp, Artificial Sequence
  derived and/or modified sequence
atgaagagtgaagattatccccatgaaaccatggcgcctgatatccacgaagaaaggcagtatagatgtgaagactgcgaccagttgttcgagagtaaggcggaactggccgaccatcagaagtttccgtgttctactccgcatagtgcctttagtatggtagaagaggacttccagcagaaattggaaagcgagaacgacttgtag

SEQ ID NO: 267739 - DNA, 378 bp, Artificial Sequence
  derived and/or modified sequence
atgaagtcagaagactatcctcatgagactatggcccctgatatacatgaagagcgccagtatcgatgtgaggactgcgaccaactcttcgagtccaaagctgaattggctgatcaccagaaatttccctgttctacacctcactcagcttttagcatggtagaggaagactttcaacagaagcttgaaagcgaaaacgaccttcaggagattcacactattcaagagtgtaaagaatgcgatcaggtcttccccgatttgcagtcactggagaaacatatgctctcacatactgaagagagagagtataagtgcgatcagtgtccaaaggccttcaactggaagtctaacctgatcagacaccagatgtcacactag

SEQ ID NO: 267740 - DNA, 312 bp, Artificial Sequence
  derived and/or modified sequence
atgaagtctgaagattaccctcatgagacgatggcaccagatattcatgaggagcgacagtatagatgcgaggactgcgaccagttgttcgagtctaaggcagagctagcagaccaccagaagttcccatgttcaacgccacacagtgctttcagcatggtcgaggaggacttccaacagaagctggaaagcgagaacgacttgcaggagattcatacgattcaggagtgtaaagaatgtgatcaagtattccccgacctgcagtctctggagaaacatatgcttagccacaccgaggagcgcgaatactag

SEQ ID NO: 267741 - DNA, 312 bp, Artificial Sequence
  derived and/or modified sequence
atgaaaagtgaggattaccctcatgagacaatggctcctgacattcatgaggaacgacagtaccggtgcgaagattgcgaccagttatttgaaagcaaagccgagcttgcagaccaccaaaagtttccctgctccactccgcatagcgcattctcaatggtcgaggaggatttccagcagaagcttgagagcgaaaacgatcttcaggaaattcacaccatccaggaatgtaaggaatgcgaccaggtattccccgacctgcagtcccttgagaaacacatgctttctcacacagaggaacgcgaatattag

SEQ ID NO: 267742 - DNA, 312 bp, Artificial Sequence
  derived and/or modified sequence
atgaagagcgaggactacccccacgagaccatggcccccgacatccacgaggagagacagtacagatgcgaggactgcgaccagctgttcgagagcaaggccgagctggccgaccaccagaagttcccctgcagcaccccccacagcgccttcagcatggtggaggaggacttccagcagaagctggagagcgagaacgacctgcaggagatccacaccatccaggagtgcaaggagtgcgaccaggtgttccccgacctgcagagcctggagaagcacatgctgagccacaccgaggagagagagtactag

SEQ ID NO: 267743 - DNA, 207 bp, Artificial Sequence
  derived and/or modified sequence
atgaagagcgaggactacccccacgagaccatggcccccgacatccacgaggagagacagtacagatgcgaggactgcgaccagctgttcgagagcaaggccgagctggccgaccaccagaagttcccctgcagcaccccccacagcgccttcagcatggtggaggaggacttccagcagaagctggagagcgagaacgacctgtag

SEQ ID NO: 267744 - DNA, 378 bp, Artificial Sequence
  derived and/or modified sequence
atgaagagcgaggactacccccacgagaccatggcccccgacatccacgaggagagacagtacagatgcgaggactgcgaccagctgttcgagagcaaggccgagctggccgaccaccagaagttcccctgcagcaccccccacagcgccttcagcatggtggaggaggacttccagcagaagctggagagcgagaacgacctgcaggagatccacaccatccaggagtgcaaggagtgcgaccaggtgttccccgacctgcagagcctggagaagcacatgctgagccacaccgaggagagagagtacaagtgcgaccagtgccccaaggccttcaactggaagagcaacctgatcagacaccagatgagccactag

SEQ ID NO: 267745 - DNA, 72 bp, Artificial Sequence
  derived and/or modified sequence
atggccacgtccgctgttcctagcgacaatcttccaacctacaaactcgttgtggtgggcgacgggggatag

SEQ ID NO: 267746 - DNA, 72 bp, Artificial Sequence
  derived and/or modified sequence
atggccaccagcgctgtgcccagcgacaacctgcccacctacaagctggtggtggtgggagatggcggctag

SEQ ID NO: 267747 - DNA, 271 bp, Artificial Sequence
  derived and/or modified sequence
aggtgtggccgccctccgggctcggccgcgctctccgcttgcggggtgcgccctgggaccggctgtgcgtggcgttttgcccccatcgcgggctcccgcgtaacggtgtgcgttcgtgaaatcggccacgaccaagaccccagtggggagggcctgcgcgccgctcagagagaccctttcatggtctgacctacgagaaacatggcaaccagcgccgtccccagtgacaacctccccacatacaagctggtggtggtgggggatgggggtg

SEQ ID NO: 267748 - DNA, 72 bp, Artificial Sequence
  derived and/or modified sequence
atggccaccagcgccgtgcccagcgacaacctgcccacctacaagctggttgtggtgggggacgggggatag

SEQ ID NO: 267749 - DNA, 72 bp, Artificial Sequence
  derived and/or modified sequence
atggccacttccgccgtgccatccgataatttgcctacatacaagttagtggtagtgggggacggaggttag

SEQ ID NO: 267750 - DNA, 72 bp, Artificial Sequence
  derived and/or modified sequence
atggccaccagcgccgtgcccagcgacaacctgcccacctacaagctggtggtggtgggcgacggcggctag

SEQ ID NO: 267751 - protein, 13 aa, Artificial Sequence
  derived and/or modified sequence
MALPRCTWPNYVW

SEQ ID NO: 267752 - DNA, 771 bp, Artificial Sequence
  derived and/or modified sequence
cggaaattctgcatattgaagcaggtggctcctggtacgaaatctctggatacatttggcttgccaagttttgctcttcgctgtcccctcccgtttacagaagcatctgtggtgcttttcattttggatttacatgcaggaaacgtatatatgtttatataccgaccgcataatatataaatacatatacgcgtgcccaagggcctggttttcgtctctcctccccacgaaacggaatgttttggagccgatggataacaagaacactattaacattcttttgagcctgttttttaaaagggggagggagcgtgaagaattgtttaacatttggccatcgtttggctgcacactaagcaccacgaagtatttatggttgcagatcaggtgcaaacggggcttagagagaaaggatatagacctgcagctaactggatttgatttataagagagaaatctgcagtcaatgcccactcttgccacactgctaatatggaaaacagaatgttcaataggatatggtctgataaatagtgatgattgaagatgctgctccaatacatgtgaaatcaatgggagatatctgctgtctgaagatctttcagagcttttctcgacaagctcccctgtaagaaatcggaggtatattctaccattatacagtctttctcaagtggatataaatacgtttgcctcactgtaaccagacaactagacaactaatgtgggaccatggcactgcccagatgcacgtggccaaattatgtttgg

SEQ ID NO: 267753 - protein, 1014 aa, Artificial Sequence
  derived and/or modified sequence
MADLEVYKNLSPEKVERCMSVMQSGTQMIKLKRGTKGLVRLFYLDEHRTRLRWRPSRKSEKAKILIDSIYKVTEGRQSEIFHRQAEGNFDPSCCFTIYHGNHMESLDLITSNPEEARTWITGLKYLMAGISDEDSLAKRQRTHDQWVKQTFEEADKNGDGLLNIEEIHQLMHKLNVNLPRRKVRQMFQEADTDENQGTLTFEEFCVFYKMMSLRRDLYLLLLSYSDKKDHLTVEELAQFLKVEQKMNNVTTDYCLDIIKKFEVSEENKVKNVLGIEGFTNFMRSPACDIFNPLHHEVYQDMDQPLCNYYIASSHNTYLTGDQLLSQSKVDMYARVLQEGCRCVEVDCWDGPDGEPVVHHGYTLTSKILFRDVVETINKHAFVKNEFPVILSIENHCSIQQQRKIAQYLKGIFGDKLDLSSVDTGECKQLPSPQSLKGKILVKGKKLPYHLGDDAEEGEVSDEDSADEIEDECKFKLHYSNGTTEHQVESFIRKKLESLLKESQIRDKEDPDSFTVRALLKATHEGLNAHLKQSPDVKESGKKSHGRSLMTNFGKHKKTTKSRSKSYSTDDEEDTQQSTGKEGGQLYRLGRRRKTMKLCRELSDLVVYTNSVAAQDIVDDGTTGNVLSFSETRAHQVVQQKSEQFMIYNQKQLTRIYPSAYRIDSSNFNPLPYWNAGCQLVALNYQSEGRMMQLNRAKFKANGNCGYVLKPQQMCKGTFNPFSGDPLPANPKKQLILKVISGQQLPKPPDSMFGDRGEIIDPFVEVEIIGLPVDCCKDQTRVVDDNGFNPVWEETLTFTVHMPEIALVRFLVWDHDPIGRDFVGQRTVTFSSLVPGYRHVYLEGLTEASIFVHITINEIYGKNRQLQGLKGLFNKNPRHSSSENNSHYVRKRSIGDRILRRTASAPAKGRKKSKMGFQEMVEIKDSVSEATRDQDGVLRRTTRSLQARPVSMPVDRNLLGALSLPVSETAKDIEGKENSLDSSFCRPTEQAKAEMCKVPFPRQLECVMKMEISET

SEQ ID NO: 267754 - DNA, 3045 bp, Artificial Sequence
  derived and/or modified sequence
atggcagatctcgaagtgtataaaaatctcagcccggagaaagtagaacgctgcatgagcgtgatgcaaagtggaacccaaatgatcaagctcaaacgagggaccaaggggctggtccgcctcttctacttggacgaacatcgcacccgcctacgttggaggccctcaaggaaaagcgaaaaggccaagatacttattgatagtatctataaggtaactgaggggcggcagtctgaaatcttccatcgtcaagctgaaggaaacttcgatccatcttgctgttttacaatttatcatggtaatcacatggaaagtctggatctgataactagtaatcctgaggaggccaggacatggattacagggctgaaatatctaatggcgggcatctcggacgaggacagcctcgccaaacgccagcgaacacacgaccagtgggtcaaacagacattcgaggaggcagataagaacggggacggtctcctgaacattgaagagatacaccagctgatgcacaaactgaatgtgaacctgccgcgtcgtaaggttagacagatgttccaggaagctgacacggatgagaatcaggggacactgacatttgaggagttctgtgtgttttataagatgatgtcgttacggcgggacctgtacctgcttctgctgtcttattccgataaaaaggaccacctcacggtagaggagttggctcagttccttaaggttgaacagaagatgaacaatgtaacgaccgattactgcctcgatatcattaaaaagttcgaagtgagcgaagaaaataaggttaaaaacgtgcttggcatcgagggcttcaccaatttcatgagatccccagcctgtgatattttcaaccctctgcaccatgaagtctaccaagatatggaccagccactttgcaattattatatcgcaagctcccataatacctatttaacaggggatcagttgctgagccagtcaaaggtcgatatgtacgcgcgcgtcttgcaggagggctgccgctgcgttgaggttgactgctgggatggacctgatggcgagcccgtagtgcaccacggttatacgctgaccagtaaaatcctctttcgggacgttgtggagaccattaacaagcatgccttcgtgaagaacgagttccctgttatcttgtctatagaaaatcactgctcaatacagcagcagagaaagatcgcgcagtaccttaaagggatctttggagataagctggatctctcatcagtcgacacaggagagtgtaaacaattgcccagcccacagtctctaaagggaaagattctggttaaaggaaagaaattaccgtaccacctcggggacgacgcggaagagggtgaggtatcagatgaggattcagcagatgagatagaggacgaatgtaaatttaaactccactacagtaatggtaccaccgaacaccaggtcgagtcgtttatccggaagaagctggagagcctcctgaaggaaagccagatacgggataaagaggatccagacagctttactgtgagggcactgctcaaagcaacccatgaaggcctcaatgctcatctgaaacagtctccagatgtgaaagaatctggcaagaaatctcatggccgtagcctgatgacaaacttcggaaagcataagaaaactaccaaaagcagaagtaagtcctactccacagacgacgaggaggacacgcagcagagcaccgggaaggagggggggcagctatatcggttgggccgcagaagaaagacaatgaaactctgcagggagctctccgacctggtagtgtacacaaactctgtcgcggcacaggatatcgtggacgacgggacaaccggtaatgtcctctctttcagtgaaacaagggcgcatcaggttgtccaacagaagagcgagcagtttatgatttacaatcagaaacagttgacgcgtatttacccctccgcttataggatcgattcctcaaacttcaacccactgccctactggaacgccggctgccaactagttgccctgaattatcagagtgagggtcgtatgatgcaactcaatcgcgccaagttcaaggctaatggtaactgcggctatgtcctgaaaccccaacagatgtgcaaggggacctttaatccgttcagtggtgaccccctgcccgctaaccctaagaagcagctgatccttaaggtcattagcggacagcaactccctaaaccacctgattctatgtttggcgacaggggtgagatcattgatccttttgtggaagtcgagatcataggattgcctgtagactgctgcaaagaccaaactcgtgtggtggacgacaatggcttcaacccggtgtgggaggagactctcacgtttaccgtacacatgcccgaaatcgccttagtgcgctttttggtttgggaccatgacccaattggcagagatttcgtaggccaacggacagtcaccttctctagcctggttcctggctaccgtcatgtctatctggaaggtctgaccgaggcatccatctttgtccacatcacgattaatgaaatatatggtaaaaatcgacagttacagggactaaaaggattgtttaacaaaaatcctagacactctagttcagagaataacagtcattatgtcagaaaaaggtcaatcggggaccgtattttacgccggactgcctctgcccctgctaagggtagaaagaaaagcaaaatggggttccaggaaatggttgaaattaaggattcagtaagtgaggcaacacgggaccaggacggcgtgctgagacggacgacccgatcattacaggcacggcctgtgtcgatgccagttgatcgaaacttgctgggggcacttagcctgccagtgagcgagactgcaaaagacatcgaggggaaggaaaattcccttgatagtagcttttgccggccaacagagcaggccaaagcggaaatgtgtaaggtgccttttcctcggcaattagagtgcgtgatgaagatggaaatctccgagacatag

SEQ ID NO: 267755 - DNA, 3045 bp, Artificial Sequence
  derived and/or modified sequence
atggctgacctggaggtgtacaagaacctgagccctgagaaggtggagcgctgcatgtctgtgatgcagagcggcacccagatgatcaagctgaagaggggcaccaagggcctggtgcggctcttctacctggatgagcacaggacccggctgcgctggaggcccagcaggaagtctgagaaggccaagatcctgattgacagcatctacaaggtgacagagggccggcagagcgagatcttccaccggcaggccgagggcaactttgaccccagctgctgcttcaccatctaccacggcaaccacatggagagcctggacctgatcaccagcaaccctgaggaggcccggacctggatcaccggcctgaagtacctgatggccggcatcagtgatgaggacagcctggccaagaggcagaggacccatgaccagtgggtgaagcagacctttgaggaggccgacaagaatggagatggcctgctgaacatcgaggagatccaccagctgatgcacaagctgaatgtgaacctgcccaggaggaaggtgcggcagatgttccaggaggccgacacagatgagaaccagggcaccctgacctttgaggagttctgtgtgttctacaagatgatgagcctgcggcgggacctgtacctgctgctgctgagctacagcgacaagaaggaccacctgactgtggaggagctggcccagttcctgaaggtggagcagaagatgaacaacgtgaccacagactactgcctggacatcatcaagaagtttgaggtgtctgaggagaacaaggtgaagaatgtgctgggcatcgagggcttcaccaacttcatgaggagccctgcctgtgacatcttcaaccccctgcaccacgaggtgtaccaggacatggaccagcccctgtgcaactactacatcgccagcagccacaacacctacctgactggagaccagctgctgagccagagcaaggtggacatgtatgcccgggtgctgcaggagggctgccgctgtgtggaggtggactgctgggatggcccagatggagagcctgtggtgcaccacggctacaccctgaccagcaagatcctcttcagagatgtggtggagaccatcaacaagcacgcctttgtgaagaatgagttccctgtgatcctgagcattgagaaccactgcagcatccagcagcagaggaagatcgcccagtacctgaagggcatctttggagacaagctggacctgagctctgtggacacaggagagtgcaagcagctgcccagcccccagagcctgaagggcaagatcctggtgaagggcaagaagctgccctaccacctgggagatgatgctgaggagggggaggtgtctgatgaggacagcgcagatgaaattgaagatgagtgcaagttcaagctgcactacagcaatggcaccacagagcaccaggtggagagcttcatcaggaagaagctggagagcctgctgaaggagagccagatccgggacaaggaggaccctgacagcttcaccgtgcgggccctgctgaaggccacccatgagggcctgaatgcccacctgaagcagagcccagatgtgaaggagagcggcaagaagagccacggccgcagcctgatgaccaactttgggaagcacaagaagaccaccaagagccgcagcaagagctacagcacagatgatgaggaggacacccagcagagcacaggcaaggagggcggccagctgtaccgcctgggcagaagaaggaagaccatgaagctgtgccgggagctgagtgacctggtggtgtacaccaacagcgtggccgcccaggacatcgtggatgatggcaccactggaaatgtgctgtccttcagcgagacccgggcccaccaggtggtgcagcagaagtctgagcagttcatgatctacaaccagaagcagctgacccgcatctaccccagcgcctacagaattgacagcagcaacttcaaccccctgccctactggaatgccggctgccagctggtggccctgaactaccagagcgagggccgcatgatgcagctgaacagagccaagttcaaggccaatggaaactgtggctacgtgctgaagccccagcagatgtgcaagggcaccttcaaccccttcagcggggaccccctgcctgccaaccccaagaagcagctgatcctgaaggtgatcagcggccagcagctgcccaagcccccagacagcatgtttggagacagaggagagatcatcgacccctttgtggaggtggagatcatcggcctgcctgtggactgctgcaaggaccagaccagggtggtggatgacaatggcttcaaccctgtgtgggaggagaccctgaccttcaccgtgcacatgcctgagatcgccctggtgcgcttcctggtgtgggaccatgaccccatcggccgggactttgtgggccagaggacagtgaccttcagcagcctggtgcccggctaccgccacgtgtacctggagggcctgacagaggccagcatctttgtgcacatcaccatcaatgagatctacggcaagaaccggcagctgcagggcctgaagggcctcttcaacaagaaccccaggcacagcagcagcgagaacaacagccactacgtgaggaagaggagcattggagaccgcatcctgcggaggacagccagcgccccagccaagggcaggaagaagagcaagatgggcttccaggagatggtggagatcaaggacagcgtgtctgaggccacccgggaccaggatggagtgctgcggaggaccaccaggagcctgcaggcccggcctgtgtccatgcctgtggacaggaacctgctgggcgccctgagcctgcctgtgtctgaaacagccaaggacatcgagggcaaggagaacagcctggacagcagcttctgccggcccacagagcaggccaaggccgagatgtgcaaggtgcccttcccccggcagctggagtgtgtgatgaagatggagatcagcgagacctag

SEQ ID NO: 267756 - DNA, 3045 bp, Artificial Sequence
  derived and/or modified sequence
atggccgacctggaggtgtacaagaacctgagccccgagaaggtggagcgctgcatgtccgtgatgcagtctggcactcagatgatcaagctgaagagaggaaccaagggcttggtgcggcttttttatcttgacgaacatcgaacaagattgagatggcgtccttctaggaaaagcgagaaggcaaagattctgatcgatagcatttataaggttactgagggcaggcaaagcgagatcttccatcgacaagctgaaggcaatttcgatcccagttgctgcttcactatctatcacggtaaccacatggaatctttagatctcatcacatcaaatcctgaagaagctaggacctggattaccggcctgaagtaccttatggccggcatcagcgacgaggactctttggccaagagacagaggactcacgatcagtgggtcaagcagacattcgaagaagccgataagaatggagacgggctgctgaatattgaagagattcatcaactgatgcataaactgaacgtgaatttgcctcgaagaaaagtcagacaaatgtttcaggaggctgacacagatgagaaccagggcacgttgacatttgaagagttctgcgtcttttacaagatgatgtcactgcggcgagacctgtatcttttactcctatcctattccgataagaaggatcatcttactgtagaggaattggctcagttcctgaaagtagagcagaagatgaacaacgttaccacagattattgcctcgacattattaagaaattcgaggtcagcgaggaaaataaagtgaagaacgtgctcggaatcgaagggtttacaaatttcatgcggtcacccgcctgtgatatatttaatcccctccaccatgaggtctaccaggatatggatcagcctctttgtaactattatatcgcaagctcacataatacctatttaaccggggaccagttgctctctcaaagcaaggttgatatgtacgctcgggtgttgcaggagggctgccggtgcgtggaggtcgattgttgggacggaccagacggtgagcccgtggtgcaccatggctacaccctgaccagtaagattctctttcgagatgtagtagaaactatcaataagcacgcctttgtgaaaaatgagtttcccgttatcctaagtatcgagaatcactgttctatccagcagcaacgaaagattgcacagtaccttaaaggaatctttggggacaaactggaccttagctccgtggataccggcgaatgcaagcagctgccaagcccccagtctctgaaggggaaaatcctcgtgaaggggaagaaactgccatatcacctcggagacgacgctgaggagggcgaagttagcgatgaagactctgctgatgagattgaagacgaatgcaaattcaaactgcactactccaacgggactaccgaacaccaggtagagagctttatcagaaaaaaattagagagcctgctgaaggagtctcaaatcagggataaggaggatcccgacagctttaccgtcagagctctgttgaaggctactcatgaggggttgaatgcgcaccttaagcaaagcccggacgttaaagaaagcggcaagaagagccacggacgctctctgatgaccaacttcggtaaacataagaagacaacgaaaagccgaagcaaaagctattcaacagatgatgaagaagacacccagcaatccaccgggaaggaggggggccagctgtatcggcttgggaggcggcggaaaacgatgaagctttgtagggagcttagtgatctggtggtgtacaccaacagcgtggccgcacaggatattgtcgatgacggtactaccgggaacgtcttgtcattcagcgagactagagcgcaccaggttgtgcagcaaaaaagcgagcaatttatgatctataatcagaagcagctgactaggatttacccgtcagcctatcggattgacagttccaactttaatcccctcccgtattggaatgccggctgccagttggtggccctgaactaccagtccgagggtcgcatgatgcagctgaacagggcgaagttcaaagcaaacggtaactgtggttatgtgctcaaaccacagcagatgtgtaagggtacctttaatccattttcgggcgaccctctgccagccaatcctaagaagcagctgattctgaaagtgatctcaggacagcagttgccgaaacccccagactccatgtttggggatagaggggagattatcgatccctttgtggaggtggagataattggacttcccgtggattgctgcaaagatcagactcgagtcgttgacgacaatggattcaaccccgtttgggaggaaactctcacttttactgtccacatgcctgagattgctctggtgaggtttctggtgtgggatcacgaccctatagggagggacttcgttgggcagaggaccgttacattctccagtcttgtgcctggctaccgccatgtgtacctggagggcctcactgaggccagcattttcgtgcacatcactattaacgaaatttatggcaagaatcgacagctgcagggcctgaagggcctgttcaataagaatccccgacactccagctcagagaacaattctcactacgtgcgtaagcgttctataggggaccggatcctcaggcgtacagcttcagctcccgccaagggccgaaagaagtccaaaatgggatttcaggaaatggtagaaatcaaggattctgtgagcgaagcaacaagagatcaggatggggtgctccgacgcaccaccaggtcccttcaggctcgtcccgtgagcatgcccgtggacagaaacctgctcggagccttgtcgctcccagtgtctgagacagcaaaagacatcgagggtaaggagaactcactggacagcagcttctgccgccccacagaacaggctaaggccgagatgtgcaaagtcccattcccccggcagctggaatgtgtgatgaagatggaaattagtgagacctag

SEQ ID NO: 267757 - DNA, 6385 bp, Artificial Sequence
  derived and/or modified sequence
agatgcttccagcgtgcttatctggctgtgcttttcactttgggacaaagttctataatcatatctcatggatttattttctccacactataaagcctgaattgtgaagatctcatcatgccataaagggcagcatgagccaagttctgggggctgctaaggatttctttgccttttttccccccaccctttttggaaatgtgtatcaggaaaaggctttgcctttagagagaaattgtactgctcttgccaataatgtgtaatagtattaaatttaatggcagaccttgaagtgtataaaaacttaagtccagaaaaagttgaaagatgcatgagtgtgatgcagtccgggacacagatgatcaagctgaaacgtggaaccaaagggcttgtccgcctcttttacctggatgagcaccggacacgcctccgatggcgaccctctaggaagagtgagaaggcaaaaatacttattgattccatttacaaagtgactgagggccggcagtctgaaatattccacagacaagctgaggggaacttcgaccccagctgctgcttcaccatctaccatggcaaccacatggagtccctggacctcatcacctccaaccccgaggaggcccgcacctggatcacaggcctcaagtacctgatggctggcatcagtgatgaagactcccttgccaaaaggcagaggacccatgaccaatgggtgaagcagacctttgaggaagctgataagaatggtgacggcttgctgaatattgaagagatacatcagctgatgcataaactgaatgttaatctgccccgaagaaaagtcagacaaatgtttcaggaagccgacacagatgagaatcagggaactttgacatttgaagagttctgtgttttttacaaaatgatgtctttgagacgagacctttatttgttacttttgagctacagtgacaagaaagatcacctaactgtggaagaactggctcagtttttgaaggtggagcaaaagatgaataatgtgacaacggactattgtcttgacatcataaagaagtttgaagtttcagaagaaaataaggtgaaaaatgttcttggcatagaaggcttcacgaacttcatgcgtagtcctgcctgtgacatatttaacccattgcaccatgaagtgtaccaagacatggatcagcccctctgcaactactacattgcttcctctcacaatacatacctgactggagaccagctcctttctcagtccaaagtggatatgtatgcacgggtgctgcaagagggctgtcgctgtgtggaagttgactgttgggatggcccagatggagagccagtagtacatcatggttacactctcacttcaaaaattctcttcagagatgttgtggagaccatcaacaagcatgcctttgtgaagaatgagtttcctgttatattgtctatcgagaatcactgcagtatccagcagcaaaggaagattgctcagtacctgaaaggaatattcggagacaaactggacctgtcatctgttgatacaggggagtgcaagcagcttccaagccctcaaagtttgaaaggcaaaattctagtgaagggtaagaagttgccttatcaccttggggatgatgcagaggaaggggaagtttctgatgaggacagtgcagatgaaattgaagacgagtgcaaattcaagctccattatagtaatgggaccactgagcatcaggtggaatctttcataaggaaaaaactggagtcactgttaaaagaatctcaaattcgagataaagaagatcctgatagtttcacagtgcgggcactactgaaggccacgcatgaaggcttaaatgcacacctgaagcagagtccagatgtaaaggaaagtggaaagaaatcacatggacgatccctcatgaccaactttggaaaacataagaaaactacaaaatcacggtctaaatcttacagtactgatgatgaggaagacacacagcagagtactggcaaggagggtggccagctgtacagattgggtcgccgaaggaaaaccatgaagctctgccgagaactctctgatttggttgtgtacacaaactccgtggccgctcaggacattgtggatgacggaaccacaggaaatgtgttatcattcagtgaaacaagagcacatcaggttgttcagcaaaaatcagagcagttcatgatttataatcaaaagcaactcacgaggatttacccctctgcctaccgcattgattccagtaacttcaaccctctcccctactggaacgcaggctgccagctagtggcactgaattatcaatctgaaggacgaatgatgcagttaaaccgagccaaattcaaggcaaatggcaattgtggctatgtcctcaaaccccagcaaatgtgcaaaggtactttcaaccctttctctggtgaccctcttcctgccaaccccaaaaagcagctcatcctgaaagttatcagtggacagcaactccccaaacctccagactccatgtttggagatcgaggcgagatcattgacccttttgttgaagttgaaattattggattgccagtagattgttgtaaagatcaaacccgtgtggtagatgacaatggatttaaccctgtgtgggaagaaacactgacatttacagtacacatgccagaaatagctttggttcggttccttgtgtgggatcacgatcccattggacgagactttgttggacaaagaactgtgaccttcagcagcttagtgcctggctaccggcatgtctatttggaaggactgacagaagcatccatatttgtacacataaccatcaatgaaatctatggaaagaacagacaactccagggtctgaagggactgttcaataagaatcctaggcacagttcttcagaaaacaattcccattatgtacggaagcgatccattggagatagaattctgcgacgcacagctagcgccccagccaaaggcaggaaaaagagcaaaatgggcttccaagaaatggtggagataaaggattctgtgtccgaggccacaagagatcaagatggcgtgctgaggaggaccacacgcagtttgcaagcacgccctgtctctatgcctgttgacagaaaccttctgggagctttgtcgctgcctgtatctgaaacagcaaaagacattgaaggaaaagaaaactctctagcagaagataaagatggcagaagaaaagggaaagcaagtataaaagatccacattttctaaatttcaacaaaaagttatcatcctcctccagtgctctgctccacaaagataccagccaaggggacaccattgtatctactgcccacatgtcagtcacaggagaacagctgggcatgtcaagtcctaggggtgggagaaccacatcaaatgccacaagcaattgccaggaaaacccctgtcccagcaagtctctctccccaaagcagcatttggctcccgatcctgtagttaaccccacacaagatctgcatggtgtgaaaatcaaggaaaagggtaatcctgaggactttgtggaagggaaaagcatcttgtcaggaagcgtcctttctcatagcaacctagaaattaagaacctggaaggtaataggggtaagggccgagctgcaacatccttttctttgtcagacgtctccatgctctgttctgacatacctgacctacattcaactgcaattctgcaggagagtgtaatttcccatcttattgacaatgtcactttaacaaatgagaatgagccgggcagttccatctcagccctgattggccagtttgatgagaccaacaatcaggctctcacagttgtttctcatcttcataataccagtgtgatgtcaggccattgtcccttgcctagcctgggcctaaaaatgcccatcaagcatggtttttgcaagggaaaatccaagtcttccttcctgtgctcatctccggagctgatagcactctcgagttctgagaccaccaaacatgcaacgaacacagtttatgaaactacctgcactcccatctctaaaaccaaaccagatgatgacctttctagtaaggccaagacagcggccttagaaagcaacctgcctggatcccctaatacttctcgtggctggttaccaaaaagtcctaccaagggagaagactgggaaacactgaagagctgcagccctgcctcttcccctgatttgaccctggaggatgtaatagctgatcccactctctgtttcaattctggggagagcagccttgtggaaattgatggagaatcagaaaatctttctctaacaacctgtgaatataggagagagggcacaagtcaacttgcttctcctttaaaactcaagtacaatcagggtgtggtagaacactttcaaagaggtttgagaaacggctactgtaaagagaccctccgcccttctgtccctgaaatattcaacaatattcaagatgtcaaaactcaaagtatttcttatctagcctatcagggtgctggctttgtgcataatcatttctcagattcagatgcaaaaatgttccagacctgtgtgccccagcaatctagtgctcaagatatgcatgtccctgtacccaagcagttggcacatcttcctttgcctgctctgaaactgcctagtccttgcaaatccaaaagtctgggggacttaacatcagaggacattgcctgcaattttgagagcaagtaccagtgtattagtaagagttttgttacaactggcattagagacaagaagggcgtgactgtgaagacaaagtcgttagagcctatagatgccctgaccgagcagcttcggaagcttgtgtcctttgaccaggaagacaactgccaagtgctatattcaaagcaggatgccaatcagctcccccgggcactggtcaggaagttgtcatccagaagtcagagcagagtgcgcaatattgctagtcgtgccaaggagaaacaggaagccaacaagcagaaagttccaaaccccagcaatggggcaggagtggttcttagaaacaaaccctcagcacccacccctgcagtgaatcgccactccaccggctcctacatcgcaggctacctgaagaacacgaaagggggtggccttgaaggccggggcatcccagagggggcatgcacggctcttcactatggccacgttgaccagttttgttcagataattctgttttgcagactgagccaagcagtgatgataaaccagaaatttattttcttttgagactgtgaattatttaaaactgcattcttaaggttttcaaggtattctgtagaatgtcagagttttcagtaaataagttccttggctttggaatgattttcaaatgtatttttaaacttgtatttgggtctccctttgacttcatgtgttctccctgttaatgcgtttgtatatagatttggtgacatttcccatgtacctattatgatctttctcccttgagttgttgtaaactgtatcagtatgaaatatgtgcatgccctagatgtgaaactcctcagcagctcgggttataatgtgtgtgtgtttcaccaagatgtcctttactgtgtcctcagattgcagtcacaaatgtagtcatttttactctctaactgttgagttgattaagagactttgcaaacgacaaagggatgaattccttactttaatctgttatcatttttcctatgtttccctctttgttcagaagcccagatgcatttttataactcagttttaaaaactttaaaatagttaccttgccttttaggatgttcttatcccacccataatgagagttgaaaggggatggatagctgctccccatgcccttcccactttttggaataggccgtgagggtgtgaggaagaaggctgtcttttgtacataaggacaaaattgtttgttttacataaattttgttacatatttttgctaatggctttgtatgtaacaagaagcgagttgccaaactacctgttgtacttttgaattttctgattgaattacagactgcgaacaacggctttcagaatgagggacttccatcagactctaatgataatagtagcacaaattgaaaacttccccaaagctttcacagaatattttctcataataaaatccaagtgaacagataattagaagaaacccttttccttcagggaaccaagcaactctattttagtactgacatgcattattttcactgtgaattcacttttttattgcatgttcagatgtccctctttgttttttttttttgtaacattaactgcaatgatgttcttcctggaattcatgaaaatataattaaaacacatttttaaac

SEQ ID NO: 267758 - DNA, 3525 bp, Artificial Sequence
  derived and/or modified sequence
ataatgccttgagggctttaacgcgctgcacgaagcatgcatgtctcatacccaaagtagccacagcgcctgcattcccacaatagcggcagccccgagcagatgcttccagcgtgcttatctggctgtgcttttcactttgggacaaagttctataatcatatctcatggatttattttctccacactataaagcctgaattgtgaagatctcatcatgccataaagggcagcatgagccaagttctgggggctgctaaggatttctttgccttttttccccccaccctttttggaaatgtgtatcaggaaaaggctttgcctttagagagaaattgtactgctcttgccaataatgtgtaatagtattaaatttaatggcagaccttgaagtgtataaaaacttaagtccagaaaaagttgaaagatgcatgagtgtgatgcagtccgggacacagatgatcaagctgaaacgtggaaccaaagggcttgtccgcctcttttacctggatgagcaccggacacgcctccgatggcgaccctctaggaagagtgagaaggcaaaaatacttattgattccatttacaaagtgactgagggccggcagtctgaaatattccacagacaagctgaggggaacttcgaccccagctgctgcttcaccatctaccatggcaaccacatggagtccctggacctcatcacctccaaccccgaggaggcccgcacctggatcacaggcctcaagtacctgatggctggcatcagtgatgaagactcccttgccaaaaggcagaggacccatgaccaatgggtgaagcagacctttgaggaagctgataagaatggtgacggcttgctgaatattgaagagatacatcagctgatgcataaactgaatgttaatctgccccgaagaaaagtcagacaaatgtttcaggaagccgacacagatgagaatcagggaactttgacatttgaagagttctgtgttttttacaaaatgatgtctttgagacgagacctttatttgttacttttgagctacagtgacaagaaagatcacctaactgtggaagaactggctcagtttttgaaggtggagcaaaagatgaataatgtgacaacggactattgtcttgacatcataaagaagtttgaagtttcagaagaaaataaggtgaaaaatgttcttggcatagaaggcttcacgaacttcatgcgtagtcctgcctgtgacatatttaacccattgcaccatgaagtgtaccaagacatggatcagcccctctgcaactactacattgcttcctctcacaatacatacctgactggagaccagctcctttctcagtccaaagtggatatgtatgcacgggtgctgcaagagggctgtcgctgtgtggaagttgactgttgggatggcccagatggagagccagtagtacatcatggttacactctcacttcaaaaattctcttcagagatgttgtggagaccatcaacaagcatgcctttgtgaagaatgagtttcctgttatattgtctatcgagaatcactgcagtatccagcagcaaaggaagattgctcagtacctgaaaggaatattcggagacaaactggacctgtcatctgttgatacaggggagtgcaagcagcttccaagccctcaaagtttgaaaggcaaaattctagtgaagggtaagaagttgccttatcaccttggggatgatgcagaggaaggggaagtttctgatgaggacagtgcagatgaaattgaagacgagtgcaaattcaagctccattatagtaatgggaccactgagcatcaggtggaatctttcataaggaaaaaactggagtcactgttaaaagaatctcaaattcgagataaagaagatcctgatagtttcacagtgcgggcactactgaaggccacgcatgaaggcttaaatgcacacctgaagcagagtccagatgtaaaggaaagtggaaagaaatcacatggacgatccctcatgaccaactttggaaaacataagaaaactacaaaatcacggtctaaatcttacagtactgatgatgaggaagacacacagcagagtactggcaaggagggtggccagctgtacagattgggtcgccgaaggaaaaccatgaagctctgccgagaactctctgatttggttgtgtacacaaactccgtggccgctcaggacattgtggatgacggaaccacaggaaatgtgttatcattcagtgaaacaagagcacatcaggttgttcagcaaaaatcagagcagttcatgatttataatcaaaagcaactcacgaggatttacccctctgcctaccgcattgattccagtaacttcaaccctctcccctactggaacgcaggctgccagctagtggcactgaattatcaatctgaaggacgaatgatgcagttaaaccgagccaaattcaaggcaaatggcaattgtggctatgtcctcaaaccccagcaaatgtgcaaaggtactttcaaccctttctctggtgaccctcttcctgccaaccccaaaaagcagctcatcctgaaagttatcagtggacagcaactccccaaacctccagactccatgtttggagatcgaggcgagatcattgacccttttgttgaagttgaaattattggattgccagtagattgttgtaaagatcaaacccgtgtggtagatgacaatggatttaaccctgtgtgggaagaaacactgacatttacagtacacatgccagaaatagctttggttcggttccttgtgtgggatcacgatcccattggacgagactttgttggacaaagaactgtgaccttcagcagcttagtgcctggctaccggcatgtctatttggaaggactgacagaagcatccatatttgtacacataaccatcaatgaaatctatggaaagaacagacaactccagggtctgaagggactgttcaataagaatcctaggcacagttcttcagaaaacaattcccattatgtacggaagcgatccattggagatagaattctgcgacgcacagctagcgccccagccaaaggcaggaaaaagagcaaaatgggcttccaagaaatggtggagataaaggattctgtgtccgaggccacaagagatcaagatggcgtgctgaggaggaccacacgcagtttgcaagcacgccctgtctctatgcctgttgacagaaaccttctgggagctttgtcgctgcctgtatctgaaacagcaaaagacattgaaggaaaagaaaactctctagactctagcttttgcaggccgactgagcaggctaaagcagaaatgtgcaaagtgcctttccccagacagttagaatgtgtaatgaagatggaaatttccgagacctgaatccccaaacccagactgatctctcttctcttcttgaatataaaagtaagctggcaagatttaaaaaactgaacccaaataaatattcatcatttttttcttc

SEQ ID NO: 267759 - DNA, 3045 bp, Artificial Sequence
  derived and/or modified sequence
atggccgacctggaggtgtacaagaacctatcccccgaaaaagttgagcgatgcatgtcagtgatgcagagcggcactcagatgataaaactcaaacgcggaacaaaaggcctggtccgcctcttctaccttgatgaacatagaactagattgaggtggcgtcccagccggaaatctgaaaaagctaagatcttgatcgacagtatttacaaggtaacagaagggaggcagagtgaaattttccaccggcaggcagagggcaacttcgatccctcatgttgcttcacaatctatcatgggaaccacatggagtctctggacttaatcacctccaaccctgaagaggctaggacttggataactgggttgaagtatttgatggccggtatttctgacgaggacagcttagcgaagaggcagcggacccatgaccagtgggtgaagcaaacctttgaagaagccgacaaaaacggtgatggcctcttaaacattgaggagattcaccagctcatgcataagctgaacgtcaatctccctcgaagaaaggtccgccagatgtttcaggaggccgatacggatgagaaccagggaaccctcaccttcgaagaattctgcgtattctataaaatgatgtccctgagacgcgatctatacttactcctgttgtcctactccgataaaaaggatcaccttacggtggaagagctcgcacagttcctgaaagtggagcagaagatgaacaatgtcactactgattattgtctggatattataaagaaatttgaggtttcagaagagaataaagtgaagaacgtgctgggtatagagggtttcacgaacttcatgcggtcccccgcatgcgatatatttaatcctctgcaccacgaggtttatcaagacatggatcaacctctgtgtaattactacatcgcgagctcccataatacgtatttaactggtgatcagctgctgtctcagagcaaagtcgacatgtatgctcgcgtgttgcaggaggggtgtcgatgtgtggaggtcgattgctgggatggccctgacggcgaaccagtggtgcatcacggctacactttgactagtaagatactgttcagggatgtggtggagacgatcaacaaacatgcgtttgtgaagaatgaattcccggtaatactaagcattgaaaatcactgctcaattcagcagcaacgcaagattgctcagtatttaaaaggtatctttggagacaaacttgacctgtcttcggttgacaccggcgagtgcaaacagttaccttctccccagagtttgaaggggaaaattcttgtgaaaggtaaaaagctgccctaccatctgggtgatgacgccgaagaaggagaggtttcggacgaagactctgccgacgaaatcgaagacgaatgcaagttcaagttacattacagtaatggcacgactgaacaccaggtagaatctttcattcggaaaaagctggagagtcttctgaaagagagtcagattcgggacaaggaggatcctgactccttcactgttagggctcttctgaaggccacccatgaggggctcaatgctcacctgaaacaaagtccagacgtcaaagagagcgggaaaaaatcccatggtagatcgctcatgaccaatttcggaaaacacaagaaaacaacgaagtcacggtctaagagttattcaaccgatgacgaagaagacacacagcagtccactgggaaagaagggggacagctgtatagactgggtagacggaggaagacaatgaaactctgtagagaactttccgatctcgtggtctacaccaattctgtagctgcccaagacattgtagacgatggcaccacgggaaacgtcctatccttcagtgaaacacgtgcccatcaggtcgttcagcaaaagtcagaacagttcatgatatataatcagaagcagctcacccgaatataccccagcgcctacaggatagactcgtcgaattttaatcccctcccctactggaacgcaggttgtcagttagtggcactgaattaccagagtgagggaagaatgatgcagctaaaccgcgcaaagttcaaggccaacggtaattgcggttacgtactgaagccacagcagatgtgtaagggaacctttaatccgttctccggtgatccactccccgcaaaccccaaaaaacaactaatcttaaaggtgatctccggccaacagctgccaaagccccctgattctatgtttggggacagaggggagattatagatccgtttgtcgaagtagagattatcggcctcccagtggactgctgcaaggatcagacacgagtggtggacgataacgggtttaatccagtttgggaggaaaccttaacatttacagtccacatgccagaaatcgccctcgtgcgctttctcgtatgggatcacgatcccatcggccgagactttgttggtcaacggactgtcacattttctagtctcgtgccaggataccgccacgtctatctcgagggtctgacagaggcttccatcttcgtacacattactattaacgagatttatggaaaaaatcggcagctgcaaggtctgaaaggcttatttaataaaaacccccgacactcctcatctgaaaacaacagccactacgtccgcaagaggagcatcggcgaccgcattttgaggaggactgcttccgctcccgcaaaaggcagaaagaaaagtaaaatggggttccaggagatggtcgaaattaaggattcagtgagcgaggccaccagagatcaggacggcgtgctgcggcgaacaacgcgttctctgcaggccagaccggtcagcatgcctgttgacagaaatctgttgggtgctctgtctcttcccgtctccgaaacggccaaggatatcgaaggaaaagaaaattccctggacagcagcttctgccggcctaccgagcaggcaaaggccgaaatgtgcaaggtgccgtttccgcgtcagctcgagtgcgtgatgaaaatggagatctccgaaacatag

SEQ ID NO: 267760 - DNA, 3045 bp, Artificial Sequence
  derived and/or modified sequence
atggccgacctggaggtgtacaagaacctgagccccgagaaggtggagagatgcatgagcgtgatgcagagcggcacccagatgatcaagctgaagagaggcaccaagggcctggtgagactgttctacctggacgagcacagaaccagactgagatggagacccagcagaaagagcgagaaggccaagatcctgatcgacagcatctacaaggtgaccgagggcagacagagcgagatcttccacagacaggccgagggcaacttcgaccccagctgctgcttcaccatctaccacggcaaccacatggagagcctggacctgatcaccagcaaccccgaggaggccagaacctggatcaccggcctgaagtacctgatggccggcatcagcgacgaggacagcctggccaagagacagagaacccacgaccagtgggtgaagcagaccttcgaggaggccgacaagaacggcgacggcctgctgaacatcgaggagatccaccagctgatgcacaagctgaacgtgaacctgcccagaagaaaggtgagacagatgttccaggaggccgacaccgacgagaaccagggcaccctgaccttcgaggagttctgcgtgttctacaagatgatgagcctgagaagagacctgtacctgctgctgctgagctacagcgacaagaaggaccacctgaccgtggaggagctggcccagttcctgaaggtggagcagaagatgaacaacgtgaccaccgactactgcctggacatcatcaagaagttcgaggtgagcgaggagaacaaggtgaagaacgtgctgggcatcgagggcttcaccaacttcatgagaagccccgcctgcgacatcttcaaccccctgcaccacgaggtgtaccaggacatggaccagcccctgtgcaactactacatcgccagcagccacaacacctacctgaccggcgaccagctgctgagccagagcaaggtggacatgtacgccagagtgctgcaggagggctgcagatgcgtggaggtggactgctgggacggccccgacggcgagcccgtggtgcaccacggctacaccctgaccagcaagatcctgttcagagacgtggtggagaccatcaacaagcacgccttcgtgaagaacgagttccccgtgatcctgagcatcgagaaccactgcagcatccagcagcagagaaagatcgcccagtacctgaagggcatcttcggcgacaagctggacctgagcagcgtggacaccggcgagtgcaagcagctgcccagcccccagagcctgaagggcaagatcctggtgaagggcaagaagctgccctaccacctgggcgacgacgccgaggagggcgaggtgagcgacgaggacagcgccgacgagatcgaggacgagtgcaagttcaagctgcactacagcaacggcaccaccgagcaccaggtggagagcttcatcagaaagaagctggagagcctgctgaaggagagccagatcagagacaaggaggaccccgacagcttcaccgtgagagccctgctgaaggccacccacgagggcctgaacgcccacctgaagcagagccccgacgtgaaggagagcggcaagaagagccacggcagaagcctgatgaccaacttcggcaagcacaagaagaccaccaagagcagaagcaagagctacagcaccgacgacgaggaggacacccagcagagcaccggcaaggagggcggccagctgtacagactgggcagaagaagaaagaccatgaagctgtgcagagagctgagcgacctggtggtgtacaccaacagcgtggccgcccaggacatcgtggacgacggcaccaccggcaacgtgctgagcttcagcgagaccagagcccaccaggtggtgcagcagaagagcgagcagttcatgatctacaaccagaagcagctgaccagaatctaccccagcgcctacagaatcgacagcagcaacttcaaccccctgccctactggaacgccggctgccagctggtggccctgaactaccagagcgagggcagaatgatgcagctgaacagagccaagttcaaggccaacggcaactgcggctacgtgctgaagccccagcagatgtgcaagggcaccttcaaccccttcagcggcgaccccctgcccgccaaccccaagaagcagctgatcctgaaggtgatcagcggccagcagctgcccaagccccccgacagcatgttcggcgacagaggcgagatcatcgaccccttcgtggaggtggagatcatcggcctgcccgtggactgctgcaaggaccagaccagagtggtggacgacaacggcttcaaccccgtgtgggaggagaccctgaccttcaccgtgcacatgcccgagatcgccctggtgagattcctggtgtgggaccacgaccccatcggcagagacttcgtgggccagagaaccgtgaccttcagcagcctggtgcccggctacagacacgtgtacctggagggcctgaccgaggccagcatcttcgtgcacatcaccatcaacgagatctacggcaagaacagacagctgcagggcctgaagggcctgttcaacaagaaccccagacacagcagcagcgagaacaacagccactacgtgagaaagagaagcatcggcgacagaatcctgagaagaaccgccagcgcccccgccaagggcagaaagaagagcaagatgggcttccaggagatggtggagatcaaggacagcgtgagcgaggccaccagagaccaggacggcgtgctgagaagaaccaccagaagcctgcaggccagacccgtgagcatgcccgtggacagaaacctgctgggcgccctgagcctgcccgtgagcgagaccgccaaggacatcgagggcaaggagaacagcctggacagcagcttctgcagacccaccgagcaggccaaggccgagatgtgcaaggtgcccttccccagacagctggagtgcgtgatgaagatggagatcagcgagacctag

SEQ ID NO: 267761 - protein, 890 aa, Artificial Sequence
  derived and/or modified sequence
MYQISKNSGWARSREYNFNLKTQSILFNRHKEDLQPYKYAGYPMLIRTITMETSDDLLFSKESPLLPAATELAFHTVNCSALNAEELRRENGLEVLQEAFSRCVAVLTRASKPSDMSVQVCGYISKCYSVAAQFEECREKITEMPSIIKDLCRVLYFGKSIPRVAALGVECVSSFAVDFWLQTHLFQAGILWYLLGFLFNYDYTLEESGIQKSEETNQQEVANSLAKLSVHALSRLGGYLAEEQATPENPTIRKSLAGMLTPYVARKLAVASVTEILKMLNSNTESPYLIWNNSTRAELLEFLESQQENMIKKGDCDKTYGSEFVYSDHAKELIVGEIFVRVYNEVPTFQLEVPKAFAASLLDYIGSQAQYLHTFMAITHAAKVESEQHGDRLPRVEMALEALRNVIKYNPGSESECIGHFKLIFSLLRVHGAGQVQQLALEVVNIVTSNQDCVNNIAESMVLSSLLALLHSLPSSRQLVLETLYALTSSTKIIKEAMAKGALIYLLDMFCNSTHPQVRAQTAELFAKMTADKLIGPKVRITLMKFLPSVFMDAMRDNPEAAVHIFEGTHENPELIWNDNSRDKVSTTVREMMLEHFKNQQDNPEANWKLPEDFAVVFGEAEGELAVGGVFLRIFIAQPAWVLRKPREFLIALLEKLTELLEKNNPHGETLETLTMATVCLFSAQPQLADQVPPLGHLPKVIQAMNHRNNAIPKSAIRVIHALSENELCVRAMASLETIGPLMNGMKKRADTVGLACEAINRMFQKEQSELVAQALKADLVPYLLKLLEGIGLENLDSPAATKAQIVKALKAMTRSLQYGEQVNEILCRSSVWSAFKDQKHDLFISESQTAGYLTGPGVAGYLTAGTSTSVMSNLPPPVDHEAGDLGYQT

SEQ ID NO: 267762 - DNA, 69 bp, Artificial Sequence
  derived and/or modified sequence
gaatagaatagaatggaatcatcgaatggaatcgaatggaatcatcatgatatggaattgagtggaatc

SEQ ID NO: 267763 - DNA, 84 bp, Artificial Sequence
  derived and/or modified sequence
aatcatcatcgaatggaatcgaatggtatcattgaatggaatcgaatggaatcatcatcagatggaaatgaatggaatcgtcat

SEQ ID NO: 267764 - DNA, 55 bp, Artificial Sequence
  derived and/or modified sequence
aatcaaagaattgaatcgaatggaatcatctaatgtactcgaatggaatcaccat

SEQ ID NO: 267765 - DNA, 85 bp, Artificial Sequence
  derived and/or modified sequence
aaatcatcatcgaatggaatcgaatggtatcattgaatggaatcgaatggaatcatcatcagatggaaatgaatggaatcgtcat

SEQ ID NO: 267766 - DNA, 609 bp, Artificial Sequence
  derived and/or modified sequence
atggagaacgagcccgaccacgagaacgtggagcagagcctgtgcgccaagaccagcgaggaggagctgaacaagagcttcaacctggaggccagcctgagcaagttcagctacatcgacatggacaaggagctggagttcaagaacgacctgatcgacgacaaggagttcgacatcccccaggtggacaccccccccaccctggagagcatcctgaacgagaccgacgacgaggacgagagcttcatcctggaggaccccaccctgctgaacatcgacaccatcgacagccacagctacgacaccagcagcgtggccagcagcgacagcggcgacagaaccaacctgaagagaaagaagaagctgcccgacagcttcagcctgcacggcagcgtgatgagacacagcctgctgaagggcatcagcgcccagatcgtgagcgccgccgacaaggtggacgccggcctgcccaccgccatcgccgtgagcagcctgatcgccgtgggcaccagccacggcctggccctgatcttcgaccagaaccaggccctgagactgtgcctgggcagcaccagcgtgggcggccagtacggcgccatcagcgcctag

SEQ ID NO: 267767 - DNA, 423 bp, Artificial Sequence
  derived and/or modified sequence
atggagaacgagcccgaccacgagaacgtggagcagagcctgtgcgccaagaccagcgaggaggagctgaacaagagcttcaacctggaggccagcctgagcaagttcagctacatcgacatggacaaggagctggagttcaagaacgacctgatcgacgacaaggagttcgacatcccccaggtggacaccccccccaccctggagagcatcctgaacgagaccgacgacgaggacgagagcttcatcctggaggaccccaccctgctgaacatcgacaccatcgacagccacagctacgacaccagcagcgtggccagcagcgacagcggcgacagaaccaacctgaagagaaagaagaagctgcccgacagcttcagcctgcacggcagcgtgatgagacacagcctgctgaagggctag

SEQ ID NO: 267768 - DNA, 366 bp, Artificial Sequence
  derived and/or modified sequence
atggagaacgagcccgaccacgagaacgtggagcagagcctgtgcgccaagaccagcgaggaggagctgaacaagagcttcaacctggaggccagcctgagcaagttcagctacatcgacatggacaaggagctggagttcaagaacgacctgatcgacgacaaggagttcgacatcccccaggtggacaccccccccaccctggagagcatcctgaacgagaccgacgacgaggacgagagcttcatcctggaggaccccaccctgctgaacatcgacaccatcgacagccacagctacgacaccagcagcgtggccagcagcgacagcggcgacagaaccaacctgaagagaaagaagaagtag

SEQ ID NO: 267769 - DNA, 225 bp, Artificial Sequence
  derived and/or modified sequence
atggagaacgagcccgaccacgagaacgtggagcagagcctgtgcgccaagaccagcgaggaggagctgaacaagagcttcaacctggaggccagcctgagcaagttcagctacatcgacatggacaaggagctggagttcaagaacgacctgatcgacgacaaggagttcgacatcccccaggtggacaccccccccaccctggagagcatcctgaacgagtag

SEQ ID NO: 267770 - DNA, 609 bp, Artificial Sequence
  derived and/or modified sequence
atggaaaacgaacctgatcatgagaatgtggagcagagcctgtgtgccaagacatcggaggaagagttaaataagtctttcaaccttgaggcaagcctgagcaaatttagttatatcgacatggacaaggaactcgagtttaaaaacgatcttattgacgacaaggagtttgacatccctcaggttgatacccctcccacactagagtctatcctcaacgagacggatgacgaggacgaatcattcatccttgaggacccaactcttctgaatatcgacactatcgactcccacagttatgacacttctagcgtagcctcctcggactcaggggatagaactaaccttaaacggaagaagaagctcccagacagttttagcttgcacggaagtgtcatgaggcattctctcctcaaaggaatctctgctcaaattgtatctgcggctgataaggtggacgccggcctgcctactgccatcgccgttagctcccttatcgccgtcggcacgtcccacggccttgccctcattttcgatcagaatcaggccttgaggttatgcctgggatctacaagtgttgggggccaatacggcgcaatatctgcctag

SEQ ID NO: 267771 - DNA, 423 bp, Artificial Sequence
  derived and/or modified sequence
atggagaacgagcccgatcacgaaaacgtggagcagtccctgtgtgctaaaacttctgaagaagaactgaataaatccttcaacctcgaggcctctctaagcaagttttcctacatcgatatggacaaagagctagaattcaagaatgatcttatcgacgataaggaattcgacatcccccaggtggatactcctcccaccctggaatcaatcctcaatgaaacggacgatgaagacgagtccttcattcttgaggatccgacactcctgaacatcgacacaatcgattcacactcatacgataccagtagtgttgcctcaagcgatagtggggacagaactaacctgaagagaaagaaaaaattgccggactcgttctctttacacggctccgttatgaggcattctctgctgaaagggtag

SEQ ID NO: 267772 - DNA, 366 bp, Artificial Sequence
  derived and/or modified sequence
atggagaacgagcccgaccacgaaaatgttgagcagtctctgtgcgccaaaacttccgaagaggagctcaacaagagctttaacctggaggcaagcttaagcaaattttcgtatattgacatggacaaagaactcgagtttaagaacgatctgatagacgataaggagtttgacattccgcaggtggacaccccgcccaccttagagtccattctgaatgagaccgatgacgaggacgagtcctttattctggaggatccgacactattgaacatcgacaccatcgacagccacagctacgatacatcttctgtggcctccagcgattccggggaccgcacaaatctgaagagaaagaagaagtag

SEQ ID NO: 267773 - DNA, 225 bp, Artificial Sequence
  derived and/or modified sequence
atggaaaatgagcccgaccacgagaatgtggagcagagcctgtgcgcaaaaacctctgaggaggagctgaataaatcctttaacttagaggcttctctgagtaaattttcctatattgacatggacaaggagctagagtttaagaatgatctgatcgatgacaaagaattcgatataccacaggttgacactccccccacgctggaaagtattctgaacgaatag

SEQ ID NO: 267774 - DNA, 609 bp, Artificial Sequence
  derived and/or modified sequence
atggagaatgaaccagaccatgaaaatgtggagcagagcctgtgtgccaagaccagcgaggaggagctgaacaagagcttcaacctggaggccagcctgagcaagttctcctacatcgacatggacaaggagctggagttcaagaatgacctgattgatgacaaggagtttgacatcccccaggtggacaccccacccaccctggagagcatcctgaatgaaacagatgatgaagatgagagcttcatcctggaggaccccaccctgctgaacatcgacaccatcgacagccacagctatgacaccagctctgtggccagcagtgacagcggggacaggaccaacctgaagaggaagaagaagctgcctgacagcttcagcctgcacggctctgtgatgaggcacagcctgctgaagggcatcagcgcccagatcgtgtctgctgctgacaaggtggatgctggcctgcccacagccatcgctgtgagcagcctgattgctgtgggcaccagccacggcctggccctgatctttgaccagaaccaggccctgcggctgtgcctgggcagcacctctgtgggcggccagtatggagccatcagcgcctag

SEQ ID NO: 267775 - DNA, 423 bp, Artificial Sequence
  derived and/or modified sequence
atggagaatgaaccagaccatgaaaatgtggagcagagcctgtgtgccaagaccagcgaggaggagctgaacaagagcttcaacctggaggccagcctgagcaagttctcctacatcgacatggacaaggagctggagttcaagaatgacctgattgatgacaaggagtttgacatcccccaggtggacaccccacccaccctggagagcatcctgaatgaaacagatgatgaagatgagagcttcatcctggaggaccccaccctgctgaacatcgacaccatcgacagccacagctatgacaccagctctgtggccagcagtgacagcggggacaggaccaacctgaagaggaagaagaagctgcctgacagcttcagcctgcacggctctgtgatgaggcacagcctgctgaagggctag

SEQ ID NO: 267776 - DNA, 366 bp, Artificial Sequence
  derived and/or modified sequence
atggagaatgaaccagaccatgaaaatgtggagcagagcctgtgtgccaagaccagcgaggaggagctgaacaagagcttcaacctggaggccagcctgagcaagttctcctacatcgacatggacaaggagctggagttcaagaatgacctgattgatgacaaggagtttgacatcccccaggtggacaccccacccaccctggagagcatcctgaatgaaacagatgatgaagatgagagcttcatcctggaggaccccaccctgctgaacatcgacaccatcgacagccacagctatgacaccagctctgtggccagcagtgacagcggggacaggaccaacctgaagaggaagaagaagtag

SEQ ID NO: 267777 - DNA, 225 bp, Artificial Sequence
  derived and/or modified sequence
atggagaatgaaccagaccatgaaaatgtggagcagagcctgtgtgccaagaccagcgaggaggagctgaacaagagcttcaacctggaggccagcctgagcaagttctcctacatcgacatggacaaggagctggagttcaagaatgacctgattgatgacaaggagtttgacatcccccaggtggacaccccacccaccctggagagcatcctgaatgaatag

SEQ ID NO: 267778 - DNA, 609 bp, Artificial Sequence
  derived and/or modified sequence
atggagaacgagcccgaccacgagaacgtggagcagagcctgtgcgccaagacaagcgaagaagagttgaataagagctttaatctcgaagctagcctgagtaaattcagctacatcgacatggataaagaactggagttcaaaaatgatctcatcgatgataaagagtttgacataccacaggttgacacgccccctaccctcgagagtattcttaacgaaaccgacgacgaagacgagtcattcatcctggaggaccccaccctgttaaacatcgacacaatcgacagccactcttatgacacatcctccgtggcgtcgagcgattccggtgaccgcacaaacctcaagcgaaagaagaagctgccagactcctttagtctccacggatccgtgatgcgccatagcctattgaaggggatctccgcccagatcgtttccgccgccgacaaggtcgatgccggcttgcccactgcaatcgctgtatccagtctgatcgcagtaggcactagccacggcttagctctgatctttgatcagaatcaggccctgcggctgtgtctgggcagtaccagcgttggtggccagtatggtgctatctctgcttag

SEQ ID NO: 267779 - DNA, 423 bp, Artificial Sequence
  derived and/or modified sequence
atggagaacgagcccgaccacgagaacgtggagcagagcctgtgcgcaaaaacttcagaagaggaactaaacaagagctttaatctggaagcatcactgagtaaattttcttacattgacatggataaagaattagagttcaagaacgacctcatagacgacaaggaatttgacattccgcaggtcgacacaccccccacactcgaaagcatactcaatgagaccgacgacgaagatgagagcttcatccttgaggatccaactcttctgaatatcgatacaatagactcacacagttacgatacctcctccgtggcttcatcggacagtggagatcgtacaaaccttaagagaaaaaagaagttgcctgactccttttctttgcacggatccgtgatgcgccattccctcctgaaaggctag

SEQ ID NO: 267780 - DNA, 366 bp, Artificial Sequence
  derived and/or modified sequence
atggagaacgagcccgaccacgagaacgtggagcagagcctgtgcgccaagacctccgaagaggagttgaacaagagtttcaacttagaagcaagcctgtccaaattttcttacatcgacatggacaaggaactggagttcaagaacgacctcatcgacgataaagaattcgacatacctcaagtcgatacccctccaacgctggagtcaatcctgaacgaaactgatgatgaggacgaaagtttcatactagaggatcctacattgttaaacatcgatacaattgacagccattcctacgatacatccagcgtagcctccagcgactcaggtgacagaacgaatctcaagagaaaaaagaagtag

SEQ ID NO: 267781 - DNA, 225 bp, Artificial Sequence
  derived and/or modified sequence
atggagaacgagcccgaccacgagaacgtggagcagagcctgtgcgcgaaaacctccgaggaagagctgaataaaagcttcaatctggaagcctccctctccaagttctcttacattgatatggataaggaactggagtttaaaaacgacctgatcgacgacaaggagttcgatattccgcaagttgacactcctcccaccctggagtccatactgaatgaatag

SEQ ID NO: 267782 - DNA, 609 bp, Artificial Sequence
  derived and/or modified sequence
atggaaaatgagccggatcatgaaaatgttgaacagtctttatgcgccaagacgtccgaggaagagctgaataagtcttttaaccttgaagctagcctgagcaaattctcctatattgatatggataaggagctcgaatttaagaacgacctgatcgacgataaggaatttgacatccctcaggtggatacccccccaaccttggagagcatcctgaatgaaactgacgacgaggacgagagcttcatcctcgaggaccctacgctgttgaatatcgatactatcgactctcactcctatgacactagctctgtggcatccagcgatagcggtgaccgaactaatcttaaacgaaagaaaaagctcccagactcctttagccttcatggtagcgtgatgagacatagtctgctgaaaggcatctctgcacagatcgtgtcagccgctgacaaggtagatgccggtctgcctactgcaatcgccgttagttccctgattgcggtaggtaccagccatggcttggccctcatctttgatcagaaccaagccctgcgattatgcctgggttctacatcagtgggcggtcagtatggagctatatccgcttag

SEQ ID NO: 267783 - DNA, 423 bp, Artificial Sequence
  derived and/or modified sequence
atggagaacgagcccgaccacgagaacgttgagcaatcgttgtgcgccaaaactagcgaagaagagttgaataagtccttcaacctggaggccagtttatctaaattcagttatatcgatatggacaaagaactggaattcaaaaacgacctgatcgacgacaaagaattcgatatccctcaggtggacacaccgcctaccctcgaaagcatccttaacgagaccgacgacgaggatgagtcctttatactcgaggatccaaccctcctaaacatcgatacaattgactctcacagttacgacacgtcctcagtcgcctcatcggattccggcgacagaacaaacctgaagcgaaagaagaagctccctgactcttttagcctgcatggctccgtgatgagacattcccttttaaagggttag

SEQ ID NO: 267784 - DNA, 366 bp, Artificial Sequence
  derived and/or modified sequence
atggagaacgaacccgatcatgagaatgtagaacagagtctttgtgcgaaaactagcgaagaagaactcaataaatcgtttaacctggaggcaagcctttctaagttcagttatatcgatatggacaaagagctcgagttcaagaatgacctcattgatgacaaagaattcgatatacctcaagtggacacccctcctacattggagtcaattctcaacgagacagatgacgaggatgaatcatttattctcgaggacccgacactgctgaacatcgacaccattgactcacactcctatgatactagttcagtggcatccagtgattctggagatcgaacaaacctgaagagaaaaaagaagtag

SEQ ID NO: 267785 - DNA, 225 bp, Artificial Sequence
  derived and/or modified sequence
atggaaaatgaacccgatcacgaaaacgttgagcagtccctgtgcgccaaaacatctgaggaggagctgaacaagtcatttaatttagaggccagtctgagtaagttctcctatatagatatggacaaagagttagaattcaagaatgaccttattgacgacaaggaattcgacattcctcaggttgataccccgccaacgttggaatccattctgaatgaatag

SEQ ID NO: 267786 - DNA, 811 bp, Artificial Sequence
  derived and/or modified sequence
cggtccacggccggaatggcagcaagctcaggggaactggagcactaccctggggtttggaatgtaaagaaggcattaattgcagcttttggcaccgatttacccttatgctgttagagataatcattcaggtcttcgtgagctaaggccaaacaaacaaaaaacacttgctttgatggactgaatactgttattagaagtaaatatggaaaatgaaccagaccatgaaaatgtggaacagagcctctgtgccaagacgagcgaagaagagctgaataagtctttcaatctagaagcttcactttcaaaattctcttacatagatatggacaaggaactggagttcaaaaatgatctgattgatgacaaggagtttgatattcctcaagttgatactcctccaacactggaaagcatactaaatgagactgatgatgaagatgagtcttttattcttgaggatcctacattgttaaacattgatactattgattctcactcctatgatacttcatctgtggcaagctcagatagtggtgacaggaccaacttaaaaaggaagaagaaattacctgattctttttcacttcatggatcagttatgcgccattcacttttgaagggaatttctgcccagatagtgtctgcagctgacaaagtagatgctggcttgcctacagcaattgcagtatccagtctgatagcagtgggtacatctcatggattggctttaatatttgatcagaatcaagctttgcgactctgtctgggtagcactagtgttggaggtcagtatggcgctatctctgcc

SEQ ID NO: 267787 - DNA, 549 bp, Artificial Sequence
  derived and/or modified sequence
atttgagattctggaagccagtgatgcagtcttgcttggagataatcattcaggtcttcgtgagctaaggccaaacaaacaaaaaacacttgctttgatggactgaatactgttattagaagtaaatatggaaaatgaaccagaccatgaaaatgtggaacagagcctctgtgccaagacgagcgaagaagagctgaataagtctttcaatctagaagcttcactttcaaaattctcttacatagatatggacaaggaactggagttcaaaaatgatctgattgatgacaaggagtttgatattcctcaagttgatactcctccaacactggaaagcatactaaatgagactgatgatgaagatgagtcttttattcttgaggatcctacattgttaaacattgatactattgattctcactcctatgatacttcatctgtggcaagctcagatagtggtgacaggaccaacttaaaaaggaagaagaaattacctgattctttttcacttcatggatcagttatgcgccattcacttttgaagggaat

SEQ ID NO: 267788 - DNA, 592 bp, Artificial Sequence
  derived and/or modified sequence
gatcagctgctgtgtcatatcggcacggggaatagaatggtgaacaaggcagatctggtctttgctctctcatggaacctgcattccaactgggggcaaggaatggtggtttagacaatgaggaaatcattacaatgtgagataatcattcaggtcttcgtgagctaaggccaaacaaacaaaaaacacttgctttgatggactgaatactgttattagaagtaaatatggaaaatgaaccagaccatgaaaatgtggaacagagcctctgtgccaagacgagcgaagaagagctgaataagtctttcaatctagaagcttcactttcaaaattctcttacatagatatggacaaggaactggagttcaaaaatgatctgattgatgacaaggagtttgatattcctcaagttgatactcctccaacactggaaagcatactaaatgagactgatgatgaagatgagtcttttattcttgaggatcctacattgttaaacattgatactattgattctcactcctatgatacttcatctgtggcaagctcagatagtggtgacaggaccaacttaaaaaggaagaagaaatt

SEQ ID NO: 267789 - DNA, 661 bp, Artificial Sequence
  derived and/or modified sequence
gtgtcgtacgttggcccggaactgggtcgggcaatttccacttactggttccaaatgaatgtgaaaattcaaatgggcttaagtaaaaagggatttattggctccaaacctggaaggggctgaggtatcactaaatccagtgactccggtgatgtatttgtgtatctctccctttctgcaaagggccagtaacccctcagttccctatctactttgcgactataattgcaagcctcattctgtcctgttacagtcgtgcggcaattaggctgagggactggcgcgcccgctcccccgactgtgagcctaggcggcgggtgtcatgcccctccccactcccgggcggaacagagataatcattcaggtcttcgtgagctaaggccaaacaaacaaaaaacacttgctttgatggactgaatactgttattagaagtaaatatggaaaatgaaccagaccatgaaaatgtggaacagagcctctgtgccaagacgagcgaagaagagctgaataagtctttcaatctagaagcttcactttcaaaattctcttacatagatatggacaaggaactggagttcaaaaatgatctgattgatgacaaggagtttgatattcctcaagttgatactcctccaacactggaaagcatactaaatgag

SEQ ID NO: 267790 - protein, 1196 aa, Artificial Sequence
  derived and/or modified sequence
MMTVMSLSRDLKDDFHSDTVLSILNEQRIRGILCDVTIIVEDTKFKAHSNVLAASSLYFKNIFWSHTICISSHVLELDDLKAEVFTEILNYIYSSTVVVKRQETVTDLAAAGKKLGISFLEDLTDRNFSNSPGPYVFCITEKGVVKEEKNEKRHEEPAITNGPRITNAFSIIETENSNNMFSPLDLRASFKKVSDSMRTASLCLERTDVCHEAEPVRTLAEHSYAVSSVAEAYRSQPVREHDGSSPGNTGKENCEALAAKPKTCRKPKTFSIPQDSDSATENIPPPPVSNLEVNQERSPQPAAVLTRSKSPNNEGDVHFSREDENQSSDVPGPPAAEVPPLVYNCSCCSKAFDSSTLLSAHMQLHKPTQEPLVCKYCNKQFTTLNRLDRHEQICMRSSHMPIPGGNQRFLENYPTIGQNGGSFTGPEPLLSENRIGEFSSTGSTLPDTDHMVKFVNGQMLYSCVVCKRSYVTLSSLRRHANVHSWRRTYPCHYCNKVFALAEYRTRHEIWHTGERRYQCIFCLETFMTYYILKNHQKSFHAIDHRLSISKKTANGGLKPSVYPYKLYRLLPMKCKRAPYKSYRNSSYENARENSQMNESAPGTYVVQNPHSSELPTLNFQDTVNTLTNSPAIPLETSACQDIPTSANVQNAEGTKWGEEALKMDLDNNFYSTEVSVSSTENAVSSDLRAGDVPVLSLSNSSENAASVISYSGSAPSVIVHSSQFSSVIMHSNAIAAMTSSNHRAFSDPAVSQSLKDDSKPEPDKVGRFASRPKSIKEKKKTTSHTRGEIPEESNYVADPGGSLSKTTNIAEETSKIETYIAKPALPGTSTNSNVAPLCQITVKIGNEAIVKRHILGSKLFYKRGRRPKYQMQEEPLPQGNDPEPSGDSPLGLCQSECMEMSEVFDDASDQDSTDKPWRPYYNYKPKKKSRQLKKMRKVNWRKEHGNRSPSHKCKYPAELDCAVGKAPQDKPFEEEETKEMPKLQCELCDGDKAVGAGNQGRPHRHLTSRPYACELCAKQFQSPSTLKMHMRCHTGEKPYQCKTCGRCFSVQGNLQKHERIHLGLKEFVCQYCNKAFTLNETLKIHERIHTGEKRYHCQFCFQRFLYLSTKRNHEQRHIREHNGKGYACFQCPKICKTAAALGMHQKKHLFKSPSQQEKIGDVCHENSNPLENQHFIGSEDNDQKDNIQTGVENVVL

SEQ ID NO: 267791 - DNA, 3591 bp, Artificial Sequence
  derived and/or modified sequence
atgatgaccgtgatgagcctgagcagagacctgaaggacgacttccacagcgacaccgtgctgagcatcctgaacgagcagagaatcagaggcatcctgtgcgacgtgaccatcatcgtggaggacaccaagttcaaggcccacagcaacgtgctggccgccagcagcctgtacttcaagaacatcttctggagccacaccatctgcatcagcagccacgtgctggagctggacgacctgaaggccgaggtgttcaccgagatcctgaactacatctacagcagcaccgtggtggtgaagagacaggagaccgtgaccgacctggccgccgccggcaagaagctgggcatcagcttcctggaggacctgaccgacagaaacttcagcaacagccccggcccctacgtgttctgcatcaccgagaagggcgtggtgaaggaggagaagaacgagaagagacacgaggagcccgccatcaccaacggccccagaatcaccaacgccttcagcatcatcgagaccgagaacagcaacaacatgttcagccccctggacctgagagccagcttcaagaaggtgagcgacagcatgagaaccgccagcctgtgcctggagagaaccgacgtgtgccacgaggccgagcccgtgagaaccctggccgagcacagctacgccgtgagcagcgtggccgaggcctacagaagccagcccgtgagagagcacgacggcagcagccccggcaacaccggcaaggagaactgcgaggccctggccgccaagcccaagacctgcagaaagcccaagaccttcagcatcccccaggacagcgacagcgccaccgagaacatcccccccccccccgtgagcaacctggaggtgaaccaggagagaagcccccagcccgccgccgtgctgaccagaagcaagagccccaacaacgagggcgacgtgcacttcagcagagaggacgagaaccagagcagcgacgtgcccggcccccccgccgccgaggtgccccccctggtgtacaactgcagctgctgcagcaaggccttcgacagcagcaccctgctgagcgcccacatgcagctgcacaagcccacccaggagcccctggtgtgcaagtactgcaacaagcagttcaccaccctgaacagactggacagacacgagcagatctgcatgagaagcagccacatgcccatccccggcggcaaccagagattcctggagaactaccccaccatcggccagaacggcggcagcttcaccggccccgagcccctgctgagcgagaacagaatcggcgagttcagcagcaccggcagcaccctgcccgacaccgaccacatggtgaagttcgtgaacggccagatgctgtacagctgcgtggtgtgcaagagaagctacgtgaccctgagcagcctgagaagacacgccaacgtgcacagctggagaagaacctacccctgccactactgcaacaaggtgttcgccctggccgagtacagaaccagacacgagatctggcacaccggcgagagaagataccagtgcatcttctgcctggagaccttcatgacctactacatcctgaagaaccaccagaagagcttccacgccatcgaccacagactgagcatcagcaagaagaccgccaacggcggcctgaagcccagcgtgtacccctacaagctgtacagactgctgcccatgaagtgcaagagagccccctacaagagctacagaaacagcagctacgagaacgccagagagaacagccagatgaacgagagcgcccccggcacctacgtggtgcagaacccccacagcagcgagctgcccaccctgaacttccaggacaccgtgaacaccctgaccaacagccccgccatccccctggagaccagcgcctgccaggacatccccaccagcgccaacgtgcagaacgccgagggcaccaagtggggcgaggaggccctgaagatggacctggacaacaacttctacagcaccgaggtgagcgtgagcagcaccgagaacgccgtgagcagcgacctgagagccggcgacgtgcccgtgctgagcctgagcaacagcagcgagaacgccgccagcgtgatcagctacagcggcagcgcccccagcgtgatcgtgcacagcagccagttcagcagcgtgatcatgcacagcaacgccatcgccgccatgaccagcagcaaccacagagccttcagcgaccccgccgtgagccagagcctgaaggacgacagcaagcccgagcccgacaaggtgggcagattcgccagcagacccaagagcatcaaggagaagaagaagaccaccagccacaccagaggcgagatccccgaggagagcaactacgtggccgaccccggcggcagcctgagcaagaccaccaacatcgccgaggagaccagcaagatcgagacctacatcgccaagcccgccctgcccggcaccagcaccaacagcaacgtggcccccctgtgccagatcaccgtgaagatcggcaacgaggccatcgtgaagagacacatcctgggcagcaagctgttctacaagagaggcagaagacccaagtaccagatgcaggaggagcccctgccccagggcaacgaccccgagcccagcggcgacagccccctgggcctgtgccagagcgagtgcatggagatgagcgaggtgttcgacgacgccagcgaccaggacagcaccgacaagccctggagaccctactacaactacaagcccaagaagaagagcagacagctgaagaagatgagaaaggtgaactggagaaaggagcacggcaacagaagccccagccacaagtgcaagtaccccgccgagctggactgcgccgtgggcaaggccccccaggacaagcccttcgaggaggaggagaccaaggagatgcccaagctgcagtgcgagctgtgcgacggcgacaaggccgtgggcgccggcaaccagggcagaccccacagacacctgaccagcagaccctacgcctgcgagctgtgcgccaagcagttccagagccccagcaccctgaagatgcacatgagatgccacaccggcgagaagccctaccagtgcaagacctgcggcagatgcttcagcgtgcagggcaacctgcagaagcacgagagaatccacctgggcctgaaggagttcgtgtgccagtactgcaacaaggccttcaccctgaacgagaccctgaagatccacgagagaatccacaccggcgagaagagataccactgccagttctgcttccagagattcctgtacctgagcaccaagagaaaccacgagcagagacacatcagagagcacaacggcaagggctacgcctgcttccagtgccccaagatctgcaagaccgccgccgccctgggcatgcaccagaagaagcacctgttcaagagccccagccagcaggagaagatcggcgacgtgtgccacgagaacagcaaccccctggagaaccagcacttcatcggcagcgaggacaacgaccagaaggacaacatccagaccggcgtggagaacgtggtgctgtag

SEQ ID NO: 267792 - DNA, 3591 bp, Artificial Sequence
  derived and/or modified sequence
atgatgactgttatgtcgttatctcgagatctgaaagacgatttccattccgatacagtgttgagcatcctcaatgagcaacggatccgcggcatcttatgtgatgtgacgattatcgtggaagatactaaatttaaagctcatagtaatgtgctggcggcctcttcactgtattttaaaaatatattttggtctcacactatctgcatttcatcccacgtgttggagcttgatgacctgaaagccgaagtgttcactgagatcctcaactacatatactcttccacagttgtggtcaagcggcaggagacggtgacggatcttgccgccgccggaaagaagcttgggatctcctttctggaagacttgactgatagaaacttcagtaattcccccgggccctacgttttctgtatcaccgaaaaaggagtagtgaaagaggaaaagaatgaaaaaagacacgaagagcctgcgattaccaacggccctagaatcacaaatgcattttctatcatcgaaactgaaaactccaataacatgttctcaccattggatctgcgagcatcatttaagaaggtgagcgatagcatgaggacagcttctctttgtcttgagcggacagatgtatgtcacgaagctgagcctgtgcggaccctagccgagcattcgtacgccgtgtcaagtgtcgccgaggcgtacagaagccaacctgtccgggaacatgacggctcaagccccggtaacactggaaaagagaactgtgaggcgttggccgctaagcccaagacatgtagaaaaccaaagaccttcagcatcccgcaggatagcgattccgccacagagaacatcccccccccacccgtctccaatctcgaggtcaaccaggaacggtcaccgcaaccagccgcggtgctgaccagaagcaagagtccaaacaatgagggagatgttcactttagccgggaggatgaaaaccagagttccgacgtccctggcccccccgccgctgaggtgccgccgctcgtatacaactgttcgtgctgtagcaaggcgttcgattcatcgacactgctatccgcccacatgcaacttcataagccaacccaggaaccccttgtttgcaaatattgtaacaagcaatttaccactctgaaccgcttagataggcacgaacagatatgtatgcgctcttcccacatgccaatcccaggcggtaatcagaggttcttagagaattaccctactattggacagaatggtggatcgttcactggacctgagcccctgctctctgaaaacagaatcggcgaattcagctccaccggatccactctcccagacacggaccatatggtaaaatttgtcaatggtcagatgttgtactcctgtgtggtatgcaaaagatcttatgtcaccctatctagtctgaggcgccacgccaacgtccattcatggcgaagaacatacccttgtcactattgcaacaaggtgttcgctctggcagagtatcgaacccgccacgaaatctggcatactggcgagaggagatatcagtgcatcttctgcctggaaacttttatgacctattatattcttaaaaaccaccaaaaatcgtttcacgccatagaccataggctgtcaatctcaaagaaaaccgcaaatggcggcctgaaaccgtccgtttacccttataaattataccgtctcctcccaatgaagtgcaagagagccccatacaagtcttatcggaattcctcatatgagaatgctcgagaaaactcccagatgaacgagtccgcgccaggtacctatgtcgtgcagaacccacactcctctgagcttccaactctcaatttccaggatacagtgaatactctgaccaattcacctgcaattcctctagaaacttcagcatgccaggacattccaacatccgccaacgtccagaatgctgaggggacaaaatggggcgaagaggcactgaagatggatctggataacaacttttattctacagaagtttctgtgtcctccacagagaacgccgtgagctccgacctgagggcgggcgacgtgcctgttctttcactgtccaactcctctgagaatgcggcgagcgttatctcatatagtggttcagctcctagtgtgattgtgcattcttcccagttcagtagtgtgataatgcactccaacgcaattgccgcgatgacaagttccaaccatcgggcctttagcgaccccgccgtctcacagtctctaaaagatgactccaagccagagccagataaggtagggaggtttgcctcacgacctaaatcaataaaggagaaaaaaaagaccacttcacacacaagaggggaaatccccgaagagagtaattacgtggccgaccctggcggctccctttcaaagaccaccaatattgccgaagagacctccaaaatcgaaacatacatcgctaagccagcgttgcccgggacctccacaaacagtaatgtagcccctctgtgccagatcaccgtgaagattgggaatgaagccattgtcaaacgacatattctcggcagcaagctcttctacaagcgaggaagaagaccaaagtaccagatgcaggaagagccactgcctcaggggaacgatcctgagccttcaggcgattccccactgggcctttgccagagcgagtgcatggagatgagcgaggttttcgatgatgcgtcggaccaggatagcactgacaagccgtggcgaccatactacaattataagccaaaaaaaaaaagtcggcagctgaagaaaatgcggaaggttaattggagaaaggaacacgggaaccgatctccaagccacaagtgcaaatatcccgcagaactagactgtgcagtggggaaggcaccacaggacaaaccatttgaggaagaggagactaaggaaatgcctaaactccaatgtgagctgtgcgacggcgataaggcggtgggcgccggtaaccaggggagaccccatcgtcacctaacctcccgcccatatgcgtgtgagctctgtgctaagcagttccagtcaccttccactctgaagatgcacatgagatgtcatactggagagaaaccttaccaatgcaaaacctgcggccggtgtttttcagttcaaggaaaccttcagaagcacgaacgaatccacctgggtctgaaggaattcgtgtgtcagtactgtaataaggcatttacactcaatgaaacactaaagattcatgagcgaattcacacgggagaaaaacgataccactgccaattttgcttccaaagattcctctacctgtctacaaaaagaaaccacgagcagcgccatatccgtgagcacaacgggaaaggctatgcatgtttccagtgcccaaaaatctgcaaaacggcggcggcactgggcatgcatcaaaagaagcatctttttaaatcgccatctcaacaggagaagatcggggacgtatgccatgagaattccaaccctctggaaaatcagcactttatcggttccgaggataatgaccagaaggacaacattcagactggggtcgagaatgtcgtgctgtag

SEQ ID NO: 267793 - DNA, 3591 bp, Artificial Sequence
  derived and/or modified sequence
atgatgacagtgatgagcctgagccgggacctgaaggatgacttccacagcgacacagtgctgagcatcctgaatgagcagaggatccggggcatcctgtgtgatgtgaccatcatcgtggaggacaccaagttcaaggcccacagcaatgtgctggccgccagcagcctgtacttcaagaacatcttctggagccacaccatctgcatcagcagccacgtgctggagctggatgacctgaaggccgaggtgttcacagagatcctgaactacatctacagcagcacagtggtggtgaagaggcaggagaccgtgacagacctggccgctgctgggaagaagctgggcatctccttcctggaggacctgacagacaggaacttcagcaacagccctggcccctacgtgttctgcatcacagagaagggcgtggtgaaggaggagaagaatgagaagagacatgaggagcccgccatcaccaacggcccccgcatcaccaatgccttcagcatcatcgagacagagaacagcaacaacatgttcagccccctggacctgcgggccagcttcaagaaggtgtctgacagcatgaggacagccagcctgtgcctggagaggacagatgtgtgccatgaagctgagcctgtgaggaccctggccgagcacagctatgctgtgtcctctgtggccgaggcctaccgcagccagcctgtgcgggagcatgatggcagcagccctggcaacacaggcaaggagaactgtgaggccctggccgccaagcccaagacctgcaggaagcccaagaccttcagcatcccccaggacagcgacagcgccacagagaacatccccccacctcctgtgagcaacctggaggtgaaccaggagaggagcccccagcctgctgctgtgctgaccaggagcaagagccccaacaatgaaggagatgtgcacttcagccgggaggatgagaaccagagcagtgatgtgcccggccccccagctgctgaggtgccccccctggtgtacaactgcagctgctgcagcaaggcctttgacagcagcaccctgctgagcgcccacatgcagctgcacaagcccacccaggagcccctggtgtgcaagtactgcaacaagcagttcaccaccctgaaccggctggacagacatgagcagatctgcatgaggagcagccacatgcccatccctgggggcaaccagcgcttcctggagaactaccccaccatcggccagaatggaggcagcttcaccggccctgagcccctgctgtctgagaacagaattggagagttcagcagcacaggcagcaccctgcctgacacagaccacatggtgaagtttgtgaatggccagatgctgtacagctgtgtggtgtgcaagaggagctatgtgaccctgagcagcctgcggagacatgccaacgtgcacagctggaggaggacctacccctgccactactgcaacaaggtgtttgccctggccgagtaccgcaccaggcatgagatctggcacactggagagcggcgctaccagtgcatcttctgcctggagaccttcatgacctactacatcctgaagaaccaccagaagagcttccacgccatcgaccaccggctgagcatcagcaagaagacagccaacggcggcctgaagcccagcgtgtacccctacaagctgtaccgcctgctgcccatgaagtgcaagagggccccctacaagagctacagaaacagcagctatgaaaatgcccgggagaacagccagatgaatgaaagtgcccctggcacctacgtggtgcagaacccccacagcagcgagctgcccaccctgaacttccaggacacagtgaacaccctgaccaacagccctgccatccccctggagaccagcgcctgccaggacatccccaccagcgccaacgtgcagaatgctgagggcaccaagtggggcgaggaggccctgaagatggacctggacaacaacttctacagcacagaggtgtctgtgagcagcacagaaaatgctgtgtccagtgacctgcgggctggagatgtgcctgtgctgagcctgagcaacagcagtgaaaatgctgccagcgtcatctcctacagcggcagcgcccccagcgtcatcgtgcacagcagccagttcagcagcgtcatcatgcacagcaatgccatcgccgccatgaccagcagcaaccaccgggccttcagtgaccctgctgtgtcccagagcctgaaggatgacagcaagccagagccagacaaggtgggccgctttgccagccggcccaagagcatcaaggagaagaagaagaccaccagccacaccagaggagagatccctgaggagagcaactacgtggccgaccccggcggcagcctgagcaagaccaccaacattgctgaggagaccagcaagattgagacctacatcgccaagccagccctgcccggcaccagcaccaacagcaatgtggcccccctgtgccagatcaccgtgaagattggaaatgaggccatcgtgaagaggcacatcctgggcagcaagctgttctacaagagaggaagaagacccaagtaccagatgcaggaggagcccctgccccagggcaatgaccctgagcccagcggggacagccccctgggcctgtgccagagcgagtgcatggagatgtctgaggtgtttgatgatgccagtgaccaggacagcacagacaagccctggaggccctactacaactacaagcccaagaagaagagccggcagctgaagaagatgaggaaggtgaactggaggaaggagcacggcaacagaagccccagccacaagtgcaagtacccagctgagctggactgtgctgtgggcaaggccccccaggacaagccctttgaggaggaggagaccaaggagatgcccaagctgcagtgtgagctgtgtgatggagacaaggctgtgggcgccggcaaccagggccggccccaccgccacctgaccagccggccctatgcctgtgagctgtgtgccaagcagttccagagccccagcaccctgaagatgcacatgcgctgccacactggagagaagccctaccagtgcaagacctgtggccgctgcttctctgtgcagggcaacctgcagaagcatgagcgcatccacctgggcctgaaggagtttgtgtgccagtactgcaacaaggccttcaccctgaatgagaccctgaagatccacgagcgcatccacactggagagaagcgctaccactgccagttctgcttccagcgcttcctgtacctgagcaccaagagaaatcatgagcagaggcacatccgggagcacaacgggaagggctacgcctgcttccagtgccccaagatctgcaagacagctgctgccctgggcatgcaccagaagaagcacctgttcaagagccccagccagcaggagaagattggagatgtgtgccacgagaacagcaaccccctggagaaccagcacttcatcggctctgaagataatgaccagaaggacaacatccagacaggagtggagaatgtggtgctgtag

SEQ ID NO: 267794 - DNA, 3591 bp, Artificial Sequence
  derived and/or modified sequence
atgatgaccgtgatgagcctgagccgggacctgaaggacgacttccactctgatactgttctgtccattcttaatgaacaaaggatcagaggtatcctctgtgacgtgaccattatcgtggaggacacaaaattcaaggctcactcaaatgtgctggccgctagtagtctttatttcaagaatatcttctggagccacactatttgcatcagcagtcacgtgttagagctggacgatctgaaggccgaggtgttcaccgagattttaaactacatctattcaagcacagttgtcgtaaaacgacaggagactgttaccgatctggccgcggctggcaaaaagctggggatatcctttttggaggacctgactgacagaaacttctctaactcacccgggccgtacgtcttttgcattacggagaagggcgtcgtgaaggaagagaaaaacgagaaacgacatgaagaaccagcaatcactaacgggcccaggataacgaatgcattcagcataattgagaccgagaattccaataacatgttttccccactcgatctacgggcgtcctttaagaaagtgagcgactcaatgcgaactgcctctttatgcctagagcgcaccgacgtctgccacgaagctgagccagtgaggaccctggcagagcattcttatgcagtgagtagtgtggcagaggcgtaccggagccagcccgtgcgcgagcacgatgggtccagccctgggaacacaggaaaggagaattgcgaggctctggcggctaaacccaaaacttgccgcaagcctaagacgttctccatcccccaagattccgattccgcgactgagaacatccctccccctcccgtcagtaatctggaggtcaatcaggaaaggagcccacaacccgccgctgtgttaacaaggagtaagagccctaataacgagggtgatgttcatttttcacgagaggatgagaaccaaagcagcgatgtcccaggcccccctgccgccgaagttcctcctctagtctataattgttcctgctgttctaaggcgttcgactcttccaccctactcagcgcccacatgcagttgcacaaaccaacacaagagccgttggtctgcaaatactgcaataaacagtttacaactctcaacaggctagatcggcacgagcagatttgtatgcgatccagtcatatgcctatacctggagggaatcaaagatttctagagaattatcctacaataggtcagaacgggggatcattcacaggccccgagccactgctgtctgagaatcggatcggagaattctcttctaccggcagcacactgccagatacagaccacatggtgaagtttgtgaatggccagatgctctatagctgtgtggtttgtaaaaggtcatacgtcacactgagttcactcagacgccacgctaatgtgcactcctggaggaggacctatccatgtcattactgcaataaagtttttgccttggctgagtaccgaacccggcacgagatctggcataccggagagaggagatatcagtgcatcttctgcttagaaaccttcatgacttattatattttaaagaaccaccagaaatcatttcacgcaatcgaccaccggttaagtatttctaaaaaaacggctaatggaggcctcaaaccttcagtgtacccttacaagctgtatagattgttgccgatgaaatgtaagagggctccttataaatcttacaggaatagctcatatgagaatgccagagaaaacagccagatgaatgagtcggctcccggcacctatgtggtacagaacccccacagctcggaactgccaactctgaattttcaggatacagtcaatactctgactaatagccccgctatcccactggagacatctgcctgtcaggacattccaacaagcgcgaatgtgcagaatgccgaaggaacaaagtggggcgaggaggccctgaagatggatctagataataacttctactcaacagaggtgtcagtctcctctactgagaatgcagtgtcctctgaccttcgggccggagacgttcccgttctctctttatctaatagcagcgagaacgcagcatctgttatatcgtacagtgggagcgcacctagcgtcatcgtccatagcagtcaatttagcagcgtgatcatgcatagtaacgcgatcgctgcaatgaccagtagcaaccaccgagccttcagcgacccagcggtgtcccagtctctaaaggacgattcaaaacccgagccggacaaggttgggaggtttgcttcacgccctaagagtatcaaagagaaaaaaaaaaccacgtctcatactagaggggaaatccctgaagaaagtaattatgtcgccgatcccggcggctctctcagtaaaacaaccaacattgcagaggaaactagcaagatcgaaacatatattgcgaaaccagcccttcctggtacaagcacaaatagcaatgtcgctcctctatgtcagattactgttaaaatcggcaacgaggccatcgtcaagcgacacattctcggctcaaagctgttttacaagaggggcagaagacctaaatatcagatgcaggaagaaccactgccgcagggaaatgaccctgagccctccggggactcgcccttaggtctatgccaaagcgaatgtatggagatgtccgaggtgttcgacgatgcaagcgaccaagatagtaccgataaaccatggagaccttattacaattacaagcccaaaaaaaagagtcgccagctgaaaaaaatgagaaaagtcaattggcggaaggagcacggcaaccggtccccgtcacacaaatgcaaatatcccgccgagcttgattgcgctgtgggaaaagccccacaggataagccctttgaagaagaagagacaaaagagatgccaaagctccaatgcgagctgtgcgacggcgataaagcagtaggcgcaggtaatcaggggcgcccccatagacacctaacctctcgcccctacgcgtgtgagctgtgcgccaagcagttccaatccccatccaccttgaagatgcatatgcgctgccacacgggagaaaagccatatcaatgtaagacatgcgggcgctgtttcagcgttcaggggaatctccagaagcacgagagaatccacctcgggctgaaggaatttgtttgtcaatattgcaacaaagcatttaccttgaacgaaactctgaagatacatgagagaatccacaccggagaaaaaaggtaccattgtcagttctgttttcaacgcttcctgtatctgtcaacaaagaggaatcatgagcaacggcacatacgcgaacacaacgggaagggctacgcttgcttccagtgccccaagatttgcaaaaccgccgccgccctggggatgcaccagaagaagcatctgtttaaatctcccagccagcaggaaaaaattggcgatgtctgccatgagaactctaaccccctcgagaaccagcatttcatcggcagcgaagataatgaccagaaggacaacattcagaccggcgttgaaaatgtcgtcctctag

SEQ ID NO: 267795 - DNA, 3591 bp, Artificial Sequence
  derived and/or modified sequence
atgatgacagttatgagtttaagccgggacttaaaggacgactttcacagcgacacagtgctgtcaattttgaatgagcaacgaattcgaggaatcctctgtgatgtgaccattattgtggaagacacaaagtttaaagctcactcaaatgtgctggcggcttcatccctgtacttcaagaatatattctggagccacacaatctgcatctctagccatgtgcttgaattggacgacttgaaagccgaggtatttactgagatcctaaactatatctatagctcaacagtcgtggtaaaacgacaagaaaccgtaacagacctcgcagctgccggtaagaagctcggcattagcttcctcgaggacttgaccgaccgcaatttctccaactctcccggaccatacgttttctgtatcactgagaagggagtcgtcaaggaagaaaaaaacgagaagaggcatgaggagccagccatcacaaatggccctcggatcacgaatgctttttcaataatagagaccgaaaactcaaataatatgttctccccgctggacctgcgcgcttcttttaagaaggtctccgactctatgagaaccgcaagtctctgtctcgagcgcaccgacgtgtgtcacgaggccgaacctgtcagaactctggcggaacatagttatgcagtgagctctgtggctgaggcttaccgcagtcagccggtcagggagcatgacgggagcagtcccggtaataccggtaaagaaaattgtgaagcgcttgccgcaaagcccaagacatgtagaaaacctaaaaccttctccattccccaagactccgactccgctacagaaaatatacctcctccacccgtgagtaacctggaggtgaatcaagagcggtcccctcagcccgctgcggtgcttacaagaagtaaatcacctaataacgaaggagacgtccacttcagccgggaagatgagaaccagagttccgacgttccaggtcctcccgctgctgaagtccctcccctggtctacaattgttcatgttgctcaaaagctttcgattcctcgacactgctatcggctcacatgcaactccataaaccaacccaagagcctctcgtctgcaagtattgcaataagcagtttaccactttgaacagactcgaccgccacgaacaaatttgtatgagatcttcccatatgcctatcccaggtgggaatcagaggttcttggagaattatccaacaattgggcaaaacggaggctcctttaccggtcccgaaccgcttctttcagaaaacaggattggggagtttagctctaccggcagcactttgccagataccgatcacatggtaaaatttgtgaatgggcaaatgctttactcctgtgtggtgtgtaagcgttcctatgtcactcttagcagcctgagaaggcacgccaatgtccatagctggaggcgaacttatccatgccactattgtaataaggtgtttgctctggctgaatatcggactagacatgaaatctggcacaccggggaaagaaggtatcagtgtatcttttgtcttgaaacatttatgacttactatatactgaagaatcaccagaagagcttccatgcaatcgatcacagattatctatatccaagaaaacagccaacggaggactgaagccttcggtgtacccctataagctttaccgcctcctgccaatgaagtgtaaaagggccccttataagagctataggaacagctcctatgaaaacgccagggagaatagccaaatgaatgagagtgcgcctggaacgtacgtggttcagaatcctcatagctctgaactcccaacactgaacttccaagatactgttaacaccttaaccaattcgccagccatcccgctggaaacaagcgcctgtcaagatattcctaccagtgccaatgtccaaaacgccgaggggactaagtggggcgaggaggccttaaagatggacctggataacaatttttatagcactgaggtctccgttagtagtacagagaacgcggtcagctcagacctccgagctggcgatgtacctgtgctcagcctcagcaactctagcgagaacgcggcaagcgttatctcctactcaggatctgccccatccgtgattgtgcattcttcacagttcagctctgtgattatgcacagcaatgccattgctgctatgacttcctccaatcacagggctttttctgatcccgcagtctcccagtctctcaaagatgactcgaagcccgagcccgacaaggtaggacgcttcgcatcaaggccaaaatctataaaagagaagaaaaagaccactagtcacaccaggggcgaaatcccagaagaaagtaattatgtcgctgatcctggcggatccctctccaagactaccaacatcgctgaagagacatctaagatagagacctatatcgccaaacccgctctccctggcacatcaaccaattcaaatgtggcacccttgtgccagatcacggttaagatcggcaatgaggctatcgtgaagaggcacatcttgggaagcaaattgttctacaagaggggtcggaggcctaagtaccagatgcaggaagagcctctgccacaggggaatgaccccgagcccagcggtgatagtccactgggcctttgccaatctgagtgtatggagatgagtgaagtgtttgatgacgctagcgatcaagactccacagataagccctggaggccttattacaattacaagcccaagaagaaaagtagacagctgaagaagatgagaaaagttaactggcgcaaggagcacggcaacaggtctcccagccacaaatgcaaatacccggctgaactggattgtgctgtcggaaaggcaccccaggacaaacccttcgaagaggaggaaacaaaagagatgcctaagcttcagtgtgagctgtgcgacggagacaaagctgtaggcgctgggaaccaaggaaggccacatcgccacctcactagccggccatatgcctgtgaattgtgcgccaaacagtttcagtcccccagcaccctcaagatgcacatgcgttgtcacactggagagaaaccttaccagtgtaaaacctgtggaaggtgcttctccgtccaggggaatttgcagaagcatgagagaatacatctgggactcaaagagttcgtgtgtcaatattgcaataaagccttcacactgaacgaaacattgaagatacacgaaagaattcatacgggagagaaaagataccattgtcagttttgtttccagcgttttctctatctcagcaccaaaagaaatcatgagcagcgccatatccgagagcacaatggcaaggggtatgcttgcttccagtgccccaaaatctgcaagaccgcagctgcgctcgggatgcaccaaaaaaagcacttattcaagagcccaagccagcaggagaagatcggtgacgtttgccacgaaaatagcaatcctctagaaaatcagcacttcattggaagtgaagacaacgatcagaaagacaatatccaaactggggtcgagaatgttgtcctatag

SEQ ID NO: 267796 - DNA, 3650 bp, Artificial Sequence
  derived and/or modified sequence
agttctcagacaggctgcccagaggggctccagcataagcaggagacatgatgacagtcatgtccctttccagggacctcaaggacgactttcacagtgacacggtactctccatcttaaatgagcagcgcattcggggcattttatgcgatgtcactatcattgtggaagataccaaatttaaagcccatagcaatgttctggcagcttcaagcctgtattttaaaaatatcttttggagccatacaatctgtatttccagccacgtcctggagctggacgatctcaaagctgaagtgtttactgaaatacttaattatatctacagttccacagtcgttgtcaagagacaggaaacagtcactgatctcgcagctgcaggaaaaaagctgggaatatcgttcttggaagaccttactgatcgcaacttctcaaattccccgggtccctatgtattctgtattactgaaaagggagtggttaaagaagaaaaaaatgaaaaaaggcatgaagaaccagccatcactaatgggccaaggatcacaaatgcattttccatcatcgaaacagaaaatagtaataacatgttttccccgctggacttgagggcaagtttcaaaaaggtctccgactccatgagaacagctagcctttgcctggagaggacggacgtctgccacgaggcagagcctgtccgcacacttgccgagcactcatacgctgtttcttccgtagctgaagcttacagaagtcagcctgtacgtgaacatgatggcagttcacctggtaacacagggaaagaaaattgtgaagcccttgcagcgaaaccgaaaacatgccggaagccaaagacattctccataccacaggattcggattcagccacagaaaatataccaccccctccagtatccaacttagaggttaatcaagaaagaagtccacaaccagctgctgttctcactcgttcaaaatctccaaacaatgaaggagatgtccatttttccagggaagatgaaaatcaatcttctgatgttcccgggccgccagccgcagaggttccacctctggtgtacaattgtagctgctgttccaaagcctttgacagcagcactctgctcagtgcccacatgcagcttcacaagccaacccaggagcctttagtgtgcaagtattgcaacaaacaattcaccaccctgaacaggttggatcggcatgaacagatctgcatgaggtcaagccacatgcccattcctggaggaaaccaacgctttttagaaaactatcctaccattggacaaaatggaggttcattcacaggtccagaacctttattatctgaaaataggattggtgaattttccagtaccggaagtactttgccagacacggaccacatggttaaatttgttaatgggcaaatgctctacagttgcgttgtgtgcaaacgtagttatgtgaccttatctagcctccgaagacatgcaaatgttcactcctggagaagaacatatccttgccattactgcaacaaagtatttgcattggctgagtacaggacaaggcatgaaatttggcatacgggagaaagacgatatcagtgcattttctgtcttgaaactttcatgacctactatatactcaaaaatcatcagaagtctttccatgccatcgatcatagactttccatcagtaaaaaaacagcaaatggaggcttgaagcctagtgtctatccgtataaactttataggctactgcctatgaaatgcaagagagccccttataagagctaccgaaattcttcctatgaaaatgcacgagaaaacagtcaaatgaatgagtctgcacctggtacctatgttgttcagaatccacacagctctgaattaccaacgctgaatttccaagatactgtaaacaccctgaccaacagtccagccatcccattggaaacatctgcatgtcaggacatacccacttctgccaatgtacaaaatgcagagggtaccaaatggggagaggaggcattgaaaatggatcttgacaataacttttattcaactgaggtgtcagtttcttccactgaaaatgctgtcagttctgacctccgggcaggggatgtacctgttttatctttgagtaatagcagtgagaatgccgcctctgtgatcagctacagtggctctgcaccctcggtcattgtacacagcagccagttttcatcggtgatcatgcacagcaatgccattgctgccatgaccagcagcaaccacagagccttttcagacccagctgtcagtcagtccctgaaagatgacagtaagcccgagccagataaagtgggtaggtttgcaagcagacccaaaagcattaaggagaaaaagaaaactacatcacataccaggggagaaataccggaggagtcaaactatgttgctgatcctggaggatcactgagcaaaaccacaaatattgctgaagaaaccagcaaaattgaaacctacattgcaaaacctgctctgccgggaacctccacaaatagtaatgttgcacccctttgccaaataacagtgaaaattggaaacgaagccattgtgaaaaggcacattctaggatctaaattgttttataaaagagggagaagacccaagtatcagatgcaggaggagcctttgccacaggggaatgacccagaacccagtggagacagcccactcgggctttgccaatccgagtgcatggagatgagtgaagtgttcgatgacgcaagtgaccaggattccactgacaaaccgtggcgcccttactacaactacaaacccaaaaagaaatccagacagttgaaaaaaatgaggaaagtcaactggaggaaggagcacggaaacaggagcccgagccataaatgtaaatacccagcagaactggattgcgccgtggggaaggctcctcaggataaaccctttgaggaagaagaaactaaagagatgcccaagctgcagtgtgaactctgtgatggagacaaagcagtgggggctggaaaccaaggaaggccccaccgacatcttacttctcggccatatgcctgcgagctctgcgccaagcagttccagagcccttccacactcaaaatgcacatgagatgtcacaccggggagaagccataccagtgcaagacctgcggacggtgcttttcggtgcaaggaaacttacagaaacatgaacgcatccacctgggcttgaaggagttcgtctgtcagtattgcaacaaggcattcaccttgaatgagaccctcaaaatccatgaaagaatccatactggagaaaagcgttaccactgtcagttctgctttcagagatttttgtatctctccaccaaaaggaatcacgagcagaggcatattcgggagcataatgggaagggctatgcctgcttccagtgccccaaaatttgcaaaacagctgctgcccttggaatgcaccaaaagaaacacttattcaaaagcccaagtcagcaggagaaaataggtgacgtgtgccacgaaaactcaaatcccttggagaatcaacatttcattggttcagaagacaatgaccaaaaggataacatacaaaccggtgtggaaaatgttgtcctttgagtggcaagaatt

SEQ ID NO: 267797 - DNA, 3662 bp, Artificial Sequence
  derived and/or modified sequence
agttctcagacaggctgcccagaggggctccagcataagcaggagacatgatgacagtcatgtccctttccagggacctcaaggacgactttcacagtgacacggtactctccatcttaaatgagcagcgcattcggggcattttatgcgatgtcactatcattgtggaagataccaaatttaaagcccatagcaatgttctggcagcttcaagcctgtattttaaaaatatcttttggagccatacaatctgtatttccagccacgtcctggagctggacgatctcaaagctgaagtgtttactgaaatacttaattatatctacagttccacagtcgttgtcaagagacaggaaacagtcactgatctcgcagctgcaggaaaaaagctgggaatatcgttcttggaagaccttactgatcgcaacttctcaaattccccgggtccctatgtattctgtattactgaaaagggagtggttaaagaagaaaaaaatgaaaaaaggcatgaagaaccagccatcactaatgggccaaggatcacaaatgcattttccatcatcgaaacagaaaatagtaataacatgttttccccgctggacttgagggcaagtttcaaaaaggtctccgactccatgagaacagctagcctttgcctggagaggacggacgtctgccacgaggcagagcctgtccgcacacttgccgagcactcatacgctgtttcttccgtagctgaagcttacagaagtcagcctgtacgtgaacatgatggcagttcacctggtaacacagggaaagaaaattgtgaagcccttgcagcgaaaccgaaaacatgccggaagccaaagacattctccataccacaggattcggattcagccacagaaaatataccaccccctccagtatccaacttagaggttaatcaagaaagaagtccacaaccagctgctgttctcactcgttcaaaatctccaaacaatgaaggagatgtccatttttccagggaagatgaaaatcaatcttctgatgttcccgggccgccagccgcagaggttccacctctggtgtacaattgtagctgctgttccaaagcctttgacagcagcactctgctcagtgcccacatgcagcttcacaagccaacccaggagcctttagtgtgcaagtattgcaacaaacaattcaccaccctgaacaggttggatcggcatgaacagatctgcatgaggtcaagccacatgcccattcctggaggaaaccaacgctttttagaaaactatcctaccattggacaaaatggaggttcattcacaggtccagaacctttattatctgaaaataggattggtgaattttccagtaccggaagtactttgccagacacggaccacatggttaaatttgttaatgggcaaatgctctacagttgcgttgtgtgcaaacgtagttatgtgaccttatctagcctccgaagacatgcaaatgttcactcctggagaagaacatatccttgccattactgcaacaaagtatttgcattggctgagtacaggacaaggcatgaaatttggcatacgggagaaagacgatatcagtgcattttctgtcttgaaactttcatgacctactatatactcaaaaatcatcagaagtctttccatgccatcgatcatagactttccatcagtaaaaaaacagcaaatggaggcttgaagcctagtgtctatccgtataaactttataggctactgcctatgaaatgcaagagagccccttataagagctaccgaaattcttcctatgaaaatgcacgagaaaacagtcaaatgaatgagtctgcacctggtacctatgttgttcagaatccacacagctctgaattaccaacgctgaatttccaagatactgtaaacaccctgaccaacagtccagccatcccattggaaacatctgcatgtcaggacatacccacttctgccaatgtacaaaatgcagagggtaccaaatggggagaggaggcattgaaaatggatcttgacaataacttttattcaactgaggtgtcagtttcttccactgaaaatgctgtcagttctgacctccgggcaggggatgtacctgttttatctttgagtaatagcagtgagaatgccgcctctgtgatcagctacagtggctctgcaccctcggtcattgtacacagcagccagttttcatcggtgatcatgcacagcaatgccattgctgccatgaccagcagcaaccacagagccttttcagacccagctgtcagtcagtccctgaaagatgacagtaagcccgagccagataaagtgggtaggtttgcaagcagacccaaaagcattaaggagaaaaagaaaactacatcacataccaggggagaaataccggaggagtcaaactatgttgctgatcctggaggatcactgagcaaaaccacaaatattgctgaagaaaccagcaaaattgaaacctacattgcaaaacctgctctgccgggaacctccacaaatagtaatgttgcacccctttgccaaataacagtgaaaattggaaacgaagccattgtgaaaaggcacattctaggatctaaattgttttataaaagagggagaagacccaagtatcagatgcaggaggagcctttgccacaggggaatgacccagaacccagtggagacagcccactcgggctttgccaatccgagtgcatggagatgagtgaagtgttcgatgacgcaagtgaccaggattccactgacaaaccgtggcgcccttactacaactacaaacccaaaaagaaatccagacagttgaaaaaaatgaggaaagtcaactggaggaaggagcacggaaacaggagcccgagccataaatgtaaatacccagcagaactggattgcgccgtggggaaggctcctcaggataaaccctttgaggaagaagaaactaaagagatgcccaagctgcagtgtgaactctgtgatggagacaaagcagtgggggctggaaaccaaggaaggccccaccgacatcttacttctcggccatatgcctgcgagctctgcgccaagcagttccagagcccttccacactcaaaatgcacatgagatgtcacaccggggagaagccataccagtgcaagacctgcggacggtgcttttcggtgcaaggaaacttacagaaacatgaacgcatccacctgggcttgaaggagttcgtctgtcagtattgcaacaaggcattcaccttgaatgagaccctcaaaatccatgaaagaatccatactggagaaaagcgttaccactgtcagttctgctttcagagatttttgtatctctccaccaaaaggaatcacgagcagaggcatattcgggagcataatgggaagggctatgcctgcttccagtgccccaaaatttgcaaaacagctgctgcccttggaatgcaccaaaagaaacacttattcaaaagcccaagtcagcaggagaaaataggtgacgtgtgccacgaaaactcaaatcccttggagaatcaacatttcattggttcagaagacaatgaccaaaaggataacatacaaaccggtgtggaaaatgttgtcctttgagtggcaagaattagaaaaatcttc

SEQ ID NO: 267798 - DNA, 127 bp, Artificial Sequence
  derived and/or modified sequence
aacaacaatgacaaacaaacaacaacgacaaagacatttatttggttcacaaatctccagggtgtacaagaagcatggtgccagcatctgctcagcttctgatgagggctctgggaagcttttactc

SEQ ID NO: 267799 - protein, 497 aa, Artificial Sequence
  derived and/or modified sequence
MMAAVPPGLEPWNRVRIPKAGNRSAVTVQNPGAALDLCIAAVIKECHLVILSLKSQTLDAETDVLCAVLYSNHNRMGRHKPHLALKQVEQCLKRLKNMNLEGSIQDLFELFSSKVLYKGVLKRLILLYEPLFGLLQEVARIQPMPYFKDFTFPSDITEFLGQPYFEAFKKKMPIAFAAKGINKLLNKLFLINEQSPRASEETLLGISKKAKQMKINVQNNVDLGQPVKNKRVFKEESSEFDVRAFCNQLKHKATQETSFDFKCSQSRLKTTKYSSQKVIGTPHAKSFVQRFREAESFTQLSEEIQMAVVWCRSKKLKAQAIFLGNKLLKSNRLKHLEAQGTSLPKKLECIKTSICNHLLRGSGIKTSKHHLRQRRSQNKFLRRQRKPQRKLQSTLLREIQQFSQGTRKSATDTSAKWRLSHCTVHRTDLYPNSKQLLNSGVSMPVIQTKEKMIHENLRGIHENETDSWTVMQINKNSTSGTIKETDDIDDIFALMGV

SEQ ID NO: 267800 - DNA, 4672 bp, Artificial Sequence
  derived and/or modified sequence
ggcccggactgggtcccatcgccccacctccggtcgctggacgtgctctcgcgtagctccgcctttcgtaagtccccccgcctcgcatgatggctgcggtgccgccgggcctggagccgtggaaccgtgtgagaatccctaaggcggggaaccgcagcgcagtgacagtgcagaaccccggcgcggcccttgacctttgcattgcagctgtaattaaagaatgccatctcgtcatactgtcgctgaagagccaaaccttagatgcagaaacagatgtgttatgtgcagtcctttacagcaatcacaacagaatgggccgccacaaaccccatttggccctcaaacaggttgagcaatgtttaaagcgtttgaaaaacatgaatttggagggctcaattcaagacctgtttgagttgttttcttccaaggttctctataaaggtgtcttaaaaaggttgattttgttatatgagcctttgtttggattgcttcaagaggtcgctaggattcaaccaatgccttacttcaaagattttacctttccttctgatatcactgaatttttaggacagccatattttgaagcctttaagaaaaaaatgcctatagcttttgcagctaaaggaataaataaattgctaaataaactgtttttaataaatgagcagtcaccaagagccagtgaagaaaccttgcttggaatttcaaaaaaagctaaacaaatgaagatcaatgtacagaataatgtggatcttggacagccagtaaagaataagagagtcttcaaagaagagtcatcagaatttgatgtgagggctttctgcaaccagctgaaacacaaagctactcaggagaccagttttgattttaaatgttctcaatccagactaaagacaaccaagtattcttctcagaaagtgataggaactcctcatgccaaaagttttgtgcaaagattccgagaggctgagtccttcacacaactttctgaagaaatccagatggcagttgtatggtgcaggagcaaaaaactcaaggctcaggccatttttctgggtaacaaacttcttaaaagcaaccggcttaaacatctggaagctcaaggtactagtttgccaaagaaactagagtgcataaaaacgtctatttgcaaccaccttcttcgtggctcaggtatcaaaacttcaaagcatcatctgagacagagaagatcacagaataaatttttacggagacaaaggaaaccacagagaaagttgcagtcgactcttttaagggaaattcagcagttctctcaagggactcggaagagtgctacagataccagtgctaagtggagactctcacactgtactgtgcatagaactgatctctaccctaacagtaagcagctcttgaatagtggagtttcaatgcctgtcatacaaactaaggagaaaatgattcatgaaaatcttagaggcatccatgaaaatgaaactgattcgtggacggtgatgcaaataaataaaaacagtacatcaggaaccattaaggagacagatgacattgatgatatttttgctttaatgggagtttagatgttcgttcatatgtgagacttttaagtgattaacaaggctagttcagtgttctaagtagaactgctaagatctggaagtaccacctggactcacagaggagctgctttagtgcagcattgcacaggagttcatttcagttcagtctacatttaaagtagcattgtgtcatttcatcaacaagtatttcttttttggcttcaactacatgtcaggtgttaatatgaaaaatctgccacagcctacccttgagaagcagatgtaattccttgagtgaggctagtaagtctctgaaaaactgaataattttatgacttactaggcaatttaataatcgtttgcaaaaaccattgtgtcttgaggtaaatgaggagcgggggtgggagatagcaaggaaacacctgaaaggtcaatttggtcttattggctccattatacataggtccgcctctgaatactaaagtttgtagctcctgacatttatgttttcttgtttatatgttggaattgatcaacaaggtttgccactgcttgtattaccagggactggttacaaccattatttctcttcatttgcttggcttatctcatattaaagtgagtttggagttctccaaaacgttttaattttatttatttgggtaccagtgattgattccaaataaacctttttacaaaaaggcaataaggtggtttatggttacatatgaaatataataggataacaggtagatgagaaagtaaaatgaaaaaatgaggttaggagatacaaagtagacccaggaatgaggctagaacatttataatttggtgttgatgctgtcatctgataggggatgttgctcgtactgttgctctgaggggagtacatcttgagtattttcaaataatgatgtgaagtttgaggtaggtatctttccaatgttctaactttactagaattaggttattaagcttctctagtgcccttaacttttgttacatagagatttaaagaaaaagaaagtagtaccttagtatgtaccgcatccttcttttcctcagccaccctatcataacagaagttatttcccttccattctttatttggctttgttctttccctgtctgccttctccattttctcagttatctctaccagtggttctcaaactttagactttttgagaatcacctggtgggttgctaaaagatgcagattagccctttcccagagactgataaacaggggccagaaacctgcatttttaacatggagcccaagtgattttgatccaggtggcccccaaatccagttatataaacactactttagcttctctcctgaagccttaagtaaactggtttaattcttaatctgtagtcagttttcatattccttttggctttctaccaagtggtagtatccatttagtgccttaaaatacagacaataccaaggagatttcattctagacaagtctagaaatggccattaacttctaagtgtccttgtgttcaatgaatatcctttacctattgggaaatagaaggtaaattagtaagagaactggtgtatagctttgtggaccatagggcttatttgctgagagttgtctatattcatgcacccagtcccctaagtagcctcttttaatacttcatttagctgattcagaaaaaaactccctgggaattaggagatttaaggttcagtcttgcttctcctacttgtggcttcactgagctagtcagtttcctcaggcttaggtttctggatttgaagtggaattttttcaagaatgaaacttttatagctgaaataaactttggagcttatctttcattggaaaaaccagggtggttcagtgagttaaggacaatatagcatggactgggctgccagtctagcatttgtttccaaattcattcatgttcttttggagtatcttcatctcctctcattttcccatcttctgccctttactattctgggaaaatggcaaaaaagcttcacatgtgtccacaaaatgacaatttgtatgtttataaggaattcagtattctgtatcagttactttttccaaataaatccaaatatttaacatttaaaaaaatgcaatctaaagtataccaaactgtaacttacctagtaaatgagattagaaactattgtcagggtcatcgtagtgaattattattattattattttttgagacagagtcttgtgctgttgcccaggctggagcacagtggtatgatctcagttcactgcaccctccacctcctgggctcaagctattctcccacctcagccgcctgagtagctgacactataggcaccaccatgccctggctaattttttaaaaactttgtgtagagatagggtttcaccatgttgcttaggctggtctcaaactcctggactcaagggatccacccactttggtctcccaaagtgctgggattacccacatcctagtaccaactttatcacttctgatggcattaggacacacaggccatttataagagcagtgtttgagacctcctgtgtgtcacttccaatcctcttggccttcatactaaagtcactgctgtggcaaccagtttcaagcagggctgaaccttgcctcttgctctggggatgtctcacttcctgcccctgggcttctcaccagctacaggaactgcctagcacttgggtatgtacaacctggaagaggtgtggggccaccccatcccctcctcaaagaaattcacaggcacagtatgaggctaaagtaacttccatcttggatgctaatctaccatgttgacttctgataaccagttcctggaatgccctctaagatttctacttttatctattaaaagaacacacacacacacacacactgtaaatcctggccttaagcaagttataggctaagttgtaaacagcattcttgcctttccctgaggaggtgacttcagtgtctcacatgttccttcatgtacccccttttctctatggcatataagccctgggtcggggggtaactgtggggatcactgcctgagacatggcttctgtgcataagtccctattaaatgtttctttctgacaaa

SEQ ID NO: 267801 - DNA, 1494 bp, Artificial Sequence
  derived and/or modified sequence
atgatggccgccgtgccccccggcctggagccctggaacagagtgagaatccccaaggccggcaacagaagcgccgtgaccgtgcagaaccccggcgccgccctggacctgtgcatcgccgccgtgatcaaggagtgccacctggtgatcctgagcctgaagagccagaccctggacgccgagaccgacgtgctgtgcgccgtgctgtacagcaaccacaacagaatgggcagacacaagccccacctggccctgaagcaggtggagcagtgcctgaagagactgaagaacatgaacctggagggcagcatccaggacctgttcgagctgttcagcagcaaggtgctgtacaagggcgtgctgaagagactgatcctgctgtacgagcccctgttcggcctgctgcaggaggtggccagaatccagcccatgccctacttcaaggacttcaccttccccagcgacatcaccgagttcctgggccagccctacttcgaggccttcaagaagaagatgcccatcgccttcgccgccaagggcatcaacaagctgctgaacaagctgttcctgatcaacgagcagagccccagagccagcgaggagaccctgctgggcatcagcaagaaggccaagcagatgaagatcaacgtgcagaacaacgtggacctgggccagcccgtgaagaacaagagagtgttcaaggaggagagcagcgagttcgacgtgagagccttctgcaaccagctgaagcacaaggccacccaggagaccagcttcgacttcaagtgcagccagagcagactgaagaccaccaagtacagcagccagaaggtgatcggcaccccccacgccaagagcttcgtgcagagattcagagaggccgagagcttcacccagctgagcgaggagatccagatggccgtggtgtggtgcagaagcaagaagctgaaggcccaggccatcttcctgggcaacaagctgctgaagagcaacagactgaagcacctggaggcccagggcaccagcctgcccaagaagctggagtgcatcaagaccagcatctgcaaccacctgctgagaggcagcggcatcaagaccagcaagcaccacctgagacagagaagaagccagaacaagttcctgagaagacagagaaagccccagagaaagctgcagagcaccctgctgagagagatccagcagttcagccagggcaccagaaagagcgccaccgacaccagcgccaagtggagactgagccactgcaccgtgcacagaaccgacctgtaccccaacagcaagcagctgctgaacagcggcgtgagcatgcccgtgatccagaccaaggagaagatgatccacgagaacctgagaggcatccacgagaacgagaccgacagctggaccgtgatgcagatcaacaagaacagcaccagcggcaccatcaaggagaccgacgacatcgacgacatcttcgccctgatgggcgtgtag

SEQ ID NO: 267802 - DNA, 1494 bp, Artificial Sequence
  derived and/or modified sequence
atgatggccgcagtgccacccggtctggaaccgtggaatcgcgtcaggataccaaaggctgggaacaggtccgccgtgacagttcagaaccccggtgccgctctggacctttgcattgctgccgtcatcaaagaatgccacctggtgatactgagtctcaagtcccaaacactagacgccgaaaccgatgtgctatgtgctgttctgtacagtaaccataaccggatggggcgacataaaccccacctggcactcaagcaagtggagcagtgcctcaagcgactcaaaaatatgaacttggagggctcaattcaagatctgttcgagttgtttagttcaaaggtgctgtataaaggcgtcctcaagagactgatattgctgtacgagcctttatttggtttactacaggaagtagctcgcatccagccgatgccttatttcaaggacttcacattcccttctgatatcacagagttccttggacagccttattttgaggcctttaagaagaagatgccaattgcctttgccgcaaagggcataaataagctcctcaacaagttgtttctgattaatgaacagagccctcgtgctagtgaggagactctcctggggatctccaaaaaggccaaacagatgaagatcaacgtccagaacaacgtcgatcttggtcagccggtgaaaaacaagagggttttcaaggaagagagcagcgagtttgatgtacgggccttctgtaatcagctcaagcataaggctactcaagaaacatcgttcgactttaagtgcagtcaaagtcggctgaagacaacaaaatacagtagccaaaaggtaattggcaccccccatgctaagagttttgtacagcggttcagagaggctgagagtttcacacagctgtctgaagagatccaaatggcagtcgtgtggtgccggtctaagaaactgaaagcacaggccatattcttggggaacaagttactgaagagtaaccgcctcaagcatctcgaagctcagggaacaagcctccctaaaaagctggaatgcattaaaactagcatttgcaatcatctgctaagggggagcggaataaaaacgagcaagcaccatcttcggcagcggcgaagtcagaacaagtttctgcgccggcagcgtaagcctcagcgaaaactgcaaagcactctgctcagagagatccaacagtttagccagggaaccaggaaaagcgcaacagacaccagtgccaagtggcgccttagtcactgtacggtccacagaaccgacctgtacccaaacagtaagcagctgctgaactcaggagtttccatgccagttattcagactaaagaaaaaatgatacacgaaaatctgcgtggaatccacgagaacgagaccgactcatggaccgtaatgcagatcaacaagaacagtacgagtggcaccatcaaggagaccgacgacattgacgacatctttgctctgatgggcgtctag

SEQ ID NO: 267803 - DNA, 1494 bp, Artificial Sequence
  derived and/or modified sequence
atgatggctgctgtgcccccaggcctggagccctggaacagagtgcgcatccccaaggccggcaacagatctgctgtgacagtgcagaaccctggagctgccctggacctgtgcatcgctgctgtgatcaaggagtgccacctggtgatcctgagcctgaagagccagaccctggatgctgagacagatgtgctgtgtgctgtgctgtacagcaaccacaacaggatgggccgccacaagccccacctggccctgaagcaggtggagcagtgcctgaagaggctgaagaacatgaacctggagggcagcatccaggacctgtttgagctgttcagcagcaaggtgctgtacaagggcgtgctgaagaggctcatcctgctgtatgagcccctgtttggcctgctgcaggaggtggcccgcatccagcccatgccctacttcaaggacttcaccttccccagcgacatcacagagttcctgggccagccctactttgaggccttcaagaagaagatgcccatcgcctttgctgccaagggcatcaacaagctgctgaacaagctgttcctgatcaatgagcagagcccccgggccagcgaggagaccctgctgggcatcagcaagaaggccaagcagatgaagatcaacgtgcagaacaacgtggacctgggccagcctgtgaagaacaagagggtcttcaaggaggagagcagcgagtttgatgtgcgggccttctgcaaccagctgaagcacaaggccacccaggagaccagctttgacttcaagtgcagccagagccggctgaagaccaccaagtacagcagccagaaggtgattggcacccctcatgccaagagctttgtgcagcgcttccgggaggccgagagcttcacccagctgtctgaggagatccagatggctgtggtgtggtgccgcagcaagaagctgaaggcccaggccatcttcctgggcaacaagctgctgaagagcaaccggctgaagcacctggaggcccagggcaccagcctgcccaagaagctggagtgcatcaagaccagcatctgcaaccacctgctgcggggcagcggcatcaagaccagcaagcaccacctgcggcagaggaggagccagaacaagttcctgcggcggcagaggaagccccagaggaagctgcagagcaccctgctgcgggagatccagcagttcagccagggcaccaggaagagcgccacagacaccagcgccaagtggaggctgagccactgcaccgtgcacaggacagacctgtaccccaacagcaagcagctgctgaacagcggcgtgtccatgcctgtgatccagaccaaggagaagatgattcatgagaacctgcggggcatccatgaaaatgaaacagacagctggacagtgatgcagatcaacaagaacagcaccagcggcaccatcaaggagacagatgacattgatgacatctttgccctgatgggcgtgtag

SEQ ID NO: 267804 - DNA, 1494 bp, Artificial Sequence
  derived and/or modified sequence
atgatggccgccgtgccccccggcctggagccctggaaccgggtgcgtatccctaaagccgggaaccggtctgctgtgaccgtgcagaatcccggggctgcactggatctctgtattgccgccgtcattaaagaatgtcacctggtaattctgagtctcaagtctcagaccctggacgcagaaacagatgtcctctgtgccgtcctctattctaaccataatcgtatggggagacataagccacacctggctcttaaacaagtggaacagtgcctgaagagactcaaaaatatgaacctggaaggatcaatccaggacctcttcgagctgttttctagcaaggtgttatacaagggggtactcaaacggctaatcctattatatgaacctctattcggtctgctacaggaggtggctaggattcagcctatgccctattttaaggattttacatttccctcagacattaccgagtttttgggccaaccttatttcgaggcgttcaagaaaaaaatgccaatcgcctttgccgctaagggaataaacaagctgctgaacaagctctttttaatcaatgaacagtcccctagggcaagtgaggaaaccctgctggggatatctaaaaaggcgaaacaaatgaagatcaatgtccagaacaacgtcgacctgggacagcccgtgaaaaataagcgcgtgtttaaagaggaatcctcagaatttgatgttagagctttctgcaaccaactgaagcacaaggcaacgcaggagacctcattcgactttaagtgtagtcaaagtcgcttaaagacgaccaagtacagcagtcagaaggtcatcggcaccccccacgccaaatcgtttgtccagcggttcagggaggccgagagcttcacccagctgtctgaagaaattcagatggcagtggtctggtgtcggagcaaaaagctgaaggcacaggccatttttctaggcaataaattattgaagagtaatagactgaagcacctggaagcgcagggtacctcgctacctaaaaagcttgagtgtatcaagacctcaatttgtaatcatttactgcgcgggtcaggtattaagacatctaaacaccacctccggcagcggagatctcaaaataaattcctccgcagacagagaaagccgcagagaaagctccagtcaaccctgctgagggagatccagcagttttcacagggcactcgtaagtccgccacggatacgtcagctaaatggcggctgtcacattgcaccgtccatcgcaccgatttatatccaaactcaaagcagctcctgaacagtggcgttagcatgcctgtgatccaaaccaaggagaaaatgattcacgagaatcttagaggcatccatgaaaacgagactgactcatggactgtgatgcagattaataaaaattctacctccgggactattaaagaaactgatgacatagacgatatcttcgccctgatgggagtgtag

SEQ ID NO: 267805 - DNA, 1494 bp, Artificial Sequence
  derived and/or modified sequence
atgatggcagccgtgccgccaggtcttgagccctggaacagagtacggatcccaaaagctggcaacagatccgctgtgaccgtgcagaaccccggagctgcacttgatctctgcatcgccgcagtcatcaaggaatgccacctggttatcctcagcctgaagtcccagactctggacgccgaaacagatgtgctttgtgccgtgctgtacagcaatcacaaccgcatgggccgacataagccccacctggccttgaaacaggtggagcagtgtctcaaaagactgaaaaatatgaacctagaaggctccattcaggatctcttcgagctcttctcgtctaaagtcctgtacaagggagtgctgaaacggctgattctgctgtatgaacctctgttcggcctcctccaagaagttgctagaatacagcctatgccatacttcaaagactttacatttccatcagatatcacagaattcttgggacagccatactttgaagcttttaaaaagaaaatgcccatcgctttcgcagcgaaaggcatcaacaaattgctgaacaagttattcctcattaacgagcagtccccgagagcctcggaggagacgctcctgggaatctccaaaaaagctaaacagatgaagataaacgtgcagaataacgtggacctggggcagccagtaaaaaacaagagagtcttcaaagaggagagctctgagttcgatgtgcgtgccttttgcaaccaactgaaacacaaagccacccaggaaactagttttgatttcaaatgtagtcagagtcggctcaagaccacaaaatacagctcacagaaagtgattggcaccccccacgcgaagtcattcgtccagcggtttcgtgaggccgagagcttcacacagctatctgaggaaattcaaatggcggtcgtgtggtgccggtccaagaagcttaaggctcaggccatctttctcggaaacaaattactgaagtccaatcggttgaaacacctcgaggcccagggcacgagtctccccaagaaattagaatgcatcaagacctccatttgcaaccaccttctgagaggcagtggaattaagacaagcaagcatcatctgcgccagaggcgttcccagaataagttcctgcgacggcagcggaagccccagcggaagctgcagagtaccctgttgcgcgaaattcagcagttctcccagggcactcggaaaagtgccacagacacaagtgccaaatggcggctcagtcactgtaccgtccatagaaccgacctgtatccgaactcaaaacagctgctgaatagcggagtttctatgccagtcatccagacaaaagaaaagatgattcatgaaaacctaagaggaattcacgagaacgagactgattcatggacagtgatgcaaatcaacaaaaattccaccagcgggaccattaaagaaaccgacgacattgacgatatctttgccttgatgggtgtgtag

SEQ ID NO: 267806 - DNA, 1296 bp, Artificial Sequence
  derived and/or modified sequence
atgaaggtgctgggcgcctgcaagctgctgctgagactgctggactgctgctgcaagaccttcctgctgaccgtgaagcacctgggcctgcaggagttcatcatcctgaacctggtgatggtgggcctggtgagcagactgtgggtgctgtacaagggcgtgctgaagagactgatcctgctgtacgagcccctgttcggcctgctgcaggaggtggccagaatccagcccatgccctacttcaaggacttcaccttccccagcgacatcaccgagttcctgggccagccctacttcgaggccttcaagaagaagatgcccatcgccttcgccgccaagggcatcaacaagctgctgaacaagctgttcctgatcaacgagcagagccccagagccagcgaggagaccctgctgggcatcagcaagaaggccaagcagatgaagatcaacgtgcagaacaacgtggacctgggccagcccgtgaagaacaagagagtgttcaaggaggagagcagcgagttcgacgtgagagccttctgcaaccagctgaagcacaaggccacccaggagaccagcttcgacttcaagtgcagccagagcagactgaagaccaccaagtacagcagccagaaggtgatcggcaccccccacgccaagagcttcgtgcagagattcagagaggccgagagcttcacccagctgagcgaggagatccagatggccgtggtgtggtgcagaagcaagaagctgaaggcccaggccatcttcctgggcaacaagctgctgaagagcaacagactgaagcacctggaggcccagggcaccagcctgcccaagaagctggagtgcatcaagaccagcatctgcaaccacctgctgagaggcagcggcatcaagaccagcaagcaccacctgagacagagaagaagccagaacaagttcctgagaagacagagaaagccccagagaaagctgcagagcaccctgctgagagagatccagcagttcagccagggcaccagaaagagcgccaccgacaccagcgccaagtggagactgagccactgcaccgtgcacagaaccgacctgtaccccaacagcaagcagctgctgaacagcggcgtgagcatgcccgtgatccagaccaaggagaagatgatccacgagaacctgagaggcatccacgagaacgagaccgacagctggaccgtgatgcagatcaacaagaacagcaccagcggcaccatcaaggagaccgacgacatcgacgacatcttcgccctgatgggcgtgtag

SEQ ID NO: 267807 - DNA, 1296 bp, Artificial Sequence
  derived and/or modified sequence
atgaaggtgctgggagcctgcaaactccttctcagactcctcgattgctgttgtaaaactttcttgcttaccgtcaaacacttggggctgcaagaattcattatacttaatctggtgatggtcgggctagtaagccgcctttgggtcctgtacaagggggtgctgaaacgcctgatcctactgtacgaacctctgtttggtctcttacaagaggtggcccgtattcagcccatgccatacttcaaggacttcactttcccttccgacatcacagagttcctcggccaaccatactttgaggccttcaaaaaaaaaatgcctatagcgttcgctgctaagggcatcaataaactactgaacaaactgtttctgattaacgaacagtcccctcgcgcaagcgaagaaaccttactcggcataagtaaaaaagccaagcaaatgaagatcaacgtacagaataatgtggacctgggccagcccgttaaaaataagagagtcttcaaagaagagagctcagagtttgacgtccgcgccttttgcaaccaactgaaacacaaagctacacaggagacatctttcgactttaaatgttcccagtcgcgtctaaagacaacaaagtacagctcacaaaaagtcattggtactccccatgcaaagtcgtttgtccagaggtttcgcgaagccgaaagttttactcagctatccgaagagatccagatggcagtcgtatggtgtagaagtaaaaagctcaaagcccaggcaatttttctgggtaataagcttttgaaatccaatagactcaaacacctagaggcccaaggcacgtcattaccgaaaaagttggaatgcatcaaaacttcaatatgcaatcatctgcttaggggcagcggcattaagacatctaaacaccatttgagacagagaagatctcaaaataagttcctgcgacgccagaggaagccacagcgcaagcttcaatcaacattgctgcgggagattcagcagttctcccagggcacccgcaaaagcgccaccgacacctccgccaaatggagattatcccactgcactgtgcaccgcacagacctctaccccaatagcaaacagcttctaaacagcggtgtttctatgcctgtgattcagaccaaggagaaaatgatccatgaaaacctgcgagggatccatgaaaacgaaactgactcctggaccgtgatgcaaattaacaagaattccacttcaggcaccattaaggaaactgacgatatcgatgacatctttgcgttaatgggggtctag

SEQ ID NO: 267808 - DNA, 1296 bp, Artificial Sequence
  derived and/or modified sequence
atgaaggtgctgggcgcctgcaagctgctgctgcggctgctggactgctgctgcaagaccttcctgctgactgtgaagcacctgggcctgcaggagttcatcatcctgaacctggtgatggtgggcctggtgtcccggctgtgggtgctgtacaagggcgtgctgaagaggctcatcctgctgtatgagcccctgtttggcctgctgcaggaggtggcccgcatccagcccatgccctacttcaaggacttcaccttccccagcgacatcacagagttcctgggccagccctactttgaggccttcaagaagaagatgcccatcgcctttgctgccaagggcatcaacaagctgctgaacaagctgttcctgatcaatgagcagagcccccgggccagcgaggagaccctgctgggcatcagcaagaaggccaagcagatgaagatcaacgtgcagaacaacgtggacctgggccagcctgtgaagaacaagagggtcttcaaggaggagagcagcgagtttgatgtgcgggccttctgcaaccagctgaagcacaaggccacccaggagaccagctttgacttcaagtgcagccagagccggctgaagaccaccaagtacagcagccagaaggtgattggcacccctcatgccaagagctttgtgcagcgcttccgggaggccgagagcttcacccagctgtctgaggagatccagatggctgtggtgtggtgccgcagcaagaagctgaaggcccaggccatcttcctgggcaacaagctgctgaagagcaaccggctgaagcacctggaggcccagggcaccagcctgcccaagaagctggagtgcatcaagaccagcatctgcaaccacctgctgcggggcagcggcatcaagaccagcaagcaccacctgcggcagaggaggagccagaacaagttcctgcggcggcagaggaagccccagaggaagctgcagagcaccctgctgcgggagatccagcagttcagccagggcaccaggaagagcgccacagacaccagcgccaagtggaggctgagccactgcaccgtgcacaggacagacctgtaccccaacagcaagcagctgctgaacagcggcgtgtccatgcctgtgatccagaccaaggagaagatgattcatgagaacctgcggggcatccatgaaaatgaaacagacagctggacagtgatgcagatcaacaagaacagcaccagcggcaccatcaaggagacagatgacattgatgacatctttgccctgatgggcgtgtag

SEQ ID NO: 267809 - DNA, 1296 bp, Artificial Sequence
  derived and/or modified sequence
atgaaggtgctgggcgcctgcaagctgctgctgcggctgctggactgttgttgtaagacatttctgctgacggtgaaacatctcgggctccaggagttcattatactgaatttggtaatggtcggcctcgtttcccgcctctgggttttgtacaagggggtcctcaaaaggctcatcctgttgtatgaacctctgttcggtctgctccaggaagttgctcgtatccagcctatgccgtatttcaaggatttcaccttcccttccgacatcaccgaattcctcggccaaccctactttgaggcatttaaaaagaagatgccgattgcctttgcagccaagggtatcaacaagctcctcaacaagctgttccttataaatgagcagagcccaagagcttccgaagaaactcttctcggcatcagtaaaaaggccaagcaaatgaagatcaatgttcagaacaacgtggacctgggtcagccagtaaagaataaacgggtctttaaagaagagagttccgaattcgatgttagagctttttgcaatcaactgaaacacaaagcgacccaggagacaagttttgactttaaatgttctcagtctcggctgaagacgacaaagtattcatctcaaaaggtgattggtacaccacacgctaaatctttcgtgcaacgcttccgcgaggcagagagctttacacaactgagtgaggagatccaaatggcagtggtgtggtgcaggtccaaaaagctgaaagcccaagcgattttcctggggaataagttactgaagtccaaccgactcaagcacctggaagcccagggcacctcactgccaaaaaaactggaatgcatcaagaccagtatttgcaaccacctgttacgggggtctggaattaaaacaagcaagcaccatctgcggcaacggaggtctcagaacaaatttctgcgccgccaacgcaagccgcagaggaaactgcagtctaccctcctgagagaaattcagcaattcagccaaggcaccaggaagtctgcgactgatacaagcgccaagtggcggctaagtcactgtactgtccatcgcacggatctgtacccaaactcgaagcagctgttgaacagcggcgtgtcaatgcccgtaattcagactaaggaaaaaatgatccacgaaaacttacggggaatccacgaaaatgaaactgattcatggacggtaatgcagatcaacaagaattccacatcagggaccattaaagaaaccgatgacattgacgatatttttgccctcatgggcgtctag

SEQ ID NO: 267810 - DNA, 1296 bp, Artificial Sequence
  derived and/or modified sequence
atgaaggtgctcggggcttgtaagttactgcttagattgcttgattgctgttgtaagacctttctgctgactgttaaacacttgggccttcaagagttcattatactgaacctggtgatggtgggcctggtgtcacgcctgtgggtgctgtacaagggtgtcctgaaaagattaattttgctgtacgagccactgtttggactgctccaggaggtggctcgaatccagcccatgccctacttcaaagatttcacattccctagcgatatcacagagtttctgggccagccctatttcgaggcatttaaaaagaagatgccaatagctttcgcggcaaaaggaatcaataagcttctgaacaagctgtttttgattaacgagcagtctccaagagcgagtgaagagactctgctgggtatatcaaagaaggccaagcagatgaagattaacgtgcagaacaatgtcgacctagggcagcccgtgaaaaacaaaagggtatttaaggaggagtcctccgagtttgacgtgcgggctttttgtaaccagctaaagcataaggctacccaggaaacttcattcgatttcaagtgctctcagtctagactcaaaacaactaaatattcttcccagaaagtcatagggacaccccacgctaagtcgttcgtgcaaaggttccgggaggcagagtcgttcacccaattatccgaggaaattcagatggctgtggtgtggtgtagatccaaaaaattgaaggcgcaggctatcttcctgggtaataagctactcaaaagcaataggcttaagcacttagaggcccaagggacctctcttccgaagaagttagagtgtatcaagacatcaatctgcaaccatctactcaggggttccgggattaagaccagtaaacaccacctgcgtcaaaggcggagtcaaaacaaattcctacgcaggcaaagaaagcctcagcggaagctccaatctaccttgctgcgcgagatacagcaatttagccaggggactaggaagagcgctaccgatactagcgccaaatggagactgtcccattgtactgtacatagaaccgatttgtacccaaattcaaagcagctcctgaacagcggcgttagcatgcccgtgattcagactaaagagaaaatgatacacgaaaacctcagaggaatacacgagaatgagactgatagttggactgtgatgcaaattaacaagaactcaacttccggcaccattaaggaaactgacgatattgatgatatattcgctctgatgggcgtctag

SEQ ID NO: 267811 - protein, 214 aa, Artificial Sequence
  derived and/or modified sequence
MPKVLCKDSERLSPSHNFLKKSRWQLYGAGKKLKAQAIFLGNKLLKSNRLKHLEAQGTSLPKKLECIKTSICNHLLRGSGIKTSKHHLRQRRSQNKFLRRQRKPQRKLQSTLLREIQQFSQGTRKSATDTSAKWRLSHCTVHRTDLYPNSKQLLNSGVSMPVIQTKEKMIHENLRGIHENETDSWTVMQINKNSTSGTIKETDDIDDIFALMGV

SEQ ID NO: 267812 - protein, 784 aa, Artificial Sequence
  derived and/or modified sequence
MTIVPTTDIEPVTVRTEATVTTLAPKTSQRTRTRRPRPKHKTTPRPETLQTKLDFGPITPGTSSAPTTTTKRTRRPHPKPKTTPHPEVPQTKLAPKVPQRTHRPHPKPKTTLSPEELQTELVPVTDLEPVTFRTEIPATTLATKTSKRTRPPRPRPKTTPSPQAPETKPVPATVLEPVTLRPEASTTLASKTSQRTRRPRLRTKTTPRPEAPESKPAPKQTPRAPPKPKTSPRPRIPQTQPVPKVPQRVTAKPKTSPSPEVSYTTPAPKDVLLPHKPYPEVSQSEPAPLETRGIPFIPMISPSPSQEELQTTLEETDQSTQEPFTTKIPRTTELAKTTQAPHRFYTTVRPRTSDKPHIRPVLNRTTTRPTRPKPSGMPSGNGVGTGVKQAPRPSGADRNVSVDSTHPTKKPGTRRPPLPPRPTHPRRKPLPPNNVTGKPGSAGIISSGPITTPPLRSTPRPTGTPLERIETDIKQPTVPASGEELENITDFSSSPTRETDPLGKPRFKGPHVRYIQKPDNSPCSITDSVKRFPKEEATEGNATSPPQNPPTNLTVVTVEGCPSFVILDWEKPLNDTVTEYEVISRENGSFSGKNKSIQMTNQTFSTVENLKPNTSYEFQVKPKNPLGEGPVSNTVAFSTESADPRVSEPVSAGRDAIWTERPFNSDSYSECKGKQYVKRTWYKKFVGVQLCNSLRYKIYLSDSLTGKFYNIGDQRGHGEDHCQFVDSFLDGRTGQQLTSDQLPIKEGYFRAVRQEPVQFGEIGGHTQINYVQWYECGTTIPGKW

SEQ ID NO: 267813 - DNA, 2355 bp, Artificial Sequence
  derived and/or modified sequence
atgacaatcgtgcctaccaccgatatcgaacccgtgacggtacgaaccgaggctacggtcactaccctggccccaaaaacctcccagagaacccgcactcgccgtccaaggcccaagcacaaaactactcccagacccgaaacactgcaaaccaaattggactttggacctatcaccccaggaacctcatctgcacctacaacgacaacaaaacgaactcgtagaccccatcctaaaccaaagaccaccccccaccctgaggtgccccagaccaaactggctcctaaagtgccacaaagaactcatagaccccacccaaaaccaaagaccaccctgtccccagaagagctgcagaccgagctggtccctgttacagacttagagcccgtcacctttagaacggagattcccgcaaccaccctggctacaaaaacatccaaacggactcgccctcctcgcccacgtcctaagaccaccccgtcacctcaggccccagagaccaaaccggtgcccgcaaccgtccttgagccagtgacactaaggcctgaggctagcactacactcgcttccaagacgtcacaaagaacacgccgtccccgattaaggactaaaacaacacccaggcctgaggcacctgagagtaaacctgccccaaagcagactcctcgagctccaccgaagcctaagactagtcctcgacctagaatccctcagacccaaccagtgcctaaggtgcctcagagggtcaccgcgaaacccaaaactagcccgtctccagaagtgtcgtacaccacacctgctccaaaggacgtcctcctccctcataaaccctatcccgaggtgagccagtccgagcccgctcctctcgagacgcgcggtattccatttatacccatgattagcccttctccctcccaggaagagctgcagacaactctagaggagacagaccagagtacccaagaaccctttactactaaaattccacgaaccacagaactcgctaaaaccacacaagccccacataggttctataccaccgtgcgtcctcgaacttcggacaagccacacattagacctgtgttaaaccggaccactactcgccctactaggcctaagccctccgggatgccctcgggcaatggagtggggacaggggtcaagcaagcgccacggcctagcggtgctgaccgtaatgtaagcgtggacagcacacatcccaccaaaaaaccagggaccagaagacctccactaccaccacgcccaacccaccctagaaggaagcctttaccccctaacaacgtcacaggcaaacctggcagtgctggtatcatctctagcggtcctattacaacccccccactgcgatctacccctcggcctactggcacccccctcgagaggattgaaacagatatcaagcagccaacagtgcctgcatcaggtgaagaacttgagaacatcaccgactttagctccagccctacaagggaaacagatcccctcggaaaacctcgattcaaaggccctcacgtgaggtatatccagaagcctgacaattccccatgcagtatcacagatagtgtgaaaaggttccccaaggaggaagctacagagggcaatgctacgagcccgcctcagaaccccccaacaaatttgaccgtggtgaccgtggaaggctgccccagttttgtaatactcgactgggaaaagccgttgaatgacacggttaccgagtacgaagtcatcagccgtgaaaacggaagcttttccggtaagaacaagtccatccagatgaccaatcagacattctcaaccgtagagaatctgaagccaaacactagttatgagtttcaagtcaaaccaaaaaaccctctgggtgaaggcccagtgagcaacaccgtggcattttctaccgagtccgccgatccgagggtaagcgagcctgtgtctgccggtagggatgctatttggaccgaacggccttttaatagcgacagctactccgaatgtaaaggcaagcaatatgtgaagcggacttggtacaagaaattcgtgggggttcagctctgcaacagcctaaggtacaaaatttatctgtccgacagcctcaccggaaagttttacaacattggggaccagcggggacatggtgaagaccattgccagttcgtcgattctttcctggatggtcgtacagggcagcagctaaccagtgaccagctccccatcaaggagggctacttcagggccgtgcggcaggagcctgtccagttcggcgagattggcggtcacactcagattaattacgtacagtggtatgagtgtggcacaacaatcccgggaaagtggtag

SEQ ID NO: 267814 - DNA, 2355 bp, Artificial Sequence
  derived and/or modified sequence
atgaccattgtaccgacaacagatatcgagcccgtgacagtacgcacggaagctacagtaactaccctcgccccgaaaacgagccaacgtacccggacccgccgtcctcggcccaaacacaagacaactcccagacctgagacactccaaactaaactggacttcggaccaattaccccaggcacaagttctgcgcctacaactacaacaaaacggacacgaaggcctcatcccaaacccaagaccacccctcaccccgaagttccgcagaccaagttagcgccgaaggtgcctcaaagaacccatcgaccgcacccgaagccaaagactactttgtctcccgaggaactgcagacagaactggttccagttaccgatctcgagcctgtcaccttccgcaccgagatccccgcgacaacactggcgactaagactagtaagcgtacgcggcctcccagaccccgcccaaaaaccacgccctcaccccaggcccctgaaaccaaacctgtgcccgcaaccgtacttgaaccagtcactctccgtcccgaggcttctaccaccctcgcctctaagacctcacagagaacacgccgcccccggctgagaacaaaaactacgccgagaccagaagctcccgagagcaagccagctccaaaacagaccccaagggccccgccaaagcctaagacctcccctaggccgcgcattccccaaactcagcccgtccctaaggtaccccagagagtcacagctaagcctaagacatctccgtcgcctgaggtctcgtatactacacccgcccccaaggatgtgttactgccacacaagccctatcctgaggtctcccagagcgaacccgctccgttggagacgagaggcatccccttcattccaatgattagcccgtcgccctctcaggaagagctccagactaccctggaggaaacagatcagagcactcaggagccttttactacgaagatccccagaaccactgaattggccaagactacccaggcccctcatcgattctatactacagtaagacctcgcacctcagataaaccgcacatcaggcccgtgttaaatagaaccacaactcgaccaactaggcccaagcccagcggaatgccatcaggcaacggcgtcgggacaggcgtgaagcaggctccaaggccttccggggcagaccggaacgtttccgtggattcaacccatcctacaaaaaaacccgggaccagaagaccaccactgccacctagacctactcatccacggagaaagcccttaccacctaataacgtgaccggaaagccaggatccgcgggcattatctcatcaggacctatcactactcctcctttgcgatccacaccgcgccccaccgggaccccattggaaaggatcgagaccgacatcaaacaaccaacagtgcccgctagcggcgaagagctcgaaaacataacagatttttctagcagtcccaccagagagaccgatcccctaggtaaacctaggtttaaggggccacatgtgaggtatattcaaaagccagataattccccatgctctattaccgattctgttaagcggtttcccaaagaggaggctactgagggaaatgccacttcccctccccagaatcccccaaccaacctgaccgtggtgaccgtggaaggatgtccgtcatttgttatactagactgggaaaagcctttgaacgacaccgtgactgaatatgaggtaataagtcgggagaatgggagtttctcaggtaaaaacaagagcatccaaatgaccaatcagacattttcgaccgttgaaaacctcaagcctaatacatcctacgagtttcaagtcaagcccaagaaccccctcggcgaaggacccgtgagtaacacggtggcattcagtacagaatcagcagatccccgggtgtctgaacctgtgagcgcagggcgggatgccatctggaccgaaagaccattcaactcagattcttattccgaatgcaaagggaaacaatacgtgaagcgcacctggtataaaaaatttgtaggcgttcaattgtgcaactctttaagatataaaatctatttatccgactcgctgaccggaaagttttacaatatcggagaccagagagggcatggagaagatcactgtcagtttgtggactccttccttgatggtcgaacagggcagcaactgacatcagatcagcttcctatcaaagaggggtacttcagggctgtacgtcaggagcccgtgcagtttggcgagatcggaggtcacactcagatcaattacgttcagtggtatgaatgcggaacaacaatccctgggaagtggtag

SEQ ID NO: 267815 - DNA, 2355 bp, Artificial Sequence
  derived and/or modified sequence
atgactatcgtacccacaacggatattgagccggtaacagtgcgaactgaagcaaccgttactacacttgcacccaaaacaagtcagcgcacccgtactcgccgcccccgcccaaaacacaaaacaacccctcgcccagagacacttcaaactaaactcgatttcggcccgataacccccggcacttcatccgctccaacaaccaccaccaagagaacaagacgcccacacccaaaacccaaaacaaccccacacccagaggtgccccagacaaagttggctccaaaagtacctcagagaacacacagacctcaccccaagcctaaaacgaccttatctccggaagaactccagactgaattagtacctgtgacagatcttgagcctgtgacttttagaacagagatacccgcaaccacgcttgcaactaaaacgtccaaaagaactcgccccccccgcccacggcccaagactacaccgtccccccaggccccagagacaaaacccgtgcccgcaaccgtactcgaacctgttaccctaagacccgaagcatctacaacattagcttcaaagacttctcaaagaacccgacgccctcggctgagaaccaaaacaaccccaaggccagaagcaccagaatcaaagccagcacctaagcaaactcctagggcccctcccaagcccaaaaccagccccaggcctcgaatccctcagacccagcctgttccaaaagtgcctcagagagtcactgcgaaacctaagaccagccccagcccagaagtgtcctataccacccccgccccaaaggatgttctcctcccccacaagccatatccagaagtgtcccaatccgaacctgcgccactggaaaccagaggcattccatttataccaatgatcagcccaagcccaagccaagaggaacttcaaactactcttgaggagacagatcagtctacacaagaacctttcacgacaaagataccacggacaacagaattagcaaagacaacccaagcacctcatcgattctatactacagtgcgccctagaactagtgacaaaccacacattcgtcccgtattaaatagaacaactacgagaccaacgagacccaaaccctctggaatgccctcaggcaacggggtggggactggggttaagcaggcccctagaccctctggcgctgacagaaacgtctccgtggattcaacccatcctacaaaaaaacccgggaccagaagaccaccactgccacctagacctactcatccacggagaaagcccttaccacctaataacgtgaccggaaagccaggatccgcgggcattatctcatcaggacctatcactactcctcctttgcgatccacaccgcgccccaccgggaccccattggaaaggatcgagaccgacatcaaacaaccaacagtgcccgctagcggcgaagagctcgaaaacataacagatttttctagcagtcccaccagagagaccgatccacttggcaaacctcgctttaaggggccccacgtgcgctatatccagaaaccagataactcgccttgctcaattacagactcggttaagcgatttcctaaagaagaagctacggagggtaacgccacatctcccccacagaacccacccaccaacctgacagtggtgaccgtcgaaggatgcccgagttttgtcatattagattgggagaaacctctgaacgatacagtgacagagtatgaggtcatatcacgcgaaaatggaagtttctccggcaagaataagtctattcaaatgacaaaccagactttttctactgtcgagaatctgaaaccaaatactagctacgagttccaagtgaagccaaagaaccccttaggggagggccctgtcagtaacaccgtggctttttcaactgaatccgcagatccaagagttagtgaaccagtctctgccggccgggatgcaatttggactgaacgaccattcaactcagactcctactctgagtgcaaaggaaagcaatatgttaagaggacatggtacaagaagtttgtaggggtgcaactctgcaattctctccgatacaagatttatctcagcgacagcctaacaggaaaattttacaatattggagaccaaaggggccacggggaagatcactgccagtttgtagactcttttcttgatggcagaacaggccagcagttgacgagtgatcaacttcctatcaaggagggctattttagagcagtgcgtcaggaacctgtccaatttggcgaaattggcgggcacacacagatcaactatgtgcagtggtacgagtgtggtactactataccaggaaaatggtag

SEQ ID NO: 267816 - DNA, 2355 bp, Artificial Sequence
  derived and/or modified sequence
atgaccatcgtgcccaccaccgacatcgagcccgtgaccgtgagaaccgaggccaccgtgaccaccctggcccccaagaccagccagagaaccagaaccagaagacccagacccaagcacaagaccacccccagacccgagaccctgcagaccaagctggacttcggccccatcacccccggcaccagcagcgcccccaccaccaccaccaagagaaccagaagaccccaccccaagcccaagaccaccccccaccccgaggtgccccagaccaagctggcccccaaggtgccccagagaacccacagaccccaccccaagcccaagaccaccctgagccccgaggagctgcagaccgagctggtgcccgtgaccgacctggagcccgtgaccttcagaaccgagatccccgccaccaccctggccaccaagaccagcaagagaaccagaccccccagacccagacccaagaccacccccagcccccaggcccccgagaccaagcccgtgcccgccaccgtgctggagcccgtgaccctgagacccgaggccagcaccaccctggccagcaagaccagccagagaaccagaagacccagactgagaaccaagaccacccccagacccgaggcccccgagagcaagcccgcccccaagcagacccccagagccccccccaagcccaagaccagccccagacccagaatcccccagacccagcccgtgcccaaggtgccccagagagtgaccgccaagcccaagaccagccccagccccgaggtgagctacaccacccccgcccccaaggacgtgctgctgccccacaagccctaccccgaggtgagccagagcgagcccgcccccctggagaccagaggcatccccttcatccccatgatcagccccagccccagccaggaggagctgcagaccaccctggaggagaccgaccagagcacccaggagcccttcaccaccaagatccccagaaccaccgagctggccaagaccacccaggccccccacagattctacaccaccgtgagacccagaaccagcgacaagccccacatcagacccgtgctgaacagaaccaccaccagacccaccagacccaagcccagcggcatgcccagcggcaacggcgtgggcaccggcgtgaagcaggcccccagacccagcggcgccgacagaaacgtgagcgtggacagcacccaccccaccaagaagcccggcaccagaagaccccccctgccccccagacccacccaccccagaagaaagcccctgccccccaacaacgtgaccggcaagcccggcagcgccggcatcatcagcagcggccccatcaccaccccccccctgagaagcacccccagacccaccggcacccccctggagagaatcgagaccgacatcaagcagcccaccgtgcccgccagcggcgaggagctggagaacatcaccgacttcagcagcagccccaccagagagaccgaccccctgggcaagcccagattcaagggcccccacgtgagatacatccagaagcccgacaacagcccctgcagcatcaccgacagcgtgaagagattccccaaggaggaggccaccgagggcaacgccaccagccccccccagaacccccccaccaacctgaccgtggtgaccgtggagggctgccccagcttcgtgatcctggactgggagaagcccctgaacgacaccgtgaccgagtacgaggtgatcagcagagagaacggcagcttcagcggcaagaacaagagcatccagatgaccaaccagaccttcagcaccgtggagaacctgaagcccaacaccagctacgagttccaggtgaagcccaagaaccccctgggcgagggccccgtgagcaacaccgtggccttcagcaccgagagcgccgaccccagagtgagcgagcccgtgagcgccggcagagacgccatctggaccgagagacccttcaacagcgacagctacagcgagtgcaagggcaagcagtacgtgaagagaacctggtacaagaagttcgtgggcgtgcagctgtgcaacagcctgagatacaagatctacctgagcgacagcctgaccggcaagttctacaacatcggcgaccagagaggccacggcgaggaccactgccagttcgtggacagcttcctggacggcagaaccggccagcagctgaccagcgaccagctgcccatcaaggagggctacttcagagccgtgagacaggagcccgtgcagttcggcgagatcggcggccacacccagatcaactacgtgcagtggtacgagtgcggcaccaccatccccggcaagtggtag

SEQ ID NO: 267817 - DNA, 2355 bp, Artificial Sequence
  derived and/or modified sequence
atgacaatcgtgcctaccacggatattgaaccagtaactgtgcgtactgaagctacggtgacaacattagccccgaagacgagccagcgcacacgcacccggcgacccaggccaaagcacaaaacaaccccccggccagagacactccagactaagctggactttggtcctatcacccctgggacctcttccgctcccactacaaccacaaagcgaacccggcggccacaccctaaaccaaaaaccaccccacatcccgaggtgccacaaaccaaacttgctccaaaggtgcctcagaggactcacagacctcatccaaagcctaaaaccacgctctccccagaagaattacagaccgagctggtgcctgtcacagatctggagccagtgacctttcgaactgaaatcccggcaaccacactggcaacaaaaacttccaaacgcacacgtccaccaaggccccgcccgaaaacaaccccatcgcctcaggccccagaaactaagcctgttcctgctaccgtgctggagcctgtaaccctgaggccagaagcctccacaacactcgcttctaagacctctcagcgtaccagacgcccccgactgaggaccaaaacaacgcctcggccagaagcgcctgaaagtaagccggccccaaagcagaccccccgggcacccccaaaaccaaagacatcccccaggccccgaattccccagacacagcccgtgccaaaagtgccccagagggtcacggccaaacccaaaacaagccctagccccgaagtctcctataccacccctgctcctaaggatgtcctactcccacataagccctaccccgaagtgtctcagagcgaacccgcgcccttagagactcgcgggatccccttcattccaatgattagtccctcccccagccaggaggaactccaaaccacactggaggaaaccgatcagtccactcaggagccctttacaacaaagatcccccgaaccactgaactcgctaagacgacacaagcccctcaccgcttctatacaaccgtgcggcctcgcacaagcgataagccccatatccgacctgtgctaaatcggacgaccaccagaccgacgcgccctaaacctagtgggatgccctcaggaaatggagttgggacgggagtgaaacaggcacctcgtcctagcggggcagatcgcaatgtgagcgttgattcaacccacccaaccaagaaaccgggtacgaggagaccacctctgccgcctcgccccacgcacccacggcgaaagcccctgcctcctaataatgtgaccggcaagccaggaagcgccggcatcattagtagcggacccataactacaccccccctgaggtctactccaagacctacaggtacccctctcgagcggatagagacagacataaagcaacccaccgtgcccgcatcaggagaagagttggagaacatcaccgatttcagttcctctcccactcgcgagacagatcccctcggcaaacctcggttcaagggcccacacgttcgctatatccagaaacctgataacagcccatgttctatcaccgattccgtcaaaaggttccccaaggaggaggccaccgaaggaaacgcaacatcaccgccccagaaccccccaacaaacctgactgtcgtgaccgtagaggggtgcccctcattcgtgattctggactgggagaaacctctcaatgataccgtaactgagtacgaggtgataagtcgggaaaatggcagtttctcaggcaaaaataagagtatccagatgaccaaccagaccttcagcacagtggaaaacttgaaaccaaacacaagctatgaattccaggtgaagcctaagaatcctcttggcgaaggccccgtgtccaacaccgtcgcattctccaccgagagtgccgacccccgagtatccgagcctgtgagcgccggcagggatgctatctggacggagaggccttttaactcggacagctatagcgagtgtaaaggcaagcagtacgtgaaacgcacttggtataagaaatttgttggggtgcagctatgcaattccctgcgatacaagatctatctctcagactccctcaccgggaagttttataacatcggagaccagcgggggcatggagaagaccattgtcagtttgtcgatagttttctggatggccgaacgggccagcaactgacctccgatcagcttcccataaaggagggttacttcagagcagtccgacaggagcctgtgcaattcggcgaaatcgggggacacacccaaattaactatgttcagtggtacgaatgtgggactactatccctggaaaatggtag

SEQ ID NO: 267818 - DNA, 2355 bp, Artificial Sequence
  derived and/or modified sequence
atgaccatcgtgcccaccacagacatcgagcctgtgacagtgaggacagaggccaccgtgaccaccctggcccccaagaccagccagaggaccaggacccggcggccccggcccaagcacaagaccacccccaggcctgagaccctgcagaccaagctggactttggccccatcaccccaggcaccagcagcgcccccaccaccaccaccaagaggacccggcggccccaccccaagcccaagaccaccccccaccctgaggtgccccagaccaagctggcccccaaggtgccccagaggacccaccggccccaccccaagcccaagaccaccctgagccctgaggagctgcagacagagctggtgcctgtgacagacctggagcctgtgaccttcagaacagagatcccagccaccaccctggccaccaagaccagcaagaggaccaggcctccccggccccggcccaagaccacccccagcccccaggcccctgagaccaagcctgtgcctgccaccgtgctggagcctgtgaccctgcggcctgaggccagcaccaccctggccagcaagaccagccagaggacccggcggccccggctgcggaccaagaccacccccaggcctgaggcccctgagagcaagccagcccccaagcagaccccccgggccccacccaagcccaagaccagcccccggccccgcatcccccagacccagcctgtgcccaaggtgccccagagggtgacagccaagcccaagaccagccccagccctgaggtgtcctacaccaccccagcccccaaggatgtgctgctgccccacaagccctacccagaggtgtcccagagcgagcccgcccccctggagacccggggcatccccttcatccccatgatcagccccagccccagccaggaggagctgcagaccaccctggaggagacagaccagagcacccaggagcccttcaccaccaagatccccaggaccacagagctggccaagaccacccaggccccccaccgcttctacaccaccgtgcggcccaggaccagtgacaagccccacatccggcctgtgctgaacagaaccaccacccggcccacccggcccaagcccagcggcatgcccagcggaaatggagtgggcactggagtgaagcaggccccccggcccagcggggctgacagaaatgtgtctgtggacagcacccaccccaccaagaagccaggcacccggcggccccccctgcccccccggcccacccaccccaggaggaagcccctgccccccaacaacgtgacaggcaagccaggcagcgctggcatcatcagcagcggccccatcaccaccccacccctgcggagcaccccccggcccaccggcacccccctggagagaattgaaacagacatcaagcagcccaccgtgcctgccagcggggaggagctggagaacatcacagacttcagcagcagccccacccgggagacagaccccctgggcaagccccgcttcaagggcccccacgtgcgctacatccagaagccagacaacagcccctgcagcatcacagacagcgtgaagcgcttccccaaggaggaggccacagagggcaatgccaccagccccccccagaacccccccaccaacctgactgtggtgacagtggagggctgccccagctttgtgatcctggactgggagaagcccctgaatgacacagtgacagaatatgaggtgatcagccgggagaatggcagcttcagcggcaagaacaagagcatccagatgaccaaccagaccttcagcacagtggagaacctgaagcccaacaccagctatgagttccaggtgaagcccaagaaccccctgggggagggccctgtgagcaacacagtggccttcagcacagaatctgctgacccccgggtgtctgagcctgtgtctgctggaagagatgccatctggacagagcggcccttcaacagcgacagctacagcgagtgcaagggcaagcagtatgtgaagaggacctggtacaagaagtttgtgggcgtgcagctgtgcaacagcctgcgctacaagatctacctgagtgacagcctgaccgggaagttctacaacattggagaccagaggggccatggagaggaccactgccagtttgtggacagcttcctggatggccgcacaggccagcagctgaccagtgaccagctgcccatcaaggagggctacttccgggctgtgcggcaggagcctgtgcagtttggagagatcggcggccacacccagatcaactacgtgcagtggtatgaatgtggcaccaccatccctgggaagtggtag

SEQ ID NO: 267819 - DNA, 2355 bp, Artificial Sequence
  derived and/or modified sequence
atgaccatcgtgcccaccaccgacatcgagcccgtgaccgtgcggacagaggccactgtgacgactttagcccctaagactagccagagaacccgcactcgtagacctcgcccaaagcataaaacaaccccccgacccgaaacccttcagactaaactggactttggcccgatcacgcctggaactagttctgcgccaacaactactactaaacggaccagacggccgcacccaaaaccaaagacaacaccccatcctgaggttccacaaaccaaattggcccccaaagtaccccaaaggactcacagaccacaccctaagcccaagactacactgtctcctgaggaactgcagacagagcttgtgcccgtgacagatctcgagccagtgacattccgcactgaaattcctgcgactacactggcgactaagacctcaaagcgcactagacctcccagaccccggcccaagaccactccctcccctcaggccccagaaaccaagcccgtacccgccacagtgttggagccagtcacattgcggcccgaagcaagcaccaccctggcctctaaaacaagtcagcgaacacggagaccgcggctccggaccaaaaccactcctcgccccgaagccccggagtcaaagccagctccaaaacagacaccacgcgccccgccgaaaccaaaaacttctccaagacctagaattcctcagacacagccagttcctaaggtacctcagagagttaccgccaagcccaaaacctcaccctcccccgaggtgtcctacacgactccggcccccaaggatgtgctcctgccgcacaaaccatatcccgaggtgtcccagtccgagcccgcgcccttagaaacccgaggcatcccattcatccccatgatatccccaagcccatcacaagaggaattacagacaaccttggaggagactgatcagtcgactcaagagccattcaccactaaaatcccacgtactacagaactcgctaagacaacgcaggcaccacatcggttctacaccaccgtgaggcccagaacttccgacaaaccccatatccgccctgtgttaaatcgcaccacgaccaggcctacgcgtcctaagccatcagggatgccctcaggaaacggggtcggcaccggcgtcaagcaggcccctcgtccatctggcgccgatagaaacgtgtccgtggacagcacacatccgaccaaaaagcccggtaccagaaggcccccgctccctcctcgaccaactcacccaagacgaaagcccttaccacctaacaacgtgaccggcaagccggggtccgccggaattataagcagcggccctattacaacaccgccgctgcggtccactccccggccaaccggtaccccactcgaaaggatcgaaactgatataaaacagcccaccgtgccagcctcaggagaggaacttgagaacatcactgatttttcttcatcacccactagagaaactgacccactcggaaagccaaggttcaaggggccccatgttcgatacatccagaagcccgacaacagtccatgtagcatcaccgatagcgttaaacggtttcccaaggaggaggcgaccgagggtaatgctacaagccctccgcagaatcccccaaccaatctgactgtggttacggtggaggggtgtccttcattcgtcatactcgactgggagaagccgctcaatgacactgtcacggagtatgaggtgatttctcgagagaacggcagtttcagcggcaaaaataaatcaatccagatgacaaaccagacattctccaccgtcgaaaatctgaaacccaacacttcctatgaattccaagttaagccaaaaaaccctctgggggaggggccagttagcaacaccgtggccttctccacagagtcggcagatcctcgggtatccgaacccgtatccgcaggcagagatgctatctggacagagaggccgttcaactccgactcatattctgagtgcaaaggaaaacaatacgttaaaagaacttggtacaaaaagtttgtgggcgttcaactttgcaactctttacggtacaagatttacctgagcgactctctgactggaaaattttacaatatcggcgatcaacgcggtcacggagaggaccactgccagtttgtggacagcttcctcgacggcagaactggccaacaactgacaagcgaccaattgcccattaaagagggctattttagagcagtgcgccaggagccagtacagttcggagaaattgggggtcacacccagatcaattacgtgcagtggtatgagtgcggaaccaccatccctggcaagtggtag

SEQ ID NO: 267820 - DNA, 4272 bp, Artificial Sequence
  derived and/or modified sequence
atggcagcaatgtatcaccaaaccagtacttccctcttcccgctgaagggaaattcacagaagctatagttgatgcagagccgaaatatctgatagttgtgcgacctgctccacctccaagtcaaaagaagtcatgttcaggtaaaactcgttctcgcaaacctctgcagctggtggttggcactctgacaccgagctcggtcttcctgtcctggggtttcctcatcaacccacaccatgactggacattgccaagtcactgtcccaatgacagattttatacaattcgctatcgagaaaaggataaagaaaagaagtggatttttcaaatctgtccagccactgaaacaattgtggaaaacctaaagcccaacacagtttatgaatttggagtgaaagacaatgtggaaggtggaatttggagtaagattttcaatcacaagactgttgttggaagtaaaaaagtaaatgggaaaatccaaagtacctatgaccaagaccacacagtgccagcatatgtcccaaggaaactaatcccaataacaatcatcaagcaagtgattcagaatgttacccacacctagtccagaagtgcccaagtccaaacccgctctggaacctgccacgatacaaccggagcccttggtgcccacaactgcctcaaaaccatctgagagacctaaaaccacacacagaccagatgcacctcaaattcagcctgtctctgagcctgttccatttgaaactgaagctccctcaatgaccatagttcccaccacagacattgagcctgtaactgtgagaactgaggctacagtgacaacattagctccaaaaacatcgcaacgaacaagaacacgtcgtccacgtcccaaacataaaaccacgccacgcccagagacactgcagaccaaactagactttggacctattactcctgggacatcttcagctccaacaacaacaacaaaaagaacccgtcgtccacatcccaaacctaaaaccacgccccatccagaagtacctcaaactaaactggctcccaaagtgcctcaacgaactcatcgtccacatcccaaacctaaaaccacactgagtcccgaagagcttcagactgaactggttcctgttacagacctcgagcctgttacttttagaactgagatccctgcaacaaccttagctaccaaaacatcaaaaagaacccgccctccacgtcccagacctaaaactacaccgagccctcaggcacctgagaccaaacctgttcctgctacagtcctagaacctgtcactcttagacctgaggcctcaacaacattagcttccaaaacatcacaacggacacgtcgtccacgtctcagaacaaaaaccacaccacgtcctgaagcacctgaatccaaaccagctcccaagcagacaccacgtgctcctcctaagccaaaaacatcaccacgcccaagaatcccacaaacacaaccagttcctaaggtgccccagcgtgttactgcaaaaccaaaaacgtcaccaagtccagaagtgtcatacaccacacctgctccaaaagatgtgctccttcctcataaaccataccctgaggtctctcagagcgaacctgctcctctagagacacgaggcatcccttttatacccatgatttccccaagtcctagtcaagaggaactacagaccactctggaagaaacagaccaatccacccaagaacctttcacaactaagattccacgaacaactgaactagcaaagacaactcaggcgccacacagattttatactactgtgaggcccagaacatctgacaagccacacatcagacctgttctgaataggacaactacaagacctactaggcccaaacccagtgggatgcccagtgggaatggagtgggaacaggggtcaagcaagcacccaggccatcaggtgctgatagaaatgtatcagtggactctacccaccccactaaaaagccagggactcgccgcccacccttgccacccagacctacacacccacgaagaaaacctttaccaccaaataatgtcactggaaagccaggaagtgcaggaatcatttcatcaggcccaataactacaccacccctgaggtcaacacccaggcctactggaactcccttggagagaatagagacagatataaagcaaccaacagttcctgcctctggagaagaactggaaaatataactgactttagctcaagcccaacaagagaaactgatcctcttgggaagccaagattcaaaggacctcatgtgcgatacatccaaaagcctgacaacagtccctgctccattactgactctgtcaaacggttccccaaagaggaggccacagaggggaatgccaccagcccaccacagaacccacccaccaacctcactgtggtcaccgtggaagggtgcccctcatttgtcatcttggactgggaaaagccactaaatgacactgtcactgaatatgaagttatatccagagaaaatgggtcattcagtgggaagaacaagtccattcaaatgacaaatcagacattttccacagtagaaaatctgaaaccaaacacgagttatgaattccaggtgaaacccaaaaacccgcttggtgaaggcccggtcagcaacacagtggcattcagtactgaatcagcggacccaagagtgagtgagccagtttctgcaggaagagatgccatctggactgaaagaccctttaattcagactcttactcagagtgtaagggcaaacaatatgtcaaaaggacatggtataaaaaatttgtaggagtgcagctgtgcaactctctcagatacaagatttacttgagcgactccctcacaggaaaattttataacataggtgatcagaggggccatggagaagatcactgccagtttgtggattcatttttagatggacgcactgggcagcaactcacttctgaccagttaccaatcaaagaaggttatttcagagcagttcgccaggaacctgtccaatttggagaaataggtggtcacacccaaatcaattatgttcagtggtatgaatgtgggactacaattcctggaaaatggtagatgctgcacaaagttaccttctgtttcatcattgcaaacaaaaatcattgaaaatactatgccgcattcatttaaagctattttgtttactatgtataaaagtctacaatctaattaatagcaatactagatgtttattattagaaaagattgctgagagtatttatcaggttttacaaagtcattttaagaaagcaagatactgatgttaacagaataacatttttggggaagctggctccctattcatggtattttaagagatcatttgtatattatttatcacactgttgtaatgatgttttgagatacttttataacaaaattaacatcaaaaaggtatatactttttaaaaaaaatttacttttattgatgtgtactcttcctattgatgagttaattccataaatctctacttagtttaacttattggatcaaattatcttcagcatgtatatctggggaaaaaaggtccgaattttcacatttatatttaaacttcaattttttatatttaaacttcaattttttagcaacagctgaatagctttgcggaggagtttaatagttacacattcatgctaatatacatttcctttaaacatccacaaattcttaaaaagattgaatcagtaaatttcatttcagctaaaaatggagtctaatatattgtttcaaaagatacatttttacccaccataaatgttacaatatctgaatatgctttgtcaaactatccctttatgcaatcgtcttcatattgtttttatgattctaatcaagctgtatgtagagactgaatgtgaagtcaagtctgagcacaaaaagataatgcacgatgagattgcctaccattttataggatatttactatgtatttatacgttaagacctctatgaatgaatgtatcagagaatgtctttgtaactgtttaattcaatctgtaataaaaatctaactaactaactcatttatttctattaaaaaggtattgtcctttaggcggggaatgggaatccttgctgcactgttgcagtcattctgaaaggacctttccctgtacttacctttcaacatgcttcaatcttatcaacgctacattttgtatttttcaaacaagtataaattctgcaataaagagatgtagttttttttt

SEQ ID NO: 267821 - RNA, 2355 nt, Artificial Sequence
  derived and/or modified sequence
augaccauuguaccgacaacagauaucgagcccgugacaguacgcacggaagcuacaguaacuacccucgccccgaaaacgagccaacguacccggacccgccguccucggcccaaacacaagacaacucccagaccugagacacuccaaacuaaacuggacuucggaccaauuaccccaggcacaaguucugcgccuacaacuacaacaaaacggacacgaaggccucaucccaaacccaagaccaccccucaccccgaaguuccgcagaccaaguuagcgccgaaggugccucaaagaacccaucgaccgcacccgaagccaaagacuacuuugucucccgaggaacugcagacagaacugguuccaguuaccgaucucgagccugucaccuuccgcaccgagauccccgcgacaacacuggcgacuaagacuaguaagcguacgcggccucccagaccccgcccaaaaaccacgcccucaccccaggccccugaaaccaaaccugugcccgcaaccguacuugaaccagucacucuccgucccgaggcuucuaccacccucgccucuaagaccucacagagaacacgccgcccccggcugagaacaaaaacuacgccgagaccagaagcucccgagagcaagccagcuccaaaacagaccccaagggccccgccaaagccuaagaccuccccuaggccgcgcauuccccaaacucagcccgucccuaagguaccccagagagucacagcuaagccuaagacaucuccgucgccugaggucucguauacuacacccgcccccaaggauguguuacugccacacaagcccuauccugaggucucccagagcgaacccgcuccguuggagacgagaggcauccccuucauuccaaugauuagcccgucgcccucucaggaagagcuccagacuacccuggaggaaacagaucagagcacucaggagccuuuuacuacgaagauccccagaaccacugaauuggccaagacuacccaggccccucaucgauucuauacuacaguaagaccucgcaccucagauaaaccgcacaucaggcccguguuaaauagaaccacaacucgaccaacuaggcccaagcccagcggaaugccaucaggcaacggcgucgggacaggcgugaagcaggcuccaaggccuuccggggcagaccggaacguuuccguggauucaacccauccuacaaaaaaacccgggaccagaagaccaccacugccaccuagaccuacucauccacggagaaagcccuuaccaccuaauaacgugaccggaaagccaggauccgcgggcauuaucucaucaggaccuaucacuacuccuccuuugcgauccacaccgcgccccaccgggaccccauuggaaaggaucgagaccgacaucaaacaaccaacagugcccgcuagcggcgaagagcucgaaaacauaacagauuuuucuagcagucccaccagagagaccgauccccuagguaaaccuagguuuaaggggccacaugugagguauauucaaaagccagauaauuccccaugcucuauuaccgauucuguuaagcgguuucccaaagaggaggcuacugagggaaaugccacuuccccuccccagaaucccccaaccaaccugaccguggugaccguggaaggauguccgucauuuguuauacuagacugggaaaagccuuugaacgacaccgugacugaauaugagguaauaagucgggagaaugggaguuucucagguaaaaacaagagcauccaaaugaccaaucagacauuuucgaccguugaaaaccucaagccuaauacauccuacgaguuucaagucaagcccaagaacccccucggcgaaggacccgugaguaacacgguggcauucaguacagaaucagcagauccccgggugucugaaccugugagcgcagggcgggaugccaucuggaccgaaagaccauucaacucagauucuuauuccgaaugcaaagggaaacaauacgugaagcgcaccugguauaaaaaauuuguaggcguucaauugugcaacucuuuaagauauaaaaucuauuuauccgacucgcugaccggaaaguuuuacaauaucggagaccagagagggcauggagaagaucacugucaguuuguggacuccuuccuugauggucgaacagggcagcaacugacaucagaucagcuuccuaucaaagagggguacuucagggcuguacgucaggagcccgugcaguuuggcgagaucggaggucacacucagaucaauuacguucagugguaugaaugcggaacaacaaucccugggaagugguag

SEQ ID NO: 267822 - RNA, 2355 nt, Artificial Sequence
  derived and/or modified sequence
augacuaucguacccacaacggauauugagccgguaacagugcgaacugaagcaaccguuacuacacuugcacccaaaacaagucagcgcacccguacucgccgcccccgcccaaaacacaaaacaaccccucgcccagagacacuucaaacuaaacucgauuucggcccgauaacccccggcacuucauccgcuccaacaaccaccaccaagagaacaagacgcccacacccaaaacccaaaacaaccccacacccagaggugccccagacaaaguuggcuccaaaaguaccucagagaacacacagaccucaccccaagccuaaaacgaccuuaucuccggaagaacuccagacugaauuaguaccugugacagaucuugagccugugacuuuuagaacagagauacccgcaaccacgcuugcaacuaaaacguccaaaagaacucgccccccccgcccacggcccaagacuacaccguccccccaggccccagagacaaaacccgugcccgcaaccguacucgaaccuguuacccuaagacccgaagcaucuacaacauuagcuucaaagacuucucaaagaacccgacgcccucggcugagaaccaaaacaaccccaaggccagaagcaccagaaucaaagccagcaccuaagcaaacuccuagggccccucccaagcccaaaaccagccccaggccucgaaucccucagacccagccuguuccaaaagugccucagagagucacugcgaaaccuaagaccagccccagcccagaaguguccuauaccacccccgccccaaaggauguucuccucccccacaagccauauccagaagugucccaauccgaaccugcgccacuggaaaccagaggcauuccauuuauaccaaugaucagcccaagcccaagccaagaggaacuucaaacuacucuugaggagacagaucagucuacacaagaaccuuucacgacaaagauaccacggacaacagaauuagcaaagacaacccaagcaccucaucgauucuauacuacagugcgcccuagaacuagugacaaaccacacauucgucccguauuaaauagaacaacuacgagaccaacgagacccaaacccucuggaaugcccucaggcaacgggguggggacugggguuaagcaggccccuagacccucuggcgcugacagaaacgucuccguggauucaacccauccuacaaaaaaacccgggaccagaagaccaccacugccaccuagaccuacucauccacggagaaagcccuuaccaccuaauaacgugaccggaaagccaggauccgcgggcauuaucucaucaggaccuaucacuacuccuccuuugcgauccacaccgcgccccaccgggaccccauuggaaaggaucgagaccgacaucaaacaaccaacagugcccgcuagcggcgaagagcucgaaaacauaacagauuuuucuagcagucccaccagagagaccgauccacuuggcaaaccucgcuuuaaggggccccacgugcgcuauauccagaaaccagauaacucgccuugcucaauuacagacucgguuaagcgauuuccuaaagaagaagcuacggaggguaacgccacaucucccccacagaacccacccaccaaccugacaguggugaccgucgaaggaugcccgaguuuugucauauuagauugggagaaaccucugaacgauacagugacagaguaugaggucauaucacgcgaaaauggaaguuucuccggcaagaauaagucuauucaaaugacaaaccagacuuuuucuacugucgagaaucugaaaccaaauacuagcuacgaguuccaagugaagccaaagaaccccuuaggggagggcccugucaguaacaccguggcuuuuucaacugaauccgcagauccaagaguuagugaaccagucucugccggccgggaugcaauuuggacugaacgaccauucaacucagacuccuacucugagugcaaaggaaagcaauauguuaagaggacaugguacaagaaguuuguaggggugcaacucugcaauucucuccgauacaagauuuaucucagcgacagccuaacaggaaaauuuuacaauauuggagaccaaaggggccacggggaagaucacugccaguuuguagacucuuuucuugauggcagaacaggccagcaguugacgagugaucaacuuccuaucaaggagggcuauuuuagagcagugcgucaggaaccuguccaauuuggcgaaauuggcgggcacacacagaucaacuaugugcagugguacgagugugguacuacuauaccaggaaaaugguag

SEQ ID NO: 267823 - protein, 486 aa, Artificial Sequence
  derived and/or modified sequence
MISPSPSQEELQTTLEETDQSTQEPFTTKIPRTTELAKTTQAPHRFYTTVRPRTSDKPHIRPVLNRTTTRPTRPKPSGMPSGNGVGTGVKQAPRPSGADRNVSVDSTHPTKKPGTRRPPLPPRPTHPRRKPLPPNNVTGKPGSAGIISSGPITTPPLRSTPRPTGTPLERIETDIKQPTVPASGEELENITDFSSSPTRETDPLGKPRFKGPHVRYIQKPDNSPCSITDSVKRFPKEEATEGNATSPPQNPPTNLTVVTVEGCPSFVILDWEKPLNDTVTEYEVISRENGSFSGKNKSIQMTNQTFSTVENLKPNTSYEFQVKPKNPLGEGPVSNTVAFSTESADPRVSEPVSAGRDAIWTERPFNSDSYSECKGKQYVKRTWYKKFVGVQLCNSLRYKIYLSDSLTGKFYNIGDQRGHGEDHCQFVDSFLDGRTGQQLTSDQLPIKEGYFRAVRQEPVQFGEIGGHTQINYVQWYECGTTIPGKW

SEQ ID NO: 267824 - DNA, 1461 bp, Artificial Sequence
  derived and/or modified sequence
atgattagcccgtctccttctcaggaggaactgcagactacgctggaggagactgatcagagcacccaggagccattcacaaccaaaatacctagaacgacggagctagcaaagacgacacaggccccacaccggttctacacaacagtgcggcctagaactagcgacaaaccccacattcgcccagtgcttaaccgaacaacaactcgtccgaccagacccaagccaagtggcatgccgtcaggaaacggcgtggggacaggcgtcaagcaggcaccccgacctagtggcgcagatagaaatgtgagtgtggattctacccacccgactaagaagcctggaaccagacggcctccactaccccctagacctacgcatcctcgcaggaaaccactgcctcctaacaacgttaccggaaagcctggctctgccggaatcatcagcagcggtccaatcacaacccctcctttaaggtcgacaccccgtcctaccggcacccccctggagagaattgagacagatataaaacaacccacagtcccagcgtccggcgaggaattagagaacatcactgacttctcatcttcaccaacccgggaaacagatccactgggaaagcccagatttaaaggaccacatgtacgctatatacagaaaccagataatagcccgtgtagtatcaccgactccgtgaaacgcttccctaaagaggaggctacagaggggaacgctacttcgccaccccagaatcccccaactaaccttactgttgtcacggtggaggggtgtccttcgttcgtgatcctggattgggaaaagcctctgaacgatactgtgactgaatacgaagtgattagcagagagaacggttcattctccggcaagaacaaaagtatccagatgaccaatcagaccttctccacagtagagaacctcaaacctaataccagttatgaatttcaggtgaaacccaagaatccactgggcgaaggtccggtttctaatacagtcgctttctccactgagtccgccgaccccagggttagcgaaccagtgtctgccggacgtgacgccatctggacagaacgcccttttaacagtgactcttactccgaatgtaagggaaagcagtacgtgaagcgcacatggtataagaagttcgtgggcgtacagctgtgcaactcgctgcgctacaagatctacctgtctgattcattaaccgggaagttctacaatattggcgaccagcgcggacatggagaagatcactgccaatttgtagatagttttttagacggacgcacgggtcagcaactgactagtgatcagctgcctatcaaggagggctattttagagctgtgcggcaggagccagtacagttcggcgaaattggtggccatactcagataaactacgtccagtggtacgagtgcggaactaccattccaggtaagtggtag

SEQ ID NO: 267825 - DNA, 1461 bp, Artificial Sequence
  derived and/or modified sequence
atgatttcaccaagtccttcgcaggaggaacttcagaccacactggaagagaccgatcagtcaactcaggaaccatttaccaccaagatacctagaactacagagcttgctaaaaccacccaggcaccccacagattctatacaactgtgaggcctcgtactagcgataaaccccatatcaggcctgtgctgaataggacaaccacacgaccaacaagaccgaaacccagcgggatgccaagtggcaacggggttggtactggcgtaaaacaggcacctcggccaagtggcgctgatcgcaacgtatctgtagactccacccatccaacaaagaagccaggcacaagaaggcccccccttccccctaggcctacacaccctaggcgaaagcccctgccaccaaataacgtcaccggcaagcctgggagcgcagggatcatcagctcaggacctataacgacacctccccttcggtcaactcctagacctaccggaacacctcttgagagaatcgagacagatattaaacagccaacggttccagcctccggagaagagttggagaacatcaccgactttagctcttcccccactcgcgaaaccgatccattgggcaagcccagattcaaaggacctcatgtgagatatattcagaagccggataatagcccctgtagcattacagacagcgtaaagcggttccctaaagaggaggccacggaaggaaacgccacttcccctccccagaatccacctacaaacttgacagtggttacggtggaaggatgtccgagtttcgtgatacttgattgggaaaaacccctgaatgataccgtgacggagtacgaggttattagccgagaaaacgggagctttagtgggaagaataagagcatacaaatgactaaccagacattcagtactgttgagaatctgaagcccaatacttcatacgaattccaagtaaaaccgaagaatccactgggagagggacctgtgtctaacactgtcgcttttagcactgaatccgccgacccacgcgtgtccgagcctgtgtccgctgggagagatgccatttggactgaaagaccatttaattctgactcttattccgagtgtaaagggaaacaatacgtcaaacgcacatggtacaagaagttcgttggggtgcaactgtgcaattctctgcggtataagatttacctctccgacagtttaacgggcaagttctataacatcggtgatcagagaggccacggtgaagatcattgccagtttgtggatagcttccttgacgggaggacaggtcaacagttaacatcggaccaactgcctatcaaagaggggtatttccgcgcagttagacaggaacccgtccaattcggtgagatcggagggcatacacagattaactacgtgcaatggtacgagtgcggcacgacaataccaggaaagtggtag

SEQ ID NO: 267826 - DNA, 1461 bp, Artificial Sequence
  derived and/or modified sequence
atgatctccccatcaccatcacaggaggagctccagacaacgctggaagaaacagaccagtcaacgcaggaaccttttacaaccaaaattcctagaaccacagagctggcgaaaacaacacaagctccacatcgtttttacaccactgttaggcctcgaacctctgataagcctcacatcagaccagtgctcaacagaactacaacccgaccaactcgcccaaaaccgtctggaatgccctctggcaacggtgtcggtaccggggtcaagcaagcaccacgtccttctggggctgaccggaacgtgagcgtcgatagcacacaccctacaaaaaagccagggacccgtagacctcccctgccgccacggccaacccacccaagacggaagccactcccccctaataacgtgacaggaaagccaggctccgccggtatcatttcatctggcccgattaccaccccccccttgcgctcaaccccaagacctaccggaactcccctggagcgaatagagaccgatatcaagcaaccaacagtacctgccagtggcgaagagcttgaaaatatcacagatttctctagttctccgactcgtgaaacagaccccctaggcaaacctcggtttaaaggcccgcacgttcgctatatccagaaacccgataatagcccctgctccatcaccgactcagttaagcgctttccaaaagaagaggcaaccgaaggcaacgcaacatcgccaccccagaatcctcccaccaacctgactgtagtcacggtagagggttgtccaagtttcgttatactcgattgggagaaaccattgaacgacaccgtgacagagtacgaggtgattagccgcgagaatggatcattctcaggcaagaataaatccatccagatgactaaccagacgttctccacagtcgaaaacttgaagcctaacacctcatatgagttccaagttaaacctaaaaaccccctgggggaagggcccgtgtccaatacagtagcctttagcaccgaatccgcagatcctagggtatccgaacccgtctccgcgggaagagacgcaatctggactgaaagacccttcaatagtgactcctactccgaatgcaaaggaaaacagtacgttaaacggacttggtacaagaagtttgtcggtgtgcaactgtgtaatagtctaaggtataaaatctatttaagcgactcactcaccggcaaattctataacatcggagaccaacgcgggcacggcgaagatcattgccagttcgtcgactcatttctcgatggacggacaggtcaacaactcacatctgatcagctacccataaaagaaggctactttagggctgtacggcaggagcctgtgcagttcggtgaaatcggcggtcacacccagattaactatgtgcagtggtacgaatgtggcacaacaatcccaggaaagtggtag

SEQ ID NO: 267827 - DNA, 1461 bp, Artificial Sequence
  derived and/or modified sequence
atgatcagccccagccccagccaggaggagctgcagaccaccctggaggagaccgaccagagcacccaggagcccttcaccaccaagatccccagaaccaccgagctggccaagaccacccaggccccccacagattctacaccaccgtgagacccagaaccagcgacaagccccacatcagacccgtgctgaacagaaccaccaccagacccaccagacccaagcccagcggcatgcccagcggcaacggcgtgggcaccggcgtgaagcaggcccccagacccagcggcgccgacagaaacgtgagcgtggacagcacccaccccaccaagaagcccggcaccagaagaccccccctgccccccagacccacccaccccagaagaaagcccctgccccccaacaacgtgaccggcaagcccggcagcgccggcatcatcagcagcggccccatcaccaccccccccctgagaagcacccccagacccaccggcacccccctggagagaatcgagaccgacatcaagcagcccaccgtgcccgccagcggcgaggagctggagaacatcaccgacttcagcagcagccccaccagagagaccgaccccctgggcaagcccagattcaagggcccccacgtgagatacatccagaagcccgacaacagcccctgcagcatcaccgacagcgtgaagagattccccaaggaggaggccaccgagggcaacgccaccagccccccccagaacccccccaccaacctgaccgtggtgaccgtggagggctgccccagcttcgtgatcctggactgggagaagcccctgaacgacaccgtgaccgagtacgaggtgatcagcagagagaacggcagcttcagcggcaagaacaagagcatccagatgaccaaccagaccttcagcaccgtggagaacctgaagcccaacaccagctacgagttccaggtgaagcccaagaaccccctgggcgagggccccgtgagcaacaccgtggccttcagcaccgagagcgccgaccccagagtgagcgagcccgtgagcgccggcagagacgccatctggaccgagagacccttcaacagcgacagctacagcgagtgcaagggcaagcagtacgtgaagagaacctggtacaagaagttcgtgggcgtgcagctgtgcaacagcctgagatacaagatctacctgagcgacagcctgaccggcaagttctacaacatcggcgaccagagaggccacggcgaggaccactgccagttcgtggacagcttcctggacggcagaaccggccagcagctgaccagcgaccagctgcccatcaaggagggctacttcagagccgtgagacaggagcccgtgcagttcggcgagatcggcggccacacccagatcaactacgtgcagtggtacgagtgcggcaccaccatccccggcaagtggtag

SEQ ID NO: 267828 - DNA, 1461 bp, Artificial Sequence
  derived and/or modified sequence
atgatcagcccaagcccgagccaagaggagttgcagacaacactggaagaaactgaccagtccacccaggagccctttaccaccaagatcccacgaactacagagttggcgaaaaccacacaggcaccgcaccgattttacacaactgttcgtcccaggacatccgacaagccccatatacggcccgtgctcaatcggactactacccggccgacacgccccaaacctagcgggatgcctagcggcaatggggtcggaacaggggtgaagcaggcacctcgacccagtggagctgatagaaatgtgagtgtcgatagtacccacccaacaaagaaaccggggacccgacgtccccctttacctcctcggcctacccacccacgccgcaaaccattgcctccaaataatgtgactggaaagccaggcagcgccgggataatctcctctggacccataaccacccctcctctaaggtctacacccagaccaaccggcacaccactggagaggatcgagacagacatcaaacaacccaccgtcccagcaagtggcgaagagctcgaaaacataactgacttttcctcatcacccacaagagagaccgatcccctgggcaagccgcgattcaaaggacctcacgtccggtatatccaaaaaccagataatagcccgtgcagtatcaccgactcagttaagcggtttcctaaagaagaggccacagagggcaatgctacatcacccccacagaacccgcccactaatctgacagtcgtgacagttgagggttgcccatcattcgtaattttggattgggagaagcccctgaatgataccgtgaccgaatacgaggtgatttctagggagaacgggtccttctccgggaaaaataagagtatccagatgacaaaccagaccttctctaccgtggagaacctcaaaccaaacacatcatacgaattccaggtaaaacctaaaaatcctttgggtgagggcccagtgagcaacacagtggccttctcaactgaatcagcagatccccgggtctcagagccagtatcggccggcagagatgccatctggaccgagcggcctttcaactctgattcttactccgagtgtaagggtaaacagtacgtgaaacgaacatggtacaagaaattcgtgggagttcagctctgcaactccctgaggtacaaaatctatctcagcgatagcctcaccggaaagttttataatatcggtgatcaaagaggccacggcgaagatcactgccagtttgtggacagctttctggatggacgcaccggacagcagctgaccagcgatcagctcccaatcaaggagggttacttccgcgctgtcaggcaggagcccgtgcagtttggagagatcggaggacacacccaaatcaactatgttcaatggtacgaatgtggaaccactatccccgggaaatggtag

SEQ ID NO: 267829 - DNA, 1461 bp, Artificial Sequence
  derived and/or modified sequence
atgatcagccccagccccagccaggaggagctgcagaccaccctggaggagacagaccagagcacccaggagcccttcaccaccaagatccccaggaccacagagctggccaagaccacccaggccccccaccgcttctacaccaccgtgcggcccaggaccagtgacaagccccacatccggcctgtgctgaacagaaccaccacccggcccacccggcccaagcccagcggcatgcccagcggaaatggagtgggcactggagtgaagcaggccccccggcccagcggggctgacagaaatgtgtctgtggacagcacccaccccaccaagaagccaggcacccggcggccccccctgcccccccggcccacccaccccaggaggaagcccctgccccccaacaacgtgacaggcaagccaggcagcgctggcatcatcagcagcggccccatcaccaccccacccctgcggagcaccccccggcccaccggcacccccctggagagaattgaaacagacatcaagcagcccaccgtgcctgccagcggggaggagctggagaacatcacagacttcagcagcagccccacccgggagacagaccccctgggcaagccccgcttcaagggcccccacgtgcgctacatccagaagccagacaacagcccctgcagcatcacagacagcgtgaagcgcttccccaaggaggaggccacagagggcaatgccaccagccccccccagaacccccccaccaacctgactgtggtgacagtggagggctgccccagctttgtgatcctggactgggagaagcccctgaatgacacagtgacagaatatgaggtgatcagccgggagaatggcagcttcagcggcaagaacaagagcatccagatgaccaaccagaccttcagcacagtggagaacctgaagcccaacaccagctatgagttccaggtgaagcccaagaaccccctgggggagggccctgtgagcaacacagtggccttcagcacagaatctgctgacccccgggtgtctgagcctgtgtctgctggaagagatgccatctggacagagcggcccttcaacagcgacagctacagcgagtgcaagggcaagcagtatgtgaagaggacctggtacaagaagtttgtgggcgtgcagctgtgcaacagcctgcgctacaagatctacctgagtgacagcctgaccgggaagttctacaacattggagaccagaggggccatggagaggaccactgccagtttgtggacagcttcctggatggccgcacaggccagcagctgaccagtgaccagctgcccatcaaggagggctacttccgggctgtgcggcaggagcctgtgcagtttggagagatcggcggccacacccagatcaactacgtgcagtggtatgaatgtggcaccaccatccctgggaagtggtag

SEQ ID NO: 267830 - DNA, 1461 bp, Artificial Sequence
  derived and/or modified sequence
atgatcagccccagccccagccaggaggagctgcagaccaccctggaggaaactgatcaaagcacccaggaaccttttacgaccaagatccctcgcacaaccgagctggctaaaactacacaggccccacatcgcttctacaccaccgtacggcccagaaccagcgataaaccgcatattcgacctgttctcaatagaacaaccacccgtcccacgcgcccaaagccttctggtatgcccagcgggaacggcgtaggaacaggtgtcaagcaggcccctcgcccttcaggtgcggaccgcaacgtatccgtggattccacacaccctactaagaagcccggcactcggcggccccctctgcccccacgtcccacgcatcctcggcgcaaacccctccctccgaacaacgtcacaggcaagccaggatcggccgggatcatctcgagcggaccgatcaccacaccaccattgagaagcacacctagacccactgggacgcctctagaaagaatcgagaccgatattaagcaaccaaccgtaccggcgagtggcgaggaattggaaaatatcacagacttctctagctccccaacacgggagaccgacccacttggcaaaccaaggtttaagggccctcacgtgcgatatatccagaagccggacaactcaccctgctcaattaccgattcagtgaaaaggttcccgaaagaagaggccaccgaaggaaatgctacgagcccccctcagaatccccccacaaatttgaccgtagtgaccgtagagggctgcccgagtttcgtcattctcgattgggagaaaccactcaatgacaccgtcacagagtacgaggtgatcagccgggagaacggatccttcagtggcaagaataagagtattcaaatgacaaaccagacatttagtactgttgaaaatcttaagcctaacacctcatatgaattccaggttaaacccaaaaacccgctcggtgaaggtcccgtgtcgaataccgtggcattcagcaccgagagtgccgacccccgcgtgtccgagcctgtgagcgcaggacgggatgccatctggacagagcgcccctttaatagcgactcttatagtgaatgcaagggtaagcagtacgtcaaacgaacatggtacaagaaatttgtaggagtgcagctgtgtaactccctgcgctacaagatctatttgagcgattcgctgaccgggaaattttacaacataggggaccagcggggccacggcgaggaccactgtcaattcgtcgactcgtttttggatggtaggaccgggcagcaactgacgagtgaccagctccccattaaggaaggatattttagagcagttcgacaagaaccggtgcagtttggcgagattggagggcatactcagatcaactacgtccagtggtatgaatgcggaaccaccatccccggtaagtggtag

SEQ ID NO: 267831 - RNA, 1461 nt, Artificial Sequence
  derived and/or modified sequence
augauuucaccaaguccuucgcaggaggaacuucagaccacacuggaagagaccgaucagucaacucaggaaccauuuaccaccaagauaccuagaacuacagagcuugcuaaaaccacccaggcaccccacagauucuauacaacugugaggccucguacuagcgauaaaccccauaucaggccugugcugaauaggacaaccacacgaccaacaagaccgaaacccagcgggaugccaaguggcaacgggguugguacuggcguaaaacaggcaccucggccaaguggcgcugaucgcaacguaucuguagacuccacccauccaacaaagaagccaggcacaagaaggcccccccuucccccuaggccuacacacccuaggcgaaagccccugccaccaaauaacgucaccggcaagccugggagcgcagggaucaucagcucaggaccuauaacgacaccuccccuucggucaacuccuagaccuaccggaacaccucuugagagaaucgagacagauauuaaacagccaacgguuccagccuccggagaagaguuggagaacaucaccgacuuuagcucuucccccacucgcgaaaccgauccauugggcaagcccagauucaaaggaccucaugugagauauauucagaagccggauaauagccccuguagcauuacagacagcguaaagcgguucccuaaagaggaggccacggaaggaaacgccacuuccccuccccagaauccaccuacaaacuugacagugguuacgguggaaggauguccgaguuucgugauacuugauugggaaaaaccccugaaugauaccgugacggaguacgagguuauuagccgagaaaacgggagcuuuagugggaagaauaagagcauacaaaugacuaaccagacauucaguacuguugagaaucugaagcccaauacuucauacgaauuccaaguaaaaccgaagaauccacugggagagggaccugugucuaacacugucgcuuuuagcacugaauccgccgacccacgcguguccgagccuguguccgcugggagagaugccauuuggacugaaagaccauuuaauucugacucuuauuccgaguguaaagggaaacaauacgucaaacgcacaugguacaagaaguucguuggggugcaacugugcaauucucugcgguauaagauuuaccucuccgacaguuuaacgggcaaguucuauaacaucggugaucagagaggccacggugaagaucauugccaguuuguggauagcuuccuugacgggaggacaggucaacaguuaacaucggaccaacugccuaucaaagagggguauuuccgcgcaguuagacaggaacccguccaauucggugagaucggagggcauacacagauuaacuacgugcaaugguacgagugcggcacgacaauaccaggaaagugguag

SEQ ID NO: 267832 - RNA, 1461 nt, Artificial Sequence
  derived and/or modified sequence
augaucuccccaucaccaucacaggaggagcuccagacaacgcuggaagaaacagaccagucaacgcaggaaccuuuuacaaccaaaauuccuagaaccacagagcuggcgaaaacaacacaagcuccacaucguuuuuacaccacuguuaggccucgaaccucugauaagccucacaucagaccagugcucaacagaacuacaacccgaccaacucgcccaaaaccgucuggaaugcccucuggcaacggugucgguaccggggucaagcaagcaccacguccuucuggggcugaccggaacgugagcgucgauagcacacacccuacaaaaaagccagggacccguagaccuccccugccgccacggccaacccacccaagacggaagccacuccccccuaauaacgugacaggaaagccaggcuccgccgguaucauuucaucuggcccgauuaccaccccccccuugcgcucaaccccaagaccuaccggaacuccccuggagcgaauagagaccgauaucaagcaaccaacaguaccugccaguggcgaagagcuugaaaauaucacagauuucucuaguucuccgacucgugaaacagacccccuaggcaaaccucgguuuaaaggcccgcacguucgcuauauccagaaacccgauaauagccccugcuccaucaccgacucaguuaagcgcuuuccaaaagaagaggcaaccgaaggcaacgcaacaucgccaccccagaauccucccaccaaccugacuguagucacgguagaggguuguccaaguuucguuauacucgauugggagaaaccauugaacgacaccgugacagaguacgaggugauuagccgcgagaauggaucauucucaggcaagaauaaauccauccagaugacuaaccagacguucuccacagucgaaaacuugaagccuaacaccucauaugaguuccaaguuaaaccuaaaaacccccugggggaagggcccguguccaauacaguagccuuuagcaccgaauccgcagauccuaggguauccgaacccgucuccgcgggaagagacgcaaucuggacugaaagacccuucaauagugacuccuacuccgaaugcaaaggaaaacaguacguuaaacggacuugguacaagaaguuugucggugugcaacuguguaauagucuaagguauaaaaucuauuuaagcgacucacucaccggcaaauucuauaacaucggagaccaacgcgggcacggcgaagaucauugccaguucgucgacucauuucucgauggacggacaggucaacaacucacaucugaucagcuacccauaaaagaaggcuacuuuagggcuguacggcaggagccugugcaguucggugaaaucggcggucacacccagauuaacuaugugcagugguacgaauguggcacaacaaucccaggaaagugguag

SEQ ID NO: 267833 - protein, 1640 aa, Artificial Sequence
  derived and/or modified sequence
MLSRLSGLANVVLHELSGDDDTDQNMRAPLDPELHQESDMEFNNTTQEDVQERLAYAEQLVVELKDIIRQKDVQLQQKDEALQEERKAADNKIKKLKLHAKAKLTSLNKYIEEMKAQGGTVLPTEPQSEEQLSKHDKSSTEEEMEIEKIKHKLQEKEELISTLQAQLTQAQAEQPAQSSTEMEEFVMMKQQLQEKEEFISTLQAQLSQTQAEQAAQKLRVLQRKLEEHEESLVGRAQVVDLLQQELTAAEQRNQILSQQLQQMEAEHNTLRNTVETEREESKILLEKMELEVAERKLSFHNLQEEMHHLLEQFEQAGQAQAELESRYSALEQKHKAEMEEKTSHILSLQKTGQELQSACDALKDQNSKLLQDKNEQAVQSAQTIQQLEDQLQQKSKEISQFLNRLPLQQHETASQTSFPDVYNEGTQAVTEENIASLQKRVVELENEKGALLLSSIELEELKAENEKLSSQITLLEAQNRTGEADREVSEISIVDIANKRSSSAEESGQDVLENTFSQKHKELSVLLLEMKEAQEEIAFLKLQLQGKRAEEADHEVLDQKEMKQMEGEGIAPIKMKVFLEDTGQDFPLMPNEESSLPAVEKEQASTEHQSRTSEEISLNDAGVELKSTKQDGDKSLSAVPDIGQCHQDELERLKSQILELELNFHKAQEIYEKNLDEKAKEISNLNQLIEEFKKNADNNSSAFTALSEERDQLLSQVKELSMVTELRAQVKQLEMNLAEAERQRRLDYESQTAHDNLLTEQIHSLSIEAKSKDVKIEVLQNELDDVQLQFSEQSTLIRSLQSQLQNKESEVLEGAERVRHISSKVEELSQALSQKELEITKMDQLLLEKKRDVETLQQTIEEKDQQVTEISFSMTEKMVQLNEEKFSLGVEIKTLKEQLNLLSRAEEAKKEQVEEDNEVSSGLKQNYDEMSPAGQISKEELQHEFDLLKKENEQRKRKLQAALINRKELLQRVSRLEEELANLKDESKKEIPLSETERGEVEEDKENKEYSEKCVTSKCQEIEIYLKQTISEKEVELQHIRKDLEEKLAAEEQFQALVKQMNQTLQDKTNQIDLLQAEISENQAIIQKLITSNTDASDGDSVALVKETVVISPPCTGSSEHWKPELEEKILALEKEKEQLQKKLQEALTSRKAILKKAQEKERHLREELKQQKDDYNRLQEQFDEQSKENENIGDQLRQLQIQVRESIDGKLPSTDQQESCSSTPGLEEPLFKATEQHHTQPVLESNLCPDWPSHSEDASALQGGTSVAQIKAQLKEIEAEKVELELKVSSTTSELTKKSEEVFQLQEQINKQGLEIESLKTVSHEAEVHAESLQQKLESSQLQIAGLEHLRELQPKLDELQKLISKKEEDVSYLSGQLSEKEAALTKIQTEIIEQEDLIKALHTQLEMQAKEHDERIKQLQVELCEMKQKPEEIGEESRAKQQIQRKLQAALISRKEALKENKSLQEELSLARGTIERLTKSLADVESQVSAQNKEKDTVLGRLALLQEERDKLITEMDRSLLENQSLSSSCESLKLALEGLTEDKEKLVKEIESLKSSKIAESTEWQEKHKELQKEYEILLQSYENVSNEAERIQHVVEAVRQEKQELYGKLRSTEANKKETEKQLQEAEQEMEEMKE

SEQ ID NO: 267834 - protein, 275 aa, Artificial Sequence
  derived and/or modified sequence
MSTIGSFEGFQAVSLKQEGDDQPSETDHLSMEEEDPMPRQISRQSSVTESTLYPNPYHQPYISRKYFATRPGAIETAMEDLKGHVAETSGETIQGFWLLTKIDHWNNEKERILLVTDKTLLICKYDFIMLSCVQLQRIPLSAVYRICLGKFTFPGMSLDKRQGEGLRIYWGSPEEQSLLSRWNPWSTEVPYATFTEHPMKYTSEKFLEICKLSGFMSKLVPAIQNAHKNSTGSGRGKKLMVLTEPILIETYTGLMSFIGNRNKLGYSLARGSIGF

SEQ ID NO: 267835 - DNA, 5479 bp, Artificial Sequence
  derived and/or modified sequence
cttggtgaagtgagattcagactgagtggggtcacagcacagggcactgtcttgcctggctttatctgagccaatcacacctctcctggccactatctgtggtctagccccctttgtgcagaaagagaaagaagagccttgaggaccagcctagtcaggctgaagaaatgtcaacaattgggagttttgaaggattccaggctgtgtctctgaagcaagagggagatgaccaaccctctgagactgaccacctatcgatggaggaagaggacccgatgccaagacagatttcaaggcagtcaagtgtgaccgaatcaactctttaccccaatccttatcatcagccttatatctcacggaagtactttgctacacggccgggggccattgagactgccatggaagacttgaaaggtcacgtagctgagacttctggagagaccattcaaggcttctggctcttgacaaagatagaccactggaacaatgagaaggagagaattctactggtcacagacaagactctcttgatctgcaaatacgacttcatcatgctgagttgtgtgcagctgcagcggattcctctgagcgctgtctatcgcatctgcctgggcaagttcaccttccctgggatgtccctggacaagagacaaggagaaggccttaggatctactgggggagtccggaggagcagtctcttctgtcccgctggaacccatggtccactgaagttccttatgctactttcactgagcatcctatgaaatacaccagtgagaaattccttgaaatttgcaagttgtctgggttcatgtctaagcttgttccagctatccagaatgcccacaagaattcaactggatctggaagaggaaagaaactgatggtgttaactgaacccattttgattgagacctacacagggctgatgtcattcattggaaaccgcaacaaacttggctattcccttgcccgtgggagtattggtttttgagagtctttttggtaccataagcatatcatccacagatatgtcactttgaaaattccagtttgacccacgctatttttggactgaaacaattaattatttttaaatgacgctttatgatttagaaatttagtatttccgaaaatttaaaagcttgattggactgatagatacacactttagacctcatacaagaataatcaaattttcttaaaactagaaaataaatgctgctgagcctatcaaatactgttatcaaatgagtgcctgatcatcaactcaggaaagaagactctaagtcctgttgcttcagctctctaaatgtaggcttttttttttttttttttttaggtcttggtcttcagccctcttatcctgatttattctctcattggggtctcactgtctctagtattttagctaccacttgataaggatgacttccaaatttatattcccattcccaatatttattccaagactcagttttgcatttctgactgctaatcatctatatatcagtgtcccagtggcctcttaattgagcattatcaaaatcctgtggtatttatatggtcccagttatccatccctgaagtctgtcaattttgatttctctaaattccttgccatgacatcctatatatgatcacatctctatacggcttagcattgtattccgatgcccagatgtcaaacttgaagctcattctcttatcaaaattgttcatgtattcctcctttccattcttatagctgtattattagatcaggtttttaattctgctcaaccaattattaccacagcctgttaaatggaatccctactccaaggctgactgtttcaatctatcctacacttggtttctagctcatttacttataccatcttttgttcaaatatatattttttaataacagacctttttcttctaaagaaatcttttgtagaagcagcatatacgaagcagataaaagtaggttcaatgcggttggagtgaagatgagaatgccacaggcatctttctttctaggcctcagaggtgctgcatatggaatgtccatggatcgcagagggttttgaagaccatgttttcaaaaacactgtcttaacactctattgtcattgctcttttccctcttatttcctctttgtctcttcccgacttagatctaattttcaacaacccaggaaattatctcatatgtttgcatctctcaagtttcttttcttttttctttcagagtcttattttatctaaatttatgtagaaaaaaaagctttgaatgttgactacatagacattactacaataagctttttgcctttcccaagactcaaaattgacacatctttgttgatgtttaagttgaaattccagccaacttttttttgacttttatgtgaagtttaaagtcttttctttgaaaagcttgcttcctcaatttcaaagatttgtcctctgatatatttataaacatcaatttaatgcagacattcaaaccctaaaccttgaataactcttattttattttgtctttgtttacttccattaatttttttttctttccctctcttccgcctttacagcacccactttttcttccccccatgatggcaaatattgttatagtccccaaggcagggaacttctattcagactgtaaaaggaaatgttgaaatccatagctgtcctgtcaacagtagtggaatgaaaagtcgttggattgttttggcactggttctgaagcaggcataattggcaaattattataatactgctgcccgaaaatccccatttgcctcaagatagtggcatttattggcagaagcctctgaaatgtccagcacattcttttgagttaccatttaaggatcagcctgacaatcgacttctctctgcacatttgccccctttgtaacctaagccagactgttcccaaatgaccttctaaaggacacagtgcaccatcatcaatggaaacagttcagaaaggatgacaggagggagatgtttcttagttctgagagccagtctgtaacaatgggataagcatttaatggaatcaaagctgttttgcataaagagtgaactcagagacgacaagagggtctttatgaattcccttcacattttgtaaaaactgtcatatataggctatccccttaattgataaatgggatctagaaagcggtattatgaccagagggtgagaagatttaggaatttggatagcagttcaagataagaaagaacttcttatagttataaattttcaatgatggaatgggttgcttctttaaacagtgagcccaccatcacttggtatgttcaaggaaagactagataaagtcgatattgtgagaggaattgctgtatgataccgtttggagaaatgattgacataatcttttaaggccggtgaccctatcattttccaaataattgttgctagtacttagttaattagacccatttttttcttaggaaagagttggatcaatcatgggagaccctgaaaaatttccttacctttcctaaggtttaatttcctcttctgcgaaatggagacaattatattacttttgcttatttcataaagatcttgtgaggattcaatgaaatgaggttaaattcttttattaaacagaaagttttgagtatttgcctagagagtgatgtgacttttgcagcagaaggtgggaaaacatccaagggaactacatttcctccagaaattgtttcttcattaccatcgacctactgattatggttttctcattttacacttggtgttcttacttgggatctttgtccttaagctcaacagggagccacaacccaggggacctatgtgtacacttggagtttttatcagactatcatttgaacttaccactacagtttagcaaatggcatgatgagtttgattgataataggagtagacgcaagatacattaagtagagtacaaagcatttcataaccaaaatgtcatggttggaggtcttcattattcggtctttatctcattcaggaatttccacttgaaaaatctctgataagctttatttcagaaactgcttgaacagctccactgacaaatgcctcactatcttctgatacatcgtaggcagttctgagggtgagaaagttcaaagcagatagatgttttaacacaacaggaggacttttaaacaatcaccaggactcactcctcggtggtcaattgggcctgtttggaggcctgacctttggtcatcttaaggtcatctaaggcagaaaagagaagctcacttataagttggcacttctgaatcatttgccttgaggtccattttttattcagcctttgtttaaaccttcttaggaagccagtttgtagagttctggggataagaaggcagaaaaaccatgtcaattcagtgcttttatttcacagaaaatgaagcaaaggcctagaaactagaaagacatttctcaaaaagaagatggtgaacttttggaaatactgagattagactacattttccaatttctatccctagcccactgctctttccaatataatatctgtattccatgggaaagacatgccatctgaattgatgtatcgtagttgttgagataattttgaaatgagaaaacaatagggcacagtcgtttgggaagaatttccagaaattgccatcattttcttaaaggctaaggacacttatagagctctccgatttcctatctgataaaaaaagcccaaacaaagctgcggaagctggcagagccagcagatattttgtaaggcagcttcacctctgctggcattttgtggggcaggagagggggagggcaaaggtattaaatttaggcttaaaagctcctcagaaattctttacacacaagagaccaagttggagaaaagaagatgacttgtgccaaggggaagaaagagagagactaatgcctgtggttttcaaaggttaacaacaacataaaaaagccaaggtatttgcacagggatgaatgctcattggctcttggccaacaattatacaagggcttgtgcccacatcctgtagctgtggtttagggacgctgctcatgagtgacttcttatgcttagtggcaggaaactttagtcactgatgtgtaaactcacctttggtctgcacctcccacaacgtgctccgaaagcagttaggggactaggcctcttgatttccttgtagataccagttccccagaagctaaggaaaaactctgaggccttggagttactgagagtggaccaatacttgtcttattctacctgattttggcaactgcttagggttcttctgtatccacaaaaaggaattatgatatcctctgctaaaccctctctttagcctcaaagcccaagaccaaaaaaaatgagccatatttcattgcaggcctgctgccaatgtgaaatataaggaataaagtcatgagactgcttctcaaccta

SEQ ID NO: 267836 - DNA, 2296 bp, Artificial Sequence
  derived and/or modified sequence
agacttgcttcaggttccaacccggtaaggcaaatggagaggctgtcaggagaccagaagtttacctcagctattgcaccgacgcaccacgtgctctggtgcacatccaccgcctcttcctgcctcagtttctccttttgtaaaacaacagcttgtaaaggcctggggatcttctcatccacgggagttttctaaggatgcaggcgaaagaggatctcactctgttgcctaggctggaatgtggtggcatgatcacagctcactgcagccacaaattcctgggctcaagcaatcctcctgcttcagcctcctgagtagctgggactataggcaagcgctactgtgctcagctctcactctctggctgaatgtagaggactctgaaggcttaggcaagaggggagttataaggcaccacagaaccctgaatgactgcatggagcagaacccttcgcaaacctgctcttcaggcctcctttttgagacagctggaaaagattctttctccttttctagcaattacttcctccctccgactcaaatgcctactcagcctctagtattcagtggctgctgcagtttgcggggttcttctccagaccatagatgcctcagtttttgcagtacctggaggtttcaccagtgaaagctctgaaacagcaaagatggcagcctgccctttcctctgggagttccatcctaggggtgtacagaactgttgctggcctgaatacacctgcatgaggtggctgaagactccagttggattatttatgaggatggcctgtgcaaaaagacacccagagatttcatgctgttgattcacagaaagcctgttcctcttcactccgtagagtcctcagagtctggatcatcccttacagaagatccttgataatatttctgatatacctccaaggttccgtttgtcaaatgtgtgcgacccttctgataagtcaccagaggtgatgagggagagagagaaagaaagcaaattacaactgtaaagagtctctgaacagtgaaagatcaaaacagacagtctctggctttactggatgagtcaccattgcagcccgaccgcaaaaacaagcgtggcttctgtacttagcagcagtcttcctgtctggaaaggaaacattgctcagattggagatactggccattttatagacttcaaagcaacttaggccactgaactgtcaggcgggaaaacaggctgaagaaatgtcaacaattgggagttttgaaggattccaggctgtgtctctgaagcaagagggagatgaccaaccctctgagactgaccacctatcgatggaggaagaggacccgatgccaagacagatttcaaggcagtcaagtgtgaccgaatcaactctttaccccaatccttatcatcagccttatatctcacggaagtactttgctacacggccgggggccattgagactgccatggaagacttgaaaggtcacgtagctgagacttctggagagaccattcaaggcttctggctcttgacaaagatagaccactggaacaatgagaaggagagaattctactggtcacagacaagactctcttgatctgcaaatacgacttcatcatgctgagttgtgtgcagctgcagcggattcctctgagcgctgtctatcgcatctgcctgggcaagttcaccttccctgggatgtccctggacaagagacaaggagaaggccttaggatctactgggggagtccggaggagcagtctcttctgtcccgctggaacccatggtccactgaagttccttatgctactttcactgagcatcctatgaaatacaccagtgagaaattccttgaaatttgcaagttgtctgggttcatgtctaagcttgttccagctatccagaatgcccacaagaattcaactggatctggaagaggaaagaaactgatggtgttaactgaacccattttgattgagacctacacagggctgatgtcattcattggaaaccgcaacaaacttggctattcccttgcccgtgggagtattggtttttgagagtctttttggtaccataagcatatcatccacagatatgtcactttgaaaattccagtttgacccacgctatttttggactgaaacaattaattatttttaaatgacgctttatgatttagaaatttagtatttccgaaaatttaaaagcttgattggactgatagatacacactttagacctcatacaagaataatcaaattttcttaaaactagaaaataaatgctgctgagcctatc

SEQ ID NO: 267837 - protein, 100 aa, Artificial Sequence
  derived and/or modified sequence
MSTIGSFEGFQAVSLKQEGDDQPSETDHLSMEEEDPMPRQISRQSSVTESTLYPNPYHQPYISRKYFATRPGAIETAMEDLKGHVAETSGETIQGFWLLT

SEQ ID NO: 267838 - DNA, 303 bp, Artificial Sequence
  derived and/or modified sequence
atgagcaccatcggcagcttcgagggcttccaggccgtgagcctgaagcaggagggcgacgaccagcccagcgagaccgaccacctgagcatggaggaggaggaccccatgcccagacagatcagcagacagagcagcgtgaccgagagcaccctgtaccccaacccctaccaccagccctacatcagcagaaagtacttcgccaccagacccggcgccatcgagaccgccatggaggacctgaagggccacgtggccgagaccagcggcgagaccatccagggcttctggctgctgacctag

SEQ ID NO: 267839 - DNA, 303 bp, Artificial Sequence
  derived and/or modified sequence
atgtccaccataggttccttcgaggggtttcaagctgttagcctcaagcaagaaggtgacgatcagcctagcgaaacagaccacctgtctatggaggaggaggacccaatgccgcggcagattagcagacagtcctccgtcacagagagcaccctctaccccaacccttatcatcaaccttatatctccaggaagtacttcgccacacgccctggggccatcgaaactgccatggaagacctcaagggacatgtggccgagacctccggcgaaacaatacaggggttttggctcctaacttag

SEQ ID NO: 267840 - DNA, 303 bp, Artificial Sequence
  derived and/or modified sequence
atgagcaccatcggcagctttgagggcttccaggccgtgtccctgaagcaggagggagatgaccagcccagcgagacagaccacctgtccatggaggaggaggaccccatgccccggcagatcagccggcagagctctgtgacagagagcaccctgtaccccaacccctaccaccagccctacatcagcaggaagtactttgccaccaggcctggggccatcgagacagccatggaggacctgaagggccacgtggccgagaccagcggggagaccatccagggcttctggctgctgacctag

SEQ ID NO: 267841 - DNA, 303 bp, Artificial Sequence
  derived and/or modified sequence
atgagcaccatcggcagcttcgagggcttccaggccgtgagcctgaagcaggagggcgacgaccagcctagtgagacagatcacttgagcatggaagaggaagatcccatgcctcgacaaatctctcgtcaatcctcagtaacggagagcacgctctaccccaatccttaccatcagccatacatttcccgcaaatattttgcgacaagacctggggcaattgaaactgcaatggaggatttgaagggacatgtcgccgaaacaagcggagaaaccattcaagggttttggttgctcacatag

SEQ ID NO: 267842 - DNA, 1129 bp, Artificial Sequence
  derived and/or modified sequence
aggcttgaaaaagaggtcaggccccaggagctgggctggagcagtgaggagtgtttcttccaagagaagatgactgcctgagaggattatttatgaggatggcctgtgcaaaaagacacccagagatttcatgctgttgattcacagaaagcctgttcctcttcactccgtagagtcctcagagtctggatcatcccttacagaagatccttgataatatttctgatatacctccaaggttccgtttgtcaaatgtgtgcgacccttctgataagtcaccagaggtgatgagggagagagagaaagaaagcaaattacaactgtaaagagtctctgaacagtgaaagatcaaaacagacagtctctggctttactggatgagtcaccattgcagcccgaccgcaaaaacaagcgtggcttctgtacttagcagcagtcttcctgtctggaaaggaaacattgctcagattggagatactggccattttatagacttcaaagcaacttaggccactgaactgtcaggcgggaaaacaggatgtcttccatttggaagcccctttgcttctaagaagttccagagaccatcccaggcccacagagttataaggattcatctgggcactgaagacatttgggacctcagtgaagtttctccgaggccagatggtcacattgattttctggaatcattttgaataaaaatgagcgaggtggtgaacacaatgcaaggctctccacgtactgtctggtattgttcaaccagctccacgactccctgagggcagagatgagcagatgttaatggataaagccaggctgaagaaatgtcaacaattgggagttttgaaggattccaggctgtgtctctgaagcaagagggagatgaccaaccctctgagactgaccacctatcgatggaggaagaggacccgatgccaagacagatttcaaggcagtcaagtgtgaccgaatcaactctttaccccaatccttatcatcagccttatatctcacggaagtactttgctacacggccgggggccattgagactgccatggaagacttgaaaggtcacgtagctgagacttctggagagaccattcaaggcttctggctcttgacaaa

SEQ ID NO: 267843 - DNA, 303 bp, Artificial Sequence
  derived and/or modified sequence
atgtccacgataggcagctttgagggattccaggcagtcagcctcaagcaagagggggatgatcaaccctcagagacagatcacctcagtatggaggaagaagatcccatgccccgacagattagccgtcagagcagcgtgacggagtccactctgtatccaaacccataccatcaaccctatataagccgcaagtattttgctactagacctggcgctattgagacagctatggaagacttaaagggccacgtcgctgaaacttcaggagagacaatccaagggttttggttgctcacttag

SEQ ID NO: 267844 - protein, 514 aa, Artificial Sequence
  derived and/or modified sequence
MAGNIFCPFALFFLPMSRVGHLQHFLLLLALGCLSLLVTVQHTERYVTLFASIILKCDYTTSAQLQDVVVTWRFKSFCKDPIFDYYSASYQAALSLGQDPSNDCNDNQREVRIVAQRRGQNEPVLGVDYRQRKITIQNRADLVINEVMWWDHGVYYCTIEAPGDTSGDPDKEVKLIVLHWLTVIFIILGALLLLLLIGVCWCQCCPQYCCCYIRCPCCPAHCCCPEEDLSLPSSLPQMPMTQTTNQPPIANGVLEYLEKELRNLNLAQPLPPDLKGRFGHPCSMLSSLGSEVVERRIIHLPPLIRDLSSSRRTSDSLHQQWLTPIPSRPWDLREGRSHHHYPDFHQELQDRGPKSWALERRELDPSWSGRHRSSRLNGSPIHWSDRDSLSDVPSSSEARWRPSHPPFRSRCQERPRRPSPRESTQRHGRRRRHRSYSPPLPSGLSSWSSEEDKERQPQSWRAHRRGSHSPHWPEEKPPSYRSLDITPGKNSRKKGSVERRSEKDSSHSGRSVVI

SEQ ID NO: 267845 - DNA, 1545 bp, Artificial Sequence
  derived and/or modified sequence
atggcggggaacatcttttgcccattcgccctgttcttcttacccatgtcccgcgtcggtcacctgcagcactttctgttgctgcttgctctcggctgcctgtccctgctggtcacagtacagcataccgagcgctacgtgactcttttcgcctccattattctaaagtgtgattatactacatccgctcagctgcaggacgtagtcgtcacatggagatttaaaagcttctgcaaagaccccatttttgactactacagcgccagctatcaggctgccctttcactgggacaagatccatcaaatgattgcaacgacaaccagcgggaagtgcggatcgttgcacagaggcgcgggcagaatgagcccgttctgggcgtagactataggcaacgaaaaatcacgattcagaatcgggccgacctagtcattaacgaggtcatgtggtgggatcacggggtgtattattgcactatcgaggccccgggggacacttccggcgaccccgataaagaagtgaaactcattgtgctacattggctcacagtgatttttattattctaggggccctgttgttgttgcttcttataggtgtttgctggtgtcagtgttgtccacagtactgctgctgttatattcggtgtccatgctgtccagctcactgttgctgtccagaggaagacctatcactgccctcgagcttgccccagatgccaatgacccaaacaacaaatcagccaccgatcgcaaacggggtgctcgagtacctcgagaaggagttacggaacttaaatctggctcagcccctgcctccagacctaaagggtcggtttggtcatccctgctcaatgctgagtagcctggggtccgaagttgtggagcggcgtatcatccacttgccgccactgattcgcgacctcagcagtagcaggagaacgtctgactccttgcaccagcagtggcttacacctataccttcacggccctgggacctgcgtgaggggcgttcccatcaccattaccccgattttcaccaggagctccaagatcgcggtccaaagagctgggccctagaacggagagagctcgatccgtcctggtcaggccggcatcgcagctcacggctgaacgggagccccatccactggagcgaccgcgactcacttagcgacgttcccagcagcagtgaggctaggtggcgacctagccatccaccttttcggtctcgatgtcaggagcggccccggcggccctctccgcgggagagcacacagcgccatggcaggagaagaaggcatagaagctactcaccccctctgccatcaggtctgagctcatggtcaagcgaggaggataaggagaggcaacctcagagttggcgcgctcaccgccggggatcccacagcccccattggcctgaagagaagcctccctcatacagatccctagatatcacaccgggcaaaaactcccgaaaaaagggctccgtagaaaggaggtccgagaaggatagtagccactccggccgaagcgtggttatttag

SEQ ID NO: 267846 - DNA, 1612 bp, Artificial Sequence
  derived and/or modified sequence
taagaacccagactctgtctgtgagctcctagccaggtcaggcaggatggcaggcaatatcttttgcccatttgcattgtttttcttacccatgagcagagtaggtcaccttcagcattttctcctgctcttggctttagggtgcctgtccttgcttgtgacggtccagcacacagaacgctatgtcaccctgtttgcctctatcatcctcaaatgtgactacaccacctctgcccagctccaggacgtggtggtgacatggcgcttcaagtccttctgcaaggaccctatctttgactactactcagcgtcataccaggcagctttatccctgggccaggacccatccaatgactgcaacgacaaccagcgggaagttcgcatagtggcccagcggcgggggcagaatgagcccgtgctgggggtagattaccggcagcgcaagatcaccatccagaaccgagcagatctcgtgataaatgaagtgatgtggtgggaccatggagtgtattactgcaccattgaggctccaggggacacatcaggagaccccgataaggaagtaaagctcatcgtcctacactggctgacagtgatcttcatcatcctgggagccctcctcctcctgctgctgattggagtgtgctggtgccagtgctgtcctcagtattgctgctgctatatccgctgtccctgctgtcctgcccactgctgctgtcctgaggaagatttgtccctgccgtccagcctcccgcagatgccaatgacccagaccaccaatcagcctcccatcgccaatggtgtcctggagtatttggagaaagaactgcggaacctcaacctggcccagcctctgccccctgacctcaaaggcagatttggccatccctgcagcatgctgtcctccctgggctctgaggtcgtggaacgcagaatcatccacctgcccccactgatcagagacctgtcatcctcaaggaggaccagtgactccctgcaccagcagtggctcaccccaattccctccaggccctgggatctgagggaggggagaagccaccaccattaccctgatttccaccaggagctccaggaccgggggccaaagtcttgggcattggaaagaagggagttggacccatcgtggagtggaaggcaccgtagctctaggctgaatgggtcacccatacactggtcagacagggacagcctaagcgatgtcccctcatccagtgaggcacgctggcggccgagccaccctcctttcaggagccgctgtcaggagaggccccgcaggcccagcccccgggagagcactcagaggcacgggagacgacgcaggcaccgcagctactctcctcccttgccctccggcctcagttcctggagctctgaagaggacaaggagaggcagccccagagctggcgggcccaccgccgcggctcgcactccccacactggcccgaggagaagccgcctagctaccgctcacttgatatcactccaggcaagaatagcaggaaaaaagggagtgtggagaggcgctcggagaaagacagctctcatagtggaaggagtgtggtcatttagtcaccaagcacagcacaactt

SEQ ID NO: 267847 - DNA, 1545 bp, Artificial Sequence
  derived and/or modified sequence
atggccggcaacatcttctgcccctttgccctcttcttcctgcccatgagccgggtgggccacctgcagcacttcctgctgctgctggccctgggctgcctgagcctgctggtgacagtgcagcacacagagcgctacgtgaccctgtttgccagcatcatcctgaagtgtgactacaccaccagcgcccagctgcaggatgtggtggtgacctggaggttcaagagcttctgcaaggaccccatctttgactactacagcgccagctaccaggccgccctgagcctgggccaggaccccagcaatgactgcaatgacaaccagcgggaggtgagaattgtggcccagaggcggggccagaatgaacctgtgctgggcgtggactaccggcagaggaagatcaccatccagaacagagctgacctggtgatcaatgaggtgatgtggtgggaccacggcgtgtactactgcaccatcgaggcccctggggacaccagcggggaccctgacaaggaggtgaagctgattgtgctgcactggctgaccgtcatcttcatcatcctgggcgccctgctgctgctgctgctgattggagtgtgctggtgccagtgctgcccccagtactgctgctgctacatccgctgcccctgctgcccagcccactgctgctgcccagaggaggacctgagcctgcccagcagcctgccccagatgcccatgacccagaccaccaaccagccccccatcgccaatggagtgctggagtacctggagaaggagctgaggaacctgaacctggcccagcccctgcccccagacctgaagggccgcttcggccacccctgcagcatgctgagcagcctgggcagcgaggtggtggagcggcgcatcatccacctgcccccactcatccgggacctgagcagcagcaggaggaccagtgacagcctgcaccagcagtggctgacccccatccccagccggccctgggacctgcgggagggccgcagccaccaccactacccagacttccaccaggagctgcaggaccggggccccaagtcctgggccctggagcggcgggagctggaccccagctggagcggccgccacaggagcagccggctgaatggcagccccatccactggagcgaccgggacagcctgagtgatgtgcccagcagcagcgaggcccgctggaggcccagccacccccccttccgcagccgctgccaggagcggccccggcggcccagcccccgggagagcacccagagacatggaagaagaagaagacacaggagctacagcccccccctgcccagcggcctgagctcctggagcagcgaggaggacaaggagcggcagccccagagctggagggcccaccggcggggcagccacagcccccactggccagaggagaagcccccatcctaccgcagcctggacatcaccccaggcaagaacagcaggaagaagggctctgtggagaggagaagtgagaaggacagcagccacagcggccgctctgtggtgatctag

SEQ ID NO: 267848 - DNA, 1545 bp, Artificial Sequence
  derived and/or modified sequence
atggccggcaacatcttctgccccttcgccctgttcttcctgcccatgtcgcgagtgggacatcttcagcactttctgcttttgctcgcactcgggtgtttgagtttgctggtgacagtgcagcatactgagaggtatgttacactgttcgccagcattatcctgaagtgtgattacaccacttcagcccaactgcaagacgttgttgtgacttggaggttcaagtctttctgcaaggatccgatcttcgactattattccgcctcatatcaggcagctctttctttaggccaggatccctccaacgactgtaacgacaaccagagggaggttaggattgtggcacagcgaaggggtcagaatgaacccgtcctgggcgtggactacaggcagagaaagatcactattcagaaccgagcagatctggttattaacgaggtgatgtggtgggatcacggagtgtactattgtacgatcgaagctcctggtgatacatctggcgaccctgacaaagaggtcaaactgattgtgctgcactggctaaccgtgattttcatcatactcggggccttgcttctgctcctgttgattggcgtttgctggtgtcagtgttgtccccagtactgctgctgttacatccggtgcccctgctgtcccgcccattgttgttgccccgaagaggacctctctctcccatccagtctgcctcaaatgccaatgacacagaccaccaatcagccaccaatcgctaatggcgtgctggagtatctcgagaaagaactgagaaatcttaatctcgcgcaaccacttccgcccgatctgaaaggccggttcggccacccatgtagtatgctgtcctcgctggggagtgaagttgtggaacgtagaattatacatcttcctccactgatcagagatcttagttcatctaggcgtacatctgactcattacatcagcagtggctgacacctattccctctcgcccatgggatctgcgtgaagggaggagccaccaccactacccagactttcaccaggaactgcaagatagaggacccaagtcttgggctctggaaaggcgcgaattggacccttcatggtcaggccggcaccgctcaagccgtctcaatggttcacccatccattggtcggatagggacagcttgtccgacgtcccatccagtagcgaggcccgctggcgaccctctcacccacctttccgttcgagatgccaggagagaccgcgaaggccctctccccgcgaatccacacagagacacggacgaaggcggagacataggtcatattcacctcccctgcccagcggactatcgagctggagctctgaagaagacaaggaacgccagccgcaatcgtggagagctcaccgtcgaggatctcactcacctcactggccagaggaaaagcctccgagttacagatcccttgacatcactcctggcaagaatagcagaaaaaaaggaagtgtcgagcgacgtagcgagaaagacagttctcattcaggcaggtcagtagtgatctag

SEQ ID NO: 267849 - DNA, 1545 bp, Artificial Sequence
  derived and/or modified sequence
atggctggcaacatcttctgcccttttgctctgttttttctgccgatgagtagagttggccacctgcagcattttctgttgctgttggcgctggggtgtttaagcctgctggtaaccgtgcagcatactgaaagatatgtcacgctgtttgcatctattattctcaagtgcgattataccacaagcgcccagctgcaagacgtggttgttacctggcgctttaaaagtttttgcaaggaccccatttttgactattattctgcaagctaccaggctgcactaagcttaggacaggatccgtctaacgactgcaatgacaatcagcgcgaagtgagaattgtggcacagcgtcgaggccagaacgaaccagtgctgggggtcgactaccggcagcgcaaaattacaattcagaaccgcgcagatttagtgatcaacgaggtgatgtggtgggaccacggtgtgtactattgcaccattgaggcaccgggagacacgtcaggcgatcccgacaaggaggtgaagctgatcgtgcttcactggttaaccgtgatatttattattcttggagccttgctgttgctcttgctcatcggggtttgctggtgtcagtgctgccctcagtattgttgttgttatatccggtgcccgtgctgccccgctcactgttgctgtccagaggaagatctgtctctgcccagctctctgcctcaaatgcctatgactcagacaacaaatcaacctcctatcgcaaatggcgtactggagtaccttgagaaggagttaaggaatctcaacctcgcccagccacttcccccagatctgaaaggccgattcggccatccttgctccatgctgtcctccctggggtctgaggtcgttgagcgtaggatcattcacctgccccctcttatccgtgacctgtcttcttcaaggagaacgagcgacagcctacaccagcagtggctgacccccataccaagtagaccctgggacttgcgcgaggggcgatcccatcatcactatcctgattttcaccaggagctgcaagaccgcggaccgaagtcatgggcactggagcggagggagctggaccccagctggtccggccgtcaccgcagtagtcgcctgaatggttctcccatccattggtcagaccgagattccctgtcggatgtgccatccagctcagaggcaaggtggcgtccaagtcacccgccatttcgctccaggtgccaggaaagacccaggcgcccttcaccacgagaatccactcaacgccatggacgtaggcggagacaccgatcttatagcccccctcttccttcaggactgtcatcatggtcaagtgaagaggacaaagagcggcagcctcaaagctggcgggctcaccggaggggcagtcactcgcctcattggcccgaagagaagcccccttcctataggagcttagatatcacaccaggcaagaacagtcggaagaaagggtctgtggagcgaaggagtgagaaagacagcagtcactcaggtcggtccgtcgtgatttag

SEQ ID NO: 267850 - DNA, 1545 bp, Artificial Sequence
  derived and/or modified sequence
atggccggcaacatcttctgccccttcgccctgttcttcctgcccatgagcagagtgggccacctgcagcacttcctgctgctgctggccctgggctgcctgagcctgctggtgaccgtgcagcacaccgagagatacgtgaccctgttcgccagcatcatcctgaagtgcgactacaccaccagcgcccagctgcaggacgtggtggtgacctggagattcaagagcttctgcaaggaccccatcttcgactactacagcgccagctaccaggccgccctgagcctgggccaggaccccagcaacgactgcaacgacaaccagagagaggtgagaatcgtggcccagagaagaggccagaacgagcccgtgctgggcgtggactacagacagagaaagatcaccatccagaacagagccgacctggtgatcaacgaggtgatgtggtgggaccacggcgtgtactactgcaccatcgaggcccccggcgacaccagcggcgaccccgacaaggaggtgaagctgatcgtgctgcactggctgaccgtgatcttcatcatcctgggcgccctgctgctgctgctgctgatcggcgtgtgctggtgccagtgctgcccccagtactgctgctgctacatcagatgcccctgctgccccgcccactgctgctgccccgaggaggacctgagcctgcccagcagcctgccccagatgcccatgacccagaccaccaaccagccccccatcgccaacggcgtgctggagtacctggagaaggagctgagaaacctgaacctggcccagcccctgccccccgacctgaagggcagattcggccacccctgcagcatgctgagcagcctgggcagcgaggtggtggagagaagaatcatccacctgccccccctgatcagagacctgagcagcagcagaagaaccagcgacagcctgcaccagcagtggctgacccccatccccagcagaccctgggacctgagagagggcagaagccaccaccactaccccgacttccaccaggagctgcaggacagaggccccaagagctgggccctggagagaagagagctggaccccagctggagcggcagacacagaagcagcagactgaacggcagccccatccactggagcgacagagacagcctgagcgacgtgcccagcagcagcgaggccagatggagacccagccacccccccttcagaagcagatgccaggagagacccagaagacccagccccagagagagcacccagagacacggcagaagaagaagacacagaagctacagcccccccctgcccagcggcctgagcagctggagcagcgaggaggacaaggagagacagccccagagctggagagcccacagaagaggcagccacagcccccactggcccgaggagaagccccccagctacagaagcctggacatcacccccggcaagaacagcagaaagaagggcagcgtggagagaagaagcgagaaggacagcagccacagcggcagaagcgtggtgatctag

SEQ ID NO: 267851 - DNA, 960 bp, Artificial Sequence
  derived and/or modified sequence
actaaggcaaccaccaccagagccaccagcagtatgagcacaccttcgagtacaccagggacgacatggatcctcacagaattgacgacagccgctactactaccgctgccaccccccacggacatcccgttcttcatcctagagatcacctggatccacacagggcccagcactacaccgtaacagtgccgacggggtccaccgcaacagcctcgtctacgagggccactgccgggaccctcaaggtgctgacctcgcaccatacccattctcaccaacttcagagccatagtctgctgcagagccgggactgcaatcgaccaagcagtaccgaaaaacattcgcaccatacacattcataccagaggtactctcacccattgtttttgcctaccgcttggacacggctttcacaaacgacaacccccaccgcaacaatgagtacagccactccctcaagtacacccgagaccgtgcacactagcaccgttcttaccaccaccaccacaaccacaagagccaccctttggccgccccccccccctccccaggaacaactcacgctgccaaagtgccgactcccgcagccccggcactcccatccactgcttcagcccagagatgggactcacgcgagtagtgtggaccagcacaaccatcacactcacaaccagcggctgcacggagatcccctactgcaccctaccacgcatactgccacagtcttaacgactacaaccactacccccctcgtgctctggcagcatcctccactggctcacaggccagtggtccccccttctctgacgaccaccgccaccactatcaccgctacaggttcgacaacgaatccgtcttcgacccccgggactacacctatcccccctgtgctgacgactactgcacatacttgctcccaccaacaacacagcgacagcctactgtgtcctcgagactag

SEQ ID NO: 267852 - protein, 330 aa, Artificial Sequence
  derived and/or modified sequence
MGSRKKEIALQVNISTQELWEEMLSSKGLTVVDVYQGWCGPCKPVVSLFQKMRIEVGLDLLHFALAEADRLDVLEKYRGKCEPTFLFYAGGELVAVVRGANAPLLQKTILDQLEAEKKVLAEGRERKVIKDEALSDEDECVSHGKNNGEDEDMVSSERTCTLAIIKPDAVAHGKTDEIIMKIQEAGFEILTNEERTMTEAEVRLFYQHKAGEEAFEKLVHHMCSGPSHLLILTRTEGFEDVVTTWRTVMGPRDPNVARREQPESLRAQYGTEMPFNAVHGSRDREDADRELALLFPSLKFSDKDTEAPQGGEAEATAGPTEALCFPEDVD

SEQ ID NO: 267853 - protein, 202 aa, Artificial Sequence
  derived and/or modified sequence
MGSRKKEIALQVNISTQELWEEMLSSKGLTVVDVYQGWCGPCKPVVSLFQKMRIEVGLDLLHFALAEADRLDVLEKYRGKCEPTFLFYAGGELVAVVRGANAPLLQKTILDQLEAEKKVLAEGRERKVIKDEALSDEDECVSHGKNNGEDEDMVSSERTCTLAIIKPDAVAHGKTDEIIMKIQEAGFEILTNEERTMTEAEV

SEQ ID NO: 267854 - DNA, 1281 bp, Artificial Sequence
  derived and/or modified sequence
aacagggcttcgtcttctttgcagagccatgggcagcaggaagaaggaaattgccctgcaggtcaacatcagcacccaagagctttgggaggaaatgctcagttccaaaggactaactgttgttgatgtctatcaaggctggtgtggcccctgcaaacctgtggtgagcctcttccagaagatgaggatcgaggtcggcctggaccttctgcactttgcattagcagaggcagatcgtcttgatgtcctcgaaaagtacagagggaagtgcgagccaacctttctgttttatgcaggaggagaactggtggctgtggttagaggagcaaatgccccactgctgcagaaaaccatcctagaccagctggaggccgaaaagaaagtgctggctgaaggcagagaacggaaagtgattaaagatgaggctctttctgatgaagatgaatgtgtttcccatggaaagaataatggtgaagatgaggacatggtttcatcagagaggacctgtaccttggccatcattaaaccagatgcagtggcccatggaaagactgatgagattatcatgaagattcaggaagctgggtttgaaattctaacaaatgaagagagaaccatgacagaggcagaagtgcgacttttctaccaacacaaagctggagaggaggcatttgagaagctggtacatcacatgtgcagtggaccaagccacctcctgatcctcaccaggactgagggcttcgaggacgtggtcactacctggcgaaccgtcatgggcccccgtgaccccaatgtggccaggagggagcagccagaaagtctccgagctcagtacggcacagaaatgcccttcaatgccgtccatggaagccgggacagagaagatgctgacagagaactggcattgctcttccccagtttgaaattttcagacaaagatacagaagcccctcagggcggtgaggctgaagcaacagcggggcccactgaggcgctttgctttcctgaggatgtggattgagatggctgtgctgctcttccagagcacgtgaccaggggtctactgcacaaaacagacctccggaatcggaacttactcttttgagtaccaatactttttggtttagctgtcttttgtagacaatgaaaataatatggctgggcgcagtgactcacacctgtaatcccagcactttgggaggccgaggcaggtggatcacctgagattaggagtttgacaccagcctagccaacatggtgaaaccctgtctctactaaaaa

SEQ ID NO: 267855 - DNA, 660 bp, Artificial Sequence
  derived and/or modified sequence
gggcgcgtcgaagatcttgtacctgtcgttcgcagtggctcactttcccaagccatgggcagcaggaagaaggaaattgccctgcaggtcaacatcagcacccaagagctttgggaggaaatgctcagttccaaaggactaactgttgttgatgtctatcaaggctggtgtggcccctgcaaacctgtggtgagcctcttccagaagatgaggatcgaggtcggcctggaccttctgcactttgcattagcagaggcagatcgtcttgatgtcctcgaaaagtacagagggaagtgcgagccaacctttctgttttatgcaggaggagaactggtggctgtggttagaggagcaaatgccccactgctgcagaaaaccatcctagaccagctggaggccgaaaagaaagtgctggctgaaggcagagaacggaaagtgattaaagatgaggctctttctgatgaagatgaatgtgtttcccatggaaagaataatggtgaagatgaggacatggtttcatcagagaggacctgtaccttggccatcattaaaccagatgcagtggcccatggaaagactgatgagattatcatgaagattcaggaagctgggtttgaaattctaacaaatgaagagagaaccatgacagaggcagaagtg

SEQ ID NO: 267856 - protein, 358 aa, Artificial Sequence [sequence omitted]

SEQ ID NO: 267857 - DNA, 1077 bp, Artificial Sequence
  derived and/or modified sequence
atgagaacctactggcttcattcggtgtgggtactgggatttttcctttcgcttttttcactgcagggacttccggtgcggtctgtggactttaacagagggacagataacattaccgttagacagggggacacagcaattctgcgctgcgtggtagaagacaagaactctaaggtggcatggctgaacaggtcagggattattttcgctggccacgacaagtggagtctggatcctcgcgtggaactcgaaaagcggcactccctagagtactccctacgcatccagaaggtggatgtgtacgatgaggggtcctacacgtgttccgtgcagacccagcacgagcccaaaacttcacaagtctacttgatcgtgcaggtcccacctaagatttcaaacatttcaagtgatgtgaccgtgaacgagggctccaatgtgactttggtgtgtatggccaacggcaggcccgaacctgtgattacatggagacacctgacacctactggccgagaattcgagggggaagaggaatatctggaaattctgggtatcactcgcgagcagagtggtaagtacgaatgcaaagccgctaacgaagtcagcagcgctgatgtcaaacaggtgaaggtgacagtcaactatccaccaacgatcaccgagagcaagagtaacgaagctacaactgggcggcaagcatcattgaagtgcgaggcatcggcagtgcctgcccctgactttgaatggtatagagacgatacaaggatcaacagcgccaacggactggagattaagagcacggagggtcagtcatctctcactgtgacgaacgtgacggaggaacattacggcaattatacttgcgtggctgcgaacaaactcggcgttaccaatgcatctctggttctgtttaaacgtgttctgcctactattcctcaccccatccaggaaataggtactaccgtccattttaaacagaagggtccgggcagcgtgcgtggtatcaacggaagcatcagccttgccgtaccattgtggctgcttgctgcatctttattatgcctcctctctaagtgctag

SEQ ID NO: 267858 - DNA, 1077 bp, Artificial Sequence
  derived and/or modified sequence
atgaggacctactggctgcacagcgtgtgggtgctgggcttcttcctgagcctcttcagcctgcagggcctgcctgtgcgctctgtggacttcaacagaggaacagacaacatcaccgtgcggcagggcgacacagccatcctgcgctgtgtggtggaggacaagaacagcaaggtggcctggctgaacagaagtggcatcatctttgctggccatgacaagtggagcctggacccccgggtggagctggagaagaggcacagcctggagtacagcctgcgcatccagaaggtggatgtgtatgatgagggcagctacacctgcagcgtgcagacccagcacgagcccaagaccagccaggtgtacctgattgtgcaggtgccccccaagatcagcaacatcagcagtgatgtgacagtgaatgaaggcagcaatgtgaccctggtgtgcatggccaacggccggcctgagcccgtcatcacctggaggcacctgacccccaccggccgggagtttgaaggagaggaggagtacctggagatcctgggcatcacccgggagcagagcggcaagtatgagtgcaaggccgccaatgaggtgagcagcgcagatgtgaagcaggtgaaggtgacagtgaactacccacccaccatcacagagagcaagagcaatgaggccaccaccggccggcaggccagcctgaagtgtgaggccagcgctgtgcctgccccagactttgagtggtacagagatgacacccgcatcaacagcgccaacggcctggagatcaagagcacagagggccagagcagcctgactgtgaccaacgtgacagaggagcactacggcaactacacctgtgtggccgccaacaagctgggcgtgaccaatgccagcctggtgctcttcaagagggtgctgcccaccatcccccaccccatccaggagatcggcaccaccgtgcacttcaagcagaagggccctggctctgtgcggggcatcaatggcagcatcagcctggccgtgcccctgtggctgctggccgccagcctgctgtgcctgctgagcaaatgttag

SEQ ID NO: 267859 - DNA, 1077 bp, Artificial Sequence
  derived and/or modified sequence
atgaggacctactggctgcacagcgtctgggtgctgggctttttcctgtccctcttctcattgcaaggactgcctgttcgcagcgtggattttaaccgaggcacggacaacatcaccgtgaggcagggggacacagccatcctcaggtgcgttgtagaagacaagaactcaaaggtggcctggttgaaccgttctggcatcatttttgctggacatgacaagtggtctctggacccacgggttgagctggagaaacgccattctctggaatacagcctccgaatccagaaggtggatgtctatgatgagggttcctacacttgctcagttcagacacagcatgagcccaagacctcccaagtttacttgatcgtacaagtcccaccaaagatctccaatatctcctcggatgtcactgtgaatgagggcagcaacgtgactctggtctgcatggccaatggccgtcctgaacctgttatcacctggagacaccttacaccaactggaagggaatttgaaggagaagaagaatatctggagatccttggcatcaccagggagcagtcaggcaaatatgagtgcaaagctgccaacgaggtctcctcggcggatgtcaaacaagtcaaggtcactgtgaactatcctcccactatcacagaatccaagagcaatgaagccaccacaggacgacaagcttcactcaaatgtgaggcctcggcagtgcctgcacctgactttgagtggtaccgggatgacactaggataaatagtgccaatggccttgagattaagagcacggagggccagtcttccctgacggtgaccaacgtcactgaggagcactacggcaactacacctgtgtggctgccaacaagctgggggtcaccaatgccagcctagtccttttcaaacgtgttttacccacaatcccccaccccattcaagaaattggtaccaccgtgcacttcaagcaaaaaggacctgggtcggtgagaggaataaatggatccatcagtctggccgtaccactgtggctgctggcagcatctctgctctgccttctcagcaaatgttaa

SEQ ID NO: 267860 - DNA, 1077 bp, Artificial Sequence
  derived and/or modified sequence
atgcggacctactggctgcacagcgtgtgggtgctgggcttcttcttatcgctcttctctttgcaggggctgccggtgcgctccgtagatttcaacaggggaactgataatatcaccgtgcggcaaggtgacactgcaatcctgcgctgcgtcgttgaggataagaactcaaaggtcgcctggctgaataggtccgggataatcttcgccgggcacgacaaatggtccttggacccgagggtcgagttggagaaacgacattcactggagtacagtttgcggatccagaaggtcgatgtttacgatgaaggctcgtacacgtgctcagttcaaacgcaacacgaacctaagaccagccaggtttatctcatagtacaagtccctcctaagataagcaacattagctcggacgtcaccgtgaacgagggctccaatgtgacgcttgtgtgtatggccaatggtcgacctgaaccagtgattacatggcgacatcttacccccacaggcagggaattcgaaggggaggaagagtatttggagattctcggcattacgagggaacagagcggcaagtacgagtgtaaggccgccaacgaggttagctctgcggatgtgaaacaggtgaaggtgaccgtgaattatccccctactattactgaatccaaaagtaacgaggctacaaccggtcgacaagcaagcttgaagtgtgaagctagtgcagtgcctgcacctgatttcgaatggtacagagacgacacaaggataaattcggcaaacggcttagagattaagtctaccgaagggcagtccagtctgaccgtgactaacgtgacagaggaacattacggaaactacacatgcgtggccgccaacaaactcggcgtgacgaacgccagcctcgtgctgtttaaacgcgttcttcccacaatcccccatcctatccaggaaatcgggacaaccgtgcattttaagcagaaaggccctgggtctgtccgcggaattaatggatccatttccttggcagtacccctgtggctgctggccgcctcgcttttgtgtctcctctctaaatgttag

SEQ ID NO: 267861 - DNA, 1077 bp, Artificial Sequence
  derived and/or modified sequence
atgcgaacctattggttgcactcggtttgggtactgggctttttcctgtctctgttcagtctgcagggacttcctgttaggtccgtcgatttcaatcgtgggacggataacatcactgtccgtcaaggtgacacagccatcctccgatgcgtggtggaggataaaaactcaaaagtagcatggctgaaccgatcggggatcatcttcgcaggccacgataagtggtccctcgatccacgggtggaactagaaaagaggcactcacttgagtattcactgaggatccaaaaggtggatgtttacgacgaagggagctacacctgcagcgttcagacccagcatgaacctaagacttctcaggtatacctcatcgtccaggtccctccaaagatatcaaacatctcaagcgatgtcacggtgaatgaaggctctaatgtaaccctggtgtgtatggctaacggcaggcctgaacccgtgatcacctggcgacacttgactcctacaggaagggaatttgagggtgaggaagaatacttagagatcctgggcataacccgggaacagtccgggaaatacgagtgtaaggctgcgaacgaggtttcaagcgctgacgtgaaacaggtgaaggtcacggtaaattatccacctacaattacagagtctaaatcaaacgaggccaccacaggcaggcaagcatctttgaagtgcgaagctagcgccgtgccggctccagactttgaatggtatcgggacgatactcgaattaacagcgccaacggattagaaatcaagtccaccgagggacagtcatcactcacagtcactaacgtgacagaggaacattacggtaactatacgtgcgtggctgccaacaaactgggcgttacaaatgctagcctggtgctcttcaaacgtgtccttcccaccataccccaccctattcaggagatcggaaccaccgttcactttaaacagaaagggcctggtagcgtacggggtatcaacggttccatctccctcgctgtgcccctatggctgttagccgcttcattattgtgcctgctttccaagtgctag

SEQ ID NO: 267862 - DNA, 1077 bp, Artificial Sequence
  derived and/or modified sequence
atgagaacctactggctgcacagcgtgtgggtgctgggcttcttcctgagcctgttcagcctgcagggcctgcccgtgagaagcgtggacttcaacagaggcaccgacaacatcaccgtgagacagggcgacaccgccatcctgagatgcgtggtggaggacaagaacagcaaggtggcctggctgaacagaagcggcatcatcttcgccggccacgacaagtggagcctggaccccagagtggagctggagaagagacacagcctggagtacagcctgagaatccagaaggtggacgtgtacgacgagggcagctacacctgcagcgtgcagacccagcacgagcccaagaccagccaggtgtacctgatcgtgcaggtgccccccaagatcagcaacatcagcagcgacgtgaccgtgaacgagggcagcaacgtgaccctggtgtgcatggccaacggcagacccgagcccgtgatcacctggagacacctgacccccaccggcagagagttcgagggcgaggaggagtacctggagatcctgggcatcaccagagagcagagcggcaagtacgagtgcaaggccgccaacgaggtgagcagcgccgacgtgaagcaggtgaaggtgaccgtgaactacccccccaccatcaccgagagcaagagcaacgaggccaccaccggcagacaggccagcctgaagtgcgaggccagcgccgtgcccgcccccgacttcgagtggtacagagacgacaccagaatcaacagcgccaacggcctggagatcaagagcaccgagggccagagcagcctgaccgtgaccaacgtgaccgaggagcactacggcaactacacctgcgtggccgccaacaagctgggcgtgaccaacgccagcctggtgctgttcaagagagtgctgcccaccatcccccaccccatccaggagatcggcaccaccgtgcacttcaagcagaagggccccggcagcgtgagaggcatcaacggcagcatcagcctggccgtgcccctgtggctgctggccgccagcctgctgtgcctgctgagcaagtgctag

SEQ ID NO: 267863 - DNA, 441 bp, Artificial Sequence
  derived and/or modified sequence
atgtggcccgccccctgcagcgtgggccggctgctgatcttcttcatgtgctccagttccggctacgttgtgcaggggtgtggaccttcccctggcgcgcggaccacccttggtagcccactgagtctgtggtccatcaagactccgtcacacatattttgtactcgcagggccattaacctggggttccccagccctccacttgttcagttgatattctggtcactcaatgccggacttgacctgtatctgtgccttatctcaagctgcggcttttcacaagtgttctggccagtggaagccttttgttctttttccctgtcctttttcgcgctggcactgagtcacaagttcgtgatttgtaggctggaccagcacattttcagcgggtttacaaaatctctaaagaacctgcctccctgtcaccgaactgacatttag

SEQ ID NO: 267864 - DNA, 1266 bp, Artificial Sequence
  derived and/or modified sequence
gagtgaggcgtcgtccgtactggaggctagctcttgtcgcggccgcggcgagttaacatcgtttttccaatctgtccgcggctgccgccacccaagacagagccagaatgttcaggatgctgaacagcagttttgaggatgaccccttcttctcgtgagttacgggagccaggagtccggggtcgcgcgggaattaagacatacaggtggtcttactctgcagcagctgaaactgaagcacaagaagcccttggaactatcatcaggacattgagtccattcttgcacaccgagaaaatatgcgacagatgataagaagtttttctgaaccctttggaagagacttgctcagtatctctgatggtagagggagagctcataatcgtagaggacataatgatggtgaagattctttgactgcaacgagttgttctcttgtgccttttggcgattttggtggtatgcatacagatgtcagctctttccagacaatggaccaaatggtgtcaaatatgagaaactatatgcagaaattagaaagaaacttcggtcaactttcagtggatccaaatggacattcattttgttcttcctcagttatgacttattccaaaataggagatgaaccgccaaaggtttttcaggcctcaactcaaactcgtcgagctccaggaggaataaaggaaaccaggaaagcaatgagagattctgacagtggactagaaaaaatggctattggtcatcatatccatgaccgagctcatgtcattaaaaagtcaaagaacaagaagactggagatgaagaggtcaaccaggagttcatcaatatgaatgaaagtgatgctcatgcttttgatgaggagtggcaaagtgaggttttgaagtacaaaccaggacgacacaatctaggaaacactagaatgagaagtgttggccatgagaatcctggctcccgagaacttaaaagaagggagaaacctcaacaaagtccagccattgaacatggaaggagatcaaatgttttgggggacaaactccacatcaaaggctcatctgtgaaaagcaacaaaaaataaatagccatgcatttgatttgtttagttttgattgttttaacagttagtaatggtgctgggtaataagcataagaccaatctcttgctgttaaatcagttctgtccttggcaactttcttctgatatctgaatgttcatgaaggtcctagctttatattgtccctcttttaggaataaaattttgattttc

SEQ ID NO: 267865 - DNA, 366 bp, Artificial Sequence
  derived and/or modified sequence
atgcggcggagcctgaagaccagccacttcagcgaggagcccagcacatgcttgttcctaaatcaccggaacggaagcactgacccaacaattatccttcatatctctgaaccaatgttcaacggggggaagcgagaaatgcatggcaagcgaacgccaccatttctacttagtttaaaattcaaagatgtgtgttttggcatgccttccctgctgcctatccacaggctccttaagtctctcatctacagcaggcacatgtgtctcttgtgcccaaagtgcattactttcctgctggtgatggcagacttcggctgtgtatgcgttcgacacgctgttaataacgagatgaaagccattgcttag

SEQ ID NO: 267866 - DNA, 366 bp, Artificial Sequence
  derived and/or modified sequence
atgcggagaagtctaaagacctcacacttcagcgaggaaccctccacatgtttatttttaaatcaccgcaatggctcaacagaccccacgattattctgcacatttcggagccgatgtttaatggcggaaaacgggagatgcacggcaaaagaactccacctttcctcctgtctttgaagttcaaagacgtgtgcttcggaatgccctcccttctacccattcatcgccttctaaaatctttaatttactccaggcatatgtgcctgctctgtcccaaatgcattacttttctgctcgttatggccgactttgggtgcgtgtgtgtacggcacgctgttaataatgagatgaaggccatcgcctag

SEQ ID NO: 267867 - protein, 514 aa, Artificial Sequence
  derived and/or modified sequence
MSSLSLKPLVQVSVGAFVQLVNEQQESRPLLSPSIDDFLCETKSEAIARPVTSNTADIQTQLEKWDDVKFHGDRNTKGHPMAERKSSSSRTGSKELLWSSEHRSQPELSGGKSALNSESASELELVAPTQARLTKEHRWGSALLSRNHSLEEEFERAKAAVESDTEFWDKMQAEWEEMARRNWISENQEAQNQVTISASEKGYYFHTENPFKDWPGAFEEGLKRLKEGDLPVTILFMEAAILQDPGDAEAWQFLGITQAENENEQAAIVALQRCLELQPNNLKALMALAVSYTNTGHQQDACDALKNWIKQNPKYKYLVKSKKGSPGLTRRMSKSPVDSSVLEGVKELYLEAAHQNGDMIDPDLQTGLGVLFHLSGEFNRAIDAFNAALTVRPEDYSLWNRLGATLANGDRSEEAVEAYTRALEIQPGFIRSRYNLGISCINLGAYREAVSNFLTALSLQRKSRNQQQVPHPAISGNIWAALRIALSLMDQPELFQAANLGDLDVLLRAFNLDP

SEQ ID NO: 267868 - DNA, 1545 bp, Artificial Sequence
  derived and/or modified sequence
atgtcatctctgtcgctcaagcccctggtgcaggttagtgtgggcgcctttgtacaactggtgaatgagcagcaggagagtaggccgctactatcacctagtattgacgattttctgtgcgaaactaagagcgaagcaatcgccaggcccgtgacaagcaacaccgctgacatccaaacacagttggagaagtgggacgatgttaagttccatggcgacagaaatactaaagggcatccaatggccgaacgtaaatcctcctcatcacggacaggctccaaggaactgctgtggtccagtgaacacaggagtcaacccgagctttcaggagggaagtctgcactgaatagcgaaagtgcgagtgagctggaactggtcgctccaacccaggcacggctgaccaaagaacatcggtggggatcagccctactatctaggaaccattcattggaggaggagttcgaacgtgccaaagcagctgttgagtcagacaccgagttctgggacaaaatgcaggccgaatgggaggagatggccaggagaaactggatctcagagaatcaggaggcgcaaaatcaggtgacaatcagtgctagcgaaaaaggatactattttcacaccgagaacccattcaaggattggccaggcgcatttgaagagggattaaagcgcctgaaagagggagatctccctgtcactatcttgtttatggaggctgccatcttgcaggatcccggcgacgcagaggcttggcagtttttaggaattacacaagcagaaaacgagaatgaacaagccgcaatcgtggctctgcaacgctgtctcgagctacaacctaacaacctaaaagcccttatggccctggccgtgtcttatacgaacactggacaccagcaggacgcttgcgacgcattgaaaaattggattaaacagaaccctaagtacaagtacctggttaaatctaagaagggaagccctggactaacccgcaggatgagcaagtcacccgtcgattcttctgtcttggagggcgtcaaagagctgtacttagaagctgctcatcaaaacggggatatgattgatccggatttgcagaccggtctgggagtcctattccatctgtccggcgagttcaatcgagcgatagacgccttcaacgccgccttaaccgtgcgacccgaagactacagcctgtggaacagactaggagccaccctggccaatggtgatcgcagtgaggaagccgtggaagcttacactcgcgccctggaaattcagcctggcttcattaggtcccggtacaacttagggatttcctgcatcaatctgggtgcataccgcgaagctgtgtctaatttcctgaccgctttgagtttgcagcgcaaaagtcgaaatcagcaacaggtgccccaccctgccatttctggcaacatctgggctgctctcaggatagctctgagtctgatggatcaacccgagctctttcaggccgctaatctgggagatttagatgtgctgttgagggcctttaacctggacccttag

SEQ ID NO: 267869 - DNA, 1545 bp, Artificial Sequence
  derived and/or modified sequence
atgagcagcctgagcctgaagcccctggtgcaggtgtctgtgggcgcctttgtgcagctggtgaatgagcagcaggagagccggcccctgctgagccccagcattgatgacttcctgtgtgagaccaagtctgaggccatcgcccggcctgtgaccagcaacacagctgacatccagacccagctggagaagtgggatgatgtgaagttccatggagacaggaacaccaagggccaccccatggccgagaggaagagcagcagcagcaggacaggcagcaaggagctgctgtggagcagcgagcacaggagccagcctgagctgagcggcggcaagagcgccctgaacagcgagagcgccagcgagctggagctggtggcccccacccaggcccggctgaccaaggagcaccgctggggcagcgccctgctgagcaggaaccacagcctggaggaggagtttgagcgggccaaggctgctgtggagagtgacacagagttctgggacaagatgcaggccgagtgggaggagatggcccggaggaactggatcagcgagaaccaggaggcccagaaccaggtgaccatcagcgccagcgagaagggctactacttccacacagagaaccccttcaaggactggccaggggcctttgaggagggcctgaagaggctgaaggagggggacctgcctgtgaccatcctcttcatggaggccgccatcctgcaggaccctggagatgctgaggcctggcagttcctgggcatcacccaggccgagaatgaaaatgagcaggccgccatcgtggccctgcagcgctgcctggagctgcagcccaacaacctgaaggccctgatggccctggccgtgtcctacaccaacacaggccaccagcaggatgcctgtgatgccctgaagaactggatcaagcagaaccccaagtacaagtacctggtgaagagcaagaagggcagccctggcctgaccaggaggatgagcaagagccctgtggacagctctgtgctggagggcgtgaaggagctgtacctggaggccgcccaccagaatggagacatgattgatcctgacctgcagacaggcctgggcgtgctcttccacctgtctggagagttcaacagagccattgatgccttcaatgctgccctgactgtgcggcctgaggactacagcctgtggaaccggctgggcgccaccctggccaacggggacagaagtgaggaggccgtggaggcctacacccgggccctggagatccagcccggcttcatccgcagccgctacaacctgggcatcagctgcatcaacctgggcgcctaccgggaggccgtgagcaacttcctgacagccctgagcctgcagaggaagagcaggaaccagcagcaggtgccccacccagccatcagcggcaacatctgggccgccctgcgcatcgccctgagcctgatggaccagcctgagctgttccaggccgccaacctgggggacctggatgtgctgctgcgggccttcaacctggacccctag

SEQ ID NO: 267870 - DNA, 1545 bp, Artificial Sequence
  derived and/or modified sequence
atgagcagcctgagcctgaagcccctggtgcaggtgagcgtgggcgcctttgttcagctggtcaacgaacagcaggaaagcaggccacttctgagccccagcatcgatgactttctgtgtgaaaccaagagtgaggccattgctcgaccagtcaccagcaatactgccgacatccagacacaactggagaaatgggatgatgttaaattccatggcgacaggaacaccaaaggtcatcccatggccgaacgcaagtcaagctcttctcgtactggaagtaaagaactgctgtggtcatctgaacatcggtcccagccggagctgagtggaggaaagtctgccctgaacagcgagagcgcgtctgagttagaacttgtagcaccgactcaagcacgtctgacaaaagagcacagatggggatctgccctcctttctagaaaccattccctcgaggaagagtttgaaagggccaaagctgccgtggaaagtgacaccgaattttgggacaaaatgcaagctgaatgggaagagatggccaggagaaactggattagcgaaaatcaggaagctcaaaatcaagtgaccatatctgcctctgaaaaagggtactattttcacactgagaaccccttcaaagactggcctggagctttcgaagaaggcctgaaaagacttaaagaaggagatctgcccgtgactattctgttcatggaagcagcgatcctccaagatcccggggacgcggaggcctggcagtttctcggtataacacaagctgagaacgagaatgaacaggcagccatcgtggcactgcaaagatgtctggaactgcagccaaataacctcaaggcccttatggccctcgccgtgtcatacaccaacactggtcatcaacaggacgcctgcgatgctctgaaaaactggataaaacagaatcccaagtacaagtatctggtgaaatccaaaaaaggatccccaggcctgacccgacgcatgtccaaatcccccgtggatagctctgtgctagaaggtgtgaaggaattgtacctggaggcagctcaccagaacggagatatgattgatcctgacttgcagacagggctcggtgtgctcttccatctttccggcgaatttaatagggctatagatgcattcaacgcagcacttaccgttcgacctgaagactattcgttgtggaacagactgggagcaactctagccaatggtgaccggagcgaggaggccgtggaagcttacacacgagcactggagattcagccgggatttattagaagcagatacaacttgggcattagttgcatcaaccttggcgcttatagagaggcggtgagcaacttcctcactgccctgtccctccagcgcaaatcccggaaccagcagcaggtaccacatccggcaatctcagggaacatctgggccgccctcaggattgcgctaagtcttatggaccagccggagctcttccaagctgcaaatttgggggacctcgatgtgttgctgagggcctttaacctggatccctag

SEQ ID NO: 267871 - DNA, 1739 bp, Artificial Sequence
  derived and/or modified sequence
agtgctaaccagaacatgtcatctttgagtctgaagccactggtccaggtctcagtaggagcttttgtccagctggtgaatgagcaacaagaaagcagacccctcctgagtccctccatcgatgactttctctgtgaaaccaaatcggaagcaatagcaaggccagtaacatccaatacagctgacattcaaacacaactggaaaaatgggacgatgttaagtttcatggagatcgaaataccaagggacatccaatggcagagagaaaatcatcctcatctagaactggatcaaaagagctcttatggtcctcagaacacagatctcaaccagaactgagtggtggaaaaagcgccctcaactctgagtcggcttcagaattggaattagtggctccgactcaggctcgactgaccaaagaacatcgctggggaagcgcattactttctagaaaccactccttagaagaagagtttgaaagggcaaaagcagcagtggagtcagatacagagttttgggataagatgcaagcagaatgggaagaaatggctcggaggaactggatatctgagaaccaagaagcccagaaccaagtaaccatctcggctagtgagaagggatattactttcacactgaaaaccccttcaaggactggcctggagcatttgaagaaggcttaaaaaggctgaaggaaggggatctgccagtcaccatcctgttcatggaagcagcaattcttcaggaccctggagatgcagaggcatggcagttcctcgggataacccaggcggagaatgaaaatgaacaagcagctattgtcgccctccagaggtgcttagaattacagcccaacaacttaaaagctttgatggccttggctgtgagttatactaacactggccatcagcaggatgcctgtgacgctctgaagaattggattaagcaaaatccaaagtacaaataccttgtgaaaagcaagaagggatctccaggcctcacccggcggatgtctaagtccccagttgatagctctgttctggaaggggtgaaggaattatatctggaagctgcccaccaaaatggagatatgatcgacccagacctgcagacaggtctaggggttctgttccacctgagtggagaatttaatagagcaatagatgcatttaacgctgccttaactgttcggccagaggactattcactatggaaccgcctcggggcgaccttggcgaacggagaccgcagcgaggaagccgtggaggcctatacgcgagcactggagattcagccaggattcatccggtccagatacaacctaggaataagctgcatcaacctgggcgcctacagagaagcggtcagcaattttctcactgccctcagtttgcaaagaaagagcaggaatcagcagcaagttcctcatcctgcaatctctgggaatatctgggctgccctcagaattgcgctctctctgatggaccaaccagaactcttccaggcggctaatcttggtgacctggatgtcctcttaagagctttcaacttggatccttgaagaaagaataataccagtactaataatccctgatctgtgtgattgtactgaaaaatcaaaaactattttattatgaatttcaaaaggataaatcaaatattcaaaaggccatggtcatatagcccaaggaaattaattcctgtggacaatgcccagtctctgttcagatccaaaagcac

SEQ ID NO: 267872 - DNA, 1545 bp, Artificial Sequence
  derived and/or modified sequence
atgtccagcctgagcctcaagcccctcgtgcaggtgtctgtaggggcatttgtacagctcgtgaatgagcagcaggagtccaggccactcctgtcacctagtatcgatgactttctttgtgaaactaagtcagaggcgatcgcgaggcccgttaccagcaacactgctgatatccagacacaactcgagaaatgggatgacgttaagtttcacggagaccggaacactaaaggccatccgatggccgagcgtaaatcatctagcagtcgcacgggaagcaaggagttgctctggtcaagcgaacaccgcagtcagcccgagctgagcggtgggaagtccgcgctcaacagtgagtcagctagtgagctagaactggtggctccaacccaggctcggctcacgaaagaacacaggtggggatccgcactgctatcacggaaccatagcctcgaggaagaattcgagcgagctaaggcagccgttgaaagtgatacggagttttgggataagatgcaggctgaatgggaggagatggccaggagaaattggatatcggagaatcaggaggcgcagaaccaggtcacaatctcagcgtcagaaaaaggttattattttcataccgagaatcctttcaaagattggccaggggcattcgaggaagggctcaaacgactgaaggagggagacctgcctgttacgattctgttcatggaggcagccatcctgcaagaccccggtgatgccgaggcctggcaatttttgggaatcacccaagctgaaaacgagaacgagcaggctgccattgttgccttgcaacgctgtttggaactgcaaccgaacaacctaaaggccttgatggcgctcgccgtgagttatacaaataccggtcaccagcaagatgcctgcgacgctctgaaaaactggattaagcagaaccctaaatacaaatacttggtgaaatcgaagaagggctcccctggcctaactaggcgaatgtcaaagagcccagtggacagctcagtcttagaaggcgtcaaggagttatacttggaggctgcgcaccaaaacggagacatgatcgacccagacctgcaaactggactgggcgtactgtttcaccttagtggagaattcaatcgagctatagatgcattcaatgccgctctgaccgtccgacccgaagactattctctctggaacagactcggtgcaacactcgccaatggcgatcggtcggaagaagccgtcgaagcgtataccagggctttggagatacagccaggctttatccggtctagatacaatctggggatctcttgtataaatctgggtgcctatcgcgaggccgtctccaactttctgaccgcattaagtctccaacgaaagagccgaaaccagcaacaagtgccccatccggctatctccgggaacatatgggccgctctgaggattgcactcagcttgatggaccagcccgaattgtttcaggccgctaacctcggggatctggacgtgctcttgcgcgcttttaacttggacccttag

SEQ ID NO: 267873 - DNA, 1545 bp, Artificial Sequence
  derived and/or modified sequence
atgagcagcctgagcctgaagcccctggtgcaggtgagcgtgggcgccttcgtgcagctggtgaacgagcagcaggagagcagacccctgctgagccccagcatcgacgacttcctgtgcgagaccaagagcgaggccatcgccagacccgtgaccagcaacaccgccgacatccagacccagctggagaagtgggacgacgtgaagttccacggcgacagaaacaccaagggccaccccatggccgagagaaagagcagcagcagcagaaccggcagcaaggagctgctgtggagcagcgagcacagaagccagcccgagctgagcggcggcaagagcgccctgaacagcgagagcgccagcgagctggagctggtggcccccacccaggccagactgaccaaggagcacagatggggcagcgccctgctgagcagaaaccacagcctggaggaggagttcgagagagccaaggccgccgtggagagcgacaccgagttctgggacaagatgcaggccgagtgggaggagatggccagaagaaactggatcagcgagaaccaggaggcccagaaccaggtgaccatcagcgccagcgagaagggctactacttccacaccgagaaccccttcaaggactggcccggcgccttcgaggagggcctgaagagactgaaggagggcgacctgcccgtgaccatcctgttcatggaggccgccatcctgcaggaccccggcgacgccgaggcctggcagttcctgggcatcacccaggccgagaacgagaacgagcaggccgccatcgtggccctgcagagatgcctggagctgcagcccaacaacctgaaggccctgatggccctggccgtgagctacaccaacaccggccaccagcaggacgcctgcgacgccctgaagaactggatcaagcagaaccccaagtacaagtacctggtgaagagcaagaagggcagccccggcctgaccagaagaatgagcaagagccccgtggacagcagcgtgctggagggcgtgaaggagctgtacctggaggccgcccaccagaacggcgacatgatcgaccccgacctgcagaccggcctgggcgtgctgttccacctgagcggcgagttcaacagagccatcgacgccttcaacgccgccctgaccgtgagacccgaggactacagcctgtggaacagactgggcgccaccctggccaacggcgacagaagcgaggaggccgtggaggcctacaccagagccctggagatccagcccggcttcatcagaagcagatacaacctgggcatcagctgcatcaacctgggcgcctacagagaggccgtgagcaacttcctgaccgccctgagcctgcagagaaagagcagaaaccagcagcaggtgccccaccccgccatcagcggcaacatctgggccgccctgagaatcgccctgagcctgatggaccagcccgagctgttccaggccgccaacctgggcgacctggacgtgctgctgagagccttcaacctggacccctag

SEQ ID NO: 267874 - DNA, 1257 bp, Artificial Sequence
  derived and/or modified sequence
atgttagagaaccacattctccataagcgtatctacatactaacctttttctcccaacagatctttatcttgtgtcatgcacatttcatcttcttttttacagtacgggacttttgtcggcaagacgagaagtgcgactattatttcagcgtcgacgcggatgtggtgcttactaacccaagaacactgaagatcttgatcgaacagaatagaaagatcatcgctcctcttgttacacgtcacggtaagctgtggtccaatttttggggcgccctgtcccccgatgggtattatgcaagatccgaggattacgtcgatatcgtgcaggggaaccgagttggcgtgtggaacgtgccctacatggccaatgtctatctgatcaaggggaagacacttagaagcgaaatgaatgagagaaactacttcgttcgggacaaactggacccagatatggctctgtgccggaacgcgagagaaatgactcttcaacgcgaaaaagattctcccacccccgaaacattccagatgctgtcgccacccaagggtgtttttatgtacatatctaataggcatgagttcggcagactgctatcaacagcaaattacaacacatcgcactacaataacgacctttggcagatctttgagaaccctgtggactggaaagagaaatatatcaacagagactactctaagatctttacagagaatatcgtggagcagccgtgccccgacgtgttttggtttccaatatttagtgagaaggcctgcgacgagcttgtcgaagagatggagcattacgggaaatggtctggtggaaaacatcacgactctcgtatctccggcgggtacgagaatgtccctaccgacgacattcacatgaagcaagtggatctggaaaacgtgtggctgcactttattcgtgagtttatagccccagtgacactgaaggttttcgcggggtattatacaaaaggctttgcgctccttaatttcgtggtcaagtacagccctgaaaggcagcgatcccttcggcctcaccacgacgcttccacctttactatcaatattgcattgaacaatgtgggcgaagacttccagggcggcggatgtaagtttcttcggtataactgctctatcgaaagcccgaggaaaggatggagctttatgcacccgggaagattgacccacctgcacgagggtctgcccgtgaagaatggaaccaggtacattgctgtgagctttatagatccatag

SEQ ID NO: 267875 - DNA, 1257 bp, Artificial Sequence
  derived and/or modified sequence
atgctggagaaccacatcctgcacaagaggatctacatcctgaccttcttcagccagcagatcttcatcctgtgccacgcccacttcatcttcttcttcaccgtgcgggacttctgccggcaggatgagaagtgtgactactacttctctgtggatgctgatgtggtgctgaccaaccccaggaccctgaagatcctgattgagcagaacaggaagatcatcgcccccctggtgaccaggcatggcaagctgtggagcaacttctggggcgccctgagcccagatggctactatgcccggtctgaggactatgtggacatcgtgcagggcaacagagtgggcgtgtggaatgtgccctacatggccaacgtgtacctgatcaagggcaagaccctgcggtctgagatgaatgaaagaaactactttgtgcgggacaagctggaccctgacatggccctgtgcagaaatgcccgggagatgaccctgcagcgggagaaggacagccccaccccagagaccttccagatgctgagcccccccaagggcgtcttcatgtacatcagcaacagacatgaatttggccgcctgctgagcacagccaactacaacaccagccactacaacaatgacctgtggcagatctttgagaaccctgtggactggaaggagaagtacatcaacagagactacagcaagatcttcacagagaacatcgtggagcagccctgcccagatgtgttctggttccccatcttcagcgagaaggcctgtgatgagctggtggaggagatggagcactacggcaagtggagcggcggcaagcaccacgacagccgcatcagcggcggctatgaaaatgtgcccacagatgacatccacatgaagcaggtggacctggagaatgtgtggctgcacttcatccgggagttcatcgcccctgtgaccctgaaggtgtttgctggctactacaccaagggctttgccctgctgaactttgtggtgaagtacagccctgagcggcagaggagcctgcggccccaccatgatgccagcaccttcaccatcaacatcgccctgaacaacgtgggggaggacttccagggcggcggctgcaagttcctgcgctacaactgcagcattgagagccccaggaagggctggagcttcatgcaccctggccgcctgacccacctgcacgagggcctgcctgtgaagaatggcacccgctacatcgctgtgtccttcatcgacccctag

SEQ ID NO: 267876 - DNA, 1257 bp, Artificial Sequence
  derived and/or modified sequence
atgctggagaaccacatcctgcacaagcggatctacatcctgaccttcttcagccagcaaatattcattctgtgccacgcacatttcatcttcttcttcacagtgagggacttctgtcggcaggatgaaaagtgcgactactatttctcagttgacgcagacgtggtgctgacgaatccaagaactttgaaaattctcattgagcaaaacagaaaaatcatcgcacccctcgtgacccggcatggcaagctgtggagtaatttctggggggcccttagccccgacggctattacgcccgcagcgaggactacgttgatattgttcaagggaaccgggtgggcgtgtggaacgttccctacatggctaacgtgtatctcatcaaggggaaaaccttgcgcagcgaaatgaatgagcgcaattattttgtgagggacaagttggaccctgacatggctttatgccgcaacgcccgcgaaatgaccctccagagagagaaggactccccgacaccagagaccttccagatgcttagcccccctaagggtgtgtttatgtacatctccaatcgccacgaattcgggcggctgttgagcactgcgaactataatacctcccactataataacgatttgtggcaaatcttcgagaaccctgtggattggaaggaaaaatacattaatagagattactccaagattttcacagagaacatcgtggaacagccgtgccccgatgtcttctggtttcctatatttagtgagaaggcttgcgatgaactggtggaagagatggaacattatggaaaatggagcgggggaaaacaccacgactcgcggatctctggcgggtacgagaacgttcccactgacgacatccatatgaaacaagttgatttggagaatgtctggcttcatttcattcgcgagttcatagctcccgttacactgaaggtattcgccggctactacacaaaggggttcgcgctgcttaacttcgtggtgaagtatagcccggaaaggcagcggtccttgaggccccatcacgacgccagtacgttcaccatcaacatcgccttaaacaacgtaggcgaggatttccagggcgggggctgtaaatttctgcgctataactgcagcattgagagccccaggaaaggctggagttttatgcatccaggccgtctaacccatctgcatgagggcctacccgtgaagaacggtacccgctacatcgccgtatcattcatcgacccctag

SEQ ID NO: 267877 - DNA, 1257 bp, Artificial Sequence
  derived and/or modified sequence
atgctggaaaaccatatactccataaaagaatttatatactaaccttcttttcgcagcaaatcttcatcctgtgtcatgctcatttcattttctttttcacagtgcgtgatttctgtcgccaggacgaaaaatgtgattattatttctcggtggacgctgatgtcgtgttgacgaatccacggacattgaagattttaattgagcagaaccgaaaaattatagccccactagtgacacggcacgggaagctatggagcaacttttggggtgctctgtccccagacggctactacgcacgatccgaggactatgtggatatcgttcagggaaacagagtgggagtctggaacgtgccctatatggctaatgtataccttataaaagggaagacactgcgctcggaaatgaacgagcggaattattttgtgagggacaagttggacccagacatggccctgtgtagaaatgcaagagaaatgaccttgcagcgggagaaggattcacccacccccgagacatttcagatgcttagccctcccaagggagtctttatgtatattagtaataggcacgagttcggacggttgttgtctactgcaaactacaatactagtcactacaacaacgatctctggcagatctttgagaatccggtggattggaaggagaagtacataaacagggactacagcaaaatatttacagaaaatatcgtagaacagccctgcccagacgtgttttggttccctatattttccgagaaggcctgcgacgagctggtggaggaaatggagcactacggcaagtggagtggcggaaagcaccacgattccagaataagtggcggatatgagaatgtccccaccgacgacatccacatgaagcaggtggacctcgagaacgtgtggttgcactttatcagagagttcatcgccccagtgaccctaaaggtattcgctggatattacaccaagggcttcgccctcttgaactttgtggttaaatattcaccagagaggcaacggtcactgagaccgcatcacgatgcctccacgtttaccatcaacattgctctgaacaatgtcggggaggattttcagggaggaggctgcaagttcctcagatacaattgtagcattgaaagtccccgaaaggggtggtcattcatgcacccaggaagactcactcatctgcacgagggccttcccgtcaagaacggaacccgatacatcgcggtgagcttcattgacccctag

SEQ ID NO: 267878 - DNA, 3043 bp, Artificial Sequence
  derived and/or modified sequence
aagtgctgactgggaccgacagtgagggaggggagcccagagggaagttgataacccaaatgtcatctggtatctccagttgttcattccttgatattgctgatgataatgttacaaactgtaccagggaaagcaaacatagtcactgcccctggtaagaaggcaggggaataactatcttagaaaatttgatgaaaatcaagtttgtaaaatattaatacctgaaaagtcatatacttacatctccaacattcatttaaaactgagttgtgggatatgtaagttgcatttgtgtgcatgtgtatgtatgtatgtatgtatgcagaaacattttgatttgtggatgttttatgccttaaaatatttactggcttgaaaatatattttaactggcttaaaattttagaggtgagctccctgtgaatatccgtgttaaattgaccattttgaaatttaagacaatatatatatcgtttcagatattgttccactattttgatcagaaaagtatgctagagaaccatattttacataaaagaatatatatattaacatttttcagtcagcagatatttattttatgtcatgcccatttcattttctttttcactgttagggacttttgccgtcaggatgaaaagtgtgattattactttagtgtggatgcagatgttgttttgacaaatccaaggactttaaaaattttgattgaacaaaacagaaagatcattgctcctcttgtaactcgtcatggaaagctgtggtccaatttctggggagcattgagtcctgatggatactatgcacgatctgaagattatgtggatattgttcaagggaatagagtaggagtatggaatgtcccatatatggctaatgtgtacttaattaaaggaaagacactccgatcagagatgaatgaaaggaactattttgttcgtgataaactggatcctgatatggctctttgccgaaatgctagagaaatgactttacaaagggaaaaagactcccctactccggaaacattccaaatgctcagccccccaaagggtgtatttatgtacatttctaatagacatgaatttggaaggctattatccactgctaattacaatacttcccattataacaatgacctctggcagatttttgaaaatcctgtggactggaaggaaaagtatataaaccgtgattattcaaagattttcactgaaaatatagttgaacagccctgtccagatgtcttttggttccccatattttctgaaaaagcctgtgatgaattggtagaagaaatggaacattacggcaaatggtctgggggaaaacatcatgatagccgtatatctggtggttatgaaaatgtcccaactgatgatatccacatgaagcaagttgatctggagaatgtatggcttcattttatccgggagttcattgcaccagttacactgaaggtctttgcaggctattatacgaagggatttgcactactgaattttgtagtaaaatactcccctgaacgacagcgttctcttcgtcctcatcatgatgcttctacatttaccataaacattgcacttaataacgtgggagaagactttcagggaggtggttgcaaatttctaaggtacaattgctctattgagtcaccacgaaaaggctggagcttcatgcatcctgggagactcacacatttgcatgaaggacttcctgttaaaaatggaacaagatacattgcagtgtcatttatagatccctaagttatttacttttcattgaattgaaatttattttggatgaatgactggcatgaacacgtctttgaagttgtggctgagaagatgagaggaatatttaaataacatcaacagaacaacttcactttgggccaaacatttgaaaaactttttataaaaaattgtttgatatttcttaatgtctgctctgagccttaaaacacagattgaagaagaaaagaaagaaaaaacttaaatatttatttctatgctttgttgcctctgagaataatgacaatttatgaatttgtgtttcaaattgataaaatatttaggtacaaataacaagactaataatattttcttatttaaaaaaagcatgggaagatttttatttatcaaaatatagaggaaatgtagacaaaatggatataaatgaaaattaccatgttgtaaaaccttgaaaatcagattctaactggatttgtatgcaactaagtatttttctgaacacctatgcaggtcttatttacagtagttactaagggaacacacaaagaattacacaacgttttcctcaagaaaatggtacaaaacacaaccgaggagcgtatacagttgaaaacatttttgttttgattggaaggcagattattttatattagtattaaaaatcaaaccctatgtttctttcagatgaatcttccaaagtggattatattaagcaggtattagatttaggaaaacctttccatttcttaaagtattatcaagtgtcaagatcagcaagtgtccttaagtcaaacaggttttttttgttgttgtttttgctttgtttccttttttagaaagttctagaaaataggaaaacgaaaaatttcattgagatgagtagtgcatttaattattttttaaaaaactttttaagtacttgaattttatatcaggaaaacaaagttgttgagccttgcttcttccgttttgccctttgtctcgctccttattctttttttggggggagggttatttgcttttttatcttcctggcataatttccattttattcttctgagtgtctatgttaacttccctctatcccgcttataaaaaaattctccaacaaaaatacttgttgacttgatgttttatcacttctctaagtaaggttgaaatatccttattgtagctactgtttttaatgtaaaggttaaacttgaaaagaaattcttaatcacggtgccaaaattcattttctaacaccatgtgttagaaaattataaaaaataaaataattttagaaa

SEQ ID NO: 267879 - DNA, 1257 bp, Artificial Sequence
  derived and/or modified sequence
atgctggaaaaccacatcctgcacaagcgtatatatatactgaccttcttttcgcagcagattttcattctctgtcatgctcactttatatttttcttcaccgttcgtgatttctgtcgccaggacgaaaaatgtgattactattttagcgtggacgccgatgtcgtcttgacaaaccctcggactctgaaaattttaattgagcagaaccgcaaaattatcgcaccccttgtaaccaggcacggaaaactgtggtccaatttctggggcgccctatccccggacgggtattatgcccggagtgaagattacgttgatatcgtgcagggcaaccgagttggagtatggaatgtgccttacatggcgaacgtgtatctcatcaaagggaaaactctgcgaagcgaaatgaatgagcgaaactattttgtgagggacaagttggatcccgatatggctctgtgtcgcaacgcccgcgagatgacattacagagggagaaggatagcccaacaccagagacatttcagatgctgagtccgccgaagggagtgttcatgtacatttcaaatagacatgaattcgggaggctcctgtccacggccaattataatacctcccattacaataacgacctctggcaaatctttgagaaccccgttgactggaaagaaaagtacattaatcgagattattccaaaatcttcacggagaacatcgtcgaacagccatgccctgacgtcttctggttccccattttttctgagaaggcctgtgacgagctcgtggaggagatggagcactatggcaagtggtcgggtggtaagcaccatgacagtagaattagtggaggttatgagaatgtacccacagacgatatacatatgaaacaagtggatctggaaaacgtgtggctccactttatccgggaattcatcgcccccgttaccctaaaagtattcgcgggttactatacaaaaggatttgccctgctaaattttgtggtgaaatactcccctgagagacagagaagtctccggcctcatcatgacgcgtcaaccttcaccattaacatcgctcttaataacgttggggaagacttccagggtgggggctgcaagttcctccgatataattgctctatcgaaagccctcggaagggatggtcgttcatgcaccccggacgtctgacccatctgcacgagggtctgccagtcaaaaacggtacccgatacatcgccgtttccttcatcgacccttag

SEQ ID NO: 267880 - DNA, 1257 bp, Artificial Sequence
  derived and/or modified sequence
atgctcgaaaaccacatcctccacaagcgcatttacattctcacattcttctcccagcagatatttatcctctgtcacgcacactttattttcttctttactgttagagacttttgtcgccaggacgagaagtgcgattattacttttcggtggatgcagatgttgtcctgaccaaccctagaaccctaaaaattttgattgaacagaaccgcaaaattatcgccccactcgttactagacatggcaaactgtggagcaatttttggggagcattaagccctgacggatactatgccagaagcgaggattacgtcgacatagttcagggaaacagagtcggcgtgtggaacgtaccgtacatggccaatgtatacttgattaaaggaaagacccttagaagcgaaatgaatgagaggaactacttcgtaagagacaagttagatccagatatggccctttgtagaaatgccagagaaatgacgctacaaagagagaaggattccccaaccccagagacattccagatgctgtccccacccaagggagtatttatgtatatcagtaaccgtcacgagttcggacggttacttagcacagccaattacaatacaagtcattacaacaacgatctgtggcaaatctttgaaaaccctgtggactggaaggaaaagtatattaaccgagattactccaagatattcaccgaaaacattgttgagcagccttgccccgacgtcttctggttcccaatattctccgaaaaggcttgcgatgagctggtggaagagatggaacattacggcaagtggtctggcggaaagcatcatgatagcagaattagcgggggatatgaaaacgttcctactgacgacattcacatgaaacaagtcgacttggaaaacgtctggttacacttcatccgcgaatttatcgctccagtgacactgaaagtctttgctggctattatacaaaaggctttgctcttctcaatttcgtcgtcaagtattccccagagaggcaaaggagtcttaggccacatcatgatgcgtccacttttactatcaatatcgccctgaacaacgtgggtgaagatttccaaggcggaggatgtaaatttttaaggtacaactgctccattgagagcccacggaagggctggtcctttatgcaccctggcagactgactcatcttcacgaaggcctacctgtaaagaatggaacccgatatatcgctgtgagcttcattgacccatag

SEQ ID NO: 267881 - DNA, 1257 bp, Artificial Sequence
  derived and/or modified sequence
atgctggagaaccacatcctgcacaagagaatctacatcctgaccttcttcagccagcagatcttcatcctgtgccacgcccacttcatcttcttcttcaccgtgagagacttctgcagacaggacgagaagtgcgactactacttcagcgtggacgccgacgtggtgctgaccaaccccagaaccctgaagatcctgatcgagcagaacagaaagatcatcgcccccctggtgaccagacacggcaagctgtggagcaacttctggggcgccctgagccccgacggctactacgccagaagcgaggactacgtggacatcgtgcagggcaacagagtgggcgtgtggaacgtgccctacatggccaacgtgtacctgatcaagggcaagaccctgagaagcgagatgaacgagagaaactacttcgtgagagacaagctggaccccgacatggccctgtgcagaaacgccagagagatgaccctgcagagagagaaggacagccccacccccgagaccttccagatgctgagcccccccaagggcgtgttcatgtacatcagcaacagacacgagttcggcagactgctgagcaccgccaactacaacaccagccactacaacaacgacctgtggcagatcttcgagaaccccgtggactggaaggagaagtacatcaacagagactacagcaagatcttcaccgagaacatcgtggagcagccctgccccgacgtgttctggttccccatcttcagcgagaaggcctgcgacgagctggtggaggagatggagcactacggcaagtggagcggcggcaagcaccacgacagcagaatcagcggcggctacgagaacgtgcccaccgacgacatccacatgaagcaggtggacctggagaacgtgtggctgcacttcatcagagagttcatcgcccccgtgaccctgaaggtgttcgccggctactacaccaagggcttcgccctgctgaacttcgtggtgaagtacagccccgagagacagagaagcctgagaccccaccacgacgccagcaccttcaccatcaacatcgccctgaacaacgtgggcgaggacttccagggcggcggctgcaagttcctgagatacaactgcagcatcgagagccccagaaagggctggagcttcatgcaccccggcagactgacccacctgcacgagggcctgcccgtgaagaacggcaccagatacatcgccgtgagcttcatcgacccctag

SEQ ID NO: 267882 - protein, 275 aa, Artificial Sequence
  derived and/or modified sequence
MGNFRGHALPGTFFFIIGLWWCTKSILKYICKKQKRTCYLGSKTLFYRLEILEGITIVGMALTGMAGEQFIPGGPHLMLYDYKQGHWNQLLGWHHFTMYFFFGLLGVADILCFTISSLPVSLTKLMLSNALFVEAFIFYNHTHGREMLDIFVHQLLVLVVFLTGLVAFLEFLVRNNVLLELLRSSLILLQGSWFFQIGFVLYPPSGGPAWDLMDHENILFLTICFCWHYAVTIVIVGMNYAFITWLVKSRLKRLCSSEVGLLKNAEREQESEEEM

SEQ ID NO: 267883 - protein, 291 aa, Artificial Sequence
  derived and/or modified sequence
MTNDSEGKMGFKHPKIMGNFRGHALPGTFFFIIGLWWCTKSILKYICKKQKRTCYLGSKTLFYRLEILEGITIVGMALTGMAGEQFIPGGPHLMLYDYKQGHWNQLLGWHHFTMYFFFGLLGVADILCFTISSLPVSLTKLMLSNALFVEAFIFYNHTHGREMLDIFVHQLLVLVVFLTGLVAFLEFLVRNNVLLELLRSSLILLQGSWFFQIGFVLYPPSGGPAWDLMDHENILFLTICFCWHYAVTIVIVGMNYAFITWLVKSRLKRLCSSEVGLLKNAEREQESEEEM

SEQ ID NO: 267884 - DNA, 876 bp, Artificial Sequence
  derived and/or modified sequence
atgaccaacgacagcgagggcaagatgggcttcaagcaccccaagatcatgggcaacttcagaggccacgccctgcccggcaccttcttcttcatcatcggcctgtggtggtgcaccaagagcatcctgaagtacatctgcaagaagcagaagagaacctgctacctgggcagcaagaccctgttctacagactggagatcctggagggcatcaccatcgtgggcatggccctgaccggcatggccggcgagcagttcatccccggcggcccccacctgatgctgtacgactacaagcagggccactggaaccagctgctgggctggcaccacttcaccatgtacttcttcttcggcctgctgggcgtggccgacatcctgtgcttcaccatcagcagcctgcccgtgagcctgaccaagctgatgctgagcaacgccctgttcgtggaggccttcatcttctacaaccacacccacggcagagagatgctggacatcttcgtgcaccagctgctggtgctggtggtgttcctgaccggcctggtggccttcctggagttcctggtgagaaacaacgtgctgctggagctgctgagaagcagcctgatcctgctgcagggcagctggttcttccagatcggcttcgtgctgtacccccccagcggcggccccgcctgggacctgatggaccacgagaacatcctgttcctgaccatctgcttctgctggcactacgccgtgaccatcgtgatcgtgggcatgaactacgccttcatcacctggctggtgaagagcagactgaagagactgtgcagcagcgaggtgggcctgctgaagaacgccgagagagagcaggagagcgaggaggagatgtag

SEQ ID NO: 267885 - DNA, 876 bp, Artificial Sequence
  derived and/or modified sequence
atgaccaacgacagtgagggcaagatggggtttaagcatcctaagataatgggcaattttcggggccacgctctacccgggactttcttctttattatcggtctgtggtggtgcacaaagtctatccttaaatatatatgtaagaagcagaagcggacctgttaccttggctctaagacccttttctataggctggagattctggagggcataaccattgtaggaatggccttgaccgggatggctggcgagcagttcatacctggggggcctcacctcatgctttatgattacaagcagggacattggaatcaactgctaggatggcatcatttcacaatgtacttctttttcggcctactgggcgtggcagatattctgtgtttcacaatcagctccttgcccgtttccctgaccaaacttatgttaagtaacgccttattcgtggaagctttcatcttctacaaccatacgcatggccgagagatgctggatatctttgtgcatcagcttcttgtgttggttgtgttcttgactggcctagtggctttcctggagttcctggtacgcaacaacgttttgttagagctcctgcgtagctctttaatcctgctgcagggctcttggttctttcagataggcttcgtcctgtaccctccctctggcggacctgcatgggatttgatggatcatgagaacatactatttttgaccatttgtttttgttggcattatgccgtgacgatcgtgatcgtcggcatgaattacgcgttcatcacatggcttgtcaagagcaggctgaagcggttatgttcgtccgaggtggggttactcaaaaacgccgaaagagaacaagaatccgaggaagaaatgtag

SEQ ID NO: 267886 - DNA, 876 bp, Artificial Sequence
  derived and/or modified sequence
atgaccaatgattctgagggcaagatgggcttcaagcaccccaagatcatgggcaacttccggggccacgccctgcccggcaccttcttcttcatcatcggcctgtggtggtgcaccaagagcatcctgaagtacatctgcaagaagcagaagaggacctgctacctgggcagcaagaccctcttctaccgcctggagatcctggagggcatcaccatcgtgggcatggccctgaccggcatggccggggagcagttcatccctgggggcccccacctgatgctgtatgactacaagcagggccactggaaccagctgctgggctggcaccacttcaccatgtacttcttcttcggcctgctgggcgtggccgacatcctgtgcttcaccatcagcagcctgcctgtgtccctgaccaagctgatgctgagcaatgccctgtttgtggaggccttcatcttctacaaccacacccacggccgggagatgctggacatctttgtgcaccagctgctggtgctggtggtgttcctgaccggcctggtggccttcctggagttcctggtgaggaacaacgtgctgctggagctgctgcggagcagcctcatcctgctgcagggctcctggttcttccagattggatttgtgctgtacccaccttctgggggccctgcctgggacctgatggaccacgagaacatcctcttcctgaccatctgcttctgctggcactatgctgtgaccatcgtgattgtgggcatgaactatgccttcatcacctggctggtgaagagccggctgaagaggctgtgcagcagcgaggtgggcctgctgaagaatgctgagcgggagcaggagagcgaggaggagatgtag

SEQ ID NO: 267887 - DNA, 876 bp, Artificial Sequence
  derived and/or modified sequence
atgaccaacgacagcgagggcaagatgggcttcaagcaccccaagatcatgggaaactttagaggacatgccctgcctggaacgttttttttcataatcgggctgtggtggtgcacgaaaagcatcctgaagtacatctgcaaaaaacaaaaacgcacctgttacctcggttccaagacactgttttatcggctggagatactagaaggtataaccatcgttggtatggccctgacaggaatggctggtgaacagttcatccctggaggaccccaccttatgctttacgattacaagcaaggtcactggaaccagttgctcggctggcaccactttactatgtatttcttctttgggctgctgggagtggcagacatcctgtgcttcacaatcagcagtctgcccgtgagcctcaccaaactcatgctgtccaatgccctgtttgtggaagcttttatcttctataatcatacacacgggagggaaatgcttgacatcttcgtgcatcagctactggttcttgtggtgttcctgaccggtctggtggcttttctggagttcctggtgcggaacaacgtgctgctcgagcttttgcgcagcagcctaatattgttgcagggcagctggttttttcagatcgggttcgtcctgtatccaccgtcaggtgggccagcgtgggacctgatggatcatgaaaatatcctcttcctgactatctgcttctgttggcattacgccgtcacaatcgtgattgtgggaatgaactatgcgttcatcacctggctggtcaagagccgactgaaacgcctgtgttccagtgaggtgggactgctgaaaaatgcggaaagggaacaggagagcgaagaagagatgtag

SEQ ID NO: 267888 - DNA, 876 bp, Artificial Sequence
  derived and/or modified sequence
atgactaacgacagtgaggggaagatgggcttcaagcatccaaagattatgggaaacttccggggacacgctctccccggaacatttttttttatcatcgggctgtggtggtgcaccaagtccatactaaaatacatctgcaagaaacaaaaacgaacttgttatctgggctctaagaccttgttttataggctcgagatactagagggaattactatagttggcatggcactaactggaatggcaggagaacaatttatccctgggggaccgcacctgatgctttatgactataagcaggggcactggaatcagctcctgggatggcaccatttcaccatgtatttcttctttgggctgcttggggtcgctgacatcctgtgcttcactatatcttctctacctgtctccttgacaaaactaatgctgtcaaacgccctttttgtggaggcgtttatcttctacaatcatactcatgggagggagatgcttgatatcttcgtgcaccaattactcgttcttgtggtctttctaaccggcctggtggcctttctggagtttctggtccggaacaatgtgctgctcgagctgttgcggtcctctctgattctcctgcaggggagttggttcttccagattggctttgtattatacccgccatcagggggaccagcctgggacctgatggatcatgagaatattctgtttcttactatctgcttctgctggcattatgccgtgaccatcgtgattgtggggatgaattatgctttcataacgtggttggtaaaaagtcgattgaaacgcctctgcagctctgaagtaggactccttaaaaacgccgagcgcgaacaagaaagtgaggaggaaatgtag

SEQ ID NO: 267889 - DNA, 1567 bp, Artificial Sequence
  derived and/or modified sequence
gaagcacatctggacagctgtgcggcctcctcgcgggccgacgtcagccgagcacgtcccccacgtcctctccttctcgccacttattatttattcgttttcccaaagaagcgactagggacccaagtttaaaaattcctccccccacccaatgcgagacgtggccagatcccatccaacacacggtttaattttcatggggctctgggatcaaaagaacagaaacagcaacaacaaaagcccagccgctgtctgattttaagctggcaaagtgggaaaaataaagtgttgagtaaacagaccaagttggatcatggggaatttcagaggtcatgccctccctggaaccttcttttttattattggtctttggtggtgtacaaagagtattctgaagtatatctgcaaaaagcaaaagcgaacctgctatcttggttccaaaacattattctatcgattggaaattttggagggaattacaatagttggcatggctttaactggcatggctggggagcagtttattcctggagggccccatctgatgttatatgactataaacaaggtcactggaatcaactcctgggctggcatcatttcaccatgtatttcttctttgggctgttgggtgtggcagatatcttatgtttcaccatcagttcacttcctgtgtccttaaccaagttaatgttgtcaaatgccttatttgtggaggcctttatcttctacaaccacactcatggccgggaaatgctggacatctttgtgcaccagctgctggttttggtcgtctttctgacaggcctcgttgccttcctagagttccttgttcggaacaatgtacttctggagctattgcggtcaagtctcattctgcttcaggggagctggttctttcagattggatttgtcctgtatccccccagtggaggtcctgcatgggatctgatggatcatgaaaatattttgtttctcaccatatgcttttgttggcattatgcagtaaccattgtcatcgttggaatgaattatgctttcattacctggttggttaaatctagacttaagaggctctgctcctcagaagttggacttctgaaaaatgctgaacgagaacaagaatcagaagaagaaatgtgactttgatgagcttccagtttttctagataaaccttttcttttttacattgttcttggttttgtttctcgatcttttgtttggagaacagctggctaaggatgactctaagtgtactgtttgcatttccaatttggttaaagtatttgaatttaaatattttctttttagctttgaaaatattttgggtgatactttcattttgcacatcatgcacatcatggtattcaggggctagagtgatttttttccagattatctaaagttggatgcccacactatgaaagaaatatttgttttatttgccttatagatatgctcaaggttactgggcttgctactatttgtaactccttgaccatggaattatacttgtttatcttgttgctgcaatgagaaataaatgaatgtatgtattttggtgcaga

SEQ ID NO: 267890 - DNA, 1910 bp, Artificial Sequence
  derived and/or modified sequence
gcgggccgacgtcagccgagcacgtcccccacgtcctctccttctcgccacttattatttattcgttttcccaaagaagcgactagggacccaagtttaaaaattcctccccccacccaatgcgagacgtggccagatcccatccaacacacggtttaattttcatggggctctgggatcaaaagaacagaaacagcaacaacaaaagcccagccgctgtctgattttaagctggcaaagtgggaaaaataaagtgttgagtaaacagaccaagttggggtgctatgggccaggtttctgaagttgggtggaggtggaggccaccggcagtgagtacaacgcccaggggaagcatgtgagtgggaggaagaaaagagagttttctggagctgttgcaatgtgtatgctggtgaaatctacttgagcattaagcagtatctcccagcattgttagctactgagtggcacatcttcagtacgcatgattcgtgggggactcaggcagaggtaaaagtgtgaaacttttcagcattacctaagaagcaaaggctcaattttggctgcttcattcttatctcttctgccacagttctaacgtgcctgatctactgagaccaaggatgaccaatgactcagaagggaaaatgggatttaaacacccaaagatcatggggaatttcagaggtcatgccctccctggaaccttcttttttattattggtctttggtggtgtacaaagagtattctgaagtatatctgcaaaaagcaaaagcgaacctgctatcttggttccaaaacattattctatcgattggaaattttggagggaattacaatagttggcatggctttaactggcatggctggggagcagtttattcctggagggccccatctgatgttatatgactataaacaaggtcactggaatcaactcctgggctggcatcatttcaccatgtatttcttctttgggctgttgggtgtggcagatatcttatgtttcaccatcagttcacttcctgtgtccttaaccaagttaatgttgtcaaatgccttatttgtggaggcctttatcttctacaaccacactcatggccgggaaatgctggacatctttgtgcaccagctgctggttttggtcgtctttctgacaggcctcgttgccttcctagagttccttgttcggaacaatgtacttctggagctattgcggtcaagtctcattctgcttcaggggagctggttctttcagattggatttgtcctgtatccccccagtggaggtcctgcatgggatctgatggatcatgaaaatattttgtttctcaccatatgcttttgttggcattatgcagtaaccattgtcatcgttggaatgaattatgctttcattacctggttggttaaatctagacttaagaggctctgctcctcagaagttggacttctgaaaaatgctgaacgagaacaagaatcagaagaagaaatgtgactttgatgagcttccagtttttctagataaaccttttcttttttacattgttcttggttttgtttctcgatcttttgtttggagaacagctggctaaggatgactctaagtgtactgtttgcatttccaatttggttaaagtatttgaatttaaatattttctttttagctttgaaaatattttgggtgatactttcattttgcacatcatgcacatcatggtattcaggggctagagtgatttttttccagattatctaaagttggatgcccacactatgaaagaaatatttgttttatttgccttatagatatgctcaaggttactgggcttgctactatttgtaactccttgaccatggaattatacttgtttatcttgttgctgcaatgagaaataaatgaatgtatgta

SEQ ID NO: 267891 - protein, 192 aa, Artificial Sequence
  derived and/or modified sequence
MPGGRRGPSRQQLSRSALPSLQTLVGGGCGNGTGLRNRNGSAIGLPVPPITALITPGPVRHCQIPDLPVDGSLLFEFLFFIYLLVALFIQYINIYKTVWWYPYNHPASCTSLNFHLIDYHLAAFITVMLARRLVWALISEATKAGAASMIHYMVLISARLVLLTLCGWVLCWTLVNLFRSHSVLNLLFLGYP

SEQ ID NO: 267892 - protein, 140 aa, Artificial Sequence
  derived and/or modified sequence
MPGGRRGPSRQQLSRSALPSLQTLVGGGCGNGTGLRNRNGSAIGLPVPPITALITPGPVRHCQIPDLPVDGSLLFEFLFFIYLLVALFIQYINIYKTVWWYPYNHPASCTSLNFHLIDYHLAAFITVMLARRLVWALISE

SEQ ID NO: 267893 - protein, 741 aa, Artificial Sequence
  derived and/or modified sequence
MAEPVSPLKHFVLAKKAITAIFDQLLEFVTEGSHFVEATYKNPELDRIATEDDLVEMQGYKDKLSIIGEVLSRRHMKVAFFGRTSSGKSSVINAMLWDKVLPSGIGHITNCFLSVEGTDGDKAYLMTEGSDEKKSVKTVNQLAHALHMDKDLKAGCLVRVFWPKAKCALLRDDLVLVDSPGTDVTTELDSWIDKFCLDADVFVLVANSESTLMNTEKHFFHKVNERLSKPNIFILNNRWDASASEPEYMEDVRRQHMERCLHFLVEELKVVNALEAQNRIFFVSAKEVLSARKQKAQGMPESGVALAEGFHARLQEFQNFEQIFEECISQSAVKTKFEQHTIRAKQILATVKNIMDSVNLAAEDKRHYSVEEREDQIDRLDFIRNQMNLLTLDVKKKIKEVTEEVANKVSCAMTDEICRLSVLVDEFCSEFHPNPDVLKIYKSELNKHIEDGMGRNLADRCTDEVNALVLQTQQEIIENLKPLLPAGIQDKLHTLIPCKKFDLSYNLNYHKLCSDFQEDIVFPFSLGWSSLVHRFLGPRNAQRVLLGLSEPIFQLPRSLASTPTAPTTPATPDNASQEELMITLVTGLASVTSRTSMGIIIVGGVIWKTIGWKLLSVSLTMYGALYLYERLSWTTHAKERAFKQQFVNYATEKLRMIVSSTSANCSHQVKQQIATTFARLCQQVDITQKQLEEEIARLPKEIDQLEKIQNNSKLLRNKAVQLENELENFTKQFLPSSNEES

SEQ ID NO: 267894 - protein, 630 aa, Artificial Sequence
  derived and/or modified sequence
MAEPVSPLKHFVLAKKAITAIFDQLLEFVTEGSHFVEATYKNPELDRIATEDDLVEMQGYKDKLSIIGEVLSRRHMKVAFFGRTSSGKSSVINAMLWDKVLPSGIGHITNCFLSVEGTDGDKAYLMTEGSDEKKSVKTVNQLAHALHMDKDLKAGCLVRVFWPKAKCALLRDDLVLVDSPGTDVTTELDSWIDKFCLDADVFVLVANSESTLMNTEKHFFHKVNERLSKPNIFILNNRWDASASEPEYMEDVRRQHMERCLHFLVEELKVVNALEAQNRIFFVSAKEVLSARKQKAQGMPESGVALAEGFHARLQEFQNFEQIFEECISQSAVKTKFEQHTIRAKQILATVKNIMDSVNLAAEDKRHYSVEEREDQIDRLDFIRNQMNLLTLDVKKKIKEVTEEVANKVSCAMTDEICRLSVLVDEFCSEFHPNPDVLKIYKSLPRSLASTPTAPTTPATPDNASQEELMITLVTGLASVTSRTSMGIIIVGGVIWKTIGWKLLSVSLTMYGALYLYERLSWTTHAKERAFKQQFVNYATEKLRMIVSSTSANCSHQVKQQIATTFARLCQQVDITQKQLEEEIARLPKEIDQLEKIQNNSKLLRNKAVQLENELENFTKQFLPSSNEES

SEQ ID NO: 267895 - protein, 155 aa, Artificial Sequence
  derived and/or modified sequence
MAEPVSPLKHFVLAKKAITAIFDQLLEFVTEGSHFVEATYKNPELDRIATEDDLVEMQGYKDKLSIIGEVLSRRHMKVAFFGRTSSGKSSVINAMLWDKVLPSGIGHITNCFLSVEGTDGDKAYLMTEGSDEKKSVKTVNQLAHALHMDKDLKAG

SEQ ID NO: 267896 - protein, 447 aa, Artificial Sequence
  derived and/or modified sequence
MAEPVSPLKHFVLAKKAITAIFDQLLEFVTEGSHFVEATYKNPELDRIATEDDLVEMQGYKDKLSIIGEVLSRRHMKVAFFGRTSSGKSSVINAMLWDKVLPSGIGHITNCFLSVEGTDGDKAYLMTEGSDEKKSVKTVNQLAHALHMDKDLKAGCLVRVFWPKAKCALLRDDLVLVDSPGTDVTTELDSWIDKFCLDADVFVLVANSESTLMNTEKHFFHKVNERLSKPNIFILNNRWDASASEPEYMEDVRRQHMERCLHFLVEELKVVNALEAQNRIFFVSAKEVLSARKQKAQGMPESGVALAEGFHARLQEFQNFEQIFEECISQSAVKTKFEQHTIRAKQILATVKNIMDSVNLAAEDKRHYSVEEREDQIDRLDFIRNQMNLLTLDVKKKIKEVTEEVANKVSCAMTDEICRLSVLVDEFCSEFHPNPDVLKIYKSKKKK

SEQ ID NO: 267897 - DNA, 2226 bp, Artificial Sequence
  derived and/or modified sequence
atggccgagcccgtgagccccctgaagcacttcgtgctggccaagaaggccatcaccgccatcttcgaccagctgctggagttcgtgaccgagggcagccacttcgtggaggccacctacaagaaccccgagctggacagaatcgccaccgaggacgacctggtggagatgcagggctacaaggacaagctgagcatcatcggcgaggtgctgagcagaagacacatgaaggtggccttcttcggcagaaccagcagcggcaagagcagcgtgatcaacgccatgctgtgggacaaggtgctgcccagcggcatcggccacatcaccaactgcttcctgagcgtggagggcaccgacggcgacaaggcctacctgatgaccgagggcagcgacgagaagaagagcgtgaagaccgtgaaccagctggcccacgccctgcacatggacaaggacctgaaggccggctgcctggtgagagtgttctggcccaaggccaagtgcgccctgctgagagacgacctggtgctggtggacagccccggcaccgacgtgaccaccgagctggacagctggatcgacaagttctgcctggacgccgacgtgttcgtgctggtggccaacagcgagagcaccctgatgaacaccgagaagcacttcttccacaaggtgaacgagagactgagcaagcccaacatcttcatcctgaacaacagatgggacgccagcgccagcgagcccgagtacatggaggacgtgagaagacagcacatggagagatgcctgcacttcctggtggaggagctgaaggtggtgaacgccctggaggcccagaacagaatcttcttcgtgagcgccaaggaggtgctgagcgccagaaagcagaaggcccagggcatgcccgagagcggcgtggccctggccgagggcttccacgccagactgcaggagttccagaacttcgagcagatcttcgaggagtgcatcagccagagcgccgtgaagaccaagttcgagcagcacaccatcagagccaagcagatcctggccaccgtgaagaacatcatggacagcgtgaacctggccgccgaggacaagagacactacagcgtggaggagagagaggaccagatcgacagactggacttcatcagaaaccagatgaacctgctgaccctggacgtgaagaagaagatcaaggaggtgaccgaggaggtggccaacaaggtgagctgcgccatgaccgacgagatctgcagactgagcgtgctggtggacgagttctgcagcgagttccaccccaaccccgacgtgctgaagatctacaagagcgagctgaacaagcacatcgaggacggcatgggcagaaacctggccgacagatgcaccgacgaggtgaacgccctggtgctgcagacccagcaggagatcatcgagaacctgaagcccctgctgcccgccggcatccaggacaagctgcacaccctgatcccctgcaagaagttcgacctgagctacaacctgaactaccacaagctgtgcagcgacttccaggaggacatcgtgttccccttcagcctgggctggagcagcctggtgcacagattcctgggccccagaaacgcccagagagtgctgctgggcctgagcgagcccatcttccagctgcccagaagcctggccagcacccccaccgcccccaccacccccgccacccccgacaacgccagccaggaggagctgatgatcaccctggtgaccggcctggccagcgtgaccagcagaaccagcatgggcatcatcatcgtgggcggcgtgatctggaagaccatcggctggaagctgctgagcgtgagcctgaccatgtacggcgccctgtacctgtacgagagactgagctggaccacccacgccaaggagagagccttcaagcagcagttcgtgaactacgccaccgagaagctgagaatgatcgtgagcagcaccagcgccaactgcagccaccaggtgaagcagcagatcgccaccaccttcgccagactgtgccagcaggtggacatcacccagaagcagctggaggaggagatcgccagactgcccaaggagatcgaccagctggagaagatccagaacaacagcaagctgctgagaaacaaggccgtgcagctggagaacgagctggagaacttcaccaagcagttcctgcccagcagcaacgaggagagctag

SEQ ID NO: 267898 - DNA, 1893 bp, Artificial Sequence
  derived and/or modified sequence
atggccgagcccgtgagccccctgaagcacttcgtgctggccaagaaggccatcaccgccatcttcgaccagctgctggagttcgtgaccgagggcagccacttcgtggaggccacctacaagaaccccgagctggacagaatcgccaccgaggacgacctggtggagatgcagggctacaaggacaagctgagcatcatcggcgaggtgctgagcagaagacacatgaaggtggccttcttcggcagaaccagcagcggcaagagcagcgtgatcaacgccatgctgtgggacaaggtgctgcccagcggcatcggccacatcaccaactgcttcctgagcgtggagggcaccgacggcgacaaggcctacctgatgaccgagggcagcgacgagaagaagagcgtgaagaccgtgaaccagctggcccacgccctgcacatggacaaggacctgaaggccggctgcctggtgagagtgttctggcccaaggccaagtgcgccctgctgagagacgacctggtgctggtggacagccccggcaccgacgtgaccaccgagctggacagctggatcgacaagttctgcctggacgccgacgtgttcgtgctggtggccaacagcgagagcaccctgatgaacaccgagaagcacttcttccacaaggtgaacgagagactgagcaagcccaacatcttcatcctgaacaacagatgggacgccagcgccagcgagcccgagtacatggaggacgtgagaagacagcacatggagagatgcctgcacttcctggtggaggagctgaaggtggtgaacgccctggaggcccagaacagaatcttcttcgtgagcgccaaggaggtgctgagcgccagaaagcagaaggcccagggcatgcccgagagcggcgtggccctggccgagggcttccacgccagactgcaggagttccagaacttcgagcagatcttcgaggagtgcatcagccagagcgccgtgaagaccaagttcgagcagcacaccatcagagccaagcagatcctggccaccgtgaagaacatcatggacagcgtgaacctggccgccgaggacaagagacactacagcgtggaggagagagaggaccagatcgacagactggacttcatcagaaaccagatgaacctgctgaccctggacgtgaagaagaagatcaaggaggtgaccgaggaggtggccaacaaggtgagctgcgccatgaccgacgagatctgcagactgagcgtgctggtggacgagttctgcagcgagttccaccccaaccccgacgtgctgaagatctacaagagcctgcccagaagcctggccagcacccccaccgcccccaccacccccgccacccccgacaacgccagccaggaggagctgatgatcaccctggtgaccggcctggccagcgtgaccagcagaaccagcatgggcatcatcatcgtgggcggcgtgatctggaagaccatcggctggaagctgctgagcgtgagcctgaccatgtacggcgccctgtacctgtacgagagactgagctggaccacccacgccaaggagagagccttcaagcagcagttcgtgaactacgccaccgagaagctgagaatgatcgtgagcagcaccagcgccaactgcagccaccaggtgaagcagcagatcgccaccaccttcgccagactgtgccagcaggtggacatcacccagaagcagctggaggaggagatcgccagactgcccaaggagatcgaccagctggagaagatccagaacaacagcaagctgctgagaaacaaggccgtgcagctggagaacgagctggagaacttcaccaagcagttcctgcccagcagcaacgaggagagctag

SEQ ID NO: 267899 - DNA, 468 bp, Artificial Sequence
  derived and/or modified sequence
atggccgagcccgtgagccccctgaagcacttcgtgctggccaagaaggccatcaccgccatcttcgaccagctgctggagttcgtgaccgagggcagccacttcgtggaggccacctacaagaaccccgagctggacagaatcgccaccgaggacgacctggtggagatgcagggctacaaggacaagctgagcatcatcggcgaggtgctgagcagaagacacatgaaggtggccttcttcggcagaaccagcagcggcaagagcagcgtgatcaacgccatgctgtgggacaaggtgctgcccagcggcatcggccacatcaccaactgcttcctgagcgtggagggcaccgacggcgacaaggcctacctgatgaccgagggcagcgacgagaagaagagcgtgaagaccgtgaaccagctggcccacgccctgcacatggacaaggacctgaaggccggctag

SEQ ID NO: 267900 - DNA, 1344 bp, Artificial Sequence
  derived and/or modified sequence
atggccgagcccgtgagccccctgaagcacttcgtgctggccaagaaggccatcaccgccatcttcgaccagctgctggagttcgtgaccgagggcagccacttcgtggaggccacctacaagaaccccgagctggacagaatcgccaccgaggacgacctggtggagatgcagggctacaaggacaagctgagcatcatcggcgaggtgctgagcagaagacacatgaaggtggccttcttcggcagaaccagcagcggcaagagcagcgtgatcaacgccatgctgtgggacaaggtgctgcccagcggcatcggccacatcaccaactgcttcctgagcgtggagggcaccgacggcgacaaggcctacctgatgaccgagggcagcgacgagaagaagagcgtgaagaccgtgaaccagctggcccacgccctgcacatggacaaggacctgaaggccggctgcctggtgagagtgttctggcccaaggccaagtgcgccctgctgagagacgacctggtgctggtggacagccccggcaccgacgtgaccaccgagctggacagctggatcgacaagttctgcctggacgccgacgtgttcgtgctggtggccaacagcgagagcaccctgatgaacaccgagaagcacttcttccacaaggtgaacgagagactgagcaagcccaacatcttcatcctgaacaacagatgggacgccagcgccagcgagcccgagtacatggaggacgtgagaagacagcacatggagagatgcctgcacttcctggtggaggagctgaaggtggtgaacgccctggaggcccagaacagaatcttcttcgtgagcgccaaggaggtgctgagcgccagaaagcagaaggcccagggcatgcccgagagcggcgtggccctggccgagggcttccacgccagactgcaggagttccagaacttcgagcagatcttcgaggagtgcatcagccagagcgccgtgaagaccaagttcgagcagcacaccatcagagccaagcagatcctggccaccgtgaagaacatcatggacagcgtgaacctggccgccgaggacaagagacactacagcgtggaggagagagaggaccagatcgacagactggacttcatcagaaaccagatgaacctgctgaccctggacgtgaagaagaagatcaaggaggtgaccgaggaggtggccaacaaggtgagctgcgccatgaccgacgagatctgcagactgagcgtgctggtggacgagttctgcagcgagttccaccccaaccccgacgtgctgaagatctacaagagcaagaagaagaagtag

SEQ ID NO: 267901 - DNA, 2226 bp, Artificial Sequence
  derived and/or modified sequence
atggctgaaccagtcagcccactgaaacatttcgtgctggcgaagaaggctattacagccattttcgatcaactcttggaattcgtgaccgagggttcccattttgtggaagctacatacaagaaccctgagctggaccggatcgccactgaggacgacctggtggaaatgcagggatataaggataagctcagtataatcggggaggtgctgagccgtaggcacatgaaagtcgccttctttggtaggactagcagtgggaagagcagcgtgatcaatgccatgctgtgggataaagtactgcccagcggtattgggcacatcacaaattgttttctgagtgtcgaaggtacagatggagataaagcctatctgatgactgagggcagcgacgagaagaaatcagttaaaactgtcaatcaactggcacacgccctgcacatggataaggacctgaaagctgggtgcctcgtgcgcgtcttttggcccaaggcaaaatgtgcgctcctgcgcgatgatctcgtgttagtggatagccctggcaccgatgtcactactgaattggacagctggatcgacaaattttgtctcgatgcggatgttttcgtgttggtcgccaactctgagtctaccctaatgaacaccgaaaaacacttctttcataaagttaacgaaagactgtccaaaccaaacatcttcatcctgaacaacagatgggatgccagcgcttccgaacccgaatacatggaggatgtgaggagacagcacatggaacgatgcctccattttctcgtggaagaactgaaggttgttaacgcgttagaggcacagaaccgaatcttcttcgtcagtgccaaagaggtgttgtcagcccggaagcaaaaggcccaagggatgccggaaagtggcgtcgcgctcgccgaggggttccatgcaaggctgcaggagttccaaaactttgagcaaatctttgaggagtgcatcagccaatcagcagtgaaaactaagttcgaacagcacacaatacgcgccaagcaaattctggcaactgtaaagaacatcatggatagcgtaaatctggccgcagaggacaaaagacactacagtgtggaagagcgcgaagatcagatcgatcgcctggactttatcaggaaccagatgaatttgctaacgctggatgtgaaaaagaagatcaaggaggttactgaagaagtcgctaacaaggtgagctgtgccatgaccgacgagatttgccgactgtccgtgctggtcgacgaattttgtagtgaatttcatccaaatccagatgtccttaaaatttacaagagcgagctgaataagcatattgaggatggtatgggccgcaaccttgccgaccgctgcaccgatgaggtgaacgcactcgtcctgcagacacagcaagaaatcatcgaaaacttgaaacccttgttgcctgcaggtattcaagataaactgcacacactgatcccttgcaagaaatttgatctctcttacaatctaaactaccataaactttgcagtgacttccaggaggacatcgtgtttccattcagtcttgggtggtcatctctggtccatcgttttctgggtccccgcaacgcccagagagtgctgctggggctgtcggagccgatctttcaacttcctagatctctggccagtacaccaaccgctcctaccacgccggctaccccagataatgcttcacaagaggagttgatgatcaccctggtgactggtctagcttccgtgacatcacggacttccatggggataattatcgtgggtggtgtaatctggaagactattggctggaagctgttgtccgtatcacttaccatgtacggggccctgtatctttacgaaagactttcatggacaacccacgcaaaagagagggccttcaagcagcagtttgtgaattacgccaccgaaaagctaagaatgatcgtgtcttccacaagcgccaattgttcccaccaggtaaagcagcagattgccactaccttcgcccgcttgtgtcagcaggtggacattacccagaaacagctcgaagaagaaattgcccggctgcccaaagagatcgatcaacttgaaaagatccagaataactccaaactgctcaggaacaaagctgtgcagctagaaaatgagttagaaaattttaccaagcaattcctgccttccagtaacgaagaatcctag

SEQ ID NO: 267902 - DNA, 1893 bp, Artificial Sequence
  derived and/or modified sequence
atggccgagccagtctcaccacttaagcattttgtgctggcgaaaaaagcaatcaccgccattttcgaccagctccttgagttcgtcacagagggatcccactttgtcgaggcgacctacaaaaatcctgaactcgaccggatagccaccgaggacgacctagttgagatgcaagggtataaagataaactttcaatcattggggaagtgttgtctcgtcgtcacatgaaagtcgctttcttcggtagaacctcatccggcaagtcatccgtaattaacgcgatgttatgggataaagtgcttccatctggcatcggacacatcaccaattgctttctgtccgttgaagggaccgatggtgacaaagcctatctgatgaccgagggaagtgatgagaaaaagtctgtgaagaccgtgaatcaactggcgcatgccctccatatggataaggatctgaaggcagggtgtctggtgagggttttttggccgaaggccaagtgcgccctcctgcgggatgacctggtgcttgtggatagtcctggcaccgacgtgacaactgaactcgactcatggatcgacaaattctgcctcgatgcagatgtgttcgtgctggtggcgaactccgagtcgacacttatgaatactgaaaaacatttcttccacaaggttaacgagcgtctgtccaaaccaaatattttcatactgaacaaccgctgggacgcatcggccagcgaaccagagtacatggaggacgtacgtagacagcatatggaacgctgccttcattttctggtggaggaactgaaggtggtgaatgcacttgaggctcaaaatagaatctttttcgtcagcgccaaagaggtactgtctgcgaggaaacagaaggcgcaaggtatgcccgagtctggagttgctctggcggagggattccacgccagacttcaggagttccaaaacttcgagcagatctttgaggaatgcatcagccagtcagcggtgaagaccaagtttgaacagcacactattagagcaaagcagatcttggccactgtcaagaatataatggacagcgtgaatttggccgccgaggacaaacgtcactactccgtggaagagcgggaagatcagatcgacaggctggacttcattcggaatcagatgaacctgctgactttagacgtaaagaagaagatcaaagaggtcaccgaagaggtcgcgaataaggttagctgcgccatgaccgatgaaatctgtaggctgagcgttctcgtggacgagttttgtagtgagttccatccaaatcctgatgtgctgaaaatatacaagagcctccccagatctctggcctcaactccgacagctcctaccactcctgctacccccgacaatgcctctcaggaagaactcatgattacccttgtgaccggtctagctagcgttacttctcgcaccagtatgggaattatcatcgtgggaggcgttatctggaaaacgatcggatggaaacttttgagtgtatcactgacaatgtacggcgctctgtacctgtacgagaggctgagctggaccacccacgccaaagagcgtgcttttaagcagcagtttgtgaattacgccaccgaaaagcttaggatgattgtgtcatccactagtgcaaactgttcacaccaggttaaacagcaaatcgcaaccacatttgcgcgcctgtgtcagcaggtcgacattactcagaagcagcttgaggaggaaatagctaggctgccaaaggagattgatcagctggagaagatccagaataactcgaaactcctaagaaataaggccgtgcaactggaaaatgaattggaaaattttactaaacagttcctcccttcttctaatgaggagtcctag

SEQ ID NO: 267903 - DNA, 468 bp, Artificial Sequence
  derived and/or modified sequence
atggctgaaccagtgagtcccttgaaacatttcgtgctggctaaaaaggctattaccgcaatcttcgatcaactattggaattcgttactgaaggatcacattttgttgaagccacctataagaaccccgaactggatcgcatcgccaccgaggacgatttggttgagatgcagggctacaaggacaaattatcaatcatcggggaagttttatctcgacgccacatgaaagtggccttttttgggagaacctccagtggaaaatcttccgtcatcaacgccatgctctgggacaaagttttacctagcgggattgggcatatcacaaactgctttctgagcgtcgagggcacggacggtgataaagcgtacctgatgacagaggggtccgacgaaaaaaaatctgtcaagaccgttaatcaactggcgcatgccctacacatggacaaagatttaaaagcgggctag

SEQ ID NO: 267904 - DNA, 2226 bp, Artificial Sequence
  derived and/or modified sequence
atggcagaacccgtgtcaccactgaaacattttgtgctggccaagaaagccataacagccatctttgatcagctcctggagtttgtgactgaagggtcacacttcgtggaagccacctataaaaaccccgagctcgatagaatcgcaactgaagacgacctggtggaaatgcaggggtataaagataagctcagtattatcggagaggtgctgagtagaagacacatgaaggtggctttcttcggaaggacctcaagcgggaagtcctctgtaataaatgccatgctctgggataaagtcttaccgtctgggatcggccatattacaaattgttttctcagcgtggaagggaccgatggggacaaagcatatctaatgactgagggatctgacgagaaaaagtctgtaaagacagttaaccagctggcgcacgctctgcatatggataaagacctgaaggctggatgtctcgtgagagtgttctggcctaaggctaaatgcgcactcttaagggatgatctcgtgctcgtcgattctcctgggaccgatgtcactaccgagctggactcgtggattgataaattttgcctcgacgccgatgtgttcgtacttgtggctaattcagaatcaacgttgatgaacacagagaagcactttttccataaggtcaacgagcggttgagcaagcctaacatctttattttgaataatagatgggatgcttctgcctctgagccagagtatatggaggacgtgcgacgtcagcatatggagcgctgtttacatttcctggtggaggaactgaaggtcgtcaacgctttagaagcccagaaccgtatatttttcgtgtccgccaaagaggtgttgtcggcccgtaagcaaaaggcccaggggatgccagagtcgggagtggcgctggcagaaggttttcatgcacgactgcaagaattccaaaacttcgaacagatatttgaagaatgtatcagccaatcggctgtcaagacaaaatttgagcagcacactattcgtgctaaacagattctcgcgacggtgaagaacattatggactcagtcaatttggcggccgaagacaagcgccactatagcgtcgaagagcgggaggatcaaatagatcgtctcgattttatacgaaaccagatgaacctgctgacactagacgtaaagaagaaaatcaaggaggtgactgaagaggtggctaacaaggtgagctgtgccatgacagacgaaatttgtcggctgtcggtcctagtggatgagttttgctccgaattccaccccaatccagatgtgctaaaaatttacaagagcgagttgaacaagcacatcgaagatggaatgggcaggaatctggctgacagatgcacagatgaagttaacgccttagtgctccagacacagcaggagattatcgaaaacctcaagccgcttctgcctgcaggtatacaggacaagctgcacacactgataccgtgtaagaagttcgacttgagctacaatctcaactaccacaagctgtgctctgatttccaggaggatatcgtattcccattctctctggggtggagctctctggtgcatcggttcttaggaccccggaacgctcaacgcgtccttttaggtctgtccgagcctatctttcagctgccacggagcctggcctcaacccccactgctccaacgacccctgctactcccgataacgcctctcaggaagagcttatgattacactggtgaccggcctggctagcgtaacatcccggaccagcatggggatcataattgtggggggcgtgatctggaagactattggatggaagctgctgagcgtgtccctgacaatgtatggtgctctctacctgtacgagaggttgtcttggacgacccacgctaaggaaagagcgttcaagcagcagttcgttaactatgccaccgaaaagctgcgtatgatcgtgtcaagcacttccgcaaactgcagccaccaggttaaacagcagatcgcaaccacctttgcccggctttgccagcaggtcgatatcacgcagaagcagttggaggaagaaatcgcacgactgccaaaggaaatcgaccagctggagaaaatccagaacaactccaaacttctgcgcaataaggccgtgcaactggagaacgagctggaaaacttcaccaaacagtttctgccctcgagcaatgaggagtcatag

SEQ ID NO: 267905 - DNA, 1344 bp, Artificial Sequence
  derived and/or modified sequence
atggctgagcccgtgtctccccttaaacattttgtgctggccaaaaaagctataacggccatcttcgaccagctgcttgagttcgtgacagagggttcccattttgtggaggccacttacaaaaatcctgagctcgacagaattgcaaccgaagacgatctcgtagaaatgcagggctacaaggacaagttatcaatcataggcgaggttctgtcacggcggcacatgaaggtggcgttttttggcagaacttctagcggaaagtcctctgttatcaacgccatgctttgggataaggtgctcccttctggcatcgggcatataaccaactgcttcttgtccgtggagggaacagacggagacaaagcgtaccttatgaccgagggttccgacgaaaagaagtcagttaaaactgtaaatcagctcgctcacgcccttcatatggacaaggacctgaaggcagggtgcctggtgcgggtcttctggccaaaagccaagtgcgctctgctcagggacgatctagtcttagtcgattccccaggcacagacgtcactacagaacttgactcttggatagataaattctgtctggacgccgacgttttcgtgctcgtggctaactccgagagcactttgatgaacacggagaagcatttttttcataaagtgaacgagcggctttccaagcctaacatcttcatcctaaataacagatgggacgcaagtgcctccgaaccggaatacatggaagatgtccggcgccaacatatggagaggtgtctgcactttctggttgaagagctaaaggtagtcaatgctttggaggcccaaaataggatctttttcgtgtccgccaaggaagtccttagcgcaaggaagcagaaggcccaggggatgcccgagtcaggtgtcgccctggcggaaggcttccacgccagactccaggagttccagaacttcgagcagatatttgaggagtgcattagccagtccgctgttaaaacgaaattcgaacagcacaccatcagggctaaacaaattctcgccaccgtgaagaacatcatggacagcgtgaatttggcagctgaggataaaaggcattattctgtcgaggagcgggaagatcaaattgatcgcctggacttcataaggaatcagatgaacctgctcaccctagatgtcaagaaaaaaatcaaggaagtgaccgaggaagtagcgaacaaagttagctgtgccatgacggatgaaatctgtaggctgtccgtgctggtggatgagttctgctctgagttccacccaaatcctgacgtgcttaagatatacaagtccaaaaagaaaaagtag

SEQ ID NO: 267906 - DNA, 2226 bp, Artificial Sequence
  derived and/or modified sequence
atggccgagcctgtgagccccctgaagcactttgtgctggccaagaaggccatcacagccatctttgaccagctgctggagtttgtgacagagggcagccactttgtggaggccacctacaagaaccctgagctggaccgcatcgccacagaagatgacctggtggagatgcagggctacaaggacaagctgagcatcattggagaggtgctgagcagaagacacatgaaggtggccttctttggaagaaccagcagcggcaagagcagcgtcatcaatgccatgctgtgggacaaggtgctgcccagcggcatcggccacatcaccaactgcttcctgtctgtggagggcacagatggagacaaggcctacctgatgacagagggcagtgatgagaagaagtctgtgaagacagtgaaccagctggcccacgccctgcacatggacaaggacctgaaggccggctgcctggtgcgggtcttctggcccaaggccaagtgtgccctgctgagagatgacctggtgctggtggacagccctggaacagatgtgaccacagagctggacagctggattgacaagttctgcctggatgctgatgtgtttgtgctggtggccaacagcgagagcaccctgatgaacacagagaagcacttcttccacaaggtgaatgaaaggctgagcaagcccaacatcttcatcctgaacaaccgctgggatgccagcgccagcgagcctgagtacatggaggatgtgcggcggcagcacatggagcgctgcctgcacttcctggtggaggagctgaaggtggtgaatgccctggaggcccagaaccgcatcttctttgtgtctgccaaggaggtgctgagcgccaggaagcagaaggcccagggcatgcctgagagcggcgtggccctggccgagggcttccacgcccggctgcaggagttccagaactttgagcagatctttgaggagtgcatcagccagagcgctgtgaagaccaagtttgagcagcacaccatccgggccaagcagatcctggccaccgtgaagaacatcatggattctgtgaacctggccgctgaggacaagaggcactacagcgtggaggagcgggaggaccagattgaccggctggacttcatccggaaccagatgaacctgctgaccctggatgtgaagaagaagatcaaggaggtgacagaggaggtggccaacaaggtgtcctgtgccatgacagatgagatctgccgcctgtctgtgctggtggatgagttctgcagcgagttccaccccaacccagatgtgctgaagatctacaagtctgagctgaacaagcacattgaagatggcatgggcaggaacctggccgaccgctgcacagatgaggtgaatgccctggtgctgcagacccagcaggagatcatcgagaacctgaagcccctgctgcctgctggcatccaggacaagctgcacaccctcatcccctgcaagaagtttgacctgagctacaacctgaactaccacaagctgtgcagcgacttccaggaggacatcgtgttccccttcagcctgggctggagcagcctggtgcaccgcttcctgggccccagaaatgcccagagggtgctgctgggcctgtctgagcccatcttccagctgcccaggagcctggccagcacccccacagcccccaccaccccagccaccccagacaatgccagccaggaggagctgatgatcaccctggtgacaggcctggcctctgtgaccagcaggacctccatgggcatcatcatcgtgggcggcgtcatctggaagaccatcggctggaagctgctgtctgtgtccctgaccatgtacggggccctgtacctgtatgaaaggctgtcctggaccacccacgccaaggagcgggccttcaagcagcagtttgtgaactatgccacagagaagctgaggatgattgtgagcagcaccagcgccaactgcagccaccaggtgaagcagcagatcgccaccacctttgcccggctgtgccagcaggtggacatcacccagaagcagctggaggaggagatcgcccggctgcccaaggagattgaccagctggagaagatccagaacaacagcaagctgctgaggaacaaggctgtgcagctggagaatgagctggagaacttcaccaagcagttcctgcccagcagcaatgaggagagctag

SEQ ID NO: 267907 - DNA, 1893 bp, Artificial Sequence
  derived and/or modified sequence
atggccgagcctgtgagccccctgaagcactttgtgctggccaagaaggccatcacagccatctttgaccagctgctggagtttgtgacagagggcagccactttgtggaggccacctacaagaaccctgagctggaccgcatcgccacagaagatgacctggtggagatgcagggctacaaggacaagctgagcatcattggagaggtgctgagcagaagacacatgaaggtggccttctttggaagaaccagcagcggcaagagcagcgtcatcaatgccatgctgtgggacaaggtgctgcccagcggcatcggccacatcaccaactgcttcctgtctgtggagggcacagatggagacaaggcctacctgatgacagagggcagtgatgagaagaagtctgtgaagacagtgaaccagctggcccacgccctgcacatggacaaggacctgaaggccggctgcctggtgcgggtcttctggcccaaggccaagtgtgccctgctgagagatgacctggtgctggtggacagccctggaacagatgtgaccacagagctggacagctggattgacaagttctgcctggatgctgatgtgtttgtgctggtggccaacagcgagagcaccctgatgaacacagagaagcacttcttccacaaggtgaatgaaaggctgagcaagcccaacatcttcatcctgaacaaccgctgggatgccagcgccagcgagcctgagtacatggaggatgtgcggcggcagcacatggagcgctgcctgcacttcctggtggaggagctgaaggtggtgaatgccctggaggcccagaaccgcatcttctttgtgtctgccaaggaggtgctgagcgccaggaagcagaaggcccagggcatgcctgagagcggcgtggccctggccgagggcttccacgcccggctgcaggagttccagaactttgagcagatctttgaggagtgcatcagccagagcgctgtgaagaccaagtttgagcagcacaccatccgggccaagcagatcctggccaccgtgaagaacatcatggattctgtgaacctggccgctgaggacaagaggcactacagcgtggaggagcgggaggaccagattgaccggctggacttcatccggaaccagatgaacctgctgaccctggatgtgaagaagaagatcaaggaggtgacagaggaggtggccaacaaggtgtcctgtgccatgacagatgagatctgccgcctgtctgtgctggtggatgagttctgcagcgagttccaccccaacccagatgtgctgaagatctacaagagcctgcccaggagcctggccagcacccccacagcccccaccaccccagccaccccagacaatgccagccaggaggagctgatgatcaccctggtgacaggcctggcctctgtgaccagcaggacctccatgggcatcatcatcgtgggcggcgtcatctggaagaccatcggctggaagctgctgtctgtgtccctgaccatgtatggagccctgtacctgtatgagcggctgtcctggaccacccacgccaaggagcgggccttcaagcagcagtttgtgaactatgccacagagaagctgaggatgattgtgagcagcaccagcgccaactgcagccaccaggtgaagcagcagatcgccaccacctttgcccggctgtgccagcaggtggacatcacccagaagcagctggaggaggagatcgcccggctgcccaaggagattgaccagctggagaagatccagaacaacagcaagctgctgaggaacaaggctgtgcagctggagaatgagctggagaacttcaccaagcagttcctgcccagcagcaatgaggagagctag

SEQ ID NO: 267908 - DNA, 468 bp, Artificial Sequence
  derived and/or modified sequence
atggccgagcctgtgagccccctgaagcactttgtgctggccaagaaggccatcacagccatctttgaccagctgctggagtttgtgacagagggcagccactttgtggaggccacctacaagaaccctgagctggaccgcatcgccacagaagatgacctggtggagatgcagggctacaaggacaagctgagcatcattggagaggtgctgagcagaagacacatgaaggtggccttctttggaagaaccagcagcggcaagagcagcgtcatcaatgccatgctgtgggacaaggtgctgcccagcggcatcggccacatcaccaactgcttcctgtctgtggagggcacagatggagacaaggcctacctgatgacagagggcagtgatgagaagaagtctgtgaagacagtgaaccagctggcccacgccctgcacatggacaaggacctgaaggccggctag

SEQ ID NO: 267909 - DNA, 1344 bp, Artificial Sequence
  derived and/or modified sequence
atggccgagcctgtgagccccctgaagcactttgtgctggccaagaaggccatcacagccatctttgaccagctgctggagtttgtgacagagggcagccactttgtggaggccacctacaagaaccctgagctggaccgcatcgccacagaagatgacctggtggagatgcagggctacaaggacaagctgagcatcattggagaggtgctgagcagaagacacatgaaggtggccttctttggaagaaccagcagcggcaagagcagcgtcatcaatgccatgctgtgggacaaggtgctgcccagcggcatcggccacatcaccaactgcttcctgtctgtggagggcacagatggagacaaggcctacctgatgacagagggcagtgatgagaagaagtctgtgaagacagtgaaccagctggcccacgccctgcacatggacaaggacctgaaggccggctgcctggtgcgggtcttctggcccaaggccaagtgtgccctgctgagagatgacctggtgctggtggacagccctggaacagatgtgaccacagagctggacagctggattgacaagttctgcctggatgctgatgtgtttgtgctggtggccaacagcgagagcaccctgatgaacacagagaagcacttcttccacaaggtgaatgaaaggctgagcaagcccaacatcttcatcctgaacaaccgctgggatgccagcgccagcgagcctgagtacatggaggatgtgcggcggcagcacatggagcgctgcctgcacttcctggtggaggagctgaaggtggtgaatgccctggaggcccagaaccgcatcttctttgtgtctgccaaggaggtgctgagcgccaggaagcagaaggcccagggcatgcctgagagcggcgtggccctggccgagggcttccacgcccggctgcaggagttccagaactttgagcagatctttgaggagtgcatcagccagagcgctgtgaagaccaagtttgagcagcacaccatccgggccaagcagatcctggccaccgtgaagaacatcatggattctgtgaacctggccgctgaggacaagaggcactacagcgtggaggagcgggaggaccagattgaccggctggacttcatccggaaccagatgaacctgctgaccctggatgtgaagaagaagatcaaggaggtgacagaggaggtggccaacaaggtgtcctgtgccatgacagatgagatctgccgcctgtctgtgctggtggatgagttctgcagcgagttccaccccaacccagatgtgctgaagatctacaagagcaagaagaagaagtag

SEQ ID NO: 267910 - DNA, 2754 bp, Artificial Sequence
  derived and/or modified sequence
ttgatgaatgtcactggtgtgtcatcagtttgcatgtctatcatccactttagttggtgcttttctaactttatctccctctagtagcataatggcagaacctgtttctccactgaagcactttgtgctggctaagaaggcgattactgcaatctttgaccagttactggagtttgttactgaaggatcacattttgttgaagcaacatataagaatccggaacttgatcgaatagccactgaagatgatctggtagaaatgcaaggatataaagacaagctttccatcattggtgaggtgctatctcggagacacatgaaggtggcattttttggcaggacaagcagtgggaagagctctgttatcaatgcaatgttgtgggataaagttctccctagtgggattggccatataaccaattgcttcctaagtgttgaaggaactgatggagataaagcctatcttatgacagaaggatcagatgaaaaaaagagtgtgaagacagttaatcaactggcccatgcccttcacatggacaaagatttgaaagctggctgtcttgtacgtgtgttttggccaaaagcaaaatgtgccctcttgagagatgacctggtgttagtagacagtccaggcacagatgtcactacagagctggatagctggattgataagttttgcctagatgctgatgtctttgttttggtcgcaaactctgaatcaacactaatgaatacggaaaaacacttttttcacaaggtgaatgagcggctttccaagcctaatattttcattctcaataatcgttgggatgcctctgcatcagagccagaatatatggaagacgtacgcagacagcacatggaaagatgcctgcatttcttggtggaggagctcaaagttgtaaatgctttagaagcacagaatcgtatcttctttgtttcagcaaaggaagttcttagtgctagaaagcaaaaagcacaggggatgccagaaagtggtgtggcacttgctgaaggatttcatgcaagattacaggaatttcagaattttgaacaaatctttgaggagtgtatctcgcagtcagcagtgaaaacaaagttcgaacagcacactatcagagctaaacagatactagctactgtgaaaaacataatggattcagtaaacctggcagctgaagataaaaggcattattcagtggaagagagggaagaccaaattgatagactggactttattcgaaaccagatgaaccttttaacactggatgttaagaaaaaaatcaaggaggttaccgaggaggtggcaaacaaagtttcatgtgcaatgacagatgaaatttgtcgactgtctgttttggttgatgaattttgttcagagtttcatcctaatccagatgtattaaaaatatataaaagtgaattaaataagcacatagaggatggtatgggaagaaatttggctgatcgatgcaccgatgaagtaaacgccttagtgcttcagacccagcaagaaattattgaaaatttgaagccattacttccagctggtatacaggataaactacatacactgatcccttgcaagaaatttgatctcagttataatctaaattaccacaagttatgttcagattttcaagaggatattgtatttcctttttccctgggctggtcttcccttgtacatcgatttttgggccctagaaatgctcaaagggtgctcctaggattatcagagcctatctttcagctccctagatctttagcttctactcccactgctcctaccactccagcaacgccagataatgcatcacaggaagaactcatgattacattagtaacaggattggcgtccgttacatctagaacttctatgggcatcattattgttggaggagtgatttggaaaactataggctggaaactcctatctgtttcattaactatgtatggagctttgtatctttatgaaagactgagctggaccacccatgccaaggagcgagcctttaaacagcagtttgtaaactatgcaactgaaaaactgaggatgattgttagctccacgagtgcaaactgcagtcaccaagtaaaacaacaaatagctaccacttttgctcgcctgtgccaacaagttgatattactcaaaaacagctggaagaagaaattgctagattacccaaagaaatagatcagttggagaaaatacaaaacaattcaaagctcttaagaaataaagctgttcaacttgaaaatgagctggagaattttactaagcagtttctaccttcaagcaatgaagaatcctaacaatagagattgctttggtgaccatgataggaggaaacgaaacttgtaagattggaacagttgttatttttatgaaattactttaaatatgaattgtactaactgtacctaaatagcaaagccctgtgtagattctggtaatgatctgtctcagggtatgtgtatttttgaagagtgttatgtccttagttttaattttgagtaaagaaaaggctaaaatcatgaattagttacaagcaacagtaccaacttatgtgacccctgaggggtggggctgtgagctcttaatttgtttttgattctgaaaaactctgcttcctggcatccaggagttagagattgagcctttcatcttctttctcaaaactagtttttgatgctttctttcatgggaatagtcacttttttatttagtaaatcgcattgctggaaccacc

SEQ ID NO: 267911 - DNA, 3178 bp, Artificial Sequence
  derived and/or modified sequence
agtgaccgccctttgccactccccctgcctcctctccgcctttaacttctcgggaagatgaggcagtttggcatctgtggccgagttgctgttgccgggtgatagttggagcggagacttagcataatggcagaacctgtttctccactgaagcactttgtgctggctaagaaggcgattactgcaatctttgaccagttactggagtttgttactgaaggatcacattttgttgaagcaacatataagaatccggaacttgatcgaatagccactgaagatgatctggtagaaatgcaaggatataaagacaagctttccatcattggtgaggtgctatctcggagacacatgaaggtggcattttttggcaggacaagcagtgggaagagctctgttatcaatgcaatgttgtgggataaagttctccctagtgggattggccatataaccaattgcttcctaagtgttgaaggaactgatggagataaagcctatcttatgacagaaggatcagatgaaaaaaagagtgtgaagacagttaatcaactggcccatgcccttcacatggacaaagatttgaaagctggctgtcttgtacgtgtgttttggccaaaagcaaaatgtgccctcttgagagatgacctggtgttagtagacagtccaggcacagatgtcactacagagctggatagctggattgataagttttgcctagatgctgatgtctttgttttggtcgcaaactctgaatcaacactaatgaatacggaaaaacacttttttcacaaggtgaatgagcggctttccaagcctaatattttcattctcaataatcgttgggatgcctctgcatcagagccagaatatatggaagacgtacgcagacagcacatggaaagatgcctgcatttcttggtggaggagctcaaagttgtaaatgctttagaagcacagaatcgtatcttctttgtttcagcaaaggaagttcttagtgctagaaagcaaaaagcacaggggatgccagaaagtggtgtggcacttgctgaaggatttcatgcaagattacaggaatttcagaattttgaacaaatctttgaggagtgtatctcgcagtcagcagtgaaaacaaagttcgaacagcacactatcagagctaaacagatactagctactgtgaaaaacataatggattcagtaaacctggcagctgaagataaaaggcattattcagtggaagagagggaagaccaaattgatagactggactttattcgaaaccagatgaaccttttaacactggatgttaagaaaaaaatcaaggaggttaccgaggaggtggcaaacaaagtttcatgtgcaatgacagatgaaatttgtcgactgtctgttttggttgatgaattttgttcagagtttcatcctaatccagatgtattaaaaatatataaaagtctccctagatctttagcttctactcccactgctcctaccactccagcaacgccagataatgcatcacaggaagaactcatgattacattagtaacaggattggcgtccgttacatctagaacttctatgggcatcattattgttggaggagtgatttggaaaactataggctggaaactcctatctgtttcattaactatgtatggagctttgtatctttatgaaagactgagctggaccacccatgccaaggagcgagcctttaaacagcagtttgtaaactatgcaactgaaaaactgaggatgattgttagctccacgagtgcaaactgcagtcaccaagtaaaacaacaaatagctaccacttttgctcgcctgtgccaacaagttgatattactcaaaaacagctggaagaagaaattgctagattacccaaagaaatagatcagttggagaaaatacaaaacaattcaaagctcttaagaaataaagctgttcaacttgaaaatgagctggagaattttactaagcagtttctaccttcaagcaatgaagaatcctaacaatagagattgctttggtgaccatgataggaggaaacgaaacttgtaagattggaacagttgttatttttatgaaattactttaaatatgaattgtactaactgtacctaaatagcaaagccctgtgtagattctggtaatgatctgtctcagggtatgtgtatttttgaagagtgttatgtccttagttttaattttgagtaaagaaaaggctaaaatcatgaattagttacaagcaacagtaccaacttatgtgacccctgaggggtggggctgtgagctcttaatttgtttttgattctgaaaaactctgcttcctggcatccaggagttagagattgagcctttcatcttctttctcaaaactagtttttgatgctttctttcatgggaatagtcacttttttatttagtaaatcgcattgctggaaccaccaaggagtgtggaatgtccttgagtgtattatttatgcaagtcacagtcacgttgccatcatggcagctatgtgaaacactaataaatgtgtttttactttttattcccgttaaaactgatgtaaaacaggataaaggcttgttatagtcacttataagtatctgggtctaagtaatttccttagatgtttctaaagaaacattttcagctttgctcccattatgattccaataaggaacgctttcctagtgcaattttaggagtaaagtttgaagagataaaaatagccaaagataggagacgtctgaattttgaatgataaacagtgatgttttaaaaaagctgttgttcttcaggaggcatttgcctaggatattgctggattataccccattggaggcttttaattttatttgtatgaattttccaggatttcattaaaaattattattgtattttttaccttaatgaaagattttgggttcaaatatctttctatattaaaagctgattgagtctgtacatatgtaaattatgcctagtggaggttctgttgactttcttccccactgtggaagaggccagttttgcctccatttgcacattcatttcagttatttctgatccataaatataacatttacaaaattcttccttgagctggtggaaatgcctcaccagtttcctctttaatgaatcaaataaaatctttaactgatgtt

SEQ ID NO: 267912 - DNA, 543 bp, Artificial Sequence
  derived and/or modified sequence
tgcgcggggcgggggtgggctctggccctgactcctgcgcccggtgtgggaaggtgggaggccttttctaagtagcataatggcagaacctgtttctccactgaagcactttgtgctggctaagaaggcgattactgcaatctttgaccagttactggagtttgttactgaaggatcacattttgttgaagcaacatataagaatccggaacttgatcgaatagccactgaagatgatctggtagaaatgcaaggatataaagacaagctttccatcattggtgaggtgctatctcggagacacatgaaggtggcattttttggcaggacaagcagtgggaagagctctgttatcaatgcaatgttgtgggataaagttctccctagtgggattggccatataaccaattgcttcctaagtgttgaaggaactgatggagataaagcctatcttatgacagaaggatcagatgaaaaaaagagtgtgaagacagttaatcaactggcccatgcccttcacatggacaaagatttgaaagctgg

SEQ ID NO: 267913 - DNA, 5224 bp, Artificial Sequence
  derived and/or modified sequence
agtgaccgccctttgccactccccctgcctcctctccgcctttaacttctcgggaagatgaggcagtttggcatctgtggccgagttgctgttgccgggtgatagttggagcggagacttagcataatggcagaacctgtttctccactgaagcactttgtgctggctaagaaggcgattactgcaatctttgaccagttactggagtttgttactgaaggatcacattttgttgaagcaacatataagaatccggaacttgatcgaatagccactgaagatgatctggtagaaatgcaaggatataaagacaagctttccatcattggtgaggtgctatctcggagacacatgaaggtggcattttttggcaggacaagcagtgggaagagctctgttatcaatgcaatgttgtgggataaagttctccctagtgggattggccatataaccaattgcttcctaagtgttgaaggaactgatggagataaagcctatcttatgacagaaggatcagatgaaaaaaagagtgtgaagacagttaatcaactggcccatgcccttcacatggacaaagatttgaaagctggctgtcttgtacgtgtgttttggccaaaagcaaaatgtgccctcttgagagatgacctggtgttagtagacagtccaggcacagatgtcactacagagctggatagctggattgataagttttgcctagatgctgatgtctttgttttggtcgcaaactctgaatcaacactaatgaatacggaaaaacacttttttcacaaggtgaatgagcggctttccaagcctaatattttcattctcaataatcgttgggatgcctctgcatcagagccagaatatatggaagacgtacgcagacagcacatggaaagatgcctgcatttcttggtggaggagctcaaagttgtaaatgctttagaagcacagaatcgtatcttctttgtttcagcaaaggaagttcttagtgctagaaagcaaaaagcacaggggatgccagaaagtggtgtggcacttgctgaaggatttcatgcaagattacaggaatttcagaattttgaacaaatctttgaggagtgtatctcgcagtcagcagtgaaaacaaagttcgaacagcacactatcagagctaaacagatactagctactgtgaaaaacataatggattcagtaaacctggcagctgaagataaaaggcattattcagtggaagagagggaagaccaaattgatagactggactttattcgaaaccagatgaaccttttaacactggatgttaagaaaaaaatcaaggaggttaccgaggaggtggcaaacaaagtttcatgtgcaatgacagatgaaatttgtcgactgtctgttttggttgatgaattttgttcagagtttcatcctaatccagatgtattaaaaatatataaaagtgaattaaataagcacatagaggatggtatgggaagaaatttggctgatcgatgcaccgatgaagtaaacgccttagtgcttcagacccagcaagaaattattgaaaatttgaagccattacttccagctggtatacaggataaactacatacactgatcccttgcaagaaatttgatctcagttataatctaaattaccacaagttatgttcagattttcaagaggatattgtatttcctttttccctgggctggtcttcccttgtacatcgatttttgggccctagaaatgctcaaagggtgctcctaggattatcagagcctatctttcagctccctagatctttagcttctactcccactgctcctaccactccagcaacgccagataatgcatcacaggaagaactcatgattacattagtaacaggattggcgtccgttacatctagaacttctatgggcatcattattgttggaggagtgatttggaaaactataggctggaaactcctatctgtttcattaactatgtatggagctttgtatctttatgaaagactgagctggaccacccatgccaaggagcgagcctttaaacagcagtttgtaaactatgcaactgaaaaactgaggatgattgttagctccacgagtgcaaactgcagtcaccaagtaaaacaacaaatagctaccacttttgctcgcctgtgccaacaagttgatattactcaaaaacagctggaagaagaaattgctagattacccaaagaaatagatcagttggagaaaatacaaaacaattcaaagctcttaagaaataaagctgttcaacttgaaaatgagctggagaattttactaagcagtttctaccttcaagcaatgaagaatcctaacaatagagattgctttggtgaccatgataggaggaaacgaaacttgtaagattggaacagttgttatttttatgaaattactttaaatatgaattgtactaactgtacctaaatagcaaagccctgtgtagattctggtaatgatctgtctcagggtatgtgtatttttgaagagtgttatgtccttagttttaattttgagtaaagaaaaggctaaaatcatgaattagttacaagcaacagtaccaacttatgtgacccctgaggggtggggctgtgagctcttaatttgtttttgattctgaaaaactctgcttcctggcatccaggagttagagattgagcctttcatcttctttctcaaaactagtttttgatgctttctttcatgggaatagtcacttttttatttagtaaatcgcattgctggaaccaccaaggagtgtggaatgtccttgagtgtattatttatgcaagtcacagtcacgttgccatcatggcagctatgtgaaacactaataaatgtgtttttactttttattcccgttaaaactgatgtaaaacaggataaaggcttgttatagtcacttataagtatctgggtctaagtaatttccttagatgtttctaaagaaacattttcagctttgctcccattatgattccaataaggaacgctttcctagtgcaattttaggagtaaagtttgaagagataaaaatagccaaagataggagacgtctgaattttgaatgataaacagtgatgttttaaaaaagctgttgttcttcaggaggcatttgcctaggatattgctggattataccccattggaggcttttaattttatttgtatgaattttccaggatttcattaaaaattattattgtattttttaccttaatgaaagattttgggttcaaatatctttctatattaaaagctgattgagtctgtacatatgtaaattatgcctagtggaggttctgttgactttcttccccactgtggaagaggccagttttgcctccatttgcacattcatttcagttatttctgatccataaatataacatttacaaaattcttccttgagctggtggaaatgcctcaccagtttcctctttaatgaatcaaataaaatctttaactgatgttaaaaaaaattgattgaaactcagatggaatggaaatgtacaaaaatgacaccattctaggaatttgctagacaaaatgtaggactaccagatcagtatctcctagacacttgttagaaatgcacaatcccggggaacgcagtacatttggccacatgtagtttatgtttccttttcatgggagggataaaatttaaagctttttttttctttgaatacagtccttccttttctatgccttttaaggcttctagatgctattcagcctttttacagcaggtgcaactctatttttcaaggtatcttagaagataacactaggccattgaagcctttcaaaaatatatttttatgcaaattgacacgagtgcagtatactaatgcaaattaattttggtgtttagcttttattgctcatttataacccaagaaatggtacagaccacagtaagtgggattaggtaacaactacaacatggaaaaacagtgtctaagatcacgtactgctaatttaggttacaaaactcaaggctgtaacctttatatgaaagtacttaagcttgaaagttcataatagtttggtatcacctcattagtatagtacagtggttctcaaagtttggtcctgggtcatcgacattacttctttttctttctgagacagggtctcagtctgtcacccaggatggagtgcagtggcgtgatcatggctcactgcagcctcaacctctcgggttcaggtgatcctcccacatcagcctcctgggtggctgggactacaggcacacgccaccatgcctggctagtttttgtaaagacgaggtttccccatgttgtgcaggctggtcttgaactcacagactcaagtgatccttttacctcagcctcccaaactgttgggataacaggtgtaagccaccacacacagctataatcaaccttcaaacttataaaaagtgtggatccttgggtctgaacccagacctatggagtcagacagtaggtttgaggcccagcaatctatggtttaacaagccatccaggtgtttctgatgcacagtgaaattggggtaccactggtattaggtttggtatggcaactttttcatcacttgttttatgtagttgtctgatcaattgtgaaaacataatgaatgttggaaatggaacagtaaaataacgaaagccaactttttttttttttttttttttttttgagacggagtctcgctctgtcgcccaggctggagtgcagtggcgcgatctcggctcactgcaagctccgcctcccgggttcacgccattctcctgcctcagcctcccgagtagctgggactacaggcgcccgccaccacgcccggctaattttttgtatttttagtagagacggggtttcaccgtgttagccaggatggtctcgatctcctgacctcgtgatccacccgcctcggcctcccaaagtgctgggattacaggcgtgagccaccgcgcccggccgaaagccaactcttatgcctagaaatatgtgcacctatgaccaagcccatgaattatacaggaattatgtaattatgagtgatgtacttcaaagttattgcacatacacttgtttactttgtatgtttgcaggattaaactttgtataatctttttacaaaaattttttttcagtatgcaagcttgcaagatgaaaataaaacctgtttgcctgata

SEQ ID NO: 267914 - DNA, 1467 bp, Artificial Sequence
  derived and/or modified sequence
agtgaccgccctttgccactccccctgcctcctctccgcctttaacttctcgggaagatgaggcagtttggcatctgtggccgagttgctgttgccgggtgatagttggagcggagacttagcataatggcagaacctgtttctccactgaagcactttgtgctggctaagaaggcgattactgcaatctttgaccagttactggagtttgttactgaaggatcacattttgttgaagcaacatataagaatccggaacttgatcgaatagccactgaagatgatctggtagaaatgcaaggatataaagacaagctttccatcattggtgaggtgctatctcggagacacatgaaggtggcattttttggcaggacaagcagtgggaagagctctgttatcaatgcaatgttgtgggataaagttctccctagtgggattggccatataaccaattgcttcctaagtgttgaaggaactgatggagataaagcctatcttatgacagaaggatcagatgaaaaaaagagtgtgaagacagttaatcaactggcccatgcccttcacatggacaaagatttgaaagctggctgtcttgtacgtgtgttttggccaaaagcaaaatgtgccctcttgagagatgacctggtgttagtagacagtccaggcacagatgtcactacagagctggatagctggattgataagttttgcctagatgctgatgtctttgttttggtcgcaaactctgaatcaacactaatgaatacggaaaaacacttttttcacaaggtgaatgagcggctttccaagcctaatattttcattctcaataatcgttgggatgcctctgcatcagagccagaatatatggaagacgtacgcagacagcacatggaaagatgcctgcatttcttggtggaggagctcaaagttgtaaatgctttagaagcacagaatcgtatcttctttgtttcagcaaaggaagttcttagtgctagaaagcaaaaagcacaggggatgccagaaagtggtgtggcacttgctgaaggatttcatgcaagattacaggaatttcagaattttgaacaaatctttgaggagtgtatctcgcagtcagcagtgaaaacaaagttcgaacagcacactatcagagctaaacagatactagctactgtgaaaaacataatggattcagtaaacctggcagctgaagataaaaggcattattcagtggaagagagggaagaccaaattgatagactggactttattcgaaaccagatgaaccttttaacactggatgttaagaaaaaaatcaaggaggttaccgaggaggtggcaaacaaagtttcatgtgcaatgacagatgaaatttgtcgactgtctgttttggttgatgaattttgttcagagtttcatcctaatccagatgtattaaaaatatataaaagtaaaaaaaaaaag

SEQ ID NO: 267915 - DNA, 2226 bp, Artificial Sequence
  derived and/or modified sequence
atggccgagcccgtgagccccctgaagcacttcgtgctggccaagaaagccatcaccgcaattttcgaccagctgctagaatttgtgactgaaggatcgcattttgtagaagcgacatataagaaccctgaactcgatcgaatcgctacagaagacgatctggtggaaatgcaagggtataaagacaagctctccattataggagaggtcctatcgaggcggcacatgaaggttgcattcttcggccggacctccagcgggaaatcgtccgtgatcaacgctatgctttgggacaaagtgttaccctccggtattggccatattactaattgttttctgagtgtggaagggactgatggcgataaggcatacctgatgaccgagggcagcgacgaaaagaagtctgtgaagactgtaaaccaattggcccatgccctgcacatggataaggacctgaaagccggttgcctggtgcgagtgttctggcccaaggcaaagtgcgccttactgcgtgatgacctcgtcttagtagacagcccaggaaccgacgtcaccactgagctggactcatggatcgataaattctgtctcgacgccgatgttttcgtgctggtcgcaaactccgagtctacactcatgaatactgaaaaacacttttttcacaaagtaaatgagagactgagcaagccaaacatctttattctgaataatagatgggacgcatcagcatccgaaccagagtacatggaggatgtgaggcgccagcatatggagcggtgcctgcactttctggtggaggaactgaaagtggtcaacgccctggaggctcagaatcgcatattctttgtgtctgccaaggaagtcctctctgctaggaagcagaaggcacaggggatgccagaaagcggcgtggccttggccgaaggctttcatgcccgtttacaagaatttcagaacttcgagcagatttttgaagaatgtattagccagtctgccgtgaaaacgaaatttgaacaacacaccatacgcgcaaagcaaattttagctactgtcaagaatattatggacagtgtgaatctggctgctgaggataagcgccactactccgttgaggagcgtgaggatcagatcgataggttggattttatccggaaccagatgaatctcctaaccctggacgtgaaaaagaagattaaggaagtgacagaagaagtggccaacaaggtgtcctgcgccatgacagacgagatctgccgtctgtcggttttggtggatgaattttgttcggagttccaccctaaccctgacgttctaaagatctacaaatctgaactgaataagcacattgaggacgggatggggagaaatctggccgaccgttgcaccgatgaagtcaatgccctcgtacttcaaacccagcaggagattatcgagaacctcaaacctctgctccccgcaggaatccaggataaattacacacactgattccctgtaagaagtttgacctgagctataacttgaactatcacaagctctgctctgacttccaggaggacatagtatttcccttctccctgggttggtctagccttgtgcacagattcctggggccacgaaatgcccaacgtgtgttacttggactgagtgagccaatatttcagctgccacggtccctggcgagcacccctacagcaccaaccacccccgcgactccagataatgccagccaggaagaattgatgatcaccctcgtgacgggactagcatcagtgactagccggacgtcaatgggtataattatagtgggaggcgtgatctggaagacgatagggtggaaacttctgtcagtgtcgctgacaatgtacggggccctgtatttatatgagaggttgagctggaccacccacgctaaagagcgggctttcaaacagcaatttgtgaactacgcaacggaaaaactgagaatgatcgtaagcagtacatcagcaaactgctctcatcaagtcaagcagcaaattgcgacaacattcgcgaggttatgtcagcaagttgacatcacacagaagcagctcgaggaggagatcgcccggttgccgaaggagattgatcagttggaaaagatccaaaacaattctaagctgcttcgtaacaaagctgttcagctggagaatgaactggagaacttcactaagcagtttttgccctcgtctaacgaggaatcatag

SEQ ID NO: 267916 - DNA, 1893 bp, Artificial Sequence
  derived and/or modified sequence
atggccgagcccgtgagccccctgaagcacttcgtgctggccaagaaggccataacagctatttttgaccagctgttagaatttgtgaccgaaggctcacatttcgttgaggcaacatataaaaaccccgagctagaccggatcgctacagaggatgatctggtggagatgcaaggatataaagacaaacttagcatcatcggtgaggtgctgtcacgtcggcatatgaaggtcgccttttttgggagaacgtcctccgggaagtccagcgtcatcaatgccatgctctgggacaaagtgctgccgagtggaattggacacatcaccaattgtttcctctctgtggaaggaactgatggagataaagcctatctaatgacagagggctctgatgaaaaaaagtctgtgaaaacggtgaaccagttggcgcatgcactccatatggataaggacctgaaggctggatgtcttgtcagagtcttctggcctaaagctaaatgtgctctgctgcgggacgatctcgtcttggttgatagcccaggaaccgacgttacgacagagctggatagttggattgacaagttctgtctcgacgcagacgtgtttgtgctggtggctaactccgaatctacgctgatgaatacggaaaagcatttcttccacaaggtgaacgagcggctgagtaagcccaacatttttattctaaacaatcgttgggatgctagtgcatccgaacctgaatacatggaagatgtcagaagacagcatatggaaagatgcctccactttctggtggaggagctaaaggtcgtgaacgcgcttgaggcacagaacaggatattctttgtgagcgcaaaagaagtgctttcagccagaaagcagaaggcccagggcatgccagagagcggtgtggcactcgcagaagggttccatgcaaggcttcaagaatttcagaactttgaacagatctttgaagagtgcatctcacaaagcgccgtgaagacaaagttcgaacagcatacgattagggctaagcagatcttggctacagtgaaaaatatcatggactcagttaatctggccgccgaggacaagagacactacagcgttgaagagcgggaggaccagatagataggctggactttattaggaatcagatgaacctgctaaccctggacgtgaagaaaaagataaaggaggttaccgaagaagtggctaataaagtgtcgtgtgccatgacagacgagatttgtagactctcagtcttagtcgatgaattctgctccgagtttcaccccaatcctgacgtgctgaagatctataagtcgttgccaaggtcccttgcgtccactccaaccgcgcccacgactccagcgaccccagacaatgcttcccaagaagagctcatgataacccttgtcaccggcttggcttccgtgacctctaggaccagcatgggaataatcatcgtaggtggcgttatctggaagaccattggttggaagctcctgtccgtcagcttgacaatgtatggagcactctacctgtatgagagactgtcatggacaacacatgcaaaagaacgagctttcaagcaacaatttgtcaactatgccaccgagaagttgaggatgatcgtttcttcaactagcgccaattgtagtcaccaggtaaaacaacagattgcgactacttttgcaagactatgccagcaggtggacatcacacaaaagcagctggaggaggagatagccagactcccaaaggagatcgaccaactcgaaaagattcagaataattccaagctcttaagaaataaggcagttcagcttgaaaacgaacttgagaattttaccaaacagtttcttcctagctccaatgaggagagttag

SEQ ID NO: 267917 - DNA, 468 bp, Artificial Sequence
  derived and/or modified sequence
atggccgagcccgtgagccccctgaagcacttcgtgctggccaagaaagccatcacagccatattcgaccagctcctggagttcgtaactgagggctcacactttgtcgaggccacctacaagaaccccgagttggatcgcattgccacagaggatgacctggtggagatgcaggggtataaggacaagcttagtatcatcggtgaggttttgagcagaagacatatgaaggtggcattttttgggcgcacaagttccggaaagtcctccgtaataaacgctatgctttgggataaagtgttgccaagcggtattggccacattactaactgtttcttgtcggtggagggaacagatggcgacaaggcatacctgatgactgaggggtccgacgaaaagaagtctgtcaagaccgtgaaccagctggctcatgcccttcacatggataaggatctaaaggccggctag

SEQ ID NO: 267918 - DNA, 2226 bp, Artificial Sequence
  derived and/or modified sequence
atggccgagcccgtgagccccctgaagcacttcgtgctggccaagaaggccattactgccattttcgatcagctgctcgaattcgtcaccgagggtagccactttgtggaggctacctacaaaaatcctgaactggaccgcatcgcaactgaggacgacttagtggagatgcaagggtataaagacaaacttagtattatcggagaggtgctatcccggcgccacatgaaggtggcattttttggccgaacctcatctggtaaatcaagtgtcatcaatgccatgttatgggacaaagtgttgccctccggtatcggtcatatcactaactgtttcttatccgtggagggtacagatggagataaggcttacctgatgaccgaagggtccgatgaaaaaaagtctgttaagacagtcaaccagctggcccacgcactacatatggacaaggacctcaaagccgggtgtctggtccgcgtgttctggcccaaagcaaaatgcgccttgttacgggatgacctggtcctagtagactcacccggcactgacgtgaccaccgagctggatagttggatcgacaagttctgcctggatgccgatgtttttgtgctcgtagctaatagcgaaagcactctcatgaacaccgagaagcacttcttccacaaggtaaacgaaaggctgtctaaacccaatatcttcatcctgaataatagatgggatgcatcagcctcagagcctgaatacatggaagacgttcgcagacagcacatggagcgatgccttcactttttagttgaggagttgaaagtggtcaatgccctcgaggcccagaacagaattttttttgtgtctgcaaaggaagtgctcagcgcacgcaaacagaaggcgcagggcatgcctgaatctggcgtcgccctggccgaaggatttcatgcgaggctgcaggagttccaaaacttcgagcaaattttcgaagagtgtatctcccagagcgctgtgaaaacgaagttcgagcagcataccattcgagcaaaacagattctggccaccgttaagaatattatggacagtgttaatctggctgcagaggacaagagacattattcggttgaagaaagagaggaccaaattgaccgcctggacttcattcgcaatcagatgaacctgctgacactcgatgttaagaaaaaaatcaaagaagtgacagaagaggtggctaacaaagtgtcatgcgctatgacggacgagatttgtagactgtccgtgctggtggatgaattctgctctgagttccatcctaaccccgatgtactgaaaatctataaatcggagttaaacaaacacatcgaagacgggatgggccggaatctggctgaccgttgtacagatgaagtaaatgcactcgtcctgcaaacccagcaagaaatcattgagaacctgaaaccactcctccccgccggcatccaggataagctgcataccctgatcccctgcaaaaaattcgacttatcttataatctgaattaccacaagctgtgcagcgactttcaggaagacattgtctttccgttcagcctcgggtggtcctctctggtccatcgattcctcggacctaggaacgctcaacgagtgctacttggcctgagtgaacctattttccagctgccccgttctctagcgagtactccaaccgcacctaccaccccggctacgccggacaacgcatcccaggaggaactcatgatcaccctggtgaccggactggcctcggttacgagtcgaacaagtatggggatcataattgtggggggagtaatctggaaaactatcggctggaaactgttatcagtttcactcaccatgtatggtgccctgtatctatatgagcgactttcctggaccacacatgccaaagagcgggccttcaaacaacaattcgtcaactatgcaaccgagaagctgcggatgatcgtgagctccacttccgcaaactgttcgcatcaagtgaaacagcagatcgccaccacttttgctaggctctgccagcaggtggacattactcaaaaacagttggaagaggagatcgctagactgccaaaggaaatcgatcaactagagaagatccagaataacagtaaactccttcgtaataaagcggtgcagctcgagaatgaactagaaaacttcacaaagcagttcctgccaagttcgaacgaggagtcttag

SEQ ID NO: 267919 - DNA, 1344 bp, Artificial Sequence
  derived and/or modified sequence
atggccgagcccgtgagccccctgaagcacttcgtgctggccaagaaggcgataaccgctatattcgatcagctcctggaatttgttacggagggctcacactttgtggaagctacatacaagaacccggagttggaccggatcgctaccgaggacgacttggtggagatgcaaggctataaagacaagctctctattatcggcgaggtgctatcacggcggcacatgaaggttgcatttttcggcaggaccagctcaggaaaatcctccgttataaacgccatgctgtgggacaaggtactgccaagcggtattggacacataaccaactgtttcctctcggtagagggaactgacggcgacaaagcctacctgatgacagagggttcggacgagaagaagagtgttaagactgtgaatcagctcgctcatgctctgcatatggacaaggacttaaaggccggctgtctcgtcagagttttctggcctaaagccaagtgtgcccttctccgggacgatctagtcctagtggattcacccggaactgatgtgacgaccgagctggacagctggatcgataaattctgtctggatgccgatgtgttcgtcctggtggcaaactcggagtctaccctgatgaacactgaaaagcactttttccacaaagttaatgaaaggctgtcaaagccaaatatctttattttaaacaataggtgggacgccagtgcctccgagccagaatatatggaagatgtgcgccgacagcatatggagaggtgccttcatttcttggtcgaggagctgaaggttgtgaacgcgctggaggctcagaataggatcttctttgtgagtgccaaagaagtcctgtccgcacgtaagcaaaaggcgcagggaatgccggagagcggtgtcgctcttgccgaaggatttcatgcacggctgcaggagtttcagaactttgagcaaattttcgaagagtgcatctctcaaagcgcagtaaaaactaagttcgagcagcacacaattcgggcaaagcaaatacttgccacagttaagaatattatggactctgtgaatctcgcagccgaagacaagcggcactattcagtggaagagcgcgaagatcagatagacaggctagacttcatccggaaccagatgaatctacttaccctcgatgttaagaaaaaaattaaggaggtgaccgaggaggtggcaaataaggtgtcatgcgcgatgactgacgaaatctgtagactgagcgtcctggtggacgaattttgcagcgaatttcacccgaaccctgatgtgctcaagatctacaaatctaaaaagaagaagtag

SEQ ID NO: 267920 - DNA, 2226 bp, Artificial Sequence
  derived and/or modified sequence
atggcagagcctgtgtcgcccctcaagcatttcgtgctggctaagaaggctattaccgcaatcttcgaccagctcctggaattcgttaccgaggggagccactttgtggaggccacttacaaaaaccctgagcttgatcgaattgcaaccgaggatgatttagtcgagatgcaggggtacaaagataaactgagtatcatcggggaggtcctgagcaggaggcatatgaaagtcgcctttttcggacggacaagttccggcaagagctcagttatcaacgctatgctgtgggataaggtgctgccttccgggatcgggcacataacaaattgttttctgagcgtggagggtaccgatggcgacaaggcatatctgatgacagaggggagtgacgagaagaagagcgtcaagactgtgaatcagctggcccacgctttacacatggacaaggacttgaaggctggatgcttggtcagggttttttggcctaaggccaagtgcgccttactgagggatgatctggtgcttgttgactcacctggaaccgacgtgactactgaactggacagttggatcgacaaattctgcttagatgccgatgttttcgtgctggtagccaactccgagtcaaccctgatgaataccgaaaagcacttctttcacaaggttaacgagaggctttctaagccaaatatcttcattctgaacaacaggtgggatgcctctgctagcgaaccggagtatatggaggacgtgcgcaggcagcacatggagaggtgcctgcactttttagtggaagagctgaaggttgtgaatgcactggaggcccagaaccgtatctttttcgtcagcgctaaggaggtgctgtccgcccgtaagcaaaaagcccagggcatgcctgagtcaggagttgcactggccgaggggttccacgcccgtctccaagagttccagaacttcgaacagatattcgaggagtgtatctcccaaagtgctgtgaagactaaattcgagcaacatactatccgtgcaaaacagatcctggccacagtcaagaatattatggattcagtcaaccttgcggctgaagataaacgccactacagtgtggaagagcgcgaggatcagattgaccggttggacttcatccgcaaccaaatgaacttgctgacattggatgtgaagaagaagattaaagaagtgacagaggaagtggcgaacaaggtgtcctgcgctatgaccgacgagatatgcaggctgagtgtactggtcgatgaattttgctcagaatttcatcccaacccagacgtgctgaagatttacaaatcagaactcaacaaacacattgaagacggcatggggaggaatctcgccgaccgatgcaccgatgaggttaacgccctcgtgctgcagacccagcaggagatcatcgagaatctgaagcctttgctgcccgctgggattcaggataagctccacaccttgattccgtgcaaaaagtttgacctgtcttacaaccttaattatcataagctgtgtagcgatttccaggaggacatcgtgtttcctttctccttgggttggagttctctggtgcacagattcttgggccctcgtaatgcccagagggtgctgctcggcttgtcagaacccattttccaattacctagaagcttagcttcgactccaaccgcacccacaactcccgctacacctgataacgcctctcaggaagagctgatgatcaccctggttaccggcctcgcctctgtcacttcacgcaccagtatgggtatcatcattgtcggtggggttatctggaagacgattggctggaaactcctcagcgtaagcctgacgatgtacggcgcattgtacctgtacgaaagactgtcttggactacccacgcaaaggagagagcattcaaacagcagttcgtgaattacgccacagagaaactccgcatgatcgtgtccagcacctccgctaactgcagtcatcaagtgaagcagcagattgcaacaacgttcgctagactctgtcaacaggtcgatattactcagaagcagcttgaggaagaaatcgccagattacctaaggagatcgatcagcttgagaagattcaaaataactctaagctgctgagaaataaggcggtccagctagagaatgaactggaaaattttacgaagcagtttctgccatcctctaacgaagagagttag

SEQ ID NO: 267921 - DNA, 1893 bp, Artificial Sequence
  derived and/or modified sequence
atggctgagcccgtgagcccactcaagcattttgtactcgccaaaaaagccataaccgccatcttcgaccaactcttagaatttgtaactgagggaagccactttgtcgaggcaacttataagaaccccgagctggacaggattgccaccgaagacgacttagtcgagatgcagggttataaagacaaactgtccattattggtgaggtcttgtcccgaagacacatgaaagtggcgttttttggcaggacttccagcggaaagtcatcagtgattaacgcaatgctctgggacaaagtgttacctagcggaataggtcatatcacaaattgctttttaagcgtcgaagggaccgacggggacaaagcctacctgatgactgagggctctgatgaaaagaaatcagtgaaaaccgttaatcagctggcccatgctctgcacatggataaggacctgaaggcgggttgtcttgtgcgagttttttggcccaaggctaagtgtgccttgctaagagacgacctcgtcttggtcgactcacccggaacggacgtcaccacagagttagattcttggattgataagttttgcctcgatgctgacgtctttgtgttggtggctaattcagagtcaacgctgatgaacacagagaagcactttttccacaaggtaaacgagagactgagcaaaccaaacatcttcatccttaacaacagatgggatgcctcagcatctgaaccagagtatatggaggacgttcgaaggcagcatatggaacggtgtctacacttcctggtggaagagttgaaggtagttaacgctctcgaggcccagaaccgcatctttttcgtatcagccaaagaggtgcttagtgccaggaaacagaaggcccaggggatgcccgagtcgggggtcgccctggccgaggggttccacgcacggttgcaagagttccagaattttgaacagatcttcgaggaatgcattagtcagtctgctgtcaaaactaaattcgagcaacacaccattcgggctaagcagattttagccactgtaaagaacattatggatagtgtgaaccttgccgcagaggataagcggcactattccgttgaggaacgcgaggatcagatcgatagattggatttcatccgcaatcagatgaaccttcttacacttgatgtgaaaaaaaagatcaaagaggtcaccgaagaagtggctaacaaagttagctgtgcaatgaccgacgagatttgcaggttaagtgtcctggtagacgaattctgttccgagtttcatccaaatccagacgtgctgaaaatctataagagtttgccgcgaagcttggcgtctacaccgaccgcacccacaacccctgctacgccagacaacgcttctcaggaggagttgatgatcacattggtgacggggctcgcttccgtaactagcaggacatctatgggaatcattatcgtgggcggagtgatctggaagaccataggatggaagttgctgagtgtgtctctgaccatgtatggggctttatatctttacgagcggttgtcctggacgacgcacgccaaggagcgggcttttaagcagcagtttgtgaattatgccaccgaaaagctgcggatgattgtttcatccacatccgccaactgctcccaccaggtcaaacaacagatcgctacaacttttgcacgtctgtgtcagcaggtcgacatcacgcagaagcaactggaagaagagatcgctagattacctaaggagatagaccagttggaaaagatccagaacaattctaaactcctgcggaataaagccgtgcaactggagaatgagctagagaatttcacgaaacagttcctgccaagcagcaacgaggaatcatag

SEQ ID NO: 267922 - DNA, 468 bp, Artificial Sequence
  derived and/or modified sequence
atggccgagccagtcagcccacttaaacattttgttctcgctaagaaggccataactgccatcttcgaccagctgctggagttcgtcacagagggcagccattttgtggaggccacctacaagaacccagaactggaccgcattgcgaccgaagacgacttggtagaaatgcaaggttataaagacaagctgtccattatcggggaagtgctgtccagacgccacatgaaggttgctttttttggcagaacctcctccggtaaatctagcgtcatcaacgccatgctctgggacaaggtcctgccaagcgggatcggtcatattaccaattgcttccttagcgtggaaggtacagacggggacaaagcatacctgatgaccgagggctcagatgagaaaaagtcagtgaagactgtgaatcagctggctcacgcccttcatatggataaagatcttaaggcgggttag

SEQ ID NO: 267923 - DNA, 2226 bp, Artificial Sequence
  derived and/or modified sequence
atggccgagcccgtttcaccactaaaacacttcgtgctggccaaaaaggctatcactgctattttcgatcagcttttagagttcgtaaccgagggttcccattttgtggaggcaacttacaaaaatcctgagcttgacaggatcgctactgaagacgacctggtggagatgcaaggctacaaagataaattgtcaattataggggaagttctgagtcggagacatatgaaggtggccttctttggcagaactagctccggaaaatcatcagtcatcaacgcaatgctttgggacaaggtactgccaagtggcatcggccatataactaactgctttctcagtgtagaaggaacagacggggataaggcctatctcatgacagaagggagcgatgaaaagaaaagtgttaaaacagtaaatcagttagcacacgctctgcacatggataaggacctcaaggcgggatgtctcgtgagagtgttctggcctaaggccaaatgcgctctcttacgcgatgatttggtcctggtagacagcccagggactgacgtaacgacagaactggactcctggatcgacaaattctgcctggacgcagacgtgttcgtactggttgctaattctgagtccactttgatgaatacagagaaacatttttttcataaagtgaatgagaggctctccaagcccaacattttcatcctgaacaatcggtgggatgcctctgcgtccgagcccgaatatatggaggatgtgaggcgtcagcacatggagaggtgcttgcacttccttgtggaggaactaaaggtcgtgaatgccctcgaagctcagaaccgcatcttcttcgtcagcgccaaagaagtactgtcagccagaaagcaaaaagcccagggtatgcccgagtctggcgttgctctggccgaaggctttcacgctcggctgcaggagtttcagaacttcgaacagatttttgaggagtgtatttcccaaagcgctgtcaagaccaagttcgagcagcacacaattagggctaagcagattctggcaactgtgaaaaacattatggactctgttaacctagcagctgaggataaacgacactatagtgtagaagagcgggaagatcagatagaccggctggactttatacggaatcaaatgaatctcttgacactggacgtaaagaagaagatcaaagaggttacagaagaagttgccaataaggtaagttgcgcaatgaccgatgagatttgcaggttgagcgtgctcgtggatgagttttgttctgaattccatcccaacccggatgtcctgaagatctacaaatcagagctcaacaagcacatcgaagatggtatgggtcgaaacctagctgaccgatgtaccgatgaagtcaatgctctagtgcttcagacacagcaagagatcattgaaaatcttaaaccactgctgcccgcaggcattcaagataagctgcatacccttattccctgcaagaaattcgaccttagttacaatttgaattaccacaaactgtgctctgacttccaagaggacatcgttttccctttttcactgggatggagctctttggtgcatcgtttcctgggaccgagaaatgctcaaagagtgctgttgggtctgagcgaacccatctttcagctgccgagaagcctagcctcaacccccactgcacctaccacccccgcaacgcctgacaacgcctcccaggaggaactcatgataacactggtgaccgggttggcctcagtcaccagccgaacttcaatgggtatcatcattgtgggtggcgtgatttggaagaccattggttggaagctcctgtctgtctcattgacaatgtatggcgcactctatctatatgagcgcctaagctggaccacccacgccaaagagagagcatttaagcagcagtttgttaattatgccacggagaagctcaggatgattgtgtccagcacttctgcgaactgctcccatcaggttaaacagcagatcgccactacattcgccaggctgtgccagcaagtggatattacccaaaagcaactggaggaggagatcgccagattgccaaaggagatagaccagctggaaaaaatacagaataattcgaaactgctgcggaataaagctgtgcagttagagaacgaactggaaaacttcacaaaacaattcctccccagcagtaacgaagagtcctag

SEQ ID NO: 267924 - DNA, 1344 bp, Artificial Sequence
  derived and/or modified sequence
atggccgagccagtttcacccctgaagcatttcgttctcgccaagaaagccatcactgcgatctttgaccagcttcttgaattcgttacagagggctcacattttgtggaggccacatacaaaaatcctgagctggatcggattgctacggaagacgatctcgtagaaatgcagggttacaaggataagctatccattatcggcgaagtgctctctcgcagacatatgaaagtcgccttcttcggcaggacgagctcagggaaatctagcgtgattaatgccatgctatgggacaaagttctacccagcggcatcgggcatattaccaactgcttcctatcggtggagggcaccgacggggacaaagcctacttaatgactgaggggagtgatgaaaagaagagcgtgaagactgtgaatcagctggctcacgccctacacatggataaggacctgaaagccggttgcttagtcagggtgttctggcccaaggccaaatgcgctttactgcgggacgatttagtactggtcgacagtccagggacagatgtgaccactgagctcgatagctggatcgataaattctgtctggatgcggacgttttcgtgctggtcgctaattcagaatctaccctgatgaacaccgagaagcacttcttccacaaggtaaacgaacgcctctccaaacctaacatcttcatcctgaataatcgctgggacgcatcagcttcagagccagaatatatggaggatgtccgtcgccagcatatggagcgttgtttacacttcctagtggaagaattgaaggtggtcaacgcgcttgaggctcaaaaccgcatcttctttgtctcggcaaaggaggttctgtcagcacggaagcagaaagcccaggggatgccagagagcggtgtggcccttgccgagggcttccacgcccgtctccaggaatttcagaattttgaacaaatatttgaggagtgtatctctcagtcagctgtgaagaccaagtttgagcagcacaccattcgcgcaaaacagatcctggcaactgtaaagaatatcatggatagtgtcaatttagctgctgaggacaaaaggcactatagtgtggaggagagagaagaccagatcgaccggctagatttcatcagaaaccaaatgaatctacttacgctggatgtcaaaaaaaagatcaaggaagtgactgaagaagtggctaacaaggtctcatgtgccatgactgacgaaatttgtcgtcttagtgtgctcgtggatgagttttgcagtgagttccatccaaacccagatgtgctcaaaatctataagagtaagaaaaaaaagtag

SEQ ID NO: 267925 - protein, 401 aa, Artificial Sequence
  derived and/or modified sequence
MKLSDLHHVTLFQEILLLKNFEKQENILQERVNSLDKEEQYMQWKINETLKEMEEKKNEITKLQEQEKALYAGFQAAIGENNKFANFLMKVLKKKIKRVKKKEVEGDADEDEESEESSEEESSLESDEDESESEDEVFDDSICPTNCDVALFELALHLREKRLDIEEALVEEKKIVDNLKKEYDTLSKKVKIVATNLNAAEEALEAYQREKQQRLNELLVVIPLKLHQIEYVVFGEIPSDLSGTLVFSNHALRRLQERIHELQEENSKQQKLNKEWRERRKQLIREKREMTKTIHKMEETVRQLMISKFGRVVNLEALQTLSVNTTLEELKIRKLRKELANAKEMKMWEEKIAQMRWELMMKTKEHTRKLYQMNDLCIEKKKLDSRLNTLQNQQNPGNGLS

SEQ ID NO: 267926 - DNA, 1206 bp, Artificial Sequence
  derived and/or modified sequence
atgaagctgagcgacctgcaccacgtgaccctgttccaggagatcctgctgctgaagaacttcgagaagcaggagaacatcctgcaggagagagtgaacagcctggacaaggaggagcagtacatgcagtggaagatcaacgagaccctgaaggagatggaggagaagaagaacgagatcaccaagctgcaggagcaggagaaggccctgtacgccggcttccaggccgccatcggcgagaacaacaagttcgccaacttcctgatgaaggtgctgaagaagaagatcaagagagtgaagaagaaggaggtggagggcgacgccgacgaggacgaggagagcgaggagagcagcgaggaggagagcagcctggagagcgacgaggacgagagcgagagcgaggacgaggtgttcgacgacagcatctgccccaccaactgcgacgtggccctgttcgagctggccctgcacctgagagagaagagactggacatcgaggaggccctggtggaggagaagaagatcgtggacaacctgaagaaggagtacgacaccctgagcaagaaggtgaagatcgtggccaccaacctgaacgccgccgaggaggccctggaggcctaccagagagagaagcagcagagactgaacgagctgctggtggtgatccccctgaagctgcaccagatcgagtacgtggtgttcggcgagatccccagcgacctgagcggcaccctggtgttcagcaaccacgccctgagaagactgcaggagagaatccacgagctgcaggaggagaacagcaagcagcagaagctgaacaaggagtggagagagagaagaaagcagctgatcagagagaagagagagatgaccaagaccatccacaagatggaggagaccgtgagacagctgatgatcagcaagttcggcagagtggtgaacctggaggccctgcagaccctgagcgtgaacaccaccctggaggagctgaagatcagaaagctgagaaaggagctggccaacgccaaggagatgaagatgtgggaggagaagatcgcccagatgagatgggagctgatgatgaagaccaaggagcacaccagaaagctgtaccagatgaacgacctgtgcatcgagaagaagaagctggacagcagactgaacaccctgcagaaccagcagaaccccggcaacggcctgagctag

SEQ ID NO: 267927 - DNA, 1206 bp, Artificial Sequence
  derived and/or modified sequence
atgaagttgagcgatctccatcacgtgaccctgttccaagagattctcttgttgaagaatttcgaaaagcaggaaaacatccttcaggagagagtgaattcactagacaaggaagaacaatatatgcagtggaagattaacgagaccctgaaggagatggaagaaaagaaaaacgagatcaccaaactgcaagaacaggagaaagctctgtatgcaggcttccaggcagccattggggagaacaacaagttcgcaaactttctaatgaaggtcctcaagaagaagatcaagagagtcaagaagaaggaagtggaaggtgacgctgacgaggacgaagaatcggaggagagcagcgaggaagagtcctcgcttgagagcgacgaagacgaaagtgagagtgaagatgaggtcttcgatgactccatctgccctactaactgtgatgtcgccctattcgagcttgccctccacttgcgggagaagaggttggacattgaggaagctcttgtggaggagaagaagattgttgacaacctgaaaaaggagtatgacactctgagcaaaaaggtgaaaatcgtcgcaaccaaccttaatgccgccgaggaggccctcgaagcctatcagcgggaaaagcagcagcggctgaatgagctgctggtggtcataccactgaaattgcaccagatcgaatatgttgtgtttggcgaaataccgtccgacctatccgggaccctggtgttcagcaaccatgccctgaggcgcctgcaagaacgaatccatgagttacaggaagaaaattctaagcagcagaagctgaacaaggaatggagggaacgaaggaaacagctcattcgcgaaaagcgggagatgaccaagacaattcacaagatggaagagactgtgaggcaattgatgatatcaaagtttggtcgggtggttaacttggaagctctgcagaccctgtcagtgaataccaccttagaagagttaaagattcgcaaattgagaaaggaactggccaacgctaaggagatgaaaatgtgggaagagaagattgcccagatgcgctgggagctgatgatgaaaacaaaggaacacacccgaaagctttatcagatgaatgacttgtgcatagaaaaaaaaaagttagactcccgactcaatacactgcaaaaccagcagaacccaggtaacggcctgagttag

SEQ ID NO: 267928 - DNA, 1206 bp, Artificial Sequence
  derived and/or modified sequence
atgaagctgagtgacctgcaccacgtgaccctcttccaggagatcctgctgctgaagaactttgagaagcaggagaacatcctgcaggagcgggtgaacagcctggacaaggaggagcagtacatgcagtggaagatcaatgagaccctgaaggagatggaggagaagaagaatgagatcaccaagctgcaggagcaggagaaggccctgtatgccggcttccaggccgccatcggggagaacaacaagtttgccaacttcctgatgaaggtgctgaagaagaagatcaagagggtgaagaagaaggaggtggagggagatgctgatgaagatgaggagagcgaggagagcagcgaggaggagagcagcctggagagtgatgaagatgaaagtgaaagtgaagatgaggtgtttgatgacagcatctgccccaccaactgtgatgtggccctgtttgagctggccctgcacctgcgggagaagaggctggacatcgaggaggccctggtggaggagaagaagatcgtggacaacctgaagaaggagtatgacaccctgagcaagaaggtgaagatcgtggccaccaacctgaatgctgctgaggaggccctggaggcctaccagcgggagaagcagcagaggctgaatgagctgctggtggtgatccccctgaagctgcaccagattgaatatgtggtgtttggagagatccccagcgacctgagcggcaccctggtgttcagcaaccacgccctgcggcggctgcaggagcgcatccacgagctgcaggaggagaacagcaagcagcagaagctgaacaaggagtggagggagaggaggaagcagctgatccgggagaagcgggagatgaccaagaccatccacaagatggaggagaccgtgcggcagctgatgatcagcaagtttggccgggtggtgaacctggaggccctgcagaccctgtctgtgaacaccaccctggaggagctgaagatcaggaagctgaggaaggagctggccaatgccaaggagatgaagatgtgggaggagaagatcgcccagatgcgctgggagctgatgatgaagaccaaggagcacaccaggaagctgtaccagatgaatgacctgtgcatcgagaagaagaagctggacagccggctgaacaccctgcagaaccagcagaaccctggaaatggcctgtcctag

SEQ ID NO: 267929 - DNA, 1206 bp, Artificial Sequence
  derived and/or modified sequence
atgaagctgagcgacctgcaccacgtgaccctgttccaggagatcctgctcttaaaaaattttgaaaagcaagaaaatatcctgcaggaacgggtgaacagcctggacaaggaggaacaatatatgcagtggaagattaatgagacattgaaagagatggaagagaaaaagaacgagataacgaagctgcaggagcaggagaaggccttatatgcaggcttccaggccgccatcggcgaaaacaacaagttcgcgaactttctcatgaaagtgctgaaaaagaagatcaaaagggtgaaaaagaaagaggtcgagggagacgctgatgaagacgaggaaagtgaggagtctagcgaagaggagtcctccctggaatccgacgaggatgagagcgaaagtgaagatgaagtcttcgatgatagcatttgccctacaaattgcgacgttgcactgttcgaattagctcttcacctgagggagaaacgtctggacattgaagaagctctggtagaggagaagaagatcgtggacaatctgaagaaagagtacgatacccttagtaagaaggtgaagatcgtggccactaacctgaacgcagcagaagaagccctagaagcctaccaaagggagaagcagcagaggcttaatgagctcctcgttgtcattccgctcaagctgcaccagatcgagtatgtagtgttcggcgaaataccatcagatctctctggcactctggtcttttctaatcacgccctccggcgcctgcaggaacggattcatgaactgcaggaagaaaattcaaagcagcaaaaactgaataaggagtggagagaacgtaggaagcagctgatccgtgaaaagcgggagatgaccaaaacaatccacaaaatggaagagacagtgagacagcttatgatatccaagtttggaagggtggttaaccttgaagcccttcagacgctatctgtcaacacaactctggaggagctcaagatacggaaactgaggaaagagttggcaaatgcaaaggagatgaaaatgtgggaggagaagatcgcgcaaatgaggtgggagttgatgatgaagacaaaagagcacacgcgcaagctctatcagatgaacgacttatgtatcgagaaaaaaaaactagacagccggttgaataccttgcagaatcagcagaacccagggaacggattgagctag

SEQ ID NO: 267930 - DNA, 1206 bp, Artificial Sequence
  derived and/or modified sequence
atgaaactttcagatcttcatcacgtcactctctttcaggaaatccttctcttgaagaacttcgaaaagcaggagaatatcctccaggagcgggtgaattccctggacaaggaggaacagtatatgcagtggaaaatcaacgaaacgctcaaagagatggaagagaaaaagaacgagatcactaagctgcaagagcaggagaaggcactctatgctggattccaggctgcgatcggcgagaataacaaatttgctaatttcctcatgaaagtgctcaagaagaaaatcaagcgggtgaagaagaaagaggttgaaggagacgccgacgaagacgaagaatcagaggaatcttccgaggaagagtcttcattggagagcgacgaagacgagagcgagtccgaggacgaggtgttcgatgattcgatttgccctaccaactgtgatgtggccttgttcgagttagctctgcatcttagggagaagcggctcgacatcgaagaggctctggtggaggagaagaagatcgtggacaaccttaagaaggagtacgatacccttagcaagaaggtgaagatcgtcgcaacgaacctgaacgctgcagaagaagctctggaggcctaccagcgcgagaaacagcagcgcctgaatgagctcttagtggtgatacctttgaagcttcatcagattgagtatgtggtatttggtgagattccctccgaccttagcggcactcttgttttctctaaccatgcactacggaggctgcaagagagaatccatgagctgcaggaggagaactccaaacagcagaagcttaataaggagtggagggaaaggaggaagcaactcatcagagaaaaaagagagatgacaaagacaatccataagatggaggagacagtaagacaactgatgatttctaagtttggtagagttgtgaacctggaggccctccagaccctatcagttaacactacactcgaagaacttaaaatacggaaattgcgtaaagaactggccaacgccaaggagatgaaaatgtgggaggagaaaatcgcccagatgagatgggagttaatgatgaagaccaaggagcacactcgcaagctgtaccagatgaatgacttatgcatagaaaaaaagaagctagacagcagactcaataccctgcaaaatcagcagaaccctggtaacgggctgtcctag

SEQ ID NO: 267931 - DNA, 2218 bp, Artificial Sequence
  derived and/or modified sequence
tcgatgcagaactccgtctccttagacatcagaaactaaaactagatactcagatgaaattatctgacctgcaccatgtcaccttatttcaagaaatacttctcctgaagaattttgaaaaacaggagaacatacttcaagaacgtgttaattccttagacaaagaggaacagtacatgcaatggaaaataaatgaaactcttaaagagatggaagagaaaaagaatgaaatcaccaaactccaggagcaagaaaaggcactctatgctggttttcaagcagccattggagaaaacaataaatttgcaaacttcctcatgaaggtcctaaagaagaagattaaacgggtaaagaaaaaagaagttgaaggagatgctgatgaagatgaggagagtgaggaatcaagtgaagaagaatctagcttggagagtgatgaagatgagtctgaatcagaagatgaggtttttgatgattctatttgcccaacaaattgtgatgtggctctttttgagctggcccttcaccttcgagagaaaaggctggacattgaggaggctttagttgaagaaaagaaaattgttgataacctcaaaaaggaatatgatacattgtcaaaaaaagtgaaaattgtggcaactaatctgaatgcagcagaggaggccctggaggcttatcagcgagagaagcagcagcggctgaatgaactgctagttgtgattccgctcaagctccaccagatagagtatgtggtatttggagaaatacctagcgatctttctggtactttggtcttctctaaccatgccttgagacggctgcaagaacgaatccatgagctccaggaggaaaattccaagcagcaaaaacttaacaaagaatggagagagagacgtaaacagctcatccgagaaaagagagaaatgacaaaaaccatacacaaaatggaggaaacagtccggcagctcatgatcagcaagtttggccgtgtggtaaatctagaagcccttcaaacgctttctgttaatacaacacttgaagaactgaagatcagaaaacttcgaaaggagctagcaaatgcgaaagagatgaagatgtgggaggaaaagattgctcaaatgcgatgggaactgatgatgaagacaaaagaacacaccagaaagctttatcagatgaatgatttgtgtattgaaaagaagaaacttgattctcggttgaatacactacagaatcagcagaaccctggaaatggtctaagctaagtgttccaacagtttggtcctctgaagaagagcatcagcatcacctgggaacttgtttaaaatggcaatgccttccagggccctcgggaagcagatgttgtggcaagagaggaggtcactgaattgatccaactccaggcggaaaggatttcggccttaaaggaggagattgctcttttgcgtaggaaaggcagtcttatcctcccacccattcagtctccacgagagaaagagatacagcccgcagacctttgagtttgctattttctcaaacccatacaagatttctgacataactcactggaagttctgtctcctcatcacctccaacaatcttattactttaaactgaactcgcctgaaagtgtaaaaccagatccagtcacgttaagtcactttaagaatctctctacaatttggttatcttagaactgactgcagcacccaacctctgttatgaaactgaatcattttagatgtttcgaacctactagattgaatatgaagtctcggaaggctgtgtttcatgattgcagcaaatcacctgtaatatattttgttttaggaaaatttgatttgggggtatcctgaatttttagcccttggcaagaaaaactatcattcagcaattcatgagaaaactttgttttcttgatccttagaaaataaacttagatgttattaagtgttctctgagaggatgcaggagaaaaggacattttgtcagctatatcttagaatagaaatgcaaatttcagttttggcattgttgacttcataaagcagtgttttgagggctcaggattcaggaaatacaaacagacatggcagagcagtttgctttgggttggcagaaagcaggaaaataaccagccttcttggattgcccacagtttttgtagactcctcagttctgagtggagcagaggggcatgcttaataaaacagtcaataaagag

SEQ ID NO: 267932 - protein, 359 aa, Artificial Sequence
  derived and/or modified sequence
MAPLGTTVLLWSLLRSSPGVERVCFRARIQPWHGGLLQPLPCSFEMGLPRRRFSSEAESGSPETKKPTFMDEEVQSILTKMTGLNLQKTFKPAIQELKPPTYKLMTQAQLEEATRQAVEAAKVRLKMPPVLEERVPINDVLAEDKILEGTETTKYVFTDISYSIPHRERFIVVREPSGTLRKASWEERDRMIQVYFPKEGRKILTPIIFKEENLRTMYSQDRHVDVLNLCFAQFEPDSTEYIKVHHKTYEDIDKRGKYDLLRSTRYFGGMVWYFVNNKKIDGLLIDQIQRDLIDDATNLVQLYHVLHPDGQSAQGAKDQAAEGINLIKVFAKTEAQKGAYIELTLQTYQEALSRHSAAS

SEQ ID NO: 267933 - protein, 168 aa, Artificial Sequence
  derived and/or modified sequence
MAPLGTTVLLWSLLRSSPGVERVCFRARIQPWHGGLLQPLPCSFEMGLPRRRFSSEAESGSPETKKPTFMDEEVQSILTKMTGLNLQKTFKPAIQELKPPTYKLMTQAQLEEATRQAVEAAKVRLKMPPVLEERVPINDVLAEDKILEGTETTKYVFTDISYSIPHRC

SEQ ID NO: 267934 - DNA, 1080 bp, Artificial Sequence
  derived and/or modified sequence
atggcgcctttaggtaccactgtcctgttatggtccttgctgcggtcaagtccaggtgtggagcgggtatgttttcgggcaagaattcaaccctggcacggtggcctgctgcaacctcttccctgttctttcgaaatgggactccctcgccgtaggttctccagcgaagcagagtcagggagtccggagactaagaagcccacattcatggacgaagaggtgcagagtatcctgacgaaaatgactggcctgaacctgcaaaagacattcaagcccgccatccaggaacttaaaccccctacctataagctaatgacccaagcccagctagaagaagcgacgcgccaggccgtcgaagctgcaaaggtgaggcttaaaatgcccccagtactcgaggagagggtgccaattaatgatgtactggccgaggataagattttggaagggacagaaacgactaagtatgtctttacggatataagttatagcatcccgcacagggaacggtttattgttgttcgtgaacctagcgggactctcagaaaggcctcttgggaagagcgcgatagaatgatccaggtgtactttccaaaggaaggtagaaagattttaacacccataatctttaaggaagaaaatctccgtactatgtattctcaggatagacatgtagacgtgctgaacctctgcttcgcccagtttgagcccgacagcaccgaatatattaaagttcaccacaagacttatgaagacatcgacaaacgcggaaaatatgatcttctacggagtacccggtatttcggtggcatggtgtggtacttcgtcaacaacaaaaaaatcgacggacttctcatagaccaaatccaacgggacctgatcgacgacgctacaaatcttgtgcaactgtaccatgtgctgcaccctgacggacaaagcgcacagggagctaaagaccaagctgcggaggggatcaacctgattaaagtgttcgccaaaactgaagcccagaaaggcgcatacatagaactcactctgcagacataccaagaagccctgtcgagacactcggccgcctcatag

SEQ ID NO: 267935 - DNA, 507 bp, Artificial Sequence
  derived and/or modified sequence
atggctcccttgggtaccaccgtgctattgtggagtctccttcgcagttccccaggcgttgagcgggtgtgttttcgcgcccgcattcaaccttggcatggaggactgctgcagcccctaccctgctcatttgagatgggcttgccaaggcgaaggttctctagcgaggctgagtctggtagtccggagacaaaaaagcccacattcatggacgaagaggtgcagtcgatcttgacgaagatgactggactgaacctgcagaagacatttaagcctgctattcaagaattgaaacccccaacctataaactcatgacgcaggcacagctcgaagaggctactcggcaggctgttgaggcggctaaggtcagattgaaaatgccacccgtgctagaagaacgtgtgcctattaatgacgtgctggctgaggataagatccttgaagggaccgagaccaccaaatacgtgtttaccgatataagctactcgattccccaccgctgctag

SEQ ID NO: 267936 - DNA, 1080 bp, Artificial Sequence
  derived and/or modified sequence
atggcccccctgggcaccaccgtgctgctgtggagcctgctgcggagcagccctggggtggagcgggtgtgcttccgggcccgcatccagccctggcatggaggcctgctgcagcccctgccctgcagctttgagatgggcctgccccggcggcgcttcagcagcgaggccgagagcggcagccctgagaccaagaagcccaccttcatggatgaggaggtgcagagcatcctgaccaagatgacaggcctgaacctgcagaagaccttcaagccagccatccaggagctgaagccacccacctacaagctgatgacccaggcccagctggaggaggccacccggcaggccgtggaggccgccaaggtgcggctgaagatgcctcctgtgctggaggagcgggtgcccatcaatgatgtgctggccgaggacaagatcctggagggcacagagaccaccaagtatgtgttcacagacatctcctacagcatcccccaccgggagcgcttcatcgtggtgcgggagcccagcggcaccctgaggaaggcctcctgggaggagcgggacaggatgatccaggtgtacttccccaaggagggcaggaagatcctgacccccatcatcttcaaggaggagaacctgcggaccatgtacagccaggacagacatgtggatgtgctgaacctgtgctttgcccagtttgagccagacagcacagagtacatcaaggtgcaccacaagacctatgaggacatcgacaagaggggcaagtatgacctgctgcggagcacccgctactttggaggcatggtgtggtactttgtgaacaacaagaagattgatggcctgctgattgaccagatccagagggacctgattgatgatgccaccaacctggtgcagctgtaccacgtgctgcacccagatggccagagcgcccagggcgccaaggaccaggccgctgagggcatcaacctgatcaaggtgtttgccaagacagaggcccagaagggggcctacatcgagctgaccctgcagacctaccaggaggccctgagccgccacagcgctgccagctag

SEQ ID NO: 267937 - DNA, 507 bp, Artificial Sequence
  derived and/or modified sequence
atggcccccctgggcaccaccgtgctgctgtggagcctgctgcggagcagccctggggtggagcgggtgtgcttccgggcccgcatccagccctggcatggaggcctgctgcagcccctgccctgcagctttgagatgggcctgccccggcggcgcttcagcagcgaggccgagagcggcagccctgagaccaagaagcccaccttcatggatgaggaggtgcagagcatcctgaccaagatgacaggcctgaacctgcagaagaccttcaagccagccatccaggagctgaagccacccacctacaagctgatgacccaggcccagctggaggaggccacccggcaggccgtggaggccgccaaggtgcggctgaagatgcctcctgtgctggaggagcgggtgcccatcaatgatgtgctggccgaggacaagatcctggagggcacagagaccaccaagtatgtgttcacagacatctcctacagcatcccccaccgctgctag

SEQ ID NO: 267938 - DNA, 1099 bp, Artificial Sequence
  derived and/or modified sequence
atggcgcccctcggaacaactgtattgctgtggagcctcttgaggagttctccgggcgtggaacgggtctgtttccgggctcgaatccagccctggcacggtggcctgctccaaccgctaccttgctctttcgagatggggctgccacgccgccggttcagctccgaggccgaatctggtagcccagagaccaagaaacctacatttatggatgaggaagttcaaagcatactcacgaaaatgacaggcttgaacttgcagaagacttttaagccagctatacaagaactgaagccaccaacctataagctaatgactcaggcacagttggaagaggctacaagacaggcagttgaggcagctaaagtacgattaaaaatgccaccagttctggaagagcgagtaccaataaatgatgtgttagctgaagataagattttggaaggaacagaaacaaccaaatatgtgtttactgatatatcatatagcataccacaccgggagcgttttattgtcgtcagagaaccaagtggcacactacgcaaagcctcttgggaagaacgggaccgaatgatacaagtttatttcccaaaagaaggtcgtaaaattttgacaccaataattttcaaggaagaaaatcttaggactatgtatagccaggacaggcatgttgatgtcctcaatctctgctttgcccagtttgagccagattccacagagtatatcaaggttcatcacaagacctatgaagatatagataaacgtggaaaatatgaccttttacgttcaacaagatactttggtggaatggtgtggtattttgtaaataataaaaagattgatggtttgctgattgaccagattcagagagatttaatcgatgatgcaaccaacttggtccagctgtatcacgtgctccatccagatggccagtcggctcaaggggccaaggatcaggctgctgagggaataaatttaatcaaggtctttgcaaaaacagaagcacagaagggagcctatatagaactaacactgcagacttatcaagaagcactcagtcgccattctgcagcttcctaaaaatattttaaaaatacat

SEQ ID NO: 267939 - DNA, 1401 bp, Artificial Sequence
  derived and/or modified sequence
taatcatggcgcccctcggaacaactgtattgctgtggagcctcttgaggagttctccgggcgtggaacgggtctgtttccgggctcgaatccagccctggcacggtggcctgctccaaccgctaccttgctctttcgagatggggctgccacgccgccggttcagctccgaggccgaatctggtagcccagagaccaagaaacctacatttatggatgaggaagttcaaagcatactcacgaaaatgacaggcttgaacttgcagaagacttttaagccagctatacaagaactgaagccaccaacctataagctaatgactcaggcacagttggaagaggctacaagacaggcagttgaggcagctaaagtacgattaaaaatgccaccagttctggaagagcgagtaccaataaatgatgtgttagctgaagataagattttggaaggaacagaaacaaccaaatatgtgtttactgatatatcatatagcataccacaccggtgttgatggaagtttcatctatgttatcttcagaacacatttagagactcctacacctctgaaaacttgagagtcagtactgtttggttaatttatacattaatcaggagcgttttattgtcgtcagagaaccaagtggcacactacgcaaagcctcttgggaagaacgggaccgaatgatacaagtttatttcccaaaagaaggtcgtaaaattttgacaccaataattttcaaggaagaaaatcttaggactatgtatagccaggacaggcatgttgatgtcctcaatctctgctttgcccagtttgagccagattccacagagtatatcaaggttcatcacaagacctatgaagatatagataaacgtggaaaatatgaccttttacgttcaacaagatactttggtggaatggtgtggtattttgtaaataataaaaagattgatggtttgctgattgaccagattcagagagatttaatcgatgatgcaaccaacttggtccagctgtatcacgtgctccatccagatggccagtcggctcaaggggccaaggatcaggctgctgagggaataaatttaatcaaggtctttgcaaaaacagaagcacagaagggagcctatatagaactaacactgcagacttatcaagaagcactcagtcgccattctgcagcttcctaaaaatattttaaaaatacatttattttactaaatactgactacatttctctgttaatattgagctaaatgttaaaaaatggccagattaaaagatatcaatttgtagttctccctacaaagcaaaaattattaccctactcacttttcgtaggctacaaggatatttgagtgcctggttatgaatttctcaaatcatgttagatgagcgt

SEQ ID NO: 267940 - DNA, 1080 bp, Artificial Sequence
  derived and/or modified sequence
atggcccccctgggcaccaccgtgctgctgtggagcctgctgcggagttccccgggcgtggagagagtgtgtttccgtgctcggatacagccatggcatggcggcttactgcaaccgctcccatgctcttttgaaatgggactgcctagaaggcgcttctcctctgaggccgaatcaggaagtcctgaaaccaaaaagcccacattcatggatgaggaggtacaatctattctaactaagatgacaggtttgaacctacagaagacattcaaacccgcaattcaagagctgaaaccccccacatacaagctgatgacccaggcacagttggaagaagctacgcgtcaggcagttgaagctgccaaggttcggttaaaaatgcctcctgtgctcgaagaaagagtccccattaatgacgtgctggccgaggataagatcctggagggcaccgagactaccaaatacgtgtttacagacatatcatactccatcccacaccgggagcgattcatcgttgttcgggaaccctccggtactcttcggaaggcgtcatgggaggagcgggatcgcatgatacaggtgtacttcccaaaggaggggcgcaaaattcttacccctattatcttcaaggaagaaaacctgaggacaatgtattcccaggacaggcacgtagacgtgctgaatctgtgtttcgcgcagtttgaaccagactctaccgagtacatcaaggtgcaccataagacttatgaggatatcgacaaaagaggaaagtatgatctgttgcggagtacccgttattttggaggcatggtgtggtattttgtgaacaacaagaaaatcgacgggttacttatagatcagattcagcgggatctgatcgatgatgctaccaatcttgtccagctgtaccacgttctccacccagacggtcaaagtgcccagggagcgaaggaccaggcggcagaaggtatcaacctgatcaaggtttttgccaagactgaggcacagaagggcgcgtacatcgagctgactctccagacgtaccaggaagcactctccaggcatagtgccgcgtcctag

SEQ ID NO: 267941 - DNA, 507 bp, Artificial Sequence
  derived and/or modified sequence
atggcccccctgggcaccaccgtgctgctgtggagcctgctgcggtccagtcccggtgttgaaagggtgtgctttagggcacggattcagccatggcacgggggcctgcttcagccacttccttgtagtttcgagatggggctgccgcgaagaagattctccagtgaggctgaaagtggcagccccgaaacaaaaaagcccacatttatggacgaggaggtgcaatccattctcaccaaaatgacaggacttaatctccagaaaacctttaagcccgccatccaagagctaaagccccccacatataaactcatgactcaggcccagctcgaggaggccacccggcaggccgttgaagctgcgaaggtgaggctgaaaatgcctccagttctagaagagagggttccaattaatgatgtgttggctgaggacaagatcctagaaggcacggagactacaaagtacgtcttcacagatatcagctattccattccgcacagatgctag

SEQ ID NO: 267942 - DNA, 1080 bp, Artificial Sequence
  derived and/or modified sequence
atggctcctcttggcactactgtgctgctttggtcactcttgaggtcctcccctggagtagagcgcgtctgcttcagggccagaattcagccatggcacgggggactgctacagcccctgccatgctccttcgagatgggactgcctcgtaggaggttctccagcgaggccgaatccggcagccccgaaaccaaaaagcctacttttatggatgaggaggttcaaagtattttgacaaagatgacgggactaaatctgcagaaaaccttcaaaccagcaatccaggagttgaagccccctacctataagctcatgacacaggcccagctggaggaggccacgcggcaagcagtggaggctgccaaggttcgactgaagatgcctcccgttctggaggaacgcgtgccaatcaacgatgtgttggctgaggataagattctcgaaggaacagagaccaccaagtatgttttcacagacatttcgtatagtatcccacacagagaaaggttcattgtggtccgcgaaccctcaggcactcttaggaaagcttcttgggaggagcgggaccggatgattcaggtgtactttcccaaagaagggaggaagattctgacgcccattatctttaaagaagagaacctgcgtaccatgtactcccaggatagacacgtggatgtgctaaatctatgtttcgcccagttcgagccagacagtaccgaatatatcaaagtacaccacaaaacttacgaggacattgacaagcggggaaaatatgacctgcttcgctctacccgatacttcggtgggatggtgtggtacttcgtgaataataaaaaaattgacggactcctgattgaccagatacaacgggacttgattgatgacgccacgaatctcgtccagctctatcacgtcctgcatcccgacggtcagtccgctcagggagccaaagaccaggctgccgagggcataaatctgataaaggtttttgccaaaacggaagcccaaaaaggtgcatatattgaactgactctgcagacctaccaggaggccctctcccgccatagcgccgcaagctag

SEQ ID NO: 267943 - DNA, 507 bp, Artificial Sequence
  derived and/or modified sequence
atggctcccctcgggacaacagtgctgttatggagcctcctgagaagctcccccggtgtggagagagtgtgcttcagagctagaatccagccttggcacggcggattgctgcaaccgctcccctgctcattcgaaatgggtttacccagaagaaggttttcttccgaagccgaatccggctctcccgagactaaaaaaccaactttcatggacgaggaagttcagagtatcttgacaaaaatgactggcctgaatctacaaaaaacgtttaaacctgccatacaggagctgaagcccccaacatacaagttaatgacccaagcgcaacttgaagaggcgacccgtcaggctgtggaagctgccaaggtccgtctcaagatgccaccagtattggaggaaagagtgcccattaatgatgttctggctgaggacaagattctggagggaactgagaccaccaagtatgtttttacagacatcagctacagcatcccccatcgttgttag

SEQ ID NO: 267944 - DNA, 1080 bp, Artificial Sequence
  derived and/or modified sequence
atggcccccctgggcaccaccgtgctgctgtggagcctgctgagaagcagccccggcgtggagagagtgtgcttcagagccagaatccagccctggcacggcggcctgctgcagcccctgccctgcagcttcgagatgggcctgcccagaagaagattcagcagcgaggccgagagcggcagccccgagaccaagaagcccaccttcatggacgaggaggtgcagagcatcctgaccaagatgaccggcctgaacctgcagaagaccttcaagcccgccatccaggagctgaagccccccacctacaagctgatgacccaggcccagctggaggaggccaccagacaggccgtggaggccgccaaggtgagactgaagatgccccccgtgctggaggagagagtgcccatcaacgacgtgctggccgaggacaagatcctggagggcaccgagaccaccaagtacgtgttcaccgacatcagctacagcatcccccacagagagagattcatcgtggtgagagagcccagcggcaccctgagaaaggccagctgggaggagagagacagaatgatccaggtgtacttccccaaggagggcagaaagatcctgacccccatcatcttcaaggaggagaacctgagaaccatgtacagccaggacagacacgtggacgtgctgaacctgtgcttcgcccagttcgagcccgacagcaccgagtacatcaaggtgcaccacaagacctacgaggacatcgacaagagaggcaagtacgacctgctgagaagcaccagatacttcggcggcatggtgtggtacttcgtgaacaacaagaagatcgacggcctgctgatcgaccagatccagagagacctgatcgacgacgccaccaacctggtgcagctgtaccacgtgctgcaccccgacggccagagcgcccagggcgccaaggaccaggccgccgagggcatcaacctgatcaaggtgttcgccaagaccgaggcccagaagggcgcctacatcgagctgaccctgcagacctaccaggaggccctgagcagacacagcgccgccagctag

SEQ ID NO: 267945 - DNA, 507 bp, Artificial Sequence
  derived and/or modified sequence
atggcccccctgggcaccaccgtgctgctgtggagcctgctgagaagcagccccggcgtggagagagtgtgcttcagagccagaatccagccctggcacggcggcctgctgcagcccctgccctgcagcttcgagatgggcctgcccagaagaagattcagcagcgaggccgagagcggcagccccgagaccaagaagcccaccttcatggacgaggaggtgcagagcatcctgaccaagatgaccggcctgaacctgcagaagaccttcaagcccgccatccaggagctgaagccccccacctacaagctgatgacccaggcccagctggaggaggccaccagacaggccgtggaggccgccaaggtgagactgaagatgccccccgtgctggaggagagagtgcccatcaacgacgtgctggccgaggacaagatcctggagggcaccgagaccaccaagtacgtgttcaccgacatcagctacagcatcccccacagatgctag

SEQ ID NO: 267946 - DNA, 312 bp, Artificial Sequence
  derived and/or modified sequence
atgtgcggcagctactaccggaactacaacggcggccacggctacggctgctgcggctacggtggccttggctgtgggtacggaggctgtggttatggctgttgtggttatggtgggctggggttcggatacgggggcttggattgcggatacggcggcctggggtgtggctatggctccttctgcggatgcggttacagaggcttagactgcggatacgggtgcggctacggttatgtctcccattcattctgcggttgtggctaccgctgcggttcagggtacggcagcagtttcgggtactattattag

SEQ ID NO: 267947 - DNA, 519 bp, Artificial Sequence
  derived and/or modified sequence
atggcttctgggccacactcaacagcaacagccgcagcagctgcaagttctgcggcaccctcagctggtgggagctcttccggcaccaccaccaccacaaccacaacgacaggcggcatcttgataggggaccggctttatagcgaggtcagccttacaatcgaccacagtctgattccggaggaacggctctcacctactcccagcatgcaggatggactggatttgccttcagagaccgatctacgcattctcgggtgcgagctcattcaggccgcgggcattctcctccggctgccccaggttgctatggcaacaggacaggtgctatttcataggtttttttatagcaaatccttcgttaagcacagcttcgagatcgttgcgatggcttgtatcaacctcgcgagtaaaattgaagaagcccctaggcggattcgagacgttataaacgtgtttcaccatcttcggcaacttaggggaaaatcggatcagctgcacttaccgaagcctgggtag

SEQ ID NO: 267948 - DNA, 519 bp, Artificial Sequence
  derived and/or modified sequence
atggccagcggcccccacagcacagccacagctgctgctgctgccagcagcgctgcccccagcgctgggggcagcagcagcggcaccaccaccaccaccaccaccaccactggaggcatcctgattggagaccggctgtacagcgaggtgtccctgaccatcgaccacagcctcatccctgaggagcggctgagccccacccccagcatgcaggacggcctggacctgcccagcgagacagacctgcgcatcctgggctgtgagctgatccaggccgccggcatcctgctgcggctgccccaggtggccatggccaccggccaggtgctcttccaccgcttcttctacagcaagagctttgtgaagcacagctttgaaattgtggccatggcctgcatcaacctggccagcaagattgaggaggccccccggcgcatcagagatgtgatcaacgtgttccaccacctgcggcagctgcggggcaagagtgaccagctgcacctgcccaagccaggatag

SEQ ID NO: 267949 - DNA, 519 bp, Artificial Sequence
  derived and/or modified sequence
atggccagcggcccccacagcaccgccaccgccgccgccgccgccagttctgccgctcctagtgccgggggctcctcatctggtaccacgaccactaccaccacaaccactggcggcattctgattggagataggctgtatagcgaggtttctttgacaatcgatcactccctgatacccgaagagaggctgagcccaaccccctctatgcaggatggtcttgacctgcctagcgagacggacctaagaatcctaggctgcgaactaatccaggctgccggcatccttctgagattgcctcaggtggctatggctaccggacaggtgctgttccacaggtttttttatagcaagtccttcgtgaagcattctttcgaaatcgtggctatggcctgtatcaacctcgcgtccaaaatcgaggaggcaccccgcaggatcagagatgtaatcaacgtcttccaccaccttaggcagcttcgaggaaaaagcgatcaacttcaccttccaaaacccggatag

SEQ ID NO: 267950 - DNA, 519 bp, Artificial Sequence
  derived and/or modified sequence
atggccagcggtcctcactctacagccactgcagccgctgctgcgagcagcgctgccccttctgcgggaggcagtagcagcggaacaacaacaactaccactactaccactgggggtatactgatcggagacagactatactccgaggtctctctcactattgaccacagccttattcccgaggaaagattgtctccaaccccctcaatgcaggatggattggatctgcctagcgaaacagatctccgcattctgggatgtgagctgatacaagcagccggaattctgctacgtctgccccaggtggccatggccacaggccaggtactttttcacagatttttctattccaaaagcttcgtgaaacactcttttgaaatcgttgcaatggcttgtattaacctggcatccaaaatcgaagaagcaccgcgtagaataagggacgtgattaatgttttccatcacctgcgccagctcaggggcaaaagtgaccaactgcatctgcctaaacctgggtag

SEQ ID NO: 267951 - DNA, 1118 bp, Artificial Sequence
  derived and/or modified sequence
atagggtccacagccctgtgttcttcaaatactgtaaagcagccctctccagattccttgagggtcactttatattacacattcgtccacacaggacaacaaagtcaccacttccacccgccaaagcgcgctcaggtcggccgccacttcccttggtacacgcggaacgcaagccgcgccgaggctaaaggaagaggccggaatgcagggcgaaggggcgcagagatgctagccaatgctgccacctctattttgggtataagggatcttgtaaagctccgttattcgtgtggctatcacaaacaaggtggtttcgaccggccttggctagagaaggcctcctcagcctctgaggatcccaaggtctgtcgcagcacccaacactcccctcgcaggcccagatgccgagggcggaggcgcggcctggagggactagttggcgcgcggctgcccggcgtggtgacgtcagggcggaagcgcacgcggcgtgaagcggcccagaacccggcggtcacgggaatatccgtcgcgccgagaacgctggttagtcttgtttcgggttccggctgcgttgggcttgcgtgcggctcgctaagactatggcgtccgggcctcattcgacagctactgctgccgcagccgcctcatcggccgccccaagcgcgggcggctccagctccgggacgacgaccacgacgacgaccacgacgggagggatcctgatcggcgatcgcctgtactcggaagtttcacttaccatcgaccactctctgattccggaggagaggctctcgcccaccccatccatgcaggatgggctcgacctgcccagtgagacggacttacgcatcctgggctgcgagctcatccaggccgccggcattctcctccggctgccgcaggtggcgatggcaacggggcaggtgttgtttcatcgttttttctactccaaatctttcgtcaaacacagtttcgagattgttgctatggcttgtattaatcttgcatcaaaaatcgaagaagcacctagaagaataagagatgtgattaatgtattccaccacctccgccagttaagaggaaaaagcgaccagctacatttaccaaagcctgggtga

SEQ ID NO: 267952 - DNA, 519 bp, Artificial Sequence
  derived and/or modified sequence
atggccagcggcccccacagcaccgccaccgccgccgccgccgccagcagcgccgcccccagcgccggcggcagcagcagcggcaccaccaccaccaccaccaccaccaccggcggcatcctgatcggcgacagactgtacagcgaggtgagcctgaccatcgaccacagcctgatccccgaggagagactgagccccacccccagcatgcaggacggcctggacctgcccagcgagaccgacctgagaatcctgggctgcgagctgatccaggccgccggcatcctgctgagactgccccaggtggccatggccaccggccaggtgctgttccacagattcttctacagcaagagcttcgtgaagcacagcttcgagatcgtggccatggcctgcatcaacctggccagcaagatcgaggaggcccccagaagaatcagagacgtgatcaacgtgttccaccacctgagacagctgagaggcaagagcgaccagctgcacctgcccaagcccggctag

SEQ ID NO: 267953 - protein, 602 aa, Artificial Sequence
  derived and/or modified sequence
MHSKVTIICIRFLFWFLLLCMLIGKSHTEDDIIIATKNGKVRGMNLTVFGGTVTAFLGIPYAQPPLGRLRFKKPQSLTKWSDIWNATKYANSCCQNIDQSFPGFHGSEMWNPNTDLSEDCLYLNVWIPAPKPKNATVLIWIYGGGFQTGTSSLHVYDGKFLARVERVIVVSMNYRVGALGFLALPGNPEAPGNMGLFDQQLALQWVQKNIAAFGGNPKSVTLFGESAGAASVSLHLLSPGSHSLFTRAILQSGSFNAPWAVTSLYEARNRTLNLAKLTGCSRENETEIIKCLRNKDPQEILLNEAFVVPYGTPLSVNFGPTVDGDFLTDMPDILLELGQFKKTQILVGVNKDEGTAFLVYGAPGFSKDNNSIITRKEFQEGLKIFFPGVSEFGKESILFHYTDWVDDQRPENYREALGDVVGDYNFICPALEFTKKFSEWGNNAFFYYFEHRSSKLPWPEWMGVMHGYEIEFVFGLPLERRDNYTKAEEILSRSIVKRWANFAKYGNPNETQNNSTSWPVFKSTEQKYLTLNTESTRIMTKLRAQQCRFWTSFFPKVLEMTGNIDEAEWEWKAGFHRWNNYMMDWKNQFNDYTSKKESCVGL

SEQ ID NO: 267954 - protein, 64 aa, Artificial Sequence
  derived and/or modified sequence
MTKLRAQQCRFWTSFFPKVLEMTGNIDEAEWEWKAGFHRWNNYMMDWKNQFNDYTSKKESCVGL

SEQ ID NO: 267955 - DNA, 2454 bp, Artificial Sequence
  derived and/or modified sequence
gagctttgtcagtaacagttgattgttacattcagtaacactgaatgtcagtgcagtccaatttacaggctggagcagcagctgcatcctgcatttccccgaagtattacatgattttcactccttgcaaactttgccatctttgttgcagagaatcggaaatcaatatgcatagcaaagtcacaatcatatgcatcagatttctcttttggtttcttttgctctgcatgcttattgggaagtcacatactgaagatgacatcataattgcaacaaagaatggaaaagtcagagggatgaacttgacagtttttggtggcacggtaacagcctttcttggaattccctatgcacagccacctcttggtagacttcgattcaaaaagccacagtctctgaccaagtggtctgatatttggaatgccacaaaatatgcaaattcttgctgtcagaacatagatcaaagttttccaggcttccatggatcagagatgtggaacccaaacactgacctcagtgaagactgtttatatctaaatgtatggattccagcacctaaaccaaaaaatgccactgtattgatatggatttatggtggtggttttcaaactggaacatcatctttacatgtttatgatggcaagtttctggctcgggttgaaagagttattgtagtgtcaatgaactatagggtgggtgccctaggattcttagctttgccaggaaatcctgaggctccagggaacatgggtttatttgatcaacagttggctcttcagtgggttcaaaaaaatatagcagcctttggtggaaatcctaaaagtgtaactctctttggagaaagtgcaggagcagcttcagttagcctgcatttgctttctcctggaagccattcattgttcaccagagccattctgcaaagtggatcctttaatgctccttgggcggtaacatctctttatgaagctaggaacagaacgttgaacttagctaaattgactggttgctctagagagaatgagactgaaataatcaagtgtcttagaaataaagatccccaagaaattcttctgaatgaagcatttgttgtcccctatgggactcctttgtcagtaaactttggtccgaccgtggatggtgattttctcactgacatgccagacatattacttgaacttggacaatttaaaaaaacccagattttggtgggtgttaataaagatgaagggacagcttttttagtctatggtgctcctggcttcagcaaagataacaatagtatcataactagaaaagaatttcaggaaggtttaaaaatattttttccaggagtgagtgagtttggaaaggaatccatcctttttcattacacagactgggtagatgatcagagacctgaaaactaccgtgaggccttgggtgatgttgttggggattataatttcatatgccctgccttggagttcaccaagaagttctcagaatggggaaataatgcctttttctactattttgaacaccgatcctccaaacttccgtggccagaatggatgggagtgatgcatggctatgaaattgaatttgtctttggtttacctctggaaagaagagataattacacaaaagccgaggaaattttgagtagatccatagtgaaacggtgggcaaattttgcaaaatatgggaatccaaatgagactcagaacaatagcacaagctggcctgtcttcaaaagcactgaacaaaaatatctaaccttgaatacagagtcaacaagaataatgacgaaactacgtgctcaacaatgtcgattctggacatcattttttccaaaagtcttggaaatgacaggaaatattgatgaagcagaatgggagtggaaagcaggattccatcgctggaacaattacatgatggactggaaaaatcaatttaacgattacactagcaagaaagaaagttgtgtgggtctctaattaatagatttaccctttatagaacatattttcctttagatcaaggcaaaaatatcaggagcttttttacacacctactaaaaaagttattatgtagctgaaacaaaaatgccagaaggataatattgattcctcacatctttaacttagtattttacctagcatttcaaaacccaaatggctagaacgtgtttaattaaatttcacaatataaagttctacagttaattatgtgcatattaaaacaatggcctggttcaatttctttctttccttaataaatttaagtttttccccccaaaattatcagtgctctgcttttagtcacgtgtattttcattaccactcgtaaaaaggtatcttttttaaatgaattaaatattgaaacactgtacaccatagtttacaatattatgtttcctaattaaaataagaattgaatgtcaatatgagatattaaaataagcacagaaaatca

SEQ ID NO: 267956 - DNA, 1952 bp, Artificial Sequence
  derived and/or modified sequence
gaccctctcccgccgcggcctgggccagaagcacccggccctgcgctgcggaggcgatgccgcatcctagcactaagcccgggcagcggggaggggcagagagaacccaggggctgcgggaaacgtggaaaaggagtggccccatggggacccgggctcgctacagaccttcgccctgggggcggaggggaggggcccaccacggccttatttccgcgagcgccggcactgcccgctccgagcccgtgtctgtcgggtgccgagccaactttcctgcgtccatgcagccccgccggcaacggctgcctgctccctggtccgggcccaggggcccgcgccccaccgccccgctgctcgcgctgctgctgttgctcgccccggtggcggcgcccgcggggtccggggaccccgacgaccctgggcagcctcaggatgctggggtcccgcgcaggctcctgcagcaggcggcgcgcgcggcgcttcacttcttcaacttccggtccggctcgcccagcgcgctacgagtgctggccgaggtgcaggagggccgcgcgtggattaatccaaaagagggatgtaaagttcacgtggtcttcagcacagagcgctacaacccagagtctttacttcaggaaggtgagggacgtttggggaaatgttctgctcgagtgtttttcaagaatcagaaacccagaccaaccatcaatgtaacttgtacacggctcatcgagaaaaagaaaagacaacaagaggattacctgctttacaagcaaatgaagcaactgaaaaaccccttggaaatagtcagcatacctgataatcatggacatattgatccctctctgagactcatctgggatttggctttccttggaagctcttacgtgatgtgggaaatgacaacacaggtgtcacactactacttggcacagctcactagtgtgaggcagtggaaaactaatgatgatacaattgattttgattatactgttctacttcatgaattatcaacacaggaaataattccctgtcgcattcacttggtctggtaccctggcaaacctcttaaagtgaagtaccactgtcaagagctacagacaccagaagaagcctccggaactgaagaaggatcagctgtagtaccaacagagcttagtaatttctaaaaagaaaaaatgatctttttccgacttctaaacaagtgactatactagcataaatcattcttctagtaaaacagctaaggtatagacattctaataatttgggaaaacctatgattacaagtaaaaactcagaaatgcaaagatgttggttttttgtttctcagtctgctttagcttttaactctggaagcgcatgcacactgaactctgctcagtgctaaacagtcaccagcaggttcctcagggtttcagccctaaaatgtaaaacctggataatcagtgtatgttgcaccagaatcagcattttttttttaactgcaaaaaatgatggtctcatctctgaatttatatttctcattcttttgaacatactatagctaatatattttatgttgctaaattgcttctatctagcatgttaaacaaagataatatactttcgatgaaagtaaattataggaaaaaaattaactgttttaaaaagaacttgattatgttttatgatttcaggcaagtattcatttttaacttgctacctacttttaaataaatgtttacatttctaaataatgaaatgtgttgaatgttctcgtgaagatttgtatacaaaggaaaaatttgtgctaaactggaattaaatgaaatggtaatattgcttaacttaaattttacaaataatagaacgtctgtctcaccagataaagctgtctgcaaacatgcatcaaaagaaacactgatgtaactgaaagtatattaaatatttacaattttcatttacaaggacaa

SEQ ID NO: 267957 - protein, 460 aa, Artificial Sequence
  derived and/or modified sequence
MYRWLVRILGTIFRFCDRSVPPARALLKRRRSDSTLFSTVDTDEIPAKRPRLDCFIHQVKNSLYNAASLFGFPFQLTTKPMVTSACNGTRNVAPSGEVNGNSVCPVTSNYHSSQRSQMDTLKTKGWGEEQNHGVKTTQFVPKQYRLVETRGPLCSLRSEKRCSKGKITDTETMVGIRFENESRRGYQLEPDLSEEVSARLRLGSGSNGLLRRKVSIIETKEKNCSGKERDRRTDDLLELTEDMEKEISNALGHGPQDEILSSAFKLRITRGDIQTLKNYHWLNDEVINFYMNLLVERNKKQGYPALHVFSTFFYPKLKSGGYQAVKRWTKGVNLFEQEIILVPIHRKVHWSLVVIDLRKKCLKYLDSMGQKGHRICEILLQYLQDESKTKRNSDLNLLEWTHHSMKPHEIPQQLNGSDCGMFTCKYADYISRDKPITFTQHQMPLFRKKMVWEILHQQLL

SEQ ID NO: 267958 - DNA, 1242 bp, Artificial Sequence
  derived and/or modified sequence
atgtggaagccccaggagcaggccgtgaccgagatgatcagcgaggagagcggcaagggcctgagaagaccccactgcaccgtggaggagggcgtgcagaaggaggagagagagaagtacagaaagctgctggagagactgaaggagagcggccacggcaacagcgtgtgccccgtgaccagcaactaccacagcagccagagaagccagatggacaccctgaagaccaagggctggggcgaggagcagaaccacggcgtgaagaccacccagttcgtgcccaagcagtacagactggtggagaccagaggccccctgtgcagcctgagaagcgagaagagatgcagcaagggcaagatcaccgacaccgagaccatggtgggcatcagattcgagaacgagagcagaagaggctaccagctggagcccgacctgagcgaggaggtgagcgccagactgagactgggcagcggcagcaacggcctgctgagaagaaaggtgagcatcatcgagaccaaggagaagaactgcagcggcaaggagagagacagaagaaccgacgacctgctggagctgaccgaggacatggagaaggagatcagcaacgccctgggccacggcccccaggacgagatcctgagcagcgccttcaagctgagaatcaccagaggcgacatccagaccctgaagaactaccactggctgaacgacgaggtgatcaacttctacatgaacctgctggtggagagaaacaagaagcagggctaccccgccctgcacgtgttcagcaccttcttctaccccaagctgaagagcggcggctaccaggccgtgaagagatggaccaagggcgtgaacctgttcgagcaggagatcatcctggtgcccatccacagaaaggtgcactggagcctggtggtgatcgacctgagaaagaagtgcctgaagtacctggacagcatgggccagaagggccacagaatctgcgagatcctgctgcagtacctgcaggacgagagcaagaccaagagaaacagcgacctgaacctgctggagtggacccaccacagcatgaagccccacgagatcccccagcagctgaacggcagcgactgcggcatgttcacctgcaagtacgccgactacatcagcagagacaagcccatcaccttcacccagcaccagatgcccctgttcagaaagaagatggtgtgggagatcctgcaccagcagctgctgtag

SEQ ID NO: 267959 - DNA, 1383 bp, Artificial Sequence
  derived and/or modified sequence
atgtacagatggctggtgagaatcctgggcaccatcttcagattctgcgacagaagcgtgccccccgccagagccctgctgaagagaagaagaagcgacagcaccctgttcagcaccgtggacaccgacgagatccccgccaagagacccagactggactgcttcatccaccaggtgaagaacagcctgtacaacgccgccagcctgttcggcttccccttccagctgaccaccaagcccatggtgaccagcgcctgcaacggcaccagaaacgtggcccccagcggcgaggtgaacggcaacagcgtgtgccccgtgaccagcaactaccacagcagccagagaagccagatggacaccctgaagaccaagggctggggcgaggagcagaaccacggcgtgaagaccacccagttcgtgcccaagcagtacagactggtggagaccagaggccccctgtgcagcctgagaagcgagaagagatgcagcaagggcaagatcaccgacaccgagaccatggtgggcatcagattcgagaacgagagcagaagaggctaccagctggagcccgacctgagcgaggaggtgagcgccagactgagactgggcagcggcagcaacggcctgctgagaagaaaggtgagcatcatcgagaccaaggagaagaactgcagcggcaaggagagagacagaagaaccgacgacctgctggagctgaccgaggacatggagaaggagatcagcaacgccctgggccacggcccccaggacgagatcctgagcagcgccttcaagctgagaatcaccagaggcgacatccagaccctgaagaactaccactggctgaacgacgaggtgatcaacttctacatgaacctgctggtggagagaaacaagaagcagggctaccccgccctgcacgtgttcagcaccttcttctaccccaagctgaagagcggcggctaccaggccgtgaagagatggaccaagggcgtgaacctgttcgagcaggagatcatcctggtgcccatccacagaaaggtgcactggagcctggtggtgatcgacctgagaaagaagtgcctgaagtacctggacagcatgggccagaagggccacagaatctgcgagatcctgctgcagtacctgcaggacgagagcaagaccaagagaaacagcgacctgaacctgctggagtggacccaccacagcatgaagccccacgagatcccccagcagctgaacggcagcgactgcggcatgttcacctgcaagtacgccgactacatcagcagagacaagcccatcaccttcacccagcaccagatgcccctgttcagaaagaagatggtgtgggagatcctgcaccagcagctgctgtag

SEQ ID NO: 267960 - DNA, 1242 bp, Artificial Sequence
  derived and/or modified sequence
atgtggaagccccaggaacaggctgtgactgagatgatctcagaggaatctggaaagggcctgcgccgaccccattgcactgtggaggagggagtccagaaggaagaaagagaaaagtacaggaagctgcttgagagactgaaggaatccggacatggcaacagcgtgtgccctgtgaccagcaattaccatagctcacagaggtcacagatggacacattgaaaacaaagggctggggcgaagaacaaaaccacggtgtgaagacaactcagtttgtccctaaacagtaccgcttagtggaaaccagaggccctctgtgttctctgcggtctgagaaacgctgctccaaggggaagatcacagacaccgagacgatggtcggaattaggttcgaaaacgagagtcggcggggataccaattggagccggacctgtctgaggaggtgagcgcccgtttgaggttgggttctggttcaaacggactgctccgaaggaaggtcagcataatcgagacaaaagaaaaaaattgctctggcaaggaacgcgatcgtagaactgatgatctactggagctcacggaagacatggaaaaagagatcagtaatgccttaggccacgggccacaggacgagatcctgtcttcagccttcaagctgcggataacccgaggagatattcagaccctgaaaaattaccactggctgaacgacgaggttattaatttctacatgaacctcctggtagaaagaaacaagaagcagggctacccggcactgcatgtgttttcgaccttcttttatcccaagctcaagagcggcgggtaccaggccgtcaaacggtggactaagggggtcaacctatttgagcaagagattattttggttcccattcaccgaaaagtgcactggtcgcttgtagtcatcgacttgagaaagaagtgccttaaatatctggatagtatggggcagaaggggcacagaatctgcgagatcttattacagtatctgcaggatgaatcaaaaactaagaggaactcagacctcaacctgctcgaatggacccatcacagtatgaaaccacacgagattcctcagcaacttaatggcagcgattgcggtatgttcacctgtaaatatgctgattatatcagcagagataaaccaattaccttcactcagcatcagatgcccctgtttagaaagaagatggtttgggagatcctgcaccaacagttgctgtag

SEQ ID NO: 267961 - DNA, 1383 bp, Artificial Sequence
  derived and/or modified sequence
atgtatcgatggctagtgcggatcctcgggaccatcttccgattctgtgaccgcagcgtgccaccggctcgagctctgctcaaaagacggcgttctgattccactctgttcagtacagtggatactgacgaaatccctgctaaacgcccccgtctagattgtttcatccaccaagttaagaactccctctacaacgcagcctctctgttcgggttccctttccagttgactaccaagcccatggtcacctctgcctgcaatggaactcgaaatgtagcaccctctggagaagtgaatggaaactcagtttgtcccgtgacaagcaactaccactctagtcagagatctcagatggatacccttaagaccaaggggtggggcgaagaacagaaccacggcgtgaaaacaacccagttcgtccccaagcagtaccgtctcgtcgagacaagggggcctctgtgttctctccggtccgagaagcgctgcagtaaaggcaaaatcactgacaccgagaccatggtgggcattcgctttgagaacgagtcccgcaggggctaccagctggaacccgatctttcagaggaggtgtctgcaaggctgcggcttggcagtggatctaatggcctgctacggcgcaaggtgagtattattgaaactaaggaaaaaaattgttctggaaaggaacgggaccgcagaactgacgacctactcgaactgaccgaggacatggagaaggagattagtaacgctctgggacacgggccccaggatgagatactctcaagcgcatttaagcttcggatcaccaggggtgacattcaaactctcaagaactatcactggctgaacgacgaagtcatcaatttctatatgaatcttctggtcgagagaaataagaaacagggataccccgccctccacgtattcagtacattcttttaccctaagcttaaatcggggggataccaagccgttaaaaggtggacgaaaggcgtgaatctttttgagcaggagattattcttgtgccaattcataggaaagttcattggtctttggtggtgatcgacttgcgcaaaaagtgccttaaatatttggactccatgggacaaaaaggccacaggatttgtgagatactgctgcagtaccttcaggatgagtcaaaaaccaagaggaatagtgatctgaacctcttggaatggacccatcatagcatgaagccccatgagattcctcagcaactcaatggtagcgattgcggaatgttcacgtgcaagtatgcagactacatttcacgtgacaaacccattacattcacgcagcatcaaatgcctctcttccgcaaaaaaatggtatgggagatcctgcatcaacagctgctgtag

SEQ ID NO: 267962 - DNA, 1242 bp, Artificial Sequence
  derived and/or modified sequence
atgtggaagccccaggagcaggccgtgacagagatgatcagcgaggagagcggcaagggcctgcggcggccccactgcaccgtggaggagggcgtgcagaaggaggagcgggagaagtacaggaagctgctggagcggctgaaggagagcggccacggcaacagcgtgtgccctgtgaccagcaactaccacagcagccagaggagccagatggacaccctgaagaccaagggctggggcgaggagcagaaccacggcgtgaagaccacccagtttgtgcccaagcagtaccgcctggtggagacccggggccccctgtgcagcctgcggtctgagaagcgctgcagcaagggcaagatcacagacacagagaccatggtgggcatccgctttgaaaatgaaagccggcggggctaccagctggagccagacctgtctgaggaggtgtctgcccggctgcggctgggcagcggcagcaatggcctgctgcggaggaaggtgtccatcatcgagaccaaggagaagaactgcagcggcaaggagcgggacagaagaacagatgacctgctggagctgacagaggacatggagaaggagatcagcaatgccctgggccacggcccccaggatgagatcctgagcagcgccttcaagctgcgcatcaccaggggggacatccagaccctgaagaactaccactggctgaatgatgaagtcatcaacttctacatgaacctgctggtggagaggaacaagaagcagggctacccagccctgcacgtgttcagcaccttcttctaccccaagctgaagagcggcggctaccaggccgtgaagcgctggaccaagggcgtgaacctgtttgagcaggagatcatcctggtgcccatccacaggaaggtgcactggagcctggtggtgattgacctgaggaagaagtgcctgaagtacctggacagcatgggccagaagggccaccgcatctgtgagatcctgctgcagtacctgcaggatgagagcaagaccaagaggaacagcgacctgaacctgctggagtggacccaccacagcatgaagccccatgagatcccccagcagctgaatggaagtgactgtggcatgttcacctgcaagtatgctgactacatcagccgggacaagcccatcaccttcacccagcaccagatgcccctcttcaggaagaagatggtgtgggagatcctgcaccagcagctgctgtag

SEQ ID NO: 267963 - DNA, 1383 bp, Artificial Sequence
  derived and/or modified sequence
atgtaccgctggctggtgcgcatcctgggcaccatcttccgcttctgtgacagatctgtgcccccagcccgggccctgctgaagagaagaagaagtgacagcaccctcttcagcacagtggacacagatgagatcccagccaagaggccccggctggactgcttcatccaccaggtgaagaacagcctgtacaatgctgccagcctgtttggcttccccttccagctgaccaccaagcccatggtgaccagcgcctgcaatggcaccagaaatgtggcccccagcggggaggtgaatggaaacagcgtgtgccctgtgaccagcaactaccacagcagccagaggagccagatggacaccctgaagaccaagggctggggcgaggagcagaaccacggcgtgaagaccacccagtttgtgcccaagcagtaccgcctggtggagacccggggccccctgtgcagcctgcggtctgagaagcgctgcagcaagggcaagatcacagacacagagaccatggtgggcatccgctttgaaaatgaaagcagaagaggctaccagctggagccagacctgtctgaggaggtgtctgcccggctgcggctgggcagcggcagcaatggcctgctgcggaggaaggtgtccatcatcgagaccaaggagaagaactgcagcggcaaggagcgggacagaagaacagatgacctgctggagctgacagaggacatggagaaggagatcagcaatgccctgggccacggcccccaggatgagatcctgagcagcgccttcaagctgcgcatcaccaggggggacatccagaccctgaagaactaccactggctgaatgatgaggtgatcaacttctacatgaacctgctggtggagaggaacaagaagcagggctacccagccctgcacgtgttcagcaccttcttctaccccaagctgaagagcggcggctaccaggccgtgaagcgctggaccaagggcgtgaacctgtttgagcaggagatcatcctggtgcccatccacaggaaggtgcactggagcctggtggtgattgacctgaggaagaagtgcctgaagtacctggacagcatgggccagaagggccaccgcatctgtgagatcctgctgcagtacctgcaggatgagagcaagaccaagaggaacagcgacctgaacctgctggagtggacccaccacagcatgaagccccatgagatcccccagcagctgaatggaagtgactgtggcatgttcacctgcaagtatgctgactacatcagccgggacaagcccatcaccttcacccagcaccagatgcccctcttcaggaagaagatggtgtgggagatcctgcaccagcagctgctgtag

SEQ ID NO: 267964 - DNA, 1242 bp, Artificial Sequence
  derived and/or modified sequence
atgtggaagccccaggagcaggccgtgaccgagatgatcagcgaggagagcggcaaggggcttcgacggccccactgcacagtcgaggaaggagtccagaaagaagagagggaaaagtaccgtaagttgcttgagaggcttaaagaatcaggacatgggaattcagtgtgcccagttactagcaactatcactcatcacagagaagccagatggatactctcaagacgaagggctggggcgaggagcaaaaccatggcgtcaaaaccacacagtttgtgccgaagcagtataggctagttgagacccgtggacccctgtgttctttgaggtccgaaaagaggtgctcaaaaggcaaaattactgacacagagactatggtgggtattcgattcgaaaacgagtctaggagaggctatcagctcgagcccgatctctccgaggaagtatccgcccgtctccgcctgggctcagggagtaatggactgcttcgacgaaaagtcagcattattgagactaaagaaaagaattgcagcggcaaagagagggaccgacgaactgatgacctgctggaactcaccgaagacatggagaaggaaattagtaatgccctgggccacggcccacaggatgagatactgagctccgcattcaaattgcgaattacaaggggcgacatacagactctgaaaaactatcattggctcaacgacgaggtaattaacttctatatgaatctgctcgtggagcgtaacaaaaaacagggctacccagctctgcacgtcttcagcacatttttctaccctaagcttaagtccgggggctatcaagccgtgaagcggtggacaaaaggagttaacctgtttgaacaagagattattctcgttcccattcacagaaaggtacattggagcctggtggtcattgatctgcgtaaaaagtgcttgaagtacctggacagcatggggcaaaaggggcataggatttgtgaaattttactccagtatctgcaggatgaaagcaagactaagaggaacagtgaccttaacctgttggagtggacacaccactccatgaagccccacgagataccccagcagttgaatggcagcgactgcgggatgtttacctgtaagtacgctgactacatttcccgcgacaagcctataacattcacccaacaccagatgcccctattccgaaagaagatggtttgggaaatccttcaccaacaattactgtag

SEQ ID NO: 267965 - DNA, 1383 bp, Artificial Sequence
  derived and/or modified sequence
atgtaccggtggctggtgcggatcctgggcaccatcttccggttctgtgaccgaagtgtccccccagcgcgcgcgctgctgaaaagaagacgtagcgactccactctcttcagtacagtggacactgatgagattcccgccaagcggccacggctcgattgcttcatccatcaggtgaaaaactcactctacaacgcagccagcctattcggctttccgttccagctaacaactaagcccatggtgacgtcagcatgcaatggcacgaggaatgtggctccatcaggagaggtcaacggaaactccgtctgccctgtaacatctaactatcactccagtcagagaagccagatggacacattgaagaccaagggttggggtgaagaacagaatcatggggttaagacgactcaatttgtgcccaagcaatacaggctcgtggagacgcggggcccactctgcagtctgcgatcggaaaaaagatgctctaagggtaaaatcactgacaccgagactatggttgggatacgttttgaaaacgaatctcggcggggatatcagctggaacccgatttgtccgaggaggtaagcgctcgcctgcggctgggatccggatctaatggactcctgagacggaaagtatcaattatcgaaacaaaagagaagaattgttccggaaaggagcgggacaggcgcaccgatgaccttttggagctcacagaggatatggagaaggaaattagcaacgctctggggcacgggccccaggacgagatcctgtcctccgcattcaaactgaggatcacacgaggggacatccagaccctgaagaactaccactggctgaatgatgaggtgatcaatttctatatgaatctgcttgttgagagaaacaagaagcaagggtatcccgccttgcacgtcttttcaacgttcttttatcctaagctcaagtcagggggttatcaggcagtgaagcgctggacaaagggggtgaacctgtttgagcaggaaatcattctggtccctatccatagaaaggtgcattggagcctggtggtcatagacctgagaaaaaaatgtttaaagtaccttgattccatgggccaaaaagggcatcgcatttgcgagatcctgttacagtacctccaggatgaatctaagacgaaacgtaacagtgacctgaacctgcttgaatggactcaccatagcatgaaaccacatgagatcccgcaacagctcaacggtagcgattgtggcatgttcacttgcaagtacgcggactatatctcccgtgacaagcctatcacctttactcaacaccagatgcctctcttccgaaagaagatggtgtgggaaatcctgcaccaacagctgttgtag

SEQ ID NO: 267966 - DNA, 1242 bp, Artificial Sequence
  derived and/or modified sequence
atgtggaagcctcaagaacaggcagtgacggaaatgatctccgaggagtccggtaagggcctgcggagaccacactgtaccgtcgaagaaggggtgcagaaggaagagcgggagaaatatcgcaagctcctggagcggctgaaggagtctgggcatggtaatagcgtgtgcccagtcacgagcaactaccactcttcccagcgcagccaaatggacacattgaaaacgaaggggtggggggaagaacagaaccacggggttaaaacaacccagttcgtgccgaaacagtaccggttggttgagacaaggggccctctgtgcagcctgaggtccgagaagaggtgctccaaggggaaaattacggataccgagacaatggtgggcattcgatttgagaacgagtctcgcagaggataccaactggaaccagatcttagcgaagaggttagcgctcggctccgtctgggctcggggagcaacggcctactgagacggaaggtgagcataatcgaaaccaaagagaagaattgcagcggaaaggaacgagaccggaggaccgacgacctgctcgagctgaccgaggacatggaaaaggagatcagcaacgctctggggcacggtccacaagatgaaatcctgtcctctgcttttaagctacgaattactagaggagacatccaaaccctaaaaaactatcactggctgaatgatgaggttatcaatttttacatgaatctcttagtcgagcgcaataagaaacaggggtacccagctttacacgttttctccacatttttttatcctaagttaaaatcaggcggttaccaggccgtaaagcgctggacaaagggagtcaacctttttgaacaggagatcattctggttccaatccatcggaaggtccattggagcctggtggtaatcgacctgaggaagaaatgccttaaatatctggattcaatggggcagaaggggcacagaatctgcgagatcttgctgcaataccttcaagacgagtccaagaccaagcgcaattcagacctaaacctgctggagtggactcaccactccatgaaacctcacgagatccctcaacagctgaacggtagtgactgtggcatgttcacctgcaagtacgcagactatatttctagagataagcctattactttcacccagcaccaaatgccactgttccgcaagaagatggtgtgggagattctacaccagcaactgctgtag

SEQ ID NO: 267967 - DNA, 1383 bp, Artificial Sequence
  derived and/or modified sequence
atgtatagatggctcgtcagaattttaggcacaatcttcagattctgcgacagatccgttcctccggcacgcgctctccttaaaagaagaagatctgacagcactctcttttcaaccgtagataccgacgaaatccccgcaaaaagaccaaggctggactgttttattcaccaggtgaagaatagcctatacaacgcggcatcactcttcggattcccctttcaactcacaactaaacctatggtcacatctgcatgcaatgggacaagaaatgtggcaccttctggtgaggtgaacggtaatagtgtgtgccctgtcacatcgaactatcacagctctcaaagaagtcagatggatacactgaaaacaaaggggtggggagaggaacagaatcacggggttaagacaacccaattcgtacccaagcagtatagattagtagaaacccggggacctctgtgcagcctgaggtcagaaaagagatgttccaagggaaagataaccgataccgaaaccatggtcggcattcgctttgagaatgagagtcggagagggtatcagctggagccagatcttagcgaggaggtatccgcgagactccgcctcggttcaggctcgaacggcttattgcgaagaaaggtatcaattattgaaaccaaggaaaaaaattgctctggtaaggagagagacagacgcaccgatgacctactggaacttactgaggatatggaaaaagagatttctaatgccctgggacacgggcctcaggacgagatattgagctcagccttcaagttgcggataactcgtggagatatccagacgcttaagaactatcactggcttaatgatgaggtaattaatttttacatgaatctgctggtcgagaggaataaaaaacaagggtatccagcattgcacgttttttcaacctttttctatcctaagcttaagtcaggaggctaccaggccgtaaagcgatggacaaagggggtgaacttgttcgagcaggaaatcatcctggtacctatccacaggaaggttcactggtctcttgttgtgattgatttgcgtaagaaatgcctaaagtatcttgattcgatgggacagaagggtcataggatatgtgaaatcctcctccagtacctacaggatgaatccaaaactaaaaggaactccgatttaaacctcctcgaatggacgcaccactctatgaagcctcacgaaatcccccaacagctgaacggctccgattgtggtatgtttacctgtaagtacgccgattacatcagccgtgacaagccaataacatttactcagcatcagatgcccctatttagaaagaagatggtctgggagattttgcaccaacagctgctttag

SEQ ID NO: 267968 - DNA, 2805 bp, Artificial Sequence
  derived and/or modified sequence
gggcctctggtagccctggggacgctgtatctgtgggctcttgaatcgcgtcacaaatcagcgaccgaactctggcggtggtggttaagacggcgaaggcggcagcggcggcgacagctctggggtttgcgtctcggggtgtgtcggccgccgctgctgcttgggcctggtatgtacagatggctggttaggattctcggcaccattttccgtttctgcgaccggtcggtgccccctgcccgggccctcctgaagaggcggcgctcagacagcactctgttttctacagtggacactgatgaaataccagccaaaagaccaagattagattgctttattcaccaagtgaaaaacagtctctacaatgctgccagcttatttggattcccattccagctgaccacaaagcccatggtaacttctgcttgtaatggaacacggaatgtggccccttcaggagaggtcaatggaaactctgtctgtcctgtaacttcaaattatcacagttctcaaagaagtcagatggacacattaaagaccaaaggctggggggaagagcaaaatcacggagtcaaaacaactcagtttgttccaaaacaatatagacttgttgaaacaaggggacctctatgttcattgagaagtgaaaagaggtgttcaaaggggaaaattactgatacagagacgatggtcggaatcagatttgaaaatgaaagtaggaggggataccaactggagcctgacctatcagaagaagtgtcggcccgactccgcctgggcagtggaagcaatggcttactcaggaggaaagtgtcaataattgagacaaaggaaaagaattgctcaggcaaagagagggacagaagaacggacgatctccttgaacttacagaggacatggaaaaggaaatcagtaatgccctaggccatggcccacaggatgaaatcctaagtagtgctttcaaattgcgaattactcgaggagatattcagacattaaagaactatcactggctcaatgatgaagtcattaatttttacatgaatcttctggtggaaagaaataaaaagcaaggctatccagcacttcatgtattcagtactttcttctatcctaaattaaagtctgggggttaccaagcagtgaaacgatggaccaaaggggtaaatctctttgaacaagaaattattctggtgcctattcatcggaaggtacattggagcctggtggtgattgacctaagaaaaaagtgtcttaaatatctggattctatgggacaaaagggccacaggatctgtgagattctccttcagtatttacaggatgaaagtaagaccaaaagaaatagtgatctgaatcttttagagtggacccatcacagcatgaaaccacacgagattcctcaacagctgaatgggagtgattgtggaatgtttacttgtaaatatgcagattatatttctagggacaaacctatcacatttactcagcaccagatgcctctcttccggaagaagatggtgtgggaaatccttcatcagcagttgctgtgagaaaactttgcctggtccctctagctgctggtggttctttcacagacatttccatatacctcatgcattgtgggttaaaaagtccctgcatcacttctgttctcacaggtactgagctgtcaaaagtgcatgaaggcctctcactgtactctagtcctgacttggggtgcagagggctgcttgcaatcctgtttgtaaggctgtgcctgctcagagctttggactgttcaacccacacaagaacaaacgctaactaatattttttttaagagattcttttccctatgaatgtgggaaatgcaggatttattctgtgaattgtttgtttctgtgtgtttgttcagcgtattcattcactcactcgtttgcaaacataatgggcagtggtcatttactgctgctcttttacagttagctctaaattacttgtttgaactatttatttctgaaaggaatgttactcaagctgccactccctgctgaagagcaggagggaactctcactgggggcggaaggaagtggagctggagcagtaactgccaacatgaagctggagggtttgggattttttttgtttttgtttttttgaggctcaaaaaatgctgggagaaatgaaaatgctgtgggatagggctcctgttgcctttcagaggaagtctgacactacagcgttggcacagtgccgtgaacagtggaactgtgcccaagggactctgattatccaagcatcttccgaagagtgttgtggtcaccttaaagagacttccccttctggaaatgtggtgacttggcttagtcttcaaactggattcatggatttgaagtaactgtaaaccctaaatcttcattttcatcccagatctggttgagtataaacctcagaattgtaggggctggcctgagctgtttatttcaaaagatactattcaatttaaagctatttttcctcagagtttttgttttctatatattaagtctaaattaagttttctactcattaagactaacatctccccactccatccccactgaaatttgtggaagaaaatttagtacttggctctgaggttgccagttatacaataatctattttgcatatgaaagtttgtatttaacttttttgttcattaaaaaccttactgatatggttataacttcagacagtttagagttggtcagaacatattttgcaagatctagtgcctagtgttgcttttctgatgtaataaaaggtggtctggcagaacct

SEQ ID NO: 267969 - protein, 288 aa, Artificial Sequence
  derived and/or modified sequence
MILLQHAVLPPPKQPSPSPPMSVATRSTGTLQLPPQKPFGQEASLPLAGEEELSKGGEQDCALEELCKPLYCKLCNVTLNSAQQAQAHYQGKNHGKKLRNYYAANSCPPPARMSNVVEPAATPVVPVPPQMGSFKPGGRVILATENDYCKLCDASFSSPAVAQAHYQGKNHAKRLRLAEAQSNSFSESSELGQRRARKEGNEFKMMPNRRNMYTVQNNSGPYFNPRSRQRIPRDLAMCVTPSGQFYCSMCNVGAGEEMEFRQHLESKQHKSKVSEQRYRNEMENLGYV

SEQ ID NO: 267970 - DNA, 447 bp, Artificial Sequence
  derived and/or modified sequence
atgatcctgctgcagcacgccgtgctgcccccccccaagcagcccagccccagcccccccatgagcgtggccaccagaagcaccggcaccctgcagctgcccccccagaagcccttcggccaggaggccagcctgcccctggccggcgaggaggagctgagcaagggcggcgagcaggactgcgccctggaggagctgtgcaagcccctgtactgcaagctgtgcaacgtgaccctgaacagcgcccagcaggcccaggcccactaccagggcaagaaccacggcaagaagctgagaaactactacgccgccaacagctgccccccccccgccagaatgagcaacgtggtggagcccgccgccacccccgtggtgcccgtgcccccccagatgggcagcttcaagcccggcggcagagtgatcctggccaccgagaacgactactag

SEQ ID NO: 267971 - DNA, 867 bp, Artificial Sequence
  derived and/or modified sequence
atgatcctgctgcagcacgccgtgctgcccccccccaagcagcccagccccagcccccccatgagcgtggccaccagaagcaccggcaccctgcagctgcccccccagaagcccttcggccaggaggccagcctgcccctggccggcgaggaggagctgagcaagggcggcgagcaggactgcgccctggaggagctgtgcaagcccctgtactgcaagctgtgcaacgtgaccctgaacagcgcccagcaggcccaggcccactaccagggcaagaaccacggcaagaagctgagaaactactacgccgccaacagctgccccccccccgccagaatgagcaacgtggtggagcccgccgccacccccgtggtgcccgtgcccccccagatgggcagcttcaagcccggcggcagagtgatcctggccaccgagaacgactactgcaagctgtgcgacgccagcttcagcagccccgccgtggcccaggcccactaccagggcaagaaccacgccaagagactgagactggccgaggcccagagcaacagcttcagcgagagcagcgagctgggccagagaagagccagaaaggagggcaacgagttcaagatgatgcccaacagaagaaacatgtacaccgtgcagaacaacagcggcccctacttcaaccccagaagcagacagagaatccccagagacctggccatgtgcgtgacccccagcggccagttctactgcagcatgtgcaacgtgggcgccggcgaggagatggagttcagacagcacctggagagcaagcagcacaagagcaaggtgagcgagcagagatacagaaacgagatggagaacctgggctacgtgtag

SEQ ID NO: 267972 - DNA, 447 bp, Artificial Sequence
  derived and/or modified sequence
atgattctcctacagcatgcagtgctcccaccgcccaaacagccaagtccaagcccccccatgtcagtggccactcgctcgactggcaccctgcagttacccccccagaaaccgttcggacaagaggcaagtctccctcttgctggtgaggaggaattgtctaagggaggggagcaggactgtgcactggaggagctctgcaagcctctatactgcaaactttgtaatgtgaccctgaattccgcccagcaggcccaagcccactaccaggggaaaaatcatgggaagaagcttagaaactactatgctgcgaatagttgccctccacccgctcgtatgtccaacgtggtggagcctgcggccaccccggtggttccagtgccacctcaaatgggctccttcaagccaggcgggagggtgatcttggccaccgaaaatgactactag

SEQ ID NO: 267973 - DNA, 867 bp, Artificial Sequence
  derived and/or modified sequence
atgatactcctgcagcatgcagttctccctccaccgaaacagcctagcccgtcaccacctatgtctgtagctacccgcagcactggtaccctgcagctgcccccgcagaaacctttcggtcaagaagcctcactgcctctggccggcgaggaggaattatcaaaaggaggcgagcaggattgcgcccttgaggagctctgcaaacccctctattgcaagctgtgcaatgttaccctgaactcagctcagcaggcacaggcgcactaccagggcaagaaccatggcaaaaaattgaggaattattacgcagccaacagctgtcctcctcctgcaaggatgtccaacgtggtggaaccagctgccaccccagtggtacctgtaccaccacaaatgggaagtttcaagcccggcggacgtgtgattctcgccaccgagaatgattactgtaaattgtgtgacgcttccttctcttcccctgccgtagcacaggcccactaccaaggaaagaaccacgccaaacggctgcgattggctgaagctcagagtaattctttttcagagagttccgagctgggtcagcggcgggcaagaaaggagggaaacgagtttaagatgatgccaaataggcggaatatgtatactgtacagaacaactctgggccttatttcaatccaaggtccagacagagaatcccacgagacctggccatgtgcgtaacccccagtggtcagttttattgtagcatgtgcaacgtcggagccggggaggagatggagttccggcagcacctggaaagcaagcagcacaaatctaaagtaagtgagcagagataccgaaacgaaatggaaaacctggggtacgtgtag

SEQ ID NO: 267974 - DNA, 447 bp, Artificial Sequence
  derived and/or modified sequence
atgatcctgctgcagcacgctgtgctgcccccacccaagcagcccagccccagcccccccatgtctgtggccaccaggagcacaggcaccctgcagctgcccccccagaagcccttcggccaggaggccagcctgcccctggccggggaggaggagctgagcaaaggaggagagcaggactgtgccctggaggagctgtgcaagcccctgtactgcaagctgtgcaatgtgaccctgaacagcgcccagcaggcccaggcccactaccagggcaagaaccacggcaagaagctgaggaactactatgctgccaacagctgccccccaccagccaggatgagcaatgtggtggagcctgctgccacccctgtggtgcctgtgcccccccagatgggcagcttcaagccaggcggccgggtcatcctggccacagaaaatgactactag

SEQ ID NO: 267975 - DNA, 867 bp, Artificial Sequence
  derived and/or modified sequence
atgatcctgctgcagcacgctgtgctgcccccacccaagcagcccagccccagcccccccatgtctgtggccaccaggagcacaggcaccctgcagctgcccccccagaagcccttcggccaggaggccagcctgcccctggccggggaggaggagctgagcaaaggaggagagcaggactgtgccctggaggagctgtgcaagcccctgtactgcaagctgtgcaatgtgaccctgaacagcgcccagcaggcccaggcccactaccagggcaagaaccacggcaagaagctgaggaactactatgctgccaacagctgccccccaccagccaggatgagcaatgtggtggagcctgctgccacccctgtggtgcctgtgcccccccagatgggcagcttcaagccaggcggccgggtcatcctggccacagaaaatgactactgcaagctgtgtgatgccagcttcagcagccctgctgtggcccaggcccactaccagggcaagaaccacgccaagaggctgcggctggccgaggcccagagcaacagcttcagcgagagcagcgagctgggccagaggcgggccaggaaggagggcaatgagttcaagatgatgcccaacagaagaaacatgtacacagtgcagaacaacagcggcccctacttcaaccccaggagccggcagaggatcccccgggacctggccatgtgtgtgacccccagcggccagttctactgcagcatgtgcaatgtgggcgctggggaggagatggagttccggcagcacctggagagcaagcagcacaagagcaaggtgtctgagcagcgctacagaaatgagatggagaacctgggctacgtgtag

SEQ ID NO: 267976 - DNA, 447 bp, Artificial Sequence
  derived and/or modified sequence
atgatcctgctgcagcacgccgtgctgcccccccccaagcagccctccccttcccctcctatgtccgtggcaaccagatcaactggcaccttgcaactgcctccacaaaaacccttcggacaagaagccagtctgccgttggccggcgaggaggaactgtcaaaagggggcgagcaggattgcgccctcgaggagctttgcaaacctttatactgtaagctgtgtaatgtgaccttgaattccgcccagcaagcccaggcacactaccaaggtaagaaccacggaaagaagttgagaaactactacgcagccaatagttgcccacctcccgctcgcatgagcaatgtagtcgagccagctgcaactccagtggtcccagtcccgcctcagatgggttcattcaagccaggaggacgcgtgatccttgctacggaaaacgattactag

SEQ ID NO: 267977 - DNA, 867 bp, Artificial Sequence
  derived and/or modified sequence
atgatcctgctgcagcacgccgtgctgcccccccccaagcagcccagcccctcaccacctatgagcgtagccaccaggagcactggcacgctgcagctccctccccagaagccttttggtcaggaggctagtctccccttggccggagaggaggagttgagtaagggcggggagcaggactgcgcccttgaggaactatgcaaaccactgtactgcaaactatgtaatgtcacgctgaacagtgcccagcaggctcaggcccattatcagggcaaaaaccatggcaagaagttgcgtaattattatgccgccaacagctgcccacctcccgcacgtatgtcaaatgttgtggaacctgccgctactccagtagtgcctgtgccacctcagatgggatcattcaaacccggaggcagagtgatcctggccaccgagaacgattactgcaaattgtgtgatgcttcgtttagttcccctgccgtcgctcaggcacactaccagggcaaaaaccatgccaagagactccgcctagctgaggcgcagagtaactccttttccgaatcttcagaacttggacagaggagggcccgcaaagagggaaacgagttcaagatgatgcctaatagaagaaatatgtataccgtacagaacaattccggaccatactttaacccacggtcccgccagaggatccccagggatttagcaatgtgtgtcactccatccggacagttttattgttccatgtgtaacgtcggcgctggcgaagagatggaatttcgccagcatttggagtccaagcaacataaaagcaaggtgtctgaacaacgatatagaaacgagatggaaaacctgggttacgtatag

SEQ ID NO: 267978 - DNA, 447 bp, Artificial Sequence
  derived and/or modified sequence
atgattttgctgcagcacgctgtgttaccccctcctaagcagccctctccaagtccaccgatgtccgtcgctaccagatctacagggactttgcagctgcccccacagaagccctttggccaggaggcaagtctgcctctagccggagaggaggagctctccaagggaggggaacaggattgcgcactcgaagaactctgcaaaccattatactgcaaattgtgcaacgtgacgctgaacagcgcccagcaggcccaggcccactaccagggtaaaaaccacggcaagaaactgcgcaactactatgctgcaaattcttgccctccacccgctagaatgtccaatgtcgtcgaacctgcggcaaccccggtcgttccagtgcctccccagatggggtcattcaaacctggtggacgtgttatcctggcaactgaaaacgactattag

SEQ ID NO: 267979 - DNA, 867 bp, Artificial Sequence
  derived and/or modified sequence
atgatacttttgcagcacgccgtgctccctccaccaaaacagcccagcccttccccgcctatgtcagttgcaacacgatctaccggaacgctgcagcttccccctcagaaaccatttggtcaggaggcctcactaccactggcaggggaagaggagcttagcaaaggaggggagcaagactgcgcactcgaggaattgtgtaagcccttgtattgtaagctctgtaacgtcaccttgaacagcgcccaacaggcacaagcccactatcagggaaagaaccacggtaagaaactcaggaattattatgctgccaactcatgtcctccccctgccagaatgagcaatgtggtggagccggcagccacgcccgttgtaccagttccccctcagatgggcagtttcaagcccggaggacgcgttatcctggcgacagaaaacgattactgtaagctgtgtgacgcctctttttcaagcccagctgtcgcacaggcccactatcaggggaagaaccacgccaagcgactgcggctggctgaggcacagtcgaactcattctctgagagctccgagctgggccagagaagagctagaaaagagggcaatgagtttaaaatgatgccgaataggcggaatatgtatacagtacagaacaactccggaccatactttaatcccagatcacgacagagaatcccccgtgatctggcgatgtgtgtcaccccctccggtcagttctactgcagcatgtgtaacgtgggagccggagaagagatggaattccggcagcacttggagtcgaagcagcacaagtcaaaagtctccgagcaaaggtaccgcaacgagatggaaaacctggggtacgtgtag

SEQ ID NO: 267980 - DNA, 743 bp, Artificial Sequence
  derived and/or modified sequence
gctttcaggacgagcccctggagcgccggggactagcggttcctttccgatgctctttccatctgccctccacgtgacagggcttgcgctgcttctatttatcagtttgcttgtttcaggcatttcacgtggaccaggtggatcatctgtgcgtgcagctgccttggccctctcagttgcccccgccccgtgggagtcgggggattccatccttcgtgatggcatccataccgggttgagatttgaagaccttgcttctcatcacccactggattatgccccaggcttccctacccaatgatcctcttgcaacacgccgtgcttcctccacctaagcagccctcaccctcgcctcctatgtcagtggccaccaggtctacaggaaccttgcagcttccaccacagaagccttttgggcaggaggcttccttgcctcttgcaggggaagaagagttatcgaagggaggggagcaagactgtgccctggaggagctatgtaagcccctgtactgcaaactctgcaatgtcaccttgaactctgcacagcaagcccaggctcattatcagggtaaaaatcatggtaagaaactccgaaattactatgcagcaaatagctgtcctcctcctgctagaatgagcaatgtggtcgagcctgcagctactccagttgttccagtccctccgcagatgggctcctttaagccaggaggccgagtgatcctggccacggagaatgattactg

SEQ ID NO: 267981 - DNA, 2944 bp, Artificial Sequence
  derived and/or modified sequence
atccactcagccgccttaaccgccaaccagcaggctaagggaggaacagaatgaacaatgtttggatcccaatgactggagatgaaagttgcaaaagctctgcccaggcttctaccaaggattaactttccagggcatctgctgaactgctcttcggggctgtctgctgagattggcggcgggaccctcccgcctctcactcgtgcctttgttccccacgccggcctaaccccgcgcccctgcgctcgcggccagggcacctgacccacgcgccgcccgccggggatgcgggagccgccactgctaccgctgccaccgctgccgggcctgctccgccaagcacatgcgcagtggcgacgccgagccggcgccctcagtctcctcctccaccgcctcccggttccgcagtcacttcctgcagctgtttccctgtgggtcgggttggactgacttttgacagtcagccttcggctgcggagggggctcggcggcggccggcggagaaagttgctccgagaagaggctgggtcgagctgggccgagccgggcgcgcagggcgggcgtcgcgggcgtcccgggcggacgcggcgcggagactgccggcgcgtcccgggggttccggcatttcacgtggaccaggtggatcatctgtgcgtgcagctgccttggccctctcagttgcccccgccccgtgggagtcgggggattccatccttcgtgatggcatccataccgggttgagatttgaagaccttgcttctcatcacccactggattatgccccaggcttccctacccaatgatcctcttgcaacacgccgtgcttcctccacctaagcagccctcaccctcgcctcctatgtcagtggccaccaggtctacaggaaccttgcagcttccaccacagaagccttttgggcaggaggcttccttgcctcttgcaggggaagaagagttatcgaagggaggggagcaagactgtgccctggaggagctatgtaagcccctgtactgcaaactctgcaatgtcaccttgaactctgcacagcaagcccaggctcattatcagggtaaaaatcatggtaagaaactccgaaattactatgcagcaaatagctgtcctcctcctgctagaatgagcaatgtggtcgagcctgcagctactccagttgttccagtccctccgcagatgggctcctttaagccaggaggccgagtgatcctggccacggagaatgattactgtaagctctgtgatgcctccttcagttccccagctgtggctcaggctcactatcaagggaagaatcatgccaagaggctgcggctggcggaagctcagagtaactcattctcggaatcctcagagctgggtcaacggcgggccaggaaagaagggaatgagtttaagatgatgcctaacaggagaaatatgtatacagtacagaataattcaggtccttacttcaatccccgctctcggcagagaattccacgtgatctggccatgtgtgttactccaagtggccagttttactgctcaatgtgtaatgttggagctggcgaagagatggaattccggcagcatttagagagcaagcaacataagagcaaggtgtctgaacagcggtacaggaatgagatggagaatctgggatatgtatagtgattatcatattaagatagagcagcttttcctgcctgttgtttgccttttgtcaacttgccctgctttgtggtctttttgatatgagtacattcctctgcttaatgttaatacatgtaacccacagtggtaccatgagatgtcaaaacctgggggcccgggggcggggcggggggaggtgggtgtgaagaacgtgcttcttaggtcataacgcttttgcagggtcaatggtgttgagccgctcatagcatgtgacctacctaccccatcagaaataactttttatcttgctcaagttctggtcaactagtagcctgacggcttagaactttgactatttaaaagtttcattttcttttgcaattttagttttatgtactgttaaagaattgtactgaattctttttagatcacagtaaaaataggttggcagagatttcagtttcccagggcttaaccagaaccgccacctcaatgcattgtcagtagaatacattattagaaactgttaaggtctttcccgggacatttttttctgccattttcttttgcaattgtagttttatgtactgttaaagaattgtattgaattctttttagatcaaagtaaaaataggtcagcagagatttcagtttcccagggcttaaccagaaccgccacctcaatgcattgtcagtaggatacattattagaaactgttagggtctttcccaggacatttttttttctgtatcatgtctccccatcattgaagcgcaaattttcttgaattcaaatactcccaatgagcttgtatacttccaaacagctaaacttgatttccagttgtggatttcacacatataattgccgccttcttccctcctcttttttcccccctagttgaatcagcttgtctaacaagcccattttcatgccccagctgtgctgtgggttttccaagcctcatatttgaatattcaatgagtttaagatggatatgatttcaaaaaatagggccgggcgcggtggctcacgcctgtaatcccagcactttgggaggccgaagcaggcggatcacgaggtcaggaggtcgagatcatcctggctaacacagtgaaaccccatctctactaaaaatacaaaacattagccgggcgtggtggtgggtgcctgtagtcccagctactctggaggctgaggcaggagaatggcgtgaacccgggaggcggagcttgcagtgagccgagatcgcgccactgcactccagcctgggtgacagagcgagactccgtctc

SEQ ID NO: 267982 - protein, 392 aa, Artificial Sequence
  derived and/or modified sequence
MFKRDPVWKYLQTVQYGVHGNFPRLSYPTFFPRFEFQDVIPPDDFLTSDEEVDSVLFGSLRGHVVGLRYYTGVVNNNEMVALQRDPNNPYDKNAIKVNNVNGNQVGHLKKELAGALAYIMDNKLAQIEGVVPFGANNAFTMPLHMTFWGKEENRKAVSDQLKKHGFKLGPAPKTLGFNLESGWGSGRAGPSYSMPVHAAVQMTTEQLKTEFDKLFEDLKEDDKTHEMEPAEAIETPLLPHQKQALAWMVSRENSKELPPFWEQRNDLYYNTITNFSEKDRPENVHGGILADDMGLGKTLTAIAVILTNFHDGRPLPIERVKKNLLKKEYNVNDDSMKLGGNNTSEKADGLSKDASRCSEQPSISDIKEKSKFRMSELSSSRPKSQKKKKKRE

SEQ ID NO: 267983 - DNA, 1179 bp, Artificial Sequence
  derived and/or modified sequence
atgtttaaacgcgaccctgtgtggaagtatttgcagaccgtacagtacggagtccacgggaactttccacggctgtcttaccctaccttttttccacgctttgaatttcaggatgtgatccctcccgatgattttctgacctctgatgaggaggtggatagtgtgctgttcggcagcctgagaggtcacgtcgtggggctccgttattacaccggtgtggtgaataacaatgagatggttgcactgcagcgggacccaaataacccctacgacaagaacgccataaaagtgaacaatgtgaatgggaaccaagtgggacatctcaagaaagagctggctggcgcactcgcctacataatggacaataagctcgcccagattgaaggcgtggtgccttttggcgctaacaatgcttttactatgcccctgcacatgactttctggggaaaggaagaaaacaggaaggcggtgagtgaccagctaaaaaagcacggtttcaagcttggaccagccccaaagaccctggggttcaacctagaatctgggtggggctccgggagggccggcccctcgtattcgatgcccgtgcatgccgccgtacaaatgactacggaacagctcaaaaccgaatttgacaaactatttgaggatctgaaagaggacgacaaaacccacgaaatggaacctgccgaagctattgaaacaccacttcttccccaccagaaacaggcattagcatggatggtatccagggagaatagcaaggagctgcccccattctgggagcaacggaatgatctgtattataatacgattacaaactttagcgagaaagatcgaccagagaacgtccacggtggcatcctggccgatgatatggggctggggaagactctcactgctatagccgtgatcctcacaaacttccatgatggtcgtcctctcccaattgagcgagttaaaaagaacctgctcaagaaggagtataacgtgaatgacgactctatgaagttgggagggaataatactagtgagaaagcagatggattaagcaaagacgcttcaagatgcagtgagcagccctcaatctcggatatcaaggaaaaatcaaagtttcgaatgtctgagttaagcagctccaggccgaaaagtcagaaaaaaaagaagaaaagagagtag

SEQ ID NO: 267984 - DNA, 1179 bp, Artificial Sequence
  derived and/or modified sequence
atgttcaagagggaccctgtgtggaagtacctgcagacagtgcagtatggagtgcacggcaacttcccccggctgagctaccccaccttcttccccaggtttgagttccaggacgtcatccccccagatgacttcctgaccagtgatgaggaggtggacagcgtgctgtttggcagcctgcggggccacgtggtgggcctgcgctactacacaggagtggtgaacaacaatgagatggtggccctgcagagggaccccaacaacccctatgacaagaatgccatcaaggtgaacaacgtgaatggaaaccaggtgggccacctgaagaaggagctggccggggccctggcctacatcatggacaacaagctggcccagattgaaggagtggtgccctttggagccaacaatgccttcaccatgcccctgcacatgaccttctggggcaaggaggagaacaggaaggctgtgtctgaccagctgaagaagcacggcttcaagctgggccctgcccccaagaccctgggcttcaacctggagagcggctggggcagcggccgggccggccccagctacagcatgcctgtgcacgccgctgtgcagatgaccacagagcagctgaagacagaatttgacaagctgtttgaggacctgaaggaggatgacaagacccatgagatggagcctgctgaggccatcgagacccccctgctgccccaccagaagcaggccctggcctggatggtgtcccgggagaacagcaaggagctgccccccttctgggagcagagaaatgacctgtactacaacaccatcaccaacttcagcgagaaggacagaccagaaaatgtgcatggaggcatcctggctgatgacatgggcctgggcaagaccctgacagccatcgctgtgatcctgaccaacttccatgatggccggcccctgcccatcgagcgggtgaagaagaacctgctgaagaaggagtacaacgtgaatgatgacagcatgaagctgggcggcaacaacaccagcgagaaggcagatggcctgagcaaggatgccagccgctgcagcgagcagcccagcatcagtgacatcaaggagaagagcaagttcaggatgtctgagctgagcagcagccggcccaagagccagaagaagaagaagaagcgggagtag

SEQ ID NO: 267985 - DNA, 1179 bp, Artificial Sequence
  derived and/or modified sequence
atgttcaagcgggaccccgtgtggaagtacctgcagaccgtgcagtacggggtccatggtaacttccccaggctatcatatccaacatttttcccaagatttgaattccaggacgtgatcccgccagatgacttcctgacctccgatgaagaagtggatagtgtattatttggaagcttgagaggtcatgtcgtgggactccggtattatactggggtagtcaacaacaacgagatggttgccctgcaacgcgatccaaacaacccctatgataagaacgccattaaagtaaataatgtaaacggtaatcaggtgggacatctgaagaaggagctggccggcgccttagcatacatcatggacaataagctagcacagattgaaggcgtggtgccttttggcgctaataatgcttttacaatgccattgcatatgacattttggggaaaggaggagaataggaaggctgtcagtgaccaacttaagaagcacgggtttaaactgggacctgccccaaagaccttgggctttaacctcgagtcaggctggggatccgggcgggcaggtcctagttactctatgcctgttcacgctgcagttcagatgactactgagcagctcaaaacagagttcgataagctatttgaggatcttaaggaggatgacaagacccatgagatggagcctgccgaggctattgagactcccctgctccctcaccaaaaacaggccctcgcctggatggtgagtcgcgagaattcgaaagaattgccaccattctgggaacaacggaatgacctctattacaacacaatcaccaacttttccgagaaggacaggcctgaaaacgtccacggaggaattttggcagacgatatgggtctggggaagactcttactgcaatcgcagttatacttactaacttccatgacggacgccccttgcccatcgagcgggtgaagaagaacctgctgaaaaaagagtacaatgtcaacgacgactccatgaaattaggcggaaataacacgagcgaaaaggctgacgggctcagtaaggacgcttctcggtgtagtgagcagccctccataagtgacattaaagagaaaagtaagttcagaatgagcgaactatccagtagtagaccaaagtctcaaaagaagaagaaaaaacgggaatag

SEQ ID NO: 267986 - DNA, 1179 bp, Artificial Sequence
  derived and/or modified sequence
atgttcaagagagaccccgtatggaagtacctccaaactgtgcaatacggtgtgcacggcaattttcccaggctttcctatccaactttttttcctcgctttgagttccaggacgttatccccccagatgattttctgacctctgacgaagaagtagactcagtgctgtttggctctctgagaggacatgtagtgggcttgcggtactacacaggcgtggtcaacaataacgaaatggtggccctgcagagagatccgaataatccctatgataagaatgcaattaaggtcaataacgttaacggaaaccaagtgggtcatctcaagaaggagttggcaggtgctcttgcatacataatggacaacaagctggcccagatcgaaggagtggtgcctttcggagcgaataatgccttcaccatgcccctgcatatgactttctggggaaaggaggaaaaccgcaaggccgtatccgaccagctcaagaagcatggtttcaagcttggtcctgctccaaagacattgggcttcaacctagagagtggttggggctcaggcagagcaggaccgtcctattctatgcccgtccacgccgcagtgcagatgactaccgagcagctaaaaacagaatttgacaaactctttgaggatttaaaagaagatgacaagacgcatgaaatggaacctgccgaggccatcgagacacccctattaccccaccaaaagcaggcactcgcctggatggtgtccagagagaatagcaaggagcttccaccgttttgggaacagcggaacgatttgtactacaataccattacgaatttttcagagaaggaccgcccagagaatgtacatggtggtatcctggccgatgacatgggcctcggcaagactctcaccgctatagctgtcatcctgaccaactttcacgacggacgtccacttcccattgagagagtaaagaagaatcttttgaagaaggagtacaatgtaaacgatgatagcatgaaattgggaggtaataatacctccgaaaaggccgacgggctgagcaaggacgcctcacgatgtagcgagcagccgagcatttctgatatcaaagagaagagtaaatttaggatgtctgaactgagcagttctagacctaaaagccagaagaaaaagaagaaaagggagtag

SEQ ID NO: 267987 - DNA, 1179 bp, Artificial Sequence
  derived and/or modified sequence
atgttcaagagagaccccgtgtggaagtacctgcagaccgtgcagtacggcgtgcacggcaacttccccagactgagctaccccaccttcttccccagattcgagttccaggacgtgatcccccccgacgacttcctgaccagcgacgaggaggtggacagcgtgctgttcggcagcctgagaggccacgtggtgggcctgagatactacaccggcgtggtgaacaacaacgagatggtggccctgcagagagaccccaacaacccctacgacaagaacgccatcaaggtgaacaacgtgaacggcaaccaggtgggccacctgaagaaggagctggccggcgccctggcctacatcatggacaacaagctggcccagatcgagggcgtggtgcccttcggcgccaacaacgccttcaccatgcccctgcacatgaccttctggggcaaggaggagaacagaaaggccgtgagcgaccagctgaagaagcacggcttcaagctgggccccgcccccaagaccctgggcttcaacctggagagcggctggggcagcggcagagccggccccagctacagcatgcccgtgcacgccgccgtgcagatgaccaccgagcagctgaagaccgagttcgacaagctgttcgaggacctgaaggaggacgacaagacccacgagatggagcccgccgaggccatcgagacccccctgctgccccaccagaagcaggccctggcctggatggtgagcagagagaacagcaaggagctgccccccttctgggagcagagaaacgacctgtactacaacaccatcaccaacttcagcgagaaggacagacccgagaacgtgcacggcggcatcctggccgacgacatgggcctgggcaagaccctgaccgccatcgccgtgatcctgaccaacttccacgacggcagacccctgcccatcgagagagtgaagaagaacctgctgaagaaggagtacaacgtgaacgacgacagcatgaagctgggcggcaacaacaccagcgagaaggccgacggcctgagcaaggacgccagcagatgcagcgagcagcccagcatcagcgacatcaaggagaagagcaagttcagaatgagcgagctgagcagcagcagacccaagagccagaagaagaagaagaagagagagtag

SEQ ID NO: 267988 - DNA, 1403 bp, Artificial Sequence
  derived and/or modified sequence
acagagcgacgctggtctcccagattgttgcagaaggagacggcgtcgacgtctgactggactcgcggcgacttacctttcagtcgtgcgctcctgatccggcgctcggaatttgtccccggcttcagggctgcggggcctggaaggaggcgtatcgaggcggctcgaaaacgatccaggggagccgaggcgctcctcttgtcatcccactcagcgccatgtcctggatgttcaagagggatccagtttggaagtacttgcagactgtccagtatggagttcatggaaattttccacgcctctcatatccaactttctttccacgttttgaattccaagatgttatccctccagatgactttctaactagtgatgaagaagtagattccgttttatttggaagtttgagaggtcatgtggttggactacgctattacacgggagtagttaataataatgaaatggttgcattacaacgagatcctaataacccttatgataagaatgcaattaaagtaaacaatgtgaatggaaatcaagttggccatttaaagaaagagcttgcaggtgctttggcctatatcatggacaacaaattggcacaaattgaaggggtagttccttttggtgcaaacaatgcttttaccatgcctctgcatatgactttttggggaaaagaagaaaatagaaaagcggtttcagatcagttgaagaaacatggatttaaattgggtcctgcaccaaaaactttaggattcaatttggaaagtggttggggctctggaagagctggaccaagctatagtatgccagtgcatgctgcagtacagatgacaactgaacagcttaaaacagaatttgacaaattgtttgaagatttaaaagaagatgataaaacccatgaaatggaaccagctgaggctattgaaacaccactgcttccacatcaaaaacaagctctagcttggatggtgtcacgggaaaatagcaaagaacttccaccattctgggaacagcgaaatgacttatactataacacaataacaaatttttctgagaaggaccgaccagaaaatgtccatggaggaattttagctgatgatatgggtttgggtaaaactcttacggccattgcagtaatccttaccaacttccatgatggcagacctcttcctattgaaagagttaaaaagaatctactgaagaaggaatataatgttaacgatgactctatgaaacttggaggaaacaataccagtgaaaaggcagatggactaagcaaagacgcatctagatgtagtgaacaacccagtatttcagatatcaaggagaagagtaagtttcgcatgtcagaattgtctagctcccgccccaaaagtcaaaaaaaaaagaaaaagagagag

SEQ ID NO: 267989 - protein, 386 aa, Artificial Sequence
  derived and/or modified sequence
MIISTPQRLTSSGSVLIGSPYTPAPAMVTQTHIAEATGWVPGDRKRARKFIDSDFSESKRSKKGDKNGKGLRHFSMKVCEKVQRKGTTSYNEVADELVSEFTNSNNHLAADSQAYDQKNIRRRVYDALNVLMAMNIISKEKKEIKWIGLPTNSAQECQNLEIEKQRRIERIKQKRAQLQELLLQQIAFKNLVQRNRQNEQQNQGPPALNSTIQLPFIIINTSRKTVIDCSISSDKFEYLFNFDNTFEIHDDIEVLKRMGMSFGLESGKCSLEDLKLAKSLVPKALEGYITDISTGPSWLNQGLLLNSTQSVSNLDLTTGATLPQSSVNQGLCLDAEVALATGQFLAPNSHQSSSAASHCSESRGETPCSFNDEDEEDDEEDSSSPE

SEQ ID NO: 267990 - protein, 370 aa, Artificial Sequence
  derived and/or modified sequence
MIISTPQRLTSSGSVLIGSPYTPAPAMVTQTHIAEATGWVPGKRSKKGDKNGKGLRHFSMKVCEKVQRKGTTSYNEVADELVSEFTNSNNHLAADSQAYDQKNIRRRVYDALNVLMAMNIISKEKKEIKWIGLPTNSAQECQNLEIEKQRRIERIKQKRAQLQELLLQQIAFKNLVQRNRQNEQQNQGPPALNSTIQLPFIIINTSRKTVIDCSISSDKFEYLFNFDNTFEIHDDIEVLKRMGMSFGLESGKCSLEDLKLAKSLVPKALEGYITDISTGPSWLNQGLLLNSTQSVSNLDLTTGATLPQSSVNQGLCLDAEVALATGQFLAPNSHQSSSAASHCSESRGETPCSFNDEDEEDDEEDSSSPE

SEQ ID NO: 267991 - protein, 86 aa, Artificial Sequence
  derived and/or modified sequence
MTAKNVGLTSTNAEVRGFIDQNLSPTKGNISFVAFPVSNTNSPTKILPKTLGPINVNVGPQMIISTPQRLTSSGSVLIGSPYTPAP

SEQ ID NO: 267992 - DNA, 1276 bp, Artificial Sequence
  derived and/or modified sequence
catttgttgcatttccagtttccaataccaactcacctacaaagattttaccaaaaaccttaggaccaataaatgtgaatgttggaccccaaatgattataagcacaccacagagactaaccagttcaggaagtgttctgattgggagtccatatacccctgcaccagcaatggttactcagacacacatagcagaagctactggctgggtccctggtgatagaaaacgggctagaaaatttatagactctgatttttcagaaagtaaacgaagcaaaaaaggagataaaaatgggaaaggcttgagacacttttcaatgaaagtgtgtgagaaagttcaacgaaaaggtacaacatcgtacaatgaagtcgctgatgagctggtgtcagagttcaccaattcaaataaccatttggctgctgattcgcaggcttatgatcagaagaacattaggcgaagagtttatgatgctttaaatgtgctaatggcaatgaacataatttcaaaggaaaaaaaagaaatcaagtggattggcctgcctaccaattctgctcaggaatgtcagaatctggagatagagaagcagaggcggatagaacggataaagcagaagcgggcccagctgcaagaacttctcctacagcaaatcgctttcaaaaacctggtacagagaaatcgacaaaatgagcagcaaaaccagggcccgccggctctgaactctaccattcagctgccattcataatcatcaatacaagcagaaaaacagtcatagattgcagcatctccagtgacaagtttgagtatcttttcaattttgacaacacctttgagatccatgatgacatagaagtactaaagcggatgggaatgtcgtttggcctggagtcaggcaaatgctctctggaggatctgaaacttgcgaaatccctggtgccaaaggctttagaaggttatatcacagatatctccacaggaccttcttggttaaatcagggactacttctgaactctacccaatcagtttcaaatttagacctgaccactggtgccaccttaccccagtcaagtgtaaaccaagggttatgcttggatgcagaagtggccttagcaactgggcagttcctggccccaaacagtcaccagtccagcagtgcggcctctcactgctccgagtcccgaggcgagaccccctgttcgttcaatgatgaagatgaggaagatgatgaggaggattcctcctccccagaataaagacaagagaaagcctacgtttc

SEQ ID NO: 267993 - DNA, 1732 bp, Artificial Sequence
  derived and/or modified sequence
gcgatctcggctgcggcgctgccgcagctgcccggcccgcggggcgcgccctgacccttcatctttgggcaggctcgagggcgcgcgcacggttggcgttctggggcctcaaactcctgggccttgaccgggcaggccgcgtctccccgggtgtgagtccaccgggacccggccgccgcctaagcgcgggcgccacagaagcggcggcgcccgaagacgcgctcctggctcggcccgacagcctcgcttggccgccagttcttctgcagccgaaggcggttgttcttttaaagaattattgaagacgaaggtttttttctttttatttttttaatggctttacagaatcttaaatagaatacagtttgacatgacggcaaaaaatgttggtttgacttccacaaatgcagaagtaagaggatttatagatcagaatctcagtccaacaaaaggtaaatacctagaagtggaattgctgggtcatatggcaacatttcatttgttgcatttccagtttccaataccaactcacctacaaagattttaccaaaaaccttaggaccaataaatgtgaatgttggaccccaaatgattataagcacaccacagagactaaccagttcaggaagtgttctgattgggagtccatatacccctgcaccagcaatggttactcagacacacatagcagaagctactggctgggtccctggtaaacgaagcaaaaaaggagataaaaatgggaaaggcttgagacacttttcaatgaaagtgtgtgagaaagttcaacgaaaaggtacaacatcgtacaatgaagtcgctgatgagctggtgtcagagttcaccaattcaaataaccatttggctgctgattcgcaggcttatgatcagaagaacattaggcgaagagtttatgatgctttaaatgtgctaatggcaatgaacataatttcaaaggaaaaaaaagaaatcaagtggattggcctgcctaccaattctgctcaggaatgtcagaatctggagatagagaagcagaggcggatagaacggataaagcagaagcgggcccagctgcaagaacttctcctacagcaaatcgctttcaaaaacctggtacagagaaatcgacaaaatgagcagcaaaaccagggcccgccggctctgaactctaccattcagctgccattcataatcatcaatacaagcagaaaaacagtcatagattgcagcatctccagtgacaagtttgagtatcttttcaattttgacaacacctttgagatccatgatgacatagaagtactaaagcggatgggaatgtcgtttggcctggagtcaggcaaatgctctctggaggatctgaaacttgcgaaatccctggtgccaaaggctttagaaggttatatcacagatatctccacaggaccttcttggttaaatcagggactacttctgaactctacccaatcagtttcaaatttagacctgaccactggtgccaccttaccccagtcaagtgtaaaccaagggttatgcttggatgcagaagtggccttagcaactgggcagttcctggccccaaacagtcaccagtccagcagtgcggcctctcactgctccgagtcccgaggcgagaccccctgttcgttcaatgatgaagatgaggaagatgatgaggaggattcctcctccccagaataaagacaagagaaagcctacgtttcaatatgtg

SEQ ID NO: 267994 - DNA, 1853 bp, Artificial Sequence
  derived and/or modified sequence
gctccgccgccaaagctcgcgcgggggaagcggggctgtagctgggcagggagagggcggacgaaatcggtagcgatctcggctgcggcgctgccgcagctgcccggcccgcggggcgcgccctgacccttcatctttgggcaggctcgagggcgcgcgcacggttggcgttctggggcctcaaactcctgggccttgaccgggcaggccgcgtctccccgggtgtgagtccaccgggacccggccgccgcctaagcgcgggcgccacagaagcggcggcgcccgaagacgcgctcctggctcggcccgacagcctcgcttggccgccagttcttctgcagccgaaggcggttgttcttttaaagaattattgaagacgaaggtttttttctttttatttttttaatggctttacagaatcttaaatagaatacagtttgacatgacggcaaaaaatgttggtttgacttccacaaatgcagaagtaagaggatttatagatcagaatctcagtccaacaaaaggtaaatacctagaagtggaattgctgggtcatatggcaacatttcatttgttgcatttccagtttccaataccaactcacctacaaagattttaccaaaaaccttaggaccaataaatgtgaatgttggaccccaaatgattataagcacaccacagagactaaccagttcaggaagtgttctgattgggagtccatatacccctgcaccagcaatggttactcagacacacatagcagaagctactggctgggtccctggtgatagaaaacgggctagaaaatttatagactctgatttttcagaaagtaaacgaagcaaaaaaggagataaaaatgggaaaggcttgagacacttttcaatgaaagtgtgtgagaaagttcaacgaaaaggtacaacatcgtacaatgaagtcgctgatgagctggtgtcagagttcaccaattcaaataaccatttggctgctgattcgcaggcttatgatcagaagaacattaggcgaagagtttatgatgctttaaatgtgctaatggcaatgaacataatttcaaaggaaaaaaaagaaatcaagtggattggcctgcctaccaattctgctcaggaatgtcagaatctggagatagagaagcagaggcggatagaacggataaagcagaagcgggcccagctgcaagaacttctcctacagcaaatcgctttcaaaaacctggtacagagaaatcgacaaaatgagcagcaaaaccagggcccgccggctctgaactctaccattcagctgccattcataatcatcaatacaagcagaaaaacagtcatagattgcagcatctccagtgacaagtttgagtatcttttcaattttgacaacacctttgagatccatgatgacatagaagtactaaagcggatgggaatgtcgtttggcctggagtcaggcaaatgctctctggaggatctgaaacttgcgaaatccctggtgccaaaggctttagaaggttatatcacagatatctccacaggaccttcttggttaaatcagggactacttctgaactctacccaatcagtttcaaatttagacctgaccactggtgccaccttaccccagtcaagtgtaaaccaagggttatgcttggatgcagaagtggccttagcaactgggcagttcctggccccaaacagtcaccagtccagcagtgcggcctctcactgctccgagtcccgaggcgagaccccctgttcgttcaatgatgaagatgaggaagatgatgaggaggattcctcctccccagaataaagacaagagaaagcctacgtttcaatatgtga

SEQ ID NO: 267995 - DNA, 9911 bp, Artificial Sequence
  derived and/or modified sequence
gcgcactgtgctgctccgccgccaaagctcgcgcgggggaagcggggctgtagctgggcagggagagggcggacgaaatcggtagcgatctcggctgcggcgctgccgcagctgcccggcccgcggggcgcgccctgacccttcatctttgggcaggctcgagggcgcgcgcacggttggcgttctggggcctcaaactcctgggccttgaccgggcaggccgcgtctccccgggtgtgagtccaccgggacccggccgccgcctaagcgcgggcgccacagaagcggcggcgcccgaagacgcgctcctggctcggcccgacagcctcgcttggccgccagttcttctgcagccgaaggcggttgttcttttaaagaattattgaagacgaaggtttttttctttttatttttttaatggctttacagaatcttaaatagaatacagtttgacatgacggcaaaaaatgttggtttgacttccacaaatgcagaagtaagaggatttatagatcagaatctcagtccaacaaaaggtaaggattattgaataaaatttttctgaattaaggcaacatttcatttgttgcatttccagtttccaataccaactcacctacaaagattttaccaaaaaccttaggaccaataaatgtgaatgttggaccccaaatgattataagcacaccacagagactaaccagttcaggaagtgttctgattgggagtccatatacccctgcaccagcaatggttactcagacacacatagcagaagctactggctgggtccctggtgatagaaaacgggctagaaaatttatagactctgatttttcagaaagtaaacgaagcaaaaaaggagataaaaatgggaaaggcttgagacacttttcaatgaaagtgtgtgagaaagttcaacgaaaaggtacaacatcgtacaatgaagtcgctgatgagctggtgtcagagttcaccaattcaaataaccatttggctgctgattcgcaggcttatgatcagaagaacattaggcgaagagtttatgatgctttaaatgtgctaatggcaatgaacataatttcaaaggaaaaaaaagaaatcaagtggattggcctgcctaccaattctgctcaggaatgtcagaatctggagatagagaagcagaggcggatagaacggataaagcagaagcgggcccagctgcaagaacttctcctacagcaaatcgctttcaaaaacctggtacagagaaatcgacaaaatgagcagcaaaaccagggcccgccggctctgaactctaccattcagctgccattcataatcatcaatacaagcagaaaaacagtcatagattgcagcatctccagtgacaagtttgagtatcttttcaattttgacaacacctttgagatccatgatgacatagaagtactaaagcggatgggaatgtcgtttggcctggagtcaggcaaatgctctctggaggatctgaaacttgcgaaatccctggtgccaaaggctttagaaggttatatcacagatatctccacaggaccttcttggttaaatcagggactacttctgaactctacccaatcagtttcaaatttagacctgaccactggtgccaccttaccccagtcaagtgtaaaccaagggttatgcttggatgcagaagtggccttagcaactgggcagttcctggccccaaacagtcaccagtccagcagtgcggcctctcactgctccgagtcccgaggcgagaccccctgttcgttcaatgatgaagatgaggaagatgatgaggaggattcctcctccccagaataaagacaagagaaagcctacgtttcaatatgtgatgctcatgtgtgtttgtagtgtgagctcttgtttttgaaatgattgcttcagtctttgcctttgtttgcactgtgtgttcagtgaaaactagagaaacacaataagcaaatcacatgaaggctgagatgattgagatgaaagttaacatagtgtgaatgaaagtctggccaacagagcagtagatgatataacaaagaaagcatgctttctgaggagatagtggggataatccctgaagagttggcagtgtgagtgcaactcatttatcttctgtgaggtgggatttttgtgttcctcacacccatgtaattattcttagaattgagattgctacacggagcagtccttgacgatcgtgtttctgacgtttctcttccttgcctggactgcctttgacaaggcagaaatgaacatgaaaagtccccaggagaggggagctgtgtagtgagggatactgagggcagtcctgtggctgaggggcacagattgaactgctgaactagttggaggtctagatgaggtgctttacgcatcagctgccttagacagcttctagaaaggagcgagcgctacttcttaagtacttaagtgacatttagataatttatagtaaaactgaaattattattagccaatgcattggtgcatagaatttactagggctacttctggaagccaaaatagaatagcatttccatgtgcattaaatactttgccagcactgcctttgccagcatcctaaatctggagttttacaaagaaggaaactgtatctttaggttaatcaaagctatgcatttcatatagctttttcatttaaaacaagacaaagaaacaaattcctatgaccaaattgcttgcctacagttccctgcagtaattgtatgatctcacccagtgtgcaatttgtgaaaatgaaccaaatgtcattacttttgtcttaaagaaaagtctatttcaagaatatgaacagcagtgtttccttgtacatgtcaccttttttcacattttcattaatcagaatgaccttattgagcctactcctggggtcaattgcatttcaaactaatccaatatttagtgtttcacagaaacactagaaaacgttgaacactcctactgcctggatatatggtagtgcagttatgttgtttatggctcaagatgtcattagaaatactgcagtggtgtattcacagctgctccttctctgaatgaaagagtgtagggacacctgccaccatggccagaccctgactgaatttcacattaaggctttggaaaggagcaaataataatgggagaattaactccaaaactttgacctgaatcatgtggatttgtcccaagattatgctagatgcaccaagcatggcccaaattggttcttttttaaatcccatgggggaagtgcaggctccttcctgtggtgcctctttatagcctcaccaccatgctaacactgagcatggtgaggaggaggaagctttggctagctaaacatgtttaataaggccataaaaactgagaaagaaaaacattcaactttagctgaagctcctttgatacaaaagtttcattctgtcagaaataagccatagtacagactcagagatagaggcagtttctagagaactcggtcttatcgtgggttctggagcacacctctcagaccagtcaggaacactggggaggtgacagcaggtccccaggggcctgcagggaatctttcagctgcacggattgggatttccctccaaaccaaactgtcctttaaggggcagcctcctcttttactaactccaccctttctcatctctgggacccagcagggacctggagaggccaacagccactgctacctttgtagtcttcaaaatattgaactgcaggtcccaagatgcatttcaggatttaagacaggtgcactaatgataaccattccttcaccaagtagcaacattcttgccagagttcttgggaaacctgtttttttctctactctccatctctgctgctctcatgctttaaattgataaaatatgggctcaaaaaaagaaagccgccaaagactcttatccttattggtgccccatcattggccaccccagccataggtgtgtgctgttggtgggaaatggtctccttcctcagcgttgtgtttgggttactggtgaggccagctcacagagtgacatcatggtcaccagtacatgtcgctggagtaaaatcttgcctttagaaactaggttgagctgttcagaaaggtcaattctcttctgtattccccctcaacatttatctgggtctaaagctcagcactgagtcacaatttcacacaagatcaaagtgaggcagtgttaggaaaccatgggctgggtgcagtgcctctcgcctgtaatcgtagcactttgggaggccgaggcgggcacattgcttgagctcaggagttcaagaccagcctgggcaacatgacaaaaccctgtctctacaaaaatacaaaaattagctgggtgtggtggggcatgcctgtagtcctggctactcaagaggctgaggtgggaggattgcttgagcgcaggaggcggaggttgtagagccaagatcacaccactgcactccagcctgggtgacagagcaagaccctgtctcaaaaaaaaaaaaaaaaaaaatggaagttgtggtcacaatgcccaggcttctttgttatagtggcacgctgggttacttgccacacacagatcactcctcccagggctgctggcacacactgattgtggggagttcaagaggccttttccccttgagggtgtggctgtccccctttcaggcgtgtggcgtcattcatggaggaagtgctggctctacttagcacacgcacagtggcactaggacctgcgtgcctggccctcagtgggtagggcggtgctgcctaggcacacagcagcgcttacgggccccaggtgcctactaggctgccttcctcttccccgctgtcagtctgtgtcctccacgtgcttatttcctgtggtgagagcagttgtggtgtttgtataccttgtgccttatgatcaaggtgggccttggaggagggcgggaaaggagcgaccaacatggcggtcctccacccctcagcgacacccaccgcccgagaaactacagacaatggccacaagtttggcgtccttcaatttaattctttaaagaagtgctgggaagaaaaagctatgtggtttctaccattttagcaggataaagaggataactccttccattagcaaattttacagttgttaacagtactctgccatatttgaaaaataatgccagagtcagtccttgaaaacaaggtagctcctatcagaattcaaatggaaattttttttttttttttttttttttttgagactgagtctcgctctgttgcccaggctggagtgcagtggtgatctcggctcactgcaagctccgcctcccgggttcacgccattctcctgcctcagctgggaccatgcctggctaattttttttgtatttttagtagagacggggtttcaccgtgttagccaggatggtctcgatctcctgaccttatgatccacccctctcggcctcccaaagtgctgggattacaggcgtgagccaccgcacccggcctcaaatggaaatatttcacagaggagtggttcagtttagccctgcaagacatctataacttgactgtttgctaaaccacaactctttttggctacttgggtcatagagacagcagagttgctccaagtataaatgtgacttaggctccctccagcacacagtgtgtatgttggagggagtgtggattagcagagaatgagaactacctcagctattcctgccataaccacactgagagaggggggcacggtggggagcctatttagcttttttttttttttgagacggagtcttgctctgtcgccaggctggagtgtagtggcgcaatcccggctcactgcaacctctgcctcccgggttcaagcgattctcctgcctcagcctcccaagtagctgggattataggcgcatgccgccacacccgactaattttttgtatttttagtagagtcagggtttcaccgtgttgcccaggctggtgtcgaactcctgacctcaggtgatctgcccacctcagcctcccgaagtgctgggattacaggtgtgagccaccgcacccggctctatttagctttttaaaaattatttcctttcaagggccctttaatatctatcaagctccctcccctaacaaaatgggctgtccctgcccaacaagtctgaaatagaccttaaaactgtgctgccttagtggtaagtaaggggtgggggttggacagtgaatcttaagatttcatccttcattcagtaagcatttgagtacctactgtgagcaggcattggggcggagcagcgagagccctgccgatgttgggttctcctcctattggggaaacttgatcacagatggaacacgtgcagattgattgatgagtgctgtggagaaagcagcagcgtagcgggaccgtttgggaaaggctactttggctgggggtggctgggaaaggcccctctgggaaagagacagttttactgagtcagatggtggaaagacagatgtctctatactttcttaacaagccactctgtcccataacatgcacttggaatctctcctaagttccagaggccccactgttccagtttcaagccttcattttggagtctgtttgggaacttttaagacttcaaagcaaagttagctaccagcaatttctgtaaaccaagagaagattgtcacaaagattcactactttccaactgaatctatgcagtagaaaaatcattagaaaatacaaaaattagccgggcgtggtggcacatgcctgtagtcccagctactcgggaggctgaggcaggagaatcacttgaacccaggaggcggaggttgcagtgagccaagatcccgccactgcactccagcccaggtgacagagcaggactctgtctcaaaaaaagaaaaaagaaagaaagaaaaatgattagaaattgagaactattttacgtgtttctaagttgttggctacatcaaagagatcatctgtattctgcatatgggctggctttggtgaagctgatgactggacttctaagaaccgttttcccaaatgggttcccatattcatgcacccaaagcaatggtccccaagcactgatgaaaactaatatgcatttcccaaagacccacactatgtatcaggagcctgcaccatgccatttgaatgaccctcagcaatgtgcctccctgccctcaaattcccagttgataacagtgtttgattaaatttccactcaagccaaacatggttactaagaagagaaaaacctgatgtttgcataatattttttttcccctcgagatggagtcttgctctgttgcccaggctggagtgcagtggcatgatctcagccactgcaacctctgcctcccgggttcaagcgattcttctgcctcagcctcccaagtagttgggattacagacatgtgccaccacgcctggctaatttttgtatttttagtagagacagggtttcaccatgttgaccacactggtcttgaacttctaaccatgtgatctgcctgcctcggcctcccaaagtgctgggattacaggcttgagccaccacgcccagcctaagattttatgattaaaaaaaattcaagctcaatacccacataaattataacgtttctcaggaagtagtcccttaaccaaaacgtctctgagaagtgatgcttaggtaatctctgggatccgattttcccacatgtctcactccacagtatgctaaagaagaaaaagtgagtgggcacaacactttgaccctctggctaagccctgggagtccctgacaggtccagaaacttctctgacacccattcaccagggtgctgagataggagaaagtgctcatttataatgtgtattctgtgcagctgttctcagacaagaccggatcttgtcatcttaccttttgctttacaaaaaaggcctgttgaagtcaatgctgtcttgccccttgctgtttcagcaggttagactttggtcttcactgcttatagctgcattggaggccaacgtagctgatgctcagggtcaggcctcgccccttcgccgcaggtctcaggatcggggataacatcgctcccaccctgctcatttagagatgggaaacaagcaagagcttgacttgcctcccatccctcagcctgtctgtggcagagcctgcaccaaaacccagagcttcttccctccgtgagggccacgctgtcaccacagtcctcccagatgggttttggattagcatcagtcctgtgtcaccaagtgccaaacagctgaggggtagaagtgggactcctttcccgagccccagcatgaggctgtggtgtcaggtttaggcctctctcaagtcagaaaaccccgggctgagacctccacagacaagggctccccatgctggccattggcaggggcccaagaagttcagtgaccaactggtccttccacaccacaccagctggtgctgcccatgtctgtcgaatcataacggaaaattccccagatcacgtttggatttaaaaactcatcccttgtcgtgcttcaatgcatgccatttgtcacttaccatacttcaccatggccgagcttcatgtcacatggcctggcgattgtgcttgttcacactggggccaggattttcatactaaaacgtcactgacaatggggctacttttctcctgaatagctcctctgggcttgttgcagttctagttttcccagtagttccatggcaggttcaacctctcagtgtcctgaaaaatggaaccacccactaaccatatgcactggctgcccaggtggctgcactccggggatcacgtttcagtactgagttccttcacgcacttggttcaccaccatcactcttgagttttggacaaaagaggtgggtatgccaggcacagtggctcacgcctgtgatcccagcactttgggaggccgaggcgggcggatcacctgaggtcgggagttcgaaaccagcctgaccaacatggagaaaccctgtctctactaaaaatataaaattagccgggtgtggtggcgcatgcctgtaatcccagctactcgggaggctgaggcaggagaatctcttgaacccaggaggcaaaagttgcaatgagctgagatcgtgccatttgcactccagcctgggcaacaagagcgaaattccatctcaaaaaaaaaaggtgggtaaagggccatgagcccaaaccactaggttgttcaccttttcatctgaaaatgctttactctgactatgtgctattgggttttatttccagaaaatatagttctccttttttctgcatgaaggatacatcgtggtgccacatgctttaagcaatttaaacaagagagataagaggaaaatgcaaccaccacatctgacttgcccaatgtagactttcctttattagattgaagtacacaacctaatatgatatattattttgtagtatctcagactttgtaaataaatgccattatttttatatggaaattttatagaagagctatttctgtatacgtaattactcctgattttctgaaattgcttctggtagataacagacaagtcctaagcagtgttccactaagggtggttccaggcctgcctgccgtggagttgactgggggaattttacagttttgcgatcctaggatgcgtcccagacgctcagtcagaagtgctggaggtggggcctgggaagctgtatttgtaatgaactctggtgttttttgtccattaaagtgtatctttgtccatcctataagattaaaggaaagaaaaagcatctcaaatgagtgtaagttgttcttgagaaaaaaatgtatcagacttttatgatttgaatgaaatgtattatagaaaaaaataaacacttt

SEQ ID NO: 267996 - DNA, 435 bp, Artificial Sequence
  derived and/or modified sequence
atgatctggagcgacatcaagagactgtggtacgagggcctggaggacttcctggaggagagcagaaaccagctgagcttcgtgatgaacagcctgtacctggccaccttcgccctgaaggtggtggcccacaacaagatcagcatgggccagatgctgcaggacttcggcaagttcctgggcatgttcctgctggtgctgttcagcttcaccatcggcctgacccagctgtacgacaagggctacaccagcaaggagcagaaggactgcgtgggcatcttctgcgagcagcagagcaacgacaccttccacagcttcatcggcacctgcttcgccctgttctggtacatcttcagcctggcccacgtggccatcttcgtgaccagattcagctacggcgaggagctgcagagcttcgtgggcgccgtgatctag

SEQ ID NO: 267997 - DNA, 435 bp, Artificial Sequence
  derived and/or modified sequence
atgatctggagtgatattaaacgtctgtggtatgaggggctggaggactttctggaagagtcgaggaatcagctgagtttcgtgatgaattctctttacttagccacttttgccctgaaagttgtggcgcataataagatctcaatgggtcagatgctgcaagacttcggcaaattcctcggaatgttccttctggtgctctttagctttacgattggcctcacacagctgtatgataaggggtacacttccaaggagcaaaaggattgcgtgggaattttctgtgagcagcagagcaacgacacattccactcctttatcggaacctgtttcgctttattctggtatatctttagcctagctcacgtagccatcttcgtgaccaggttttcctacggcgaggaactgcaatcatttgtgggggctgtaatttag

SEQ ID NO: 267998 - DNA, 435 bp, Artificial Sequence
  derived and/or modified sequence
atgatctggagcgacatcaagaggctgtggtatgagggcctggaggacttcctggaggagagcaggaaccagctgagctttgtgatgaacagcctgtacctggccacctttgccctgaaggtggtggcccacaacaagatctccatgggccagatgctgcaggactttgggaagttcctgggcatgttcctgctggtgctcttctccttcaccatcggcctgacccagctgtatgacaagggctacaccagcaaggagcagaaggactgtgtgggcatcttctgtgagcagcagagcaatgacaccttccacagcttcatcggcacctgctttgccctcttctggtacatcttcagcctggcccacgtggccatctttgtgacccgcttctcctatggagaggagctgcagagctttgtgggcgccgtcatctag

SEQ ID NO: 267999 - DNA, 435 bp, Artificial Sequence
  derived and/or modified sequence
atgatctggagcgacatcaagcggctgtggtacgagggcctggaggacttcctggaggaaagtaggaaccagctgtcattcgtgatgaactccttgtatctcgcgacctttgctctcaaggtggtggcacataacaagatatctatgggacaaatgctgcaagattttggcaagttcctggggatgttcctgcttgtgctcttttcttttaccatcggactgacacagctgtatgacaaagggtacacttctaaggagcagaaggattgtgtggggatcttttgtgagcagcagagtaatgatactttccatagttttatcggcacctgtttcgcgctgttctggtatatcttttccctggctcacgtggccatctttgtgacccggttcagctacggggaagagctgcagtccttcgtgggcgcagtcatttag

SEQ ID NO: 268000 - DNA, 435 bp, Artificial Sequence
  derived and/or modified sequence
atgatctggtccgacataaaacggctgtggtacgaagggctcgaagatttcctggaagaaagcaggaaccagctgagtttcgtgatgaacagcctgtaccttgctacttttgctctgaaggttgtggcccataataagatctcaatgggccagatgctgcaagacttcgggaaattcctcggtatgttcctcctcgtgctcttctcgtttacaattggtctgacgcagctgtatgataaaggctatacctctaaggagcaaaaggactgtgtgggcatattctgcgagcagcagtctaacgacacgtttcattcttttattggtacatgttttgccctgttctggtatatattctctttggcgcatgtagccattttcgtgacaagattttcttacggcgaagaactgcagtcctttgtcggcgcagtcatttag

SEQ ID NO: 268001 - DNA, 1882 bp, Artificial Sequence
  derived and/or modified sequence
attcccgggaggggggagcggcgttggaggccaccgtttccagcatcaacaacagcaacttgtgattggcggtgaccggatattcagttgcacatccccacatcaatgcactgccaatggattttctcattcagcatttacctttggtatagaaagccatatcagtcagtccaatataaatggtgccctcgtcccacccgctgcattgatttctatcatccagaaaggtctacagtatgtagaagcagaagttagtattaatgaggatggtaccttgtttgatggtcgaccaatagagtctctgtccctgatagatgccgtaatgcctgatgtagtacaaacaagacaacaagcttatagagataagcttgcacagcaacaggcagcagctgctgcagctgccgcagctgcagccagccaacaaggatctgcaaaaaatggagaaaacacagcaaatggggaggagaatggagcacatactatagcaagaatatggaatcttagtgagaacagcaccagtggctctacacagttagtacttagacattgtatacgagaaggagggcaagatgttccaagcaacaaggatgtcacatctctagattggaatagtgaaggtacacttctagcaactggttcctatgatgggtttgccagaatatggactaaagatggtaaccttgctagcaccttagggcagcataaaggccctatatttgcattaaaatggaataagaaaggaaatttcatcctaagtgctggagtagacaagactacaattatttgggacgcacatactggtgaagccaagcaacagtttccttttcattcagcaccagcattggatgttgattggcagagcaacaacacctttgcttcttgtagtacagatatgtgcattcatgtctgtaaattaggacaagacagacctattaaaacattccaaggacatacgaatgaagtaaatgctatcaaatgggacccaactggcaatctcttggcctcctgttctgacgacatgactttaaagatatggagtatgaaacaagacaattgtgtccatgatttgcaagcacataataaagaaatttatactatcaaatggagtccaacaggaccagggactaataatccaaatgccaaccttatgttagcaagtgcatcctttgattctactgttaggttatgggatgtagaccgagggatatgcatccataccttgacaaaacaccaagagcctgtgtacagtgtagctttcagtcctgatggcaggtatctggcaagtggttcttttgacaaatgtgtacacatctggaacacgcagacaggtgctctagttcacagctataggggaacaggtggaatatttgaagtttgctggaatgcagcaggagacaaagttggagccagtgcatcagatggttcagtttgtgtattagaccttcggaaatagcgctactagttggaagccatggaccgactatgaatgtgtacatagccaaaatgactgtccctgacccatgtactgctatagtcccacttgaaccatggccagtccactacagccaaatctaaaagaaatatatacatacagtgtatataaacaaaattgcaccctgaagatgacagagttttgtcacagcttgtgaattctgttcaccaagtgctggaatctaatctgctgtgcccctaaaatagcatttagaagttttggatatgaaaaacagaagagagaaaaatatacattataaaagcagaacatacatgtaccagtttttggatactaaatgacagccttgtttctcccctttgaatcagcagacaccatggattatattctttttttcccttcagtagtgagcagtttgtatgtacagagaaa

SEQ ID NO: 268002 - DNA, 1131 bp, Artificial Sequence
  derived and/or modified sequence
atgcccgacgtggtgcagaccagacagcaggcctacagagacaagctggcccagcagcaggccgccgccgccgccgccgccgccgccgccgccagccagcagggcagcgccaagaacggcgagaacaccgccaacggcgaggagaacggcgcccacaccatcgccagaatctggaacctgagcgagaacagcaccagcggcagcacccagctggtgctgagacactgcatcagagagggcggccaggacgtgcccagcaacaaggacgtgaccagcctggactggaacagcgagggcaccctgctggccaccggcagctacgacggcttcgccagaatctggaccaaggacggcaacctggccagcaccctgggccagcacaagggccccatcttcgccctgaagtggaacaagaagggcaacttcatcctgagcgccggcgtggacaagaccaccatcatctgggacgcccacaccggcgaggccaagcagcagttccccttccacagcgcccccgccctggacgtggactggcagagcaacaacaccttcgccagctgcagcaccgacatgtgcatccacgtgtgcaagctgggccaggacagacccatcaagaccttccagggccacaccaacgaggtgaacgccatcaagtgggaccccaccggcaacctgctggccagctgcagcgacgacatgaccctgaagatctggagcatgaagcaggacaactgcgtgcacgacctgcaggcccacaacaaggagatctacaccatcaagtggagccccaccggccccggcaccaacaaccccaacgccaacctgatgctggccagcgccagcttcgacagcaccgtgagactgtgggacgtggacagaggcatctgcatccacaccctgaccaagcaccaggagcccgtgtacagcgtggccttcagccccgacggcagatacctggccagcggcagcttcgacaagtgcgtgcacatctggaacacccagaccggcgccctggtgcacagctacagaggcaccggcggcatcttcgaggtgtgctggaacgccgccggcgacaaggtgggcgccagcgccagcgacggcagcgtgtgcgtgctggacctgagaaagtag

SEQ ID NO: 268003 - DNA, 1131 bp, Artificial Sequence
  derived and/or modified sequence
atgccggacgtggtgcaaactcgtcaacaggcttatcgcgacaaactggcccagcagcaggctgcagccgcggctgctgccgccgccgccgcttcgcaacaaggttctgccaaaaatggcgaaaacaccgctaatggggaggaaaatggagcccacaccatagctcggatatggaatctgtcagagaatagtacctctggttccacacagcttgtgctgcgccactgtatccgggagggtggtcaggatgtccctagtaataaggatgtaacgagcctggattggaatagcgaaggcacacttcttgcgactggcagctatgatggattcgcccggatttggaccaaggatggaaacctcgcatctaccttgggacagcacaaggggccgatcttcgcgttgaaatggaataagaaaggtaacttcatcctgtcagccggtgtggataagaccactatcatctgggatgcccacactggagaggccaagcaacagttcccattccatagcgcacctgcgctggatgtggactggcagagcaataacacctttgcctcctgcagcaccgacatgtgcattcacgtgtgcaagctcggccaggaccgccctatcaaaacattccagggccacacaaacgaggtaaacgcaatcaagtgggatcccacaggtaacctgctggcttcctgcagcgatgatatgaccctgaagatctggtctatgaaacaggacaattgtgtccacgacctccaggcacacaataaagagatttatactattaaatggtctccaaccggcccaggcactaataatcccaatgctaatctgatgctagcatctgcctcgtttgactctactgtcaggttatgggacgtggaccggggcatttgcatccacacactcacaaaacaccaggaaccagtgtattcggtagccttttccccagatggaaggtacctggcgtccgggtctttcgataaatgcgtgcacatctggaacacacagacaggtgctctggtgcacagctaccggggcaccggtggcatcttcgaagtctgctggaatgcagctggcgacaaggtgggggcctccgcctccgacgggtctgtttgcgttctggatttacgcaaatag

SEQ ID NO: 268004 - DNA, 1131 bp, Artificial Sequence
  derived and/or modified sequence
atgccagatgtggtgcagacccggcagcaggcctacagagacaagctggcccagcagcaggccgctgctgctgctgctgctgctgctgctgccagccagcagggcagcgccaagaatggagaaaatacagccaatggagaggagaatggagcccacaccatcgcccgcatctggaacctgtctgagaacagcaccagcggcagcacccagctggtgctgcggcactgcatccgggagggcggccaggatgtgcccagcaacaaggatgtgaccagcctggactggaacagcgagggcaccctgctggccaccggcagctatgatggctttgcccgcatctggaccaaggatggcaacctggccagcaccctgggccagcacaagggccccatctttgccctgaagtggaacaagaagggcaacttcatcctgtctgctggggtggacaagaccaccatcatctgggatgcccacactggagaggccaagcagcagttccccttccacagcgccccagccctggatgtggactggcagagcaacaacacctttgccagctgcagcacagacatgtgcatccacgtgtgcaagctgggccaggaccggcccatcaagaccttccagggccacaccaatgaggtgaatgccatcaagtgggaccccaccggcaacctgctggccagctgcagtgatgacatgaccctgaagatctggagcatgaagcaggacaactgtgtgcatgacctgcaggcccacaacaaggagatctacaccatcaagtggagccccaccggccctggcaccaacaaccccaatgccaacctgatgctggccagcgccagctttgacagcacagtgcggctgtgggatgtggaccggggcatctgcatccacaccctgaccaagcaccaggagcctgtgtacagcgtggccttctccccagatggccgctacctggccagcggcagctttgacaagtgtgtgcacatctggaacacccagacaggagccctggtgcacagctaccggggcactggaggcatctttgaggtgtgctggaatgctgctggggacaaggtgggcgccagcgccagtgatggctctgtgtgtgtgctggacctgaggaagtag

SEQ ID NO: 268005 - DNA, 1131 bp, Artificial Sequence
  derived and/or modified sequence
atgcccgacgtggtgcagacccggcagcaggcctaccgggacaagctggcccaacagcaggccgcagcagcagctgcagccgcagcagcagcctctcagcaaggatcagccaagaacggagagaacacagctaacggagaggaaaacggcgcgcacacaatcgcccggatatggaacctcagcgaaaatagcaccagcggaagcacccagctcgtgctacgtcattgcatccgagaagggggccaggacgtgcccagtaacaaggacgttactagtctggactggaactctgaggggacactcctggcgacaggctcgtatgatggctttgcccgtatttggaccaaggacgggaatctggcttccaccttgggtcaacacaaaggcccaatctttgccctaaagtggaacaaaaagggcaactttattcttagcgctggagttgataagactacaataatctgggatgcacataccggagaggccaagcagcagttccctttccactccgcacctgccctggatgtcgactggcagtcaaacaacacctttgcaagctgcagtaccgacatgtgtatccatgtttgtaagttggggcaggaccgcccaatcaagacatttcaaggacacactaacgaagtaaatgccataaaatgggatcccactggcaacctcctggcttcctgctccgacgatatgaccttgaagatctggtcgatgaaacaagataattgtgttcatgatctccaggcacacaacaaggagatatatactattaaatggagtccaactggacctggcaccaataaccctaatgctaatctcatgctggcttcagcatcttttgactcaactgtcaggctgtgggatgtcgacaggggcatttgcatccatacacttacaaaacatcaggaacctgtctattctgtggcattttctcctgacggccggtatcttgcaagcggctcgttcgataagtgtgtacacatctggaacacccagactggtgccctggtgcattcttatagagggacaggaggcattttcgaggtgtgctggaatgcggccggagataaagtcggcgcatcagccagcgacggatccgtttgcgtgctcgatctgcgcaagtag

SEQ ID NO: 268006 - DNA, 1131 bp, Artificial Sequence
  derived and/or modified sequence
atgcctgatgtggttcagacacggcagcaggcttacagggacaaactagctcaacagcaggcagcggcagccgctgcagcggcagcggcagcgagccagcagggaagtgccaagaacggggaaaatacagccaatggtgaggagaatggtgcacacacaatcgctaggatctggaacctctctgagaattcgacttccgggtctacgcagctggtgctgcggcattgcattcgggaaggaggccaagacgtcccatcaaacaaggatgtgaccagcctagactggaattccgagggaaccctgctagctactggctcctacgatgggtttgcacgcatttggaccaaggacgggaacctagccagcactctaggacagcacaaggggcctatattcgccctaaagtggaacaagaaagggaattttatccttagcgccggtgtggataagaccactataatatgggacgcacacaccggggaggctaaacagcaattcccatttcattccgcccctgctctagacgtagactggcaaagcaacaacacctttgcatcttgctctaccgatatgtgcattcatgtttgcaaactgggtcaagacagacccatcaaaacatttcaagggcacacaaacgaggtgaatgctataaaatgggaccctacaggcaatttactcgcgagttgctccgatgatatgactctgaaaatctggtcaatgaaacaggacaattgcgtccacgaccttcaagcgcataataaagaaatttacaccatcaaatggtctccaacgggcccagggaccaataaccccaatgctaaccttatgctggcctccgcctcgttcgacagtactgtcaggttgtgggatgttgacaggggcatttgcatccacactttaaccaaacatcaggaaccagtatattctgtggcctttagtcccgacgggcgatacctcgcaagcggttcgtttgacaagtgcgtccacatttggaacacccaaaccggcgctctcgtgcactcatatcgcggtactggtggaatcttcgaggtgtgttggaatgccgcaggcgataaagtgggtgccagcgcttctgacgggtcagtgtgtgtcctcgaccttaggaaatag

SEQ ID NO: 268007 - DNA, 279 bp, Artificial Sequence
  derived and/or modified sequence
atgagctgtcagcagaatcagcagcagtgccagcccccacccaaatgtccaagtccaaaatgtccacctaaatccccggtccagtgcctccctcccgcaagcagtggctgcgcgcctagttctgggggatgcgggccatcgtctgaaggaggctgcttcctgaaccaccataggcgtcatcaccgatgccgcaggcagcgacctaactcctgtgaccgcggtagcggacagcaagggggaggtagtggatgtggccacggctcaggcggttgttgttag

SEQ ID NO: 268008 - protein, 703 aa, Artificial Sequence
  derived and/or modified sequence
MEALLEGIQNRGHGGGFLTSCEAELQELMKQIDIMVAHKKSEWEGRTHALETCLKIREQELKSLRSQLDVTHKEVGMLHQQVEEHEKIKQEMTMEYKQELKKLHEELCILKRSYEKLQKKQMREFRGNTKNHREDRSEIERLTAKIEEFRQKSLDWEKQRLIYQQQVSSLEAQRKALAEQSEIIQAQLVNRKQKLESVELSSQSEIQHLSSKLERANDTICANELEIERLTMRVNDLVGTSMTVLQEQQQKEEKLRESEKLLEALQEEKRELKAALQSQENLIHEARIQKEKLQEKVKATNTQHAVEAIRPREESLAEKKYTSQGQGDLDSVLSQLNFTHTSEDLLQAEVTCLEGSLESVSATCKQLSQELMEKYEELKRMEAHNNEYKAEIKKLKEQILQGEQSYSSALEGMKMEISHLTQELHQRDITIASTKGSSSDMEKRLRAEMQKAEDKAVEHKEILDQLESLKLENRHLSEMVMKLELGLHEAKEISLADLQENYIEALNKLVSENQQLQKDLMNTKSQLEISTQMCKKQNDRIFKPTHSRTTEFKNTEFKPTHGQHRHDGIKTEHYKTDLHSPRGQASDSINPMSRVLSPLSPQISPCSSTRSLTSYSLCKTHSLPSALDTNEANFSDTMSESMNDQEEFISSCSLPVSPLGSIATRFLEEEELRSHHILERLDAHIEELKRESEKTVRQFTALK

SEQ ID NO: 268009 - protein, 162 aa, Artificial Sequence
  derived and/or modified sequence
MEALLEGIQNRGHGGGFLTSCEAELQELMKQIDIMVAHKKSEWEGRTHALETCLKIREQELKSLRSQLDVTHKEVGMLHQQVEEHEKIKQEMTMEYKQELKKLHEELCILKRSYEKLQKKQMREFRGNTKNHREDRSEIERLTAKIEEFRQKSLDWEKQRLI

SEQ ID NO: 268010 - protein, 63 aa, Artificial Sequence
  derived and/or modified sequence
MEALLEGIQNRGHGGGFLTSCEAELQELMKQIDIMVAHKKSEWEGRTHALETCLKIREQELKS

SEQ ID NO: 268011 - DNA, 2112 bp, Artificial Sequence
  derived and/or modified sequence
atggaggccctgctggagggcatccagaacagaggccacggcggcggcttcctgaccagctgcgaggccgagctgcaggagctgatgaagcagatcgacatcatggtggcccacaagaagagcgagtgggagggcagaacccacgccctggagacctgcctgaagatcagagagcaggagctgaagagcctgagaagccagctggacgtgacccacaaggaggtgggcatgctgcaccagcaggtggaggagcacgagaagatcaagcaggagatgaccatggagtacaagcaggagctgaagaagctgcacgaggagctgtgcatcctgaagagaagctacgagaagctgcagaagaagcagatgagagagttcagaggcaacaccaagaaccacagagaggacagaagcgagatcgagagactgaccgccaagatcgaggagttcagacagaagagcctggactgggagaagcagagactgatctaccagcagcaggtgagcagcctggaggcccagagaaaggccctggccgagcagagcgagatcatccaggcccagctggtgaacagaaagcagaagctggagagcgtggagctgagcagccagagcgagatccagcacctgagcagcaagctggagagagccaacgacaccatctgcgccaacgagctggagatcgagagactgaccatgagagtgaacgacctggtgggcaccagcatgaccgtgctgcaggagcagcagcagaaggaggagaagctgagagagagcgagaagctgctggaggccctgcaggaggagaagagagagctgaaggccgccctgcagagccaggagaacctgatccacgaggccagaatccagaaggagaagctgcaggagaaggtgaaggccaccaacacccagcacgccgtggaggccatcagacccagagaggagagcctggccgagaagaagtacaccagccagggccagggcgacctggacagcgtgctgagccagctgaacttcacccacaccagcgaggacctgctgcaggccgaggtgacctgcctggagggcagcctggagagcgtgagcgccacctgcaagcagctgagccaggagctgatggagaagtacgaggagctgaagagaatggaggcccacaacaacgagtacaaggccgagatcaagaagctgaaggagcagatcctgcagggcgagcagagctacagcagcgccctggagggcatgaagatggagatcagccacctgacccaggagctgcaccagagagacatcaccatcgccagcaccaagggcagcagcagcgacatggagaagagactgagagccgagatgcagaaggccgaggacaaggccgtggagcacaaggagatcctggaccagctggagagcctgaagctggagaacagacacctgagcgagatggtgatgaagctggagctgggcctgcacgaggccaaggagatcagcctggccgacctgcaggagaactacatcgaggccctgaacaagctggtgagcgagaaccagcagctgcagaaggacctgatgaacaccaagagccagctggagatcagcacccagatgtgcaagaagcagaacgacagaatcttcaagcccacccacagcagaaccaccgagttcaagaacaccgagttcaagcccacccacggccagcacagacacgacggcatcaagaccgagcactacaagaccgacctgcacagccccagaggccaggccagcgacagcatcaaccccatgagcagagtgctgagccccctgagcccccagatcagcccctgcagcagcaccagaagcctgaccagctacagcctgtgcaagacccacagcctgcccagcgccctggacaccaacgaggccaacttcagcgacaccatgagcgagagcatgaacgaccaggaggagttcatcagcagctgcagcctgcccgtgagccccctgggcagcatcgccaccagattcctggaggaggaggagctgagaagccaccacatcctggagagactggacgcccacatcgaggagctgaagagagagagcgagaagaccgtgagacagttcaccgccctgaagtag

SEQ ID NO: 268012 - DNA, 5778 bp, Artificial Sequence
  derived and/or modified sequence
gagttcatttgctcgcgtgcaggggaagtctggagaaggcattgtttcaattattaaaagtgtgggggcagtgggcggaacaaacgcgccgactacagaggctggacgtaagcttagcggtggcgcgcgtgcgcagcgccggcccgagttgccaaaacaaaggggatttggtgatggaggctttgttagaaggaatacaaaatcgagggcatggtgggggatttttgacatcttgtgaagcagaactacaggagctcatgaaacagattgacataatggtggctcataaaaaatctgaatgggaaggacgtacacatgctctagaaacttgcttgaaaatccgtgaacaggaacttaagagtcttaggagtcagttggatgtgacacataaggaggttggaatgttgcatcagcaggtagaagaacatgaaaaaatcaagcaagagatgaccatggaatataagcaggagttgaagaaactacatgaagaattatgcatactgaagagaagctatgaaaagcttcagaaaaagcaaatgagggaattcagaggaaataccaaaaatcacagggaagatcggtctgaaattgagaggttaactgcaaaaatagaggaattccgtcagaaatcgctggactgggagaagcaacgcttgatttatcagcaacaggtatcttcactggaggcacaaaggaaggctctggctgaacaatcagagataattcaggctcagcttgtcaatcggaaacagaaattagagtctgtggaactttctagccaatcagaaattcaacacttaagcagtaaactggagcgggctaatgacactatctgtgccaatgagttggaaatagagcgcctcaccatgagggtcaatgacttggttggaaccagtatgactgtcctacaggagcagcagcaaaaagaagaaaaattgagggaatctgaaaaactattagaggctctgcaggaagaaaagagagaattgaaggcagctcttcagtctcaagaaaatctcatacatgaggccagaatacaaaaggagaagttacaagaaaaagtaaaggcaactaacactcaacatgctgtagaagctataaggccacgggaagaatctctggcagaaaagaagtacacctctcaagggcagggggacttagacagtgtgctctcccagttgaattttacccatactagtgaggaccttctgcaggcagaggtgacttgtcttgaaggcagtttggaatctgtgagtgcaacgtgtaaacagctgagccaagaactaatggaaaaatatgaagaactgaagaggatggaagcacataacaatgaatacaaagcagagattaagaagttgaaagaacagattttacagggtgaacaaagttacagttctgcactagaaggaatgaagatggaaatctcccatctaactcaggagttacatcagcgagatatcactattgcttccaccaaaggttcttcctcagacatggaaaagcgactcagagcagagatgcaaaaggcagaagacaaagcagtagagcataaggagattttggatcagctggagtcactcaaattagaaaatcgtcatctttctgaaatggtgatgaaattggaattgggtttacatgaggcaaaagagatttcactagcagacctccaggagaattatattgaggcattaaataaattagtgtctgaaaatcaacaactacagaaagatttgatgaataccaaatctcagctggagatttctactcagatgtgcaaaaaacaaaatgacaggatctttaaaccaacacacagcagaacaactgagttcaagaatacagagttcaagccaacccatggccagcacagacatgatggaataaagactgagcactacaaaacagatcttcattctccaagaggacaagcgtcggatagtataaaccccatgtctagggtgctaagccccctgagtcctcaaatcagcccttgcagctccaccaggtctttgacttcctactctctatgtaaaactcattctttgccttcagcgctagatacaaatgaagccaatttttctgacactatgtctgagagtatgaatgaccaagaagagtttatatcttcgtgttccttgcctgtatctccccttggttcaatagctaccagatttttggaagaggaggaactgaggtctcatcacattctagagcgcttggatgcccatattgaagaactaaaaagagagagtgaaaagacagtgagacaattcacagccttaaagtagcctcttaaaaaaatcactatcttggaaataaaaataaacaccaaagagttactgtcatctgaagtagcagctctttaaaaacatgaagagataaaattataaaaatgatacatctaaagcagtggtgaagaaagctgaaaaactgatacttttgataggcattttctctgcactggtttgtttaaaggacttcttccagcaataagttgaaagaataaaccactttgctagacttttttctcatacgaatatttattatcataaagtgatacttaccttgctgacttaaatgtgaatagctatgtactaattgaaataaggattttatgatacatgttgaaaataaagtaactgcaggaactttctttaggggaaatgtgtagaagcatggatttaggggtcaaacatacctggatcgatagactggttttgccacttaccagccaacggggcttgttatttactgggctggtagcccctcctagccaaggggctggtagtgtgtaaagtcaggctggtagtgaataaggggggggtgtgctaaagaaccttatcaagcagtcctctcttgctcaacactcatgcagaggagagaggcagggagggcaagggactggctgtcatgcacggtgcccatggaatatccattggaaataaatgttcatcgtctgcactgctgaggacaagtttagatgggagacaaagatctggatgttgatgtgccgcaggcatttgaaacgatgggagttgataagatccaccagggaggctgtggagagagagaggagcaggaggctgggtttggggccctgaaagatgccagcatctgaggatcacaggaaatagatctagcaaaggaactagaatgtgcagttacagatgagaaaggtcagtgtagtgtacttgccagctcaagggtgtggcctctgtgaaccctctttctgtagtggatctttcccatcagcgtaaaacatcctgttatttcccctttttaaataaaacctcagttttttttaatgcctctcttttactgctctgtatgtttgcttcccttcacccaaacacttctggaaagagttgtctgcagtgactctttccagttcctcaccccgccccaccgtagttctcttcctaaccctctccaacaccacttccatccccagactgctttcttgctcttgagttcaccagtgacctaatcagtgtctgagcatcattcagcacagttggactctctcttggcttctgtgacctggaacttctggtttcctctctacctcatcctccactccatctcatggcttttcctcttctaacctctaagtcagagggccccctagagctctgtcatgggttttctccctcagcattctcttccctagaagtttccattccattctcaagctcttaataccacctataggccagtgacccttacatttattactaatcttgacctctccccagagctgctgtcttagatacctagctgcttatgcgatgtcttcacttggatatctgacaaacatcttgtttccaagagagaactctttattctccctcttgctaagattccatatcaggacatagcattatgtttgccagttcctaggagttacttataattccttccttacccacatccgcatatccagtcatttgggaggtcctgtcatttcttcccccagaatcttatctcagacccaaccgtttccctcctgcacttctaccacctgatccagactacttctctctcaccctgattctggcagtagcctcctaactgatagtactcacaccagtaattcagggagcttctggagttatcctttagaaatgtaaatgaaacagtgtcaccactgcttcccttcagactcttccaaggcttctctttttttttttattgagacagagtctcactctgtcgcccaagctgcagtacagtggcaggatctcggctctctgcaacctccacctcccgggctcaagtgattctcctgccttagcttcccgagtagctgggattacaggcgcatgccaccaggcccagctaatttttgtatttttagtaggaacagggtttcaccatgttggtcaggctgatctcgaactcctgacctcaagtgatccacccgcctgagcttcccaaagtgctgggttataagcgtgagccactgcacccagccccaaggcttcttactgcactcagaataaaatccaaatgaattagtatagcctacagagtgtcaataatctgggcctaatcacccattgcatcatcctttactgtgctccacccatgctggcgtcctttctgtttattgagtgcagcaagctttaacctgttcgggtctttcatttgcagtttaccctgaatattccctttctcttacctcacctttgattggcgttttcccccttgcagacctgcactctggcatcctctcctgagcaagccttctttgattgctgcctcccaaacctgtttctccccatttctctagctcattggcctgtgttacttgcttcatagtgctcactactatctgaaatcatttcattacttgatttatgtttgtactgtctatttctgtctttagaattaaaactccttgagggcaaggactttgcttctctggttcatggtgggatcctcatcacccagcacaagcccaacacttaggagaggctcagctagtttgaaccaatggaaaatgccattcctgaggtgcaccacatcgtttcttttgtgttggtgtgcatgctgtccttcagtttgtctcctcttcccacaccctgtcatgtgctcctaaaactccccctttacttggctactttatctggcttggcaaagctttcccatatcccctgacccatgtcagggaacgtttctcctcattgctgtcatggcaccctgtgtgtggctctgaccagactttgctatccgctttgatttctgtctttcaggggctaagtcctgcctacatcctcagtcagcatgctgcctaacacataacagatcctaagcaaatattgggtggatgaaaatcactaccattcaaggcttcattgtatttatcagtaaaactgaaataatatctaatggggtcgagaagatttactgaaaatatatatttgaaagggctttgcagttttaagtactgtacctatgtgcattgctgttacattcaggagatttctgagttttagacagtcccaagcttcagcttaaaatctgtagactgcagcccgtttctgaaacgtttgtactacgtgttgactaggaggaacaatgacagactctgtagtcaccggaaatacttaaggaatcatgaggtactatgtatttccttaaattatactgttttttaaagctgaagtatctaatagttaatgggttgtccaaatttgtcagaacatttgactgtaatttaatgtctcaccatttttcaaaaagatatattaataccaaatattaaaatgtgtcaagact

SEQ ID NO: 268013 - DNA, 2112 bp, Artificial Sequence
  derived and/or modified sequence
atggaggcactgctggagggcatccagaacagaggccacggggggggcttcctcacctcctgtgaagccgaactgcaggaacttatgaagcagattgacatcatggttgcccacaagaaatccgaatgggaaggcagaactcacgctctcgagacctgcctcaaaatcagagaacaggagctcaaatccctccgaagccagctggatgtcacgcacaaagaggtgggtatgttgcatcagcaagtggaagagcatgaaaaaatcaagcaagagatgaccatggaatataagcaggagctcaaaaagctccatgaagaactgtgtattctcaagaggtcctatgagaaattacagaagaagcagatgagggagtttcgcggcaataccaagaaccatcgtgaagacaggtcagaaatcgagcggctaacagccaaaattgaagaattccggcagaaatcactggattgggaaaagcagaggctcatctatcagcagcaggttagcagtctggaggcacagagaaaagcactcgcagaacaatcagagattattcaggcccaattggtgaatcgcaaacagaagctagaaagtgtggagttatcatcccagtccgaaattcagcacctttctagcaaactcgaaagagccaacgataccatatgcgccaatgaactggagatcgaacgccttacaatgagggtcaacgatttggtgggtacatctatgactgtgctccaggaacagcagcagaaagaggaaaagctgagggagtccgaaaagcttctggaagccttacaggaggagaaacgcgaactgaaggcggccctccaatcacaggagaacctgatccacgaggccagaatccaaaaggagaagctgcaggagaaagttaaagctaccaacacacagcacgccgtcgaagcgattagaccacgcgaagaatccttagcagagaagaagtacacgagccagggtcagggggatttagatagtgtcctctcccaactcaatttcacgcacacctcagaagacctgttacaagcagaggtgacatgtctcgaaggaagtctggaatctgtttccgccacatgtaaacagctcagccaagaactcatggaaaaatacgaggagttaaaaagaatggaagctcacaacaacgagtataaggcagagataaagaagctaaaggagcagatactgcagggtgagcagtcttatagcagtgccctggaagggatgaagatggagatatcccacctgactcaagagttgcaccagagggatattacaattgcttccacaaaaggctcctcatccgacatggagaaacgattgcgcgcagaaatgcaaaaagcggaggacaaagccgttgagcacaaagagatcctggaccaattggagtctttgaagttggagaacaggcacttgtccgagatggttatgaagctggaattgggtctgcatgaggccaaagaaataagcctagcggatctgcaggagaactacatcgaggctcttaacaaacttgtcagtgagaaccagcagcttcagaaagacctaatgaacacaaaatcacagctggagattagcacccagatgtgcaaaaaacagaatgataggatctttaaacctacacattctcgcactactgagttcaaaaatactgaatttaaacctactcacggccaacatcgccatgacggtatcaaaaccgaacactataaaacagatctgcactctccacgggggcaagccagcgactctatcaaccccatgagtcgggtcctttccccactctctcctcagatttccccctgttcctcaacaagatccctgacctcctactcactttgcaagacacacagtctgccctcagccttggatactaacgaggcgaacttctctgacaccatgagcgaaagcatgaacgatcaggaagagttcatttctagctgttctctgcctgtctctccccttggctcgatcgccaccaggtttctggaggaggaagagctcaggagtcatcacatcctggaacggctggacgcccacatcgaggaactgaagagagagagcgaaaaaaccgtgcgccagtttaccgcactaaaatag

SEQ ID NO: 268014 - DNA, 2112 bp, Artificial Sequence
  derived and/or modified sequence
atggaagctttgctcgaagggatacagaacagagggcacggcgggggctttttgacatcctgtgaagctgaattacaggagctgatgaagcaaattgatatcatggttgctcacaaaaaatctgaatgggagggcagaactcacgccctggaaacctgcctgaaaattcgggagcaggaactgaagagtttacgatctcaactcgatgtgactcacaaggaggtcggtatgttacaccagcaagtcgaggaacatgagaagatcaaacaggagatgactatggagtataaacaggagctgaagaagctgcacgaggaactctgcattttgaagagatcttacgaaaaactgcagaagaagcagatgcgcgagttccgcggcaacacaaagaaccatcgggaggaccgatccgagatcgaaagattaaccgccaaaatcgaggaatttagacagaaaagcctggattgggagaagcagaggctcatataccaacagcaggtgagctccctggaagcccagcgaaaagccttagccgagcagtctgagattatccaggcacagctggtcaatcggaagcagaaattggagtctgtggaactcagcagccagagtgagattcaacacctgtcttctaagctggagcgtgccaacgacactatttgcgctaacgaactcgaaattgaacggttgacaatgagagtgaacgacttggttgggacatcaatgaccgttctgcaagaacagcagcaaaaggaggaaaaattgagggagagcgaaaaacttctggaggccctgcaggaggaaaaacgagaactcaaagctgctctgcagtcccaggagaatctcatccatgaggcaagaatccaaaaggaaaaactgcaggagaaagtgaaggccacaaatacccagcacgccgtagaagccatcagacctcgagaggagtcgctggccgagaagaagtacactagtcagggtcagggcgatttggactctgtgctgtcccaattgaacttcacacatacttctgaggacctgctgcaagctgaggtcacgtgcttggagggctcgttggagtcggtctctgcaacctgcaagcagctgtcgcaagagctcatggagaagtacgaagagcttaaaagaatggaggctcacaataacgagtacaaagcggaaatcaaaaaattgaaggaacagatcctgcaaggcgagcagtcatactcaagcgcgctggagggcatgaagatggagatcagccacctcacccaggagctgcaccagcgcgacatcaccatcgcttccacaaagggcagttcatccgacatggaaaagagattaagggctgagatgcagaaggccgaagacaaggcagtcgaacacaaggaaatactcgaccaactagagagcctcaagctcgaaaatagacacctttccgagatggtgatgaagcttgagttaggactgcatgaagcgaaagaaatctctctcgccgacttgcaagagaactatattgaggccctgaacaaactggtctccgagaaccagcagttacaaaaagatctgatgaacactaagagccagctcgagattagtactcagatgtgtaaaaaacaaaatgaccgcatatttaagcccactcactctaggaccaccgaattcaagaatacagaatttaaaccaacgcacggacagcatagacacgatggtattaaaacagaacattacaagactgatctgcattcccctagagggcaagcttccgactctatcaacccgatgtcgagagttcttagccctctgagccctcagatttcgccctgcagtagcacccggtccttgaccagttacagcctctgcaagacacattcactcccctccgctttggataccaatgaggcaaatttctcagacactatgagtgagtcaatgaatgaccaggaggagtttatttcctcgtgtagcctgccagttagccccttgggtagcatcgccactcgattcctggaggaggaggagctgcggagccatcatattcttgagagactggatgcgcatattgaggagttgaaacgggaaagcgagaaaacagtgcggcagttcacagctctcaagtag

SEQ ID NO: 268015 - DNA, 2112 bp, Artificial Sequence
  derived and/or modified sequence
atggaggccctgctggagggcatccagaacagaggacatggaggcggcttcctgaccagctgtgaggccgagctgcaggagctgatgaagcagattgacatcatggtggcccacaagaagtctgagtgggagggccgcacccacgccctggagacctgcctgaagatccgggagcaggagctgaagagcctgcggagccagctggatgtgacccacaaggaggtgggcatgctgcaccagcaggtggaggagcacgagaagatcaagcaggagatgaccatggagtacaagcaggagctgaagaagctgcacgaggagctgtgcatcctgaagaggagctatgagaagctgcagaagaagcagatgagggagttccggggcaacaccaagaaccaccgggaggacagaagtgaaattgagcggctgacagccaagattgaggagttccggcagaagagcctggactgggagaagcagaggctcatctaccagcagcaggtgagcagcctggaggcccagaggaaggccctggccgagcagagcgagatcatccaggcccagctggtgaacaggaagcagaagctggagagcgtggagctgagcagccagagcgagatccagcacctgagcagcaagctggagcgggccaatgacaccatctgtgccaatgagctggagattgagcggctgaccatgagggtgaatgacctggtgggcacctccatgacagtgctgcaggagcagcagcagaaggaggagaagctgcgggagagcgagaagctgctggaggccctgcaggaggagaagcgggagctgaaggccgccctgcagagccaggagaacctgatccacgaggcccgcatccagaaggagaagctgcaggagaaggtgaaggccaccaacacccagcacgctgtggaggccatccggccccgggaggagagcctggccgagaagaagtacaccagccagggccagggcgacctggacagcgtgctgagccagctgaacttcacccacaccagcgaggacctgctgcaggccgaggtgacctgcctggagggcagcctggagagcgtgtctgccacctgcaagcagctgagccaggagctgatggagaagtatgaggagctgaagaggatggaggcccacaacaatgagtacaaggccgagatcaagaagctgaaggagcagatcctgcagggcgagcagagctacagcagcgccctggagggcatgaagatggagatcagccacctgacccaggagctgcaccagagggacatcaccatcgccagcaccaagggcagcagcagtgacatggagaagaggctgcgggcagagatgcagaaggccgaggacaaggctgtggagcacaaggagatcctggaccagctggagagcctgaagctggagaacagacacctgtctgagatggtgatgaagctggagctgggcctgcacgaggccaaggagatcagcctggccgacctgcaggagaactacatcgaggccctgaacaagctggtgtctgagaaccagcagctgcagaaggacctgatgaacaccaagagccagctggagatcagcacccagatgtgcaagaagcagaatgaccgcatcttcaagcccacccacagcaggaccacagagttcaagaacacagagttcaagcccacccacggccagcacagacatgatggcatcaagacagagcactacaagacagacctgcacagcccccggggccaggccagtgacagcatcaaccccatgagccgggtgctgagccccctgagcccccagatcagcccctgcagcagcaccaggagcctgaccagctacagcctgtgcaagacccacagcctgcccagcgccctggacaccaatgaggccaacttcagtgacaccatgtctgagagcatgaatgaccaggaggagttcatcagcagctgcagcctgcctgtgagccccctgggcagcatcgccacccgcttcctggaggaggaggagctgcggagccaccacatcctggagcggctggatgcccacatcgaggagctgaagcgggagagcgagaagacagtgcggcagttcaccgccctgaagtag

SEQ ID NO: 268016 - DNA, 2112 bp, Artificial Sequence
  derived and/or modified sequence
atggaggccctgctggagggcatccagaaccggggccacggcggcggtttcctaacctcatgtgaggcggagttgcaggagttgatgaagcagattgacattatggtcgcgcataagaagtctgagtgggaggggcgcactcacgcactcgaaacatgtctgaagattcgggagcaagagctgaaatcacttcggtctcaactggacgttacacataaagaagttggaatgctgcaccagcaggtggaagagcatgaaaagataaaacaggagatgaccatggagtataagcaggagctgaaaaagctgcacgaggagctgtgcatcctcaagcggtcttacgaaaaactgcaaaaaaaacaaatgcgcgaatttcgcggcaacaccaagaatcatagagaagatcgcagcgaaatcgagcgtttgactgcaaagatcgaagagtttcgtcagaagtctcttgattgggagaagcagaggctgatttatcagcagcaggtatccagtctggaagcccagcgcaaggcccttgccgagcagagcgaaatcatccaagctcagctggtgaacagaaagcagaaactggaatccgtagagctgtcttctcagtctgaaatacaacatctgtcaagcaaattagagagagctaacgacaccatctgcgccaatgaactggaaatagagcggctgacgatgcgtgtgaacgacctggtcgggacctcaatgacagtactccaggagcaacagcagaaagaagaaaagctgagagagagcgagaaactcttggaggccctccaggaagaaaagagagagctgaaggccgccctgcaaagtcaggagaacttgattcatgaggcaagaattcagaaggaaaaactgcaagaaaaggtgaaagctacaaacactcagcatgcagtagaggcaattcgccctagagaggagtcgctagccgagaaaaaatacacatcgcagggacaaggcgacttggacagcgtgttaagtcagctgaactttactcatacttctgaggacctgttacaagccgaggttacctgtttggaaggctcactggaatccgtctcggccacatgtaagcagctgtcgcaggagctcatggaaaaatacgaagaactcaaaagaatggaagcacacaacaatgagtataaagccgagatcaaaaagttgaaggaacagatactccagggtgaacagtcttactccagtgccttggagggaatgaagatggagatctctcacctgacccaagaactccaccagcgagacattaccatcgcctccacgaagggatcatcttctgatatggaaaagcgcctgcgcgccgaaatgcagaaagctgaggataaagccgttgagcacaaggagatcctagaccagctggagagcctgaagcttgagaacaggcacttaagcgagatggtaatgaagctggaactaggactccacgaggccaaggagatcagtctggccgatctgcaggagaactacattgaggccctgaacaagctcgtctctgaaaatcagcagctccagaaagatttgatgaacaccaagtctcagctagaaatatctactcagatgtgcaagaaacagaatgatagaatcttcaaacctactcatagcagaaccaccgagttcaaaaacacagagtttaagcctacacacggccagcaccgacatgatggaattaagacggagcactataagactgatctgcactccccacgagggcaggcttctgacagtattaacccgatgagccgggtactgtctcctttgtctccccagattagtccttgttctagcacaagatccctgacgagttacagcctctgtaaaacccatagtctgccctcagcgcttgacactaacgaggccaatttctccgacaccatgagcgagagcatgaacgatcaagaggaattcatctcttcgtgtagtctgcctgtctcccctctggggtcaatcgccaccaggttcttggaagaagaggagcttaggagccaccacattctggagagattggatgcgcatatcgaggaactaaagagagaatctgaaaagacggtgaggcaattcaccgccttgaaatag

SEQ ID NO: 268017 - DNA, 2112 bp, Artificial Sequence
  derived and/or modified sequence
atggaggccctgctggagggcatccagaaccggggccacggcggcgggtttctgacctcatgcgaagccgaactccaggagctgatgaaacaaattgatatcatggtcgcccataaaaagagcgagtgggaaggcagaacacacgccctggaaacctgcctgaagattagggagcaggaactgaaatcactgcggagtcagttagacgtcacacataaggaagtgggcatgctgcaccagcaggtggaggaacatgaaaagattaagcaggaaatgaccatggagtataagcaggaactaaaaaaattgcacgaggagttatgcattctgaaacggtcctacgaaaagctgcagaaaaagcaaatgcgcgagtttcgcggtaacacgaagaaccatagggaggataggtccgagatcgaaaggctgactgccaagatcgaggagtttaggcagaagtctctggattgggaaaaacaacgcctgatctatcaacagcaagtctcgtcccttgaggcacagcgtaaagcactggctgagcagagtgagatcatccaggcccagctcgttaaccgtaaacagaaacttgagagcgtagaactgagttcccagtctgaaatccagcacttgtcttcaaaactcgagcgtgcaaacgataccatctgcgctaatgagctcgagatcgaaaggctgaccatgagagtcaatgacctcgtgggtacatccatgaccgtgcttcaggaacaacagcagaaagaagagaaactccgggaaagcgaaaagctgttagaagcactccaagaggaaaaacgggaattgaaggccgctcttcagtctcaggaaaatctgattcacgaggcccgcattcagaaagagaaactgcaagaaaaggtcaaggctaccaatactcagcatgcagtggaggccatccggccacgtgaagaatcactggcggagaaaaagtatacctcacagggccagggtgatctcgatagcgtcctgtcacagttgaactttactcacacctcagaggacctcctacaagcagaggtgacttgtctggagggcagcctggaatcggttagtgcgacttgcaagcaacttagccaagagttgatggagaagtacgaggagctcaagcgcatggaagcgcataacaacgaatataaggccgagataaaaaaattaaaagaacagattttgcaaggagaacaatcttattcttccgccctcgaaggaatgaagatggagatcagccacctgactcaagagttacaccaaagagacattacaatcgcgtctactaaggggtctagtagtgatatggaaaaaagactgagagccgagatgcagaaagctgaagacaaagctgtggagcataaagaaattctagaccagcttgaatctctgaagctggaaaatcgacatctgagcgagatggtaatgaagttggagctgggcctgcacgaggccaaagagataagtttggcagatcttcaggagaactacattgaagcacttaataagctcgtttcagaaaatcagcagttgcagaaagacctcatgaacaccaaaagtcagttagagataagcacccagatgtgtaagaaacagaacgacaggatttttaagccaactcattctcggacaactgagttcaaaaacaccgagtttaaacccacacacggacagcacaggcacgatggcattaaaacggagcattacaagactgatttgcactccccaagagggcaagcctccgattctatcaacccaatgtcccgagtgctgtctccgttgtcacctcagatttccccctgcagctccacccgctcgcttacttcttactcactctgcaagacccattcacttcccagcgctcttgacaccaacgaggcgaatttctctgacacaatgagcgagtctatgaacgatcaggaggagtttataagctcgtgctctttgccggtgagcccactggggtcaatcgcgacccgctttctggaagaagaggaactccgctcacaccacatccttgaaagattggatgcccatatcgaagagctaaagcgagagtccgagaaaacagtaaggcaatttaccgcactgaagtag

SEQ ID NO: 268018 - DNA, 2112 bp, Artificial Sequence
  derived and/or modified sequence
atggaagcactgttagaaggtattcagaacagaggccacggcggaggtttcctgaccagttgtgaagccgaactgcaagaactcatgaagcagattgacattatggtggcgcataaaaaatctgagtgggagggacgtacgcacgcactggagacgtgtttgaagataagggaacaagaactgaaatcactgcggtcccagcttgatgtgacacataaagaagtggggatgctgcaccaacaggttgaagaacacgaaaagattaaacaggaaatgactatggagtataagcaggaattgaaaaaactgcacgaggaactgtgcattctgaaacggagttatgaaaaattgcagaaaaagcagatgagggagtttcgtggcaacaccaagaatcatagggaggaccgctccgagatagagagactgactgccaaaatagaggagtttaggcagaaaagcctagactgggagaaacagcgcctcatatatcagcagcaggtttcatcgctggaggctcagaggaaagccctcgccgaacagagtgaaattatccaggcccagctcgttaacagaaaacagaagctggagtcggtagagctgagcagccagagtgagattcagcatctgagcagcaaactggagcgagctaacgataccatctgcgccaatgagctagagattgaaagactgaccatgagggtaaacgatttagtgggcactagtatgacggttctgcaagaacagcaacagaaggaggagaaactcagggaaagcgagaagcttttagaagcattacaggaggaaaagcgtgagctgaaggcagctttgcagagccaggaaaatttgatccacgaggccagaatacagaaggagaagctgcaggaaaaagtgaaagctaccaacacacagcacgccgtcgaagctatccggccacgcgaggaatctcttgccgaaaaaaagtacaccagccagggacagggggatctggactccgtcttatcacaactgaatttcacccataccagcgaggacttgctacaggccgaagttacctgcctcgaggggagtttagaatcggtttccgcaacctgtaagcaattgagccaggagttaatggagaaatatgaggagctgaaaaggatggaggcccataacaacgaatataaagccgagattaagaagctgaaggaacagattctgcagggtgaacagagctacagctccgccttggagggaatgaaaatggaaattagccacctgacccaggagctgcaccaaagagacatcacaatagcaagtaccaaagggtcatccagcgacatggaaaagcgactgcgcgcagagatgcagaaagccgaggataaagctgtggaacataaggaaattctcgatcagctcgagtctctgaaactcgagaaccggcacctttccgagatggtgatgaagttggaactgggcctccatgaggccaaagaaatttccttggcagatttacaggaaaactacattgaagcactcaataaattagtgtccgagaatcagcagctccagaaggacttgatgaatacaaagagccagctggagatcagcacacagatgtgcaaaaaacagaacgataggatatttaaaccaacacattccagaactacagagttcaaaaacaccgaattcaagccaacccatgggcaacataggcacgatgggatcaaaactgagcattacaaaacggatctacacagcccacgaggccaggcttctgacagcatcaatcccatgtcccgggttctgtcacccctcagtccccagatttctccttgcagctccacaaggtctctaactagttacagcctgtgtaagacacattccctgccttctgctctcgacaccaacgaggcaaacttctctgacacgatgagcgagagtatgaatgaccaagaggagtttatttcgtcttgcagtctgcccgtcagccccctcggtagcattgccacacggttcttagaagaagaagaactgcgatcacaccatatcctcgagagactggatgcacatattgaagagcttaagagggagtccgaaaagactgtgcgccaattcactgccctgaagtag

SEQ ID NO: 268019 - DNA, 2112 bp, Artificial Sequence
  derived and/or modified sequence
atggaggcgctgcttgaaggaatccagaacagaggacatgggggtgggttcctcacttcttgtgaggctgaactgcaagagctgatgaaacagatcgacatcatggttgcccacaagaagtctgaatgggaaggcaggactcatgcactggagacgtgtctgaagattagagagcaagagctgaagtccctgagatcccagctcgatgttactcacaaagaggtgggaatgctccatcagcaagtagaagagcacgagaagataaaacaggagatgactatggagtataaacaggaactgaagaagcttcacgaggagttatgtatcctcaagagatcttatgagaagctccagaaaaaacaaatgcgcgaattccgagggaacacaaagaaccatcgggaagaccgcagtgagattgaacgattgacagcgaaaatagaggagttcaggcagaagagtttggactgggaaaagcagaggctcatctaccagcagcaggtgagcagccttgaagctcaacgaaaggctctggccgagcagtctgagatcattcaagcccagctggtgaaccgaaagcaaaaattggagagcgttgagctctcctcacagtctgagattcagcacctcagcagcaagttagaacgcgctaatgacacaatctgcgccaacgagttggagattgaaagacttacgatgcgggtcaacgacctggtgggaacctctatgaccgtcctacaggagcagcagcagaaggaggagaagctgagagagtctgaaaaactgctggaggccctacaagaggagaagcgggagcttaaggccgcactccagagccaggagaatttaatccatgaagccagaatccagaaagagaagctgcaggaaaaggtgaaggcaactaatactcagcatgctgtggaagccattcgcccaagggaggagagtctggccgagaagaagtacacgtcacagggtcagggggaccttgatagcgtactttcgcagctcaactttactcatacatccgaggacctgctgcaagccgaagtgacatgcctggagggatcgctggaatccgtatccgcaacctgcaagcagctttcgcaggaactaatggaaaaatacgaggagcttaagagaatggaagcacacaacaacgaatataaggccgaaatcaaaaagctgaaggagcaaatcctgcaaggagagcagtcctactcttccgctctggaaggcatgaagatggagattagtcacctgacccaggaactacaccaacgcgacataactattgcaagtacgaagggcagctcctctgatatggagaagcgcctccgggcagagatgcagaaagcggaggacaaagccgtggagcataaggaaatactggaccagttagaatccttaaagcttgaaaatcggcatttgagtgaaatggtgatgaagctcgagctgggcctccacgaggctaaggaaatttcactcgccgatctacaagagaattatatcgaggccttgaataaattagtttcagagaatcaacagctgcaaaaagatctgatgaatacaaagtctcaattagaaatcagtacccagatgtgtaagaagcagaatgaccggatctttaaacccacccacagcaggaccacggagttcaagaacactgaattcaagcctacacacggtcagcaccgacacgacggcatcaagaccgagcactataaaacagatttgcactccccacgtggacaagcctccgactccatcaaccctatgagtagggtgttaagcccactgtcgccacagatatctccatgcagttcaacaaggtcactgacaagttattcactgtgcaagacccatagcctgccttccgctctggacacaaatgaggctaactttagcgacacaatgtcagagagtatgaatgaccaggaggaattcatctccagctgttcacttcctgtatctccactcgggagtatcgccacacgattcctcgaggaagaagaactaagaagtcatcacatattagagcgattagatgcgcatatcgaggagctgaaaagagaatcagagaaaaccgtgaggcagtttacagctctcaagtag

SEQ ID NO: 268020 - DNA, 2770 bp, Artificial Sequence
  derived and/or modified sequence
gtgcttgcggcaaccctgtaaccgccggtgcgcaagttggaggggcaaggggctgccgtgtcctggtctggaggcggcccaggctgccttggtgattctggcttcgcggcctcatggcttgcggccggtttgcgcaacggcctgcgaaccaccaggcgcgtccccgccggcttgggtccgccccgaagcccagtccctcggcctggcccgctatgccctgcacactggcggagtctggcgtggcgcagcccggcgtggggttcggccccgccaggtggtcagcccttcctcggagtccaggtggctgggggcgcttcggagagtggccaggggcccccaaacccggggccgcagagcagtaccagtccgtggcctgttaggaaccaggctacagagcaggagttgccaaaacaaaggggatttggtgatggaggctttgttagaaggaatacaaaatcgagggcatggtgggggatttttgacatcttgtgaagcagaactacaggagctcatgaaacagattgacataatggtggctcataaaaaatctgaatgggaaggacgtacacatgctctagaaacttgcttgaaaatccgtgaacaggaacttaagagtcttaggagtcagttggatgtgacacataaggaggttggaatgttgcatcagcaggtagaagaacatgaaaaaatcaagcaagagatgaccatggaatataagcaggagttgaagaaactacatgaagaattatgcatactgaagagaagctatgaaaagcttcagaaaaagcaaatgagggaattcagaggaaataccaaaaatcacagggaagatcggtctgaaattgagaggttaactgcaaaaatagaggaattccgtcagaaatcgctggactgggagaagcaacgcttgatttatcagcaacaggtatcttcactggaggcacaaaggaaggctctggctgaacaatcagagataattcaggctcagcttgtcaatcggaaacagaaattagagtctgtggaactttctagccaatcagaaattcaacacttaagcagtaaactggagcgggctaatgacactatctgtgccaatgagttggaaatagagcgcctcaccatgagggtcaatgacttggttggaaccagtatgactgtcctacaggagcagcagcaaaaagaagaaaaattgagggaatctgaaaaactattagaggctctgcaggaagaaaagagagaattgaaggcagctcttcagtctcaagaaaatctcatacatgaggccagaatacaaaaggagaagttacaagaaaaagtaaaggcaactaacactcaacatgctgtagaagctataaggccacgggaagaatctctggcagaaaagaagtacacctctcaagggcagggggacttagacagtgtgctctcccagttgaattttacccatactagtgaggaccttctgcaggcagaggtgacttgtcttgaaggcagtttggaatctgtgagtgcaacgtgtaaacagctgagccaagaactaatggaaaaatatgaagaactgaagaggatggaagcacataacaatgaatacaaagcagagattaagaagttgaaagaacagattttacagggtgaacaaagttacagttctgcactagaaggaatgaagatggaaatctcccatctaactcaggagttacatcagcgagatatcactattgcttccaccaaaggttcttcctcagacatggaaaagcgactcagagcagagatgcaaaaggcagaagacaaagcagtagagcataaggagattttggatcagctggagtcactcaaattagaaaatcgtcatctttctgaaatggtgatgaaattggaattgggtttacatgaggcaaaagagatttcactagcagacctccaggagaattatattgaggcattaaataaattagtgtctgaaaatcaacaactacagaaagatttgatgaataccaaatctcagctggagatttctactcagatgtgcaaaaaacaaaatgacaggatctttaaaccaacacacagcagaacaactgagttcaagaatacagagttcaagccaacccatggccagcacagacatgatggaataaagactgagcactacaaaacagatcttcattctccaagaggacaagcgtcggatagtataaaccccatgtctagggtgctaagccccctgagtcctcaaatcagcccttgcagctccaccaggtctttgacttcctactctctatgtaaaactcattctttgccttcagcgctagatacaaatgaagccaatttttctgacactatgtctgagagtatgaatgaccaagaagagtttatatcttcgtgttccttgcctgtatctccccttggttcaatagctaccagatttttggaagaggaggaactgaggtctcatcacattctagagcgcttggatgcccatattgaagaactaaaaagagagagtgaaaagacagtgagacaattcacagccttaaagtagcctcttaaaaaaatcactatcttggaaataaaaataaacaccaaagagttactgtcatctgaagtagcagctctttaaaaacatgaagagataaaattataaaaatgatacatctaaagcagtggtgaagaaagctgaaaaactgatacttttgataggcattttctctgcactggtttgtttaaaggacttcttccagcaataagttgaaagaataaaccactttgctag

SEQ ID NO: 268021 - protein, 1078 aa, Artificial Sequence
  derived and/or modified sequence
MAFYSCCWVLLALTWHTSAYGPDQRAQKKGDIILGGLFPIHFGVAAKDQDLKSRPESVECIRYNFRGFRWLQAMIFAIEEINSSPALLPNLTLGYRIFDTCNTVSKALEATLSFVAQNKIDSLNLDEFCNCSEHIPSTIAVVGATGSGVSTAVANLLGLFYIPQVSYASSSRLLSNKNQFKSFLRTIPNDEHQATAMADIIEYFRWNWVGTIAADDDYGRPGIEKFREEAEERDICIDFSELISQYSDEEEIQHVVEVIQNSTAKVIVVFSSGPDLEPLIKEIVRRNITGKIWLASEAWASSSLIAMPQYFHVVGGTIGFALKAGQIPGFREFLKKVHPRKSVHNGFAKEFWEETFNCHLQEGAKGPLPVDTFLRGHEESGDRFSNSSTAFRPLCTGDENISSVETPYIDYTHLRISYNVYLAVYSIAHALQDIYTCLPGRGLFTNGSCADIKKVEAWQVLKHLRHLNFTNNMGEQVTFDECGDLVGNYSIINWHLSPEDGSIVFKEVGYYNVYAKKGERLFINEEKILWSGFSREVPFSNCSRDCLAGTRKGIIEGEPTCCFECVECPDGEYSDETDASACNKCPDDFWSNENHTSCIAKEIEFLSWTEPFGIALTLFAVLGIFLTAFVLGVFIKFRNTPIVKATNRELSYLLLFSLLCCFSSSLFFIGEPQDWTCRLRQPAFGISFVLCISCILVKTNRVLLVFEAKIPTSFHRKWWGLNLQFLLVFLCTFMQIVICVIWLYTAPPSSYRNQELEDEIIFITCHEGSLMALGFLIGYTCLLAAICFFFAFKSRKLPENFNEAKFITFSMLIFFIVWISFIPAYASTYGKFVSAVEVIAILAASFGLLACIFFNKIYIILFKPSRNTIEEVRCSTAAHAFKVAARATLRRSNVSRKRSSSLGGSTGSTPSSSISSKSNSEDPFPQPERQKQQQPLALTQQEQQQQPLTLPQQQRSQQQPRCKQKVIFGSGTVTFSLSFDEPQKNAMAHRNSTHQNSLEAQKSSDTLTRHEPLLPLQCGETDLDLTVQETGLQGPVGGDQRPEVEDPEELSPALVVSSSQSFVISGGGSTVTENVVNS

SEQ ID NO: 268022 - DNA, 3237 bp, Artificial Sequence
  derived and/or modified sequence
atggctttttacagttgttgctgggtactgctggcactgacatggcatacgtcagcttacgggccagatcaacgagcgcaaaaaaagggagatatcatccttggtggcctgtttcctatccatttcggggtggccgctaaagatcaggatctgaagtcacgacctgaaagcgtggagtgcatccgctataacttccggggcttcagatggttgcaggctatgatttttgccatcgaggagatcaactccagtcctgcgttgttgcctaatttgaccttaggatatcgtattttcgatacctgtaacactgtatcgaaggctttggaggccaccctgtcttttgtggcgcagaacaagatagatagcctgaatctagacgaattctgtaattgttctgaacacatcccctccaccatcgccgtagtaggggccaccggttctggtgtatcaaccgccgtagcaaatctcttaggcctcttttacatcccacaggttagttatgcctcaagttcccggctgctgtctaataaaaaccagtttaagtcatttctgcgcacaattcccaatgacgaacatcaggcaaccgccatggctgacatcatagaatacttccggtggaactgggtgggcacaatcgctgccgacgatgattatgggagaccaggcattgaaaaatttcgcgaagaagcggaagagcgagacatctgtattgacttcagcgaactcatctcccaatactccgatgaagaggaaatacaacacgtcgttgaggtgattcaaaatagcacagctaaagtgatagtcgtgttttcatctggcccagacctggaacctttgattaaggagatagttagacggaatattactggtaagatttggcttgccagcgaagcctgggcaagtagttccctgattgcaatgcctcaatacttccacgtggtcggaggaactattggattcgctctgaaagctgggcagattccagggttccgcgaattccttaagaaagtgcacccacggaagagcgtacataacggatttgctaaggagttttgggaggaaactttcaactgccacctgcaggagggtgctaaagggcctctgccagtggatacgtttctcagagggcatgaagagtccggcgatcgtttcagtaacagttcaaccgcttttaggcctttatgcacaggggatgaaaacattagttctgtagagaccccatacatcgattacacccacctgagaattagttacaacgtctatcttgctgtgtatagcatcgcgcacgccctccaggatatctacacatgtcttcccggaagaggtctgttcaccaacggcagctgtgcagacatcaagaaagtggaggcttggcaggttctgaaacatttgcgccatctaaattttacaaataatatgggggaacaagttacttttgatgaatgcggcgaccttgttggcaattatagtatcatcaattggcacctgtccccggaagatggttcaatcgtgttcaaagaagtgggttattacaacgtctacgccaagaagggggagcgcttgtttattaacgaagagaaaattctatggtccggattttctcgtgaagtccccttcagcaactgcagcagagactgcctggcaggcactcggaagggaattatcgagggtgagcctacatgttgcttcgaatgtgtggaatgtcccgacggtgagtactcagatgagaccgacgccagtgcctgcaataagtgtccggacgacttctggtctaacgaaaatcatacctcttgtatcgccaaggagatcgagtttctgtcctggactgagccatttggaatcgccttgactctattcgctgtcctgggtatctttcttactgcctttgtgttaggagtatttattaagtttcgcaacacccccattgtgaaagccactaatcgagagctcagttatctattacttttttccctgctctgctgcttttcctctagtcttttctttattggagagccccaagactggacatgtagactgagacaaccagcattcggaatcagctttgttctttgcatatcctgcatcctcgtgaaaaccaacagagttctcctggtgttcgaggccaagatacctacatcgttccaccggaagtggtggggactgaacttgcaattcttactcgttttcctatgcaccttcatgcagatcgttatctgcgttatctggctgtacacagctccacctagttcctaccggaatcaggaactggaggatgaaatcatatttattacttgccatgaaggcagcctgatggccctcggctttttgatcggctacacctgtcttctcgccgctatatgctttttctttgccttcaagtcgcgcaaactgccagagaattttaacgaagccaaatttattacattctccatgctcatattcttcatcgtgtggatcagtttcatacctgcttacgcctcaacctacggaaagtttgtgagcgcagtggaggtgatcgcgattcttgctgctagtttcggcctgctggcttgcatattcttcaacaaaatctacatcatcttattcaaacccagccggaatactattgaggaagtaagatgcagtacggctgctcatgcattcaaggttgcggcaagagcgactctccggagatccaatgtcagtcgtaagcgttcaagctcattgggaggatctaccggaagtacgccgagcagctccatctcaagtaagagcaatagcgaggatccctttccacagccggaaagacagaaacaacagcagcctctggccctcacccagcaagagcagcagcaacagcctttgactctcccccagcagcagaggtctcaacaacaaccgaggtgtaagcaaaaggtcattttcggatccggaacggtgaccttttcactttcatttgatgagccacagaaaaacgcaatggcacaccgcaattcaacacaccagaacagtctagaggctcagaagagctctgacaccctgacccggcacgaacccctgctgcctcttcaatgcggcgaaacagacctggacctgaccgtgcaggaaacgggacttcaaggacctgtaggcggagatcaaaggccggaggttgaagaccctgaggaactgtctccagcgctggtggtcagcagtagccagtcatttgttatctccggcggcggcagtaccgtaaccgaaaacgtcgtgaactcatag

SEQ ID NO: 268023 - DNA, 3237 bp, Artificial Sequence
  derived and/or modified sequence
atggctttttacagctgctgctgggttctcctcgcactgacttggcacactagcgcatacggtcctgatcagagagcacagaaaaaaggggacattatacttggggggctcttccctatccattttggggtcgctgcaaaggaccaggacctcaagagccgtccagagagtgtggagtgcatacgatacaatttcaggggcttcagatggctgcaggcaatgatcttcgcgatagaggagatcaattcttcacccgctcttttgcctaatctaactctcggctaccggattttcgatacttgtaataccgtgtcaaaagcactggaggctaccttgtctttcgtggcacagaacaagatcgatagtctgaacctggacgaattctgtaactgctctgaacacatccctagtacaatcgccgtggtaggagctacggggagcggcgtgagtaccgcagtggccaatctcttaggcctgttctatatcccacaggtttcttacgcatcttctagcaggctgttatccaacaaaaaccagttcaaaagtttcttaagaaccattcccaacgacgagcaccaggcgactgcaatggcagacatcatagagtacttccgctggaactgggtcggtaccattgctgccgatgacgactacgggcgtcccggcatcgagaaatttcgcgaagaggccgaagagagagacatctgcatcgatttctcagaacttattagccagtattctgatgaggaggagattcagcatgtggtcgaagtcattcaaaactccactgcaaaagtgatcgtggtcttttcatccggtcctgatcttgaacccctgatcaaggagatcgttaggagaaacatcaccggtaagatatggttggccagtgaggcatgggcttctagcagtctgatcgcaatgccccagtactttcacgtggtcgggggcaccatcggattcgctctcaaggcagggcaaatccctggctttcgtgaattccttaagaaggtacaccctaggaagagcgtgcacaacggcttcgctaaagaattctgggaggaaacctttaactgccacctgcaggagggcgcaaaaggacctctcccggtggacacatttctgagagggcacgaagagtcaggcgaccgattctccaattcgtctactgcttttaggcctttatgcaccggcgatgagaatatctcttcggtcgagaccccttacatcgattacactcatttgcgcatttcatacaacgtgtatttagctgtatatagcatcgcccacgccttgcaagatatttacacctgtctgcccgggaggggactgtttacaaacgggagctgtgcagatattaagaaggtggaggcgtggcaggtgctcaaacacctgagacaccttaattttacaaataatatgggtgagcaggtcaccttcgatgagtgcggggacttggtcggcaattacagcatcattaactggcacctgagcccggaagacgggtctatcgttttcaaggaggtggggtattacaatgtctacgctaagaaaggtgagaggctgttcatcaatgaggaaaagattctttggtcaggcttcagcagggaagtgcctttcagtaactgctctcgcgactgtctggctggcaccaggaagggtatcattgaaggtgagccaacttgctgcttcgaatgcgtagaatgtccggacggcgagtacagcgatgagacagatgcgtcagcctgtaataagtgccccgatgatttttggagcaatgaaaatcatacttcttgtattgccaaagagatcgagttcctgtcatggaccgaacctttcggcatcgccctcacgctcttcgccgtgctgggaattttccttactgctttcgtgctcggtgtattcattaaattccgtaacacaccgatcgtaaaggctacaaaccgcgaacttagctatctgctgcttttctccttgctctgctgtttcagcagcagcctgttcttcatcggggagcctcaagactggacctgtcgcttgaggcagccggcatttggcatttcatttgtgttgtgcatttcgtgtatcctggtgaagaccaatagagtgctacttgtgttcgaggcgaagattcctacatctttccatagaaagtggtggggcctgaacttacagttcctgctggtcttcctgtgcactttcatgcaaatcgtgatctgtgtaatctggctgtacacagcccctccaagctcgtatagaaaccaagagttagaggatgagataatatttatcacgtgccatgagggatctctgatggcactcggcttcctcattggatacacctgcttgctggctgcaatttgttttttctttgctttcaaatcaaggaagctgcccgagaactttaacgaagccaagttcattactttttccatgcttattttctttattgtgtggatttcctttatccctgcttacgcatcaacctacggtaaattcgtgtcagccgtggaggtgatcgctatactggccgcaagttttggtctactggcttgtatatttttcaataagatttacataatcctgtttaagccttcacggaacaccattgaggaagttcgttgtagtactgccgcgcatgctttcaaagtcgctgcgcgcgccactctgcgtcgctccaatgtgtcgaggaagcgctctagctccttgggtggcagtacaggatccaccccctcctcttctataagtagtaagtctaacagtgaagacccctttcctcagcccgagaggcaaaagcagcaacagcctcttgccctgacccagcaagagcagcaacaacagccactcaccctcccgcagcaacagcgttcacagcagcaacctcggtgtaagcagaaggtaatcttcggtagcggaaccgtgaccttctcactgtcctttgacgagccgcagaaaaacgccatggctcacagaaattctacacatcaaaactcactggaggctcagaaatccagcgatactctgacacgccatgaacccttgctcccactgcaatgtggcgaaacagacctcgatcttaccgttcaggaaacaggcctgcagggacctgtcggaggtgatcagagaccggaagtggaagaccctgaggagttaagcccagccctagttgtgtcttcgagccagtcatttgttattagcggcggcggtagcacagtgaccgagaacgtggtgaatagctag

SEQ ID NO: 268024 - DNA, 3237 bp, Artificial Sequence
  derived and/or modified sequence
atggccttctacagctgctgctgggtgctgctggccctgacctggcacaccagcgcctacggccctgaccagagggcccagaagaagggggacatcatcctgggcggcctcttccccatccactttggagtggccgccaaggaccaggacctgaagagcaggcctgagagcgtggagtgcatccgctacaacttccggggcttccgctggctgcaggccatgatctttgccatcgaggagatcaacagcagccctgccctgctgcccaacctgaccctgggctaccgcatctttgacacctgcaacacagtgtccaaggccctggaggccaccctgagctttgtggcccagaacaagattgacagcctgaacctggatgagttctgcaactgcagcgagcacatccccagcaccatcgctgtggtgggcgccactggaagtggagtgtccacagctgtggccaacctgctgggcctcttctacatcccccaggtgtcctatgccagcagcagccggctgctgagcaacaagaaccagttcaagagcttcctgcggaccatccccaatgatgagcaccaggccacagccatggctgacatcatcgagtacttccgctggaactgggtgggcaccatcgccgcagatgatgattatggccggcccggcatcgagaagttccgggaggaggccgaggagcgggacatctgcatcgacttcagcgagctgatcagccagtacagtgatgaggaggagatccagcacgtggtggaggtgatccagaacagcacagccaaggtgattgtggtgttcagcagcggccctgacctggagcccctcatcaaggagatcgtgagaagaaacatcaccgggaagatctggctggccagcgaggcctgggccagcagcagcctgattgccatgccccagtacttccacgtggtgggcggcaccatcggctttgccctgaaggccggccagatccctggcttccgggagttcctgaagaaggtgcaccccaggaagtctgtgcacaatggatttgccaaggagttctgggaggagaccttcaactgccacctgcaggagggcgccaagggccccctgcctgtggacaccttcctgcggggccacgaggagagcggggaccgcttcagcaacagcagcacagccttccggcccctgtgcacaggagatgagaacatcagctctgtggagaccccctacatcgactacacccacctgcgcatctcctacaacgtgtacctggccgtgtacagcatcgcccacgccctgcaggacatctacacctgcctgcccggccggggcctcttcaccaacggcagctgtgccgacatcaagaaggtggaggcctggcaggtgctgaagcacctgcggcacctgaacttcaccaacaacatgggagagcaggtgacctttgatgaatgtggggacctggtgggcaactacagcatcatcaactggcacctgagcccagaagatggcagcatcgtgttcaaggaggtgggctactacaacgtgtatgccaagaagggggagcggctcttcatcaatgaggagaagatcctgtggagcggcttcagccgggaggtgcccttcagcaactgcagccgggactgcctggccggcaccaggaagggcatcattgaaggagagcccacctgctgctttgaatgtgtggagtgcccagatggagagtacagtgatgaaacagatgccagcgcctgcaacaagtgcccagatgacttctggagcaatgaaaaccacaccagctgcatcgccaaggagattgagttcctgtcctggacagagcccttcggcatcgccctgaccctgtttgctgtgctgggcatcttcctgacagcctttgtgctgggcgtcttcatcaagttcaggaacacccccatcgtgaaggccaccaaccgggagctgagctacctgctgctcttcagcctgctgtgctgcttcagcagcagcctcttcttcatcggggagccccaggactggacctgccgcctgcggcagcctgccttcggcatcagctttgtgctgtgcatcagctgcatcctggtgaagaccaacagagtgctgctggtgtttgaggccaagatccccaccagcttccacaggaagtggtggggcctgaacctgcagttcctgctggtgttcctgtgcaccttcatgcagatcgtcatctgtgtgatctggctgtacacagccccacccagcagctacagaaaccaggagctggaggatgagatcatcttcatcacctgccacgagggcagcctgatggccctgggcttcctgattggctacacctgcctgctggccgccatctgcttcttctttgccttcaagagcaggaagctgcctgagaacttcaatgaggccaagttcatcaccttctccatgctgatcttcttcatcgtgtggatctccttcatcccagcctatgccagcacctacggcaagtttgtgtctgctgtggaggtgattgccatcctggccgccagctttggcctgctggcctgcatcttcttcaacaagatctacatcatcctcttcaagcccagcaggaacaccatcgaggaggtgcgctgcagcacagctgcccacgccttcaaggtggccgcccgggccaccctgcggcgcagcaatgtgtccaggaagaggagcagcagcctgggcggcagcacaggcagcacccccagcagcagcatcagcagcaagagcaacagcgaggaccccttcccccagcctgagcggcagaagcagcagcagcccctggccctgacccagcaggagcagcagcagcagcccctgaccctgccccagcagcagaggagccagcagcagccccgctgcaagcagaaggtgatcttcggcagcggcaccgtgaccttcagcctgagctttgatgagccccagaagaatgccatggcccacaggaacagcacccaccagaacagcctggaggcccagaagagcagtgacaccctgaccaggcatgagcccctgctgcccctgcagtgtggggagacagacctggacctgactgtgcaggagaccggcctgcagggccctgtgggcggggaccagaggcctgaggtggaggaccctgaggagctgagccctgccctggtggtgagcagcagccagagctttgtgatcagcggcggcggcagcacagtgacagaaaatgtggtgaacagctag

SEQ ID NO: 268025 - DNA, 3237 bp, Artificial Sequence
  derived and/or modified sequence
atggccttctacagctgctgctgggtgctgctggccctgacctggcacacctctgcttacggccctgaccagcgcgctcagaaaaaaggcgatattattttgggaggactttttccaatacactttggggtggccgcaaaggaccaggatctgaaaagccgacccgagagtgtggaatgcattcggtacaatttcagaggattcagatggctacaggcaatgatttttgccatcgaagaaatcaactcctcaccagctctgcttcctaatcttacattggggtataggatcttcgacacctgtaacactgtgtctaaagctcttgaggcaactctctcattcgtggcccagaacaaaatcgattctctgaatcttgacgaattctgtaactgctcagaacatatcccatccacaatagccgttgtgggggctacaggctccggcgtgtctaccgccgtcgcaaacctgctcggactgttttacataccccaggtgagctacgcgtcctcttcccgacttctgtccaacaaaaatcagttcaaaagttttcttcgaactataccaaacgacgaacaccaggccaccgccatggctgatatcatcgaatacttccgctggaattgggtggggacaatcgccgccgacgatgactatgggagaccaggcattgagaaatttagggaggaggcagaggaaagagatatctgcattgacttcagtgaactcatatcccagtacagcgacgaggaggaaatccaacatgtcgtggaggttatccagaactctacagccaaagttatcgtggtcttcagctccgggccggacctcgaacctctgatcaaggagatagtaaggagaaatattacaggcaagatctggcttgcctcagaagcctgggcctccagcagtctcatcgctatgccgcagtacttccacgtagtgggcgggacaatcggattcgcccttaaagctggacagattccgggctttcgcgaattcctgaagaaagttcacccacggaagagcgtccacaacggtttcgcgaaagagttttgggaggaaacattcaactgccatcttcaggagggagccaaggggcctctgccagtggacacgttcctcaggggacacgaagaatctggcgacaggtttagtaacagctctaccgcatttcgccctctgtgcaccggcgatgaaaacatatcatctgtggagacaccttacattgattatacacacttaaggattagttataatgtgtatctcgcagtatattcaatcgcccatgcacttcaggacatttacacctgtctacccggaaggggcttatttacgaatggatcatgcgccgatattaagaaagtggaggcctggcaggttctcaagcatctcaggcacttaaacttcacaaacaacatgggagagcaggtcactttcgacgagtgcggagatttagtggggaactacagcattattaactggcatcttagccccgaagacgggagcatcgtgtttaaggaggtgggctattataatgtgtatgccaagaagggcgaacgattgttcattaacgaggaaaagatactgtggtctggattctctcgcgaggttccgttctcaaactgctctcgtgattgccttgcggggaccaggaaagggatcatagagggggagccaacctgttgtttcgagtgcgtagaatgcccagacggagaatattccgacgagacggatgcctccgcttgcaataaatgtcccgacgatttttggagcaacgagaatcatacgtcctgcatcgccaaagaaatcgagtttttgtcttggacagagccattcggcatcgctctcaccctttttgcagtattggggatcttcctcaccgcctttgttctgggggtctttattaagtttcgaaacacacccatagtcaaagccactaacagggaattgagttacctgcttctcttctccctcctctgctgcttcagtagctcactgttttttataggtgagccacaggactggacttgccgattgcggcagcctgcttttgggatttcatttgtgctgtgcatcagctgtatcctggttaagacaaatagggtgcttcttgttttcgaggccaagataccgaccagctttcatcggaaatggtggggcctcaatctgcaatttctgctggttttcctctgcacttttatgcaaatagtaatctgtgtcatctggctgtacactgcccctccgtcttcctaccgcaatcaggagcttgaggacgagatcatcttcattacgtgtcatgaggggagcctcatggccctgggcttcctgataggctacacgtgcctgctggccgccatttgcttttttttcgcttttaagagtcggaaactccctgagaatttcaatgaggccaagttcatcactttctccatgttgatttttttcatcgtctggatctccttcatccctgcatacgcaagtacctacggtaagttcgtctccgcagtcgaagtgatcgccattctggcagcctctttcggcctgctcgcctgcatcttcttcaacaaaatttacatcattttgttcaagcccagcaggaacactatcgaggaagttcgctgcagtacagccgctcacgcattcaaggtggcagctcgcgccacactgcgcagaagtaacgtgagcaggaagcggtcatcttcactgggcggctccacgggcagtacaccaagttctagtatctcctccaagtctaactcggaggacccctttccccagcctgaacggcaaaagcaacagcaacctctcgccctaacacagcaggaacagcagcaacagccccttacgctcccccagcagcagagaagccagcagcagccacgttgcaagcaaaaagtgatctttggaagcgggacggtgacattctccctttcctttgatgaaccacaaaagaacgctatggcacatagaaacagtacccaccaaaattcactagaggcccagaaaagttctgacacactgactagacacgaaccattgctgccattgcagtgtggagaaacagatctggatctgactgttcaggaaaccggtttacaggggccagtgggaggcgaccagcggcccgaggtggaagatcctgaggagttgtctcctgctttggtagtctcctcaagtcaaagcttcgttatttctggaggtggtagcaccgtcacagaaaacgtggtgaactcctag

SEQ ID NO: 268026 - DNA, 3237 bp, Artificial Sequence
  derived and/or modified sequence
atggccttctacagctgctgctgggtgctgctggccctgacctggcacacgtctgcgtatggtcctgatcagcgcgcccagaagaaaggggatataattttaggcggcttatttccaatacactttggggtcgcagccaaggatcaggatctcaaatctaggccggagagtgtggagtgtataaggtacaactttagaggattccgctggctgcaagcaatgatttttgcaattgaggaaataaatagctctcctgccttgctccccaatctcaccttgggttatcgcatctttgacacctgcaatacagtgtcaaaggctcttgaagccacactcagttttgttgctcagaacaaaatagactccctgaacctggacgaattctgcaactgtagtgagcatatcccctccacgatcgcagtggtcggcgcgactggttcaggggttagcaccgctgtggctaatctgttaggcctattttacattccgcaggtgtcatacgctagcagctccaggctgctgtccaacaaaaatcagtttaaatcttttctgcgaactattcctaatgatgagcaccaggcgaccgcgatggccgacatcatcgagtatttccgatggaattgggtgggaacaatcgccgcagacgatgattacggccggcccggaatcgaaaagtttagagaggaggctgaggagcgcgatatctgcatagatttctccgagcttatcagccagtactccgatgaggaagagattcagcacgtcgtggaagtgatccagaattccaccgcgaaggtgatcgtggtgttttctagcggccccgacctggagccgctcatcaaggaaatagtccggcggaacattactgggaaaatatggctggcaagtgaggcctgggcatcctcaagtctgatcgcaatgccacaatatttccacgtggttggtggcacaattggctttgcactcaaggccgggcagatcccaggcttcagagagttcttgaagaaagttcaccctcgcaaaagcgtgcataatggattcgccaaagagttctgggaggaaactttcaactgtcacctacaggaaggcgccaagggccctctccccgtcgataccttcttgcgcggccacgaagagtcgggtgatagattttctaacagttcaaccgcctttaggcctctttgtaccggggatgagaacattagcagcgtggaaacaccctatattgactacacccacctgcggataagctacaatgtgtatctggctgtatattcaattgctcacgccttacaagacatatatacttgtctccctggcagggggttgtttactaatgggagttgcgccgatatcaagaaggtggaagcttggcaggtcttaaagcacctgaggcatttgaatttcacaaataacatgggcgagcaggtgacgttcgacgagtgtggcgacctagtcgggaattacagtattattaattggcacctaagccctgaagatggctcgatcgtcttcaaagaggtggggtattataacgtgtacgcaaagaagggggaacggctcttcataaatgaagaaaaaatcctgtggtcaggatttagtagggaggtgcctttctcaaattgttctcgtgactgtctcgcggggacacgaaagggtattatagaaggcgaaccaacctgctgtttcgaatgtgtcgagtgccccgatggggaatattcagatgagactgacgcctccgcgtgcaacaagtgtcccgacgacttttggagcaatgaaaaccacactagctgtattgccaaagagatcgaattcctgagttggaccgagcccttcgggattgccctcacactgtttgccgttcttggtatctttctgaccgccttcgtcctgggagtgttcattaagtttcggaacacccctattgtcaaggctactaatagagagctgagttacctcctgctgttcagtctgctgtgttgcttctcgagttcattgttttttatcggagagccacaggactggacatgtcgccttcgccagcccgcgtttggtatatctttcgttctgtgcatctcatgtattttggttaaaactaacagagtgttgctggtgtttgaggctaaaataccaacctcgttccatcggaagtggtggggtctcaacctccagtttctgctggtcttcctgtgtactttcatgcagatcgtgatctgcgtgatttggctttataccgcaccaccaagctcatatcgcaaccaggagttagaagacgagatcatcttcatcacgtgtcatgaaggctctctgatggccctgggctttctcataggatacacttgcctcctggcagcaatctgctttttctttgcctttaaaagccgaaaactaccagagaacttcaatgaagccaagttcatcaccttttcaatgctcatcttcttcatcgtgtggataagttttatccccgcctacgccagcacttacgggaaattcgtcagtgcagtggaagttatcgccatcttggctgcttcctttggcctgctagcttgcattttttttaacaaaatttacattatattgttcaagccttcccggaacactattgaagaagtgagatgcagtacggctgcacacgccttcaaagtggccgcgcgggcaactctgcgcaggtcaaatgtctctagaaaacgatccagcagcctgggcggaagcacagggtctaccccaagctcaagtatatccagcaagtcaaactcggaagatccctttccccaaccagaacggcagaagcagcagcagcctttggccctgacacaacaggaacagcagcagcagcctctcaccctgccacagcagcaacgatcacagcagcagccgagatgcaaacaaaaagttatttttggctctgggaccgtcacctttagtttgagtttcgatgaacctcagaaaaacgccatggctcacaggaactctacacaccagaacagcttggaggctcagaagagcagtgatacactgaccagacacgaacctcttctccccttgcaatgtggggaaacggaccttgacttaaccgttcaagagacaggactgcagggacccgtgggtggcgatcagagacccgaagtggaagaccccgaggaactatcccctgccttggtcgtgagttcctcacaatcattcgtcatctcgggaggcggaagtaccgttacagaaaatgtggtgaattcttag

SEQ ID NO: 268027 - DNA, 3237 bp, Artificial Sequence
  derived and/or modified sequence
atggcattttacagttgctgttgggttctcttggcactgacttggcacacatccgcatacggccctgatcaaagagcccagaagaaaggtgacattatcttgggtggactgttccctatccactttggggtagcagctaaagaccaggacctgaagtcgagacccgagtcagtggagtgtataagatataattttagaggattccgctggctgcaagccatgatcttcgctatcgaagagatcaactcatccccagcgttactgcccaacctgactctcggctatcggatcttcgatacctgtaataccgtatcgaaggctctggaagccacattgtccttcgtggcacaaaacaagattgactctctgaatctggatgaattttgtaactgctccgaacacatcccctcaactatcgcagtcgtgggggcaaccgggtcaggcgtgtccaccgcggtggctaacctgcttggactcttttatattcctcaggtgtcctacgcttccagcagcaggctgctgagcaacaagaatcagttcaagagcttcctccgaacaatccctaatgatgagcaccaggccacagccatggccgacataatcgaatactttcgttggaactgggtgggcaccatagctgctgatgatgattatggaaggccaggcatcgaaaagttccgagaggaggcagaggagcgcgacatatgcatcgacttcagcgagctcatcagccagtattcagatgaggaggaaattcagcacgtggtggaggtgattcagaatagtacggccaaggtcatcgtggttttctcctcggggccagatttggagcctctgatcaaagagatcgtcagacgcaatatcactggaaagatatggctggccagtgaggcttgggctagctccagcctcatcgccatgccccagtacttccacgtggtcggaggaaccatcgggttcgcacttaaagccggacagattcctggttttcgcgagttcctaaagaaagttcacccacggaaatccgtgcataatggctttgccaaagagttctgggaagagacgtttaactgtcatcttcaggaaggggcaaaaggcccattgccggtggacacatttttaagaggacatgaagagagcggggaccgctttagtaacagttcgacagcattcagaccgttgtgcaccggagatgagaatatatcaagcgtggaaacaccatatatcgactacacacatctgaggatttcgtacaacgtatatctggctgtgtattctattgcccatgcactccaagatatctacacatgtctcccgggaaggggactgttcactaacggctcctgtgcggacattaagaaggtggaagcctggcaggtgctgaagcatctccgtcacctcaacttcacaaacaatatgggcgagcaggtcacctttgatgaatgcggcgatcttgtgggcaattatagtatcattaactggcatctttcgcccgaggacggttccatcgtcttcaaagaagtcgggtattacaatgtttatgccaaaaaaggcgagaggttgtttatcaacgaagagaaaattctttggagcggcttcagcagagaggtgcccttttcgaattgttctagggattgtctagccggtacacgcaagggcatcatcgagggtgaacccacatgttgttttgaatgcgtcgaatgtccggacggcgagtattccgatgagactgacgcttctgcatgcaataagtgccctgatgacttctggagtaacgagaaccacacatcttgtatcgcaaaggaaattgagttcctctcctggactgagccgttcggtatcgctctgaccctgttcgcggttctgggaatttttttaacagcttttgtgctcggcgtgtttataaagttccggaacacacctattgtgaaggccaccaatcgcgaattatcttacctgctgctcttttctctcctatgttgcttctcatcatccctcttcttcattggggaaccccaggattggacttgtagactcagacaacctgccttcggaatctcgtttgtgctttgcatcagctgtattttagtcaaaacaaacagggtgctgctggttttcgaggccaaaatcccgacttcgtttcatcggaagtggtggggactaaatctccagttccttctggtgttcctctgcacattcatgcagattgtgatctgtgtgatctggttatatacagccccaccatcctcctaccgaaatcaggagctcgaagatgagatcatctttattacatgtcatgaaggcagcctgatggccctaggctttctgattggctatacctgccttctggctgccatctgtttctttttcgctttcaagtcccgcaaacttcctgaaaattttaacgaagccaagtttattaccttttccatgcttatcttttttattgtctggatatctttcattcctgcttacgcatccacctacggcaaattcgtctccgctgtcgaagtcatcgctatcctggctgcctcctttgggctgttggcctgcatatttttcaacaagatttacattatcttgtttaagccttccaggaataccattgaagaggtaagatgttctacggctgcccatgcttttaaagtggctgcaagggccaccctgagacgatctaatgtgagtcggaaacgcagttcctctttgggcggttccaccgggtctactcctagtagctctattagctcgaaatcgaactcggaagaccctttccctcaaccagagcgccaaaaacagcagcagcccctcgccctgacccagcaggagcagcagcagcagcctctaactctgcctcaacagcaacggagtcaacaacagcctagatgtaagcagaaagtcattttcggctccggcaccgttaccttcagcctgagttttgacgaaccgcaaaagaatgctatggctcatcggaacagcacacaccagaacagtctggaagcacagaaatcttcagacactctgacccgccacgagccgcttctgcctctgcagtgtggggagacagacctggacctcaccgtacaggagactggcctacagggccctgtgggtggagatcagagaccagaggtggaagacccagaagaactttctccagccctggtagtgtcctcttcccagtctttcgtgattagcggtggcggaagcaccgttacagagaacgtcgtgaatagttag

SEQ ID NO: 268028 - DNA, 3237 bp, Artificial Sequence
  derived and/or modified sequence
atggcgttttactcatgttgttgggtgctcctggcgctgacctggcacacctccgcctacggtccagaccagagagcccagaagaagggggatatcatcctcggcggactgttcccgattcacttcggcgtcgcggcaaaagatcaggacctgaaatctagaccggaatctgtcgaatgtattcggtataacttccgaggctttaggtggctgcaggcgatgatctttgctattgaagagatcaacagctcacccgctctactgcccaacctgacattgggctaccggattttcgatacatgcaatactgtgagcaaagcgttggaagctactctgtcatttgtggcccaaaataaaatcgatagtctgaacttagacgaattctgcaattgctcagagcacattccaagcactattgccgtggttggggctactggaagcggagtgtctactgcagtggccaacctgctgggcctgttctacatccctcaggtctcttacgctagtagcagccgccttctttctaataaaaatcagttcaaaagctttctaaggaccattcccaatgacgagcatcaggctaccgcaatggcagatatcatcgaatattttaggtggaactgggttggaaccatcgctgcagacgacgactatggcaggccgggtatcgaaaaattccgcgaggaggcagaagagcgagatatttgcattgattttagcgaactgattagccagtatagcgatgaagaagagatacagcacgtggtcgaggtaattcaaaattctacagcaaaagtcatagtggtctttagctccggtcctgatttagaacccctgattaaggaaattgtccgccgaaacattactggtaagatttggctggcttcagaggcttgggcctcatcctccttgattgccatgccacagtatttccatgtggtcggcggaaccatcggcttcgctctcaaagcaggtcagatcccaggattcagagagttcctcaagaaggtgcacccccgaaaatccgtccataacgggttcgctaaagagttttgggaggagacttttaattgccatcttcaggagggagcgaaggggccactacccgtcgacactttcctgagaggccacgaggagagcggagatagattttccaactcaagcaccgccttccgcccactctgtaccggtgacgaaaatatcagcagcgtggagacaccatacattgattacacccatctgaggattagctacaacgtttatcttgcagtgtattccatcgctcacgctttgcaagatatttatacctgtctccctggccgaggcctctttaccaacggaagctgcgccgatatcaaaaaggttgaggcatggcaagtgctgaaacacctgaggcacttaaatttcactaataacatgggcgagcaagtcactttcgacgaatgtggcgacctagtaggaaattattcaatcataaactggcacctctcaccagaagacggtagtattgtgttcaaggaggtgggatactacaacgtgtatgccaagaaaggagaacgcctgttcatcaacgaggaaaagatcctctggtccgggttctctagggaggtaccatttagcaattgtagcagggactgccttgccggaacgcgtaagggtatcattgagggagaaccaacctgctgtttcgaatgtgtcgagtgtccagacggcgagtactctgatgaaaccgatgcatccgcctgtaataaatgccctgacgacttctggtctaatgagaaccacacgtcctgcatagccaaggaaattgaatttctttcctggactgaaccgtttggtattgccttgactctcttcgccgtgttgggcatttttcttactgcgtttgtgttgggagtgttcatcaaattcagaaatacccccattgtgaaagctaccaatcgtgaactgtcctatcttctgctgttctccctgttatgctgcttctcttcatcccttttcttcatcggggagcctcaggactggacatgcagattgcggcagcccgcttttgggattagcttcgtgctgtgtatcagctgtattctcgtgaaaacaaaccgggttctcctggtattcgaggctaagattccaacttcgttccacagaaagtggtggggtcttaatctgcagtttctgctggtctttctctgcacttttatgcaaatcgtaatatgcgtcatctggctgtatacagcacctccatcctcctatcggaatcaggaactggaggacgagatcatctttatcacctgtcacgaggggtctctgatggcactggggttcctcataggctacacgtgcctcctggccgctatctgctttttttttgctttcaagagtaggaagctgcccgaaaactttaacgaggccaaatttattacgtttagtatgctgatcttcttcattgtgtggatcagcttcatccctgcttacgcctccacctacggcaagttcgtctccgccgtcgaggtgatcgccatattggccgcaagcttcggcctgctggcgtgcatctttttcaataagatttatatcatcctgttcaaaccatcccggaatactatcgaggaggtgcggtgttccaccgccgctcatgctttcaaggtggccgctagagccacactgcggcgtagcaacgtcagtaggaagagaagtagttcgctgggaggttccacaggatctaccccatctagctcaatcagttctaagagcaattctgaagacccattcccccagccggagcgccagaagcagcagcagcccctcgcactgacacagcaagagcagcagcagcagcccctcaccctgccccagcaacagcgttctcagcaacagcctaggtgtaagcagaaggtgatcttcggctctggcacagtgaccttctcgctgagcttcgacgagcctcagaagaacgcaatggctcaccggaactcaacccaccagaattccctcgaggcccagaagtcttccgacacactgacacgacatgagccactcctacctctgcagtgtggggaaactgacctggacctgactgtacaggaaaccggactccaaggtcccgtcggcggtgaccaacgacctgaagtcgaagatcctgaagagctcagccctgccttggtcgtctcctcttctcaaagttttgtcattagtggaggaggatcaaccgtgacagagaacgtggtcaactcttag

SEQ ID NO: 268029 - DNA, 3361 bp, Artificial Sequence
  derived and/or modified sequence
tcccttgccctggagagacggcagaaccatggcattttatagctgctgctgggtcctcttggcactcacctggcacacctctgcctacgggccagaccagcgagcccaaaagaagggggacattatccttggggggctctttcctattcattttggagtagcagctaaagatcaagatctcaaatcaaggccggagtctgtggaatgtatcaggtataatttccgtgggtttcgctggttacaggctatgatatttgccatagaggagataaacagcagcccagcccttcttcccaacttgacgctgggatacaggatatttgacacttgcaacaccgtttctaaggccttggaagccaccctgagttttgttgctcaaaacaaaattgattctttgaaccttgatgagttctgcaactgctcagagcacattccctctacgattgctgtggtgggagcaactggctcaggcgtctccacggcagtggcaaatctgctggggctcttctacattccccaggtcagttatgcctcctccagcagactcctcagcaacaagaatcaattcaagtctttcctccgaaccatccccaatgatgagcaccaggccactgccatggcagacatcatcgagtatttccgctggaactgggtgggcacaattgcagctgatgacgactatgggcggccggggattgagaaattccgagaggaagctgaggaaagggatatctgcatcgacttcagtgaactcatctcccagtactctgatgaggaagagatccagcatgtggtagaggtgattcaaaattccacggccaaagtcatcgtggttttctccagtggcccagatcttgagcccctcatcaaggagattgtccggcgcaatatcacgggcaagatctggctggccagcgaggcctgggccagctcctccctgatcgccatgcctcagtacttccacgtggttggcggcaccattggattcgctctgaaggctgggcagatcccaggcttccgggaattcctgaagaaggtccatcccaggaagtctgtccacaatggttttgccaaggagttttgggaagaaacatttaactgccacctccaagaaggtgcaaaaggacctttacctgtggacacctttctgagaggtcacgaagaaagtggcgacaggtttagcaacagctcgacagccttccgacccctctgtacaggggatgagaacatcagcagtgtcgagaccccttacatagattacacgcatttacggatatcctacaatgtgtacttagcagtctactccattgcccacgccttgcaagatatatatacctgcttacctgggagagggctcttcaccaatggctcctgtgcagacatcaagaaagttgaggcgtggcaggtcctgaagcacctacggcatctaaactttacaaacaatatgggggagcaggtgacctttgatgagtgtggtgacctggtggggaactattccatcatcaactggcacctctccccagaggatggctccatcgtgtttaaggaagtcgggtattacaacgtctatgccaagaagggagaaagactcttcatcaacgaggagaaaatcctgtggagtgggttctccagggaggtgcccttctccaactgcagccgagactgcctggcagggaccaggaaagggatcattgagggggagcccacctgctgctttgagtgtgtggagtgtcctgatggggagtatagtgatgagacagatgccagtgcctgtaacaagtgcccagatgacttctggtccaatgagaaccacacctcctgcattgccaaggagatcgagtttctgtcgtggacggagccctttgggatcgcactcaccctctttgccgtgctgggcattttcctgacagcctttgtgctgggtgtgtttatcaagttccgcaacacacccattgtcaaggccaccaaccgagagctctcctacctcctcctcttctccctgctctgctgcttctccagctccctgttcttcatcggggagccccaggactggacgtgccgcctgcgccagccggcctttggcatcagcttcgtgctctgcatctcatgcatcctggtgaaaaccaaccgtgtcctcctggtgtttgaggccaagatccccaccagcttccaccgcaagtggtgggggctcaacctgcagttcctgctggttttcctctgcaccttcatgcagattgtcatctgtgtgatctggctctacaccgcgcccccgtcaagctaccgcaaccaggagctggaggatgagatcatcttcatcacgtgccacgagggctccctcatggccctgggcttcctgatcggctacacctgcctgctggctgccatctgcttcttctttgccttcaagtcccggaagctgccggagaacttcaatgaagccaagttcatcaccttcagcatgctcatcttcttcatcgtctggatctccttcattccagcctatgccagcacctatggcaagtttgtctctgccgtagaggtgattgccatcctggcagccagctttggcttgctggcgtgcatcttcttcaacaagatctacatcattctcttcaagccatcccgcaacaccatcgaggaggtgcgttgcagcaccgcagctcacgctttcaaggtggctgcccgggccacgctgcgccgcagcaacgtctcccgcaagcggtccagcagccttggaggctccacgggatccaccccctcctcctccatcagcagcaagagcaacagcgaagacccattcccacagcccgagaggcagaagcagcagcagccgctggccctaacccagcaagagcagcagcagcagcccctgaccctcccacagcagcaacgatctcagcagcagcccagatgcaagcagaaggtcatctttggcagcggcacggtcaccttctcactgagctttgatgagcctcagaagaacgccatggcccacaggaattctacgcaccagaactccctggaggcccagaaaagcagcgatacgctgacccgacacgagccattactcccgctgcagtgcggggaaacggacttagatctgaccgtccaggaaacaggtctgcaaggacctgtgggtggagaccagcggccagaggtggaggaccctgaagagttgtccccagcacttgtagtgtccagttcacagagctttgtcatcagtggtggaggcagcactgttacagaaaacgtagtgaattcataaaatggaaggagaagactgggctagggagaatgcagagaggtttcttggggtcccagggaagaggaatcgccccagactcctttcctctgaggaaga

SEQ ID NO: 268030 - DNA, 3783 bp, Artificial Sequence
  derived and/or modified sequence
caacaggcacctggctgcagccaggaaggaccgcacgccctttcgcgcaggagagtggaaggagggagctgtttgccagcaccgaggtcttgcggcacaggcaacgcttgacctgagtcttgcagaatgaaaggcatcacaggaggcctctgcatgatgtggcttccaaagactcaaggaccacccacattacaagtctggattgaggaaggcagaaatggagattcaaacaccacgtcttctattattttattaatcaatctgtagacatgtgtccccactgcagggagtgaactgctccaagggagaaacttctgggagcctccaaactcctagctgtctcatcccttgccctggagagacggcagaaccatggcattttatagctgctgctgggtcctcttggcactcacctggcacacctctgcctacgggccagaccagcgagcccaaaagaagggggacattatccttggggggctctttcctattcattttggagtagcagctaaagatcaagatctcaaatcaaggccggagtctgtggaatgtatcaggtataatttccgtgggtttcgctggttacaggctatgatatttgccatagaggagataaacagcagcccagcccttcttcccaacttgacgctgggatacaggatatttgacacttgcaacaccgtttctaaggccttggaagccaccctgagttttgttgctcaaaacaaaattgattctttgaaccttgatgagttctgcaactgctcagagcacattccctctacgattgctgtggtgggagcaactggctcaggcgtctccacggcagtggcaaatctgctggggctcttctacattccccaggtcagttatgcctcctccagcagactcctcagcaacaagaatcaattcaagtctttcctccgaaccatccccaatgatgagcaccaggccactgccatggcagacatcatcgagtatttccgctggaactgggtgggcacaattgcagctgatgacgactatgggcggccggggattgagaaattccgagaggaagctgaggaaagggatatctgcatcgacttcagtgaactcatctcccagtactctgatgaggaagagatccagcatgtggtagaggtgattcaaaattccacggccaaagtcatcgtggttttctccagtggcccagatcttgagcccctcatcaaggagattgtccggcgcaatatcacgggcaagatctggctggccagcgaggcctgggccagctcctccctgatcgccatgcctcagtacttccacgtggttggcggcaccattggattcgctctgaaggctgggcagatcccaggcttccgggaattcctgaagaaggtccatcccaggaagtctgtccacaatggttttgccaaggagttttgggaagaaacatttaactgccacctccaagaaggtgcaaaaggacctttacctgtggacacctttctgagaggtcacgaagaaagtggcgacaggtttagcaacagctcgacagccttccgacccctctgtacaggggatgagaacatcagcagtgtcgagaccccttacatagattacacgcatttacggatatcctacaatgtgtacttagcagtctactccattgcccacgccttgcaagatatatatacctgcttacctgggagagggctcttcaccaatggctcctgtgcagacatcaagaaagttgaggcgtggcaggtcctgaagcacctacggcatctaaactttacaaacaatatgggggagcaggtgacctttgatgagtgtggtgacctggtggggaactattccatcatcaactggcacctctccccagaggatggctccatcgtgtttaaggaagtcgggtattacaacgtctatgccaagaagggagaaagactcttcatcaacgaggagaaaatcctgtggagtgggttctccagggaggtgcccttctccaactgcagccgagactgcctggcagggaccaggaaagggatcattgagggggagcccacctgctgctttgagtgtgtggagtgtcctgatggggagtatagtgatgagacagatgccagtgcctgtaacaagtgcccagatgacttctggtccaatgagaaccacacctcctgcattgccaaggagatcgagtttctgtcgtggacggagccctttgggatcgcactcaccctctttgccgtgctgggcattttcctgacagcctttgtgctgggtgtgtttatcaagttccgcaacacacccattgtcaaggccaccaaccgagagctctcctacctcctcctcttctccctgctctgctgcttctccagctccctgttcttcatcggggagccccaggactggacgtgccgcctgcgccagccggcctttggcatcagcttcgtgctctgcatctcatgcatcctggtgaaaaccaaccgtgtcctcctggtgtttgaggccaagatccccaccagcttccaccgcaagtggtgggggctcaacctgcagttcctgctggttttcctctgcaccttcatgcagattgtcatctgtgtgatctggctctacaccgcgcccccgtcaagctaccgcaaccaggagctggaggatgagatcatcttcatcacgtgccacgagggctccctcatggccctgggcttcctgatcggctacacctgcctgctggctgccatctgcttcttctttgccttcaagtcccggaagctgccggagaacttcaatgaagccaagttcatcaccttcagcatgctcatcttcttcatcgtctggatctccttcattccagcctatgccagcacctatggcaagtttgtctctgccgtagaggtgattgccatcctggcagccagctttggcttgctggcgtgcatcttcttcaacaagatctacatcattctcttcaagccatcccgcaacaccatcgaggaggtgcgttgcagcaccgcagctcacgctttcaaggtggctgcccgggccacgctgcgccgcagcaacgtctcccgcaagcggtccagcagccttggaggctccacgggatccaccccctcctcctccatcagcagcaagagcaacagcgaagacccattcccacagcccgagaggcagaagcagcagcagccgctggccctaacccagcaagagcagcagcagcagcccctgaccctcccacagcagcaacgatctcagcagcagcccagatgcaagcagaaggtcatctttggcagcggcacggtcaccttctcactgagctttgatgagcctcagaagaacgccatggcccacaggaattctacgcaccagaactccctggaggcccagaaaagcagcgatacgctgacccgacacgagccattactcccgctgcagtgcggggaaacggacttagatctgaccgtccaggaaacaggtctgcaaggacctgtgggtggagaccagcggccagaggtggaggaccctgaagagttgtccccagcacttgtagtgtccagttcacagagctttgtcatcagtggtggaggcagcactgttacagaaaacgtagtgaattcataaaatggaaggagaagactgggctagggagaatgcagagaggtttcttggggtcccagggaagaggaatcgccccagactcctttcctctgaggaagaagggataatagacacatcaaatgccccgaatttagtcacaccatcttaaatgacagtgaattgacccatgttcccttt

SEQ ID NO: 268031 - DNA, 3237 bp, Artificial Sequence
  derived and/or modified sequence
atggccttctacagctgctgctgggtgctgctggccctgacctggcacaccagcgcctacggccccgaccagagagcccagaagaagggcgacatcatcctgggcggcctgttccccatccacttcggcgtggccgccaaggaccaggacctgaagagcagacccgagagcgtggagtgcatcagatacaacttcagaggcttcagatggctgcaggccatgatcttcgccatcgaggagatcaacagcagccccgccctgctgcccaacctgaccctgggctacagaatcttcgacacctgcaacaccgtgagcaaggccctggaggccaccctgagcttcgtggcccagaacaagatcgacagcctgaacctggacgagttctgcaactgcagcgagcacatccccagcaccatcgccgtggtgggcgccaccggcagcggcgtgagcaccgccgtggccaacctgctgggcctgttctacatcccccaggtgagctacgccagcagcagcagactgctgagcaacaagaaccagttcaagagcttcctgagaaccatccccaacgacgagcaccaggccaccgccatggccgacatcatcgagtacttcagatggaactgggtgggcaccatcgccgccgacgacgactacggcagacccggcatcgagaagttcagagaggaggccgaggagagagacatctgcatcgacttcagcgagctgatcagccagtacagcgacgaggaggagatccagcacgtggtggaggtgatccagaacagcaccgccaaggtgatcgtggtgttcagcagcggccccgacctggagcccctgatcaaggagatcgtgagaagaaacatcaccggcaagatctggctggccagcgaggcctgggccagcagcagcctgatcgccatgccccagtacttccacgtggtgggcggcaccatcggcttcgccctgaaggccggccagatccccggcttcagagagttcctgaagaaggtgcaccccagaaagagcgtgcacaacggcttcgccaaggagttctgggaggagaccttcaactgccacctgcaggagggcgccaagggccccctgcccgtggacaccttcctgagaggccacgaggagagcggcgacagattcagcaacagcagcaccgccttcagacccctgtgcaccggcgacgagaacatcagcagcgtggagaccccctacatcgactacacccacctgagaatcagctacaacgtgtacctggccgtgtacagcatcgcccacgccctgcaggacatctacacctgcctgcccggcagaggcctgttcaccaacggcagctgcgccgacatcaagaaggtggaggcctggcaggtgctgaagcacctgagacacctgaacttcaccaacaacatgggcgagcaggtgaccttcgacgagtgcggcgacctggtgggcaactacagcatcatcaactggcacctgagccccgaggacggcagcatcgtgttcaaggaggtgggctactacaacgtgtacgccaagaagggcgagagactgttcatcaacgaggagaagatcctgtggagcggcttcagcagagaggtgcccttcagcaactgcagcagagactgcctggccggcaccagaaagggcatcatcgagggcgagcccacctgctgcttcgagtgcgtggagtgccccgacggcgagtacagcgacgagaccgacgccagcgcctgcaacaagtgccccgacgacttctggagcaacgagaaccacaccagctgcatcgccaaggagatcgagttcctgagctggaccgagcccttcggcatcgccctgaccctgttcgccgtgctgggcatcttcctgaccgccttcgtgctgggcgtgttcatcaagttcagaaacacccccatcgtgaaggccaccaacagagagctgagctacctgctgctgttcagcctgctgtgctgcttcagcagcagcctgttcttcatcggcgagccccaggactggacctgcagactgagacagcccgccttcggcatcagcttcgtgctgtgcatcagctgcatcctggtgaagaccaacagagtgctgctggtgttcgaggccaagatccccaccagcttccacagaaagtggtggggcctgaacctgcagttcctgctggtgttcctgtgcaccttcatgcagatcgtgatctgcgtgatctggctgtacaccgccccccccagcagctacagaaaccaggagctggaggacgagatcatcttcatcacctgccacgagggcagcctgatggccctgggcttcctgatcggctacacctgcctgctggccgccatctgcttcttcttcgccttcaagagcagaaagctgcccgagaacttcaacgaggccaagttcatcaccttcagcatgctgatcttcttcatcgtgtggatcagcttcatccccgcctacgccagcacctacggcaagttcgtgagcgccgtggaggtgatcgccatcctggccgccagcttcggcctgctggcctgcatcttcttcaacaagatctacatcatcctgttcaagcccagcagaaacaccatcgaggaggtgagatgcagcaccgccgcccacgccttcaaggtggccgccagagccaccctgagaagaagcaacgtgagcagaaagagaagcagcagcctgggcggcagcaccggcagcacccccagcagcagcatcagcagcaagagcaacagcgaggaccccttcccccagcccgagagacagaagcagcagcagcccctggccctgacccagcaggagcagcagcagcagcccctgaccctgccccagcagcagagaagccagcagcagcccagatgcaagcagaaggtgatcttcggcagcggcaccgtgaccttcagcctgagcttcgacgagccccagaagaacgccatggcccacagaaacagcacccaccagaacagcctggaggcccagaagagcagcgacaccctgaccagacacgagcccctgctgcccctgcagtgcggcgagaccgacctggacctgaccgtgcaggagaccggcctgcagggccccgtgggcggcgaccagagacccgaggtggaggaccccgaggagctgagccccgccctggtggtgagcagcagccagagcttcgtgatcagcggcggcggcagcaccgtgaccgagaacgtggtgaacagctag

SEQ ID NO: 268032 - protein, 115 aa, Artificial Sequence
  derived and/or modified sequence
MEKKRKTLLLLLLMAATLFCMPIVSYAVSSVNIQGHLTHSELVKGPNRRLLPFVDCGARCRVRCSLHSRPKICSRACGTCCFRCRCVPPGTYGNREMCGKCYTDMITHGNKPKCP

SEQ ID NO: 268033 - protein, 676 aa, Artificial Sequence
  derived and/or modified sequence
MNFETSRCATLQYCPDPYIQRFVETPAHFSWKESYYRSTMSQSTQTNEFLSPEVFQHIWDFLEQPICSVQPIDLNFVDEPSEDGATNKIEISMDCIRMQDSDLSDPMWPQYTNLGLLNSMDQQIQNGSSSTSPYNTDHAQNSVTAPSPYAQPSSTFDALSPSPAIPSNTDYPGPHSFDVSFQQSSTAKSATWTYSTELKKLYCQIAKTCPIQIKVMTPPPQGAVIRAMPVYKKAEHVTEVVKRCPNHELSREFNEGQIAPPSHLIRVEGNSHAQYVEDPITGRQSVLVPYEPPQVGTEFTTVLYNFMCNSSCVGGMNRRPILIIVTLETRDGQVLGRRCFEARICACPGRDRKADEDSIRKQQVSDSTKNGDAFRQNTHGIQMTSIKKRRSPDDELLYLPVRGRETYEMLLKIKESLELMQYLPQHTIETYRQQQQQQHQHLLQKQTSIQSPSSYGNSSPPLNKMNSMNKLPSVSQLINPQQRNALTPTTIPDGMGANIPMMGTHMPMAGDMNGLSPTQALPPPLSMPSTSHCTPPPPYPTDCSIVSFLARLGCSSCLDYFTTQGLTTIYQIEHYSMDDLASLKIPEQFRHAIWKGILDHRQLHEFSSPSHLLRTPSSASTVSVGSSETRGERVIDAVRFTLRQTISFPPRDEWNDFNFDMDARRNKQQRIKEEGE

SEQ ID NO: 268034 - protein, 582 aa, Artificial Sequence
  derived and/or modified sequence
MLYLENNAQTQFSEPQYTNLGLLNSMDQQIQNGSSSTSPYNTDHAQNSVTAPSPYAQPSSTFDALSPSPAIPSNTDYPGPHSFDVSFQQSSTAKSATWTYSTELKKLYCQIAKTCPIQIKVMTPPPQGAVIRAMPVYKKAEHVTEVVKRCPNHELSREFNEGQIAPPSHLIRVEGNSHAQYVEDPITGRQSVLVPYEPPQVGTEFTTVLYNFMCNSSCVGGMNRRPILIIVTLETRDGQVLGRRCFEARICACPGRDRKADEDSIRKQQVSDSTKNGDAFRQNTHGIQMTSIKKRRSPDDELLYLPVRGRETYEMLLKIKESLELMQYLPQHTIETYRQQQQQQHQHLLQKQTSIQSPSSYGNSSPPLNKMNSMNKLPSVSQLINPQQRNALTPTTIPDGMGANIPMMGTHMPMAGDMNGLSPTQALPPPLSMPSTSHCTPPPPYPTDCSIVSFLARLGCSSCLDYFTTQGLTTIYQIEHYSMDDLASLKIPEQFRHAIWKGILDHRQLHEFSSPSHLLRTPSSASTVSVGSSETRGERVIDAVRFTLRQTISFPPRDEWNDFNFDMDARRNKQQRIKEEGE

SEQ ID NO: 268035 - DNA, 2031 bp, Artificial Sequence
  derived and/or modified sequence
atgaacttcgagaccagcagatgcgccaccctgcagtactgccccgacccctacatccagagattcgtggagacccccgcccacttcagctggaaggagagctactacagaagcaccatgagccagagcacccagaccaacgagttcctgagccccgaggtgttccagcacatctgggacttcctggagcagcccatctgcagcgtgcagcccatcgacctgaacttcgtggacgagcccagcgaggacggcgccaccaacaagatcgagatcagcatggactgcatcagaatgcaggacagcgacctgagcgaccccatgtggccccagtacaccaacctgggcctgctgaacagcatggaccagcagatccagaacggcagcagcagcaccagcccctacaacaccgaccacgcccagaacagcgtgaccgcccccagcccctacgcccagcccagcagcaccttcgacgccctgagccccagccccgccatccccagcaacaccgactaccccggcccccacagcttcgacgtgagcttccagcagagcagcaccgccaagagcgccacctggacctacagcaccgagctgaagaagctgtactgccagatcgccaagacctgccccatccagatcaaggtgatgaccccccccccccagggcgccgtgatcagagccatgcccgtgtacaagaaggccgagcacgtgaccgaggtggtgaagagatgccccaaccacgagctgagcagagagttcaacgagggccagatcgccccccccagccacctgatcagagtggagggcaacagccacgcccagtacgtggaggaccccatcaccggcagacagagcgtgctggtgccctacgagcccccccaggtgggcaccgagttcaccaccgtgctgtacaacttcatgtgcaacagcagctgcgtgggcggcatgaacagaagacccatcctgatcatcgtgaccctggagaccagagacggccaggtgctgggcagaagatgcttcgaggccagaatctgcgcctgccccggcagagacagaaaggccgacgaggacagcatcagaaagcagcaggtgagcgacagcaccaagaacggcgacgccttcagacagaacacccacggcatccagatgaccagcatcaagaagagaagaagccccgacgacgagctgctgtacctgcccgtgagaggcagagagacctacgagatgctgctgaagatcaaggagagcctggagctgatgcagtacctgccccagcacaccatcgagacctacagacagcagcagcagcagcagcaccagcacctgctgcagaagcagaccagcatccagagccccagcagctacggcaacagcagcccccccctgaacaagatgaacagcatgaacaagctgcccagcgtgagccagctgatcaacccccagcagagaaacgccctgacccccaccaccatccccgacggcatgggcgccaacatccccatgatgggcacccacatgcccatggccggcgacatgaacggcctgagccccacccaggccctgcccccccccctgagcatgcccagcaccagccactgcacccccccccccccctaccccaccgactgcagcatcgtgagcttcctggccagactgggctgcagcagctgcctggactacttcaccacccagggcctgaccaccatctaccagatcgagcactacagcatggacgacctggccagcctgaagatccccgagcagttcagacacgccatctggaagggcatcctggaccacagacagctgcacgagttcagcagccccagccacctgctgagaacccccagcagcgccagcaccgtgagcgtgggcagcagcgagaccagaggcgagagagtgatcgacgccgtgagattcaccctgagacagaccatcagcttcccccccagagacgagtggaacgacttcaacttcgacatggacgccagaagaaacaagcagcagagaatcaaggaggagggcgagtag

SEQ ID NO: 268036 - DNA, 2031 bp, Artificial Sequence
  derived and/or modified sequence
atgaactttgagacaagccgatgcgcgaccctgcagtattgccccgatccttacatccagagatttgtggagacacccgcacacttttcttggaaggagagctattatcggtctactatgagccaatccacacagaccaacgaatttctttcgcctgaggtctttcagcacatttgggatttccttgagcagcctatctgtagtgtgcagccgatcgacttgaattttgttgacgagccttctgaggacggggctacaaataagatagagattagcatggactgcattcgcatgcaggactctgatctgagcgaccccatgtggcctcaatacacaaatcttggccttcttaatagtatggaccagcagatccaaaacggaagtagttctacatccccatataataccgaccatgctcagaactcagtcactgctcccagcccctatgcgcagcctagtagcacttttgatgctctgtcacccagtcctgctatcccatccaatacggattacccaggcccacacagcttcgacgtgagcttccaacagagttccaccgctaaaagtgcaacatggacctattctacggagctgaaaaagctctattgtcagattgcaaaaacctgccctattcagattaaggtgatgacacctccgccacaaggcgcagtgattcgagccatgccagtgtataaaaaggccgagcacgtcactgaggtggtaaagcggtgtcctaaccatgagctgtcacgcgaattcaatgagggccaaatcgcaccgccgagtcacctcatccgagtggagggcaattcacatgcccaatacgtcgaggatccaatcactggacgtcaatctgtgttagtgccttacgaacccccccaggtgggtaccgagttcaccaccgtcctgtacaatttcatgtgcaacagttcttgcgtcggcgggatgaacagaaggcccatccttattattgtgaccttagaaactagggacggccaggtcctcggcagaaggtgctttgaggcccgcatttgcgcatgtccaggacgggatagaaaggccgatgaggatagcattcggaagcagcaggtcagtgactccactaagaatggcgacgcattccgacagaacactcacgggatacagatgaccagtattaagaagcgacgctctccagatgacgagctcctgtatctccctgttcgtggccgggagacatatgagatgcttctgaagatcaaggaatcacttgagcttatgcagtatctacctcaacacacaatcgagacctacagacagcagcaacagcagcagcaccaacacttgctccagaagcagacctcgatccagtccccatctagctacggaaattccagtccccccctgaacaaaatgaattctatgaacaaattgccaagcgtcagccaacttatcaaccctcagcagaggaatgcacttactcctaccacaatccctgacggcatgggtgcaaacatccccatgatgggtacccacatgcccatggccggagatatgaacgggctgtcacctactcaggcactgcctccgccactcagcatgccgagcaccagtcattgtactccaccacctccttatccaaccgattgttcgatcgtgagctttttggcgagattgggttgctcctcctgtctggattactttaccacccagggactaacaaccatctaccagattgagcattactccatggacgacctggcatcgttaaagatcccggaacagtttagacatgcaatctggaaagggattctcgatcacaggcagctacatgagttcagctccccgtcccacttgctgcgcacccccagcagcgccagcaccgtttcagtggggtcgagcgagaccagaggcgagcgtgtaattgacgctgtacgttttactctcaggcagacgataagcttccctccgcgtgacgagtggaacgactttaacttcgatatggacgctcgacggaacaagcagcagcgaattaaggaggaaggggagtag

SEQ ID NO: 268037 - DNA, 2031 bp, Artificial Sequence
  derived and/or modified sequence
atgaactttgagaccagccgctgtgccaccctgcagtactgcccagacccctacatccagagatttgtggagaccccagcccacttctcctggaaggagagctactaccgcagcaccatgagccagagcacccagaccaatgagttcctgagccctgaggtgttccagcacatctgggacttcctggagcagcccatctgcagcgtgcagcccatcgacctgaactttgtggatgagcccagtgaagatggagccaccaacaagattgagatctccatggactgcatccgcatgcaggacagcgacctgagtgaccccatgtggccccagtacaccaacctgggcctgctgaacagcatggaccagcagatccagaatggcagcagcagcaccagcccctacaacacagaccacgcccagaacagcgtgacagcccccagcccctatgcccagcccagcagcacctttgatgccctgagccccagccctgccatccccagcaacacagactacccaggcccccacagctttgatgtgtccttccagcagagcagcacagccaagagcgccacctggacctacagcacagagctgaagaagctgtactgccagatcgccaagacctgccccatccagatcaaggtgatgaccccaccaccccagggcgctgtgatccgggccatgcctgtgtacaagaaggccgagcacgtgacagaggtggtgaagcgctgccccaaccacgagctgagccgggagttcaatgaaggccagatcgccccacccagccacctgatccgggtggagggcaacagccacgcccagtatgtggaggaccccatcaccggccggcagagcgtgctggtgccctatgagcccccccaggtgggcacagagttcaccaccgtgctgtacaacttcatgtgcaacagcagctgtgtgggcggcatgaacagaagacccatcctgatcatcgtgaccctggagaccagagatggccaggtgctgggccgccgctgctttgaggcccgcatctgtgcctgccccggccgggacaggaaggcagatgaggacagcatcaggaagcagcaggtgtctgacagcaccaagaatggagatgccttccggcagaacacccacggcatccagatgaccagcatcaagaagagaagaagcccagatgatgagctgctgtacctgcctgtgcggggccgggagacctatgagatgctgctgaagatcaaggagagcctggagctgatgcagtacctgccccagcacaccatcgagacctaccggcagcagcagcagcagcagcaccagcacctgctgcagaagcagaccagcatccagagccccagcagctatggcaacagcagcccccccctgaacaagatgaacagcatgaacaagctgcccagcgtgtcccagctgatcaacccccagcagagaaatgccctgacccccaccaccatcccagatggcatgggcgccaacatccccatgatgggcacccacatgcccatggccggggacatgaatggcctgagccccacccaggccctgcccccacccctgtccatgcccagcaccagccactgcaccccacctccaccctaccccacagactgcagcatcgtgtccttcctggcccggctgggctgcagcagctgcctggactacttcaccacccagggcctgaccaccatctaccagatcgagcactacagcatggatgacctggccagcctgaagatccctgagcagttcagacatgccatctggaagggcatcctggaccaccggcagctgcacgagttcagcagccccagccacctgctgcggacccccagcagcgccagcacagtgtctgtgggcagcagcgagaccagaggagagcgggtgattgatgctgtgcgcttcaccctgcggcagaccatctccttccccccaagagatgagtggaatgacttcaactttgacatggatgcccggaggaacaagcagcagaggatcaaggaggagggggagtag

SEQ ID NO: 268038 - DNA, 2031 bp, Artificial Sequence
  derived and/or modified sequence
atgaacttcgagaccagccggtgcgccaccctgcagtactgccccgacccctacatccagcgcttcgtagagacccccgctcacttcagttggaaagaatcctactacaggagcaccatgagccagagtacccaaacgaatgaattcttgagccccgaagtcttccagcacatatgggatttcctggagcaacccatctgttctgtgcagccaatcgatctgaattttgtcgatgaacccagcgaagacggggccacaaataaaatcgagataagtatggactgcatccgaatgcaggactccgatctgtcagacccaatgtggccgcaatacaccaatctgggtctacttaactccatggaccagcagatccagaatggctccagtagcacgtctccctacaacaccgaccatgctcagaatagtgtgacagccccatctccatacgctcagccatcttcgacattcgatgcgctgtcaccctctcctgcaataccatctaacacagattatcccggacctcactctttcgatgtttcgtttcagcaatcaagcactgccaagtccgccacctggacttacagtactgaactcaagaagctgtactgccagatcgccaagacttgccctatccagatcaaggtcatgacgcctcctccacagggagccgtaatcagagccatgcctgtgtataagaaggcagaacatgtgactgaggttgtgaaacgttgtcctaatcacgagcttagccgggagttcaatgaaggccagatcgctcccccgtctcatctgatccgggtggagggcaattcccacgctcagtacgtcgaagacccaatcaccgggcgccagagcgtgcttgtgccttatgagcctccacaagtgggaaccgagttcacaactgtgctgtataactttatgtgcaactccagttgcgtcggagggatgaatcgaagaccaattctcataatcgttacacttgagacaagagacggccaggtgctgggacggaggtgcttcgaagcccgtatatgtgcctgcccgggccgggacagaaaagctgacgaggatagtatacggaaacagcaggtcagtgattccacgaaaaatggagacgcattcagacaaaatacccacggcatccagatgacttctatcaagaagaggcgctcccccgacgacgagctgctgtacctgcctgttcgcggccgtgaaacctacgagatgctcctcaaaataaaggaatccctcgagctgatgcaatatctaccacagcataccatcgaaacctaccggcaacagcagcagcagcagcatcagcatcttctgcagaaacagactagtatccagagtccgtcttcctacgggaattctagccccccactgaacaaaatgaactcaatgaataagcttccctctgtcagccagctgataaatccgcagcagagaaacgccctcacccctactaccatacctgatggcatgggcgccaacattcctatgatgggaactcacatgccgatggccggtgacatgaacggattaagcccaactcaagctctgccaccgcccctcagtatgccgagcacctcccattgtacgccgccccctccttatcccactgattgttccatcgtaagcttcctggcccggctcggttgttcttcctgtctggactactttacaacgcaagggttgaccactatttaccagatcgaacactattctatggacgatctggccagtttgaaaattccggaacagttccggcacgctatttggaaaggcattcttgatcatcgccagcttcacgagttttcctcaccaagccatctcttacggacaccgtcatccgcttcaactgtttctgttgggtcctctgaaacaagaggtgaaagagtaatcgacgccgtgcgatttactctgaggcagacaatttcctttcctccccgggacgagtggaacgatttcaacttcgacatggacgccaggcgcaacaaacagcagcgtatcaaagaggagggcgagtag

SEQ ID NO: 268039 - DNA, 2031 bp, Artificial Sequence
  derived and/or modified sequence
atgaatttcgaaacaagcaggtgtgctaccctccaatattgtccagatccttatattcagagatttgtggaaactccagcccactttagctggaaagagtcatattacagatccaccatgagccagtcaacccaaactaacgagtttctgtcgcccgaggtgtttcagcacatctgggatttcctggaacagcctatctgcagcgtgcagccaatcgacttgaattttgtagacgagccatcggaggatggggctacaaataaaattgaaatatccatggactgcatcagaatgcaggattccgacttgtcagatccaatgtggccccagtacaccaatctgggactgctcaatagcatggatcagcaaatccagaacgggtcctcttccaccagcccttataatacggatcatgctcagaacagtgtgaccgctcccagcccgtatgcccagccgagctctaccttcgatgccctgtcccccagcccagccattccgtccaatactgactatccgggacctcattcctttgatgtgtcctttcagcagagcagtacggccaagagcgctacctggacctactccactgagctcaaaaaattgtattgccagattgccaaaacctgccctatacagattaaagtcatgaccccacctcctcagggggctgtcatccgggctatgcctgtgtacaaaaaggcagagcacgtgaccgaagtggttaagcgttgtccaaatcacgagctgagccgagaattcaatgagggccagattgcacctccgagccaccttatcagagtggaggggaatagtcacgctcagtacgtggaagatcctattaccgggaggcagtccgtgctggtcccgtatgaaccacctcaggttggaaccgaatttacgacggtcttgtacaatttcatgtgcaatagtagctgtgttggaggaatgaatcgacgacccatacttataattgttaccctagagaccagggatggacaggtactggggagacgttgcttcgaggcaagaatttgcgcatgcccgggtcgggacagaaaggccgacgaggatagcatccggaaacagcaggtaagtgactcaactaagaatggtgatgcatttcgccagaatacgcatggcatccagatgactagtatcaagaagcgcagatccccagacgatgagctgttataccttccggtgaggggaagggagacatacgagatgcttctaaagatcaaagagagcctggagctcatgcagtacctaccccagcacactattgagacttacagacagcagcagcagcagcagcatcagcacctgctccagaaacagacatccattcagtctccttcctcctacggcaatagttcacccccactgaataagatgaactcaatgaacaagctacctagcgtgtcccaactcattaacccccagcagaggaacgcactcacccccaccaccattcctgacggcatgggggcaaacattccaatgatggggacccacatgcctatggccggagatatgaatggcttaagtcccacgcaagctttgccgccacccctgagcatgccttccacaagccactgcacgcccccacccccttacccaaccgattgctccatcgtgtcatttttggcacgtctgggatgctctagctgcctcgactactttacaacccaaggtttgacaaccatttatcaaatcgagcactactccatggatgacctcgcttctctgaagattcctgagcaattcagacacgccatctggaaaggcatcctggaccatcgtcagttacacgagttctcatctccctctcatcttctgcggaccccaagcagcgcctcaacagtcagtgtgggctcctctgaaacacgcggagaacgagttattgacgccgtgaggtttacactgagacaaacgatcagctttcctcccagagacgagtggaatgactttaactttgacatggacgccaggagaaataaacaacaacggatcaaagaggagggggagtag

SEQ ID NO: 268040 - DNA, 2031 bp, Artificial Sequence
  derived and/or modified sequence
atgaattttgaaacttcacggtgtgccaccctacagtactgccctgacccttacatccagcgtttcgtagaaaccccagctcatttctcttggaaagaaagttattaccgatccaccatgtcccagagcacacagacaaatgaattcctcagtccagaggttttccagcatatctgggattttctggaacagcctatatgttcagttcagcccattgacttgaactttgtggatgaaccatcagaagatggtgcgacaaacaagattgagattagcatggactgtatccgcatgcaggactcggacctgagtgaccccatgtggccacagtacacgaacctggggctcctgaacagcatggaccagcagattcagaacggctcctcgtccaccagtccctataacacagaccacgcgcagaacagcgtcacggcgccctcgccctacgcacagcccagctccaccttcgatgctctctctccatcacccgccatcccctccaacaccgactacccaggcccgcacagtttcgacgtgtccttccagcagtcgagcaccgccaagtcggccacctggacgtattccactgaactgaagaaactctactgccaaattgcaaagacatgccccatccagatcaaggtgatgaccccacctcctcagggagctgttatccgcgccatgcctgtctacaaaaaagctgagcacgtcacggaggtggtgaagcggtgccccaaccatgagctgagccgtgaattcaacgagggacagattgcccctcctagtcatttgattcgagtagaggggaacagccatgcccagtatgtagaagatcccatcacaggaagacagagtgtgctggtaccttatgagccaccccaggttggcactgaattcacgacagtcttgtacaatttcatgtgtaacagcagttgtgttggagggatgaaccgccgtccaattttaatcattgttactctggaaaccagagatgggcaagtcctgggccgacgctgctttgaggcccggatctgtgcttgcccaggaagagacaggaaggcggatgaagatagcatcagaaagcagcaagtttcggacagtacaaagaacggtgatgcgtttcgtcagaacacacatggtatccagatgacatccatcaagaaacgaagatccccagatgatgaactgttatacttaccagtgaggggccgtgagacttatgaaatgctgttgaagatcaaagagtccctggaactcatgcagtaccttcctcagcacacaattgaaacgtacaggcaacagcaacagcagcagcaccagcacttacttcagaaacagacctcaatacagtctccatcttcatatggtaacagctccccacctctgaacaaaatgaacagcatgaacaagctgccttctgtgagccagcttatcaaccctcagcagcgcaacgccctcactcctacaaccattcctgatggcatgggagccaacattcccatgatgggcacccacatgccaatggctggagacatgaatggactcagccccacccaggcactccctcccccactctccatgccatccacctcccactgcacacccccacctccgtatcccacagattgcagcattgtcagtttcttagcgaggttgggctgttcatcatgtctggactatttcacgacccaggggctgaccaccatctatcagattgagcattactccatggatgatctggcaagtctgaaaatccctgagcaatttcgacatgcgatctggaagggcatcctggaccaccggcagctccacgaattctcctccccttctcatctcctgcggaccccaagcagtgcctctacagtcagtgtgggctccagtgagacccggggtgagcgtgttattgatgctgtgcgattcaccctccgccagaccatctctttcccaccccgagatgagtggaatgacttcaactttgacatggatgctcgccgcaataagcaacagcgcatcaaagaggagggggagtga

SEQ ID NO: 268041 - DNA, 1788 bp, Artificial Sequence
  derived and/or modified sequence
atgaacttcgagaccagcagatgcgccaccctgcagtactgccccgacccctacatccagagattcgtggagacccccgcccacttcagctggaaggagagctactacagaagcaccatgagccagagcacccagaccaacgagttcctgagccccgaggtgttccagcacatctgggacttcctggagcagcccatctgcagcgtgcagcccatcgacctgaacttcgtggacgagcccagcgaggacggcgccaccaacaagatcgagatcagcatggactgcatcagaatgcaggacagcgacctgagcgaccccatgtggtacagcaccgagctgaagaagctgtactgccagatcgccaagacctgccccatccagatcaaggtgatgaccccccccccccagggcgccgtgatcagagccatgcccgtgtacaagaaggccgagcacgtgaccgaggtggtgaagagatgccccaaccacgagctgagcagagagttcaacgagggccagatcgccccccccagccacctgatcagagtggagggcaacagccacgcccagtacgtggaggaccccatcaccggcagacagagcgtgctggtgccctacgagcccccccaggtgggcaccgagttcaccaccgtgctgtacaacttcatgtgcaacagcagctgcgtgggcggcatgaacagaagacccatcctgatcatcgtgaccctggagaccagagacggccaggtgctgggcagaagatgcttcgaggccagaatctgcgcctgccccggcagagacagaaaggccgacgaggacagcatcagaaagcagcaggtgagcgacagcaccaagaacggcgacggcaccaagagacccttcagacagaacacccacggcatccagatgaccagcatcaagaagagaagaagccccgacgacgagctgctgtacctgcccgtgagaggcagagagacctacgagatgctgctgaagatcaaggagagcctggagctgatgcagtacctgccccagcacaccatcgagacctacagacagcagcagcagcagcagcaccagcacctgctgcagaagcagaccagcatccagagccccagcagctacggcaacagcagcccccccctgaacaagatgaacagcatgaacaagctgcccagcgtgagccagctgatcaacccccagcagagaaacgccctgacccccaccaccatccccgacggcatgggcgccaacatccccatgatgggcacccacatgcccatggccggcgacatgaacggcctgagccccacccaggccctgcccccccccctgagcatgcccagcaccagccactgcacccccccccccccctaccccaccgactgcagcatcgtgagcttcctggccagactgggctgcagcagctgcctggactacttcaccacccagggcctgaccaccatctaccagatcgagcactacagcatggacgacctggccagcctgaagatccccgagcagttcagacacgccatctggaagggcatcctggaccacagacagctgcacgagttcagcagccccagccacctgctgagaacccccagcagcgccagcaccgtgagcgtgggcagcagcgagaccagaggcgagagagtgatcgacgccgtgagattcaccctgagacagaccatcagcttcccccccagagacgagtggaacgacttcaacttcgacatggacgccagaagaaacaagcagcagagaatcaaggaggagggcgagtag

SEQ ID NO: 268042 - DNA, 1506 bp, Artificial Sequence
  derived and/or modified sequence
atgctgtacctggagaacaacgcccagacccagttcagcgagtacagcaccgagctgaagaagctgtactgccagatcgccaagacctgccccatccagatcaaggtgatgaccccccccccccagggcgccgtgatcagagccatgcccgtgtacaagaaggccgagcacgtgaccgaggtggtgaagagatgccccaaccacgagctgagcagagagttcaacgagggccagatcgccccccccagccacctgatcagagtggagggcaacagccacgcccagtacgtggaggaccccatcaccggcagacagagcgtgctggtgccctacgagcccccccaggtgggcaccgagttcaccaccgtgctgtacaacttcatgtgcaacagcagctgcgtgggcggcatgaacagaagacccatcctgatcatcgtgaccctggagaccagagacggccaggtgctgggcagaagatgcttcgaggccagaatctgcgcctgccccggcagagacagaaaggccgacgaggacagcatcagaaagcagcaggtgagcgacagcaccaagaacggcgacggcaccaagagacccttcagacagaacacccacggcatccagatgaccagcatcaagaagagaagaagccccgacgacgagctgctgtacctgcccgtgagaggcagagagacctacgagatgctgctgaagatcaaggagagcctggagctgatgcagtacctgccccagcacaccatcgagacctacagacagcagcagcagcagcagcaccagcacctgctgcagaagcagaccagcatccagagccccagcagctacggcaacagcagcccccccctgaacaagatgaacagcatgaacaagctgcccagcgtgagccagctgatcaacccccagcagagaaacgccctgacccccaccaccatccccgacggcatgggcgccaacatccccatgatgggcacccacatgcccatggccggcgacatgaacggcctgagccccacccaggccctgcccccccccctgagcatgcccagcaccagccactgcacccccccccccccctaccccaccgactgcagcatcgtgagcttcctggccagactgggctgcagcagctgcctggactacttcaccacccagggcctgaccaccatctaccagatcgagcactacagcatggacgacctggccagcctgaagatccccgagcagttcagacacgccatctggaagggcatcctggaccacagacagctgcacgagttcagcagccccagccacctgctgagaacccccagcagcgccagcaccgtgagcgtgggcagcagcgagaccagaggcgagagagtgatcgacgccgtgagattcaccctgagacagaccatcagcttcccccccagagacgagtggaacgacttcaacttcgacatggacgccagaagaaacaagcagcagagaatcaaggaggagggcgagtag

SEQ ID NO: 268043 - DNA, 1788 bp, Artificial Sequence
  derived and/or modified sequence
atgaactttgagacatcaagatgtgctacactccagtactgcccggacccctatatccaaaggttcgtggagaccccagcgcacttcagttggaaggagagttattacagatccacgatgagccagtctactcaaacgaatgagttcctgagcccagaggtctttcagcatatttgggattttctagaacagcccatctgtagcgtgcagcctatcgacctgaatttcgtggacgagccaagtgaagatggcgccactaataaaattgagattagcatggactgtattcgcatgcaggacagcgaccttagcgatccaatgtggtacagtacagaactgaagaagctatattgtcagatcgcgaaaacatgtcctattcagattaaagttatgactccaccgccgcagggagctgtgatccgggcaatgcctgtttacaagaaagcagagcacgtaacagaagtggttaagcgatgtcccaaccacgagttgtcacgcgaatttaatgagggccagatcgccccaccaagtcatctgattcgcgtggagggcaactcgcacgcacaatatgtggaggaccctattaccggacggcaatccgtgttagtcccttacgagccgccacaagtgggaactgagtttaccacagtgctttataactttatgtgtaattcttcctgtgttggtggaatgaaccgcaggcccatcctgataattgtcacccttgaaacacgtgatggacaggtactggggagaaggtgtttcgaggcacggatctgcgcttgtcctggacgagaccgcaaagccgatgaagactccataagaaagcagcaggtctcggacagcactaaaaatggagatggtacgaaacggccctttcgtcagaatacacacggcatacagatgaccagcattaagaagcgtagatcccctgacgatgagctgctgtacctgccagtgagaggccgggagacctatgaaatgcttttgaaaattaaggagagccttgaattgatgcagtacctgcctcaacacactatagaaacttacagacagcagcagcagcagcaacatcagcacctcctgcagaagcagacaagcatccagtcaccctccagttacggtaattcttctccccccctgaataaaatgaatagcatgaacaagctgccatctgtcagtcagctgattaatccccagcagcgcaatgcactaactccaacaactatacccgacggtatgggagcaaacatacccatgatggggacacatatgccaatggccggtgacatgaatgggctgtcaccaacacaagctctcccccctcctctgtcgatgcctagtacatctcattgtacccctcctcctccttacccaacggactgcagcatcgtcagctttctggcccggctggggtgctcctcatgtctggattactttacaacgcagggcttgacgacgatttatcaaatcgaacattactccatggatgacctggcctctttgaaaatccccgaacagttccgccatgctatttggaagggcatcctcgatcaccgacaactccatgaattcagttctccctctcatctcttaaggactccttcctccgcgagcactgtatctgttggtagttcagaaactcgcggcgagcgggtcatcgacgccgtgcgctttactctgaggcagactatttcctttccccctagggatgagtggaacgacttcaattttgacatggatgctcggagaaacaaacagcagagaattaaagaggagggggagtag

SEQ ID NO: 268044 - DNA, 1506 bp, Artificial Sequence
  derived and/or modified sequence
atgctgtacctggaaaacaatgctcaaacgcagtttagcgaatactccactgagctgaaaaagctgtactgccaaattgcaaagacctgccctatccagataaaggtgatgacccctccgccgcaaggagcagtgatccgagcgatgcccgtgtataagaaggcagaacacgtgacggaggtcgtcaaaagatgtccgaaccatgagctctcacgcgagtttaacgaagggcagatcgccccgccctctcatctgatacgtgtagaaggaaacagccatgcccagtacgtagaggatccgattaccggcaggcagtcggtcctggttccctacgagccacctcaggttgggactgaattcacgaccgtcttgtataactttatgtgcaacagtagctgtgtgggaggcatgaatcgtcggcctatccttataatcgttaccctggagacccgggacgggcaggtgctgggccgtaggtgtttcgaggcacgcatctgcgcctgtcctggtcgcgataggaaagctgatgaggattctattcggaaacagcaggtgtccgacagcaccaagaatggggacggcacgaagcgcccttttcgtcagaacacccacggaattcagatgactagtatcaaaaaacggaggtcccctgatgacgagctgctgtatctccctgttagaggtcgtgagacctatgaaatgctccttaaaatcaaagagtcacttgaactgatgcagtacctcccacagcatactatcgagacctataggcagcagcagcagcagcagcaccaacatctcctgcagaagcagacttcaattcagtctccgtccagttacggcaactcaagtcccccattaaataaaatgaatagtatgaataagcttccttcagtctcacagctgatcaatccacagcagcggaacgctcttacaccaaccaccattccggacggcatgggcgccaatatcccaatgatgggtacccatatgcctatggctggcgatatgaacggcctctcaccaacacaggcattgccccctcccctgtccatgccaagtacatcccactgcaccccaccgccaccctatccaacagattgtagcattgtgtccttcctagcccggctgggatgttcatcctgcctggactactttacaactcagggcctgactacaatctatcagattgagcattatagtatggatgacctggcaagcttgaaaatcccagaacagtttcggcacgctatttggaaaggaatccttgaccatcgacagttacacgagttttcctctcccagtcatttgctgagaactccgagcagtgcttccacagtctctgtcggaagctctgaaacacgaggcgagagggtcattgacgccgtgcgttttacactgaggcaaaccatctctttcccaccacgggatgagtggaacgattttaattttgatatggatgcaaggcgtaacaagcagcaacggatcaaagaagagggggagtag

SEQ ID NO: 268045 - DNA, 1788 bp, Artificial Sequence
  derived and/or modified sequence
atgaactttgagaccagccgctgtgccaccctgcagtactgcccagacccctacatccagagatttgtggagaccccagcccacttctcctggaaggagagctactaccgcagcaccatgagccagagcacccagaccaatgagttcctgagccctgaggtgttccagcacatctgggacttcctggagcagcccatctgcagcgtgcagcccatcgacctgaactttgtggatgagcccagtgaagatggagccaccaacaagattgagatctccatggactgcatccgcatgcaggacagcgacctgagtgaccccatgtggtacagcacagagctgaagaagctgtactgccagatcgccaagacctgccccatccagatcaaggtgatgaccccaccaccccagggcgccgtcatccgggccatgcctgtgtacaagaaggccgagcacgtgacagaggtggtgaagcgctgccccaaccacgagctgagccgggagttcaatgaaggccagatcgccccacccagccacctgatccgggtggagggcaacagccacgcccagtatgtggaggaccccatcaccggccggcagagcgtgctggtgccctatgagcccccccaggtgggcacagagttcaccaccgtgctgtacaacttcatgtgcaacagcagctgtgtgggcggcatgaacagaagacccatcctgatcatcgtgaccctggagaccagagatggccaggtgctgggccgccgctgctttgaggcccgcatctgtgcctgccccggccgggacaggaaggcagatgaagattccatcaggaagcagcaggtgtctgacagcaccaagaatggagatggcaccaagaggcccttccggcagaacacccacggcatccagatgaccagcatcaagaagaggaggagcccagatgatgagctgctgtacctgcctgtgcggggccgggagacctatgagatgctgctgaagatcaaggagagcctggagctgatgcagtacctgccccagcacaccatcgagacctaccggcagcagcagcagcagcagcaccagcacctgctgcagaagcagaccagcatccagagccccagcagctatggcaacagcagcccccccctgaacaagatgaacagcatgaacaagctgcccagcgtgtcccagctgatcaacccccagcagagaaatgccctgacccccaccaccatcccagatggcatgggcgccaacatccccatgatgggcacccacatgcccatggccggggacatgaatggcctgagccccacccaggccctgcccccacccctgtccatgcccagcaccagccactgcaccccacctccaccctaccccacagactgcagcatcgtgtccttcctggcccggctgggctgcagcagctgcctggactacttcaccacccagggcctgaccaccatctaccagatcgagcactacagcatggatgacctggccagcctgaagatccctgagcagttcagacatgccatctggaagggcatcctggaccaccggcagctgcacgagttcagcagccccagccacctgctgcggacccccagcagcgccagcacagtgtctgtgggcagcagcgagaccagaggagagcgggtgattgatgctgtgcgcttcaccctgcggcagaccatctccttccccccaagagatgagtggaatgacttcaactttgacatggatgcccggaggaacaagcagcagaggatcaaggaggagggggagtag

SEQ ID NO: 268046 - DNA, 1506 bp, Artificial Sequence
  derived and/or modified sequence
atgctgtacctggagaacaatgcccagacccagttcagcgagtacagcacagagctgaagaagctgtactgccagatcgccaagacctgccccatccagatcaaggtgatgaccccaccaccccagggcgccgtcatccgggccatgcctgtgtacaagaaggccgagcacgtgacagaggtggtgaagcgctgccccaaccacgagctgagccgggagttcaatgaaggccagatcgccccacccagccacctgatccgggtggagggcaacagccacgcccagtatgtggaggaccccatcaccggccggcagagcgtgctggtgccctatgagcccccccaggtgggcacagagttcaccaccgtgctgtacaacttcatgtgcaacagcagctgtgtgggcggcatgaacagaagacccatcctgatcatcgtgaccctggagaccagagatggccaggtgctgggccgccgctgctttgaggcccgcatctgtgcctgccccggccgggacaggaaggcagatgaagattccatcaggaagcagcaggtgtctgacagcaccaagaatggagatggcaccaagaggcccttccggcagaacacccacggcatccagatgaccagcatcaagaagaggaggagcccagatgatgagctgctgtacctgcctgtgcggggccgggagacctatgagatgctgctgaagatcaaggagagcctggagctgatgcagtacctgccccagcacaccatcgagacctaccggcagcagcagcagcagcagcaccagcacctgctgcagaagcagaccagcatccagagccccagcagctatggcaacagcagcccccccctgaacaagatgaacagcatgaacaagctgcccagcgtgtcccagctgatcaacccccagcagagaaatgccctgacccccaccaccatcccagatggcatgggcgccaacatccccatgatgggcacccacatgcccatggccggggacatgaatggcctgagccccacccaggccctgcccccacccctgtccatgcccagcaccagccactgcaccccacctccaccctaccccacagactgcagcatcgtgtccttcctggcccggctgggctgcagcagctgcctggactacttcaccacccagggcctgaccaccatctaccagatcgagcactacagcatggatgacctggccagcctgaagatccctgagcagttcagacatgccatctggaagggcatcctggaccaccggcagctgcacgagttcagcagccccagccacctgctgcggacccccagcagcgccagcacagtgtctgtgggcagcagcgagaccagaggagagcgggtgattgatgctgtgcgcttcaccctgcggcagaccatctccttccccccaagagatgagtggaatgacttcaactttgacatggatgcccggaggaacaagcagcagaggatcaaggaggagggggagtag

SEQ ID NO: 268047 - DNA, 1788 bp, Artificial Sequence
  derived and/or modified sequence
atgaacttcgagaccagccggtgcgccaccctgcagtactgccccgatccttacatacagaggtttgtagaaacgcctgcgcacttttcttggaaagaaagctattatagatctacaatgtcccaaagcacacagacaaatgaattcttaagcccagaggtcttccagcatatctgggatttccttgagcagcccatctgttccgtccagcccatagatctcaactttgtggacgagcctagcgaagacggcgcaaccaataagatcgagatcagcatggactgcattagaatgcaagactcggatctgtctgaccccatgtggtatagcaccgaactgaaaaagctctattgtcagatcgcgaaaacttgccccatccagatcaaggtgatgacaccccctccccagggtgcagtgatccgggccatgcccgtctacaagaaagccgaacacgtgaccgaagtcgtgaaaaggtgtcctaatcacgagttgagcagggagtttaatgagggacagattgcccccccaagccaccttattcgggtagagggcaacagccacgcccagtatgtcgaagaccctatcactggacgacagtctgttctggtcccctatgagccccctcaggttggaaccgagttcacgacagtcttatacaacttcatgtgcaactcctcttgcgttgggggaatgaacagacgccctatcctaatcatagttaccctggagacccgagacgggcaggtgctcggcagacgatgttttgaggccaggatctgcgcctgccctggccgagacagaaaggctgatgaggacagtatacgcaagcagcaggttagcgactcaacaaagaatggcgacggcaccaaacgtccctttcgccagaatacccacggcattcaaatgacctcaataaagaagagaaggtcccctgacgatgagctgctctatctaccagtaagagggcgggagacatacgagatgcttttgaagatcaaggagtccctggaactgatgcaatacctaccacaacacactatcgagacctacaggcagcagcagcagcaacagcaccagcacctgcttcagaaacagacgagcattcagtctccctcatcatatggcaacagtagccctcctcttaacaaaatgaactctatgaacaaacttccttctgtaagtcaactgatcaatccacagcagcgaaacgcattgacccccaccaccatacctgacggcatgggggctaacataccaatgatggggacgcatatgccgatggctggcgacatgaacggcctgtctccaacacaggcccttccacccccactgtctatgccgtcaacaagccactgtactccccctcccccatatcccaccgattgcagcatcgttagttttctcgcccgcctcggttgtagctcttgtctggactattttacaacccaagggctcaccaccatatatcaaatcgaacattatagcatggacgacttggccagcttgaagattcccgagcagtttcgccacgctatctggaagggtatattggatcacaggcaattacacgagttttcaagcccttcccacctgctgcgtacgccatcaagcgccagtacagtgtcggttggaagtagcgagacacgcggtgagagagtgatcgacgctgtgaggtttacgcttaggcagacaattagcttcccaccccgggacgaatggaatgactttaactttgatatggatgctcgccgtaacaagcaacagaggattaaagaggaaggtgagtag

SEQ ID NO: 268048 - DNA, 1506 bp, Artificial Sequence
  derived and/or modified sequence
atgctgtacctggagaacaacgcccagacccagttcagcgagtactcaacggagctaaagaagttgtactgccagattgctaagacatgtccaattcagattaaagttatgacaccccccccgcagggcgctgtgattcgtgcgatgcccgtatacaagaaagctgagcacgttactgaagttgtgaagagatgcccaaaccacgagctgagccgcgaattcaacgaaggtcagatcgcccctccaagtcatctaatccgggtggaaggaaactcgcacgcccagtatgtcgaggatcctattacgggacgccagtcagtgttggtgccgtacgagccaccccaggtaggtaccgagttcaccactgtcctttacaacttcatgtgcaactcaagttgtgttggtggtatgaaccggagaccaatattgataattgtcacattggagaccagagatgggcaagtgttagggcgaagatgttttgaggctcgcatatgcgcatgccctggacgcgataggaaggccgacgaggacagcatccgcaaacagcaggttagtgacagcacgaaaaacggtgatgggacaaagcggcctttcagacagaatacccatgggattcagatgacaagtattaaaaagagacggtcgcccgacgatgagttattgtacctgccagtgcgcggcagggagacatacgagatgctactgaagatcaaagagtccctggagctgatgcaatacctcccccagcacaccatcgagacatatcgacagcagcaacaacaacagcaccaacatttgctgcaaaagcaaactagcatccagagtccctcctcttatggcaatagcagccctcccctgaataagatgaattctatgaataaactgccctcagtgagtcagctgattaacccgcagcaacggaacgcactgacacctacaacgatcccagatggcatgggcgcaaacattcctatgatgggcactcatatgcccatggccggcgatatgaatgggctctcgccaacccaggccctacccccgccactgtctatgcctagcacatctcactgtacaccgcctcctccatacccgacggactgtagcatagtgtccttcttggcgcggttagggtgtagctcttgtctggactattttaccacccagggactaaccactatttatcaaatagagcactatagcatggatgacttagcttcacttaaaatcccagagcaattccgtcacgccatctggaagggtatactggatcatcgccagcttcatgaattctcttccccttcccatctattaaggacccctagctccgcatccaccgtgagtgttggtagctctgagactcgcggcgaaagagtgattgatgccgtcagattcacgttgcgccagaccatctcgttcccgccaagagatgagtggaatgactttaatttcgacatggacgcccggagaaacaagcagcaacggattaaagaggaaggagagtag

SEQ ID NO: 268049 - DNA, 1788 bp, Artificial Sequence
  derived and/or modified sequence
atgaacttcgaaacctctcgctgcgccactttgcaatattgtccagacccctacattcagcgcttcgtggagacacccgctcacttctcttggaaggagtcctattacagatcaactatgtcccagtcaacccagaccaatgaatttctgtctccagaggtgtttcaacatatttgggactttctcgaacagcccatatgttcagttcagcctattgacctgaattttgtcgacgagccatctgaggatggagccacaaataagatcgagatctcaatggactgcatccggatgcaggattcggatctcagcgaccctatgtggtactcgactgaactaaagaaattatactgccagattgccaagacttgccccatacagattaaggtcatgacacccccacctcaaggggcagttataagggctatgcccgtatacaaaaaggctgaacatgtgaccgaggtcgtaaagaggtgtccgaaccacgaactctcccgggagttcaatgaaggacagattgctccccctagccaccttatccgcgtggaaggcaactcgcatgcccagtatgttgaagatcctatcacagggaggcaaagtgttcttgtaccttacgagccgcctcaggtcggtaccgagttcactactgtcctttacaactttatgtgcaatagttcttgcgttggcggaatgaaccggaggcccatcttaatcatcgtgaccctcgagacgagggacggacaggttctgggacgacggtgcttcgaagccaggatctgcgcatgccccggtagagatagaaaggccgatgaggactcgattcgaaaacaacaggtgagtgactccaccaagaatggggatgggacaaagcggccttttcggcagaacacacacggtatacagatgaccagtatcaaaaagaggcgatcccccgacgatgaactgttatatctgccagtgcggggtagagagacatacgaaatgttgctgaaaatcaaagaatctctggaacttatgcagtatcttccccagcatacaatcgagacatatcgacagcagcagcagcagcagcatcagcatctgttgcaaaagcaaaccagcattcagtccccatctagttacggaaacagcagcccacctctgaacaagatgaactcaatgaacaaattaccgtctgtgagccagttgataaacccccagcagcggaacgccttgacccctaccactattccagatgggatgggcgcaaacattcccatgatgggcactcacatgccaatggccggtgatatgaacggcctctcccccacacaggctctgccacctcccctctccatgccctctacgagtcattgtacccctcccccaccgtacccaacggattgctccattgtgagtttcttagcacgcttggggtgtagcagttgtctcgactactttaccacccaagggctgacaacaatctaccaaattgaacattattctatggacgatttagcttccttgaagattcctgagcagttccgacatgccatctggaaaggaattcttgatcaccgacaactgcacgaattttccagcccctctcatcttctgcggacccctagcagtgcatcaactgtgtctgtgggctccagtgaaacacggggtgaacgggtcatagacgccgtccggttcactcttcgccagaccatctcatttccccctagggacgaatggaacgactttaatttcgacatggatgcccgaagaaataagcagcaaagaattaaggaagagggggagtag

SEQ ID NO: 268050 - DNA, 1506 bp, Artificial Sequence
  derived and/or modified sequence
atgctctatctggaaaataacgcgcagacccagttctccgagtattctactgaactgaaaaaactctactgtcaaattgctaaaacctgtccaatccagattaaagtgatgactcctccaccccagggcgctgtgattcgagctatgcccgtgtataagaaggcagaacacgttaccgaggtagtaaagcgctgtccaaaccatgaactgtctagggagttcaacgaggggcagatagcaccacccagccacctcataagggtggaaggaaatagccacgcccagtatgttgaagaccccattacaggacgccagtctgtgcttgtgccgtatgaaccccctcaggtcggcacggagttcactactgtgctgtataactttatgtgcaatagctcttgcgtcggaggaatgaatcgtcgccctattctgattattgtgacactcgaaacacgggatgggcaagtcctcggcagacgatgcttcgaggcgaggatctgcgcttgtcccggaagggatcgcaaggcggacgaggactccatcaggaagcaacaggtgtctgacagcactaaaaacggagacggaacaaagaggccgtttcgtcagaacactcatgggattcagatgacaagtataaagaagcgcagaagtcccgatgatgagctgctctatttgcccgtccggggacgcgaaacctacgagatgctgctgaagatcaaggaatctttggagctgatgcagtatcttccccaacacactattgagacctacagacaacagcagcagcagcagcatcagcaccttctgcagaagcagacttccatacagtctccatcatcctatggtaactcttctcctccactgaacaagatgaactccatgaacaaacttccaagtgtctctcaactcattaacccccagcagcggaatgccctgacccctactacaataccagacgggatgggtgccaacataccgatgatgggcacacatatgccaatggctggagacatgaacgggctcagtccaacgcaggccctgcccccaccccttagcatgccctccacatcccactgtacgccaccacctccctatcctacagactgctctattgtatctttcctggctagattaggctgcagctcatgcctcgactactttactacccaagggctgactacaatttaccagattgaacactacagtatggatgatctcgcctcattaaagattcccgaacagtttagacatgctatatggaaaggaatcctggaccatcgccagctccatgaattctccagtccatctcacctgctgagaacaccatcttcagccagcacagtgtcagtcggctcaagcgagacgcgtggagagagagtgatcgatgccgtgcgcttcacgcttcgacaaaccatctccttccccccaagggacgaatggaatgactttaactttgatatggatgcacggagaaataaacagcagcgcattaaagaggagggcgagtag

SEQ ID NO: 268051 - DNA, 1788 bp, Artificial Sequence
  derived and/or modified sequence
atgaattttgaaacttcacggtgtgccaccctacagtactgccctgacccttacatccagcgtttcgtagaaaccccagctcatttctcttggaaagaaagttattaccgatccaccatgtcccagagcacacagacaaatgaattcctcagtccagaggttttccagcatatctgggattttctggaacagcctatatgttcagttcagcccattgacttgaactttgtggatgaaccatcagaagatggtgcgacaaacaagattgagattagcatggactgtatccgcatgcaggactcggacctgagtgaccccatgtggtattccactgaactgaagaaactctactgccaaattgcaaagacatgccccatccagatcaaggtgatgaccccacctcctcagggagctgttatccgcgccatgcctgtctacaaaaaagctgagcacgtcacggaggtggtgaagcggtgccccaaccatgagctgagccgtgaattcaacgagggacagattgcccctcctagtcatttgattcgagtagaggggaacagccatgcccagtatgtagaagatcccatcacaggaagacagagtgtgctggtaccttatgagccaccccaggttggcactgaattcacgacagtcttgtacaatttcatgtgtaacagcagttgtgttggagggatgaaccgccgtccaattttaatcattgttactctggaaaccagagatgggcaagtcctgggccgacgctgctttgaggcccggatctgtgcttgcccaggaagagacaggaaggcggatgaagatagcatcagaaagcagcaagtttcggacagtacaaagaacggtgatggtacgaagcgcccgtttcgtcagaacacacatggtatccagatgacatccatcaagaaacgaagatccccagatgatgaactgttatacttaccagtgaggggccgtgagacttatgaaatgctgttgaagatcaaagagtccctggaactcatgcagtaccttcctcagcacacaattgaaacgtacaggcaacagcaacagcagcagcaccagcacttacttcagaaacagacctcaatacagtctccatcttcatatggtaacagctccccacctctgaacaaaatgaacagcatgaacaagctgccttctgtgagccagcttatcaaccctcagcagcgcaacgccctcactcctacaaccattcctgatggcatgggagccaacattcccatgatgggcacccacatgccaatggctggagacatgaatggactcagccccacccaggcactccctcccccactctccatgccatccacctcccactgcacacccccacctccgtatcccacagattgcagcattgtcagtttcttagcgaggttgggctgttcatcatgtctggactatttcacgacccaggggctgaccaccatctatcagattgagcattactccatggatgatctggcaagtctgaaaatccctgagcaatttcgacatgcgatctggaagggcatcctggaccaccggcagctccacgaattctcctccccttctcatctcctgcggaccccaagcagtgcctctacagtcagtgtgggctccagtgagacccggggtgagcgtgttattgatgctgtgcgattcaccctccgccagaccatctctttcccaccccgagatgagtggaatgacttcaactttgacatggatgctcgccgcaataagcaacagcgcatcaaagaggagggggagtga

SEQ ID NO: 268052 - DNA, 1506 bp, Artificial Sequence
  derived and/or modified sequence
atgttgtacctggaaaacaatgcccagactcaatttagtgagtattccactgaactgaagaaactctactgccaaattgcaaagacatgccccatccagatcaaggtgatgaccccacctcctcagggagctgttatccgcgccatgcctgtctacaaaaaagctgagcacgtcacggaggtggtgaagcggtgccccaaccatgagctgagccgtgaattcaacgagggacagattgcccctcctagtcatttgattcgagtagaggggaacagccatgcccagtatgtagaagatcccatcacaggaagacagagtgtgctggtaccttatgagccaccccaggttggcactgaattcacgacagtcttgtacaatttcatgtgtaacagcagttgtgttggagggatgaaccgccgtccaattttaatcattgttactctggaaaccagagatgggcaagtcctgggccgacgctgctttgaggcccggatctgtgcttgcccaggaagagacaggaaggcggatgaagatagcatcagaaagcagcaagtttcggacagtacaaagaacggtgatggtacgaagcgcccgtttcgtcagaacacacatggtatccagatgacatccatcaagaaacgaagatccccagatgatgaactgttatacttaccagtgaggggccgtgagacttatgaaatgctgttgaagatcaaagagtccctggaactcatgcagtaccttcctcagcacacaattgaaacgtacaggcaacagcaacagcagcagcaccagcacttacttcagaaacagacctcaatacagtctccatcttcatatggtaacagctccccacctctgaacaaaatgaacagcatgaacaagctgccttctgtgagccagcttatcaaccctcagcagcgcaacgccctcactcctacaaccattcctgatggcatgggagccaacattcccatgatgggcacccacatgccaatggctggagacatgaatggactcagccccacccaggcactccctcccccactctccatgccatccacctcccactgcacacccccacctccgtatcccacagattgcagcattgtcagtttcttagcgaggttgggctgttcatcatgtctggactatttcacgacccaggggctgaccaccatctatcagattgagcattactccatggatgatctggcaagtctgaaaatccctgagcaatttcgacatgcgatctggaagggcatcctggaccaccggcagctccacgaattctcctccccttctcatctcctgcggaccccaagcagtgcctctacagtcagtgtgggctccagtgagacccggggtgagcgtgttattgatgctgtgcgattcaccctccgccagaccatctctttcccaccccgagatgagtggaatgacttcaactttgacatggatgctcgccgcaataagcaacagcgcatcaaagaggagggggagtga

SEQ ID NO: 268053 - protein, 55 aa, Artificial Sequence
  derived and/or modified sequence
MGFNLTFHLSYKFRLLLLLTLCLTVVGWATSNYFVGAIQEIPKAKEFMANFHKTL

SEQ ID NO: 268054 - DNA, 168 bp, Artificial Sequence
  derived and/or modified sequence
atgggcttcaacctgaccttccacctgagctacaagttcagactgctgctgctgctgaccctgtgcctgaccgtggtgggctgggccaccagcaactacttcgtgggcgccatccaggagatccccaaggccaaggagttcatggccaacttccacaagaccctgtag

SEQ ID NO: 268055 - DNA, 411 bp, Artificial Sequence
  derived and/or modified sequence
atgggcttcaacctgaccttccacctgagctacaagttcagactgctgctgctgctgaccctgtgcctgaccgtggtgggctgggccaccagcaactacttcgtgggcgccatccaggagatccccaaggccaaggagttcatggccaacttccacaagaccctgatcctgggcaagggcaagaccctgaccaacgaggccagcaccaagaaggtggagctggacaactgccccagcgtgagcccctacctgagaggccagagcaagctgatcttcaagcccgacctgaccctggaggaggtgcaggccgagaaccccaaggtgagcagaggcagatacagaccccaggagtgcaaggccctgcagagagtggccatcctggtgccccacagaaacagagagaagcactag

SEQ ID NO: 268056 - DNA, 357 bp, Artificial Sequence
  derived and/or modified sequence
atgggcttcaacctgaccttccacctgagctacaagttcagactgctgctgctgctgaccctgtgcctgaccgtggtgggctgggccaccagcaactacttcgtgggcgccatccaggagatccccaaggccaaggagttcatggccaacttccacaagaccctgatcctgggcaagggcaagaccctgaccaacgaggccagcaccaagaaggtggagctggacaactgccccagcgtgagcccctacctgagaggccagagcaagctgatcttcaagcccgacctgaccctggaggaggtgcaggccgagaaccccaaggtgagcagaggcagatacagaccccaggagtgctag

SEQ ID NO: 268057 - DNA, 129 bp, Artificial Sequence
  derived and/or modified sequence
atgggcttcaacctgaccttccacctgagctacaagttcagactgctgctgctgctgaccctgtgcctgaccgtggtgggctgggccaccagcaactacttcgtgggcgccatccaggagatcccctag

SEQ ID NO: 268058 - DNA, 168 bp, Artificial Sequence
  derived and/or modified sequence
atgggattcaacctaacctttcacctttcgtacaagtttcgcctgcttctgctcctcaccctatgcctgaccgtggtagggtgggccacctctaattactttgtgggtgccattcaggagatccctaaagctaaagagttcatggcaaattttcacaaaacactttag

SEQ ID NO: 268059 - DNA, 411 bp, Artificial Sequence
  derived and/or modified sequence
atggggttcaatctcacttttcaccttagttataagttccgcctactcctgctgctcacactctgcctgaccgtggtaggctgggccacttctaactactttgtgggtgctattcaggagattcccaaggccaaggaattcatggccaacttccacaagacacttatactcgggaagggaaagaccctgacaaacgaagcatccaccaaaaaggtcgagctggacaattgcccgagcgtctccccctatttgagagggcagagtaagctgatattcaaacccgacctgacactcgaggaagtccaagcagagaatcctaaagtaagccgaggtagatacagaccccaggagtgcaaagcgctccagagagtagctattttggtaccccacagaaatcgcgaaaagcattag

SEQ ID NO: 268060 - DNA, 357 bp, Artificial Sequence
  derived and/or modified sequence
atgggattcaacctaactttccacctgagttataagttccggctgctgttgctgctcactctatgtcttacggtggtagggtgggccacatcaaattactttgtgggggcaattcaggagatccccaaggcaaaggagtttatggcgaatttccacaagacactaatccttggcaaagggaaaacattgaccaacgaggcctcgaccaaaaaagtagagttagataactgcccctccgtgagcccttacctgcggggacagtcaaaactgatcttcaagcctgacctcaccttggaagaagttcaagccgagaaccccaaagtctcgagggggcgctatcgaccccaagagtgttag

SEQ ID NO: 268061 - DNA, 129 bp, Artificial Sequence
  derived and/or modified sequence
atgggattcaatctaacctttcatctgtcttataagttccgcctcctactgctactgacgctgtgcctgaccgttgtaggctgggcgactagcaattactttgtgggtgccatccaggagataccttag

SEQ ID NO: 268062 - DNA, 168 bp, Artificial Sequence
  derived and/or modified sequence
atgggcttcaacctgaccttccacctgagctacaagttccggctgctgctgctgctgaccctgtgcctgactgtggtgggctgggccaccagcaactactttgtgggcgccatccaggagatccccaaggccaaggagttcatggccaacttccacaagaccctgtag

SEQ ID NO: 268063 - DNA, 411 bp, Artificial Sequence
  derived and/or modified sequence
atgggcttcaacctgaccttccacctgagctacaagttccggctgctgctgctgctgaccctgtgcctgactgtggtgggctgggccaccagcaactactttgtgggcgccatccaggagatccccaaggccaaggagttcatggccaacttccacaagaccctcatcctgggcaagggcaagaccctgaccaatgaggccagcaccaagaaggtggagctggacaactgccccagcgtgagcccctacctgcggggccagagcaagctgatcttcaagccagacctgaccctggaggaggtgcaggccgagaaccccaaggtgtcccggggccgctaccggccccaggagtgcaaggccctgcagagggtggccatcctggtgccccacaggaaccgggagaagcactag

SEQ ID NO: 268064 - DNA, 357 bp, Artificial Sequence
  derived and/or modified sequence
atgggcttcaacctgaccttccacctgagctacaagttccggctgctgctgctgctgaccctgtgcctgactgtggtgggctgggccaccagcaactactttgtgggcgccatccaggagatccccaaggccaaggagttcatggccaacttccacaagaccctcatcctgggcaagggcaagaccctgaccaatgaggccagcaccaagaaggtggagctggacaactgccccagcgtgagcccctacctgcggggccagagcaagctgatcttcaagccagacctgaccctggaggaggtgcaggccgagaaccccaaggtgtcccggggccgctaccggccccaggagtgctag

SEQ ID NO: 268065 - DNA, 129 bp, Artificial Sequence
  derived and/or modified sequence
atgggcttcaacctgaccttccacctgagctacaagttccggctgctgctgctgctgaccctgtgcctgactgtggtgggctgggccaccagcaactactttgtgggcgccatccaggagatcccctag

SEQ ID NO: 268066 - DNA, 168 bp, Artificial Sequence
  derived and/or modified sequence
atgggcttcaacctgaccttccacctgagctacaagttccggctgctgctgctgctgacattgtgtctcactgtggttgggtgggccacatccaactatttcgtcggcgcgattcaggaaatcccaaaagcaaaggagtttatggccaacttccacaaaactctgtag

SEQ ID NO: 268067 - DNA, 411 bp, Artificial Sequence
  derived and/or modified sequence
atgggcttcaacctgaccttccacctgagctacaagttccggctgctgctattactgacactctgtctgaccgtagtgggctgggctacgagcaattactttgtgggggccatccaagagatccccaaagctaaagagttcatggcaaacttccacaaaaccctgattttaggaaaggggaaaaccctgaccaatgaagccagcactaagaaagtggagctggacaattgtccatcagtctccccctacctacgaggtcagtccaagctgatttttaagcccgacttgacacttgaggaagttcaagccgagaaccccaaggtgtcgagggggaggtatagacctcaggagtgcaaagcactccagagggtggccatactggtgcctcatcgcaacagggaaaagcattag

SEQ ID NO: 268068 - DNA, 357 bp, Artificial Sequence
  derived and/or modified sequence
atgggcttcaacctgaccttccacctgagctacaagttccggctgctgctgttgttaacactgtgtctcacggttgtggggtgggctacttctaattacttcgtgggcgctattcaagaaatccctaaagccaaggaattcatggcgaacttccataagaccttaatattagggaagggtaaaactctcactaatgaggcaagcactaaaaaagtcgagctggataattgtccctctgttagcccgtacctgaggggccaaagcaagttaatctttaagccagacctcaccttggaggaggtgcaagccgaaaaccctaaagtgagccgtggccgctatcgaccccaggagtgctag

SEQ ID NO: 268069 - DNA, 129 bp, Artificial Sequence
  derived and/or modified sequence
atgggcttcaacctgaccttccacctgagctacaagttccggctgttgctgcttcttaccttatgcctgaccgtcgtgggatgggctactagcaactatttcgtgggtgccatccaggagatcccgtag

SEQ ID NO: 268070 - DNA, 168 bp, Artificial Sequence
  derived and/or modified sequence
atgggattcaacctgacttttcatctgtcatacaaattccggcttctcttgttattgaccctgtgtctgaccgtcgtcggttgggcgacctcaaactatttcgtgggcgctattcaagaaatcccaaaggccaaggaattcatggccaacttccacaagacgttgtag

SEQ ID NO: 268071 - DNA, 411 bp, Artificial Sequence
  derived and/or modified sequence
atggggtttaaccttacctttcatctgagttacaagttccgattacttctgctccttactctctgcctaacagtggtgggctgggccacgagcaactattttgtgggcgctatacaggagatccctaaagcgaaggagttcatggctaatttccataagactcttattctcggaaaggggaagaccctcaccaacgaagccagcacaaaaaaggtagagctagacaattgccctagtgttagcccatatctcagaggccagtccaagctgatttttaaaccagatctgacgctcgaggaagtgcaagctgaaaatccgaaggtctcacgtggtcgatacaggcctcaggagtgcaaggccctccaaagggtcgcaattctcgtgcctcaccggaatcgagagaagcactag

SEQ ID NO: 268072 - DNA, 357 bp, Artificial Sequence
  derived and/or modified sequence
atggggttcaacttaaccttccacttaagttataaattcaggctgctgttgttgttaactctttgtttgactgtagtagggtgggcgacgtctaattatttcgttggagctatccaggagatccctaaagcaaaagaattcatggctaactttcacaaaaccctcatcttgggaaaagggaagactctcacaaatgaagctagcaccaaaaaggtggagctcgacaattgcccgtcagttagtccttacctgcggggacagtctaagctgatcttcaagcctgacctcactctggaggaggtgcaggccgagaacccgaaagtgtcgagaggcaggtataggccccaggaatgctag

SEQ ID NO: 268073 - DNA, 129 bp, Artificial Sequence
  derived and/or modified sequence
atgggcttcaacttgacttttcatttgtcatataaattccggctcctgctcttgctgacactctgtcttactgtcgtaggctgggccactagcaactatttcgtaggcgcaatccaggaaattccttag

SEQ ID NO: 268074 - DNA, 641 bp, Artificial Sequence
  derived and/or modified sequence
agtgctagctcgccgcggccgcctccggggtgagtacgctggctccgccggcgcccgggaaatgcagttccctggacacgggcgccgtgcgagggtagccgggcgacggccggggaccacctggcttcatgtgtggatttccacggctcttgcccagaggcgggtacactgtgttccaatgtgccacggaactcacgcagtggcactttgtggcttcatgaaggaagaggcaggccacgcaacacttcctccccaagccaaggagaagtatcacttttagaggcagaggagcggaaggcagtgggtgtgaccaaaagtgccatttgttaaagactgttggagcagaactactgagaaaaaccaggcattgtatcttcagttgtcatcaagttcgcaatcagattggaaaagctcaacttgaagctttcttgcctgcagtgaagcagagagatagatattattcacgtaataaaaaacatgggcttcaacctgactttccacctttcctacaaattccgattactgttgctgttgactttgtgcctgacagtggttgggtgggccaccagtaactacttcgtgggtgccattcaagagattcctaaagcaaaggagttcatggctaatttccataagaccct

SEQ ID NO: 268075 - DNA, 560 bp, Artificial Sequence
  derived and/or modified sequence
gtgcacactgttgcaaagtgttccagagtgggtgagggatggggacgtggcggtggtgagggtactggtagacctcctcagccgtttggtgatgaaaaggaggaaaaagaaaatggtaatctgagcgtggaggaccacctggcttcatgtgtggatttccacggctcttgcccagaggcgggtacactgtgttccaatgtgccacggaactcacgcagtggcactttgtggcttcatgaaggaagaggcaggccacgcaacacttcctccccaagccaaggagaagtatcacttttagaggcagaggagcggaaggcagtgggtgtgaccaaaagtgccatttgttaaagactgttggagcagaactactgagaaaaaccaggcattgtatcttcagttgtcatcaagttcgcaatcagattggaaaagctcaacttgaagctttcttgcctgcagtgaagcagagagatagatattattcacgtaataaaaaacatgggcttcaacctgactttccacctttcctacaaattccgattactgttgctgttgactttgtg

SEQ ID NO: 268076 - DNA, 884 bp, Artificial Sequence
  derived and/or modified sequence
agtgctagctcgccgcggccgcctccggggaccacctggcttcatgtgtggatttccacggctcttgcccagaggcgggtacactgtgttccaatgtgccacggaactcacgcagtggcactttgtggcttcatgaaggaagaggcaggccacgcaacacttcctccccaagccaaggagaagtatcacttttagaggcagaggagcggaaggcagtgggtgtgaccaaaagtgccatttgttaaagcttatcttccttgccagattttaaaaactattatggaaaatctcaagcattcacaaaagtagagagaaagaaaggactctcagactgttggagcagaactactgagaaaaaccaggcattgtatcttcagttgtcatcaagttcgcaatcagattggaaaagctcaacttgaagctttcttgcctgcagtgaagcagagagatagatattattcacgtaataaaaaacatgggcttcaacctgactttccacctttcctacaaattccgattactgttgctgttgactttgtgcctgacagtggttgggtgggccaccagtaactacttcgtgggtgccattcaagagattcctaaagcaaaggagttcatggctaatttccataagaccctcattttggggaagggaaaaactctgactaatgaagcatccacgaagaaggtagaacttgacaactgcccttctgtgtctccttacctcagaggccagagcaagctcattttcaaaccagatctcactttggaagaggtacaggcagaaaatcccaaagtgtccagaggccggtatcgccctcaggaatgtaaagctttacagagggtcgccatcctcgttccccaccggaacagagagaaacacc

SEQ ID NO: 268077 - DNA, 615 bp, Artificial Sequence
  derived and/or modified sequence
agtgctagctcgccgcggccgcctccggggtgagtacgctggctccgccggcgcccgggaaatgcagttccctggacacgggcgccgtgcgagggtagccgggcgacggccgggactgttggagcagaactactgagaaaaaccaggcattgtatcttcagttgtcatcaagttcgcaatcagattggaaaagctcaacttgaagctttcttgcctgcagtgaagcagagagatagatattattcacgtaataaaaaacatgggcttcaacctgactttccacctttcctacaaattccgattactgttgctgttgactttgtgcctgacagtggttgggtgggccaccagtaactacttcgtgggtgccattcaagagattcctaaagcaaaggagttcatggctaatttccataagaccctcattttggggaagggaaaaactctgactaatgaagcatccacgaagaaggtagaacttgacaactgcccttctgtgtctccttacctcagaggccagagcaagctcattttcaaaccagatctcactttggaagaggtacaggcagaaaatcccaaagtgtccagaggccggtatcgccctcaggaatgtaa

SEQ ID NO: 268078 - DNA, 588 bp, Artificial Sequence
  derived and/or modified sequence
acggaggccgagcctggcgggaggcaccggctcaggtgctggcgttccgcgcggcgccgcctctgctgcgggccgggggagccagacgaggtgctgccgggaccacctggcttcatgtgtggatttccacggctcttgcccagaggcgggtacactgtgttccaatgtgccacggaactcacgcagtggcactttgtggcttcatgaaggaagaggcaggccacgcaacacttcctccccaagccaaggagaagtatcacttttagaggcagaggagcggaaggcagtgggtgtgaccaaaagtgccatttgttaaagactgttggagcagaactactgagaaaaaccaggcattgtatcttcagttgtcatcaagttcgcaatcagattggaaaagctcaacttgaagctttcttgcctgcagtgaagcagagagatagatattattcacgtaataaaaaacatgggcttcaacctgactttccacctttcctacaaattccgattactgttgctgttgactttgtgcctgacagtggttgggtgggccaccagtaactacttcgtgggtgccattcaagagattcc

SEQ ID NO: 268079 - protein, 331 aa, Artificial Sequence
  derived and/or modified sequence
MASALWTVLPSRMSLRSLKWSLLLLSLLSFFVMWYLSLPHYNVIERVNWMYFYEYEPIYRQDFHFTLREHSNCSHQNPFLVILVTSHPSDVKARQAIRVTWGEKKSWWGYEVLTFFLLGQEAEKEDKMLALSLEDEHLLYGDIIRQDFLDTYNNLTLKTIMAFRWVTEFCPNAKYVMKTDTDVFINTGNLVKYLLNLNHSEKFFTGYPLIDNYSYRGFYQKTHISYQEYPFKVFPPYCSGLGYIMSRDLVPRIYEMMGHVKPIKFEDVYVGICLNLLKVNIHIPEDTNLFFLYRIHLDVCQLRRVIAAHGFSSKEIITFWQVMLRNTTCHY

SEQ ID NO: 268080 - protein, 91 aa, Artificial Sequence
  derived and/or modified sequence
MASALWTVLPSRMSLRSLKWSLLLLSLLSFFVMWYLSLPHYNVIERVNWMYFYEIHLDVCQLRRVIAAHGFSSKEIITFWQVMLRNTTCHY

SEQ ID NO: 268081 - protein, 111 aa, Artificial Sequence
  derived and/or modified sequence
MASALWTVLPSRMSLRSLKWSLLLLSLLSFFVMWYLSLPHYNVIERVNWMYFYEYEPIYRQDFHFTLREHSNCSHQNPFLVILVTSHPSDVKARQAIRVTWGEKKSWWGYE

SEQ ID NO: 268082 - protein, 58 aa, Artificial Sequence
  derived and/or modified sequence
MASALWTVLPSRMSLRSLKWSLLLLSLLSFFVMWYLSLPHYNVIERVNWMYFYEYEPI

SEQ ID NO: 268083 - protein, 41 aa, Artificial Sequence
  derived and/or modified sequence
MASALWTVLPSRMSLRSLKWSLLLLSLLSFFVMWYLSLPHY

SEQ ID NO: 268084 - protein, 65 aa, Artificial Sequence
  derived and/or modified sequence
MASALWTVLPSRMSLRSLKWSLLLLSLLSFFVMWYLSLPHYNVIERVNWMYFYEYEPIYRQDFHF

SEQ ID NO: 268085 - protein, 29 aa, Artificial Sequence
  derived and/or modified sequence
MASALWTVLPSRMSLRSLKWSLLLLSLLS

SEQ ID NO: 268086 - protein, 54 aa, Artificial Sequence
  derived and/or modified sequence
MASALWTVLPSRMSLRSLKWSLLLLSLLSFFVMWYLSLPHYNVIERVNWMYFYE

SEQ ID NO: 268087 - DNA, 996 bp, Artificial Sequence
  derived and/or modified sequence
atggccagcgccctgtggaccgtgctgcccagcagaatgagcctgagaagcctgaagtggagcctgctgctgctgagcctgctgagcttcttcgtgatgtggtacctgagcctgccccactacaacgtgatcgagagagtgaactggatgtacttctacgagtacgagcccatctacagacaggacttccacttcaccctgagagagcacagcaactgcagccaccagaaccccttcctggtgatcctggtgaccagccaccccagcgacgtgaaggccagacaggccatcagagtgacctggggcgagaagaagagctggtggggctacgaggtgctgaccttcttcctgctgggccaggaggccgagaaggaggacaagatgctggccctgagcctggaggacgagcacctgctgtacggcgacatcatcagacaggacttcctggacacctacaacaacctgaccctgaagaccatcatggccttcagatgggtgaccgagttctgccccaacgccaagtacgtgatgaagaccgacaccgacgtgttcatcaacaccggcaacctggtgaagtacctgctgaacctgaaccacagcgagaagttcttcaccggctaccccctgatcgacaactacagctacagaggcttctaccagaagacccacatcagctaccaggagtaccccttcaaggtgttccccccctactgcagcggcctgggctacatcatgagcagagacctggtgcccagaatctacgagatgatgggccacgtgaagcccatcaagttcgaggacgtgtacgtgggcatctgcctgaacctgctgaaggtgaacatccacatccccgaggacaccaacctgttcttcctgtacagaatccacctggacgtgtgccagctgagaagagtgatcgccgcccacggcttcagcagcaaggagatcatcaccttctggcaggtgatgctgagaaacaccacctgccactactag

SEQ ID NO: 268088 - DNA, 276 bp, Artificial Sequence
  derived and/or modified sequence
atggccagcgccctgtggaccgtgctgcccagcagaatgagcctgagaagcctgaagtggagcctgctgctgctgagcctgctgagcttcttcgtgatgtggtacctgagcctgccccactacaacgtgatcgagagagtgaactggatgtacttctacgagatccacctggacgtgtgccagctgagaagagtgatcgccgcccacggcttcagcagcaaggagatcatcaccttctggcaggtgatgctgagaaacaccacctgccactactag

SEQ ID NO: 268089 - DNA, 336 bp, Artificial Sequence
  derived and/or modified sequence
atggccagcgccctgtggaccgtgctgcccagcagaatgagcctgagaagcctgaagtggagcctgctgctgctgagcctgctgagcttcttcgtgatgtggtacctgagcctgccccactacaacgtgatcgagagagtgaactggatgtacttctacgagtacgagcccatctacagacaggacttccacttcaccctgagagagcacagcaactgcagccaccagaaccccttcctggtgatcctggtgaccagccaccccagcgacgtgaaggccagacaggccatcagagtgacctggggcgagaagaagagctggtggggctacgagtag

SEQ ID NO: 268090 - DNA, 177 bp, Artificial Sequence
  derived and/or modified sequence
atggccagcgccctgtggaccgtgctgcccagcagaatgagcctgagaagcctgaagtggagcctgctgctgctgagcctgctgagcttcttcgtgatgtggtacctgagcctgccccactacaacgtgatcgagagagtgaactggatgtacttctacgagtacgagcccatctag

SEQ ID NO: 268091 - DNA, 126 bp, Artificial Sequence
  derived and/or modified sequence
atggccagcgccctgtggaccgtgctgcccagcagaatgagcctgagaagcctgaagtggagcctgctgctgctgagcctgctgagcttcttcgtgatgtggtacctgagcctgccccactactag

SEQ ID NO: 268092 - DNA, 198 bp, Artificial Sequence
  derived and/or modified sequence
atggccagcgccctgtggaccgtgctgcccagcagaatgagcctgagaagcctgaagtggagcctgctgctgctgagcctgctgagcttcttcgtgatgtggtacctgagcctgccccactacaacgtgatcgagagagtgaactggatgtacttctacgagtacgagcccatctacagacaggacttccacttctag

SEQ ID NO: 268093 - DNA, 90 bp, Artificial Sequence
  derived and/or modified sequence
atggccagcgccctgtggaccgtgctgcccagcagaatgagcctgagaagcctgaagtggagcctgctgctgctgagcctgctgagctag

SEQ ID NO: 268094 - DNA, 165 bp, Artificial Sequence
  derived and/or modified sequence
atggccagcgccctgtggaccgtgctgcccagcagaatgagcctgagaagcctgaagtggagcctgctgctgctgagcctgctgagcttcttcgtgatgtggtacctgagcctgccccactacaacgtgatcgagagagtgaactggatgtacttctacgagtag

SEQ ID NO: 268095 - DNA, 996 bp, Artificial Sequence
  derived and/or modified sequence
atggcctctgcgttatggactgtacttccatccaggatgtctctgaggtccctcaaatggagtctgctgctgttgtccctgctgtcattttttgtcatgtggtaccttagtctcccccactacaatgtgattgaacgggtcaactggatgtacttttatgaatatgaaccaatctaccgtcaggattttcatttcacgctgcgcgaacattccaattgcagtcatcagaatcccttcctcgtgatattagtgacgagccacccttccgacgtaaaagcacggcaggccattagagtcacgtggggagagaaaaaatcatggtggggctacgaagtgttaacttttttcttgttgggacaggaagccgaaaaggaagacaagatgctcgctctcagcctcgaggatgagcaccttctctatggggatattattagacaggattttttagacacctataacaacctaacccttaagacaatcatggcctttcggtgggtcactgaattttgtccaaacgcaaagtacgttatgaagaccgatacagatgttttcatcaacacaggtaacttggtcaagtatttactgaatctcaatcacagcgaaaagttttttaccgggtatccactaattgacaactactcatacagaggcttctaccagaaaacacatatctcttatcaggagtaccctttcaaggtcttccccccatattgttccggactcggctatattatgtcgcgagacctcgtgcctaggatctacgaaatgatgggccacgtcaagccaattaagtttgaagatgtatacgtcggaatctgcctgaacttgctgaaggtgaacatccacatccccgaagacacaaacctcttctttctgtacaggattcacctcgatgtatgccagctgcgccgggtgattgcagcccacggattcagcagcaaggagatcataacattttggcaggtgatgctgagaaacacaacttgccactactag

SEQ ID NO: 268096 - DNA, 996 bp, Artificial Sequence
  derived and/or modified sequence
atggcatcggcactgtggaccgtactgcctagccggatgagcttgagaagcctcaagtggagcctgcttctgctttcccttctgtctttcttcgtgatgtggtatctttccttgcctcactacaatgtgatcgagagggtgaactggatgtatttttacgagtatgagcccatctataggcaggattttcactttacactacgcgagcatagcaattgttctcaccagaatcctttcctggtgattctggtgacctcccacccaagtgacgtgaaggcacgccaggctatcagggtgacatggggcgaaaaaaagagttggtggggctacgaagttcttacatttttccttcttggtcaggaagccgaaaaggaagacaaaatgttggccctgtcattagaagacgagcacttactgtacggagacatcattcggcaggacttcctggatacttacaacaatctgactctgaagactattatggcatttagatgggtcactgaattttgtcccaatgcaaaatacgtaatgaaaacagatactgacgtctttattaatacgggcaatctggtgaagtatctgttgaatcttaaccacagcgaaaaattctttacgggctatcctttgattgataattattcctacagggggttctaccagaagacccacatttcttaccaggagtacccattcaaagtgtttcccccctactgctcgggcctagggtacattatgtccagagacctggtgcctcggatctatgagatgatggggcatgtgaaacctatcaagttcgaagacgtgtacgtagggatctgtcttaatttattgaaggtcaacatccacattccagaagatacgaacctctttttcctgtatcgcatccatctggatgtgtgccagctccgtagagttatagccgcacacgggtttagctccaaggagatcattaccttctggcaggttatgctgcggaatacaacgtgtcactattag

SEQ ID NO: 268097 - DNA, 996 bp, Artificial Sequence
  derived and/or modified sequence
atggccagcgcactgtggactgtactaccttcccgaatgtcactcagatctctcaaatggagcctcctgctgctgtccttgctctcattcttcgtgatgtggtatctgtcgctcccgcattataacgtgattgagcgcgtgaactggatgtatttttatgagtatgagcctatctatcggcaagacttccacttcactctacgggaacatagtaactgcagccaccaaaaccccttcctcgtgattttagtgacctcccatccttctgatgtgaaggcaagacaggcaattagggttacctggggggagaaaaaatcttggtggggttacgaggtcctgaccttcttcttactgggccaagaggctgagaaagaggataaaatgttggcactttctctggaagatgagcatttgctctacggggatattattagacaggatttcttggatacctataacaatttgacacttaagactattatggcatttcggtgggtcaccgaattttgccctaatgctaagtatgtcatgaagacagacactgatgtgttcatcaatacagggaacctggtgaaatatttactgaatctaaaccactcagagaagttttttaccggttaccctctcatcgacaattacagctacagaggtttttatcagaagacccacatatcttaccaggaatatccattcaaagttttcccaccctactgctctgggctagggtatattatgagccgcgacctagtgccccggatttatgagatgatggggcatgtcaaacccataaaatttgaagatgtgtacgtcggtatctgcctgaatctgctaaaagtgaatattcacattcctgaggataccaatttgttttttctttatcgtatccacctggatgtttgccagctcagacgggtgatcgcggctcatgggttctcgtctaaagaaatcattaccttttggcaggtgatgctgagaaacactacctgtcattactag

SEQ ID NO: 268098 - DNA, 996 bp, Artificial Sequence
  derived and/or modified sequence
atggcatctgccctgtggactgtgctcccaagtaggatgtcccttagatccctgaaatggtctctgctcctgctcagcctgctgtccttttttgttatgtggtatctctcccttccgcattacaatgtaatcgagagagtgaattggatgtatttctatgagtacgaacccatctatcggcaggacttccattttacgctgcgcgaacacagcaattgttctcaccagaaccccttcttggtcatactggtgacaagccacccaagtgacgtgaaagctcgtcaggcgatcagggtgacctggggggagaagaagagttggtgggggtacgaggtgctcacctttttcctactcggccaggaggcagagaaggaggacaaaatgttggctctttccttggaagacgagcacctgttatatggagatattattcgtcaggatttcctcgacacctacaacaatctcaccctgaaaacaatcatggccttccggtgggtcacagaattctgtcccaacgcaaagtatgtcatgaaaaccgacaccgatgtgttcattaataccggcaacttagttaaatatttgctgaatctgaatcactcagaaaaatttttcactggatacccattgattgataactactcataccgtggtttctaccagaaaacacatatatcataccaggaatacccctttaaagtgtttccgccgtactgcagtggcttaggttacataatgtctcgcgacctcgtgccccggatttatgagatgatggggcacgtaaaacccattaaattcgaggacgtgtacgtgggaatttgtctaaacttactaaaggttaacatacatattccagaggacacaaatctcttcttcttatacagaattcacctagacgtttgccagttacggagagtgatcgcagcccacgggttttcttcaaaagaaatcataacattttggcaagttatgctgcgtaataccacctgccactactag

SEQ ID NO: 268099 - DNA, 276 bp, Artificial Sequence
  derived and/or modified sequence
atggcgtctgccttatggaccgttctgccatcacgaatgtctctcagaagtctcaaatggtccctccttctgcttagcttgctctcattcttcgttatgtggtatctgtcactgccccactacaacgtgatagagcgcgtcaattggatgtacttttacgagatccacctggacgtctgccagcttaggagagtgatcgcggctcacgggttctcctcgaaggaaattattactttctggcaggtaatgcttagaaatacgacttgtcactactag

SEQ ID NO: 268100 - DNA, 336 bp, Artificial Sequence
  derived and/or modified sequence
atggcgagcgccctatggaccgttctgccgtctcggatgtcactgaggagtctgaaatggtccctgctcctcctgtccttgctctcttttttcgtgatgtggtacctgagtctgccacactacaatgtaattgaacgcgttaattggatgtacttttacgaatatgagccgatctacaggcaggattttcactttactctccgcgagcactccaactgttcccaccagaatcctttcctggtgattctggtcacgtctcatccttcagatgtgaaagctcgtcaggctatcagagtgacctggggtgaaaaaaagtcatggtggggttatgaatag

SEQ ID NO: 268101 - DNA, 177 bp, Artificial Sequence
  derived and/or modified sequence
atggcttctgccttatggacagtactcccatcccggatgagcctgcgatccttaaaatggtctctgttgctgctgtcattgctgtcgttcttcgtaatgtggtacctctccctccctcattacaatgtcattgagcgggttaattggatgtacttctatgagtacgagccaatctag

SEQ ID NO: 268102 - DNA, 996 bp, Artificial Sequence
  derived and/or modified sequence
atggcgtccgccctgtggacggttttaccaagtaggatgtccctgcgctcactgaagtggagcctgcttctactttctctgttgagtttcttcgtcatgtggtacctcagtctgccccattacaacgtgatagaacgagtgaactggatgtatttctacgagtacgaacccatctatagacaggacttccacttcacattgagggaacactctaactgttcgcaccagaatccatttctggtgattctagtcacatcacatcctagtgacgttaaagctcggcaagctatccgcgttacatggggcgagaagaaaagttggtggggctacgaggtcctgaccttcttcctgctaggtcaggaggccgaaaaagaagataaaatgctggccttgagtttggaagacgagcacttgctttacggcgacattataaggcaggactttctggatacgtacaacaatctgacgctcaaaaccattatggctttccggtgggtgaccgagttttgtccaaacgccaagtacgtgatgaaaaccgacactgacgtgtttataaataccggcaaccttgtaaaatacttgttgaatctcaaccattcagagaaattcttcaccggttaccccttaattgataactattcctacagaggattctaccagaagacccacatatcctatcaggagtatccctttaaagtttttcctccatactgttctgggctggggtacataatgagccgggacttagtgcctcgaatttatgaaatgatgggccatgtgaagccaatcaaattcgaggatgtctacgtgggcatttgcctgaacctcctaaaagtcaatatccacattcccgaggacactaatctttttttcctgtatcggatacatctcgatgtgtgtcagctacgcagagtaatagccgctcatggattctccagcaaggagataatcaccttttggcaggtgatgttgagaaacactacttgtcactactag

SEQ ID NO: 268103 - DNA, 126 bp, Artificial Sequence
  derived and/or modified sequence
atggcatcagcgctgtggacagtgttgccttcgcggatgtcccttcgatctctgaaatggagtcttcttttactctctctgctgtctttttttgtcatgtggtatctatctctcccccactattag

SEQ ID NO: 268104 - DNA, 996 bp, Artificial Sequence
  derived and/or modified sequence
atggcatcagctctctggaccgtcctgccaagtcgcatgagcctccggtccctgaaatggtccctacttttgctttctcttctgtccttttttgtcatgtggtatctctcactgccccattataacgttattgagagagtgaattggatgtacttttacgaatatgagcctatctatcgacaggattttcacttcactcttcgcgagcactctaattgcagccatcagaacccattcctagtcatattggtaaccagccacccatccgacgtgaaagccaggcaggccatcagggtgacctggggggaaaaaaagagttggtggggttatgaagtactcactttctttttgctgggacaagaggcagaaaaagaggataagatgctggcgttaagcctagaagacgaacatctcctttacggtgatattatcaggcaggattttctggacacatataacaacttgacacttaagactatcatggcgttcagatgggtaaccgagttttgccctaatgccaaatatgtcatgaagaccgatactgatgtgtttataaacaccggcaacctggttaagtaccttctcaatttaaaccactctgaaaaattctttacgggataccccttaatcgacaattacagctatcgcggtttttaccaaaaaacccatatttcctaccaagaatatcctttcaaggtctttccaccctactgcagcggtctgggctacatcatgtcacgagacttggtcccgaggatttacgagatgatgggccacgtgaaacctattaagttcgaggatgtatacgtgggaatttgccttaacctgctaaaagtaaacatccacattcccgaggataccaacctgttttttctctatcgaattcacctggatgtatgtcagctgcgcagagtgatcgctgcacacggtttttcttccaaggaaataatcactttctggcaggttatgctgagaaacactacctgtcattactag

SEQ ID NO: 268105 - DNA, 198 bp, Artificial Sequence
  derived and/or modified sequence
atggcaagcgccttgtggacagttctgccttctaggatgagcctgagatctttaaagtggtctctactgcttctatctttactgtccttctttgttatgtggtacttatccctgccccattacaatgtcatagagagagtgaattggatgtatttttacgagtacgagccaatatatagacaggatttccatttctag

SEQ ID NO: 268106 - DNA, 90 bp, Artificial Sequence
  derived and/or modified sequence
atggcctccgccttatggactgtgctgccttcccggatgagccttaggtccctgaagtggagcctgctcctgctctcattgctctcttag

SEQ ID NO: 268107 - DNA, 165 bp, Artificial Sequence
  derived and/or modified sequence
atggcctcggccctctggacagtcctgcctagcaggatgtccctgcgatctctcaaatggtccctgcttctcctttcactgctgagtttcttcgtgatgtggtacctctctttgcctcactataatgtgattgaaagggtgaactggatgtatttttatgagtag

SEQ ID NO: 268108 - DNA, 996 bp, Artificial Sequence
  derived and/or modified sequence
atggccagcgccctgtggacagtgctgcccagcaggatgagcctgcggagcctgaagtggagcctgctgctgctgagcctgctgtccttctttgtgatgtggtacctgagcctgccccactacaacgtcatcgagcgggtgaactggatgtacttctatgaatatgagcccatctaccggcaggacttccacttcaccctgcgggagcacagcaactgcagccaccagaaccccttcctggtgatcctggtgaccagccaccccagtgatgtgaaggcccggcaggccatccgggtgacctggggcgagaagaagtcctggtggggctatgaggtgctgaccttcttcctgctgggccaggaggccgagaaggaggacaagatgctggccctgagcctggaggatgagcacctgctgtatggagacatcatccggcaggacttcctggacacctacaacaacctgaccctgaagaccatcatggccttccgctgggtgacagagttctgccccaatgccaagtatgtgatgaagacagacacagatgtgttcatcaacacaggcaacctggtgaagtacctgctgaacctgaaccacagcgagaagttcttcaccggctaccccctgattgacaactacagctaccggggcttctaccagaagacccacatctcctaccaggagtaccccttcaaggtgtttcctccctactgcagcggcctgggctacatcatgagccgggacctggtgccccgcatctatgagatgatgggccacgtgaagcccatcaagtttgaagatgtgtatgtgggcatctgcctgaacctgctgaaggtgaacatccacatccctgaggacaccaacctcttcttcctgtaccgcatccacctggatgtgtgccagctgcggcgggtgattgctgcccacggcttcagcagcaaggagatcatcaccttctggcaggtgatgctgaggaacaccacctgccactactag

SEQ ID NO: 268109 - DNA, 276 bp, Artificial Sequence
  derived and/or modified sequence
atggccagcgccctgtggacagtgctgcccagcaggatgagcctgcggagcctgaagtggagcctgctgctgctgagcctgctgtccttctttgtgatgtggtacctgagcctgccccactacaacgtcatcgagcgggtgaactggatgtacttctatgagatccacctggatgtgtgccagctgcggcgggtgattgctgcccacggcttcagcagcaaggagatcatcaccttctggcaggtgatgctgaggaacaccacctgccactactag

SEQ ID NO: 268110 - DNA, 336 bp, Artificial Sequence
  derived and/or modified sequence
atggccagcgccctgtggacagtgctgcccagcaggatgagcctgcggagcctgaagtggagcctgctgctgctgagcctgctgtccttctttgtgatgtggtacctgagcctgccccactacaacgtcatcgagcgggtgaactggatgtacttctatgaatatgagcccatctaccggcaggacttccacttcaccctgcgggagcacagcaactgcagccaccagaaccccttcctggtgatcctggtgaccagccaccccagtgatgtgaaggcccggcaggccatccgggtgacctggggcgagaagaagtcctggtggggctatgaatag

SEQ ID NO: 268111 - DNA, 177 bp, Artificial Sequence
  derived and/or modified sequence
atggccagcgccctgtggacagtgctgcccagcaggatgagcctgcggagcctgaagtggagcctgctgctgctgagcctgctgtccttctttgtgatgtggtacctgagcctgccccactacaacgtcatcgagcgggtgaactggatgtacttctatgaatatgagcccatctag

SEQ ID NO: 268112 - DNA, 126 bp, Artificial Sequence
  derived and/or modified sequence
atggccagcgccctgtggacagtgctgcccagcaggatgagcctgcggagcctgaagtggagcctgctgctgctgagcctgctgtccttctttgtgatgtggtacctgagcctgccccactactag

SEQ ID NO: 268113 - DNA, 198 bp, Artificial Sequence
  derived and/or modified sequence
atggccagcgccctgtggacagtgctgcccagcaggatgagcctgcggagcctgaagtggagcctgctgctgctgagcctgctgtccttctttgtgatgtggtacctgagcctgccccactacaacgtcatcgagcgggtgaactggatgtacttctatgaatatgagcccatctaccggcaggacttccacttctag

SEQ ID NO: 268114 - DNA, 90 bp, Artificial Sequence
  derived and/or modified sequence
atggccagcgccctgtggacagtgctgcccagcaggatgagcctgcggagcctgaagtggagcctgctgctgctgagcctgctgtcctag

SEQ ID NO: 268115 - DNA, 165 bp, Artificial Sequence
  derived and/or modified sequence
atggccagcgccctgtggacagtgctgcccagcaggatgagcctgcggagcctgaagtggagcctgctgctgctgagcctgctgtccttctttgtgatgtggtacctgagcctgccccactacaacgtcatcgagcgggtgaactggatgtacttctatgaatag

SEQ ID NO: 268116 - DNA, 996 bp, Artificial Sequence
  derived and/or modified sequence
atggccagcgccctgtggaccgtgctgcccagccggatgagcctgaggagtctgaagtggtctctgcttctgctcagtttactgtcattcttcgtcatgtggtacttgtcccttccccactataatgttatcgaacgcgtcaactggatgtacttctatgaatatgaacctatttacaggcaggattttcacttcacccttcgggagcactctaactgctcacatcagaatccctttctggtcattctggtcacaagccacccttcagacgtgaaggctcgacaggctatccgcgtcacttggggcgagaaaaaatcctggtggggatatgaggtgctcaccttcttcttgctgggccaggaagccgagaaggaggacaagatgctcgcgctctctctcgaggatgaacatttgctctatggagacattatccgacaggacttcctagatacttataataacctcacactaaaaaccatcatggcttttcgttgggtcaccgaattttgccccaacgccaagtacgtgatgaagaccgacaccgatgttttcatcaacacaggcaacctcgttaagtacctcctcaacttgaaccacagcgaaaagttcttcaccggttatcccctcattgataattattcttacaggggcttttatcaaaaaacacacatcagctaccaggagtacccattcaaagtctttcctccctattgctcaggattgggatacatcatgtcccgcgatctggttcctagaatatatgagatgatggggcatgtcaaaccaatcaagtttgaggatgtgtacgtagggatctgcctgaacctcttaaaagtcaacatccacatacccgaagacacgaatttattctttctgtatcgaatacacctcgacgtgtgtcagctgcgcagagtaatcgctgcacacggcttcagctccaaggaaatcatcactttttggcaggtgatgctgcgcaacactacatgccactattag

SEQ ID NO: 268117 - DNA, 996 bp, Artificial Sequence
  derived and/or modified sequence
atggccagcgccctgtggaccgtgctgcccagccggatgagcctgcgttcactaaagtggtcgttgctgctgctgtccctgctgtccttttttgtgatgtggtacctgtccttaccgcactataacgtgattgagcgggttaattggatgtatttttatgaatacgagccgatatatcgccaggattttcatttcacgctgagagagcatagtaactgcagccaccagaatcccttcctggtcatcttggtcacaagtcacccgagcgacgtgaaagcacggcaggccattagagtgacctggggggagaaaaagtcctggtggggttatgaagtgctgacatttttcttgctcgggcaggaagcagagaaagaggataagatgctggcactgtcattggaagacgagcacctgctctacggcgatattatccgccaagatttcctggatacatataacaatctcaccctgaaaacaattatggcttttagatgggtgaccgaattctgccccaacgcaaagtacgttatgaagaccgataccgacgtcttcatcaatacaggaaatttagtcaaatacctacttaatctgaaccactctgaaaagtttttcacgggctatcccttaatcgacaactatagctacagagggttctatcagaaaactcatatttcttatcaggagtatccttttaaagtttttcctccatactgttctggtctcgggtacatcatgtcacgggatctggtgccacggatttacgaaatgatgggacatgtgaaacccatcaaatttgaggatgtgtatgttggcatctgcttgaatctgctgaaagtgaacatccacattccagaggatacaaacctttttttcttataccgcatccatctcgacgtctgccaactgaggcgagtgattgctgcacatggattttcctccaaggaaattataaccttttggcaagtgatgctgaggaataccacatgccactattag

SEQ ID NO: 268118 - DNA, 996 bp, Artificial Sequence
  derived and/or modified sequence
atggccagcgccctgtggaccgtgctgcccagccggatgagcctgcggtccctcaagtggtccctcttgttgttatccctcctttcatttttcgttatgtggtacctttctctgccccactataacgtgatagaacgagttaactggatgtacttctatgaatacgaacctatctatcgccaagattttcacttcaccctgagggaacacagtaattgcagtcaccaaaacccatttctggtgattctagtgacaagccaccccagtgacgttaaggccaggcaggccatcagagtgacgtggggggagaagaagagttggtggggttacgaagtgctaaccttcttcttgcttggccaggaggccgaaaaagaggataagatgctggctttgtccctggaggatgagcatttgctgtatggagatatcatacggcaagacttcttggacacgtataataatttgacccttaagaccataatggccttccggtgggtgacagaattttgtccaaacgcaaagtacgtgatgaaaaccgatacagatgtgttcattaataccggaaacttggtgaaatatctccttaacctgaaccactctgaaaagttctttaccgggtaccctctgatcgataattattcctacagaggattttatcaaaagacccacatcagctatcaggaatatccattcaaagtattccccccttactgtagtggcctcgggtatataatgtctcgcgatctggtgcctcgcatttacgaaatgatgggccatgtcaaacccattaagttcgaggacgtttacgtggggatttgccttaatctgctgaaagtgaatattcatatccccgaagacacgaacctttttttcctgtatcgcatccaccttgacgtgtgtcaattgagacgcgtaatcgctgctcacggattcagcagtaaagagatcataacattctggcaggtcatgctgcgaaacactacgtgccattactag

SEQ ID NO: 268119 - DNA, 996 bp, Artificial Sequence
  derived and/or modified sequence
atggccagcgccctgtggaccgtgctgcccagccggatgagcctgagaagcctgaaatggtctctactgctgctgagcctcctcagcttcttcgtcatgtggtatttaagcctcccacattataatgtgatagagcgggtgaactggatgtacttctacgaatacgagccaatataccgccaagattttcatttcaccctaagagagcatagcaactgctcccaccagaatcccttcttagtgattctggtcacatctcaccccagcgacgtcaaagcaagacaggctattagagtgacatggggggaaaaaaaatcatggtggggctacgaagtcttgacgttcttcttgctaggtcaggaagctgaaaaggaagacaagatgctcgcactgtcacttgaggacgaacatctcctatacggcgatattatacgccaggacttcctggacacatataacaacctaacacttaaaacgattatggcttttagatgggtcacagagttctgccctaacgctaaatacgtgatgaagactgacacagatgtttttatcaatacgggcaaccttgtgaaatatcttcttaatttgaatcactctgaaaaattctttacagggtaccccctcatcgataactattcatacagagggttttatcaaaaaacccatataagttaccaggaataccctttcaaagttttcccaccttattgcagcggcctgggatatatcatgtcgagagacctggtcccaagaatttacgagatgatgggtcatgtaaagcccatcaagttcgaggatgtgtacgtgggaatatgtctgaatttactgaaggtcaatatccatatcccagaagatacaaacttgttttttctgtacagaatccacttggatgtgtgccagctgagaagagtaattgctgcgcacggattttcttcaaaggaaatcatcaccttctggcaggttatgctccgaaacaccacttgtcactactag

SEQ ID NO: 268120 - DNA, 276 bp, Artificial Sequence
  derived and/or modified sequence
atggccagcgccctgtggaccgtgctgcccagccggatgagcctgcgcagtcttaagtggagcttactgcttctcagcctgttatccttcttcgtgatgtggtatctgtccctaccccactataatgttattgagcgggttaactggatgtacttctatgaaattcatctggacgtgtgtcaattacggcgggtgatcgccgcacatggttttagttcgaaggaaattattaccttttggcaagtgatgctgcgaaacaccacatgtcattattag

SEQ ID NO: 268121 - DNA, 336 bp, Artificial Sequence
  derived and/or modified sequence
atggccagcgccctgtggaccgtgctgcccagccggatgagcctgcggagtctgaaatggtccctactgctgctctcacttctcagctttttcgtcatgtggtatttgtcactaccacactacaatgtgatcgaacgcgttaattggatgtacttctatgaatacgagccaatatatcgtcaggacttccatttcacgttaagagagcactcgaactgttcacatcagaacccctttctcgttatcctcgtgacctcccatccctccgatgtgaaagccagacaagcgattcgagtaacttggggcgaaaaaaaatcgtggtgggggtacgagtag

SEQ ID NO: 268122 - DNA, 177 bp, Artificial Sequence
  derived and/or modified sequence
atggccagcgccctgtggaccgtgctgcccagccggatgagcctgaggtcactgaagtggagtctactccttttatcactgctgagttttttcgtgatgtggtatttgtctctcccacattataacgtcatcgaacgggtcaattggatgtacttctacgaatacgagcccatttag

SEQ ID NO: 268123 - DNA, 996 bp, Artificial Sequence
  derived and/or modified sequence
atggccagcgccctgtggaccgtgctgcccagccggatgagcctgagatcattgaagtggagcctcttacttttgagcctcttatctttcttcgttatgtggtatctgtctttacctcattataacgtgatcgagagagtgaattggatgtatttctatgagtatgagcctatctatcgacaggattttcattttaccttaagagaacactccaactgttcacaccagaacccattcctagtcatcctcgtgacctctcatccgtctgacgtgaaggctcggcaagccatccgggtcacatggggtgagaagaaatcctggtggggatatgaagttctgactttttttctgctgggacaggaggctgaaaaagaggacaagatgctcgcactgagtctggaagatgagcatcttctgtatggcgatatcatcagacaggattttttggatacatacaataatttaaccctgaagaccatcatggccttccgctgggtcaccgaattttgtccaaatgccaaatatgtgatgaaaacagatacggacgtctttatcaacactgggaatctggttaagtacttgctcaatttgaatcactccgaaaagttcttcactgggtaccctcttattgacaactacagctatcgcgggttttatcagaagactcacatctcatatcaagagtatccttttaaggtatttcccccatactgctcaggcctgggctacattatgtcaagagatctcgtgcctcgaatttatgaaatgatggggcacgtgaaacccatcaagtttgaggatgtgtatgtcggtatttgcctgaacttgctaaaagtcaacatccacatacctgaggatacgaacctgttctttttatacaggatccatttagatgtttgtcagttgcgacgcgttattgccgcacacggctttagcagcaaagaaatcatcactttctggcaggtgatgctgcggaacacgacttgccattactag

SEQ ID NO: 268124 - DNA, 126 bp, Artificial Sequence
  derived and/or modified sequence
atggccagcgccctgtggaccgtgctgcccagccggatgagcctgcggtctctgaagtggagcttactgcttctgtcacttctatcattttttgtaatgtggtacctctcactcccgcattattag

SEQ ID NO: 268125 - DNA, 996 bp, Artificial Sequence
  derived and/or modified sequence
atggccagcgccctgtggaccgtgctgcccagccggatgagcctgaggtcattgaaatggtccttgctgctactgtcccttctgtcatttttcgtgatgtggtatctctccctacctcattacaacgtcatcgaacgtgtgaactggatgtatttctacgaatacgaacccatttaccggcaagacttccactttacattgcgcgagcattctaactgcagccaccagaatcctttcctggttatattggtgacatcgcatccgtccgatgttaaggcacgacaagcaatcagggtgacctggggagagaagaaaagttggtggggatatgaagtgctgacattttttctactaggtcaggaggctgagaaagaagataagatgctcgccctgtcactggaagacgaacatctcctctatggcgacatcatacgacaagactttcttgatacctacaacaatctaacactcaaaaccattatggctttccgctgggtaaccgaattttgcccaaatgccaaatatgtcatgaagaccgataccgatgtgttcattaacacgggtaatctcgttaagtacctcctgaacctgaatcacagcgagaagtttttcaccggctatcccttgattgataactattcctatcggggattttaccagaagacacatataagctaccaggagtatccattcaaggtgttccccccgtactgttccggtttagggtacatcatgagtagagacctggtccctagaatatacgagatgatgggtcacgtgaagcccattaaatttgaagacgtctacgtcggtatctgtctcaacttgcttaaggttaacatacatatccccgaggatacaaacctcttcttcctgtatagaattcatttagatgtttgccagctcagacgtgttatcgccgcacacggcttcagctctaaggagatcatcacattctggcaggtaatgctgagaaacaccacatgtcactattag

SEQ ID NO: 268126 - DNA, 198 bp, Artificial Sequence
  derived and/or modified sequence
atggccagcgccctgtggaccgtgctgcccagccggatgagcctgcgtagtttgaagtggtctctccttttactgagtctgttaagctttttcgtgatgtggtacctgagcctgccacattataacgtcattgaacgcgttaattggatgtacttttacgaatacgaacctatctatcggcaggatttccacttctag

SEQ ID NO: 268127 - DNA, 90 bp, Artificial Sequence
  derived and/or modified sequence
atggccagcgccctgtggaccgtgctgcccagccggatgagcctgaggtctctgaaatggagtttactgctcctcagcctgctttcgtag

SEQ ID NO: 268128 - DNA, 165 bp, Artificial Sequence
  derived and/or modified sequence
atggccagcgccctgtggaccgtgctgcccagccggatgagcctgaggtctctgaaatggtcactcctgctcttgtcgctgctatcattttttgtgatgtggtatctgtccctcccccattacaacgtgatcgaaagagttaattggatgtacttctacgaatag

SEQ ID NO: 268129 - DNA, 996 bp, Artificial Sequence
  derived and/or modified sequence
atggcatctgctctctggacggtgctgccatcaaggatgtctctgcggagcctcaagtggtctcttctgctgctgagtttgctctccttttttgtgatgtggtacttgagcctgccccactacaacgtgatcgaacgagtgaattggatgtatttctacgagtatgagcccatctatcggcaggatttccatttcactctccgagagcacagcaattgtagtcaccagaacccttttttggtgatcctggtcaccagccacccctccgatgtgaaagccaggcaggccatccgtgtgacatggggcgagaaaaaaagctggtggggttacgaggtcctcacgtttttccttttggggcaggaagccgagaaagaggacaagatgctggctttaagcctggaggacgaacacttgttatatggagacatcattcggcaagacttcctcgacacgtataacaatcttacgctgaaaactataatggcctttagatgggttacagagttttgccccaacgcaaaatatgttatgaaaaccgacacagacgtctttataaacactggtaatttagtgaaatacttactgaatttgaaccatagcgagaagtttttcacaggatatcccttaattgacaactatagttaccgaggattttatcaaaaaactcatatctcttaccaggagtatccgtttaaggtgtttccaccttattgcagcggtcttggatatatcatgtctcgcgacttagtccccaggatatatgaaatgatggggcatgtaaaacccatcaagttcgaggatgtgtacgtcggaatttgtctaaatctgctcaaggttaatattcacatccccgaagacacaaatcttttctttctgtatcgaattcatctggacgtttgccagctaagaagagtgattgccgcacatggcttctcctctaaggagatcatcaccttttggcaggtaatgctccggaacacaacatgccactattag

SEQ ID NO: 268130 - DNA, 996 bp, Artificial Sequence
  derived and/or modified sequence
atggccagtgccctgtggacagtgctgccaagccggatgtcgctacgtagtctgaagtggtccttgttacttcttagcctcttatctttctttgtcatgtggtacctgtcccttccacattataatgtgatagaaagagttaattggatgtatttctacgaatacgagccaatctatcgacaggacttccactttacactccgagagcactccaattgctcacatcagaacccatttctggtcatactagttacatcccatccatctgacgttaaggcgaggcaggctatacgtgtcacatggggtgagaagaagtcctggtggggttacgaagtgttgactttttttctcctgggccaagaagctgagaaggaggacaaaatgctcgccttgtccctcgaggatgagcacctactttacggagacatcattagacaggattttcttgacacctacaacaaccttacccttaagactattatggcttttcgttgggtgacggagttttgcccaaacgctaagtatgtcatgaagaccgacaccgacgtgtttatcaataccggtaacctagtcaaatacctgctgaatctgaatcactctgagaagtttttcacagggtatccgctgatcgataactattcctatcggggattctaccagaagacccacatttcatatcaagagtaccctttcaaggtctttcccccatactgttccggattagggtatatcatgtcacgtgatttggttccccgtatttacgaaatgatgggccatgtgaaaccgattaagtttgaagatgtgtatgtgggaatctgtttgaatttgctgaaggtcaatatccatatccccgaagacaccaacctgtttttcctttatagaattcacctcgacgtgtgccagctaaggagagtgatcgctgcacacggattctcatctaaagagatcatcacattctggcaggtaatgctgcggaatacaacctgtcactactag

SEQ ID NO: 268131 - DNA, 996 bp, Artificial Sequence
  derived and/or modified sequence
atggccagtgccctgtggacagtactaccctctaggatgtcactccggagcctaaagtggtcactgctcctgctcagcctgttaagtttctttgtgatgtggtacctatcactgcctcactataatgtgattgagagagtcaattggatgtatttctatgagtatgagcctatctatcgacaggatttccatttcactttgagggaacattcgaactgcagccatcagaatccttttttagtgatactcgtaacctcccacccctcagatgtgaaagccagacaggcaatacgggtgacctggggcgagaagaaatcttggtgggggtacgaggtcttaacattctttctgcttggccaggaggccgagaaagaagataaaatgctcgcactgagtctcgaagatgagcatctgttatatggggatataatacgccaggatttcctggacacatataataaccttaccctgaagaccatcatggcctttcggtgggtgactgagttctgcccaaatgcgaagtatgttatgaagacagataccgatgtatttattaacacgggaaacttggtgaagtacctcctcaatctcaatcatagtgagaaatttttcaccggttaccctttgattgataactacagctatcgcggattttaccaaaaaacacacatctcctatcaggaatacccgttcaaagtgttccctccgtattgcagcggtctcgggtatattatgtcccgagatctggtcccacgcatatatgagatgatgggacacgttaaacccattaagttcgaggatgtgtacgtgggaatttgcttgaatctgctaaaggtaaacattcacattcctgaggatacaaacctctttttcctgtacaggatccatctggatgtgtgtcagttgcgacgcgtaattgctgcccacggcttttcctcgaaagagatcattaccttttggcaagtcatgctgagaaataccacctgccactactag

SEQ ID NO: 268132 - DNA, 996 bp, Artificial Sequence
  derived and/or modified sequence
atggcttctgccctctggacggtgcttcccagtaggatgagtctccggtctttgaagtggtcactgttactcctcagcttgctgtcctttttcgtgatgtggtacctgagcctgccccactataacgtgattgaaagggttaattggatgtacttttacgaatacgagcccatctataggcaagattttcactttaccctacgtgagcactcaaattgctcccatcagaacccattcctggtgattcttgttacgtctcaccccagtgatgtgaaggccaggcaggccatccgcgttacttggggagagaaaaagtcttggtgggggtatgaagttctgaccttctttctgctgggccaagaggccgagaaggaggacaagatgctggcactgtcactggaggatgagcacctgttatacggagacatcattagacaggacttccttgatacctacaataatctgaccttgaaaaccattatggcgttcaggtgggtcactgaattttgccctaatgccaaatatgttatgaagaccgacaccgacgtttttataaacacaggaaacctggtgaagtatctgttaaatttgaaccatagcgaaaaatttttcaccgggtacccactcatagacaactactcataccgcggtttctatcaaaaaacacacatttcctatcaggagtacccattcaaagttttccctccatactgcagcggactgggatatattatgtcccgtgatctcgtgcccagaatatatgagatgatgggccatgtgaaaccgataaaattcgaggatgtctatgtaggcatatgcctgaacttgttgaaagtcaacattcacatacctgaggacacaaacctgttcttcctctatcgaattcatctagatgtgtgccagttgaggcgagtcatagcagctcatggcttcagctccaaggaaatcatcactttctggcaggttatgctgaggaatactacatgtcactactag

SEQ ID NO: 268133 - DNA, 276 bp, Artificial Sequence
  derived and/or modified sequence
atggcaagtgcactgtggaccgtgctaccaagtcgcatgtccctccgttccctgaagtggtctttgttactcctatccctcttgtccttttttgtgatgtggtatctctccctaccccattacaatgttatcgagcgcgtgaattggatgtatttttacgaaattcacttagacgtgtgtcagctccggcgagtaatcgctgcgcacgggttctcttccaaagagatcatcacgttctggcaagttatgctgcggaacaccacttgtcactactag

SEQ ID NO: 268134 - DNA, 336 bp, Artificial Sequence
  derived and/or modified sequence
atggcctccgccctttggaccgtgttgccctcccgcatgtccctccgcagtctgaaatggtccttacttctcctgagcctactgtccttctttgtcatgtggtatctgtctctgccacactataatgtgattgaacgggttaactggatgtatttctatgaatacgaacctatttatcgccaagactttcactttaccctcagggaacatagtaactgctctcatcagaatccctttctggttattctggtcacctcacaccctagcgatgtgaaagcgaggcaggcaatacgtgttacatggggggaaaagaaatcctggtggggctacgagtag

SEQ ID NO: 268135 - DNA, 177 bp, Artificial Sequence
  derived and/or modified sequence
atggcctctgccctgtggacggtcttgcctagtagaatgagcctgcgttccctcaaatggtccctgttactcctgtctctcttgtcattttttgtcatgtggtatctgtcactgccacattataatgtgattgagcgtgtaaattggatgtatttctatgaatacgagcctatctag

SEQ ID NO: 268136 - DNA, 996 bp, Artificial Sequence
  derived and/or modified sequence
atggcttccgccctgtggaccgtgttgccaagccggatgtccctccgcagcctcaaatggtcacttctgctcctatctctgctgagcttctttgtgatgtggtatctgtccctaccccactacaatgtgattgaacgggttaattggatgtatttctacgagtacgaacctatctataggcaggatttccacttcacactgagagagcattcaaactgcagccatcagaaccctttcctagttatccttgtgactagccatccatccgatgtgaaggcccgtcaagccattcgggtgacctggggtgaaaagaagtcctggtggggctatgaggtccttacctttttcttgctgggccaggaagccgaaaaggaagacaagatgctggccctgagcctggaagatgagcatttattatacggagacattatacgacaggactttctggacacctataacaacctgaccctaaagactatcatggcttttcgatgggtcactgagttctgtcctaacgctaaatatgtaatgaagactgacaccgacgtttttatcaacacaggcaacttggtgaagtacctgctgaatctgaaccactctgagaagttcttcaccggctatcccttaatcgacaactattcttaccggggattctaccagaaaactcacatcagctaccaagagtacccattcaaggttttccccccttactgcagcggcttggggtacatcatgtcccgtgatctggtgcctagaatatacgagatgatgggacacgtgaaacccattaaatttgaggatgtctacgtcgggatctgtctcaatttgctaaaggtgaacattcatatccctgaagatactaaccttttttttctgtacaggattcatctggacgtatgtcagctgagacgggtaatcgcagcacacggcttctcatccaaggaaatcatcaccttttggcaggtgatgctgagaaacactacttgccactattag

SEQ ID NO: 268137 - DNA, 126 bp, Artificial Sequence
  derived and/or modified sequence
atggcctctgcgttgtggaccgtgctgccttccagaatgagcttacgatcactgaaatggtccctgctgctcctgagtctcctttctttcttcgttatgtggtacctctctctacctcactactag

SEQ ID NO: 268138 - DNA, 996 bp, Artificial Sequence
  derived and/or modified sequence
atggccagcgctctgtggacagtcctgccttcacgcatgagtttgaggtccctgaaatggtccctgctgctgctgtcactcctgtctttcttcgttatgtggtatctgagtctcccacactacaacgtgatagagcgggtgaattggatgtacttttacgagtacgagcctatctataggcaggatttccacttcacactgcgggaacactctaactgttctcaccagaatcccttcctggtcatcttggtgacttcccacccatcagatgttaaggccagacaggccattagggtgacctggggcgagaagaagagctggtggggatatgaggtgttaacattttttctactggggcaggaagccgagaaggaggataaaatgctggctctcagcctggaggacgaacacctcttgtacggggacattatccggcaagacttcttagacacttataataatctgacacttaagaccataatggcatttaggtgggtgacagagttctgtccgaacgcgaagtatgttatgaagactgacacggatgtgtttattaatactggcaacctagttaagtacctccttaacctgaaccactccgagaaatttttcacaggatacccgctaattgataattattcatatcggggtttctaccagaagacacacatatcataccaggagtacccttttaaagtgtttccaccatactgttcaggactcggatacatcatgagcagggacttagtgcctcggatctacgagatgatggggcacgtgaagccaattaagttcgaggatgtctatgtggggatctgtctcaatctcctcaaagttaatattcacattcccgaggataccaacttattttttctatatcgtatacacctggatgtctgccaattacgaagggtgatcgctgcccatggcttctcatcaaaggagatcataacattctggcaggtgatgctacgcaacaccacctgccactactag

SEQ ID NO: 268139 - DNA, 198 bp, Artificial Sequence
  derived and/or modified sequence
atggcctccgctctgtggacggttctcccaagccggatgtctttacgctctttgaagtggtctctgttgttactgtccctattatcctttttcgtcatgtggtatctaagtctccctcattataacgtgattgagcgcgtgaactggatgtatttttatgagtacgaacctatttatagacaggatttccatttttag

SEQ ID NO: 268140 - DNA, 90 bp, Artificial Sequence
  derived and/or modified sequence
atggcctccgctttgtggacggtcctgccttcccgtatgtcgctgaggtcactgaaatggtcgctgctcctgctctctctcctttcatag

SEQ ID NO: 268141 - DNA, 165 bp, Artificial Sequence
  derived and/or modified sequence
atggcttcagcactgtggaccgtccttccttccagaatgtcacttcgatctctaaagtggtccttgctgctccttagcttgctttccttcttcgttatgtggtacctatccctccctcactataatgtgatcgagagggtgaactggatgtacttctacgagtag

SEQ ID NO: 268142 - DNA, 3270 bp, Artificial Sequence
  derived and/or modified sequence
gtgcggatgcggggaggctgcgtgtgtgcgcagggagagaacgccggccaccttcccgcttccgagctgggtgcgcgccgagcacaggagattgcctgcgtttaggaggtggctgcgttgtgggaaaagctatcaaggaagaaattgccaaaccatgtctttttttctgttttcagagtagttcacaacagatctgagtgttttaattaagcatggaatacagaaaacaacaaaaaacttaagctttaatttcatctggaattccacagttttcttagctccctggacccggttgacctgttggctcttcccgctggctgctctatcacgtggtgctctccgactactcaccccgagtgtaaagaaccttcggctcgcgtgcttctgagctgctgtggatggcctcggctctctggactgtccttccgagtaggatgtcactgagatccctcaaatggagcctcctgctgctgtcactcctgagtttctttgtgatgtggtacctcagccttccccactacaatgtgatagaacgcgtgaactggatgtacttctatgagtatgagccgatttacagacaagactttcacttcacacttcgagagcattcaaactgctctcatcaaaatccatttctggtcattctggtgacctcccacccttcagatgtgaaagccaggcaggccattagagttacttggggtgaaaaaaagtcttggtggggatatgaggttcttacatttttcttattaggccaagaggctgaaaaggaagacaaaatgttggcattgtccttagaggatgaacaccttctttatggtgacataatccgacaagattttttagacacatataataacctgaccttgaaaaccattatggcattcaggtgggtaactgagttttgccccaatgccaagtacgtaatgaagacagacactgatgttttcatcaatactggcaatttagtgaagtatcttttaaacctaaaccactcagagaagtttttcacaggttatcctctaattgataattattcctatagaggattttaccaaaaaacccatatttcttaccaggagtatcctttcaaggtgttccctccatactgcagtgggttgggttatataatgtccagagatttggtgccaaggatctatgaaatgatgggtcacgtaaaacccatcaagtttgaagatgtttatgtcgggatctgtttgaatttattaaaagtgaacattcatattccagaagacacaaatcttttctttctatatagaatccatttggatgtctgtcaactgagacgtgtgattgcagcccatggcttttcttccaaggagatcatcactttttggcaggtcatgctaaggaacaccacatgccattattaacttcacattctacaaaaagcctagaaggacaggatactttgtggaaagtgttaaataaagtaggtactgtggaaaattcatggggaggtcagtgtgctggcttacactgaactgaaactcatgaaaaacccagactggagactggagggttacacttgtgatttattagtcaggcccttcaaagatgatatgtggaggaattaaatataaaggaattggaggtttttgctaaagaaattaataggaccaaacaatttggacatgtcattctgtagactagaatttcttaaaagggtgttactgagttataagctcactaggctgtaaaaacaaaacaatgtagagttttatttattgaacaatgtagtcacttgaaggttttgtgtatatcttatgtggattaccaatttaaaaatatatgtagttctgtgtcaaaaaacttcttcactgaagttatactgaacaaaattttacctgtttttggtcatttataaagtacttcaagatgttgcagtatttcacagttattattatttaaaattacttcaactttgtgtttttaaatgttttgacgatttcaatacaagataaaaaggatagtgaatcattctttacatgcaaacattttccagttacttaactgatcagtttattattgatacatcactccattaatgtaaagtcataggtcattattgcatatcagtaatctcttggactttgttaaatattttactgtggtaatatagagaagaattaaagcaagaaaatctgaagtattgtcttgtttttaaaaaatacagttcctagtgtttttagaagtcacttaatttgtctcatttttccacctggaaattaggaataatgtagaatgcaaggcagtaatttccttttggaaaggactctgaaggcagaaaagaagggagagaacctcatgggcagaatattataaaaagagtgtcatattccagcatttgaattggaaagagaagagtgaagatccaagttgcattattaatctgccctgtgttttttccttttaacaatcagtttgagctgctgctgttatgagtttctcatcaagatgaaagccctaatatgtaaagtcaaatccgatttaaattttgtgcttttatagaaagaaatttcttcatagacgtggtgatatatcatttgttggacctgctaatagtaggtcaaaggggagcactccttgccccctgttcctgggtttatgcagttttctttttagagtttatatagggcaagtggttctttttctctgaattacaggatggaaaaaggtcatatcctttgtcaggaaatataaacttgaaagtatgtagtcagctcttgtaatactcatatttatgattgtcctatatgaaaaacaacttcagttaaaactataatgtgtgattctgtataacaaggtgatgtctgtttcccagggctcagacctaatccagttataataaaatcaattaaatgaaatattctatagaatcgatctatgcccttgttaatctccatccatataggagtcacgttctttaagacagatggtggtagttatttttgtggcatggttagatttgactggttttgcagaagattacagttatgtactgcataatgacatatacaatagtggtcccataaaattataatggagcagaaaatctattgcctcatgatgttttagccgttttaatgtcatagcctagtgcattactcacgtgtctgtggagatgctggtgtaaacaaacctactacactgccagttgtataaaagtacagcacattcagttatgtacagtatgtaatactgataatgacaataaatgacaccggtttgtgtatttactttttataa

SEQ ID NO: 268143 - DNA, 3221 bp, Artificial Sequence
  derived and/or modified sequence
ttccggccgcggccctggcgcgtggtctgcgcgcgcccggccgtgcgtgcggatgcggggaggctgcgtgtgtgcgcagggagagaacgccggccaccttcccgcttccgagctgggtgcgcgccgagcacaggagattgcctgcgtttaggaggtggctgcgttgtgggaaaagctatcaaggaagaaattgccaaaccatgtctttttttctgttttcagagtagttcacaacagatctgagtgttttaattaagcatggaatacagaaaacaacaaaaaacttaagctttaatttcatctggaattccacagaaccttcggctcgcgtgcttctgagctgctgtggatggcctcggctctctggactgtccttccgagtaggatgtcactgagatccctcaaatggagcctcctgctgctgtcactcctgagtttctttgtgatgtggtacctcagccttccccactacaatgtgatagaacgcgtgaactggatgtacttctatgagtatgagccgatttacagacaagactttcacttcacacttcgagagcattcaaactgctctcatcaaaatccatttctggtcattctggtgacctcccacccttcagatgtgaaagccaggcaggccattagagttacttggggtgaaaaaaagtcttggtggggatatgaggttcttacatttttcttattaggccaagaggctgaaaaggaagacaaaatgttggcattgtccttagaggatgaacaccttctttatggtgacataatccgacaagattttttagacacatataataacctgaccttgaaaaccattatggcattcaggtgggtaactgagttttgccccaatgccaagtacgtaatgaagacagacactgatgttttcatcaatactggcaatttagtgaagtatcttttaaacctaaaccactcagagaagtttttcacaggttatcctctaattgataattattcctatagaggattttaccaaaaaacccatatttcttaccaggagtatcctttcaaggtgttccctccatactgcagtgggttgggttatataatgtccagagatttggtgccaaggatctatgaaatgatgggtcacgtaaaacccatcaagtttgaagatgtttatgtcgggatctgtttgaatttattaaaagtgaacattcatattccagaagacacaaatcttttctttctatatagaatccatttggatgtctgtcaactgagacgtgtgattgcagcccatggcttttcttccaaggagatcatcactttttggcaggtcatgctaaggaacaccacatgccattattaacttcacattctacaaaaagcctagaaggacaggatactttgtggaaagtgttaaataaagtaggtactgtggaaaattcatggggaggtcagtgtgctggcttacactgaactgaaactcatgaaaaacccagactggagactggagggttacacttgtgatttattagtcaggcccttcaaagatgatatgtggaggaattaaatataaaggaattggaggtttttgctaaagaaattaataggaccaaacaatttggacatgtcattctgtagactagaatttcttaaaagggtgttactgagttataagctcactaggctgtaaaaacaaaacaatgtagagttttatttattgaacaatgtagtcacttgaaggttttgtgtatatcttatgtggattaccaatttaaaaatatatgtagttctgtgtcaaaaaacttcttcactgaagttatactgaacaaaattttacctgtttttggtcatttataaagtacttcaagatgttgcagtatttcacagttattattatttaaaattacttcaactttgtgtttttaaatgttttgacgatttcaatacaagataaaaaggatagtgaatcattctttacatgcaaacattttccagttacttaactgatcagtttattattgatacatcactccattaatgtaaagtcataggtcattattgcatatcagtaatctcttggactttgttaaatattttactgtggtaatatagagaagaattaaagcaagaaaatctgaagtattgtcttgtttttaaaaaatacagttcctagtgtttttagaagtcacttaatttgtctcatttttccacctggaaattaggaataatgtagaatgcaaggcagtaatttccttttggaaaggactctgaaggcagaaaagaagggagagaacctcatgggcagaatattataaaaagagtgtcatattccagcatttgaattggaaagagaagagtgaagatccaagttgcattattaatctgccctgtgttttttccttttaacaatcagtttgagctgctgctgttatgagtttctcatcaagatgaaagccctaatatgtaaagtcaaatccgatttaaattttgtgcttttatagaaagaaatttcttcatagacgtggtgatatatcatttgttggacctgctaatagtaggtcaaaggggagcactccttgccccctgttcctgggtttatgcagttttctttttagagtttatatagggcaagtggttctttttctctgaattacaggatggaaaaaggtcatatcctttgtcaggaaatataaacttgaaagtatgtagtcagctcttgtaatactcatatttatgattgtcctatatgaaaaacaacttcagttaaaactataatgtgtgattctgtataacaaggtgatgtctgtttcccagggctcagacctaatccagttataataaaatcaattaaatgaaatattctatagaatcgatctatgcccttgttaatctccatccatataggagtcacgttctttaagacagatggtggtagttatttttgtggcatggttagatttgactggttttgcagaagattacagttatgtactgcataatgacatatacaatagtggtcccataaaattataatggagcagaaaatctattgcctcatgatgttttagccgttttaatgtcatagcctagtgcattactcacgtgtctgtggagatgctggtgtaaacaaacctactacactgccagttgtataaaagtacagcacattcagttatgtacagtatgtaatactgataatgacaataaatgacaccggtttgtgtatttactttttataa

SEQ ID NO: 268144 - DNA, 3437 bp, Artificial Sequence
  derived and/or modified sequence
gcttccggccgcggccctggcgcgtggtctgcgcgcgcccggccgtgcgtgcggatgcggggaggctgcgtgtgtgcgcagggagagaacgccggccaccttcccgcttccgagctgggtgcgcgccgagcacaggagattgcctgcgtttaggaggtggctgcgttgtgggaaaagctatcaaggaagaaattgccaaaccatgtctttttttctgttttcagagtagttcacaacagatctgagtgttttaattaagcatggaatacagaaaacaacaaaaaacttaagctttaatttcatctggaattccacagttttcttagctccctggacccggttgacctgttggctcttcccgctggctgctctatcacgtggtgctctccgactactcaccccgagtgtaaagtcttgctgctctgttgcccaggctggagtacagtggcaggatctcagctcactgcaatctccgtctctcaggtttaagcagttctcctgcctcagcctcccaagtaggtgggactacagaaccttcggctcgcgtgcttctgagctgctgtggatggcctcggctctctggactgtccttccgagtaggatgtcactgagatccctcaaatggagcctcctgctgctgtcactcctgagtttctttgtgatgtggtacctcagccttccccactacaatgtgatagaacgcgtgaactggatgtacttctatgagtatgagccgatttacagacaagactttcacttcacacttcgagagcattcaaactgctctcatcaaaatccatttctggtcattctggtgacctcccacccttcagatgtgaaagccaggcaggccattagagttacttggggtgaaaaaaagtcttggtggggatatgaggttcttacatttttcttattaggccaagaggctgaaaaggaagacaaaatgttggcattgtccttagaggatgaacaccttctttatggtgacataatccgacaagattttttagacacatataataacctgaccttgaaaaccattatggcattcaggtgggtaactgagttttgccccaatgccaagtacgtaatgaagacagacactgatgttttcatcaatactggcaatttagtgaagtatcttttaaacctaaaccactcagagaagtttttcacaggttatcctctaattgataattattcctatagaggattttaccaaaaaacccatatttcttaccaggagtatcctttcaaggtgttccctccatactgcagtgggttgggttatataatgtccagagatttggtgccaaggatctatgaaatgatgggtcacgtaaaacccatcaagtttgaagatgtttatgtcgggatctgtttgaatttattaaaagtgaacattcatattccagaagacacaaatcttttctttctatatagaatccatttggatgtctgtcaactgagacgtgtgattgcagcccatggcttttcttccaaggagatcatcactttttggcaggtcatgctaaggaacaccacatgccattattaacttcacattctacaaaaagcctagaaggacaggatactttgtggaaagtgttaaataaagtaggtactgtggaaaattcatggggaggtcagtgtgctggcttacactgaactgaaactcatgaaaaacccagactggagactggagggttacacttgtgatttattagtcaggcccttcaaagatgatatgtggaggaattaaatataaaggaattggaggtttttgctaaagaaattaataggaccaaacaatttggacatgtcattctgtagactagaatttcttaaaagggtgttactgagttataagctcactaggctgtaaaaacaaaacaatgtagagttttatttattgaacaatgtagtcacttgaaggttttgtgtatatcttatgtggattaccaatttaaaaatatatgtagttctgtgtcaaaaaacttcttcactgaagttatactgaacaaaattttacctgtttttggtcatttataaagtacttcaagatgttgcagtatttcacagttattattatttaaaattacttcaactttgtgtttttaaatgttttgacgatttcaatacaagataaaaaggatagtgaatcattctttacatgcaaacattttccagttacttaactgatcagtttattattgatacatcactccattaatgtaaagtcataggtcattattgcatatcagtaatctcttggactttgttaaatattttactgtggtaatatagagaagaattaaagcaagaaaatctgaagtattgtcttgtttttaaaaaatacagttcctagtgtttttagaagtcacttaatttgtctcatttttccacctggaaattaggaataatgtagaatgcaaggcagtaatttccttttggaaaggactctgaaggcagaaaagaagggagagaacctcatgggcagaatattataaaaagagtgtcatattccagcatttgaattggaaagagaagagtgaagatccaagttgcattattaatctgccctgtgttttttccttttaacaatcagtttgagctgctgctgttatgagtttctcatcaagatgaaagccctaatatgtaaagtcaaatccgatttaaattttgtgcttttatagaaagaaatttcttcatagacgtggtgatatatcatttgttggacctgctaatagtaggtcaaaggggagcactccttgccccctgttcctgggtttatgcagttttctttttagagtttatatagggcaagtggttctttttctctgaattacaggatggaaaaaggtcatatcctttgtcaggaaatataaacttgaaagtatgtagtcagctcttgtaatactcatatttatgattgtcctatatgaaaaacaacttcagttaaaactataatgtgtgattctgtataacaaggtgatgtctgtttcccagggctcagacctaatccagttataataaaatcaattaaatgaaatattctatagaatcgatctatgcccttgttaatctccatccatataggagtcacgttctttaagacagatggtggtagttatttttgtggcatggttagatttgactggttttgcagaagattacagttatgtactgcataatgacatatacaatagtggtcccataaaattataatggagcagaaaatctattgcctcatgatgttttagccgttttaatgtcatagcctagtgcattactcacgtgtctgtggagatgctggtgtaaacaaacctactacactgccagttgtataaaagtacagcacattcagttatgtacagtatgtaatactgataatgacaataaatgacaccggtttgtgtatttactttttataa

SEQ ID NO: 268145 - DNA, 3606 bp, Artificial Sequence
  derived and/or modified sequence
gcgtggtctgcgcgcgcccggccgtgcgtgcggatgcggggaggctgcgtgtgtgcgcagggagagaacgccggccaccttcccgcttccgagctgggtgcgcgccgagcacaggagggtgcaatacctgccttgcgtcgcccgtgccgctccagccaccgtcaaatccgggtagcgacccggggcgtttgcagcggtgccgaggaagaggacgggaacggtgttacgattgcctgcgtttaggaggtggctgcgttgtgggaaaagctatcaaggaagaaattgccaaaccatgtctttttttctgttttcagagtagttcacaacagatctgagtgttttaattaagcatggaatacagaaaacaacaaaaaacttaagctttaatttcatctggaattccacagagacaaggccactttatgtttcccaggctggactggaacccctgggctcaaatgatcctcctacctaagcctgcagagtagcgaggacttcagttttcttagctccctggacccggttgacctgttggctcttcccgctggctgctctatcacgtggtgctctccgactactcaccccgagtgtaaagtcttgctgctctgttgcccaggctggagtacagtggcaggatctcagctcactgcaatctccgtctctcaggtttaagcagttctcctgcctcagcctcccaagtaggtgggactacagaaccttcggctcgcgtgcttctgagctgctgtggatggcctcggctctctggactgtccttccgagtaggatgtcactgagatccctcaaatggagcctcctgctgctgtcactcctgagtttctttgtgatgtggtacctcagccttccccactacaatgtgatagaacgcgtgaactggatgtacttctatgagtatgagccgatttacagacaagactttcacttcacacttcgagagcattcaaactgctctcatcaaaatccatttctggtcattctggtgacctcccacccttcagatgtgaaagccaggcaggccattagagttacttggggtgaaaaaaagtcttggtggggatatgaggttcttacatttttcttattaggccaagaggctgaaaaggaagacaaaatgttggcattgtccttagaggatgaacaccttctttatggtgacataatccgacaagattttttagacacatataataacctgaccttgaaaaccattatggcattcaggtgggtaactgagttttgccccaatgccaagtacgtaatgaagacagacactgatgttttcatcaatactggcaatttagtgaagtatcttttaaacctaaaccactcagagaagtttttcacaggttatcctctaattgataattattcctatagaggattttaccaaaaaacccatatttcttaccaggagtatcctttcaaggtgttccctccatactgcagtgggttgggttatataatgtccagagatttggtgccaaggatctatgaaatgatgggtcacgtaaaacccatcaagtttgaagatgtttatgtcgggatctgtttgaatttattaaaagtgaacattcatattccagaagacacaaatcttttctttctatatagaatccatttggatgtctgtcaactgagacgtgtgattgcagcccatggcttttcttccaaggagatcatcactttttggcaggtcatgctaaggaacaccacatgccattattaacttcacattctacaaaaagcctagaaggacaggatactttgtggaaagtgttaaataaagtaggtactgtggaaaattcatggggaggtcagtgtgctggcttacactgaactgaaactcatgaaaaacccagactggagactggagggttacacttgtgatttattagtcaggcccttcaaagatgatatgtggaggaattaaatataaaggaattggaggtttttgctaaagaaattaataggaccaaacaatttggacatgtcattctgtagactagaatttcttaaaagggtgttactgagttataagctcactaggctgtaaaaacaaaacaatgtagagttttatttattgaacaatgtagtcacttgaaggttttgtgtatatcttatgtggattaccaatttaaaaatatatgtagttctgtgtcaaaaaacttcttcactgaagttatactgaacaaaattttacctgtttttggtcatttataaagtacttcaagatgttgcagtatttcacagttattattatttaaaattacttcaactttgtgtttttaaatgttttgacgatttcaatacaagataaaaaggatagtgaatcattctttacatgcaaacattttccagttacttaactgatcagtttattattgatacatcactccattaatgtaaagtcataggtcattattgcatatcagtaatctcttggactttgttaaatattttactgtggtaatatagagaagaattaaagcaagaaaatctgaagtattgtcttgtttttaaaaaatacagttcctagtgtttttagaagtcacttaatttgtctcatttttccacctggaaattaggaataatgtagaatgcaaggcagtaatttccttttggaaaggactctgaaggcagaaaagaagggagagaacctcatgggcagaatattataaaaagagtgtcatattccagcatttgaattggaaagagaagagtgaagatccaagttgcattattaatctgccctgtgttttttccttttaacaatcagtttgagctgctgctgttatgagtttctcatcaagatgaaagccctaatatgtaaagtcaaatccgatttaaattttgtgcttttatagaaagaaatttcttcatagacgtggtgatatatcatttgttggacctgctaatagtaggtcaaaggggagcactccttgccccctgttcctgggtttatgcagttttctttttagagtttatatagggcaagtggttctttttctctgaattacaggatggaaaaaggtcatatcctttgtcaggaaatataaacttgaaagtatgtagtcagctcttgtaatactcatatttatgattgtcctatatgaaaaacaacttcagttaaaactataatgtgtgattctgtataacaaggtgatgtctgtttcccagggctcagacctaatccagttataataaaatcaattaaatgaaatattctatagaatcgatctatgcccttgttaatctccatccatataggagtcacgttctttaagacagatggtggtagttatttttgtggcatggttagatttgactggttttgcagaagattacagttatgtactgcataatgacatatacaatagtggtcccataaaattataatggagcagaaaatctattgcctcatgatgttttagccgttttaatgtcatagcctagtgcattactcacgtgtctgtggagatgctggtgtaaacaaacctactacactgccagttgtataaaagtacagcacattcagttatgtacagtatgtaatactgataatgacaataaatgacaccggtttgtgta

SEQ ID NO: 268146 - DNA, 1107 bp, Artificial Sequence
  derived and/or modified sequence
ctctccgactactcaccccgagtgtaaagaaccttcggctcgcgtgcttctgagctgctgtggatggcctcggctctctggactgtccttccgagtaggatgtcactgagatccctcaaatggagcctcctgctgctgtcactcctgagtttctttgtgatgtggtacctcagccttccccactacaatgtgatagaacgcgtgaactggatgtacttctatgaaatccatttggatgtctgtcaactgagacgtgtgattgcagcccatggcttttcttccaaggagatcatcactttttggcaggtcatgctaaggaacaccacatgccattattaacttcacattctacaaaaagcctagaaggacaggatactttgtggaaagtgttaaataaagtaggtactgtggaaaattcatggggaggtcagtgtgctggcttacactgaactgaaactcatgaaaaacccagactggagactggagggttacacttgtgatttattagtcaggcccttcaaagatgatatgtggaggaattaaatataaaggaattggaggtttttgctaaagaaattaataggaccaaacaatttggacatgtcattctgtagactagaatttcttaaaagggtgttactgagttataagctcactaggctgtaaaaacaaaacaatgtagagttttatttattgaacaatgtagtcacttgaaggttttgtgtatatcttatgtggattaccaatttaaaaatatatgtagttctgtgtcaaaaaacttcttcactgaagttatactgaacaaaattttacctgtttttggtcatttataaagtacttcaagatgttgcagtatttcacagttattattatttaaaattacttcaactttgtgtttttaaatgttttgacgatttcaatacaagataaaaaggatagtgaatcattctttacatgcaaacattttccagttacttaactgatcagtttattattgatacatcactccattaatgtaaagtcataggtcattattgcatatcagtaatctcttggactttgttaaatattttactgtggtaatatagagaagaattaaagcaagaa

SEQ ID NO: 268147 - DNA, 914 bp, Artificial Sequence
  derived and/or modified sequence
gtgtgtgcgcagggagagaacgccggccaccttcccgcttccgagctgggtgcgcgccgagcacaggagggtgcaatacctgccttgcgtcgcccgtgccgctccagccaccgtcaaatccgggtagcgacccggggcgtttgcagcggtgccgaggaagaggacgggaacggtgttacgattgcctgcgtttaggaggtggctgcgttgtgggaaaagctatcaaggaagaaattgccaaaccatgtctttttttctgttttcagagtagttcacaacagatctgagtgttttaattaagcatggaatacagaaaacaacaaaaaacttaagctttaatttcatctggaattccacagagacaaggccactttatgtttcccaggctggactggaacccctgggctcaaatgatcctcctacctaagcctgcagagtagcgaggacttcagttttcttagctccctggacccggttgacctgttggctcttcccgctggctgctctatcacgtggtgctctccgactactcaccccgagtgtaaagaaccttcggctcgcgtgcttctgagctgctgtggatggcctcggctctctggactgtccttccgagtaggatgtcactgagatccctcaaatggagcctcctgctgctgtcactcctgagtttctttgtgatgtggtacctcagccttccccactacaatgtgatagaacgcgtgaactggatgtacttctatgagtatgagccgatttacagacaagactttcacttcacacttcgagagcattcaaactgctctcatcaaaatccatttctggtcattctggtgacctcccacccttcagatgtgaaagccaggcaggccattagagttacttggggtgaaaaaaagtcttggtggggatatgag

SEQ ID NO: 268148 - DNA, 572 bp, Artificial Sequence
  derived and/or modified sequence
tgcgcagggagagaacgccggccaccttcccgcttccgagctgggtgcgcgccgagcacaggagattgcctgcgtttaggaggtggctgcgttgtgggaaaagctatcaaggaagaaattgccaaaccatgtctttttttctgttttcagagtagttcacaacagatctgagtgttttaattaagcatggaatacagaaaacaacaaaaaacttaagctttaatttcatctggaattccacagtcttgctgctctgttgcccaggctggagtacagtggcaggatctcagctcactgcaatctccgtctctcaggtttaagcagttctcctgcctcagcctcccaagtaggtgggactacagaaccttcggctcgcgtgcttctgagctgctgtggatggcctcggctctctggactgtccttccgagtaggatgtcactgagatccctcaaatggagcctcctgctgctgtcactcctgagtttctttgtgatgtggtacctcagccttccccactacaatgtgatagaacgcgtgaactggatgtacttctatgagtatgagccgattta

SEQ ID NO: 268149 - DNA, 2123 bp, Artificial Sequence
  derived and/or modified sequence
cacttttccaagcagtaaggaatgatgccatcctcaagtacggattgcctgcgtttaggaggtggctgcgttgtgggaaaagctatcaaggaagaaattgccaaaccatgtctttttttctgttttcagagtagttcacaacagatctgagtgttttaattaagcatggaatacagaaaacaacaaaaaacttaagctttaatttcatctggaattccacagttttcttagctccctggacccggttgacctgttggctcttcccgctggctgctctatcacgtggtgctctccgactactcaccccgagtgtaaagaaccttcggctcgcgtgcttctgagctgctgtggatggcctcggctctctggactgtccttccgagtaggatgtcactgagatccctcaaatggagcctcctgctgctgtcactcctgagtttctttgtgatgtggtacctcagccttccccactacaatgtgatagaacgcgtgaactggatgtacttctatgagtatgagccgatttacagacaagactttcacttcacacttcgagagcattcaaactgctctcatcaaaatccatttctggtcattctggtgacctcccacccttcagatgtgaaagccaggcaggccattagagttacttggggtgaaaaaaagtcttggtggggatatgaggttcttacatttttcttattaggccaagaggctgaaaaggaagacaaaatgttggcattgtccttagaggatgaacaccttctttatggtgacataatccgacaagattttttagacacatataataacctgaccttgaaaaccattatggcattcaggtgggtaactgagttttgccccaatgccaagtacgtaatgaagacagacactgatgttttcatcaatactggcaatttagtgaagtatcttttaaacctaaaccactcagagaagtttttcacaggttatcctctaattgataattattcctatagaggattttaccaaaaaacccatatttcttaccaggagtatcctttcaaggtgttccctccatactgcagtgggttgggttatataatgtccagagatttggtgccaaggatctatgaaatgatgggtcacgtaaaacccatcaagtttgaagatgtttatgtcgggatctgtttgaatttattaaaagtgaacattcatattccagaagacacaaatcttttctttctatatagaatccatttggatgtctgtcaactgagacgtgtgattgcagcccatggcttttcttccaaggagatcatcactttttggcaggtcatgctaaggaacaccacatgccattattaacttcacattctacaaaaagcctagaaggacaggatactttgtggaaagtgttaaataaagtaggtactgtggaaaattcatggggaggtcagtgtgctggcttacactgaactgaaactcatgaaaaacccagactggagactggagggttacacttgtgatttattagtcaggcccttcaaagatgatatgtggaggaattaaatataaaggaattggaggtttttgctaaagaaattaataggaccaaacaatttggacatgtcattctgtagactagaatttcttaaaagggtgttactgagttataagctcactaggctgtaaaaacaaaacaatgtagagttttatttattgaacaatgtagtcacttgaaggttttgtgtatatcttatgtggattaccaatttaaaaatatatgtagttctgtgtcaaaaaacttcttcactgaagttatactgaacaaaattttacctgtttttggtcatttataaagtacttcaagatgttgcagtatttcacagttattattatttaaaattacttcaactttgtgtttttaaatgttttgacgatttcaatacaagataaaaaggatagtgaatcattctttacatgcaaacattttccagttacttaactgatcagtttattattgatacatcactccattaatgtaaagtcataggtcattattgcatatcagtaatctcttggactttgttaaatattttactgtggtaatatagagaagaattaaagcaagaaaatctgaa

SEQ ID NO: 268150 - DNA, 552 bp, Artificial Sequence
  derived and/or modified sequence
gagctgggtgcgcgccgagcacaggagattgcctgcgtttaggaggtggctgcgttgtgggaaaagctatcaaggaagaaattgccaaaccatgtctttttttctgttttcagagtagttcacaacagatctgagtgttttaattaagcatggaatacagaaaacaacaaaaaacttaagctttaatttcatctggaattccacagagacaaggccactttatgtttcccaggctggactggaacccctgggctcaaatgatcctcctacctaagcctgcagagtagcgaggacttcagttttcttagctccctggacccggttgacctgttggctcttcccgctggctgctctatcacgtggtgctctccgactactcaccccgagtgtaaagaaccttcggctcgcgtgcttctgagctgctgtggatggcctcggctctctggactgtccttccgagtaggatgtcactgagatccctcaaatggagcctcctgctgctgtcactcctgagtttctttgtgatgtggtacctcagccttccccactaca

SEQ ID NO: 268151 - DNA, 1660 bp, Artificial Sequence
  derived and/or modified sequence
gcgccgtcctcggaaacgcctagaccccggcagctaggccgggaggcaccgcccactcctctagagcggagcgtggcccaggttgagccgccgcaccgtgggtctcgggtctcggtgacgagcagctgcccgcctccggtgagcgcgggagaaggggcccagtggggcagtgggcgacgcggagggcccaggcccaggccgcggccgcgccgcatccgctggttgtccaccttgccttgccccagggtgcaatacctgccttgcgtcgcccgtgccgctccagccaccgtcaaatccgggtagcgacccggggcgtttgcagcggtgccgaggaagaggacgggaacggtgttacgattgcctgcgtttaggaggtggctgcgttgtgggaaaagctatcaaggaagaaattgccaaaccatgtctttttttctgttttcagagtagttcacaacagatctgagtgttttaattaagcatggaatacagaaaacaacaaaaaacttaagctttaatttcatctggaattccacagttttcttagctccctggacccggttgacctgttggctcttcccgctggctgctctatcacgtggtgctctccgactactcaccccgagtgtaaagaaccttcggctcgcgtgcttctgagctgctgtggatggcctcggctctctggactgtccttccgagtaggatgtcactgagatccctcaaatggagcctcctgctgctgtcactcctgagtttctttgtgatgtggtacctcagccttccccactacaatgtgatagaacgcgtgaactggatgtacttctatgagtatgagccgatttacagacaagactttcacttcacacttcgagagcattcaaactgctctcatcaaaatccatttctggtcattctggtgacctcccacccttcagatgtgaaagccaggcaggccattagagttacttggggtgaaaaaaagtcttggtggggatatgaggttcttacatttttcttattaggccaagaggctgaaaaggaagacaaaatgttggcattgtccttagaggatgaacaccttctttatggtgacataatccgacaagattttttagacacatataataacctgaccttgaaaaccattatggcattcaggtgggtaactgagttttgccccaatgccaagtacgtaatgaagacagacactgatgttttcatcaatactggcaatttagtgaagtatcttttaaacctaaaccactcagagaagtttttcacaggttatcctctaattgataattattcctatagaggattttaccaaaaaacccatatttcttaccaggagtatcctttcaaggtgttccctccatactgcagtgggttgggttatataatgtccagagatttggtgccaaggatctatgaaatgatgggtcacgtaaaacccatcaagtttgaagatgtttatgtcgggatctgtttgaatttattaaaagtgaacattcatattccagaagacacaaatcttttctttctatatagaatccatttggatgtctgtcaactgagacgtgtgattgcagcccatggcttttcttccaaggagatcatcactttttggcaggtcatgctaaggaacaccacatgccattattaa

SEQ ID NO: 268152 - DNA, 662 bp, Artificial Sequence
  derived and/or modified sequence
agagaacgccggccaccttcccgcttccgagctgggtgcgcgccgagcacaggagattgcctgcgtttaggaggtggctgcgttgtgggaaaagctatcaaggaagaaattgccaaaccatgtctttttttctgttttcagagtagttcacaacagatctgagtgttttaattaagcatggaatacagaaaacaacaaaaaacttaagctttaatttcatctggaattccacagttttcttagctccctggacccggttgacctgttggctcttcccgctggctgctctatcacgtggtgctctccgactactcaccccgagtgtaaagtcttgctgctctgttgcccaggctggagtacagtggcaggatctcagctcactgcaatctccgtctctcaggtttaagcagttctcctgcctcagcctcccaaaaccttcggctcgcgtgcttctgagctgctgtggatggcctcggctctctggactgtccttccgagtaggatgtcactgagatccctcaaatggagcctcctgctgctgtcactcctgagtttctttgtgatgtggtacctcagccttccccactacaatgtgatagaacgcgtgaactggatgtacttctatgagtatgagccgatttacagacaagactttcacttca

SEQ ID NO: 268153 - protein, 22 aa, Artificial Sequence
  derived and/or modified sequence
MLRGTMTAWRGMRPEVTLACLL

SEQ ID NO: 268154 - protein, 85 aa, Artificial Sequence
  derived and/or modified sequence
MLRGTMTAWRGMRPEVTLACLLLATAGCFADLNEVPQVTVQPASTVQKPGGTVILGCVVEPPRMNVTWRLNGKELNGSDDALGVL

SEQ ID NO: 268155 - protein, 32 aa, Artificial Sequence
  derived and/or modified sequence
MLRGTMTAWRGMRPEVTLACLLLATAGCFADL

SEQ ID NO: 268156 - protein, 87 aa, Artificial Sequence
  derived and/or modified sequence
MKPTGTDPRILSIAAEVAKSPEQNVPVILLKLKEIINITPLGSSELKKIKQDIYCYDLIQYCLLVLSQDYSRIQGGWTTISQLTQIL

SEQ ID NO: 268157 - DNA, 264 bp, Artificial Sequence
  derived and/or modified sequence
atgaaacccaccggaactgaccctaggattttgtcaatcgccgcagaagttgccaagtctcctgagcagaacgtgcctgtcatattattaaagctgaaggaaatcataaatatcactcctctgggaagcagcgagcttaaaaaaataaagcaagacatctattgctacgacttaatccagtattgcctgctcgtgttgtcccaggactactcgcgcattcagggagggtggacaacaatctcacagctgactcaaatcctgtag

SEQ ID NO: 268158 - DNA, 602 bp, Artificial Sequence
  derived and/or modified sequence
cgcgtcgcgacgcacgctgccccggaaggccgcggcgctgtagtgcggcgtgggagccccaggttctttagtggaagaacgcgaagcgaggatgagtgatccgtggaggcagtaacaggcgcggcgagggagaagtgattcccgaagaatcaaggctgggccggacccggtggcctggcaacagggtagtagccttaaaatagataaataattgtctttttgtgtcaaatttcatgaatttaatgtaaagatgggagaagtgttgaattataggagaaacactcgagaaagtttacagatggtttccataacaggtggtttttcagggtaataagagaaatgaagccaacaggtacagacccaaggatcttatctatagctgctgaagttgcaaaaagccctgagcagaatgtccctgttatactgttgaagttaaaagaaataataaacatcacacctttaggaagctcagagttgaagaaaatcaaacaagatatatattgttatgatctcattcaatattgcctcttggtcctcagtcaagattattctcgaatccagggtggttggactacaatttcccagcttacacagatattaag

SEQ ID NO: 268159 - DNA, 264 bp, Artificial Sequence
  derived and/or modified sequence
atgaagcccaccggcacagacccccgcatcctgagcattgctgctgaggtggccaagagccctgagcagaatgtgcctgtgatcctgctgaagctgaaggagatcatcaacatcacccccctgggcagcagcgagctgaagaagatcaagcaggacatctactgctatgacctgatccagtactgcctgctggtgctgagccaggactacagccgcatccagggcggctggaccaccatcagccagctgacccagatcctgtag

SEQ ID NO: 268160 - DNA, 264 bp, Artificial Sequence
  derived and/or modified sequence
atgaagcccaccggcaccgacccccggatcctgagcatcgccgccgaggtcgccaaaagccctgagcagaacgtgcccgtgatccttcttaagctgaaggaaattatcaacattacgcctctgggctcatccgaactgaagaaaattaagcaggatatttactgctacgaccttatccaatattgtctccttgtgttatcccaagattacagtaggatccagggcgggtggacgaccatctcccagcttacccagattctgtag

SEQ ID NO: 268161 - DNA, 264 bp, Artificial Sequence
  derived and/or modified sequence
atgaaaccgaccggcacagacccccgaattctctccatagctgccgaggtggccaagtccccagagcagaatgtgccggttatcctgcttaaactcaaggagatcataaacatcacacctttagggtccagcgaactgaaaaagatcaagcaagacatttactgttacgatctcatacagtactgcttgttggtattgtctcaggactacagtaggattcaggggggatggactactattagccagctgacacagatcctgtag

SEQ ID NO: 268162 - DNA, 264 bp, Artificial Sequence
  derived and/or modified sequence
atgaagcccaccggcaccgaccccagaatcctgagcatcgccgccgaggtggccaagagccccgagcagaacgtgcccgtgatcctgctgaagctgaaggagatcatcaacatcacccccctgggcagcagcgagctgaagaagatcaagcaggacatctactgctacgacctgatccagtactgcctgctggtgctgagccaggactacagcagaatccagggcggctggaccaccatcagccagctgacccagatcctgtag

SEQ ID NO: 268163 - protein, 221 aa, Artificial Sequence
  derived and/or modified sequence
MSLQVLNDKNVSNEKNTENCDFLFSPPEVTGRSSVLRVSQKENVPPKNLAKAMKVTFQTPLRDPQTHRILSPSMASKLEAPFTQDDTLGLENSHPVWTQKENQQLIKEVDAKTTHGILQKPVEADTDLLGDASPAFGSGSSSESGPGALADLDCSSSSQSPGSSENQMVSPGKVSGSPEQAVEENLSSYSLDRRVTPASETLEDPCRTESQHKAETPHGAE

SEQ ID NO: 268164 - protein, 145 aa, Artificial Sequence
  derived and/or modified sequence
MSLQVLNDKNVSNEKNTENCDFLFSPPEVTGRSSVLRVSQKENVPPKNLAKAMKVTFQTPLRDPQTHRILSPSMASKLEAPFTQDDTLGLENSHPVWTQKEKAAAFSLSGGHACGAVGSRDPNSREQGESLELCQHLASHKLSRQ

SEQ ID NO: 268165 - DNA, 189 bp, Artificial Sequence
  derived and/or modified sequence
atgttgcaggtcgtgcaggaggggaaccccgctcctttcatcattaacaccgtgaagcgaggtaggcgagatcgagagcggcaaaggaccccctgggcacctcatccactcggattccaggaaaggagatatatttatgagtccccgaatcaccgaggcaaagattcttctttcctagcacagaagtag

SEQ ID NO: 268166 - DNA, 438 bp, Artificial Sequence
  derived and/or modified sequence
atgagcctgcaggtgctgaacgacaagaacgtgagcaacgagaagaacaccgagaactgcgacttcctgttcagcccccccgaggtgaccggcagaagcagcgtgctgagagtgagccagaaggagaacgtgccccccaagaacctggccaaggccatgaaggtgaccttccagacccccctgagagacccccagacccacagaatcctgagccccagcatggccagcaagctggaggcccccttcacccaggacgacaccctgggcctggagaacagccaccccgtgtggacccagaaggagaaggccgccgccttcagcctgagcggcggccacgcctgcggcgccgtgggcagcagagaccccaacagcagagagcagggcgagagcctggagctgtgccagcacctggccagccacaagctgagcagacagtag

SEQ ID NO: 268167 - DNA, 438 bp, Artificial Sequence
  derived and/or modified sequence
atgagtttgcaggtgttgaatgataagaatgtttccaatgagaaaaacacggaaaattgcgactttctgttctccccccccgaggtcactgggaggagtagcgtactcagggtgtctcagaaagaaaatgtgcccccaaagaatctggccaaagctatgaaggtcacctttcagacacctctgcgggatccacagacacacagaatactttccccaagcatggcatcaaagctcgaggccccttttacccaggatgacacactgggtttggagaactcccacccggtgtggactcagaaggagaaagctgcagcttttagcttatccggtggacatgcctgtggggccgtaggtagcagagatcccaattctagggaacagggcgaaagcctggagctctgccagcaccttgcaagccataagttgagtagacaatag

SEQ ID NO: 268168 - DNA, 438 bp, Artificial Sequence
  derived and/or modified sequence
atgagcctgcaggtgctgaatgacaagaatgtgtccaatgagaagaacacagagaactgtgacttcctgttcagccccccagaggtgacaggccgcagctctgtgctgcgggtgtcccagaaggaaaatgtgccccccaagaacctggccaaggccatgaaggtgaccttccagacccccctgcgggacccccagacccaccgcatcctgagccccagcatggccagcaagctggaggcccccttcacccaggatgacaccctgggcctggagaacagccaccctgtgtggacccagaaggagaaggccgccgccttcagcctgagcggcggccacgcctgtggggctgtgggcagccgggaccccaacagccgggagcagggcgagagcctggagctgtgccagcacctggccagccacaagctgagccggcagtag

SEQ ID NO: 268169 - DNA, 438 bp, Artificial Sequence
  derived and/or modified sequence
atgagcctgcaggtgctgaacgacaagaacgtgagcaacgagaagaatacagagaattgcgacttcctcttttcaccacctgaagtcaccggccgttcctcagttctgcgcgtatcacagaaggaaaatgtaccgcccaaaaatctggcaaaggccatgaaggttaccttccagactcccctcagagatccccaaacacataggatattgtccccttctatggcatccaaactggaggcccccttcacccaggatgacacgctagggctggagaactcacacccagtgtggactcagaaagaaaaagccgccgccttcagcctgtcaggtggccatgcttgcggcgctgtcggatctagggacccaaactcccgggaacagggggagagtctggagttatgccaacatctggcgagccacaaactgagtagacagtag

SEQ ID NO: 268170 - DNA, 438 bp, Artificial Sequence
  derived and/or modified sequence
atgtctcttcaagtgctgaatgataagaacgtgagcaatgaaaaaaacaccgaaaactgcgacttcctgttctcccctcccgaggtgactggcaggtccagcgtgctgcgcgtgtctcagaaagaaaacgtgccccctaagaacctggcaaaggccatgaaagtgacctttcagacaccattgcgcgatccacagacccatcggatactgagtccatcaatggcaagcaagctggaggctccattcacgcaggatgatacccttggccttgagaattcccatcctgtttggacacagaaagaaaaagctgcagcttttagtctgagcgggggacatgcttgcggtgcagtgggcagcagggaccccaattctcgagaacagggggagtcgctggagctgtgccagcacctcgcttctcacaagctcagcaggcaatag

SEQ ID NO: 268171 - DNA, 1693 bp, Artificial Sequence
  derived and/or modified sequence
tagcagctaggcttggcccccggcgtggagcagacgcggacccctccttcctggcggcggcggcgcgggctcagagcccggcaacgggcgggcgggcagaatgagtctgcaggtcttaaacgacaaaaatgtcagcaatgaaaaaaatacagaaaattgcgacttcctgttttcgccaccagaagttaccggaagatcgtctgttcttcgtgtgtcacagaaagaaaatgtgccacccaagaacctggccaaagctatgaaggtgacttttcagacacctctgcgggatccacagacgcacaggattctaagtcctagcatggccagcaaacttgaggctcctttcactcaggatgacacccttggactggaaaactcacacccggtctggacacagaaagagaaggcagctgcattcagcctcagcggaggacacgcctgtggtgcagttggcagccgagaccccaacagcagagagcaaggagagagccttgaactctgccagcacctcgcttcccacaagctgtccaggcagtgagccagtgcccacccatcagcaggggcagcctgccttggagctgaaagaggagagcttcagagaccccgctgaggttctaggcacgggcgcggaggtggattacctggagcagtttggaacttcctcgtttaaggagtcggccttgaggaagcagtccttatacctcaagttcgaccccctcctgagggacagtcctggtagaccagtgcccgtggccaccgagaccagcagcatgcacggtgcaaatgagactccctcaggacgtccgcgggaagccaagcttgtggagttcgatttcttgggagcactggacattcctgtgccaggcccacccccaggtgttcccgcgcctgggggcccacccctgtccaccggacctatagtggacctgctccagtacagccagaaggacctggatgcagtggtaaaggcgacacaggaggagaaccgggagctgaggagcaggtgtgaggagctccacgggaagaacctggaactggggaagatcatggacaggttcgaagaggttgtgtaccaggccatggaggaagttcagaagcagaaggaactttccaaagctgaaatccagaaagttctaaaagaaaaagaccaacttaccacagatctgaactccatggagaagtccttctccgacctcttcaagcgttttgagaaacagaaagaggtgatcgagggctaccgcaagaacgaagagtcactgaagaagtgcgtggaggattacctggcaaggatcacccaggagggccagaggtaccaagccctgaaggcccacgcggaggagaagctgcagctggcaaacgaggagatcgcccaggtccggagcaaggcccaggcggaagcgttggccctccaggccagcctgaggaaggagcagatgcgcatccagtcgctggagaagacagtggagcagaagactaaagagaacgaggagctgaccaggatctgcgacgacctcatctccaagatggagaagatctgacctccacggagccgctgtccccgcccccctgctcccgtctgtctgtcctgtctgattctcttaggtgtcatgttcttttttctgtcttgtcttcaacttttttaaaaactagattgctttgaaaacatgactcaataaaagtttcctttcaattt

SEQ ID NO: 268172 - protein, 400 aa, Artificial Sequence [sequence omitted]

SEQ ID NO: 268173 - protein, 137 aa, Artificial Sequence
  derived and/or modified sequence
MNGDSRAAVVTSPPPTTAPHKERYFDRVDENNPEYLRERNMAPDLRQDFNMMEQKKRVSMILQSPAFCEELESMIQEQFKKGKNPTGLLALQQIADFMTTNVPNVYPAAPQGGMAALNMSLGMVTPVNDLRGSDSIA

SEQ ID NO: 268174 - DNA, 441 bp, Artificial Sequence
  derived and/or modified sequence
atggaccccgtggccacccacagctgccacctgctgcagcagctgcacgagcagagaatccagggcctgctgtgcgactgcatgctggtggtgaagggcgtgtgcttcaaggcccacaagaacgtgctggccgccttcagccagtacttcagaagcctgttccagaacagcagcagccagaagaacgacgtgttccacctggacgtgaagaacgtgagcggcatcggccagatcctggacttcatgtacaccagccacctggacctgaaccaggacaacatccaggtgatgctggacaccgcccagtgcctgcaggtgcagaacgtgctgagcctgtgccacaccttcctgaagagcgccaccgtggtgcagccccccggcatgccctgcaacagcaccctgagcctgcagagcaccctgacccccgacgccacctgctag

SEQ ID NO: 268175 - DNA, 441 bp, Artificial Sequence
  derived and/or modified sequence
atggatcctgtcgccacacacagttgtcacctcttacagcagctgcacgaacagcgcatacaaggcttgttatgtgattgtatgttggttgtgaagggcgtttgctttaaggcccacaagaatgtgctggccgccttttcacagtattttcggagcttgttccaaaactcctcgtcccagaagaacgacgtgtttcatttggacgtcaagaacgtctctggcatcggacagatcctcgattttatgtataccagccacttagatctgaatcaggataatatccaagtgatgctagatacagcacagtgtctgcaggttcaaaacgtgttatcattgtgccacacattcttgaagtccgccaccgtggttcagccaccgggcatgccatgtaattcaaccctgagtcttcagtccacacttactcccgatgcgacgtgttag

SEQ ID NO: 268176 - DNA, 441 bp, Artificial Sequence
  derived and/or modified sequence
atggaccctgtggccacccacagctgccacctgctgcagcagctgcacgagcagaggatccagggcctgctgtgtgactgcatgctggtggtgaagggcgtgtgcttcaaggcccacaagaatgtgctggccgccttcagccagtacttccgcagcctcttccagaacagcagcagccagaagaatgatgtgttccacctggatgtgaagaatgtgtctggaattggccagatcctggacttcatgtacaccagccacctggacctgaaccaggacaacatccaggtgatgctggacacagcccagtgcctgcaggtgcagaatgtgctgagcctgtgccacaccttcctgaagagcgccaccgtggtgcagcccccaggcatgccctgcaacagcaccctgagcctgcagagcaccctgaccccagatgccacctgctag

SEQ ID NO: 268177 - DNA, 441 bp, Artificial Sequence
  derived and/or modified sequence
atggaccccgtggccacccacagctgccacctgctgcagcagctgcacgaacaaagaattcagggcctcttgtgtgactgcatgctggtggtaaagggtgtctgtttcaaggcccataaaaacgttcttgccgccttcagtcagtattttcgcagtcttttccagaatagctcatcgcaaaagaacgacgtgtttcaccttgatgtcaagaatgtctcagggatcgggcagatcctcgatttcatgtacactagccacctggacctgaaccaagacaacatccaggtgatgctagatacagcacaatgcctgcaggtccaaaatgtcctgagcttgtgtcataccttcctgaaatccgctaccgtggtccagccgcctggtatgccttgcaactctacccttagtttacaatccactttgacaccagatgccacttgttag

SEQ ID NO: 268178 - DNA, 441 bp, Artificial Sequence
  derived and/or modified sequence
atggaccccgtggcgactcactcttgccacctcctccagcagctgcacgaacaaagaattcagggactgttatgcgattgtatgttggttgtgaagggggtgtgttttaaggctcataagaatgtgttggccgctttcagtcagtatttccgcagcctgttccaaaacagcagttcccagaaaaacgacgtgttccatctcgacgtcaaaaacgtaagcggaataggccagatcttagattttatgtacacttcccatctggacctgaaccaagacaatatccaggtaatgctggatactgcgcagtgcctgcaggtacaaaacgtcttgagcctgtgtcataccttcttgaaaagtgctacggtggtgcagcctcccggaatgccatgcaatagcacactctcgcttcagagcacccttactcccgatgcaacttgctag

SEQ ID NO: 268179 - DNA, 502 bp, Artificial Sequence
  derived and/or modified sequence
cggccagcggatcgctgcgagtggccttgaaggcagctgctgcaggtcacctgaatggttgagcatggaccctgttgctacccacagctgccatctgctccagcaactgcatgagcagcgaatccaaggcctgctttgtgactgtatgttggtggtaaaaggagtctgctttaaagcgcataagaatgtcctggcagcattcagccagtattttaggagcctctttcagaattcttcaagccagaagaatgatgtttttcacttggatgttaaaaatgtcagtggcatagggcagatcctggacttcatgtacacttctcatctagatcttaaccaggacaatatacaagtaatgctggacacagcacagtgtttgcaagttcaaaatgttctgagtctgtgtcacacatttttaaaatcagccactgtagtacagccacctggcatgccttgtaatagtacattgtctctacaaagcaccctgaccccagatgccacttgt

SEQ ID NO: 268180 - DNA, 2380 bp, Artificial Sequence
  derived and/or modified sequence
gttgtcgtgatgattccgcggccagcggatcgctgcgagtggccttgaaggcagctgctgcaggtgaagagtaggcggcggggcagagagcggcctccgagggtcacctgaatggttgagcatggaccctgttgctacccacagctgccatctgctccagcaactgcatgagcagcgaatccaaggcctgctttgtgactgtatgttggtggtaaaaggagtctgctttaaagcgcataagaatgtcctggcagcattcagccagtattttaggagcctctttcagaattcttcaagccagaagaatgatgtttttcacttggatgttaaaaatgtcagtggcatagggcagatcctggacttcatgtacacttctcatctagatcttaaccaggacaatatacaagtaatgctggacacagcacagtgtttgcaagttcaaaatgttctgagtctgtgtcacacatttttaaaatcagccactgtagtacagccacctggcatgccttgtaatagtacattgtctctacaaagcaccctgaccccagatgccacttgtgttatcagtgaaaactacccccctcatttactgcaggaatgttcagcagatgcacagcagaacaaaacgttggatgaatcgcatccgcatgcttcaccatcagttaatcgtcatcactccgcaggtgaaatctcaaaacaagctcctgatacttcagatggcagctgcacagaactgcctttcaaacagccaaattactattacaaactcagaaacttttacagtaagcagtaccataaacacgcagctggtcccagtcaggagagagttgttgagcagccttttgctttcagcacctctacagaccttaccacggtagagagccagccttgtgccgtcagtcattctgaatgcatcctggagtctcccgagcacttaccttccaacttcctggcccagcctgtgaatgactctgccccacaccctgagtcagacgccacatgccaacaacctgtcaagcagatgaggctcaaaaaggccattcatctgaagaagctcaatttcctgaagtcacagaaatacgcagagcaagtatctgaacccaagtcagatgatggtttgacaaagaggttggaatctgctagtaaaaataccctagagaaagctagcagccaaagtgctgaagaaaaagaaagtgaagaagtcgtcagttgtgagaattttaattgcattagtgagacggagaggcctgaagacccggctgccctggaagaccagtcccagacacttcagtcccagagacaatacgcgtgtgaattatgcgggaaaccttttaaacacccaagcaacttggagcttcacaaacggtctcatacaggtttgcagcctctggcgacgtccagcgtcacattattattcactcaggagaaaaaccacacttgtgtgacatctgtggtcgagggtttagtaacttcagtaatttgaaggagcacaaaaagacacacacggctgataaagtcttcacctgtgatgagtgtggaaagtcttttaatatgcaaaggaagttagtaaagcacagaattcggcacacgggggagcggccttacagctgctctgcctgcgggaaatgttttgggggatcaggtgacctccgcaggcatgtccgcactcacactggggagaagccgtacacatgtgagatctgtaacaagtgctttacccgctctgcggtgctccggcggcacaagaagatgcactgcaaagctggtgacgagagcccagatgtgctggaggagctcagccaagccatcgagacctccgacctcgagaaatctcagagctcagactctttctcccaagacacgtctgtgacgctgatgccagtgtcggttaaactccctgtccacccagtggaaaattctgtggcagaatttgatagccactctggcggctcctattgtaagttacggtccatgatccaacctcatggagttagtgaccaggagaagctgagtttggatcctggtaaacttgccaagccccagatgcagcagacacagcctcaggcctatgcttactcggatgtggacaccccagccggtggcgaaccactgcaggccgatggcatggccatgatccgttcctctctggctgctttggacaaccacggcggtgaccccctgggcagtcgagcatcttccaccacttataggaactcagagggtcagtttttctccagcatgactctctgggggctagcgatgaagacgctgcagaatgaaaacgagttagaccagtgatgtaccgcgcttctccacggtagaggcgtgttctcagtttagcaggctggtgttaaggctgtaggaggacccagtttcccca

SEQ ID NO: 268181 - DNA, 3542 bp, Artificial Sequence
  derived and/or modified sequence
agagcaggcagacagcagaatgaccaggcaccaagctctccattccactagcctctctgggccaggcctgtggagtctccagaggaaacaggcaggtgatcttgatcctgacgaagtactaccacgcagacatggggaaggttctggaaagttctctgtggcggtcatcagatttcgggacgtcctacaccaagctcaccctccagcctggtgtcaccaccgtcatcgacaatttctacatctgcccgaccaacaagaggaaggtcatccttgtcagctcctcactcagtgaccgggaccagagcctattcctcagcgcagacgaaggcgccacctttcagaagcagcccattcccttcttcgtggaaactctgattttccaccctaaggaggaggacaaggtcctcgcctacacaaaggagagcaagctctacgtgtcatctgacttggggaaaaagtggacacttctgcaagagcgagtgaccaaagaccacgtgttctggtctgtgtctggggtggacgctgaccctgacttggtccacgtggaagcccaagacctcggtggagattttcggtacgtcacctgcgcaatccacaattgctccgagaagatgctgacagccccattcgcaggccccattgaccacgggtctctgaccgtgcaggacgattacatcttctttaaggcaacatcagcaaaccagacaaaatactacgtctcttatcgtcgaaatgaatttgtcctgatgaagctgccgaagtatgcattgccaaaggatctgcagatcatcagcacggacgagagtcaggtgttcgtggcggtgcaggagtggtaccagatggacacctacaacctgtaccagtcggacccacggggcgtgcgctacgcgctggtgctgcaggacgtgcgcagctcacggcaggcggaggagagcgtgctcatcgacatcctggaggtcagaggggtgaaaggagtcttcctggcaaaccaaaaaattgatgggaaagtgatgacgcttataacctacaacaagggccgcgactgggattacctgaggccacccagcatggacatgaatggaaaaccaaccaactgcaagcctccagactgccacctgcacctgcacctgcgctgggcagacaacccctacgtatcaggcaccgtgcacaccaaggacaccgccccaggcctcatcatgggtgcaggtaacctgggctcacagctggtggaatataaagaagaaatgtacatcacgtcagactgtggtcacacctggcggcaggtgtttgaggaagagcatcacatcctgtacctggaccacggcggcgtgatcgtggccatcaaagacacctccatccctttgaagatcctcaagttcagtgtggacgagggcctcacctggagcacgcacaacttcaccagcacctcggtgtttgtggacgggctgctgagtgagccaggggacgagacgctggtcatgacggtctttggccacatcagcttccgctccgattgggagctggtcaaggtggacttccggccctcattctccaggcagtgcggcgaggaggactacagctcctgggagctctccaacctgcagggcgaccgctgtatcatgggccagcagagaagtttccggaaaagaaagtccacgtcctggtgcatcaaggggaggagcttcacgtcggcgctcacgtcccgcgtgtgcgagtgccgggactcggacttcctgtgcgactacggatttgagcgctcctcctcctcagagtccagcaccaacaagtgctctgccaacttctggtttaacccattgtccccgcctgacgactgtgccctgggccagacctacaccagcagccttgggtaccggaaagtggtgtccaacgtgtgtgagggtggggtggacatgcagcagagtcaggtgcagctgcagtgccccctcacgccgccccggggcctgcaggtcagcattcaaggcgaggcggtggccgtgcggcctggagaggacgtcctgtttgtggtgcggcaggagcagggtgatgtcctgactaccaagtaccaggtagaccttggggacggcttcaaggccatgtacgtgaaccttacactgaccggggagcccatccggcaccgctacgagagccccggcatctaccgcgtgtccgtcagggcagagaacacggcaggccacgatgaggcggtgctctttgtccaggtcaactcccccctgcaggccctctacctggaggtggttcctgtcattggcctcaaccaggaggtgaacctcacagctgtgctgcttcccttgaaccctaacctcaccgtcttctactggtggatcggccacagcctgcagcccctcctttccctggataattctgtgacaacgcggttttcggacacgggcgacgtgcgtgtgacggtgcaggccgcctgtgggaactcggtgctgcaggactccagggtcctccgtgtgctggatcaatttcaagtcatgcctctgcagttttccaaggagctggatgcctacaaccccaacacccctgagtggagggaagacgtgggcctggtggtcacccggctgctctccaaggagaccagcgtccctcaggagcttctggtgactgtggtgaagccggggctgcccactttggccgatctgtacgtgctcctgccccctcccaggcccacaaggaagaggagcctctcgagtgataagaggctcgccgccatccagcaggtgctgaacgcacagaagatcagcttcctcctgcgaggcggagtccgggtcctggtggccctgcgggacacaggcacaggtgctgagcagctgggcggcggtggcggctactgggcggtagtggtgctgtttgtcatcgggctcttcgcagcgggagccttcatcctctacaagttcaaaagcaggaaacggccaggcaggaccgtgtacgcccaaatgcacaacgagaaggagcaggagatgaccagccctgtgagtcacagtgaggacgtccagggcgctgtccagggtgaggagtttatagatgatgatctcgactcgcagactctaggcaaccactcaggcgtggtcctgagcatcaactcccgagagatgcacagctacctggtgagctgatgccaccccagcatctgtcttttcacccacggagggcacagaaccaccagcaaagccggcggctggactggcgcccctcagagacctgcggaaagccccctccctgagtcgtcgccacaccaggcgacaggcaccaccccctctgataaatccaagcccgcccaggcccacggggggcccacgggaccccccgggactccccggacatggccctgcccctatgggacaccaggcctgactcaggcaggttctgccccccagaccccacacacggccgccccacgtgctgtcgctcagcccgaggcctgacttctctgggctgaggctggtcgtcctggagccctcccagtacctcgggctgcaagagctgcagacccgttcagacactgcgttgcgggctcc

SEQ ID NO: 268182 - protein, 97 aa, Artificial Sequence
  derived and/or modified sequence
MAAEEMHWPVPMKAIGAQNLLTMPGGVAKAGYLHKKGGTQLQLLKWPLRFVIIHKRCVYYFKSSTSASPQGAFSLSGYNRQPRPQPAQALSQTEAGP

SEQ ID NO: 268183 - DNA, 9211 bp, Artificial Sequence
  derived and/or modified sequence
cagccgggtgacccaggccgaggccggcagaagacagcctgatgccttgaagacttcctcttgcacttttgttggagggtgctggtttgctaaaagcagagagtatttttctttttatttattttgtttttaattttttaattttagctccagctcagttgcccagactggagagcagtggccaatcatagcttactgcctcctggaactcctggctcaatcgatcctcctggataagcctcctccgggtactatagcttcatggcggctgaagagatgcattggcctgtccctatgaaggccattggtgcccagaacctgctaaccatgcctgggggcgtggccaaggctggctacctgcacaagaagggcggtacccagctgcagctgctgaaatggcccctgcgctttgtcatcatccacaaacgctgcgtctactacttcaagagtagcacctctgcctccccgcagggcgccttctccctgagtggctataaccgggtgatgcgggcggctgaggagaccacgtccaacaacgttttccccttcaagatcatccatatcagcaagaagcaccgcacgtggttcttctcggcctcctccgaggaggagcgcaagagctggatggccttgctgcgcagggagattggccacttccacgaaaagaaagacctgcccttggacaccagcgactccagctcggacacagacagcttctacggcgcagttgagcggcctgtggatatcagcctttccccgtaccccacggacaatgaagactatgagcacgacgatgaggatgactcctacctggagcctgactccccggagcccggaaggcttgaggatgccctgatgcacccaccggcttacccaccacccccagtgcccacgcccaggaagccagccttctctgacatgccccgggcccactcctttacctccaagggccccggtcccctactgccacccccgccccctaagcacggcctcccagatgttggcctggctgctgaggactccaagagggacccactgtgcccgaggcgggctgagccttgccccagggtacctgctaccccccgaaggatgagcgatccccctctgagcaccatgcccaccgcacccggcctccggaaacccccttgcttccgggagagtgccagccccagcccggagccctggacccctggccacggggcctgctccacttccagtgctgccatcatggccactgccacctccagaaactgtgacaaactcaagtccttccacctgtccccccgaggaccacccacatctgagcccccacctgtgccagccaacaagcccaagttcctgaagatagctgaagaggaccccccaagggaggcagccatgcccggactctttgtgccccccgtggctccccggcctcctgcgctgaagctgccagtgcctgaggccatggcgcggcccgcagtcctgcccaggccagagaagccgcagctcccgcacctccagcgatcaccccccgatgggcagagtttcaggagcttctcctttgaaaagccccggcaaccctcacaggctgacactggcggggacgactcggacgaggactatgagaaggtgccactgcccaactcggtcttcgtcaacaccacggagtcctgcgaagtggaaaggttgttcaaggctacaagcccccggggagagccccaggatggactctactgcatccggaactcctctaccaagtcggggaaggtcctggttgtgtgggacgaaacctctaacaaagtgaggaactatcgcatttttgagaaggactctaagttctacctggagggcgaggtcctgtttgtgagtgtgggcagcatggtggagcactaccacacccacgtgctgcccagccaccagagcctgctgctgcggcacccctacggctacactgggcctaggtgatggcagtccatgtggctgccaggccaaggcagtcacaggggccctgaccccaggccacacagacggacatgggcccacatgggagggtgagcaggagcaaggctgtgcttgcctagggcctctgtgatggacatctcgtaggacccagccagtctcatccagcaggttgggttctagggctgaaccaggcgccaggctccagaggacgaagggactctgttgccccacactaacttgccctgtcccaatcccagaaacccaggaccaagctgtgcctgggctccaaggacaggaacactggtccccccatcacactcacccctaagtgggctgggagccaggcagggccagggcagctgggtgggggccggggctggccctgggacccccaggaacgctaagacacaggctccagtaggggctgttgcctccaataaagcagcagtgagctttgccttggtggctggggcttgattgggaaggaggggattaccagcttactgggtgcccatgctgatgtctaagtggtgaccgcagcagtacccgggaaccccaacagttggttgtcttgtcttccagggtgcaggtcactgagtgacttccccagggtgcacagcgagtaacagatcaggacccaaacttgggcagtctgggctgggagcccacaccccactcaccagttctgctgcctcaggtcaggccagggcagtgctgctgcagagctagaaggccctgcagctacagctgcttcattccctgcattagtgcctggttactgggtacctcctgagtggctgtccccgttccagaacttgcatacactgagcgggctacagagctagaaggccctgcagctacagctgcttcattccctgcattagcgagcagttattgggtacctcctgcatgcctggtcccattccagacaggggcctctggcctggctgagttcacagcccagtctggggacagctgggtatgaggtgcttacggcacagtgtccagggcagctgggtgtgcagggactgggggctcccggaagattttttggaggaagtaacagctacgatgggatgggaacagtggaccctaagcaggccaagggtgcgtagggacggtggtacccagatgcccaagtcttccaggcaatacctggctcaggcccagccccaatccatccccttactttctgccatggagttccagcaggtcactctccctggcacaccttccaggctggatttttaatgaaacagactcagggaggtaggggctggcagggaccctagaatccttgtgatttttcttagcaccttatgtcagggaaacctaaactgaggtcagcacttgggcccactgacagtgactgactgggggagaaggtcctgcagcccccttcccctgggtgtgttctggggacctgtggtttgctggcggaaacaagtgatgaggctggttagcggatgtgggaggctgtgaccccagggggccatagggtgcggtggaactgcaggccctgcagatgacggcagccagctgcttccaggaaccaggtgtccaaggccacctctgcaggggtttcctcttcagcctgcctggggtgagaggtcagtgcaccacagccgaggctggagcacagggagcttctgttgttctgatctatctctggaaaaccagccattcctcctccctgcagtcagaattctttgccctgtctgacctgaacttgcttagggagtcatgccactccccactgtggccatagtttctcttcctgtaaaattttattattttagttttttgtttttgagatgtagtctcaccctgtcgcccaggctggagtgcaatgccgtgatctccgctcactgccacctccgcctctctagttcaagcgattttcctgcctcagcctcccgagtagctgggattccaggcgcccgccaccacgcctggctaattttttgtatttttagtagagacgggattttatcatgttggccaggctggtctcgaactcctgacctcaggtgatctgcccaccttggcctcccaaagtgctgggattacaggcatgagccactgtgcctggccccttcctgtaaaatttttaaatggagaattgggtgcgagatgtggtttccagcctggtgcctggggtgctgagctagtgagtggtgcagtccaggacacctttgctttatgtcacttacacggtcacctggagccggctcaagtggctaaagcatcctggggcccagagccaggtgataggtccctctggccaactggacagttgaggcctgtggttacccgaagcccagctggggccctggtccagcctcgcctcccagactctgcacctgctagcacagctgtccacgtctgtgtgagctgctctaggccgagggcctcagtttcaagagtgtgttggggtgggatggggcaggccgtggtcctccagcatgaagaaggagccatgaggagttcccatgacctcccgagacttgccataagtgttctagtccacatataagggtagggttgggattaccatttactgaccacatctgtgaggtgccgagctgggtgcttgacatcatttgcttggagaagcagctgctagtagacccattttacaggtgagagaaccaagtctcacagaggcctgggttcaagtcccacctctgccactaactggcatgtgaccctatctatccttcactgctctgagcctagaccctggcccctgcctggctccctgccaggctccctgccacccctcacgacctctgatggtcgttgtgggggtctcttgcctggctcccagggctagggttagggctctggaggtgctttcactcaaccaagggggccacagcactggggagtgaaactgccccgcctcaccctgcgttgccctctgggtctgtgagggtgggctggcaggaggcctaggccttgccctaggggcagtcctgcttcctcattttatagatagggaaactgaggctttgggaggactcactgacatacctaccttcaagatgagttcaggtgggctcagttctggggcttgggaaaagggccccagtggctttgggaagcacccccagcccagggtgaaacatgcttcttctcttcctgtggttccatccgaaggattgtggtgagccccgtgccttcagttaataaagatttgtattgtgaaaagattttttcttttttttttgggacacagtctcactctgtcgcccaggctagagtggattggcgtgatctcggctcaatgcaaatctccagggttcaatcgattctcctgcctcaccctcccatgtagctgggattacagctgcctgccaaatttttgtatttttagtggaaccggggtttcaccatgttggccaggctggtcttgaactcctgacctcaactgatccgcccaccttggcctcccaagtgctgggattacaggcgcgagccacggcgcccagccttgaaaagatgtttttagaaccagaagaaacctcggttcccactgatccttctgggccacgttgtgcggagctcccctgctggttggggctcagcgcagccccagggaggtgcttcctgcacctcaggatgggcgagggtgggcattgggggagagggggacctgggacctgcggcttagttccctgaggcaggcagggcttattggggccatttcatagaaaggcagattgaagctcagcagggaagaggcttttgagggtgatccaggcgctggagggatggcctaggacaccagggtcacaccaggaacatgggagggccgtgcttgtctctagacgaggggaatgggggaagggccacaacctctgtttctgtgacccagcagcatcaagcccctcgctgggcacctcgcacacaccccctgccttatctctgcctgcacgccctgttccctccacctagactgcctgctgagggggcagtgccaggaggttgcctgtccttggggaagaggggcagtgaccctgtgaagatgcttgacagacaacccccaccacctcagaagtgtgtgtgagtggtgaacccttttaagccatcttccagccattctcactggagggagatttgatgggtacagagcagacccctacctgtctaccctccttcggacccctaggaagcttcgcaggccttccaggctgccagacagctgccctggcgttgccgtctgcttcttccctggccccactctgaggggctcagagctgaggcagaatccctttttcattcatttcctgcagaataaaacaacatacagaaaagtgaataaaacataaatgcacaacctaacacactgttaggaagtgaacgatctgcaaccaccatcaggaaatagttttgccagcacccaagtgccctcccctcacagtgtcacttccggcctctctgccctggcttatgtgagtcttgtgttcttgtttttctaaaaagtcttcagcacccaattatgcaggcattgcagtattttcctgtttctgtgctttatccccttgaatcatacagatgcaaattctggcagctggcttctttggctcgttattatgtctgtgagatttattcatgttgctgtgcgtagtatagtttgtgcatgttcattgctaaaaacttccattgtttggctgtatcgtagttcacagattcatttcactgtcagtcaagcttgtccaatgcatgcagcccaggatgcctttgaatgtggcccaacacaaatttgtaaactttcttaaaacattataaagatttttgtttgcgatttttttttttagctcatcagctatagttagtggtagtgtattttatgcgtgacccgagacagttcttccggtatggtccatggaagccaaaagattggacatgcctgctgtagatggacagttggtttgtttctagtttggggtaactacacacaatgctgctagcaacagttttgtccatgtctctgatgcacgtgtgttttttgcaaatggtgcacaaatttttctagggtttgtactcaggagtctgactcctgggttctagggtatgaagatctttctaaatattgttctagtttacgtgcccaccagcagtaaaacagaattcccttgccttcccatccttggcagacatttcacttttgccagtctggtggggtgtatagttatggccttaatttgcatttagctaattaccaaggagattgagcatatttttatgtttttattaaccattttgattttgtctcctgtgaagtgtctatcatcttttgcccattttttaacttgttgtctttttctttttcttttctttttttttttttctgagacagggtctcactctgttgccctggctggagtgcagtggtgcaatctcagctcactgcagccttgagtcaggctcaggtgattctctcacctcagcctcccaagtagctgggaccacaggcccacaccaccaagcccagctaattttttgtatttttaagtagagacgggtttcatcatgttatgcaggctgctctcaaactcttgagctcaagcgatctgctggcctcagcctcccaaagttgggattataggcgtgagctaccagattttttcttattaatctaataattctttgtatagtcttgatattatccataatgtgtattgcaaatatcttctctaactctggcttgactgtttatggtgtcctttttttttggggggggttttttgagacaaggtcttgctctgtcacccaggctggagtgttatggcacaatcttggcttattgcagcctcaattcctaggcttaaacagtcctcccacctcagcctcctgagtagccggaactacagtcacgcacttccatgtccagataattttttttttttttttagagataggatcttactatgccccagctggtctcaaactcctagactcaatgagcctcccatcttgacctcccaaagtgctgggagtacaggcatgagccactgtgcatgccagttcttatttttaatgcagttgaattgatcagtgttttcattttggttagtgctttttgtggcttaagaaattctttccaggctgggtacagtggctcacacctgtaatgccagcactttgggggcagaggcaggaggattacttgagctcaggagtttgagaccaacctggacaacatggcgaaacaccatctctacaaaaaatacaaaaattagctggacatggtggtgcgtgcctgtagtcccagctactcaggtggctggggtgagaggattgcttgagcccagaaggtcaaggctgcagtgagctgtgattgtgccactgcacttcagcctgtgagacagagtgagaccctatctcaaaaaaaaccaaaaaaaaaaaaaaaaaaaagaaaaccactgaaattatttccactccaaggtcatgaagatagtctcttagattatattctgaaatccttataaatgtaaatttcatatttaggcctttaattcacctagatttggttttttgcatatggtgtgaggtaaggattcactttcatttttttctctccatagggttacacacctgtcctatcattgtttgtaatctaactttctgcgcccatctgcaatgccacctctgtcatatgtccacatatgacatatgtagatctgttgttggattctttcctctgttccattagtctgtctgttcttgtgccaatatcaagctgtcttcattattatcaattatgtattgagatctgataaagtaagtcttttccaccttatttttcttctttgagagtgtcttgactattctggctctttgtattttcatgtaaggtttttctcccatataagttttaaaatcagcttgtcaattccaacaacaatgatgcacttgatagtttgggaatttattatagctatcaatcagttttgggaaaattgacgtctttacaatattgagttttctgattcatgaacatggtttacctctctttccatttgggtcttctttaaggtttaccaataggattttatatttttgtccattgtggtcttgcttatcttaagtttgatttgtaaatattttatgtttcttttagtctattgtaaattgtgtatttttaatttcatttttttttttgttaatagcatataaaacacaccttgtcttttaactggagcattttgtccattgtgtatttaatgtaattaaatctaccatcttattttatgctaca

SEQ ID NO: 268184 - protein, 99 aa, Artificial Sequence
  derived and/or modified sequence
MKLSMKNNIINTQQSFVTMPNVIVPDIEKEIRRMENGACSSFSEDDDSASTSEESENENPHARGSFSYKSLRKGGPSQREQYLPGAIALFNVNNSSNKD

SEQ ID NO: 268185 - DNA, 2073 bp, Artificial Sequence
  derived and/or modified sequence
atgaagctgagcatgaaaaataatatcatcaatacacagcagtctttcgtcacaatgccgaatgtaatcgtacccgacatagagaaggagatcaggcggatggaaaacggcgcctgttctagtttctccgaagatgatgatagtgcaagcaccagcgaggaatctgaaaacgaaaatcctcacgcccgcggttccttctcatacaaatcccttcgtaaaggcggcccaagccagcgtgaacagtacctccccggggcgattgccctcttcaatgtgaacaacagtagcaataaagatcaggaaccggaagagaaaaaaaaaaagaagaaggaaaagaagtccaagtccgacgataagaatgagaataagaacgaccccgagaaaaaaaagaaaaaaaaggacaaagaaaaaaagaagaaggaggagaagtctaaggataagaaagaggaggaaaaaaaggaggtagtggtgatcgatcccagcggaaacacctattataattggctcttctgcatcactttgcctgtaatgtacaattggacgatggttatcgctcgcgcctgttttgacgagctccagagtgattatctggaatactggcttattcttgattatgtctccgacatcgtttaccttatcgatatgttcgtgcgcactagaactggatatcttgagcagggcctcctggttaaagaggaattgaaactgatcaataaatataagtctaacctacagtttaaattagatgtactctcgctcattcccaccgaccttctctacttcaaactggggtggaattaccccgagatacggctgaacagactcctgcggttttcaagaatgttcgaattctttcagcggactgaaactagaaccaactatccgaacatctttcgcatcagcaatctggtgatgtacatcgtcataatcatacattggaacgcatgtgtattttattcaatttccaaggccatcggttttggaaacgacacctgggtgtacccagacatcaacgaccctgaattcggaaggctcgcacggaagtacgtgtatagcctgtattggtctaccctcactctgacaacaataggggaaacgcctcctccagttcgggactccgagtacgtgttcgttgtagtagatttcctgatcggcgtcctcatcttcgcgaccattgtgggtaatattggctccatgataagtaatatgaacgctgctagggctgaattccaggctcgtatcgatgcaatcaagcagtacatgcacttcagaaacgtctctaaggacatggaaaagcgtgttattaagtggttcgactatctctggacaaataagaagaccgtcgacgaaaaggaagtgttgaagtacctgcccgacaaattacgtgctgagatagcaattaatgttcacctcgatactctgaaaaaagtgcgcatctttgcggactgtgaggcaggactgctggtggagctggttctgaaattgcaaccgcaggtgtattcgccaggtgactatatttgtaagaagggcgatattgggcgtgaaatgtacataattaaagagggaaagctcgcagtcgtagctgacgatggggtgacacagtttgtggtgctgagcgatggatcatatttcggtgagataagcattttaaacataaaaggttcaaaagcaggtaacagaaggacagccaacatcaagtcaatcggttacagtgacctgttttgtctttccaaagacgacctgatggaggctctgaccgagtatcccgacgcgaagaccatgctcgaggagaaagggaaacagatcctgatgaaggatggcctcctggatctgaacatcgcaaatgccggctctgaccccaaagacctcgaagaaaaggttaccaggatggaaggttctgttgacctcctacagacccgtttcgcacgcatcctggccgagtacgagagcatgcagcagaaactgaagcagcgcttaaccaaggtggagaagttcctcaagcccctaatcgataccgagttctcctccattgaaggccctggcgccgaaagtggaccgattgactctacctag

SEQ ID NO: 268186 - DNA, 2073 bp, Artificial Sequence
  derived and/or modified sequence
atgaagctcagcatgaaaaacaacatcattaatacccaacaaagcttcgttacaatgcctaatgtaattgtgcctgatatagaaaaggagataagacggatggaaaacggagcctgtagtagtttcagcgaagacgatgactccgcctcaacctctgaagaaagtgaaaacgagaacccacatgctcggggatcgttttcctataagagcctgaggaaaggtggacccagtcaaagagaacagtacctgcctggggctatcgcactctttaacgtcaataacagtagcaacaaagatcaagagccggaagagaaaaagaaaaagaaaaaggagaaaaaatccaagtcggacgacaaaaacgagaacaaaaatgacccagaaaagaaaaagaaaaagaaggataaggagaagaaaaagaaggaagagaaatccaaagataaaaaggaagaggagaagaaggaggtggtcgtcatagatcccagtgggaatacatattataattggttgttctgcataacactgccagtgatgtataattggacaatggtgatcgcccgtgcctgtttcgatgagctgcagagcgactatctcgagtactggctgatcctggactatgtcagcgatatcgtgtatctgattgatatgttcgtgaggactagaactggctatttggagcagggcttactggttaaagaggagcttaaattgattaacaaatacaaatccaatcttcagttcaagcttgacgtgttaagtctcattcctacagacttgctgtattttaagctcggctggaattacccagaaatccgactcaaccgcctgctgaggttcagcaggatgtttgagttttttcagcgaaccgagaccagaaccaattaccccaatatatttagaatctctaatctcgttatgtatatagtcatcataatccactggaacgcatgcgttttttactctatttcaaaggctattggttttgggaatgatacatgggtgtatccggatattaatgatcccgagtttggtcggctggcccggaagtatgtgtattccctatattggtccactctgaccctaacgaccattggagagactccccccccagtgcgagatagcgaatatgtgtttgtggtggttgatttcctcataggggtgttgattttcgctactatcgtgggaaatatcggctcaatgatctctaacatgaatgccgctagagcagagttccaggctcgaatagacgcgataaagcaatacatgcattttcgcaacgtttctaaagatatggaaaagagggttatcaaatggttcgattacctatggaccaacaagaaaacggttgatgaaaaggaggtccttaagtatcttccagataagttacgggcagaaattgccatcaatgttcatttggacactctcaagaaagtgaggatatttgccgactgtgaggctgggctgctggttgaactcgtgctgaagctccagcctcaggtatattcccctggggactacatctgcaaaaaaggggatatcggcagagaaatgtatattataaaagaggggaaactcgcagtggtcgccgatgatggcgtgactcagttcgtagtattgtccgacggatcatacttcggtgagatctcaatcctcaacatcaaggggtctaaggcaggcaaccgcagaacggcaaacattaaatcaatcggttattctgacctcttctgcctgagcaaagacgatctcatggaagcccttactgagtatcctgacgcaaagaccatgctcgaagagaagggcaagcagatactcatgaaagatggcctccttgacctcaacattgctaacgccggatctgatcctaaggacctagaggagaaggtgacacgcatggaaggttcggtggacttgctacaaactcgatttgcccggatcttggcagagtacgagagtatgcagcagaaactcaaacagaggttaactaaggtcgagaagtttctgaagcctttaattgacaccgagtttagtagtatcgagggcccaggcgcggagagcggccctatagattccacctag

SEQ ID NO: 268187 - DNA, 387 bp, Artificial Sequence
  derived and/or modified sequence
atgaagttatcaatgaagaacaacataatcaatacacagcagtctttcgtgaccatgccaaatgtgatcgtgcccgacatcgagaaggagatcagaaggatggagaacggggcttgttctagcttctccgaggacgacgatagtgcctccactagtgaagaatcagaaaacgagaatccacatgcgcggggaagctttagttataagtccctgcggaaaggggggccctcccagagagagcagtacctccccggagccatagcgctgttcaacgtcaacaacagcagcaataaagaccaggagcccgaagaaaaaaaaaagaaaaagaaagaaaaaaaaagcaagagcgacgataaaaacgaaaacaaaaacgaccctgagaagtag

SEQ ID NO: 268188 - DNA, 300 bp, Artificial Sequence
  derived and/or modified sequence
atgaagttgtccatgaaaaacaacatcatcaatacacaacagtcatttgtcacgatgccgaatgtgattgtgccagatatcgagaaggaaataagacgcatggaaaatggggcctgctcttctttcagcgaggatgatgacagcgctagcacatcagaagagtccgaaaacgaaaacccgcatgcgagggggtctttcagctataagtcactgcggaaggggggaccgtcccagagagaacagtacctgccaggcgctatcgccctctttaatgtgaataatagttcaaacaaagattag

SEQ ID NO: 268189 - DNA, 2073 bp, Artificial Sequence
  derived and/or modified sequence
atgaaactgagcatgaaaaacaacatcatcaatacacaacaatccttcgtgactatgcccaatgttatcgtgccagatattgagaaggagattaggcggatggaaaacggggcgtgttcttctttcagtgaggatgatgattccgccagtaccagcgaggagagtgaaaacgagaatcctcatgcccgtggtagcttttcctacaagagtctcaggaaggggggcccttctcagcgggagcagtatctgcccggagccatagcactcttcaatgtgaacaatagttctaataaggaccaggaaccggaggagaaaaagaagaaaaaaaaggagaagaaatcaaaaagtgatgataaaaatgaaaacaaaaatgatcctgagaaaaagaaaaagaaaaaggacaaagagaagaaaaagaaggaggaaaagtctaaggacaaaaaggaagaggaaaaaaaggaagtcgtggttattgatccttctggcaatacctactataactggctcttctgcattaccctgcccgtgatgtataactggaccatggtgatagccagggcatgcttcgacgagttgcagtcggattatcttgagtattggctcattctggattacgtcagcgatattgtgtacctgattgatatgttcgtacgaacccggaccggctacctagagcaggggctcctggttaaagaagaattgaagcttatcaacaaatacaagtcaaatctgcaatttaaactggacgttttgtcactgatacccactgaccttctttatttcaagctggggtggaactatcccgagattcgcctgaaccgactgctcagattcagtcggatgttcgaattcttccagagaacggaaaccaggacaaactaccctaatatcttccggatctccaaccttgtgatgtacatcgtgatcatcatccattggaacgcttgcgtgttctatagcatttccaaagcaatcgggtttgggaacgacacatgggtttaccctgatatcaacgacccggagtttggccgactcgctcgcaagtatgtgtattctttgtactggtccacgctgaccctgactaccataggtgagacacctccgcccgtacgcgattcagagtacgtattcgtggtggtggactttcttatcggcgttttgattttcgcaactatcgttggcaatataggatccatgatctcaaacatgaacgccgcacgagccgagtttcaagcacgtatagatgctattaagcagtacatgcactttcgcaacgtgtccaaggacatggagaaacgggttattaagtggttcgattacttatggacgaataaaaaaacagtggacgagaaggaggttctgaaatacctgcctgataaactgcgagcagagatcgccatcaatgttcatttggacacccttaagaaggtgcgcatcttcgctgactgtgaagctggcctcctggtagaattggtgctgaaacttcagccacaagtgtatagccctggagactacatctgcaagaaaggggacatcggacgggagatgtacatcattaaggagggcaaactcgcggtggtggccgacgatggcgtgacccagttcgtggtactgtccgatgggtcctatttcggagagatatcaatccttaacatcaaaggctccaaggccggtaatcgaaggactgccaatattaaatccattgggtattcggatctcttctgcctgagtaaagacgatcttatggaagctctcacagaatatcccgatgcaaagacaatgctggaagaaaaaggaaagcagattttgatgaaggatgggttgctggatctcaacattgcgaatgctggctccgacccaaaggatctggaagaaaaagtgacccggatggaaggctcagttgacctgctgcagactcggtttgcacgtatcttggcagagtacgagtcaatgcaacaaaagttgaaacagcgcctaacgaaggtcgagaaattcctgaaacccctgatcgataccgaattcagcagtatcgagggacccggcgccgaatctggaccaattgatagcacctag

SEQ ID NO: 268190 - DNA, 300 bp, Artificial Sequence
  derived and/or modified sequence
atgaagctcagtatgaaaaacaacattatcaacacccagcagtccttcgtcacaatgcccaacgttattgtcccggacattgagaaagaaattcgaaggatggagaatggtgcgtgctcctcattctccgaggacgacgactctgcctccacatctgaagagtccgagaatgagaaccctcatgctagaggctcattttcttataaatcactgcggaaggggggcccaagtcaacgcgaacagtacttacccggagcaattgcgctgtttaacgtgaataactcatccaataaggactag

SEQ ID NO: 268191 - DNA, 2073 bp, Artificial Sequence
  derived and/or modified sequence
atgaagctgagtatgaagaacaacatcattaacactcagcagagctttgtaacgatgccaaatgttatcgtccctgacattgaaaaagaaattaggagaatggagaacggggcgtgttcctctttcagtgaggatgatgattcagcatctacatcggaggagtctgagaacgagaatccccatgctaggggtagcttcagttacaaaagtctgcggaagggcgggccctctcaacgagaacaatatctgccgggagcaattgccctgttcaacgttaacaactcttctaataaagaccaggaacctgaggagaaaaagaagaaaaagaaagagaaaaaatccaagagtgacgacaaaaacgagaataagaacgaccctgaaaagaagaaaaagaaaaaagacaaggagaaaaagaaaaaggaggagaagtccaaagacaagaaggaagaggagaagaaggaggtggtagtcatagatccttccggaaacacctattacaactggctgttctgcatcacactccccgtgatgtacaattggaccatggtgatagcaagggcctgcttcgacgagctgcagtcagattacctcgaatattggctcatcttagactatgttagtgacatcgtgtacttgattgacatgttcgtgcggacacgcactggctatctagagcagggactgctggtgaaggaggagctgaaattaatcaataaatacaaatcaaatctgcagtttaaactggatgtgctgagtttaattcccacagacctgctatactttaagctggggtggaattaccccgagattcgcctcaacagattactgcgcttcagccgtatgtttgagttctttcagcgaaccgagacgcgaaccaattaccccaatatctttaggatcagcaacctcgtgatgtatattgtgattattatccactggaacgcttgcgtcttctattcgatttccaaagcaatcggttttggaaatgacacatgggtatacccggatattaacgatccagagttcggcagactcgccaggaagtacgtttactctctatattggagtaccttgaccctgacaacgattggggaaacacccccccccgtgcgagatagcgagtacgtgtttgtagtcgttgattttctgataggagtgttaatctttgctactatcgtgggtaatataggctctatgataagtaatatgaacgccgctcgggccgaattccaggccaggatcgacgccatcaagcagtatatgcactttagaaatgtaagtaaagacatggagaaacgggtcattaaatggttcgattatttatggactaacaaaaagaccgttgacgagaaggaagtcctgaagtacctcccggacaaactaagagccgagattgctatcaacgttcaccttgatacactcaaaaaggtgcgaatttttgcggattgtgaagctggcctgctggtggaactggtactgaaactgcagccgcaggtttattctccaggcgattacatatgcaagaagggagatattggccgcgagatgtatattatcaaagagggcaaattggccgtcgtcgctgacgacggagtgactcagtttgtggtcctgtccgatgggtcatattttggcgagatatctatcctgaatatcaagggaagtaaggcaggcaaccgtaggacagcaaacattaagtctataggttattctgacctattttgcttgtctaaagacgacctcatggaagccctgactgagtacccggacgccaaaaccatgttggaggagaaaggaaagcagattctgatgaaggacggcctgctcgacctgaacatagccaatgcaggctccgaccctaaggacctcgaagagaaggtaacacggatggagggtagcgtcgacctacttcaaacacgcttcgcccgcattctggcagaatatgaatctatgcaacagaagctgaagcagcgactcactaaagtagagaaattcctgaagcctttgatcgatactgaatttagttcaattgagggcccaggtgctgagtcaggccctattgatagcacctag

SEQ ID NO: 268192 - DNA, 2073 bp, Artificial Sequence
  derived and/or modified sequence
atgaagctgtccatgaagaacaacatcatcaacacccagcagagctttgtgaccatgcccaacgtgattgtgcctgacatcgagaaggagatccggaggatggagaatggagcctgcagcagcttctctgaagatgatgacagcgccagcaccagcgaggagagtgaaaatgaaaacccccacgcccggggcagcttctcctacaagagcctgaggaaaggaggccccagccagcgggagcagtacctgcccggggccatcgccctcttcaacgtgaacaacagcagcaacaaggaccaggagcctgaggagaagaagaagaagaagaaggagaagaagagcaagagtgatgacaagaatgaaaacaagaatgaccctgagaagaagaagaagaagaaggacaaggagaagaagaagaaggaggagaagagcaaggacaagaaggaggaggagaagaaggaggtggtggtgattgaccccagcggcaacacctactacaactggctgttctgcatcaccctgcctgtgatgtacaactggaccatggtgattgcccgggcctgctttgatgagctgcagagcgactacctggagtactggctgatcctggactatgtgtctgacatcgtgtacctgattgacatgtttgtgaggaccaggacaggctacctggagcagggcctgctggtgaaggaggagctgaagctgatcaacaagtacaagagcaacctgcagttcaagctggatgtgctgagcctcatccccacagacctgctgtacttcaagctgggctggaactacccagagatccggctgaaccggctgctgcgcttcagcaggatgtttgagttcttccagaggacagagaccaggaccaactaccccaacatcttccgcatcagcaacctggtgatgtacatcgtcatcatcatccactggaatgcctgtgtgttctacagcatcagcaaggccatcggctttggaaatgacacctgggtgtacccagacatcaatgaccctgagtttggccgcctggccaggaaatatgtgtacagcctgtactggagcaccctgaccctgaccaccatcggggagaccccacctcctgtgcgggacagtgaatatgtgtttgtggtggtggacttcctgattggagtgctgatctttgccaccatcgtgggcaacatcggctccatgatcagcaacatgaatgctgcccgggcagagttccaggccagaattgatgccatcaagcagtacatgcacttcagaaatgtgtccaaggacatggagaagagggtcatcaagtggtttgactacctgtggaccaacaagaagacagtggatgagaaggaggtgctgaagtacctgcctgacaagctgcgggcagaaattgccatcaacgtgcacctggacaccctgaagaaggtgcgcatctttgctgactgtgaggccggcctgctggtggagctggtgctgaagctgcagccccaggtgtacagccctggggactacatctgcaagaagggggacatcggccgggagatgtacatcatcaaggagggcaagctggccgtggtggctgatgatggagtgacccagtttgtggtgctgagtgatggcagctactttggagagatcagcatcctgaacatcaagggcagcaaggccggcaacagaagaacagccaacatcaagagcatcggctacagcgacctcttctgcctgagcaaggatgacctgatggaggccctgacagagtacccagatgccaagaccatgctggaggagaagggcaagcagatcctgatgaaggatggcctgctggacctgaacatcgccaatgccggcagtgaccccaaggacctggaggagaaggtgaccaggatggagggctctgtggacctgctgcagaccaggtttgcccgcatcctggccgagtatgagagcatgcagcagaagctgaagcagaggctgaccaaggtggagaagttcctgaagcccctgattgacacagagttcagcagcattgagggccctggagctgagagcggccccatcgacagcacctag

SEQ ID NO: 268193 - DNA, 387 bp, Artificial Sequence
  derived and/or modified sequence
atgaagctgtccatgaagaacaacatcatcaacacccagcagagctttgtgaccatgcccaacgtgattgtgcctgacatcgagaaggagatccggaggatggagaatggagcctgcagcagcttctctgaagatgatgacagcgccagcaccagcgaggagagtgaaaatgaaaacccccacgcccggggcagcttctcctacaagagcctgaggaaaggaggccccagccagcgggagcagtacctgcccggggccatcgccctcttcaacgtgaacaacagcagcaacaaggaccaggagcctgaggagaagaagaagaagaagaaggagaagaagagcaagagtgatgacaagaatgaaaacaagaatgaccctgagaagtag

SEQ ID NO: 268194 - DNA, 300 bp, Artificial Sequence
  derived and/or modified sequence
atgaagctgtccatgaagaacaacatcatcaacacccagcagagctttgtgaccatgcccaacgtgattgtgcctgacatcgagaaggagatccggaggatggagaatggagcctgcagcagcttctctgaagatgatgacagcgccagcaccagcgaggagagtgaaaatgaaaacccccacgcccggggcagcttctcctacaagagcctgaggaaaggaggccccagccagcgggagcagtacctgcccggggccatcgccctcttcaacgtgaacaacagcagcaacaaggactag

SEQ ID NO: 268195 - DNA, 2073 bp, Artificial Sequence
  derived and/or modified sequence
atgaagctgagcatgaagaacaacatcatcaacacccagcagagctttgttactatgccaaatgttatcgtgcccgacatcgagaaggagatccgacgcatggagaacggcgcctgttcctcgttttccgaagacgacgacagcgctagcacaagcgaagaaagtgagaacgaaaacccccacgccaggggctctttcagctacaagagcttgcggaagggggggccttcacaacgcgagcaatacctgccaggggccatcgcactgttcaacgtaaacaattcttccaacaaggaccaggaacctgaggagaaaaaaaaaaaaaaaaaagaaaaaaaaagcaagagcgacgacaagaatgaaaataagaacgaccccgaaaagaaaaagaagaaaaaggataaagagaagaaaaagaaggaagagaaaagcaaggacaagaaagaggaggagaaaaaggaagtcgtcgtaatcgacccatcgggcaatacctactacaattggctgttttgcatcaccctacctgttatgtataactggactatggtgattgccagggcctgttttgacgagttacagagcgattaccttgaatactggctaatcctggattatgtgtctgatatcgtatatctgattgacatgttcgttcgcaccagaacgggttatctggaacaaggactcctagtcaaggaggaactaaagctcatcaacaagtataaatctaacctgcagttcaagcttgatgtcctgtcactaatccccactgaccttctgtatttcaagctcgggtggaactacccggagatacggttgaaccgattgctacgtttctctagaatgttcgaattcttccagcggactgagacccgtactaactaccctaatatttttagaatcagcaaccttgtaatgtacattgtgattatcattcactggaacgcttgcgtgttttacagcattagcaaagccattgggttcggtaatgatacgtgggtgtatcccgatatcaacgatccagaatttgggcgcctggcccgtaagtatgtgtattccctgtactggtcaacgttgaccctgactacaataggggaaactccgcccccagtaagagactcagagtacgtgtttgtagtcgtcgacttcctgattggggtgttaatttttgcaacaatcgtgggcaacattggaagcatgatctcaaacatgaatgccgctcgcgcagaatttcaagcccgaattgacgccatcaagcaatatatgcattttcgcaatgtgagcaaggacatggaaaaacgcgtgatcaagtggtttgactatctctggactaataaaaaaactgttgatgaaaaggaagtgctgaagtatctaccagataagttgcgggcagagatcgccataaacgtgcatctggacacgctcaagaaagtgcgcatctttgcagattgcgaggccggcttgttggtagagctggtcctgaagctgcagcctcaagtgtatagccctggcgattacatctgtaagaaaggagacataggacgcgagatgtatatcatcaaggaaggtaagttggccgtggttgccgacgatggggtgacacagttcgtggtcctttctgatggcagctacttcggtgaaataagcatacttaatatcaaaggttcaaaagccgggaatcgcagaaccgctaacatcaagagcatcggctactccgatttgttttgtctgtccaaagatgaccttatggaggctttaacggagtacccagatgccaagaccatgctggaggagaaggggaaacaaatactcatgaaggatggtttactggacctcaacattgccaacgcaggcagtgatcctaaggatcttgaggaaaaagtgacccgcatggaaggatctgtcgatctgctccagactcgcttcgcacgcatcctggcggaatatgaatcaatgcagcagaaactgaaacagagactgactaaggtagagaaatttcttaagccactcatcgacacagagttcagctccatcgagggacctggagccgagtccggccccattgattccacctag

SEQ ID NO: 268196 - DNA, 2073 bp, Artificial Sequence
  derived and/or modified sequence
atgaagctgagcatgaagaacaacatcatcaacacccagcagagcttcgtgacaatgccgaacgtgatagttcccgacatcgagaaggagattcgccgaatggaaaacggggcttgcagctcattctccgaagacgacgattccgcttcaacaagtgaagagagtgaaaatgaaaacccccatgccaggggatcatttagctataagtcactgagaaagggagggccaagccagagggagcagtacctgccaggggcgatcgcccttttcaacgtcaataatagtagcaataaggatcaagaaccggaagaaaaaaagaaaaagaagaaggagaagaagtctaaatcggacgataaaaatgaaaataagaacgaccccgagaaaaagaaaaagaaaaaggacaaggaaaagaaaaaaaaggaagaaaagtcaaaggacaagaaggaagaggaaaaaaaggaagtcgtggtgatagacccatcgggcaacacctactacaattggttattctgcataaccctgcccgtcatgtacaactggacaatggtcatcgcaagagcatgtttcgatgaactgcagtccgattatctggagtactggctcatcctagattacgtctccgatatcgtttatctgattgacatgttcgtgcggaccagaacaggctacctggaacaaggcttgctcgttaaagaggagcttaaattgatcaataaatataaatccaacctgcagtttaaactcgacgtcttaagccttatcccaacggacctgctgtacttcaaactgggctggaattacccagaaattcgtctgaatcggctcctacggttcagtagaatgttcgagtttttccaacggacggagacccgcactaattatcctaacatcttcagaatttccaatctggtgatgtatatcgtcattatcatacactggaacgcctgcgtgttctattctatttccaaggcgatcggcttcggcaatgacacctgggtttacccagacattaatgaccctgagtttggccggcttgctagaaagtacgtatactccttgtattggagcactcttaccctgacgaccattggagagaccccccctcccgtcagggattccgagtacgtttttgtcgttgtcgacttcctcatcggagttctgatcttcgctacaattgttggaaacatcggatccatgatctccaatatgaacgccgcgcgagccgaatttcaggcccgcatcgatgccatcaaacaatatatgcattttagaaatgttagtaaggatatggagaagcgggtcatcaagtggttcgactatctgtggactaataaaaagaccgtcgacgaaaaagaggtcctgaagtatctgcctgataaattacgggccgagatagcaatcaatgtacacctcgacacactgaaaaaagtccgcatctttgcagattgtgaagctggcctcctcgtggagctggttctgaaactgcagcctcaggtctactccccaggggactacatttgtaaaaagggggacattggacgcgagatgtatatcattaaagagggcaaactcgccgttgtcgcggacgacggcgtgactcagtttgtcgtcctgtcggacggcagctattttggagaaatttccattttaaatataaaagggtctaaggccggaaaccgcagaacggcgaatatcaaatctatcggatattctgatctgttctgcctgagtaaggatgacctcatggaagcactgaccgagtatcccgacgctaaaacgatgctcgaagagaagggtaaacagattctgatgaaggatggtctgttagacctgaacattgcgaatgccggttcagaccccaaggacttggaggaaaaagtgacacggatggaaggttctgtggatctcctgcagaccagattcgcccggatcttggccgagtacgaatccatgcagcagaagcttaagcaaagactgacgaaggtcgaaaagtttcttaaacctttaatcgatacagagttctccagtatcgaaggtccaggcgcagagtcaggccccatagactctacctag

SEQ ID NO: 268197 - DNA, 387 bp, Artificial Sequence
  derived and/or modified sequence
atgaagctgagcatgaagaacaacatcatcaacacccagcagagctttgtaaccatgccaaacgtcatcgtgcccgacattgaaaaagaaattcggcgtatggaaaacggcgcctgctctagtttcagcgaggatgacgacagtgcctccaccagcgaggagagtgaaaatgagaatccgcatgcacgcggatctttttcatacaagagtctcagaaagggaggccccagccaacgagaacagtacctgccaggggctatcgcccttttcaatgtcaacaattcctcgaataaggaccaggaacctgaagagaagaagaaaaagaaaaaggagaagaagtctaagtctgatgacaagaacgagaataaaaacgatccagagaagtag

SEQ ID NO: 268198 - DNA, 300 bp, Artificial Sequence
  derived and/or modified sequence
atgaagctgagcatgaagaacaacatcatcaacacccagcagagcttcgtcaccatgcccaacgtgatcgtgccggacattgaaaaagaaatccggaggatggaaaatggagcctgtagctctttctctgaggatgacgattcagcatctaccagcgaagaaagcgagaatgaaaaccctcacgcaagagggagtttttcttataagtcccttcgcaaggggggaccttcccagcgggaacagtatctacccggagctatcgccctttttaacgtgaataattcatcaaacaaggattag

SEQ ID NO: 268199 - DNA, 2073 bp, Artificial Sequence
  derived and/or modified sequence
atgaagctgagcatgaagaacaacatcatcaacacccagcagagctttgttacaatgcccaatgtgatagtacctgacattgaaaaggaaatacgccggatggaaaacggcgcatgctcttcattcagtgaggatgacgactccgcctcgacctctgaggaaagcgagaacgagaatccccacgcccgcgggagtttctcatataagagtctgagaaagggggggccaagccagagagaacagtatttgcctggggcgatcgccctcttcaatgttaataattcttcgaataaggatcaggagcccgaagaaaagaaaaagaagaaaaaggaaaagaagtccaaaagcgatgataaaaatgaaaacaagaacgatccagaaaagaagaaaaaaaaaaaagataaggagaagaagaagaaggaggagaaaagtaaagacaagaaggaagaagaaaaaaaagaggtggttgttatcgatccctcaggcaacacctattataattggctgttctgtattacactccctgtcatgtataactggaccatggtaattgccagggcttgcttcgacgagctgcaatctgactacttagagtactggctgatcctggactacgtgtccgacatcgtctatctaattgacatgtttgtgcgtacgcggaccggatatcttgaacaaggcctgctagtgaaggaggagctcaaattgattaacaaatacaagtctaatttacaattcaagctggacgtactttcactgatccctaccgatctactctactttaaactgggatggaattaccccgagatacggctgaatcggctcttgcgattttccagaatgttcgagttcttccagcgcactgagaccaggacaaactacccgaacatcttcaggatatccaatcttgtaatgtacattgtgatcatcatacactggaacgcctgtgtgttttactccatcagtaaagccattgggtttggaaatgacacttgggtgtaccccgacataaacgatccagagttcggcaggctggcccgaaagtacgtgtacagcctgtactggtccacactgacccttacaacgatcggcgagaccccccctccggttcgggacagcgagtacgttttcgtggtggtggactttctcatcggcgtcttgatttttgcaacgatcgttgggaatatcggatccatgatctccaatatgaacgccgctagagcagaatttcaggctcgcatcgatgccatcaagcagtatatgcatttcaggaatgtgagcaaagatatggaaaaaagggtgataaaatggtttgattatctttggacaaataaaaaaacagtggatgagaaggaggtactgaagtacctgcctgacaaattgagggcggaaatcgctatcaacgtacatctggacaccctcaaaaaagtgagaatcttcgccgattgcgaggctggactgctcgtcgagctggtgctcaagttacagccacaagtttacagcccaggggactatatctgcaaaaagggagatatcgggagagagatgtacatcataaaagagggaaaactcgccgttgtggctgatgacggggtgacgcagtttgtggtgctgtctgatggcagttactttggcgagatctctatcctgaatatcaaggggtccaaggccggcaacagacgtactgctaatatcaaaagcattggttatagtgacctcttttgtctttctaaggacgacctgatggaggccctgacggaatacccagatgccaagacgatgttggaggaaaagggcaagcagatactaatgaaggacggacttctcgatttaaacatcgccaatgcaggcagcgatccaaaggacctcgaagagaaggtgaccaggatggagggatcggttgatcttctacagacacggttcgcgcgaatcctggcggaatacgaatccatgcagcaaaaactgaagcagcgccttacaaaggtcgagaaatttttgaagcctcttatagatactgagttttccagcatcgaaggacctggcgccgaaagcggccccatcgattccacatag

SEQ ID NO: 268200 - DNA, 300 bp, Artificial Sequence
  derived and/or modified sequence
atgaagctgagcatgaagaacaacatcatcaacacccagcagagctttgtgacgatgcccaatgttattgtccccgacatcgaaaaggaaattagaaggatggagaatggggcttgcagctcgttctccgaggatgacgactctgcatctacatccgaggagtcagagaacgaaaatccacacgcacggggaagtttctcgtataagagtctacgaaagggaggtcccagccaacgcgagcaatatcttcccggggcaattgcactgttcaacgtcaataattctagcaataaggattag

SEQ ID NO: 268201 - DNA, 2073 bp, Artificial Sequence
  derived and/or modified sequence
atgaagctgagcatgaagaacaacatcatcaacacccagcagagctttgtgacaatgccaaatgtgatcgtaccagacattgaaaaggagataagacggatggagaatggcgcttgcagtagctttagcgaagacgacgatagtgcttctacttccgaagaatctgaaaacgagaatccacacgcccgtggctcatttagctataaaagcctgcgcaaaggagggccatcccagagggaacagtatctccctggcgcaatagcactcttcaacgtgaataattctagcaataaggaccaggaacccgaagagaagaagaagaagaagaaggaaaaaaagtcaaaatcagatgataaaaatgagaacaagaatgacccagaaaaaaagaagaaaaagaaggacaaggagaagaagaaaaaggaggagaaaagtaaagacaaaaaggaggaggagaagaaagaggtcgtggtgattgaccccagcggcaatacttactacaactggcttttctgcataaccttgcctgtgatgtataactggaccatggttatagccagagcgtgttttgatgagttacagtcagactaccttgaatattggctgatcctcgattacgtgtccgacatcgtgtacctaattgacatgttcgtcagaacccggactggttacctagagcagggcctgctggtgaaagaagagctaaaactgattaataaatacaagagcaacttacagtttaagctagacgtgctgagcctgattcccaccgatctactgtacttcaagctgggctggaattaccccgagatcaggctcaacaggctcctccgattcagccggatgtttgagttttttcagcgcaccgaaactcgcacaaattatcccaatatcttccgaattagcaatttggtgatgtatatcgtgattattatccactggaatgcttgtgtgttttacagcatctccaaggccatagggttcgggaacgacacttgggtgtaccccgatataaacgaccccgagtttggcagactggctcggaaatatgtgtatagcttgtattggagcacgctcacactgacgacgattggggaaactccaccacctgtccgagatagcgagtacgtcttcgtcgtggttgattttctaataggtgtcctcatttttgcaactattgtcgggaatatcggatccatgatcagcaatatgaacgcggcccgtgcggagttccaggcacgcatcgatgcgatcaaacagtatatgcattttaggaacgtttcaaaggacatggagaagagggtgattaagtggttcgactacctgtggaccaacaagaaaactgtcgatgagaaggaagttctcaagtacttgccagataagcttcgtgcggagatcgcaattaacgtccaccttgacactctgaagaaagtgcggattttcgccgattgcgaggccggcctgctggtggaactcgtactgaaacttcaacctcaggtgtattctcccggcgattatatttgcaaaaagggggacatcggccgagaaatgtacattattaaggaaggaaagctagcggttgtggccgatgacggagtcacacagtttgttgtcttgtcagatggttcctattttggcgagatatcaatcctcaacatcaaaggtagcaaggccggaaaccgacgaacagctaacatcaagtcaatcgggtattcagatctattctgtctcagtaaggatgacctaatggaggcactgacagaatatcccgatgctaagacgatgctggaagagaagggcaagcagatccttatgaaggacggactgctggacctaaatatcgcgaacgccggcagcgaccctaaggacctcgaagagaaggtgacgagaatggaaggatcagtggatctgctgcagacgcggttcgccaggatactggcagagtacgagagcatgcaacaaaagctgaaacagcggctgacgaaagtggagaagttccttaagcccctcattgacacagaattctcttctattgaagggcctggcgctgaatctggccccattgactctacttag

SEQ ID NO: 268202 - DNA, 2073 bp, Artificial Sequence
  derived and/or modified sequence
atgaagctttctatgaaaaataacattatcaatactcagcaatctttcgtgactatgcctaatgtaattgtgcccgacatcgagaaggagatacgcaggatggagaacggcgcatgctcatccttctccgaggacgatgactcagcatccactagtgaggagtccgagaatgagaatccgcacgcaagagggtctttttcttacaagtccctgaggaagggtgggccatcacagcgggaacagtatctacccggtgccatagcattattcaacgtgaacaacagttccaacaaagatcaggagccagaggagaaaaaaaagaagaaaaaagagaagaagtccaaatcggacgacaagaacgagaacaaaaacgatccagagaagaaaaaaaaaaaaaaagataaagaaaaaaaaaaaaaagaagagaagtcgaaggataagaaggaggaagagaagaaggaggtagtggtgatcgacccttctggtaatacttattacaactggctgttttgtattaccctgcccgttatgtataactggaccatggtgatcgcccgagcttgtttcgatgaattgcagtccgactacctcgagtattggcttattcttgattatgtgtcagatatcgtttacttgatcgacatgtttgttagaacccgtacagggtatctggagcagggactgttggttaaggaagagctgaaactgataaataaatacaagtctaatctgcagtttaaactcgatgtcttgtcgctgatcccgaccgacctgctttatttcaaattgggttggaactatcccgaaatccggctgaataggttactcagattctctagaatgtttgagttttttcagcggactgaaacccggacaaattaccctaatatctttcgcattagcaatctggtgatgtacatcgttattattatacactggaacgcttgtgtgttctattctattagcaaggctatcggttttggtaacgatacttgggtttaccctgatatcaatgaccctgagtttggacgactcgcacgcaaatatgtttatagcctgtactggtcaactctgacactcacaaccatcggcgagacacctccgccagtgcgcgactccgagtacgtttttgtagtagtcgattttctaataggcgtgctgatcttcgcaaccattgtgggcaacattggctcaatgatcagcaacatgaacgccgctcgggcagaattccaggctcggatcgatgcaattaaacagtatatgcactttcgcaacgtctctaaggacatggaaaagagggtcataaaatggttcgattacctgtggacaaacaaaaaaacggtcgacgagaaagaagttttgaaatacctgcccgacaaactcagagcagagatagctatcaatgtgcacttagacactttgaagaaagttagaatctttgctgattgcgaagccggactgctggttgagcttgttcttaaactccagccccaagtctatagccctggagattatatatgcaagaaaggggacattggcagggaaatgtacatcattaaggaaggaaaactggcagtcgtagccgatgacggcgtgacccagtttgtcgtgctgtccgacggctcctactttggcgagattagtatccttaacatcaaagggtccaaagccggaaaccggagaacggcaaacatcaagagcataggttactccgatctattctgtctcagcaaagacgatctcatggaggccctcaccgagtatccagatgcaaaaacaatgcttgaagaaaaaggtaagcagattctaatgaaggacgggctcctggacttgaatatcgccaacgccggtagcgaccctaaggacctagaggagaaggtcacacgcatggaagggtcggtggacctgcttcaaacccgcttcgcccgtatccttgctgaatatgagtccatgcagcaaaaactgaagcagcggctgactaaagttgaaaaatttctgaaaccactgattgacaccgaatttagtagtatcgaaggccctggcgctgagtcaggacccatcgattccacatag

SEQ ID NO: 268203 - DNA, 2073 bp, Artificial Sequence
  derived and/or modified sequence
atgaagctcagcatgaaaaataatattatcaacacacagcagagcttcgtgacaatgccaaacgtgatcgtgcctgacatcgagaaggagattcgcagaatggagaatggggcatgtagctccttctcggaagacgatgactccgctagcacctctgaagaatccgagaatgagaaccctcacgcccgaggctcctttagttataaatcacttcgcaaggggggtccttcccaaagggagcagtacctacccggagcaatcgccctgttcaacgtaaacaattcctcaaataaagatcaagagcccgaggaaaagaagaaaaagaagaaggaaaaaaagtctaagtccgacgacaaaaatgaaaacaaaaatgatcccgaaaagaagaagaaaaagaaggacaaagaaaaaaagaagaaagaagagaagtccaaagataagaaggaagaggagaagaaggaggtagtggtcatagatccctccggaaatacatattacaattggctgttctgcatcacccttcccgttatgtataactggactatggttattgccagggcgtgttttgatgaattgcagtcggattacctggagtattggcttatcctcgactacgtgagcgacattgtatacctgatcgacatgtttgtgagaacacgcacaggttatctggagcagggcctgctcgttaaggaagagctaaaactgatcaacaagtataaatcaaacctccagtttaaacttgacgtccttagtctgatcccaaccgatttgctgtattttaagctaggctggaattatcccgaaataagactaaaccgccttctgcgctttagccgcatgtttgaattcttccagcggacagaaactaggacaaactatcccaacatttttcgcatcagcaatcttgtgatgtatatcgtaatcatcattcattggaatgcctgcgtgttctactcaatctcaaaagcaatcggattcggaaatgatacctgggtgtaccccgatattaatgatcccgagttcggacggctggcgcgtaaatacgtgtactctttgtattggtctactttgacactgaccaccattggagagacgcccccaccggtgcgagatagcgagtacgtctttgtcgtagtggatttcctgataggagtccttatcttcgccacaattgttggcaacatcggctccatgatctctaacatgaatgcagcaagggcagagtttcaggcacgcatcgatgccattaagcaatacatgcactttcggaatgtctctaaggatatggagaagcgggtgattaaatggttcgactatctttggaccaacaagaaaactgtcgacgagaaagaggtgctcaagtatttgcccgacaagctccgggcagagatcgccatcaacgtccacctggataccctcaagaaagtgagaatcttcgctgattgtgaagccggacttttggttgagctcgtgctaaagctgcaacctcaggtctatagtccgggagactatatctgcaaaaaaggcgacatcggcagagagatgtatatcattaaagaaggaaaactagccgtggtagcagacgatggcgtcacacagtttgtggtcctgtccgacggctcctacttcggagaaatctcgatccttaatatcaaagggtccaaggcgggtaataggcgcacagccaacataaaaagcatcggatacagcgatttattctgtctgagcaaagacgatctgatggaggcactcactgaatatcctgatgctaaaaccatgctcgaagaaaagggcaagcagatcttgatgaaggatggattgctcgatttaaacatagccaacgcgggatcggacccaaaggatctagaggaaaaggtcactcgcatggagggaagtgtggaccttctccagacccgatttgccaggatccttgccgagtatgaaagcatgcaacagaagctaaaacagagactcacaaaagtcgaaaagttcctcaaacctttgatcgacactgagttctcatccatcgagggccctggcgctgaatctggcccaatcgacagcacctag

SEQ ID NO: 268204 - DNA, 387 bp, Artificial Sequence
  derived and/or modified sequence
atgaaacttagtatgaaaaataacatcattaatacacagcagagttttgtcactatgcccaatgtcattgtaccggacattgagaaggaaatcaggcgaatggaaaacggtgcctgttcttcgttttctgaagatgacgactcagcctcaacaagcgaggagagtgaaaacgagaacccccatgccagggggtccttctcttacaagtctctgagaaagggcggaccaagccagcgcgaacaatatctgcctggcgcaattgccctcttcaatgtgaacaactcctcaaacaaggatcaggaacctgaagaaaaaaagaaaaaaaaaaaagaaaagaagtccaagtctgacgataagaacgaaaacaagaatgatcccgagaagtag

SEQ ID NO: 268205 - DNA, 300 bp, Artificial Sequence
  derived and/or modified sequence
atgaaattgtccatgaagaacaatatcattaacacccagcaatcatttgtgacaatgcctaacgtgatcgtccccgatatcgaaaaagagatacggaggatggagaatggcgcatgttcctccttttcggaggatgacgactccgcctcaacgagtgaggaaagcgagaatgagaatcctcacgcacggggatcgttcagttataagagccttaggaagggagggccatctcagcgggaacagtatcttcctggcgctatcgctctgttcaacgtgaacaactccagtaataaagattag

SEQ ID NO: 268206 - DNA, 2073 bp, Artificial Sequence
  derived and/or modified sequence
atgaaacttagcatgaagaacaacataatcaatactcaacaatctttcgtgacaatgcctaatgttatagttccggacatcgagaaagaaattcgtcggatggaaaacggggcatgttctagcttctcagaggacgatgacagcgctagcacttccgaggaatctgagaacgaaaaccctcacgccagaggtagcttttcttataaatctctgcgcaagggcggacccagccagagagaacaatacttacctggagcgatcgctctatttaacgtgaacaatagctctaataaagatcaggagcccgaagaaaaaaagaagaaaaagaaggagaagaagagcaaatctgacgataagaacgagaacaaaaatgaccccgaaaagaaaaaaaagaaaaaggacaaggagaaaaagaaaaaagaggaaaagagtaaagacaaaaaagaagaggagaagaaagaggtggtcgtgatcgacccttctggcaatacatactacaattggctgttttgcattacccttcctgtaatgtataattggaccatggtgatcgcccgagcgtgctttgatgagcttcaaagcgattatttggaatattggctcatcctggattacgttagcgatatagtgtatctgatcgacatgtttgtgaggacccgcaccggatacctggaacaaggattgttggtgaaggaagagctcaagcttattaataagtataagtctaatctgcaattcaaactggacgtgctgtccctaataccgactgacctgctgtactttaaacttggttggaattaccccgaaattcgcctcaacaggctgctgcgcttctcacgcatgttcgagttcttccaaaggaccgaaacacggactaactacccaaatatattccgtattagcaaccttgttatgtatatcgttatcatcatccactggaacgcatgtgtcttctattctattagcaaagctatcggttttggcaatgacacttgggtgtatcctgacatcaacgatccagagttcggaaggcttgcgagaaagtacgtctactccttgtactggagtactcttaccctcaccacaattggtgaaacccccccaccggtgcgagattcggagtatgtgtttgtagtggttgatttcctgatcggggtcttgattttcgcgactattgtggggaacatcgggagtatgatttccaatatgaacgccgcacgcgcagagtttcaagccaggatagatgccattaaacagtacatgcacttcaggaacgtgtctaaagacatggagaagcgtgtgatcaaatggtttgattacttgtggacaaacaagaagaccgttgacgaaaaggaagtgttaaagtacctgccagacaaattacgagccgagattgccatcaatgttcacctggatacactgaagaaagtgagaattttcgcagattgtgaagccggactcttggtagagcttgtcctcaagttacaacctcaggtctactctccaggagattacatctgtaagaaaggggacatcggcagggaaatgtacataatcaaggagggaaagctggccgttgttgctgatgatggcgtgacacagttcgtggtgctgtccgatgggtcgtattttggggaaatcagcatcttgaacattaagggctccaaggccggtaacagacgcaccgcgaatataaagagcattggttactctgatctgttttgtctatctaaagacgatctgatggaggcactgaccgaatatcccgacgcgaaaaccatgctagaggagaagggtaaacagattctgatgaaggatggcctgcttgacctgaacatcgcaaacgccggttctgatcccaaggatctggaggagaaagtcacaagaatggaaggatcagtggatctgttgcagaccagatttgcacgtatcctcgcagagtacgagagtatgcagcagaaactcaaacagcggcttaccaaggtagaaaagttcttaaagccattaatcgacaccgagtttagcagtatcgagggccctggcgctgagagtggacccattgactccacttag

SEQ ID NO: 268207 - DNA, 300 bp, Artificial Sequence
  derived and/or modified sequence
atgaagctgtcaatgaaaaacaacatcataaacacgcagcagtcctttgtaaccatgcccaacgtaattgtgcctgacattgagaaggagattaggcgtatggaaaatggggcttgttcttcattctccgaggacgatgatagcgcttctacatctgaggaatctgaaaacgagaatccccacgctagagggtctttttcttataagagcctccgcaagggtggtccatcacagcgagagcagtaccttcctggggcaatcgccctgtttaacgtcaataacagcagtaacaaggactag

SEQ ID NO: 268208 - DNA, 2073 bp, Artificial Sequence
  derived and/or modified sequence
atgaagttgtccatgaagaataatatcatcaatacccagcagtcttttgttacaatgccaaatgtgatcgtccccgacattgaaaaagagataaggaggatggagaacggcgcttgctcatcgttttcagaagatgacgactcagcctccacatcagaggagtccgaaaacgagaatccccatgcccgtggttccttttcctataagagcctacgtaaagggggaccatctcagcgggagcagtacttgcctggggctatcgctctgtttaacgtcaataattcctccaataaggaccaggaacccgaggaaaagaagaagaaaaagaaggagaaaaagtccaaatccgatgataagaatgaaaataaaaacgatccggagaagaagaagaagaagaaggataaggaaaagaagaagaaggaagagaaaagcaaggataagaaagaggaggagaagaaggaagtcgtcgtcattgacccatctggcaacacttattataactggctcttctgcataacgctgccggtgatgtacaactggacgatggtcatagcgcgagcatgtttcgatgagttgcaatccgattatctggagtattggctcatcttagactatgtgtccgacatcgtctatcttatcgacatgtttgtccgaacgcggacgggttacctggaacagggcctgctggtcaaggaggaattgaaattaatcaacaagtataagtccaacctgcagttcaagcttgatgtccttagtctgattccaaccgacctcctgtactttaagctggggtggaactaccccgagatccgtctcaaccggctgcttagattctcacggatgttcgagttttttcagcgcactgagacgcgcaccaactacccaaacattttcaggattagtaacctggttatgtatattgttatcattattcactggaacgcatgtgtcttctattccatctcaaaggcaattggattcggtaatgacacatgggtctaccccgacatcaatgaccccgaattcggaagacttgctagaaaatacgtgtatagtttatattggagtacactgactctgactacaatcggagaaaccccaccgcctgtgcgcgattccgaatacgtgttcgttgtggttgatttcctcattggagtgctgatatttgctaccattgtcggcaacattgggagcatgatatccaacatgaacgcagcacgcgctgaattccaggctagaatcgatgcgatcaagcagtatatgcacttccggaatgtaagcaaagacatggagaaacgcgtgattaaatggttcgattacttgtggacaaataaaaaaactgttgatgaaaaagaagtgctgaaatatctacccgataagcttcgggcagagatcgcaattaacgttcatctagacactctgaaaaaggtgaggatctttgcagattgtgaggcgggtctcctggtcgaactggtgcttaagttacagccgcaagtttactcgcccggtgactatatctgtaagaagggagatatcggacgcgaaatgtacataatcaaagaaggcaaactggccgtggtggccgatgatggcgtgacacaattcgtagtgttgtctgacgggagctacttcggtgagatctctatactgaacataaagggctccaaggcaggcaatcgacgcactgcaaacattaagtccataggatactcagatctgttttgtctcagcaaagatgatttgatggaggccctgactgagtatcccgatgctaagacaatgctggaggaaaagggaaaacagatcctgatgaaagacgggcttctggatttgaacattgcaaacgccggtagtgaccccaaggatctcgaagagaaggttacacgaatggagggcagcgtggacctgctgcagacaagattcgccagaatcctggccgagtacgagtccatgcagcagaagctgaaacagagactcacaaaggtcgagaagttcctgaaaccccttattgacacggagttttctagcattgagggaccgggagcagagagtggaccgatcgactcaacttag

SEQ ID NO: 268209 - DNA, 2073 bp, Artificial Sequence
  derived and/or modified sequence
atgaagctgagcatgaagaacaacatcatcaacacccagcagagcttcgtgaccatgcccaacgtgatcgtgcccgacatcgagaaggagatcagaagaatggagaacggcgcctgcagcagcttcagcgaggacgacgacagcgccagcaccagcgaggagagcgagaacgagaacccccacgccagaggcagcttcagctacaagagcctgagaaagggcggccccagccagagagagcagtacctgcccggcgccatcgccctgttcaacgtgaacaacagcagcaacaaggaccaggagcccgaggagaagaagaagaagaagaaggagaagaagagcaagagcgacgacaagaacgagaacaagaacgaccccgagaagaagaagaagaagaaggacaaggagaagaagaagaaggaggagaagagcaaggacaagaaggaggaggagaagaaggaggtggtggtgatcgaccccagcggcaacacctactacaactggctgttctgcatcaccctgcccgtgatgtacaactggaccatggtgatcgccagagcctgcttcgacgagctgcagagcgactacctggagtactggctgatcctggactacgtgagcgacatcgtgtacctgatcgacatgttcgtgagaaccagaaccggctacctggagcagggcctgctggtgaaggaggagctgaagctgatcaacaagtacaagagcaacctgcagttcaagctggacgtgctgagcctgatccccaccgacctgctgtacttcaagctgggctggaactaccccgagatcagactgaacagactgctgagattcagcagaatgttcgagttcttccagagaaccgagaccagaaccaactaccccaacatcttcagaatcagcaacctggtgatgtacatcgtgatcatcatccactggaacgcctgcgtgttctacagcatcagcaaggccatcggcttcggcaacgacacctgggtgtaccccgacatcaacgaccccgagttcggcagactggccagaaagtacgtgtacagcctgtactggagcaccctgaccctgaccaccatcggcgagacccccccccccgtgagagacagcgagtacgtgttcgtggtggtggacttcctgatcggcgtgctgatcttcgccaccatcgtgggcaacatcggcagcatgatcagcaacatgaacgccgccagagccgagttccaggccagaatcgacgccatcaagcagtacatgcacttcagaaacgtgagcaaggacatggagaagagagtgatcaagtggttcgactacctgtggaccaacaagaagaccgtggacgagaaggaggtgctgaagtacctgcccgacaagctgagagccgagatcgccatcaacgtgcacctggacaccctgaagaaggtgagaatcttcgccgactgcgaggccggcctgctggtggagctggtgctgaagctgcagccccaggtgtacagccccggcgactacatctgcaagaagggcgacatcggcagagagatgtacatcatcaaggagggcaagctggccgtggtggccgacgacggcgtgacccagttcgtggtgctgagcgacggcagctacttcggcgagatcagcatcctgaacatcaagggcagcaaggccggcaacagaagaaccgccaacatcaagagcatcggctacagcgacctgttctgcctgagcaaggacgacctgatggaggccctgaccgagtaccccgacgccaagaccatgctggaggagaagggcaagcagatcctgatgaaggacggcctgctggacctgaacatcgccaacgccggcagcgaccccaaggacctggaggagaaggtgaccagaatggagggcagcgtggacctgctgcagaccagattcgccagaatcctggccgagtacgagagcatgcagcagaagctgaagcagagactgaccaaggtggagaagttcctgaagcccctgatcgacaccgagttcagcagcatcgagggccccggcgccgagagcggccccatcgacagcacctag

SEQ ID NO: 268210 - DNA, 387 bp, Artificial Sequence
  derived and/or modified sequence
atgaagctgagcatgaagaacaacatcatcaacacccagcagagcttcgtgaccatgcccaacgtgatcgtgcccgacatcgagaaggagatcagaagaatggagaacggcgcctgcagcagcttcagcgaggacgacgacagcgccagcaccagcgaggagagcgagaacgagaacccccacgccagaggcagcttcagctacaagagcctgagaaagggcggccccagccagagagagcagtacctgcccggcgccatcgccctgttcaacgtgaacaacagcagcaacaaggaccaggagcccgaggagaagaagaagaagaagaaggagaagaagagcaagagcgacgacaagaacgagaacaagaacgaccccgagaagtag

SEQ ID NO: 268211 - DNA, 300 bp, Artificial Sequence
  derived and/or modified sequence
atgaagctgagcatgaagaacaacatcatcaacacccagcagagcttcgtgaccatgcccaacgtgatcgtgcccgacatcgagaaggagatcagaagaatggagaacggcgcctgcagcagcttcagcgaggacgacgacagcgccagcaccagcgaggagagcgagaacgagaacccccacgccagaggcagcttcagctacaagagcctgagaaagggcggccccagccagagagagcagtacctgcccggcgccatcgccctgttcaacgtgaacaacagcagcaacaaggactag

SEQ ID NO: 268212 - protein, 81 aa, Artificial Sequence
  derived and/or modified sequence
MMFPLARNALSSLKIQSILQSMARHSHVKHSPDFHDKYGNAVLASGTAFCVATWVFTATQIGIEWNLSPVGRVTPKEWKHQ

SEQ ID NO: 268213 - protein, 32 aa, Artificial Sequence
  derived and/or modified sequence
MMFPLARNALSSLKIQSILQSMARHSHVKHSP

SEQ ID NO: 268214 - protein, 80 aa, Artificial Sequence
  derived and/or modified sequence
MFPLARNALSSLKIQSILQSMARHSHVKHSPDFHDKYGNAVLASGTAFCVATWVFTATQIGIEWNLSPVGRVTPKEWKHQ

SEQ ID NO: 268215 - DNA, 246 bp, Artificial Sequence
  derived and/or modified sequence
atgatgttccctcttgctaggaatgcccttagttccctcaagattcagtccattctccagtccatggcccgccacagccatgttaaacatagccctgactttcacgacaaatacggtaacgccgtcctagcaagcggcaccgccttttgtgttgcaacctgggtttttactgccactcagataggaattgaatggaacctgagcccggtggggcgggtcactcccaaggagtggaagcaccagtag

SEQ ID NO: 268216 - DNA, 246 bp, Artificial Sequence
  derived and/or modified sequence
atgatgtttcctctagcaaggaacgcgttgtcaagcctgaagatccagtctatcctgcagagtatggcccgacattcacacgtgaagcattctccagatttccacgataagtatgggaacgctgtgcttgcaagtggaacagctttctgcgttgcaacttgggtgtttactgccacacaaataggtatagagtggaatctgtctccggttggacgggtcacgcctaaggagtggaaacaccagtag

SEQ ID NO: 268217 - DNA, 246 bp, Artificial Sequence
  derived and/or modified sequence
atgatgttccccctggcacgcaatgccctttcgtcgctcaagatacagtctatcctgcaatccatggcgcggcactctcacgttaaacactctcctgatttccatgataaatacggtaacgctgtcctggcatcaggtacagcattctgcgtcgccacatgggtgtttaccgctactcagattggtatagaatggaacctgtctcctgtcgggcgagtaacacccaaggagtggaaacaccaatag

SEQ ID NO: 268218 - DNA, 99 bp, Artificial Sequence
  derived and/or modified sequence
atgatgtttccactcgcaaggaatgccctgtcctcgcttaagattcaatccattctccagagtatggctcgccactcacacgtcaaacattctccgtag

SEQ ID NO: 268219 - DNA, 243 bp, Artificial Sequence
  derived and/or modified sequence
atgttcccgctggcccggaatgccctcagctctctgaagattcagtcgatcctccagtccatggcccggcattcccatgtgaagcattcccccgattttcacgacaagtatggcaatgccgtgctcgcctccggtactgcattttgcgtggccacatgggtgtttacagcaacacagattggaatagaatggaacctctctccggtggggagggtaaccccaaaagagtggaaacaccagtag

SEQ ID NO: 268220 - DNA, 246 bp, Artificial Sequence
  derived and/or modified sequence
atgatgttccccctggccagaaatgccctgagcagcctgaagatccagagcatcctgcagagcatggcccggcacagccacgtgaagcacagcccagacttccatgacaagtatggaaatgctgtgctggccagcggcacagccttctgtgtggccacctgggtgttcaccgccacccagattggaattgagtggaacctgagccctgtgggccgggtgacccccaaggagtggaagcaccagtag

SEQ ID NO: 268221 - DNA, 99 bp, Artificial Sequence
  derived and/or modified sequence
atgatgttccccctggccagaaatgccctgagcagcctgaagatccagagcatcctgcagagcatggcccggcacagccacgtgaagcacagcccctag

SEQ ID NO: 268222 - DNA, 243 bp, Artificial Sequence
  derived and/or modified sequence
atgttccccctggccagaaatgccctgagcagcctgaagatccagagcatcctgcagagcatggcccggcacagccacgtgaagcacagcccagacttccatgacaagtatggaaatgctgtgctggccagcggcacagccttctgtgtggccacctgggtgttcaccgccacccagatcggcatcgagtggaacctgagccctgtgggccgggtgacccccaaggagtggaagcaccagtag

SEQ ID NO: 268223 - DNA, 246 bp, Artificial Sequence
  derived and/or modified sequence
atgatgttccccctggcccggaacgccctgagcagcctgaagatccaatccatcctgcagagcatggctagacacagccacgtcaaacattcccccgactttcatgacaagtacggaaatgctgttttggcctctggaactgccttctgcgttgcgacatgggtgttcactgcaacacaaatcggtatagagtggaacttgtcccccgttggtagggtcacacctaaggagtggaaacaccagtag

SEQ ID NO: 268224 - DNA, 246 bp, Artificial Sequence
  derived and/or modified sequence
atgatgttccccctggcccggaacgccctgagcagcctgaagatccagagcattctgcaaagcatggcccgtcattctcacgtaaagcacagtccagactttcacgacaagtacggcaacgccgttctggcttccggcacagccttctgcgtggctacatgggtatttacagctactcagatcggaatcgaatggaatctgtctccagtcgggagggtgacccccaaagaatggaaacaccagtag

SEQ ID NO: 268225 - DNA, 246 bp, Artificial Sequence
  derived and/or modified sequence
atgatgttccccctggcccggaacgccctgagcagcctgaagatccagtctattctgcaatccatggctaggcattcacatgtaaagcattcccccgacttccacgataaatacggcaacgcagtattagccagcggcaccgcattctgcgtagccacctgggtgttcaccgccactcagattgggattgaatggaatctgtcccccgtgggaagagttacaccaaaggaatggaagcaccagtag

SEQ ID NO: 268226 - DNA, 99 bp, Artificial Sequence
  derived and/or modified sequence
atgatgttccccctggcccggaacgccctgagcagcctgaagatccagtccatcctccagagcatggcccgtcacagtcacgtaaagcactctccgtag

SEQ ID NO: 268227 - DNA, 243 bp, Artificial Sequence
  derived and/or modified sequence
atgttccccctggcccggaacgccctgagcagcctgaagatccagtctatcttgcaatctatggccaggcactcccacgtgaaacacagtcccgactttcacgataagtatgggaacgctgtgctcgcctctggcacagcattctgtgtggctacttgggtattcacagcaacacaaattggaatcgagtggaacctttcccctgtcggacgggtgactccaaaagaatggaagcaccagtag

SEQ ID NO: 268228 - DNA, 246 bp, Artificial Sequence
  derived and/or modified sequence
atgatgttccctctggcacgcaacgcgctctcgagcctgaaaattcaatccatactccagtccatggccaggcattctcacgtaaaacacagcccggattttcatgacaagtacggaaacgcggttctcgcttcaggcaccgcgttctgtgttgcaacttgggtctttactgctactcagattggcatcgaatggaacctgtcacccgtgggcagagtgacccccaaagaatggaagcaccaatag

SEQ ID NO: 268229 - DNA, 246 bp, Artificial Sequence
  derived and/or modified sequence
atgatgtttccgctggccagaaacgccctatccagtctgaaaattcaatcaatactgcaatcaatggcccgacactcacacgtgaagcactctcctgactttcatgataagtacggcaatgccgtgttggcttccgggactgccttttgcgtggctacatgggttttcaccgcgacccaaattgggatcgagtggaacctatccccagtggggcgtgtcacgcccaaggaatggaagcatcagtag

SEQ ID NO: 268230 - DNA, 246 bp, Artificial Sequence
  derived and/or modified sequence
atgatgtttcctctggcaagaaacgccttatccagcctcaagatccaatcaattcttcagagtatggctaggcactcacacgtgaaacactctccggacttccacgacaagtatgggaacgcagttctggcatcaggcactgctttctgcgtggctacctgggtcttcaccgctactcagattggaatcgagtggaatctcagcccagtgggacgcgtgacgccaaaggaatggaaacaccagtag

SEQ ID NO: 268231 - DNA, 99 bp, Artificial Sequence
  derived and/or modified sequence
atgatgtttcccctggccaggaatgccctgtcctcgctgaagattcagtcaatcctgcaatccatggctcgccatagtcacgtaaagcacagtccttag

SEQ ID NO: 268232 - DNA, 243 bp, Artificial Sequence
  derived and/or modified sequence
atgttcccgcttgccagaaatgcactatcatcattaaagatccaatccatcctccaaagtatggccaggcacagtcacgtgaaacactctccagactttcacgacaagtatgggaatgccgttctggccagtggtacagccttttgtgttgctacttgggtcttcactgcgactcagatcggaattgaatggaatctctcaccagtaggtcgagtgacccctaaggagtggaagcaccagtag

SEQ ID NO: 268233 - DNA, 489 bp, Artificial Sequence
  derived and/or modified sequence
gtgatcatcttttctttgacattggaagcagaatctgaaactttctgaggagagcatttgagcttcagatttctaacagcctctttgcaacaaaatagaccagtagctgaaggcaactgcaatccttcatgatgtttcccttggccagaaatgcactaagcagtctcaagattcaaagcattctgcaaagcatggcaagacatagccatgtaaaacactcaccagattttcatgataaatatggtaatgctgtgctagccagtggaactgctttctgtgttgctacatgggtgtttacagccactcagattggaatagaatggaacctatcccctgttggcagagttaccccaaaagagtggaaacatcagtaaccatcacagttgctgtaatgacagaattgtttaaaaaaccaacttgtcatgtaagcactctactgcttattaaaatatagcacaattgaaaaaataaaatgtgttttaaatcttt

SEQ ID NO: 268234 - DNA, 542 bp, Artificial Sequence
  derived and/or modified sequence
ggctgtaaaacggaaaggttcggaatttgcctctgcgccgtctttttttgcctgttacctgtgacgtccttggaagcagaatctgaaactttctgaggagagcatttgagcttcagatttctaacagcctctttgcaacaaaatagaccagtagctgaaggcaactgcaatccttcatgatgtttcccttggccagaaatgcactaagcagtctcaagattcaaagcattctgcaaagcatggcaagacatagccatgtaaaacactcaccagattttcatgataaatatggtaatgctgtgctagccagtggaactgctttctgtgttgctacatgggtgtttacagccactcagattggaatagaatggaacctatcccctgttggcagagttaccccaaaagagtggaaacatcagtaaccatcacagttgctgtaatgacagaattgtttaaaaaaccaacttgtcatgtaagcactctactgcttattaaaatatagcacaattgaaaaaataaaatgtgttttaaatctttaaaaa

SEQ ID NO: 268235 - DNA, 617 bp, Artificial Sequence
  derived and/or modified sequence
atttgcctctgcgccgtctttttttgcctgttacctgtgacgtccttgaaaatgaaaagctttcttaagacaataggacgggccgggcgcggtggctcatgcctgtaatcctaacactctgggaggccgaggttggcggatcacgaggaagcagaatctgaaactttctgaggagagcatttgagcttcagatttctaacagcctctttgcaacaaaatagaccagtagctgaaggcaactgcaatccttcatgatgtttcccttggccagaaatgcactaagcagtctcaagattcaaagcattctgcaaagcatggcaagacatagccatgtaaaacactcaccagattttcatgataaatatggtaatgctgtgctagccagtggaactgctttctgtgttgctacatgggtgtttacagccactcagattggaatagaatggaacctatcccctgttggcagagttaccccaaaagagtggaaacatcagtaaccatcacagttgctgtaatgacagaattgtttaaaaaaccaacttgtcatgtaagcactctactgcttattaaaatatagcacaattgaaaaaataaaatgtgttttaaatctttaaaaa

SEQ ID NO: 268236 - DNA, 417 bp, Artificial Sequence
  derived and/or modified sequence
tccaggctgtaaaacggaaaggttcggaatttgcctctgcgccgtctttttttgcctgttacctgtgacgtccttgatgattattcttttggctctttacaatgtagctaggaaaaatttgtctttgatgtgatataatatctgaatccctggaggaactacagtcatgcatcgctgaacagcaaggatatatgttctgaaaaatgcatcattaggaagcagaatctgaaactttctgaggagagcatttgagcttcagatttctaacagcctctttgcaacaaaatagaccagtagctgaaggcaactgcaatccttcatgatgtttcccttggccagaaatgcactaagcagtctcaagattcaaagcattctgcaaagcatggcaagacatagccatgtaaaacactcaccaga

SEQ ID NO: 268237 - DNA, 587 bp, Artificial Sequence
  derived and/or modified sequence
ctttttttctattcttgttttagaaaatgaaaagctttcttaagacaataggacgggccgggcgcggtggctcatgcctgtaatcctaacactctgggaggccgaggttggcggatcacgaggaagcagaatctgaaactttctgaggagagcatttgagcttcagatttctaacagcctctttgcaacaaaatagaccagtagctgaaggcaactgcaatccttcatgatgtttcccttggccagaaatgcactaagcagtctcaagattcaaagcattctgcaaagcatggcaagacatagccatgtaaaacactcaccagattttcatgataaatatggtaatgctgtgctagccagtggaactgctttctgtgttgctacatgggtgtttacagccactcagattggaatagaatggaacctatcccctgttggcagagttaccccaaaagagtggaaacatcagtaaccatcacagttgctgtaatgacagaattgtttaaaaaaccaacttgtcatgtaagcactctactgcttattaaaatatagcacaattgaaaaaataaaatgtgttttaaatcttt

SEQ ID NO: 268238 - DNA, 246 bp, Artificial Sequence
  derived and/or modified sequence
atgatgttccccctggccagaaacgccctgagcagcctgaagatccagagcatcctgcagagcatggccagacacagccacgtgaagcacagccccgacttccacgacaagtacggcaacgccgtgctggccagcggcaccgccttctgcgtggccacctgggtgttcaccgccacccagatcggcatcgagtggaacctgagccccgtgggcagagtgacccccaaggagtggaagcaccagtag

SEQ ID NO: 268239 - DNA, 99 bp, Artificial Sequence
  derived and/or modified sequence
atgatgttccccctggccagaaacgccctgagcagcctgaagatccagagcatcctgcagagcatggccagacacagccacgtgaagcacagcccctag

SEQ ID NO: 268240 - DNA, 243 bp, Artificial Sequence
  derived and/or modified sequence
atgttccccctggccagaaacgccctgagcagcctgaagatccagagcatcctgcagagcatggccagacacagccacgtgaagcacagccccgacttccacgacaagtacggcaacgccgtgctggccagcggcaccgccttctgcgtggccacctgggtgttcaccgccacccagatcggcatcgagtggaacctgagccccgtgggcagagtgacccccaaggagtggaagcaccagtag

SEQ ID NO: 268241 - DNA, 5467 bp, Artificial Sequence
  derived and/or modified sequence
agcatttcagccgcagcagcctgcttgtggacagagcaggggttggcagtggtgacgactgttttgggaaaggaaatgtaagggcatttcggctgctgtgctggggctgacgaggagcacacaggagagatgcccctcccatctcccagagtgggttggctggagttcattgcggagcatgaggacgtgtgggggacaatattatcttattcttgagaggttgtaaagagctcggccttaaagaatctcaactttttgacccgagtgacctccaggatacatccaacagagtaacagtcaagagccttgattatagtaggaagctgaaaaatgtattagttaccatttactggctgggaaaagcagcaaacagctgcacatcctacagcggaacgacactaaacctgaaggagtttgaaggattgttggctcagatgcgaaaggacactgatgacattgaaagtcctaaacgcagtatccgagacagtggctacatcgactgctgggattccgagcgcagcgactccctctctcctcctcgccacggcagagatgattccttcgacagcctggattcctttggctctcgctctcggcagacgccttcaccagatgtagtcctcaggggaagcagcgatgggagaggaagcgactctgaatccgacttgcctcatcggaagctgccagatgtgaagaaggatgacatgtctgcacggcggacttcccatggtgagccgaaatcagcagtgccttttaaccagtacctcccgaacaaaagcaatcagacggcctacgtccccgcgcctctgagaaagaagaaagcagagagagaggaataccgcaagagctggagtaccgccacctccccgctgggtggggagaggcccttcagctttcctgaaacgatagaggaagaggggagtgaagtggggtctgctggtgaagacaacccagctggccaaatgaatcctggttggaagccttccgatggtgggtgtgaattacctgacggcagtggtaaggagcacccttcttcagacggggctgtggtggcaccagctcccaagtctgaagaaaaagatgctgctgagatccaaaagcgcaaaaggctagagcaagctggaatcaaggtcatgccagcagcacagcgctttgccagtcaaaaacaattaagtgaagagaaagaagctattcgtgatattgtccttcgcaaagaaaactctttcctgacccaccaacatggcaacgattcagaggcagaaggtgaagttgtgtgtcgactgcctgatcttgagaaggatgactttgctgcaaggagagcaaggatgaaccaaaccaagccaatggtgccattaaatcaactcctctatggcccttatccaaagaaaggggcagagaaatcagatggcagcaaacagctctcaaagggaatctcaaaaaaaagaagtctagaatataaaagaaaccagggccacacagaagaggtgaagttgatagtgacctgtaacatgagggctcaggaaagtgaacctgtggaaggaggactcaggaaggtgccagatcttcacaaggatgacctggcccagcagagaattcagggcagccttgcccctcaccgcgagcccccgagcttcattacgctctccaacataacagaagctgacttggagacgtgggagagactcaaagtgtcagaaaaggcgagggatggagatgttcagcacatctgtgcttctgagccttccccagaaattaaagcagaaactgccattcgtgatgactttgccaaccgcaaagcaagggcctctaagaaagcttccagccccaggcaaaagtttgtgcactttgggccagtgacggagctagatcagcagaaatggaagcggcttagcattggcaaggctgggcctagagaggatgaagaagaagtcatctgtcatggcagcaagattcaaatggactctgtgtctcctgtctcagcggccacttccagcttaaagggccaccaaatatttaatcgacaaaatgactgcagaacaatgaattgtggccgaggtgactattgcagaagggcctcgtggctggctcctgtgccggagtctcaggaagagtgggtctgcagtttgggcgagtgcccgagggggacagaggaagttacatccaaacagctgccacaggatggcaaagaagaaacagaaagcgctccaagagattctgagaggctgtcaaaggcagaaagatcagaggacagcagccagccactggtgtgtcctctggcctctgagtgtgaggcttcagggacagaagagaagttggagaagatgacagctcctgcctggagtggcagtggactgaaaggccagcgaaagttggatgattcacgaaaagatgacatgatggccaggagaactgggatgtcccttagacacactggatccaacccaaaccagttccttccagttccatttgcaaagcaacaggatgtggaagaatcttctaaaggtctacccatgaaagatcagagatacggtccgagaactcctgtgtctgatgacgcagagagcaccagcatgtttgacatgcggtgtgaggaggaggccgcggtgcagccgcacagcagggcccgccaggagcagctgcagctgataaataaccagctgagggaagaggacgacaaatggcaagatgacctggctcgttggaagagtcgtagaagaagtgtttctcaggacttaatcaagaaagaggaagaaaggaaaaaaatggagaagttactggctggagaagatgggacaagtgaacgaaggaaaagcatcaaaacctacagagaaattgttcaagaaaaagagcggagagagagagagctgcatgaagcatataagaacgctcggtcccaggaggaggcagaggggatccttcaacagtacattgagaggttcaccatcagtgaggctgttctcgaacgcttggagatgccaaaaattctggaaagaagccattcaacagagccaaatttatcctccttcctgaatgaccccaatcccatgaaatacctgcggcaacagtcactgcctccacccaaattcactgccactgttgaaaccaccattgctcgtgccagtgttctggataccagcatgtcagcaggcagtgggtctccaagcaaaactgtcactcccaaagcagtgcctatgctgacacccaagccttactcccagcccaaaaattctcaagatgttctgaagacctttaaggtagacgggaaagtcagtgtgaatggagagacggttcatagagaggaggagaaggaaagagagtgtcccacggtggcacctgcccactccttaaccaaatcccagatgtttgaaggtgtggccagagtgcacgggtctccactggagctgaaacaagacaacggtagcatcgagatcaacataaagaagccaaactctgttccccaagagctcgcagcaaccactgagaaaacggaaccgaatagtcaagaggacaagaatgatggtggaaaatcaagaaaagggaatatagaacttgcctcatcagaaccacagcattttacaacaactgtgactcgatgcagcccgaccgtggcctttgtggaatttccctccagcccccagctgaagaatgatgtgtcggaagaaaaagaccagaagaaaccagaaaatgaaatgagtggaaaggtggagttggtgctgtcacaaaaggtggtaaagccaaaatctccagaacccgaagcaacgctgacatttccatttctggacaaaatgcctgaagccaaccaactacatttgccaaatctcaattctcaagtggattctccaagcagtgagaagtcacctgttatgacaccttttaagttctgggcatgggacccagaagaggagcgcaggcgacaggaaaaatggcaacaggaacaggaacgtttgctccaggagagataccagaaggagcaggacaagctgaaagaagagtgggaaaaggcccaaaaggaggtggaagaggaagaacgcagatactatgaggaggagcgtaagataattgaagacactgtggttccatttactgtttcttcaagttccgctgaccagctgtctacctcttcctccatgactgaaggcagtgggacaatgaataagatagacctgggaaactgtcaagatgaaaaacaagacagaagatggaagaaatcattccagggagatgacagtgacttattgctgaagactagggaaagtgatcgactggaggagaagggcagcctaactgaaggggccttggctcattctgggaaccctgtatcaaaaggagtccatgaagaccatcagctggataccgaggctggggccccacactgtggaacaaacccacagcttgctcaggatccatcccagaatcagcagacatcaaatccaacgcacagttcagaagatgtgaagccaaaaaccctcccgctggataaaagcattaaccatcagatcgagtctcccagtgaaaggcggaagaaaagtccccgagagcacttccaggctgggcctttctctccctgttctcccacccctcccggtcagtcaccaaacaggtctataagtggaaagaagctgtgctcttcctgtgggcttcctttgggtaaaggagctgcaatgatcatcgagaccctcaatctctattttcacatccagtgtttcaggtgtggaatttgtaaaggccagcttggagatgcagtgagtgggacggatgttaggattcgaaatggtctcctgaactgtaatgattgctacatgcgatccagaagtgccgggcagcctacaacattgtgacacggctttcaagcttccggatcactcaccatttctttactgagagtgtcccctggcaactgcttaacaaaatcccaagctcaggggcttctcagcatttacctaatttctgaaaggctcttctgaaaggtggtatctgttctttcgtagcacagtgtttatgtttttcctgtttattgttttggttttttttttttttttgcatttgcacagtatacacaaaagaatatggggttgtaatgatcctgaatagctcaaaaaaggttttagcatggtcaaacaggcttatggtttaaaatgtgttattctcttctttgggaattagctaaatgatgcaataaacctgttttgttttagaatgtctaggaattaaacactttatgtttacagaattgagctgcagaaagtgcaagacatgccaatttgagacacacggtcttctaagactgaaggataaatttaatgcatttcagaaactaaacatcacagcaagctctatctctgagctataatttgtttttaatgcaaagacactagtttgataatatatactgtaatcctgaaacatttgtgttacttacctttggaggtagaaattataccaataaattattgcaccgttagtatta

SEQ ID NO: 268242 - protein, 1466 aa, Artificial Sequence
  derived and/or modified sequence
RKDTDDIESPKRSIRDSGYIDCWDSERSDSLSPPRHGRDDSFDSLDSFGSRSRQTPSPDVVLRGSSDGRGSDSESDLPHRKLPDVKKDDMSARRTSHGEPKSAVPFNQYLPNKSNQTAYVPAPLRKKKAEREEYRKSWSTATSPLGGERPFSFPETIEEEGSEVGSAGEDNPAGQMNPGWKPSDGGCELPDGSGKEHPSSDGAVVAPAPKSEEKDAAEIQKRKRLEQAGIKVMPAAQRFASQKQLSEEKEAIRDIVLRKENSFLTHQHGNDSEAEGEVVCRLPDLEKDDFAARRARMNQTKPMVPLNQLLYGPYPKKGAEKSDGSKQLSKGISKKRSLEYKRNQGHTEEVKLIVTCNMRAQESEPVEGGLRKVPDLHKDDLAQQRIQGSLAPHREPPSFITLSNITEADLETWERLKVSEKARDGDVQHICASEPSPEIKAETAIRDDFANRKARASKKASSPRQKFVHFGPVTELDQQKWKRLSIGKAGPREDEEEVICHGSKIQMDSVSPVSAATSSLKGHQIFNRQNDCRTMNCGRGDYCRRASWLAPVPESQEEWVCSLGECPRGTEEVTSKQLPQDGKEETESAPRDSERLSKAERSEDSSQPLVCPLASECEASGTEEKLEKMTAPAWSGSGLKGQRKLDDSRKDDMMARRTGMSLRHTGSNPNQFLPVPFAKQQDVEESSKGLPMKDQRYGPRTPVSDDAESTSMFDMRCEEEAAVQPHSRARQEQLQLINNQLREEDDKWQDDLARWKSRRRSVSQDLIKKEEERKKMEKLLAGEDGTSERRKSIKTYREIVQEKERRERELHEAYKNARSQEEAEGILQQYIERFTISEAVLERLEMPKILERSHSTEPNLSSFLNDPNPMKYLRQQSLPPPKFTATVETTIARASVLDTSMSAGSGSPSKTVTPKAVPMLTPKPYSQPKNSQDVLKTFKVDGKVSVNGETVHREEEKERECPTVAPAHSLTKSQMFEGVARVHGSPLELKQDNGSIEINIKKPNSVPQELAATTEKTEPNSQEDKNDGGKSRKGNIELASSEPQHFTTTVTRCSPTVAFVEFPSSPQLKNDVSEEKDQKKPENEMSGKVELVLSQKVVKPKSPEPEATLTFPFLDKMPEANQLHLPNLNSQVDSPSSEKSPVMTPFKFWAWDPEEERRRQEKWQQEQERLLQERYQKEQDKLKEEWEKAQKEVEEEERRYYEEERKIIEDTVVPFTVSSSSADQLSTSSSMTEGSGTMNKIDLGNCQDEKQDRRWKKSFQGDDSDLLLKTRESDRLEEKGSLTEGALAHSGNPVSKGVHEDHQLDTEAGAPHCGTNPQLAQDPSQNQQTSNPTHSSEDVKPKTLPLDKSINHQIESPSERRKKSPREHFQAGPFSPCSPTPPGQSPNRSISGKKLCSSCGLPLGKGAAMIIETLNLYFHIQCFRCGICKGQLGDAVSGTDVRIRNGLLNCNDCYMRSRSAGQPTTL

SEQ ID NO: 268243 - protein, 1467 aa, Artificial Sequence
  derived and/or modified sequence
MRKDTDDIESPKRSIRDSGYIDCWDSERSDSLSPPRHGRDDSFDSLDSFGSRSRQTPSPDVVLRGSSDGRGSDSESDLPHRKLPDVKKDDMSARRTSHGEPKSAVPFNQYLPNKSNQTAYVPAPLRKKKAEREEYRKSWSTATSPLGGERPFSFPETIEEEGSEVGSAGEDNPAGQMNPGWKPSDGGCELPDGSGKEHPSSDGAVVAPAPKSEEKDAAEIQKRKRLEQAGIKVMPAAQRFASQKQLSEEKEAIRDIVLRKENSFLTHQHGNDSEAEGEVVCRLPDLEKDDFAARRARMNQTKPMVPLNQLLYGPYPKKGAEKSDGSKQLSKGISKKRSLEYKRNQGHTEEVKLIVTCNMRAQESEPVEGGLRKVPDLHKDDLAQQRIQGSLAPHREPPSFITLSNITEADLETWERLKVSEKARDGDVQHICASEPSPEIKAETAIRDDFANRKARASKKASSPRQKFVHFGPVTELDQQKWKRLSIGKAGPREDEEEVICHGSKIQMDSVSPVSAATSSLKGHQIFNRQNDCRTMNCGRGDYCRRASWLAPVPESQEEWVCSLGECPRGTEEVTSKQLPQDGKEETESAPRDSERLSKAERSEDSSQPLVCPLASECEASGTEEKLEKMTAPAWSGSGLKGQRKLDDSRKDDMMARRTGMSLRHTGSNPNQFLPVPFAKQQDVEESSKGLPMKDQRYGPRTPVSDDAESTSMFDMRCEEEAAVQPHSRARQEQLQLINNQLREEDDKWQDDLARWKSRRRSVSQDLIKKEEERKKMEKLLAGEDGTSERRKSIKTYREIVQEKERRERELHEAYKNARSQEEAEGILQQYIERFTISEAVLERLEMPKILERSHSTEPNLSSFLNDPNPMKYLRQQSLPPPKFTATVETTIARASVLDTSMSAGSGSPSKTVTPKAVPMLTPKPYSQPKNSQDVLKTFKVDGKVSVNGETVHREEEKERECPTVAPAHSLTKSQMFEGVARVHGSPLELKQDNGSIEINIKKPNSVPQELAATTEKTEPNSQEDKNDGGKSRKGNIELASSEPQHFTTTVTRCSPTVAFVEFPSSPQLKNDVSEEKDQKKPENEMSGKVELVLSQKVVKPKSPEPEATLTFPFLDKMPEANQLHLPNLNSQVDSPSSEKSPVMTPFKFWAWDPEEERRRQEKWQQEQERLLQERYQKEQDKLKEEWEKAQKEVEEEERRYYEEERKIIEDTVVPFTVSSSSADQLSTSSSMTEGSGTMNKIDLGNCQDEKQDRRWKKSFQGDDSDLLLKTRESDRLEEKGSLTEGALAHSGNPVSKGVHEDHQLDTEAGAPHCGTNPQLAQDPSQNQQTSNPTHSSEDVKPKTLPLDKSINHQIESPSERRKKSPREHFQAGPFSPCSPTPPGQSPNRSISGKKLCSSCGLPLGKGAAMIIETLNLYFHIQCFRCGICKGQLGDAVSGTDVRIRNGLLNCNDCYMRSRSAGQPTTL

SEQ ID NO: 268244 - DNA, 4401 bp, Artificial Sequence
  derived and/or modified sequence
agaaaggacaccgacgacatcgagagccccaagagaagcatcagagacagcggctacatcgactgctgggacagcgagagaagcgacagcctgagcccccccagacacggcagagacgacagcttcgacagcctggacagcttcggcagcagaagcagacagacccccagccccgacgtggtgctgagaggcagcagcgacggcagaggcagcgacagcgagagcgacctgccccacagaaagctgcccgacgtgaagaaggacgacatgagcgccagaagaaccagccacggcgagcccaagagcgccgtgcccttcaaccagtacctgcccaacaagagcaaccagaccgcctacgtgcccgcccccctgagaaagaagaaggccgagagagaggagtacagaaagagctggagcaccgccaccagccccctgggcggcgagagacccttcagcttccccgagaccatcgaggaggagggcagcgaggtgggcagcgccggcgaggacaaccccgccggccagatgaaccccggctggaagcccagcgacggcggctgcgagctgcccgacggcagcggcaaggagcaccccagcagcgacggcgccgtggtggcccccgcccccaagagcgaggagaaggacgccgccgagatccagaagagaaagagactggagcaggccggcatcaaggtgatgcccgccgcccagagattcgccagccagaagcagctgagcgaggagaaggaggccatcagagacatcgtgctgagaaaggagaacagcttcctgacccaccagcacggcaacgacagcgaggccgagggcgaggtggtgtgcagactgcccgacctggagaaggacgacttcgccgccagaagagccagaatgaaccagaccaagcccatggtgcccctgaaccagctgctgtacggcccctaccccaagaagggcgccgagaagagcgacggcagcaagcagctgagcaagggcatcagcaagaagagaagcctggagtacaagagaaaccagggccacaccgaggaggtgaagctgatcgtgacctgcaacatgagagcccaggagagcgagcccgtggagggcggcctgagaaaggtgcccgacctgcacaaggacgacctggcccagcagagaatccagggcagcctggccccccacagagagccccccagcttcatcaccctgagcaacatcaccgaggccgacctggagacctgggagagactgaaggtgagcgagaaggccagagacggcgacgtgcagcacatctgcgccagcgagcccagccccgagatcaaggccgagaccgccatcagagacgacttcgccaacagaaaggccagagccagcaagaaggccagcagccccagacagaagttcgtgcacttcggccccgtgaccgagctggaccagcagaagtggaagagactgagcatcggcaaggccggccccagagaggacgaggaggaggtgatctgccacggcagcaagatccagatggacagcgtgagccccgtgagcgccgccaccagcagcctgaagggccaccagatcttcaacagacagaacgactgcagaaccatgaactgcggcagaggcgactactgcagaagagccagctggctggcccccgtgcccgagagccaggaggagtgggtgtgcagcctgggcgagtgccccagaggcaccgaggaggtgaccagcaagcagctgccccaggacggcaaggaggagaccgagagcgcccccagagacagcgagagactgagcaaggccgagagaagcgaggacagcagccagcccctggtgtgccccctggccagcgagtgcgaggccagcggcaccgaggagaagctggagaagatgaccgcccccgcctggagcggcagcggcctgaagggccagagaaagctggacgacagcagaaaggacgacatgatggccagaagaaccggcatgagcctgagacacaccggcagcaaccccaaccagttcctgcccgtgcccttcgccaagcagcaggacgtggaggagagcagcaagggcctgcccatgaaggaccagagatacggccccagaacccccgtgagcgacgacgccgagagcaccagcatgttcgacatgagatgcgaggaggaggccgccgtgcagccccacagcagagccagacaggagcagctgcagctgatcaacaaccagctgagagaggaggacgacaagtggcaggacgacctggccagatggaagagcagaagaagaagcgtgagccaggacctgatcaagaaggaggaggagagaaagaagatggagaagctgctggccggcgaggacggcaccagcgagagaagaaagagcatcaagacctacagagagatcgtgcaggagaaggagagaagagagagagagctgcacgaggcctacaagaacgccagaagccaggaggaggccgagggcatcctgcagcagtacatcgagagattcaccatcagcgaggccgtgctggagagactggagatgcccaagatcctggagagaagccacagcaccgagcccaacctgagcagcttcctgaacgaccccaaccccatgaagtacctgagacagcagagcctgcccccccccaagttcaccgccaccgtggagaccaccatcgccagagccagcgtgctggacaccagcatgagcgccggcagcggcagccccagcaagaccgtgacccccaaggccgtgcccatgctgacccccaagccctacagccagcccaagaacagccaggacgtgctgaagaccttcaaggtggacggcaaggtgagcgtgaacggcgagaccgtgcacagagaggaggagaaggagagagagtgccccaccgtggcccccgcccacagcctgaccaagagccagatgttcgagggcgtggccagagtgcacggcagccccctggagctgaagcaggacaacggcagcatcgagatcaacatcaagaagcccaacagcgtgccccaggagctggccgccaccaccgagaagaccgagcccaacagccaggaggacaagaacgacggcggcaagagcagaaagggcaacatcgagctggccagcagcgagccccagcacttcaccaccaccgtgaccagatgcagccccaccgtggccttcgtggagttccccagcagcccccagctgaagaacgacgtgagcgaggagaaggaccagaagaagcccgagaacgagatgagcggcaaggtggagctggtgctgagccagaaggtggtgaagcccaagagccccgagcccgaggccaccctgaccttccccttcctggacaagatgcccgaggccaaccagctgcacctgcccaacctgaacagccaggtggacagccccagcagcgagaagagccccgtgatgacccccttcaagttctgggcctgggaccccgaggaggagagaagaagacaggagaagtggcagcaggagcaggagagactgctgcaggagagataccagaaggagcaggacaagctgaaggaggagtgggagaaggcccagaaggaggtggaggaggaggagagaagatactacgaggaggagagaaagatcatcgaggacaccgtggtgcccttcaccgtgagcagcagcagcgccgaccagctgagcaccagcagcagcatgaccgagggcagcggcaccatgaacaagatcgacctgggcaactgccaggacgagaagcaggacagaagatggaagaagagcttccagggcgacgacagcgacctgctgctgaagaccagagagagcgacagactggaggagaagggcagcctgaccgagggcgccctggcccacagcggcaaccccgtgagcaagggcgtgcacgaggaccaccagctggacaccgaggccggcgccccccactgcggcaccaacccccagctggcccaggaccccagccagaaccagcagaccagcaaccccacccacagcagcgaggacgtgaagcccaagaccctgcccctggacaagagcatcaaccaccagatcgagagccccagcgagagaagaaagaagagccccagagagcacttccaggccggccccttcagcccctgcagccccaccccccccggccagagccccaacagaagcatcagcggcaagaagctgtgcagcagctgcggcctgcccctgggcaagggcgccgccatgatcatcgagaccctgaacctgtacttccacatccagtgcttcagatgcggcatctgcaagggccagctgggcgacgccgtgagcggcaccgacgtgagaatcagaaacggcctgctgaactgcaacgactgctacatgagaagcagaagcgccggccagcccaccaccctgtag

SEQ ID NO: 268245 - DNA, 4404 bp, Artificial Sequence
  derived and/or modified sequence
atgagaaaggacaccgacgacatcgagagccccaagagaagcatcagagacagcggctacatcgactgctgggacagcgagagaagcgacagcctgagcccccccagacacggcagagacgacagcttcgacagcctggacagcttcggcagcagaagcagacagacccccagccccgacgtggtgctgagaggcagcagcgacggcagaggcagcgacagcgagagcgacctgccccacagaaagctgcccgacgtgaagaaggacgacatgagcgccagaagaaccagccacggcgagcccaagagcgccgtgcccttcaaccagtacctgcccaacaagagcaaccagaccgcctacgtgcccgcccccctgagaaagaagaaggccgagagagaggagtacagaaagagctggagcaccgccaccagccccctgggcggcgagagacccttcagcttccccgagaccatcgaggaggagggcagcgaggtgggcagcgccggcgaggacaaccccgccggccagatgaaccccggctggaagcccagcgacggcggctgcgagctgcccgacggcagcggcaaggagcaccccagcagcgacggcgccgtggtggcccccgcccccaagagcgaggagaaggacgccgccgagatccagaagagaaagagactggagcaggccggcatcaaggtgatgcccgccgcccagagattcgccagccagaagcagctgagcgaggagaaggaggccatcagagacatcgtgctgagaaaggagaacagcttcctgacccaccagcacggcaacgacagcgaggccgagggcgaggtggtgtgcagactgcccgacctggagaaggacgacttcgccgccagaagagccagaatgaaccagaccaagcccatggtgcccctgaaccagctgctgtacggcccctaccccaagaagggcgccgagaagagcgacggcagcaagcagctgagcaagggcatcagcaagaagagaagcctggagtacaagagaaaccagggccacaccgaggaggtgaagctgatcgtgacctgcaacatgagagcccaggagagcgagcccgtggagggcggcctgagaaaggtgcccgacctgcacaaggacgacctggcccagcagagaatccagggcagcctggccccccacagagagccccccagcttcatcaccctgagcaacatcaccgaggccgacctggagacctgggagagactgaaggtgagcgagaaggccagagacggcgacgtgcagcacatctgcgccagcgagcccagccccgagatcaaggccgagaccgccatcagagacgacttcgccaacagaaaggccagagccagcaagaaggccagcagccccagacagaagttcgtgcacttcggccccgtgaccgagctggaccagcagaagtggaagagactgagcatcggcaaggccggccccagagaggacgaggaggaggtgatctgccacggcagcaagatccagatggacagcgtgagccccgtgagcgccgccaccagcagcctgaagggccaccagatcttcaacagacagaacgactgcagaaccatgaactgcggcagaggcgactactgcagaagagccagctggctggcccccgtgcccgagagccaggaggagtgggtgtgcagcctgggcgagtgccccagaggcaccgaggaggtgaccagcaagcagctgccccaggacggcaaggaggagaccgagagcgcccccagagacagcgagagactgagcaaggccgagagaagcgaggacagcagccagcccctggtgtgccccctggccagcgagtgcgaggccagcggcaccgaggagaagctggagaagatgaccgcccccgcctggagcggcagcggcctgaagggccagagaaagctggacgacagcagaaaggacgacatgatggccagaagaaccggcatgagcctgagacacaccggcagcaaccccaaccagttcctgcccgtgcccttcgccaagcagcaggacgtggaggagagcagcaagggcctgcccatgaaggaccagagatacggccccagaacccccgtgagcgacgacgccgagagcaccagcatgttcgacatgagatgcgaggaggaggccgccgtgcagccccacagcagagccagacaggagcagctgcagctgatcaacaaccagctgagagaggaggacgacaagtggcaggacgacctggccagatggaagagcagaagaagaagcgtgagccaggacctgatcaagaaggaggaggagagaaagaagatggagaagctgctggccggcgaggacggcaccagcgagagaagaaagagcatcaagacctacagagagatcgtgcaggagaaggagagaagagagagagagctgcacgaggcctacaagaacgccagaagccaggaggaggccgagggcatcctgcagcagtacatcgagagattcaccatcagcgaggccgtgctggagagactggagatgcccaagatcctggagagaagccacagcaccgagcccaacctgagcagcttcctgaacgaccccaaccccatgaagtacctgagacagcagagcctgcccccccccaagttcaccgccaccgtggagaccaccatcgccagagccagcgtgctggacaccagcatgagcgccggcagcggcagccccagcaagaccgtgacccccaaggccgtgcccatgctgacccccaagccctacagccagcccaagaacagccaggacgtgctgaagaccttcaaggtggacggcaaggtgagcgtgaacggcgagaccgtgcacagagaggaggagaaggagagagagtgccccaccgtggcccccgcccacagcctgaccaagagccagatgttcgagggcgtggccagagtgcacggcagccccctggagctgaagcaggacaacggcagcatcgagatcaacatcaagaagcccaacagcgtgccccaggagctggccgccaccaccgagaagaccgagcccaacagccaggaggacaagaacgacggcggcaagagcagaaagggcaacatcgagctggccagcagcgagccccagcacttcaccaccaccgtgaccagatgcagccccaccgtggccttcgtggagttccccagcagcccccagctgaagaacgacgtgagcgaggagaaggaccagaagaagcccgagaacgagatgagcggcaaggtggagctggtgctgagccagaaggtggtgaagcccaagagccccgagcccgaggccaccctgaccttccccttcctggacaagatgcccgaggccaaccagctgcacctgcccaacctgaacagccaggtggacagccccagcagcgagaagagccccgtgatgacccccttcaagttctgggcctgggaccccgaggaggagagaagaagacaggagaagtggcagcaggagcaggagagactgctgcaggagagataccagaaggagcaggacaagctgaaggaggagtgggagaaggcccagaaggaggtggaggaggaggagagaagatactacgaggaggagagaaagatcatcgaggacaccgtggtgcccttcaccgtgagcagcagcagcgccgaccagctgagcaccagcagcagcatgaccgagggcagcggcaccatgaacaagatcgacctgggcaactgccaggacgagaagcaggacagaagatggaagaagagcttccagggcgacgacagcgacctgctgctgaagaccagagagagcgacagactggaggagaagggcagcctgaccgagggcgccctggcccacagcggcaaccccgtgagcaagggcgtgcacgaggaccaccagctggacaccgaggccggcgccccccactgcggcaccaacccccagctggcccaggaccccagccagaaccagcagaccagcaaccccacccacagcagcgaggacgtgaagcccaagaccctgcccctggacaagagcatcaaccaccagatcgagagccccagcgagagaagaaagaagagccccagagagcacttccaggccggccccttcagcccctgcagccccaccccccccggccagagccccaacagaagcatcagcggcaagaagctgtgcagcagctgcggcctgcccctgggcaagggcgccgccatgatcatcgagaccctgaacctgtacttccacatccagtgcttcagatgcggcatctgcaagggccagctgggcgacgccgtgagcggcaccgacgtgagaatcagaaacggcctgctgaactgcaacgactgctacatgagaagcagaagcgccggccagcccaccaccctgtag

SEQ ID NO: 268246 - DNA, 4401 bp, Artificial Sequence
  derived and/or modified sequence
aggaaggatacagatgatattgagagccctaaacgatctatcagagatagcgggtacattgattgctgggactcagagcgctcagacagcctgagcccaccacgccatggcagagatgacagcttcgactcactggactcttttggctcgcggtcgagacagaccccaagcccagatgtggtgctccggggctccagtgatggacgtgggtcagactctgaatccgacctgccccatcggaagttacccgacgtgaaaaaagatgacatgagcgccaggcggacttcccacggggagcctaaaagcgcagtgccttttaatcagtacttgcctaacaaaagcaaccagacagcatatgtgccagccccactgcgaaagaaaaaagcagaacgggaagagtatagaaaatcctggtcaacagctacttctcctctgggcggagagagacctttttccttcccagaaacgattgaggaagagggaagcgaggttggaagcgctggtgaggacaacccagcgggacagatgaaccctgggtggaagcctagtgatggaggctgcgaactgcccgatggatctggcaaagagcaccctagcagcgacggggccgtcgtggcgcccgcaccaaagtctgaggaaaaggatgctgcggagatccagaagcggaaaaggcttgagcaggccgggattaaagtcatgccagccgcccagcgcttcgctagtcaaaagcagctctccgaagaaaaagaggccattcgggatatcgttctgaggaaggaaaacagctttctcactcaccagcatggcaacgactcagaagcagaaggggaggtggtatgcaggctgcccgaccttgagaaggatgacttcgccgcccgccgggcacgtatgaaccagaccaaacctatggtaccacttaatcagctgttgtatgggccttacccgaagaagggggctgaaaaatccgatggctctaaacagctgtccaagggaatttccaagaaaaggagcctggagtataagcggaatcaaggccatactgaagaagttaaactgatcgtcacctgtaacatgagagctcaggagtccgagcctgtcgaagggggcttgcgaaaagtcccagaccttcacaaggacgacctggctcagcagaggattcaagggagccttgctcctcaccgagaaccccccagttttatcactcttagcaacattaccgaggccgacctcgagacctgggagagacttaaggtttcggaaaaggcccgcgatggggacgtgcagcacatttgcgcatccgagccatctccagaaatcaaggcagaaaccgccatacgtgacgatttcgccaaccgcaaagcaagagcctccaagaaagctagcagccctagacagaaatttgtacactttgggcccgtgaccgaactcgatcagcagaaatggaaaagacttagtataggtaaagccggtccccgggaggatgaggaggaggttatttgccatggatccaaaatccaaatggatagcgtaagccccgtttctgcagcaacttctagcctgaagggtcaccagatcttcaatcggcagaatgactgcagaacaatgaactgcggtagaggcgactattgtcgccgggcaagctggttagccccggttccagagtcccaggaggagtgggtttgtagcctaggcgaatgtcccaggggtaccgaagaggtgactagcaagcagctcccccaagatggaaaggaggagacagagagcgcaccccgggactcagaaaggctttccaaagcggagcggagcgaagactccagccagccactggtgtgccccctggcttctgaatgcgaagcttccgggacagaggagaaactggagaagatgaccgccccagcctggagcggaagtggattaaaaggccagcggaagctggacgactctcggaaggacgatatgatggcccgcaggaccggaatgtcgcttaggcacactggcagtaacccgaatcaatttctccccgtgccctttgccaaacagcaggatgtcgaggagtcctccaagggccttcccatgaaagaccagcgctatggccctcggactccagtctctgacgacgctgagagcacttctatgtttgatatgcggtgcgaagaagaagcagcagtgcagccccacagtcgggcacgccaggaacagttgcagctgatcaataatcagctccgggaggaagacgacaagtggcaagatgacttagctaggtggaagtcacgacgccgctccgtcagtcaggacctgattaaaaaggaggaggagagaaagaagatggagaagctgctcgccggagaagacggcactagcgagaggcgaaaatccattaaaacatatagagagatcgtgcaggagaaggagcggagagaacgagagcttcacgaggcatataaaaatgccagatcccaggaggaggccgaaggaattctgcagcagtatatcgaaaggttcacgatttctgaggctgtgctggagcgacttgaaatgcctaaaatcctggaacgcagccactcgactgaaccaaacctgtccagcttcctcaatgatcccaatcccatgaagtatttacgccagcagtctctgccaccgccaaaattcaccgctacagtcgagacgacaattgctagggcctccgttctcgatacatccatgtccgccggaagcgggagcccgtcaaagacagttactccaaaggcggtgcctatgctgaccccaaaaccttacagccagccaaagaattctcaggacgttctgaaaacttttaaggtagacggaaaggtgagcgtgaacggagagacggtgcatcgggaggaggagaaagaaagggagtgccctaccgtcgcccctgcacacagcctcaccaagtctcagatgtttgaaggagtggccagggttcacggttccccccttgagctgaagcaggacaacggatctattgaaatcaatatcaagaaacctaacagcgttccacaggagctggcagctactaccgagaaaacagagcccaattcacaagaagataagaatgacggagggaagagtagaaaaggcaatattgagcttgcatccagtgagccccagcatttcactacaaccgtgacgcggtgttcacctaccgtcgctttcgtggagttcccctcctcaccccagcttaaaaacgacgtctccgaggaaaaggatcaaaagaagccggagaacgaaatgtcaggcaaggtggaacttgttctttcacagaaagtagtcaagcctaaaagtcctgagccagaagcgactctaacattcccctttttggataagatgcctgaggccaaccagctacacctccctaatctcaacagccaagtggacagtccttcgagcgaaaagagcccagttatgacgcccttcaagttctgggcgtgggatcctgaggaggagagacgtcggcaagaaaagtggcagcaggaacaggaaaggctacttcaggaacgctaccaaaaggaacaggataagttaaaagaggagtgggagaaggcacagaaggaggtggaggaagaggaaaggcggtactacgaggaagagagaaaaatcatcgaagacaccgtggtcccctttacggtgagctcaagttccgctgaccagttgtcgacatcatctagtatgactgaaggatcgggaacaatgaacaagatcgacctagggaactgccaggatgagaaacaggataggcgttggaagaagtcctttcagggcgatgactccgatttgctgctaaagacacgagaaagcgatcggctagaagaaaagggttctcttaccgagggggccctagcccacagcggaaacccagtatccaaaggcgtgcacgaggaccatcagcttgacaccgaagcaggggcaccgcattgcggaactaaccctcagctcgctcaagatccctcacagaaccagcagacatctaatcctacacatagctctgaagacgtcaaacctaaaacactgccattagataaatcaattaatcaccagatcgagtcgccatcagagaggcgcaaaaagtccccaagggagcacttccaggctggccctttttccccctgcagtcctacaccacccggccagtcgccgaaccgctccatttccggcaaaaaattatgctctagttgcgggttgccactgggcaagggggcagcgatgatcatcgagaccttgaacctctactttcatattcagtgctttcgctgcggcatttgcaagggccaactgggggacgccgtttctggcaccgatgtcaggatacggaatggcctccttaattgtaatgattgctatatgaggagccggagtgcgggacagcccactaccctgtag

SEQ ID NO: 268247 - DNA, 4404 bp, Artificial Sequence
  derived and/or modified sequence
atgagaaaggacactgacgatattgaatcaccgaaacgatctatccgcgatagtggatatatcgattgctgggattcggagcgctcagactccttgagtccaccacgacatggacgagacgacagctttgactccctggactcattcgggtcccgctcgcggcagactccctcccccgacgtggtactgagaggatctagtgacgggagaggttccgactcagagagcgacctgcctcaccgaaagttgcctgacgtgaaaaaggacgatatgtccgccaggcgcacgagtcatggagagcccaagtcagcagtcccctttaaccaatatctccccaataaatctaaccagacagcttatgtaccagcccccctccggaaaaaaaaagccgagagggaagagtaccggaagtcctggagcactgcaacatcgcctctgggaggggaacggccattctcatttccagaaaccattgaggaggaggggagtgaggttggttccgccggcgaggataacccggctggtcaaatgaaccctgggtggaaaccatccgatggaggttgtgaactgcccgatggctcgggcaaggaacaccccagttccgacggagctgtcgtggctcccgccccgaaatctgaagaaaaagacgcggctgagatccaaaaacgcaaaagactagagcaggcaggcataaaagtaatgcctgccgctcaacgcttcgcttcacagaaacagttgagtgaagagaaggaggctataagggacatcgtgttgcggaaggagaattcctttctgacccatcaacatggaaatgactcagaagccgaaggagaagtggtctgtagactgccagacttagagaaggacgacttcgcagccagacgggcccggatgaaccaaaccaagccgatggtacccctgaaccagctcctctatggcccctatccaaagaaaggcgctgaaaaatctgatggcagcaaacagcttagcaaaggcattagcaaaaaacgctccctcgagtacaaacgaaaccagggtcataccgaggaagtgaagctcatcgtaacctgtaacatgcgagcccaggaatccgagcctgttgagggcggtttgaggaaggtacccgatctacataaagacgacctcgctcagcagcgcatccagggaagcctggccccacacagagaacccccctctttcattactttgtctaatattaccgaggcagatttagaaacatgggagagactgaaagtgagcgaaaaggcgcgagacggtgacgtgcagcacatctgcgcatccgagccctcacctgaaatcaaggcggagactgcaataagggatgatttcgcgaataggaaggcgagggcctcgaaaaaagcttcaagtccgaggcagaaattcgtgcattttggaccagtaaccgagctggaccaacagaagtggaagcggctctcgattgggaaagcgggccccagagaggatgaggaggaggttatttgtcatggttctaaaatccagatggacagcgttagtccagtctccgcagcaacctcatccttgaaagggcaccaaatcttcaatagacagaatgactgccgaaccatgaattgcggcaggggcgactattgtcgtagggcttcctggctcgccccagtgccagaatcgcaagaggagtgggtctgcagtctgggggaatgccctcgaggtacagaggaagttacatccaagcagctgccccaggatggcaaggaagagactgaatccgcccctcgggactccgagcgcctgagtaaggcagaacgatccgaagacagctcccaacccttggtctgccctctggcctccgaatgtgaggcttcaggcacagaagaaaaactggagaagatgaccgcccccgcttggagcggctccgggctcaaaggacagcgaaaactggatgactcaagaaaggatgatatgatggcgcgtagaacaggcatgtctttgcgccataccgggtcaaacccaaatcagtttctccctgtgccgttcgctaaacaacaagacgtagaagaaagctcgaaagggctcccgatgaaagaccagagatacggcccccgcacacctgtgtcagatgacgcagagtcaacatccatgtttgacatgagatgtgaggaagaagccgctgtacagcctcattctagagctcgccaggagcagcttcaactgattaataaccagctgcgggaagaggatgataagtggcaggatgatttggctagatggaaatcccgccgcagatcggtcagccaagacttaatcaaaaaagaggaggaacgcaagaagatggaaaagctgttagccggggaagacggcacgagcgagaggcgcaagtcaatcaagacttacagggagattgtccaggagaaagagaggcgagagagagagctccatgaagcctataagaatgctcgcagtcaggaagaggcagaggggatcctgcaacagtacattgaaaggttcacgattagcgaagccgtccttgaaaggctggaaatgcctaagatcctggagcgttcacattctactgaaccaaacctttcttcattcctgaacgacccaaatcccatgaagtacctgcgccaacagagcctaccaccaccaaaattcaccgccactgtggagactacgattgcaagggcctccgtgttggacacttccatgtcggctggaagtggatcaccatcaaagactgtgaccccaaaggctgtgcccatgctgacccccaaaccctattcgcagccgaaaaatagccaggatgtgctgaagacgtttaaggtcgatggcaaggtgtctgttaatggagagactgtgcatagagaggaagagaaggagagggagtgccccacagtggcccccgcccactcccttaccaagagccaaatgttcgagggagtggcacgcgtgcacggttcgcctttagagttgaagcaggacaatggaagcatcgaaatcaatatcaaaaagcccaactcagtcccccaagagttggccgcaaccacagagaagaccgaacccaattctcaggaggacaaaaacgacggaggaaagagccggaaaggaaacatcgagcttgccagctctgagcctcagcattttaccacaactgtaacacgctgcagcccaaccgtggccttcgtggaatttccatcgtctccccagcttaaaaatgatgtgtcagaggaaaaggatcaaaaaaagcccgagaatgagatgtctgggaaggtggagctggtgctgagtcagaaagtggttaagccaaaaagcccagagcccgaggccacactaacatttcctttcctcgacaaaatgcctgaagccaatcagctccacctgcccaacctcaattcccaggttgactctccatcctcagaaaagtccccagtgatgacaccctttaagttttgggcatgggatcctgaagaagaacgcaggagacaggaaaagtggcaacaagagcaagaacgcctcctgcaggagcgctaccagaaagagcaggataagctgaaagaggagtgggaaaaagcccagaaagaagtagaggaggaggaaagacgatattatgaggaggaacgcaagataattgaagatacggtcgttcctttcacagtttcctctagcagtgccgaccagctctctacatcaagctccatgacagagggcagtggcacgatgaacaagatagatttgggaaactgtcaggatgagaaacaagatagaagatggaagaaatcattccagggcgacgatagcgacttactcttaaaaacacgcgagagcgaccgcttggaggaaaaagggagtctgaccgagggtgccctggcacactcgggcaatccagtctctaagggcgtccacgaagaccatcagctagacaccgaggcaggggcaccccactgcggaaccaaccctcagctggcccaggatccaagccagaatcaacagacctctaaccccacccactcgtccgaggatgtgaaaccgaaaaccctgcccctcgataaaagtataaatcaccaaatcgaaagccctagcgagaggcggaagaaatctccaagggagcatttccaggccggtccattcagcccttgcagccctaccccccctggccagtccccaaatagaagtatcagcgggaaaaagttgtgttcatcttgtggccttcctctgggcaaaggcgccgctatgatcattgagacattgaatctatattttcacattcaatgctttagatgtggtatatgcaaagggcagttgggagatgccgtgtctggcaccgacgtgcgaatcaggaacgggctcctgaactgtaatgactgttatatgcgctcgagaagtgcggggcagcccacgaccctatag

SEQ ID NO: 268248 - DNA, 4401 bp, Artificial Sequence
  derived and/or modified sequence
aggaaggacacagatgacatcgagagccccaagaggagcatccgggacagcggctacatcgactgctgggacagcgagaggagtgacagcctgagccccccaagacatggaagagatgacagctttgacagcctggacagctttggcagccgcagccggcagacccccagcccagatgtggtgctgcggggcagcagtgatggccggggcagtgacagcgagagtgacctgccccacaggaagctgcctgatgtgaagaaggatgacatgtctgcccggaggaccagccatggagagcccaagtctgctgtgcccttcaaccagtacctgcccaacaagagcaaccagacagcctacgtgcctgcccccctgaggaagaagaaggccgagcgggaggagtacaggaagtcctggagcacagccaccagccccctgggcggggagcggcccttctccttccctgagaccatcgaggaggagggcagcgaggtgggcagcgctggggaggacaacccagctggccagatgaaccctggctggaagcccagtgatggcggctgtgagctgcctgatggcagcggcaaggagcaccccagcagtgatggagctgtggtggccccagcccccaagtctgaggagaaggatgctgctgagatccagaagaggaagaggctggagcaggccggcatcaaggtgatgcctgctgcccagagatttgccagccagaagcagctgtctgaggagaaggaggccatccgggacatcgtgctgaggaaggagaacagcttcctgacccaccagcacggcaatgacagcgaggccgagggggaggtggtgtgccgcctgcctgacctggagaaggatgactttgctgcccggcgggccaggatgaaccagaccaagcccatggtgcccctgaaccagctgctgtatggcccctaccccaagaagggagctgagaagagtgatggcagcaagcagctgagcaagggcatcagcaagaagaggagcctggagtacaagaggaaccagggccacacagaggaggtgaagctgattgtgacctgcaacatgagggcccaggagagcgagcctgtggagggcggcctgaggaaggtgcctgacctgcacaaggatgacctggcccagcagaggatccagggcagcctggccccccaccgggagccccccagcttcatcaccctgagcaacatcacagaggccgacctggagacctgggagcggctgaaggtgtctgagaaggccagagatggagatgtgcagcacatctgtgccagcgagcccagccctgagatcaaggccgagacagccatcagagatgactttgccaacaggaaggcccgggccagcaagaaggccagcagcccccggcagaagtttgtgcacttcggccctgtgacagagctggaccagcagaagtggaagaggctgagcatcggcaaggccggccccagagaagatgaggaggaggtgatctgccacggcagcaagatccagatggattctgtgtcccctgtgtctgctgccaccagcagcctgaagggccaccagatcttcaaccggcagaatgactgcaggaccatgaactgtggccgcggggactactgccggcgggcctcctggctggcccctgtgcctgagagccaggaggagtgggtgtgcagcctgggagaatgtccccggggcacagaggaggtgaccagcaagcagctgccccaggacggcaaggaggagacagagagcgccccccgggacagcgagcggctgagcaaggccgagaggtctgaggacagcagccagcccctggtgtgccccctggcctctgaatgtgaggccagcggcacagaggagaagctggagaagatgacagccccagcctggagcggcagcggcctgaagggccagaggaagctggatgacagcaggaaggatgacatgatggcccggaggacaggcatgagcctgcggcacacaggcagcaaccccaaccagttcctgcctgtgccctttgccaagcagcaggatgtggaggagagcagcaagggcctgcccatgaaggaccagagatatggccccaggacccctgtgtctgatgatgctgagagcacctccatgtttgacatgagatgtgaggaggaggccgctgtgcagccccacagccgggcccggcaggagcagctgcagctgatcaacaaccagctgcgggaggaggatgacaagtggcaggatgacctggcccgctggaagagcagaagaagatctgtgtcccaggacctgatcaagaaggaggaggagaggaagaagatggagaagctgctggccggagaagatggcaccagcgagaggaggaagagcatcaagacctaccgggagatcgtgcaggagaaggagcggcgggagcgggagctgcacgaggcctacaagaatgcccggagccaggaggaggccgagggcatcctgcagcagtacatcgagcgcttcaccatcagcgaggccgtgctggagcggctggagatgcccaagatcctggagaggagccacagcacagagcccaacctgagcagcttcctgaatgaccccaaccccatgaagtacctgcggcagcagagcctgcccccacccaagttcaccgccaccgtggagaccaccatcgcccgggcctctgtgctggacacctccatgtctgctggcagcggcagccccagcaagacagtgacccccaaggctgtgcccatgctgacccccaagccctacagccagcccaagaacagccaggatgtgctgaagaccttcaaggtggatggcaaggtgtctgtgaatggagagaccgtgcaccgggaggaggagaaggagcgggagtgccccaccgtggccccagcccacagcctgaccaagagccagatgtttgagggcgtggcccgggtgcacggcagccccctggagctgaagcaggacaatggcagcattgagatcaacatcaagaagcccaacagcgtgccccaggagctggccgccaccacagagaagacagagcccaacagccaggaggacaagaatgatggcggcaagagcaggaaaggaaacatcgagctggccagcagcgagccccagcacttcaccaccaccgtgacccgctgcagccccaccgtggcctttgtggagttccccagcagcccccagctgaagaatgatgtgtctgaggagaaggaccagaagaagccagaaaatgagatgtctgggaaggtggagctggtgctgagccagaaggtggtgaagcccaagagccctgagcctgaggccaccctgaccttccccttcctggacaagatgcctgaggccaaccagctgcacctgcccaacctgaacagccaggtggacagccccagcagcgagaagagccctgtgatgacccccttcaagttctgggcctgggaccctgaggaggagcggcggcggcaggagaagtggcagcaggagcaggagcggctgctgcaggagcgctaccagaaggagcaggacaagctgaaggaggagtgggagaaggcccagaaggaggtggaggaggaggagcggcgctactatgaggaggagaggaagatcattgaagatactgtggtgcccttcaccgtgagcagcagcagcgctgaccagctgagcaccagcagctccatgacagagggcagcggcaccatgaacaagattgacctgggcaactgccaggatgagaagcaggaccggcgctggaagaagagcttccagggagatgacagcgacctgctgctgaagacccgggagagtgaccggctggaggagaagggcagcctgacagaaggagccctggcccacagcggcaaccctgtgtccaagggcgtgcatgaggaccaccagctggacacagaggccggggccccccactgcggcaccaacccccagctggcccaggaccccagccagaaccagcagaccagcaaccccacccacagcagtgaagatgtgaagcccaagaccctgcccctggacaagagcatcaaccaccagatcgagagccccagcgagaggaggaagaagagcccccgggagcacttccaggccggccccttcagcccctgcagccccaccccacctggccagagccccaacagaagcatcagcggcaagaagctgtgcagcagctgtggcctgcccctgggcaaaggagctgccatgatcatcgagaccctgaacctgtacttccacatccagtgcttccgctgtggcatctgcaagggccagctgggagatgctgtgtctggaacagatgtgcgcatcagaaatggcctgctgaactgcaatgactgctacatgaggagccgctctgctggccagcccaccaccctgtag

SEQ ID NO: 268249 - DNA, 4404 bp, Artificial Sequence
  derived and/or modified sequence
atgaggaaggacacagatgacatcgagagccccaagaggagcatccgggacagcggctacatcgactgctgggacagcgagaggagtgacagcctgagcccccccaggcatggaagagatgacagctttgacagcctggacagctttggcagccgcagccggcagacccccagcccagatgtggtgctgcggggcagcagtgatggccggggcagtgacagcgagagtgacctgccccacaggaagctgcctgatgtgaagaaggatgacatgtctgcccggaggaccagccacggggagcccaagtctgctgtgcccttcaaccagtacctgcccaacaagagcaaccagacagcctacgtgcctgcccccctgaggaagaagaaggccgagcgggaggagtacaggaagtcctggagcacagccaccagccccctgggcggggagcggcccttctccttccctgagaccatcgaggaggagggcagcgaggtgggcagcgctggggaggacaacccagctggccagatgaaccctggctggaagcccagtgatggcggctgtgagctgcctgatggcagcggcaaggagcaccccagcagtgatggagctgtggtggccccagcccccaagtctgaggagaaggatgctgctgagatccagaagaggaagaggctggagcaggccggcatcaaggtgatgcctgctgcccagagatttgccagccagaagcagctgtctgaggagaaggaggccatccgggacatcgtgctgaggaaagaaaattccttcctgacccaccagcacggcaatgattctgaggccgagggggaggtggtgtgccgcctgcctgacctggagaaggatgactttgctgcccggcgggccaggatgaaccagaccaagcccatggtgcccctgaaccagctgctgtatggcccctaccccaagaagggagctgagaagagtgatggcagcaagcagctgagcaagggcatcagcaagaagaggagcctggagtacaagaggaaccagggccacacagaggaggtgaagctgattgtgacctgcaacatgagggcccaggagagcgagcctgtggagggcggcctgaggaaggtgcctgacctgcacaaggatgacctggcccagcagaggatccagggcagcctggccccccaccgggagcccccatccttcatcaccctgagcaacatcacagaagctgacctggagacctgggagcggctgaaggtgtctgagaaggccagagatggagatgtgcagcacatctgtgccagcgagcccagccctgagatcaaggccgagacagccatcagagatgactttgccaacaggaaggcccgggccagcaagaaggccagcagcccccggcagaagtttgtgcactttggacctgtgacagagctggaccagcagaagtggaagaggctgagcatcggcaaggccggcccccgggaggatgaggaggaggtgatctgccacggcagcaagatccagatggacagcgtgtcccctgtgtctgctgccaccagcagcctgaagggccaccagatcttcaaccggcagaatgactgcaggaccatgaactgtggccgcggggactactgcagaagagcctcctggctggcccctgtgcctgagagccaggaggagtgggtgtgcagcctgggggagtgcccccggggcacagaggaggtgaccagcaagcagctgccccaggacggcaaggaggagacagaaagtgccccccgggacagcgagcggctgagcaaggccgagaggtctgaggacagcagccagcccctggtgtgccccctggcctctgaatgtgaggccagcggcacagaggagaagctggagaagatgacagccccagcctggagcggcagcggcctgaagggccagaggaagctggatgacagcaggaaggatgacatgatggccaggagaacaggcatgagcctgcggcacacaggcagcaaccccaaccagttcctgcctgtgccctttgccaagcagcaggatgtggaggagagcagcaagggcctgcccatgaaggaccagagatatggccccaggacccctgtgtctgatgatgctgagagcacctccatgtttgacatgagatgtgaggaggaggccgctgtgcagccccacagccgggcccggcaggagcagctgcagctgatcaacaaccagctgcgggaggaggatgacaagtggcaggatgacctggcccgctggaagagcagaagaagatctgtgtcccaggacctgatcaagaaggaggaggagaggaagaagatggagaagctgctggccggggaggatggcaccagcgagaggaggaagagcatcaagacctaccgggagatcgtgcaggagaaggagcggcgggagcgggagctgcacgaggcctacaagaatgcccggagccaggaggaggccgagggcatcctgcagcagtacatcgagcgcttcaccatcagcgaggccgtgctggagcggctggagatgcccaagatcctggagaggagccacagcacagagcccaacctgagcagcttcctgaatgaccccaaccccatgaagtacctgcggcagcagagcctgcccccacccaagttcaccgccaccgtggagaccaccatcgcccgggcctctgtgctggacacctccatgtctgctggcagcggcagccccagcaagacagtgacccccaaggctgtgcccatgctgacccccaagccctacagccagcccaagaacagccaggatgtgctgaagaccttcaaggtggatggcaaggtgtctgtgaatggagaaacagtgcaccgggaggaggagaaggagagagaatgtcccaccgtggccccagcccacagcctgaccaagagccagatgtttgaaggagtggcccgggtgcacggcagccccctggagctgaagcaggacaatggcagcattgagatcaacatcaagaagcccaacagcgtgccccaggagctggccgccaccacagagaagacagagcccaacagccaggaggacaagaatgatggcggcaagagcaggaagggcaacatcgagctggccagcagcgagccccagcacttcaccaccaccgtgacccgctgcagccccaccgtggcctttgtggagttccccagcagcccccagctgaagaatgatgtgtctgaggagaaggaccagaagaagccagaaaatgagatgtctgggaaggtggagctggtgctgagccagaaggtggtgaagcccaagagccctgagcctgaggccaccctgaccttccccttcctggacaagatgcctgaggccaaccagctgcacctgcccaacctgaacagccaggtggacagccccagcagcgagaagagccctgtgatgacccccttcaagttctgggcctgggaccctgaggaggagcggcggcggcaggagaagtggcagcaggagcaggagcggctgctgcaggagcgctaccagaaggagcaggacaagctgaaggaggagtgggagaaggcccagaaggaggtggaggaggaggagcggcgctactatgaggaggagaggaagatcatcgaggacacagtggtgcccttcaccgtgagcagcagcagcgctgaccagctgagcaccagcagctccatgacagagggcagcggcaccatgaacaagattgacctgggcaactgccaggatgagaagcaggaccggcgctggaagaagagcttccagggagatgacagcgacctgctgctgaagacccgggagagtgaccggctggaggagaagggcagcctgacagagggcgccctggcccacagcggcaaccctgtgtccaaaggagtgcatgaggaccaccagctggacacagaagctggggccccccactgcggcaccaacccccagctggcccaggaccccagccagaaccagcagaccagcaaccccacccacagcagtgaagatgtgaagcccaagaccctgcccctggacaagagcatcaaccaccagatcgagagccccagcgagaggaggaagaagagcccccgggagcacttccaggccggccccttcagcccctgcagccccaccccacctggccagagccccaacagaagcatcagcggcaagaagctgtgcagcagctgtggcctgcccctgggcaagggggccgccatgatcatcgagaccctgaacctgtacttccacatccagtgcttccgctgtggcatctgcaagggccagctgggagatgctgtgtctggaacagatgtgcgcatcagaaatggcctgctgaactgcaatgactgctacatgaggagccgctctgctggccagcccaccaccctgtag

SEQ ID NO: 268250 - DNA, 7258 bp, Artificial Sequence
  derived and/or modified sequence
aggaaggacactgatgacattgaaagtcctaaacgcagtatccgagacagtggctacatcgactgctgggattccgagcgcagcgactccctctctcctcctcgccacggcagagatgattccttcgacagcctggattcctttggctctcgctctcggcagacgccttcaccagatgtagtcctcaggggaagcagcgatgggagaggaagcgactctgaatccgacttgcctcatcggaagctgccagatgtgaagaaggatgacatgtctgcacggcggacttcccatggtgagccgaaatcagcagtgccttttaaccagtacctcccgaacaaaagcaatcagacggcctacgtccccgcgcctctgagaaagaagaaagcagagagagaggaataccgcaagagctggagtaccgccacctccccgctgggtggggagaggcccttcagctttcctgaaacgatagaggaagaggggagtgaagtggggtctgctggtgaagacaacccagctggccaaatgaatcctggttggaagccttccgatggtgggtgtgaattacctgacggcagtggtaaggagcacccttcttcagacggggctgtggtggcaccagctcccaagtctgaagaaaaagatgctgctgagatccaaaagcgcaaaaggctagagcaagctggaatcaaggtcatgccagcagcacagcgctttgccagtcaaaaacaattaagtgaagagaaagaagctattcgtgatattgtccttcgcaaagaaaactctttcctgacccaccaacatggcaacgattcagaggcagaaggtgaagttgtgtgtcgactgcctgatcttgagaaggatgactttgctgcaaggagagcaaggatgaaccaaaccaagccaatggtgccattaaatcaactcctctatggcccttatccaaagaaaggggcagagaaatcagatggcagcaaacagctctcaaagggaatctcaaaaaaaagaagtctagaatataaaagaaaccagggccacacagaagaggtgaagttgatagtgacctgtaacatgagggctcaggaaagtgaacctgtggaaggaggactcaggaaggtgccagatcttcacaaggatgacctggcccagcagagaattcagggcagccttgcccctcaccgcgagcccccgagcttcattacgctctccaacataacagaagctgacttggagacgtgggagagactcaaagtgtcagaaaaggcgagggatggagatgttcagcacatctgtgcttctgagccttccccagaaattaaagcagaaactgccattcgtgatgactttgccaaccgcaaagcaagggcctctaagaaagcttccagccccaggcaaaagtttgtgcactttgggccagtgacggagctagatcagcagaaatggaagcggcttagcattggcaaggctgggcctagagaggatgaagaagaagtcatctgtcatggcagcaagattcaaatggactctgtgtctcctgtctcagcggccacttccagcttaaagggccaccaaatatttaatcgacaaaatgactgcagaacaatgaattgtggccgaggtgactattgcagaagggcctcgtggctggctcctgtgccggagtctcaggaagagtgggtctgcagtttgggcgagtgcccgagggggacagaggaagttacatccaaacagctgccacaggatggcaaagaagaaacagaaagcgctccaagagattctgagaggctgtcaaaggcagaaagatcagaggacagcagccagccactggtgtgtcctctggcctctgagtgtgaggcttcagggacagaagagaagttggagaagatgacagctcctgcctggagtggcagtggactgaaaggccagcgaaagttggatgattcacgaaaagatgacatgatggccaggagaactgggatgtcccttagacacactggatccaacccaaaccagttccttccagttccatttgcaaagcaacaggatgtggaagaatcttctaaaggtctacccatgaaagatcagagatacggtccgagaactcctgtgtctgatgacgcagagagcaccagcatgtttgacatgcggtgtgaggaggaggccgcggtgcagccgcacagcagggcccgccaggagcagctgcagctgataaataaccagctgagggaagaggacgacaaatggcaagatgacctggctcgttggaagagtcgtagaagaagtgtttctcaggacttaatcaagaaagaggaagaaaggaaaaaaatggagaagttactggctggagaagatgggacaagtgaacgaaggaaaagcatcaaaacctacagagaaattgttcaagaaaaagagcggagagagagagagctgcatgaagcatataagaacgctcggtcccaggaggaggcagaggggatccttcaacagtacattgagaggttcaccatcagtgaggctgttctcgaacgcttggagatgccaaaaattctggaaagaagccattcaacagagccaaatttatcctccttcctgaatgaccccaatcccatgaaatacctgcggcaacagtcactgcctccacccaaattcactgccactgttgaaaccaccattgctcgtgccagtgttctggataccagcatgtcagcaggcagtgggtctccaagcaaaactgtcactcccaaagcagtgcctatgctgacacccaagccttactcccagcccaaaaattctcaagatgttctgaagacctttaaggtagacgggaaagtcagtgtgaatggagagacggttcatagagaggaggagaaggaaagagagtgtcccacggtggcacctgcccactccttaaccaaatcccagatgtttgaaggtgtggccagagtgcacgggtctccactggagctgaaacaagacaacggtagcatcgagatcaacataaagaagccaaactctgttccccaagagctcgcagcaaccactgagaaaacggaaccgaatagtcaagaggacaagaatgatggtggaaaatcaagaaaagggaatatagaacttgcctcatcagaaccacagcattttacaacaactgtgactcgatgcagcccgaccgtggcctttgtggaatttccctccagcccccagctgaagaatgatgtgtcggaagaaaaagaccagaagaaaccagaaaatgaaatgagtggaaaggtggagttggtgctgtcacaaaaggtggtaaagccaaaatctccagaacccgaagcaacgctgacatttccatttctggacaaaatgcctgaagccaaccaactacatttgccaaatctcaattctcaagtggattctccaagcagtgagaagtcacctgttatgacaccttttaagttctgggcatgggacccagaagaggagcgcaggcgacaggaaaaatggcaacaggaacaggaacgtttgctccaggagagataccagaaggagcaggacaagctgaaagaagagtgggaaaaggcccaaaaggaggtggaagaggaagaacgcagatactatgaggaggagcgtaagataattgaagacactgtggttccatttactgtttcttcaagttccgctgaccagctgtctacctcttcctccatgactgaaggcagtgggacaatgaataagatagacctgggaaactgtcaagatgaaaaacaagacagaagatggaagaaatcattccagggagatgacagtgacttattgctgaagactagggaaagtgatcgactggaggagaagggcagcctaactgaaggggccttggctcattctgggaaccctgtatcaaaaggagtccatgaagaccatcagctggataccgaggctggggccccacactgtggaacaaacccacagcttgctcaggatccatcccagaatcagcagacatcaaatccaacgcacagttcagaagatgtgaagccaaaaaccctcccgctggataaaagcattaaccatcagatcgagtctcccagtgaaaggcggaagaaaagtccccgagagcacttccaggctgggcctttctctccctgttctcccacccctcccggtcagtcaccaaacaggtctataagtggaaagaagctgtgctcttcctgtgggcttcctttgggtaaaggagctgcaatgatcatcgagaccctcaatctctattttcacatccagtgtttcaggtgtggaatttgtaaaggccagcttggagatgcagtgagtgggacggatgttaggattcgaaatggtctcctgaactgtaatgattgctacatgcgatccagaagtgccgggcagcctacaacattgtgacacggctttcaagcttccggatcactcaccatttctttactgagagtgtcccctggcaactgcttaacaaaatcccaagctcaggggcttctcagcatttacctaatttctgaaaggctcttctgaaaggtggtatctgttctttcgtagcacagtgtttatgtttttcctgtttattgttttggttttttttttttttttgcatttgcacagtatacacaaaagaatatggggttgtaatgatcctgaatagctcaaaaaaggttttagcatggtcaaacaggcttatggtttaaaatgtgttattctcttctttgggaattagctaaatgatgcaataaacctgttttgttttagaatgtctaggaattaaacactttatgtttacagaattgagctgcagaaagtgcaagacatgccaatttgagacacacggtcttctaagactgaaggataaatttaatgcatttcagaaactaaacatcacagcaagctctatctctgagctataatttgtttttaatgcaaagacactagtttgataatatatactgtaatcctgaaacatttgtgttacttacctttggaggtagaaattataccaataaattattgcaccgttagtattagattctgtgtaccttggaagttatgtcattaatataggctggttcatcaaataaagcaaaaccttgcaatatcagctagatttacactccgggacgttgcccaaaggtaggaagaaagcagagggaaatatttcagtcatcatttccaaagtcattatcaaaatctgtgaggaagtttaatcttccaaagagtcaatgtcagacatcaggcctctgttgcctgcttctctcgaggcactagattaggagtcttcaataagagacttaacatgaggtatatggaagatgaggcaccgagataagttcatcattaggtgtgagcactgctcacccttgctggcaagttctccttaagggcctgaagcacaggtgtccaaagaaaagcgttaagtccatcttaatagaatctatgtggtatatgatgtggtcagcccctggtctgtgatcagcaagaacctacagcacagattatgccctgcccacttcaatgaatacctactctcctccattctccatcactttttttgctatcaagaactccggaccttgcccatggagaagtttagagaggaactcttgtggagagctggtttattttctgccctgtgcgacgagtttcagctggccaagaaaggagtcaagttattaaaaagcatcacaatgtagatctccaggctggttttttgttttttgttgttaagactggggaaagggggactatttattctgccttaaatcaatggcaaataagtcaagatgacattttgtgaatgtagactatggatacactcctaatagattgatgtagtcataaaagggggtcaagtagatgtttttctgttatgtaagcaataatttttccgtgtcttattgagtatggctagcgattatttattacatgctagatgggttctttgcatgtgggttccatataggtgcagaaatttcctcagccactggagggatttcgaccatatttgtcatttggatgagctgttattagattgaaatctacacatcatttcattaaaaattgtgccttagaaaacgcaaagctgttgcacatggcgataaattatggatgcagtacattgaagagagatgaagtcacttccaagtttccaagacttctcatggaggtgtttgctgttttacaggaaaaaataaaaataaaaaaagaaaaaaagaaaaaattaaaaagaaaaattgttttgaaaatgtacagatcaagtccaatattttgattatccacctgcatgttttattaaatattttgataatgtggatgtttacactttgcatgatattagcagagtaccactagtaatgcacaaacatgtacaatatggtcattcataaccgatttttatagaatactttttacatgtgcaactccatccgttatgtaaggattacatgaatattgcacattcccttctggtttcacaaacccatttatacatatttcttagtgaggctcattgtacatgtattgaagctagaatcgagtcaagaaaaataaagccccattctccaactgcaaaatgtgctttcccataatgaacactagtcaccagcacagaataatctccaacattttctaaattctaattgccaactgtttctatttatatttgatttatatttcatttggagtctgttacatggcagcttaggcagactagatcttgttttttccaatgcagcataatgagtatgatctatttcttttcaaataatctttgagatcccaggaaaaaaaaaatgctctgctccattgagctataatgtaaatgtgtttgtttaaaaaacaggtgaggcaagtgagtgatttattgttcctgaggaagtatatctgattttttttctcatactccaaaagctagtccctactctttaataaaaataatgggtaactttttgtttttcactagcgaacttccatgacatttcctttctatgtagtgtgattaatgcaatacatattatagttatctatacacagtgtaagatttaacaaactgaaatgatccacctcatatgtgagtccgtccaaaagatgttactgctctgggtgggccagtgttctatatcggttatactaactttcatttaaagtatttattctaaaatgcctctgagaaacagtaaaaaataaaaacaacaagttgtctaaaatgcaacagcttttatagtaaatgtacatttataaataaaatactcaaatc

SEQ ID NO: 268251 - DNA, 4401 bp, Artificial Sequence
  derived and/or modified sequence
cggaaggacaccgacgacatcgagagccccaagcggagcatccgggacagtggttacatcgactgctgggatagcgaaagaagcgactccctgagtccgccacggcatgggcgtgacgacagcttcgactccctcgatagttttggatcacgcagccgccagacaccatcacccgatgttgtgttgcgtggttctagcgacggcagaggctcagacagcgagtctgacctcccccatcgtaagttgccagacgtaaaaaaggatgatatgtccgctcggagaacgagccatggtgagcccaaatccgctgtgcccttcaaccagtacttgccaaataagtctaatcagacagcttatgtaccggccccattaagaaaaaagaaagctgaacgggaagaatatcgcaagagttggagcacggcgactagccctctcggcggcgaacggccgttctcttttcccgaaaccattgaagaagagggttctgaagtagggagcgctggagaagacaaccccgccgggcagatgaacccagggtggaaacctagtgacggaggttgcgagctccccgacggctccggaaaggagcacccttcctcagacggagccgtggtcgcaccagcccctaagagcgaggaaaaagatgcggcagaaatccagaagaggaaacgcctagaacaagccggtatcaaggtgatgcccgcagcacagcgattcgctagccagaagcagctgtctgaggagaaggaggccatccgtgatatcgtgctgcgcaaggaaaacagcttccttacccaccagcatggtaacgattccgaagccgaaggcgaagtggtgtgcagactgcccgatctcgaaaaggatgacttcgcagcaagaagagccaggatgaaccagaccaagccaatggtgcctctcaaccaactcctttatggtccctacccgaagaagggagcagagaaatctgatggcagcaagcagctcagcaagggtattagcaagaagcgctccttggagtacaagagaaatcaaggccacacggaggaggttaagttgattgtcacatgtaacatgagagctcaagagtcagagccggtagaggggggcctgcgcaaggttcccgacctgcataaagacgatctagcgcaacagcggattcagggctcactggccccgcacagagagcccccgagcttcatcacgctgagcaatatcacggaagccgatctggagacatgggagcgactcaaggttagtgagaaggctagggacggggacgtgcagcatatttgtgccagcgagcccagcccagagattaaggcggagacagcaattcgagacgatttcgccaaccgtaaggcacgggcttctaagaaggcttcctctccacgccagaaatttgtccactttggccccgtgaccgagctggatcagcagaagtggaaacgtctgtcaattgggaaagctggccctagggaagatgaggaggaggtaatttgtcacgggagcaagattcagatggattccgtgagtcctgtgtctgctgctaccagttccctgaaggggcatcaaattttcaacagacagaacgactgtcgtacgatgaattgcggtagaggagattactgccggcgcgccagttggctcgcaccagtgcctgagagccaggaggagtgggtttgcagcctcggggaatgcccacgtgggactgaggaggtcacatctaaacagttgcctcaggatggaaaggaggaaaccgagagtgcaccccgggactccgagcgcctcagcaaggccgagcggtccgaggattcctcccagcccttggtctgcccattggccagcgaatgtgaggcatccgggaccgaggagaagctcgagaagatgacagcccccgcatggagcggctccggcttaaagggccagcgtaaactggacgacagcaggaaggacgatatgatggcgcggcggaccgggatgtcactgcgccatacaggaagcaatccgaaccagttcctgccagtgccgtttgccaaacaacaagatgttgaggagtcatccaagggactgcccatgaaagatcagcgctacggcccccggacccctgtgtcagacgatgccgagtccacatctatgttcgatatgaggtgcgaggaggaagccgctgtgcagcctcacagtcgggcaagacaagaacagctgcaactgataaacaatcaactaagagaggaagacgataagtggcaggacgatctcgcgagatggaagagccgtagacgttcagtgtctcaggacttgatcaaaaaggaagaagaacggaagaaaatggagaagctgctcgctggagaggacggtaccagcgaaagacgaaagtcaatcaagacatatcgcgagattgtgcaggaaaaggagcgcagggagcgggaactgcacgaagcctacaagaacgctagatcccaggaagaggccgaggggattctccagcagtacatcgaacgcttcacgatttcggaggccgtcctcgagaggctcgagatgccaaagattctcgaaagaagtcacagcacagagccaaatctgtcttcttttctcaacgatccaaatcccatgaagtatctgagacagcaaagtctgcctcctcccaaattcaccgccaccgtcgaaactaccatcgcccgagcctccgttcttgatacgtctatgagcgcaggctccggatcaccatcaaagaccgttactccgaaagcggtgcctatgcttactcctaagccctattcacaaccaaagaatagccaagatgtgctgaaaactttcaaggtcgacggcaaggttagtgtcaatggggagacagtacaccgagaggaggagaaggagcgcgaatgtcctaccgtggctccggcacacagtttgacgaaaagccagatgtttgaaggtgtggcccgggtccacggctcaccattagagttaaaacaggacaatgggtcaatcgaaatcaacattaagaagcccaattcggtcccacaagaactggccgctactacggagaaaacagagcctaatagccaagaagacaagaacgatggtggtaaaagcaggaagggtaacatagaattggcctcatctgagcctcagcacttcaccaccactgtcacaagatgttctccaaccgtggcattcgtagagttcccatcttcgcctcaactgaaaaacgatgtttctgaggaaaaagatcagaagaagcctgagaacgaaatgagcgggaaagtggagcttgtactgtcgcaaaaggtggtgaaacccaagagcccggagcccgaggcgacccttacttttccatttctggacaagatgcccgaggcaaatcaattgcacctgccaaatttgaactctcaagtggatagcccaagcagtgaaaagtctcctgtgatgacccctttcaaattctgggcctgggatccagaggaggaaagaaggagacaggaaaaatggcaacaggagcaggaacgccttctccaggaacgctaccagaaggaacaagacaagctcaaagaggaatgggaaaaagcacagaaggaggtggaggaggaggagcggagatactatgaggaggaacggaagattatcgaagataccgtggtgcccttcacagtgtcctctagttctgctgaccagctcagcacaagctccagtatgaccgaggggtcaggaacaatgaataaaatcgacttgggcaattgccaggatgagaagcaggacagacggtggaaaaagagcttccagggtgatgactccgatctgctgctgaaaactagggaatcagataggttagaagagaaaggtagcctcactgagggcgcattggctcacagcggcaacccagtctccaagggcgtgcacgaggaccatcagctggatacggaggccggggcccctcactgcggtacgaatcctcagctggcacaagatccaagtcagaaccagcaaaccagcaatcctacgcatagctccgaagacgtaaagccaaaaacactcccgctggataaatctattaaccatcagatcgaaagcccatcggaaagaagaaaaaaaagccctagagaacatttccaggccggtcccttctcaccttgctcccccacaccaccgggccagtcccctaataggtcaatatctggcaagaagctatgctcatcatgcggcctaccccttgggaaaggcgctgccatgataatcgagactctgaacctctacttccatattcagtgcttcagatgtgggatttgtaaagggcaactcggagacgcggtgtccggaacagatgtccgcattcgcaatggcctcctgaattgcaacgattgctacatgcgttccagatcggctggtcagcctacaacattgtag

SEQ ID NO: 268252 - DNA, 4404 bp, Artificial Sequence
  derived and/or modified sequence
atgcggaaggacaccgacgacatcgagagccccaagcggagcatccgggattccgggtatatcgactgttgggactcagagcgaagcgacagcttgagtcccccacgccacggcagagacgactccttcgattcactggactcgtttgggtctagatcccgccagacgccctctccagatgtcgtcctgcgcggcagctccgacggccgcggttctgatagtgaaagtgatctcccccacagaaagcttcctgacgtaaagaaggatgatatgtccgcccgacgcacttcacacggagaacctaaaagtgccgtaccctttaatcagtatcttcctaataaatccaaccaaacagcctatgtgcccgccccattaagaaagaagaaggcagagcgagaagagtataggaagtcatggagtactgcaaccagtccgcttggaggtgagcggccgtttagttttccagaaactatcgaagaagaggggtcagaggtgggaagcgctggagaggacaatcctgctggtcagatgaacccgggctggaagccttcagacggaggctgcgaacttcccgacggttctggaaaagagcatccctcctcggatggtgcggttgtggcccccgctcctaagagcgaggaaaaagatgccgccgagattcagaagcgcaagaggctcgaacaggcgggcattaaggtgatgccagccgcccaacggttcgcctcacagaaacagctgagtgaggaaaaagaggccatacgggacattgtacttcggaaggaaaacagcttcctgactcatcagcacggaaacgattccgaagccgaaggggaggtcgtgtgtcggctgccagacctggagaaagatgactttgccgcacgacgggccagaatgaaccagacaaaaccaatggtcccacttaaccagcttctctacggtccttacccaaagaagggcgccgagaagtcagacggttctaagcagctctccaagggaatctccaaaaaacgcagcctagagtataagcgaaaccagggccacacggaggaggtcaagcttatcgtgacctgcaacatgcgagcacaggagagtgaacccgttgaagggggattgaggaaagtgccagatttgcacaaggacgatcttgcacagcagagaattcagggaagcttggcgccacaccgggagccgccctccttcatcacattatcaaatattacagaagccgacctggagacgtgggagagacttaaagtgtccgaaaaggccagagacggagacgtgcagcatatctgtgcctctgaaccaagtcccgagattaaggctgaaactgctattagggacgatttcgccaatcgcaaggctcgcgcatctaagaaggctagtagcccccggcagaagtttgttcactttggcccagtaactgagctcgatcagcagaagtggaagcggcttagcataggaaaggccggcccacgagaagatgaagaagaagttatctgccacggctcaaaaatacagatggactccgtctcccccgtgtctgctgctacctcgtctcttaaggggcatcagatctttaatcggcaaaatgattgtcgcacaatgaattgcggtagaggggattattgtagaagagccagttggctggctcctgtcccagagtcccaggaagagtgggtgtgttcccttggcgagtgtcctcgagggaccgaggaggtcactagcaaacagcttccccaggacggcaaggaggaaactgaaagtgccccccgcgacagtgagcggctcagcaaggccgaacgtagcgaggattcctcacagccactggtgtgcccgctggcatcggaatgcgaggcatccggcaccgaggagaaactcgagaaaatgactgcacccgcctggtccggttccgggctgaagggacagcgcaagctggacgactcacggaaagatgacatgatggcgaggagaaccggaatgtccctgagacataccgggtctaacccgaaccaatttctacccgtgccattcgctaagcagcaggacgttgaagaatcatcaaaagggcttccgatgaaggaccagcgatatggtccccgaacacctgtgtccgacgacgcagaatcaacctctatgtttgacatgcgatgtgaggaggaagccgcagtccagccccatagccgtgccaggcaggagcagctgcaactgattaataatcagttgcgcgaagaggacgacaagtggcaggatgatctggcacggtggaaatctaggcgtcggagcgtatcacaggatctcattaaaaaggaggaggagaggaagaaaatggagaagcttctggctggggaggacgggactagcgagagaagaaagagtatcaagacgtatcgagaaattgtacaggaaaaagaacggagagagcgagagttacacgaggcatataagaacgcacggtcacaagaagaagcggagggtatcttacagcagtatatagagaggttcaccatcagcgaagcagtgctcgagagattagagatgcctaaaatactggaacggtcacactcaaccgagcccaatctctcctcatttttgaatgaccctaacccgatgaaatatcttaggcagcagagcctccctccaccaaagtttaccgctacagtagagaccaccatcgcaagagccagcgttttagacaccagtatgagcgccggcagcggaagcccttcaaagacggttacacctaaggccgtgcccatgctgacacccaagccttactctcagcctaaaaacagccaggacgtgttgaaaacgttcaaagtggatggaaaggttagcgtgaatggagagacagtgcacagagaagaagagaaggaacgagagtgtcccaccgtggctccggctcattccctgacgaagtcccaaatgttcgaaggggtggccagggtgcatggcagccctttagaattgaagcaagacaacggttccatagagatcaacattaagaaaccaaactcagtgcctcaggagctggccgccacaacagaaaaaaccgagcccaacagtcaggaggacaaaaatgacgggggcaaaagccgcaaaggtaacatcgaactggcctcatcagagccccagcatttcacaacaactgtgacgcgctgcagtcctacagtggcgttcgtagagtttcccagttccccacagctgaaaaatgatgtcagtgaggagaaggaccagaaaaagcccgagaatgaaatgtcaggaaaggtagaactggttctgtcccaaaaagtggttaagcccaagagtcccgaaccagaggcaacattgacattccccttcctggacaagatgcctgaagccaatcaattgcatctccccaatctgaattctcaagtggactcccccagttccgagaagtccccggtgatgacccccttcaagttctgggcttgggatccggaggaagagcgcagaagacaagaaaagtggcagcaagagcaggagcggctgctgcaggaacgctatcagaaggagcaggataagttaaaagaagagtgggagaaagcacagaaagaagtagaggaggaagagcgacggtactacgaggaagagcgtaagattatcgaggataccgtcgtgcctttcactgtctcttcatcatccgctgatcagctgtctacctcctcaagcatgacagaagggagtggcacaatgaataagatagatctagggaactgtcaggatgagaaacaggaccggcggtggaagaaatccttccagggagacgactctgacttattgctgaagacccgggaaagcgatcggctggaggagaaaggcagcctgaccgaaggcgccctggcgcatagcggcaaccccgtctcgaagggcgttcacgaggatcaccagctcgacacagaggcaggcgccccacactgcgggacaaatccccagctagcccaagatccctcacaaaaccagcagacctcaaaccctactcattcaagcgaggatgtgaagcccaagaccctacccctcgacaagtccattaaccatcagatcgagagtccatcagaacgccgaaaaaagagccctagggagcactttcaggcaggccccttttcaccctgttcccccacccccccaggccagtctcccaaccggtctatctccgggaaaaagctgtgcagttcatgcggcttaccactcggcaagggggctgctatgattatcgaaaccctcaatctgtattttcatattcagtgcttcaggtgtgggatctgcaaggggcagttgggcgacgcagtgagcggtacggatgtccgaattaggaatggcttgcttaactgtaatgactgttatatgagatcccgttccgctggccagcctacgacactgtag

SEQ ID NO: 268253 - DNA, 4401 bp, Artificial Sequence
  derived and/or modified sequence
cggaaagacaccgatgacatcgagtccccaaagcggagcattcgagactccggatatattgactgctgggacagtgagcgatccgacagcctatcccccccaagacatggcagagatgatagttttgactcattagatagttttggaagccgatctcgccaaactcctagtcccgatgtagtcctgcgcggtagttcagatgggagaggtagtgactcagagtcagatcttccgcaccgaaagttgcctgacgtaaaaaaagacgacatgtccgcgagaaggactagtcacggagaaccaaaatcagccgtaccgtttaatcagtatctccctaacaagtcaaatcagacggcatacgttccagctccactgaggaaaaagaaagccgagagagaagagtatcgcaagtcctggtcaacagccacttcaccattgggcggagagagacctttcagctttccagagaccattgaagaagaagggagcgaagtcggctccgccggtgaagataacccagctggacaaatgaatccaggatggaagccatctgacggaggctgtgaattgccggacgggtccggaaaagagcacccttcgagcgacggggcagttgtggcccctgcaccgaagagcgaggagaaagatgctgctgagatccagaagcgtaagcggctcgagcaggcaggaattaaagtaatgcccgcagcgcagagattcgcaagtcagaagcagctgtctgaggagaaagaagctatccgagatattgtgttacgcaaagaaaactcgttcctcacgcaccagcatggcaacgacagcgaagccgagggggaagtggtgtgtcggcttccagacctcgaaaaagatgatttcgctgctagaagagctcgcatgaaccagaccaagcctatggttcccctcaaccagctcttgtacggtccgtaccccaagaagggcgcagagaaaagcgacggaagtaaacagctttctaaggggatttccaagaagcgatccctggagtacaagagaaatcaaggccacactgaggaagtgaaactcatcgtcacctgcaatatgagagctcaggagagcgagcccgtcgaagggggactgaggaaggtgccggatctgcataaagatgacttggcacagcagcgtattcaaggctcgctggctcctcacagggagcccccaagcttcatcactctctctaatattaccgaagccgacctggagacctgggagcggcttaaagtgtcagagaaggcccgagatggagacgtccagcacatctgcgcgtccgaaccgagtccagagattaaagccgagaccgctatcagagacgacttcgcaaatagaaaggccagagcgtctaaaaaggcttccagcccgagacaaaagttcgtgcacttcggcccagtgaccgagttagaccagcagaaatggaagcgcctttccattggaaaagccggaccaagagaagacgaggaggaagtcatctgccatggtagcaagattcagatggatagtgtaagtcctgtctccgcagccacaagctctctcaagggccaccagatcttcaataggcaaaatgattgccgcaccatgaactgtggtcgcggagattactgcaggagggcctcctggttagcccctgtgccagaaagccaggaagagtgggtctgctctctgggcgagtgccctcgcggaacggaggaggtgacttcgaagcaactccctcaagacggaaaggaggagacagaatcggctcctagggattcagagcgactgtcaaaagcagagcggtcagaggatagcagccagcccctggtgtgcccattagcatcagagtgtgaggcatctggtaccgaagagaagctggagaagatgacggctccagcgtggtctgggagtggactcaaggggcagcggaagctggacgactcccgcaaggatgacatgatggcccgaaggaccggtatgagcctacgacacaccggttccaaccctaaccaattcctcccagtgccattcgctaagcaacaggatgttgaggagtccagcaaaggcctgccaatgaaggatcagcgctacggtcctcgcacaccggtcagtgacgatgctgagagtacgtcgatgttcgatatgcggtgtgaggaagaagctgccgtgcagccccatagtcgggcaaggcaggaacagttgcagcttatcaacaatcagctaagagaggaagatgataagtggcaggatgacttagctcgttggaagagtaggcgaagaagcgtgtctcaagatctgatcaaaaaggaagaggagcgcaagaaaatggaaaaactgttggcaggcgaagacggaacgtctgaacgcaggaagtccatcaaaacctaccgcgagattgtgcaggagaaggaacgacgcgaacgtgagctccacgaggcttataaaaatgccaggtcccaggaagaagccgaaggtatcctgcagcagtacatagaacgttttaccatctccgaggcagtattggagagactagaaatgcctaagattctggagagaagtcactctaccgagcccaacctcagttcctttttgaatgatccaaaccccatgaagtatctgaggcagcagagccttccccctccaaaattcaccgcgaccgttgaaaccactattgcccgagcctcagtgcttgatacctccatgagcgcaggtagtggctccccaagcaagacggtgacacccaaagccgtgcctatgctgacgccgaagccttactctcagcctaagaacagccaggatgtgttgaagacatttaaggtcgacggaaaggtgtcagttaatggggaaaccgtccatcgggaggaggagaaggagagggagtgcccgaccgtagccccagcacactcactgacaaagagccagatgtttgagggcgtggctcgtgtgcatggttcacccctggaactgaagcaggataacggatccatcgaaattaatataaagaagccaaactccgtgccacaggaactagcggctacgaccgagaagaccgagcctaattcacaggaggacaagaacgatgggggaaagtcccgtaaggggaacattgaattggctagctctgaaccccagcacttcactacaactgtcacgagatgctcccctacggtcgcattcgtggagttccctagcagcccccagctcaaaaacgacgtgtcagaagagaaggaccagaaaaagccggagaacgagatgtcaggaaaggtagaactagtgctgtctcagaaagttgtgaaaccaaagtcgccagagccggaggccacgttgaccttcccattcctggacaagatgccggaggctaaccaactgcacctcccaaacctgaattcccaggtggactcaccctcttcagagaagagtcctgttatgaccccatttaagttctgggcctgggatcctgaagaagagagacgcaggcaagaaaaatggcaacaggagcaagagaggctgttacaagagcgttaccagaaggagcaggataaacttaaagaggagtgggagaaagcgcaaaaggaagtggaggaagaggagaggagatactacgaagaggagcgtaaaatcattgaggacacagtggttccattcaccgtatcgagtagtagcgctgaccagctctccactagctccagcatgactgagggctccggtaccatgaacaagatcgacctgggaaactgtcaggacgaaaagcaggataggcgctggaaaaagtctttccagggtgacgacagtgatctgttgcttaagacaagggagtctgatagactggaggaaaagggatccctcaccgagggggctcttgcacattctgggaaccctgtgtcgaagggggtccacgaggatcatcagctggacaccgaggctggtgcacctcactgtggtaccaacccgcagctggcccaggacccaagccaaaatcaacagaccagtaatcccactcacagctccgaagatgtgaaacctaaaacgctgcctctggataagtccatcaatcaccagatagaaagcccttctgagcggcgaaaaaagagccccagggaacactttcaggccggacccttctcgccatgctcaccaacaccccctggccagagtcccaatcgttccattagcggcaaaaaactttgcagttcgtgcgggctccctctgggaaagggcgcagccatgatcatagagaccttgaacctgtatttccacattcagtgctttcgttgcggcatttgcaagggtcagctgggtgacgcggtgtcggggacagacgtgcggatcagaaatggactcctgaattgcaatgactgctacatgagatcacgttcggccggacagcccaccactctgtag

SEQ ID NO: 268254 - DNA, 4404 bp, Artificial Sequence
  derived and/or modified sequence
atgcggaaagacactgacgacatcgagtcccctaagagaagtattagggatagcggatacatcgactgctgggactccgagcgttccgacagcttgagtccaccgcgtcacggcagggatgactcctttgactctctcgatagtttcggcagtaggtctcgccagactcccagccctgatgtggtcctaaggggctcctccgacggaaggggatccgatagcgaatcagatctgccgcataggaagttgcccgacgtcaaaaaggatgatatgtctgcgagacgcaccagccacggcgaacccaagtctgctgtgccctttaatcagtacctccctaacaagtctaatcagactgcatacgtccctgcccctctacgcaaaaagaaagccgagagagaggagtaccgtaagtcctggtccacagcaacgtctccactcgggggagagcggcctttctcctttcccgagaccattgaggaagagggaagtgaagttggatccgccggagaggataaccctgccggacagatgaatcccggttggaagccaagcgacggtggttgtgagctgccagatggtagtggtaaagaacatccttcatccgatggagctgttgtcgcccctgccccaaaatccgaggaaaaagatgccgctgagatacaaaagaggaaaagactggaacaggccggaatcaaagtgatgcctgcggctcagagattcgcctcccagaagcaactgagcgaagagaaggaggctatcagggacatcgtcctgagaaaggaaaatagctttctcactcatcagcacggcaatgactcagaagccgagggggaggtggtgtgtcggctacccgatttggaaaaggatgacttcgccgctagaagggcaaggatgaatcagaccaagcccatggtgccccttaatcagctgctgtacggaccctaccccaaaaagggcgctgagaaatccgatgggtctaagcagttgtccaagggcatcagcaaaaaacgcagtctggagtacaagagaaaccaaggtcacactgaagaggttaaactcattgtgacatgtaacatgcgcgctcaggagagcgaaccagttgagggagggctgcgcaaggttcctgatttgcacaaggatgacctggctcaacaacgcatccaaggctctctggcccctcaccgggagcctccatcattcatcacactgtccaatatcacagaagccgatcttgaaacttgggaacgtctgaaggtcagcgaaaaggctcgggatggagatgttcaacatatatgtgcctctgagccttcaccggagataaaggccgagacagcaataagagatgactttgcaaatcgaaaagctagggctagtaagaaagcatcaagtcccaggcagaagttcgtccattttggtcctgtaaccgagcttgaccaacagaagtggaaaagattgtctatcggcaaagccggtccccgagaggacgaggaggaggttatctgccacgggtcaaaaatccagatggacagtgtgtcccctgtgtcagcagctacctcatccctgaaaggtcaccagatcttcaatagacagaacgactgccggacaatgaattgcggccgtggcgattactgtagacgtgcctcctggctcgcacccgtccctgaatcgcaggaagaatgggtttgcagcctaggcgagtgccctaggggcacagaggaggtcacctccaaacagctgccccaggacggtaaagaggagaccgagagtgcccctagggactctgagcgccttagcaaggctgagcggtctgaggatagctcccaacctctggtgtgcccactggcttctgagtgtgaggcctccggcaccgaagaaaagctcgagaagatgacagccccagcttggagcggtagcggactgaagggacagaggaaacttgatgacagtcgaaaagacgacatgatggccaggcgcaccgggatgagcctgcgtcatacaggatctaaccctaatcagtttctgcccgtgccatttgcgaaacagcaggatgtggaggaatccagcaaagggctccctatgaaggatcaacggtacggccctaggacccctgtgagtgatgatgcggagagcacctcaatgttcgatatgaggtgtgaggaagaggcagccgtacagcctcactcccgggctagacaagaacaactgcagctcattaataaccagcttagagaagaagatgacaagtggcaagacgatcttgcgcgttggaagagccggagacgatctgtttcacaggacttgattaaaaaggaggaggagaggaaaaagatggaaaaattgttggcgggagaggacgggacttccgagcggagaaagagtattaagacttacagagaaatagtccaggaaaaggagagaagagagcgagagcttcatgaggcatataaaaacgctagatcacaggaagaggcagaggggatactccagcagtacatagagcgctttaccatatccgaggccgttctcgaaaggctcgagatgcctaagattttggagaggtctcattccacagagcctaacctgagtagcttcctgaatgatcctaaccctatgaagtacttacgccagcaatcgctcccaccacccaagtttacagctactgtggaaacaaccatcgccagggcgtctgttcttgatacttctatgtctgctggcagcggctccccctctaagaccgtgacccctaaggcagttccaatgctgacgccaaagccttacagtcagcccaaaaattcccaagatgttcttaaaacgtttaaagtggacggcaaggttagtgtgaacggagagacagtgcaccgtgaagaggagaaggaacgggagtgtcctactgttgcacccgcacatagcctaaccaagtcacaaatgttcgagggggtcgcaagagtccacggaagcccacttgaacttaaacaggataatggatcaatcgagatcaatataaagaagccgaactcagtcccgcaggagctcgccgcaactacagagaagactgagcccaactcacaggaagacaaaaatgatggaggtaagtcgcgcaagggaaatatcgagctcgccagcagcgagcctcagcacttcacaaccaccgttacgcgatgttcccccacagtcgcctttgtcgagttcccatcttccccacaactgaaaaatgatgtgtcggaagagaaagatcagaaaaagcctgagaatgagatgtctggaaaggtggagttggtgctcagccagaaagttgtgaagcccaaatccccagaaccagaagcaaccctgacctttcccttccttgataaaatgccagaagcgaaccaactccacctgcccaatctgaactcccaggtcgacagtccgagctccgaaaagtcccccgttatgaccccattcaaattttgggcttgggaccccgaggaggagaggcgacgacaggagaaatggcagcaggaacaggaaagactgctgcaggaacgctaccagaaagaacaagacaagttaaaggaggaatgggagaaagcccagaaggaagtggaggaggaggagagacgctactacgaagaggagaggaagatcatagaggacacggtcgtccctttcacagtatcctcaagttccgccgaccagctttccacatcttcttctatgaccgagggcagcggaaccatgaataagatcgatctgggcaactgccaggacgagaagcaggataggaggtggaagaaaagcttccagggcgacgacagcgacttgttactgaagaccagagaatctgaccgtctcgaggagaagggctccttgactgaaggagcactggcccatagtggcaacccggtttctaagggcgtccacgaggatcaccagttggacacagaggccggagccccacattgcggaaccaatccccagttggcgcaagatccttcccaaaaccagcagaccagtaaccccactcattcatccgaggatgtgaagcctaagaccctccctctggataaaagcattaaccaccaaatagaatctcccagcgaaagacgcaaaaaatctccacgcgagcactttcaggctggtccgttctccccctgctctccaaccccccctggacaatcacctaacagatcgatttccgggaagaagctctgttcatcgtgtggtctgccattggggaaaggagcagctatgatcatcgaaacactgaacctttatttccacatccagtgcttccgttgcggaatctgcaaagggcagctcggtgacgctgtgtcagggacggatgtaaggatacggaatggcctgctgaattgcaatgactgttatatgcgctcaagaagcgcaggacagcctactactctatag

SEQ ID NO: 268255 - protein, 210 aa, Artificial Sequence
  derived and/or modified sequence
MAERKNAKALACSSLQERANVNLDVPLQVDFPTPKTELVQKFHVQYLGMLPVDKPVGMDILNSAIENLMTSSNKEDWLSVNMNVADATVTVISEKNEEEVLVECRVRFLSFMGVGKDVHTFAFIMDTGNQRFECHVFWCEPNAGNVSEAVQAACMLRYQKCLVARPPSQKVRPPPPPADSVTRRVTTNVKRGVLSLIDTLKQKRPVTEMP

SEQ ID NO: 268256 - protein, 737 aa, Artificial Sequence
  derived and/or modified sequence
MSEVLPADSGVDTLAVFMASSGTTDVTNRNSPATPPNTLNLRSSHNELLNAEIKHTETKNSTPPKCRKKYALTNIQAAMGLSDPAAQPLLGNGSANIKLVKNGENQLRKAAEQGQQDPNKNLSPTAVINITSEKLEGKEPHPQDSSSCEILPSQPRRTKSFLNYYADLETSARELEQNRGNHHGTAEEKSQPVQGQASTIIGNGDLLLQKPNRPQSSPEDGQVATVSSSPETKKDHPKTGAKTDCALHRIQNLAPSDEESSWTTLSQDSASPSSPDETDIWSDHSFQTDPDLPPGWKRVSDIAGTYYWHIPTGTTQWERPVSIPADLQGSRKGSLSSVTPSPTPENEDLHAATVNPDPSLKEFEGATLRYASLKLRNAPHPDDDDSCSINSDPEAKCFAVRSLGWVEMAEEDLAPGKSSVAVNNCIRQLSYCKNDIRDTVGIWGEGKDMYLILENDMLSLVDPMDRSVLHSQPIVSIRVWGVGRDNGRDFAYVARDKDTRILKCHVFRCDTPAKAIATSLHEICSKIMAERKNAKALACSSLQERANVNLDVPLQVDFPTPKTELVQKFHVQYLGMLPVDKPVGMDILNSAIENLMTSSNKEDWLSVNMNVADATVTVISEKNEEEVLVECRVRFLSFMGVGKDVHTFAFIMDTGNQRFECHVFWCEPNAGNVSEAVQAACMLRYQKCLVARPPSQKVRPPPPPADSVTRRVTTNVKRGVLSLIDTLKQKRPVTEMP

SEQ ID NO: 268257 - DNA, 2214 bp, Artificial Sequence
  derived and/or modified sequence
atgagcgaagtcctgccagctgattctggagtggataccctcgctgtttttatggcctcatcaggcacgacagacgtgactaatcgcaacagcccagccactcctcctaacactctcaaccttcgatcatcccacaacgagctactcaacgcagagattaaacataccgaaacaaagaatagcacaccgccaaagtgtaggaaaaaatatgcccttacaaatatacaggctgctatgggactcagcgatccagccgcccaaccactgctgggcaatggcagcgccaatatcaaactggtgaagaacggggaaaaccaattgaggaaggccgcagagcaggggcaacaggatccaaacaagaatctgagccccaccgcagtgattaatattacgtccgagaagcttgaaggcaaagagccacatcctcaggattcatctagctgcgagatactccccagccaaccacgtagaacaaaatcatttctgaattactatgcagatttggaaaccagcgcgcgggaattggagcaaaatcgaggtaaccaccacggcactgcggaagagaagagtcagcctgtgcagggccaggctagtacaataattgggaatggcgatctgcttttgcagaaacccaaccgcccacagtccagccctgaagacgggcaggtggcaaccgttagctcctcacccgaaactaagaaagaccatcctaaaactggggccaagaccgattgcgccttacatagaatccaaaatctcgctccctcagacgaagagagctcatggacgactctaagccaggatagcgcgtcaccgtctagccccgatgagaccgacatctggagtgaccactctttccagaccgatccggacctcccaccaggttggaagcgcgtaagcgacatagctggcacctattattggcacattccaacaggtaccactcagtgggaacgccccgtgtcaattccggccgatctgcaagggagccgaaaaggctcactctcgtccgtgaccccttcaccgacaccggaaaacgaagatctgcacgccgccacggtaaacccagatcccagcctgaaggagttcgagggtgccactctgaggtatgcatccctgaaattgcgtaatgcaccacatcccgacgacgatgattcatgttccattaactcggatcccgaagccaagtgctttgccgtgcgctcgctgggatgggtggagatggctgaggaagacctggcacccggcaagtcctccgtggccgtgaacaactgtatcaggcagctgtcgtattgcaaaaacgatattcgggatactgtcgggatttggggggagggtaaggacatgtacctcatcctagaaaatgacatgcttagtctggttgatcctatggaccggagtgtgctacactcccagcctattgtgtctatacgggtgtggggagttgggcgagataacgggcgagactttgcttacgtcgcgcgggacaaagatactcgtatcttgaagtgtcatgttttccgctgcgacacacccgctaaggccattgctacatcactccacgagatatgtagcaaaatcatggctgagaggaagaacgcaaaggcactggcttgctcctctttgcaagaacgcgccaatgtgaatctggatgttcccttgcaggtcgattttcccacccctaagaccgagctggtacaaaagtttcatgtgcaatacttgggaatgctcccagttgataagccggtgggaatggatatcctgaactctgccattgagaacctaatgacgtcaagcaacaaggaagattggctcagcgtaaacatgaacgtggctgatgccacagtgactgtcatcagcgaaaagaatgaggaggaagtcctggtcgaatgccgcgtgcggttccttagcttcatgggagttggcaaggacgtgcataccttcgctttcataatggataccggcaatcagaggttcgagtgtcacgtgttctggtgtgaaccgaatgccgggaatgtgtctgaggccgttcaggccgcttgtatgctgcgttaccaaaaatgcctcgtcgctcgccctccgagccagaaagtacgccctcctccgccacctgccgattccgtcaccaggcgggtcacaaccaatgtgaaaagaggagttctctctctgattgacaccttgaagcaaaaacgcccagtgaccgaaatgccttag

SEQ ID NO: 268258 - DNA, 2214 bp, Artificial Sequence
  derived and/or modified sequence
atgtctgaggtgctgcctgctgacagcggcgtggacaccctggccgtgttcatggccagcagcggcaccacagatgtgaccaacagaaacagccctgccaccccacccaacaccctgaacctgcggagcagccacaatgagctgctgaatgctgagatcaagcacacagagaccaagaacagcaccccacccaagtgcaggaagaagtatgccctgaccaacatccaggccgccatgggcctgagtgaccctgctgcccagcccctgctgggcaatggcagcgccaacatcaagctggtgaagaatggagagaaccagctgaggaaggctgctgagcagggccagcaggaccccaacaagaacctgagccccacagctgtgatcaacatcaccagcgagaagctggagggcaaggagccccacccccaggacagcagcagctgtgagatcctgcccagccagcccaggaggaccaagagcttcctgaactactatgctgacctggagaccagcgcccgggagctggagcagaacagaggcaaccaccacggcacagctgaggagaagagccagcctgtgcagggccaggccagcaccatcattggaaatggagacctgctgctgcagaagcccaaccggccccagagcagcccagaagatggccaggtggccaccgtgagcagcagccctgagaccaagaaggaccaccccaagacaggagccaagacagactgtgccctgcaccgcatccagaacctggcccccagtgatgaggagagctcctggaccaccctgagccaggacagcgccagccccagcagcccagatgaaacagacatctggagcgaccacagcttccagacagatcctgacctgcccccaggctggaagagggtgtctgacattgctggcacctactactggcacatccccaccggcaccacccagtgggagaggcctgtgtccatcccagctgacctgcagggcagcaggaagggcagcctgagctctgtgacccccagccccaccccagaaaatgaagacctgcatgctgccaccgtgaacccagaccccagcctgaaggagtttgaaggagccaccctgcgctatgccagcctgaagctgagaaatgccccccacccagatgatgatgacagctgcagcatcaacagcgaccctgaggccaagtgctttgctgtgcgcagcctgggctgggtggagatggccgaggaggacctggcccctgggaagagctctgtggccgtgaacaactgcatccggcagctgagctactgcaagaatgacatccgggacacagtgggcatctggggcgagggcaaggacatgtacctgatcctggagaatgacatgctgagcctggtggaccccatggacagatctgtgctgcacagccagcccatcgtgtccatccgggtgtggggcgtgggccgggacaatggccgggactttgcctacgtggcccgggacaaggacacccgcatcctgaagtgccacgtgttccgctgtgacaccccagccaaggccatcgccaccagcctgcacgagatctgcagcaagatcatggccgagaggaagaatgccaaggccctggcctgcagcagcctgcaggagcgggccaacgtgaacctggatgtgcccctgcaggtggacttccccacccccaagacagagctggtgcagaagttccacgtgcagtacctgggcatgctgcctgtggacaagcctgtgggcatggacatcctgaacagcgccatcgagaacctgatgaccagcagcaacaaggaggactggctgtctgtgaacatgaatgtggctgatgccaccgtgaccgtcatcagcgagaagaatgaggaggaggtgctggtggagtgccgggtgcgcttcctgtccttcatgggcgtgggcaaggatgtgcacacctttgccttcatcatggacaccggcaaccagagatttgagtgccacgtgttctggtgtgagcccaatgctggaaatgtgtctgaggccgtgcaggccgcctgcatgctgcgctaccagaagtgcctggtggcccggccccccagccagaaggtgcggcccccacctcctcctgctgacagcgtgacccggcgggtgaccaccaacgtgaagaggggcgtgctgagcctgattgacaccctgaagcagaagaggcctgtgacagagatgccctag

SEQ ID NO: 268259 - DNA, 2214 bp, Artificial Sequence
  derived and/or modified sequence
atgagcgaggtgctgcccgccgacagcggcgtggacaccctggccgtctttatggcctcctcagggaccaccgacgtcacgaaccgtaactcgcccgccactccacccaatactctaaatctgaggagtagtcacaacgaactgctgaatgctgagatcaagcatacggaaaccaaaaatagcacgccaccaaaatgcaggaaaaagtatgctctgaccaatattcaggcagccatgggactctctgatcccgccgcgcagccccttctgggaaatggaagcgccaacatcaagctagtgaagaacggcgaaaaccagttaaggaaggctgcagagcaaggacaacaggatcctaataagaatctcagtccgaccgcagtgattaacattaccagtgaaaaactagagggtaaggaaccacacccacaggatagctcctcatgcgaaattctcccctcacagcctcgcagaacgaagagcttcttgaactattacgccgatctcgaaacgtcagctagggagctggagcagaaccggggcaaccaccatggcaccgcagaggaaaaaagtcagcctgttcaggggcaggcgagtactatcatcggaaatggcgacctgttgttgcaaaagcctaataggcctcagtcaagccctgaagatgggcaggtggccaccgtcagttcctctcctgagactaaaaaagatcatcctaaaacaggagctaaaaccgactgtgcgttgcatcgtattcaaaatctggcaccctccgacgaggaaagttcttggacaactctgtcccaagacagcgctagcccaagctcacctgatgaaacagatatctggtccgatcattccttccagacagatccagacttacccccaggctggaaacgcgtgtctgatatagccgggacatactactggcacattccaacagggacgactcagtgggaacgacccgtcagtatacctgccgacctccaggggagccggaagggcagtcttagtagcgtcaccccctcacccactccagaaaatgaagacctgcacgccgcgacagtgaaccccgaccccagcttgaaggagtttgaaggcgctactctccgatacgcttcactcaagctgagaaacgcacctcatccggacgacgacgatagctgctccattaatagcgacccagaagcaaaatgtttcgcagtgcggtccctcgggtgggttgaaatggcggaggaagatctggctccaggcaaatcctcagtggcagtaaataactgcatccgacagttgagctattgtaaaaacgatattcgcgataccgtgggcatttggggcgagggcaaggatatgtatttgatcttagagaatgacatgctatctctagttgatccgatggaccggtctgtcctgcacagtcagccaatcgtctcaattcgcgtgtggggggtggggcgagacaatggaagggacttcgcctatgtcgcccgagataaagatactcgcattctcaaatgccacgtgtttaggtgcgacacgcccgccaaggcgatcgctacttccttgcacgaaatatgcagcaaaataatggctgagcggaaaaatgccaaggcccttgcttgttctagcctacaggagcgtgctaacgtaaacttggacgtcccattgcaggtggattttccaactcctaagaccgagctcgtgcagaagttccacgttcaatatctgggaatgctgcctgtcgataaacctgtggggatggatatactcaactcagccatcgagaatcttatgacgtcttccaacaaggaggattggttgagcgtgaacatgaacgtagcggacgcaaccgttactgttataagcgagaaaaatgaggaggaagtgctcgtcgaatgtcgggtgcgcttcctcagttttatgggcgtcggcaaggacgtgcatacattcgctttcattatggacactggcaaccagcggttcgagtgccacgtgttttggtgcgaacctaatgctggtaatgtcagcgaggccgtccaagccgcatgtatgctgcggtatcaaaaatgcctggtcgctcgtccaccatcacagaaagtcagaccacccccaccgcctgccgattccgtgacccggcgggtaaccactaatgtgaagcgcggggtgctctcactcatcgacacactgaaacagaagcggcctgtgactgagatgccttag

SEQ ID NO: 268260 - DNA, 1681 bp, Artificial Sequence
  derived and/or modified sequence
aacttgagcccggggcagtgcgcgcggctgcttgagcgacggcaccgctggctggtgccggcaccctggggcttgtcgtagcacctggggcggcatccccgcccgacttcggaaggaccgggaggcaaaggtgaggaagttggcgaaggaacggctctcctttgtttgcagggattttgcttatgtagcaagagataaagatacaagaattttgaaatgtcatgtatttcgatgtgacacaccagcaaaagccattgccacaagtctccacgagatctgctccaagattatggctgaacggaagaatgccaaagcgctggcctgcagctccttacaggaaagggccaatgtgaacctcgatgtccctttgcaagtagattttccaacaccaaagactgagctggtccagaagttccacgtgcagtacttgggcatgttacctgtagacaaaccagtcggaatggatattttgaacagtgccatagaaaatcttatgacctcatccaacaaggaggactggctgtcagtgaacatgaacgtggctgatgccactgtgactgtcatcagtgaaaagaatgaagaggaagtcttagtggaatgtcgtgtgcgattcctgtccttcatgggtgttgggaaggacgtccacacatttgccttcatcatggacacggggaaccagcgctttgagtgccacgttttctggtgcgagcctaatgctggtaacgtgtctgaggcggtgcaggccgcctgcatgttacgatatcagaagtgcttggtagccaggccgccttctcagaaagttcgaccacctccaccgccagcagattcagtaaccagaagagtcacaaccaatgtaaaacgaggggtcttatccctcattgacactttgaaacagaaacgccctgtcaccgaaatgccatagctgcacatgcaaaaggactcggctatttacctgaagattgactagctacactaaagaaaatgaactccgccatccgaccttccatccagttgctgatgctttgtcttcagagaatttacccttaaccaagcagtgttagacaagcatgttctctcgtcttgccaccatcatgtgatatgaaaagaagcatgaataattttttttgctgtaagttacatcatgcgcagtggaaggtctttttcttattgtaaatattgtgaacattacttaacttcacacacacacagagaagagtgtggccccacccctcctagtgaactaacgctgcgtccttggaatgaatgatgcgtgagttagtttcactgtcttcttggctggacctgtcacaagcaacctttaagtcctacagcactttgccctgttttcaacattggagtaggcactgcatagcagataccattgaattgctgtaaaaataggatggcgagtttgtgttttaatttttcataaaattgaacctgttggttgacaaaattggctgttggcatcagtatagaaaccaactggcagctttccctgacaagctctttgacacatggacaccatttcatgtctacagctgtttgtgggatgttggaaaaaaatgaaacttcaaaattgatgaaaaactaaattcgaggaattaaaatcgaacaaaacatagcctttcttttccgatggttttcaaactgattatttttaaaagagattaataaaatc

SEQ ID NO: 268261 - DNA, 3316 bp, Artificial Sequence
  derived and/or modified sequence
aaagcctggagaagtggaatctcgtcagcgccgctccctgcgcgggactcgcggaacggcactgagcatgctcagttgccggagcccgttctggtctcaagtaggaagctagtgcgctgtaaccgcatctgatctgggcgctccgggaagggcgagactggagcagagccgctgggcgccggagccgaggcgagcgccgcgcgcaccactggttggagttgctgtgggtgagctgctgtggtctgtagccaagcatgctgtggtcggatctgcccagccgtggaacagaaacatttgctggatggaaaatccataaaagaaagctcctgtgaaaagctgaggctgacaataatttaagcaaaatcagatcgatctctttgggctgcctgacctccttgggtgcttgctattaattaacagactttgtggggaaaaaaaggagcttgccttctgagctttgtaccaaagacctgggaaaactaaccatctcagtctttcctgaggacttgggaactgccgaggcctctgccaatgtgttgactgtcgctatgggctcactgttgtccaggcagctcatatttcaaattataacctatttcctgcaccattgctgacgcctggtgatccatgtcagaagtacttccagctgactcaggtgttgacaccttggcagtgtttatggccagcagcggaactacagacgtcacaaatcggaacagcccagccacaccaccaaacacccttaacctccgatcctcccacaatgaactgttgaacgctgaaataaaacacacagaaaccaagaacagcacacctcccaaatgcaggaaaaaatatgcactaactaacatccaggcggccatgggcctctcggatccagctgcacagcccctgctgggaaatggctctgccaacatcaagctggtgaaaaatggggagaaccagctccgtaaggctgcagagcaagggcagcaggaccccaacaaaaacctgagccccactgcagtcatcaacataacttctgagaagttagagggtaaagagccccacccacaggattcctcgagctgtgagattttaccctcccagcccaggagaactaagagcttcctaaattactatgcagatctggaaacctcagccagagaactagagcagaaccgaggcaatcaccatgggactgcggaagagaaatcccagccagtccagggccaggcctccaccatcattgggaatggcgatttgctgctgcagaaaccaaacagaccccagtccagccctgaagacggccaagtagccacagtgtcatccagcccagaaaccaagaaggatcatccgaaaacaggggccaaaaccgactgtgcactgcaccggatccagaacctggcaccgagcgatgaggagtccagctggacaacgttgtcccaagacagtgcctcacccagctccccggatgaaacagatatatggagtgatcactcatttcagactgatccagatttgccgcctggctggaaaagagtcagtgacattgccgggacctattattggcacatcccaacaggaacgactcagtgggaacggcccgtctccatcccagcagatctccagggttctaggaaagggtcacttagttctgtaacgccatctcccaccccagagaacgaggatttgcatgcagccactgttaacccggaccccagtttaaaagagtttgaaggagcaaccctacgctatgcatctttgaaactcagaaatgccccacaccctgatgatgatgattcttgtagtatcaacagtgacccagaagccaagtgttttgctgtgcgttctctgggatgggtagagatggcagaagaggacctcgcccccggtaaaagtagtgttgcggtcaacaactgcatcaggcaactttcctactgcaaaaatgacatccgagacacagtcgggatttggggagaggggaaagacatgtacctgatcctggagaatgacatgctcagcctggtggaccccatggaccgcagcgtgctgcactcgcagcccatcgtcagcatccgcgtgtggggcgtgggccgcgacaatggccgggattttgcttatgtagcaagagataaagatacaagaattttgaaatgtcatgtatttcgatgtgacacaccagcaaaagccattgccacaagtctccacgagatctgctccaagattatggctgaacggaagaatgccaaagcgctggcctgcagctccttacaggaaagggccaatgtgaacctcgatgtccctttgcaagtagattttccaacaccaaagactgagctggtccagaagttccacgtgcagtacttgggcatgttacctgtagacaaaccagtcggaatggatattttgaacagtgccatagaaaatcttatgacctcatccaacaaggaggactggctgtcagtgaacatgaacgtggctgatgccactgtgactgtcatcagtgaaaagaatgaagaggaagtcttagtggaatgtcgtgtgcgattcctgtccttcatgggtgttgggaaggacgtccacacatttgccttcatcatggacacggggaaccagcgctttgagtgccacgttttctggtgcgagcctaatgctggtaacgtgtctgaggcggtgcaggccgcctgcatgttacgatatcagaagtgcttggtagccaggccgccttctcagaaagttcgaccacctccaccgccagcagattcagtaaccagaagagtcacaaccaatgtaaaacgaggggtcttatccctcattgacactttgaaacagaaacgccctgtcaccgaaatgccatagctgcacatgcaaaaggactcggctatttacctgaagattgactagctacactaaagaaaatgaactccgccatccgaccttccatccagttgctgatgctttgtcttcagagaatttacccttaaccaagcagtgttagacaagcatgttctctcgtcttgccaccatcatgtgatatgaaaagaagcatgaataattttttttgctgtaagttacatcatgcgcagtggaaggtctttttcttattgtaaatattgtgaacattacttaacttcacacacacacagagaagagtgtggccccacccctcctagtgaactaacgctgcgtccttggaatgaatgatgcgtgagttagtttcactgtcttcttggctggacctgtcacaagcaacctttaagtcctacagcactttgccctgttttcaacattggagtaggcactgcatagcagataccattgaattgctgtaaaa

SEQ ID NO: 268262 - DNA, 2214 bp, Artificial Sequence
  derived and/or modified sequence
atgtccgaagtcttgccagccgactctggagtggataccctcgctgtgttcatggcttccagtgggacgactgatgtgacaaatcgcaattcccctgctacccccccaaataccctgaacctgaggtcctctcacaacgagctgctcaacgccgagataaaacacacggagaccaagaactctaccccccctaagtgcaggaaaaagtacgccctgacgaatattcaggcagccatggggctttctgatcctgcagcccagccgcttttaggtaacgggtccgccaatattaagcttgtgaaaaatggcgaaaatcagctgagaaaagctgctgaacaggggcaacaggatcccaataagaacctctcacccaccgctgttatcaatatcacatcggagaaactggaggggaaagagcctcaccctcaagattcttcatcctgtgagatcctccctagccagccacgcaggacaaaaagctttctgaattactacgctgacctggagacatccgcccgagaactggaacaaaacagggggaaccatcatggtacggctgaagaaaagtcccagcccgttcaggggcaggcttcaactattatcgggaacggcgacctgctgctccagaagcccaacaggccccaatcctcccccgaggatggacaagtggcaaccgtttcatccagtcccgaaacaaagaaggaccatccaaaaaccggagccaaaaccgactgcgctctgcatcgaatccagaatctggcccctagtgacgaagagagctcttggacaactttatcccaggattcagcatcgccatccagccccgacgaaaccgatatttggtcagaccacagttttcagacggaccccgacttacctccgggttggaagagggtgtcagacatcgctggcacctactactggcacatcccaaccggcaccacccaatgggaacgacctgtgtcaattcccgcagacctgcagggtagtcgtaaaggctctctaagctcagtcacaccctcgcctaccccggagaacgaagacctgcacgccgctaccgtgaacccggacccttcgcttaaagagttcgagggcgctaccctaaggtatgccagcctgaagcttcgcaatgcccctcaccctgacgatgacgactcctgcagtatcaattctgatccggaggccaagtgttttgctgtgcgcagtctgggctgggtggaaatggccgaggaggatctggccccaggtaagtcaagcgttgctgtcaataattgcattaggcaactgtcttattgtaagaacgacattcgcgacacagttggaatctggggggaaggcaaagatatgtacttaatactcgagaatgatatgctctcccttgtcgatcctatggacaggtcagttttgcattctcagcctattgtgtccattagggtttggggcgttggcagggacaacggccgtgactttgcctatgtggcccgagacaaagatactcggattctgaagtgccatgtctttagatgcgatactcctgcaaaagccatagctactagcttacatgagatctgctccaaaataatggccgagagaaagaacgcaaaggcactggcctgcagctctctccaggaacgtgcaaatgttaatctcgatgtgccccttcaggtcgattttccaactcctaagaccgagctggtgcagaagtttcacgtgcaatacctggggatgctgcccgtggataagcccgtgggcatggatattttgaattctgcgattgagaatctgatgacaagcagcaataaagaggactggctcagtgtgaacatgaacgtcgcggatgctacagtgacggtgattagtgaaaagaatgaggaggaagttttggtggagtgcagggtaagatttttgagcttcatgggcgtcggcaaagacgtgcacaccttcgcgtttatcatggacactggcaatcaaaggttcgagtgccacgtcttttggtgtgaacctaacgctggcaacgtttccgaggcggtgcaggctgcatgtatgttaaggtaccaaaagtgtttggtggccagacctccttcacagaaggtgagacctccgcctccgccagcggacagcgtcaccaggcgtgttactacgaatgttaaaagaggtgtgctatctctcatcgacacactgaaacagaagcgacccgtgacagagatgccctag

SEQ ID NO: 268263 - DNA, 2214 bp, Artificial Sequence
  derived and/or modified sequence
atgagcgaggtgctgcccgccgacagcggcgtggacaccctggccgtgttcatggccagcagcggcaccaccgacgtgaccaacagaaacagccccgccaccccccccaacaccctgaacctgagaagcagccacaacgagctgctgaacgccgagatcaagcacaccgagaccaagaacagcaccccccccaagtgcagaaagaagtacgccctgaccaacatccaggccgccatgggcctgagcgaccccgccgcccagcccctgctgggcaacggcagcgccaacatcaagctggtgaagaacggcgagaaccagctgagaaaggccgccgagcagggccagcaggaccccaacaagaacctgagccccaccgccgtgatcaacatcaccagcgagaagctggagggcaaggagccccacccccaggacagcagcagctgcgagatcctgcccagccagcccagaagaaccaagagcttcctgaactactacgccgacctggagaccagcgccagagagctggagcagaacagaggcaaccaccacggcaccgccgaggagaagagccagcccgtgcagggccaggccagcaccatcatcggcaacggcgacctgctgctgcagaagcccaacagaccccagagcagccccgaggacggccaggtggccaccgtgagcagcagccccgagaccaagaaggaccaccccaagaccggcgccaagaccgactgcgccctgcacagaatccagaacctggcccccagcgacgaggagagcagctggaccaccctgagccaggacagcgccagccccagcagccccgacgagaccgacatctggagcgaccacagcttccagaccgaccccgacctgccccccggctggaagagagtgagcgacatcgccggcacctactactggcacatccccaccggcaccacccagtgggagagacccgtgagcatccccgccgacctgcagggcagcagaaagggcagcctgagcagcgtgacccccagccccacccccgagaacgaggacctgcacgccgccaccgtgaaccccgaccccagcctgaaggagttcgagggcgccaccctgagatacgccagcctgaagctgagaaacgccccccaccccgacgacgacgacagctgcagcatcaacagcgaccccgaggccaagtgcttcgccgtgagaagcctgggctgggtggagatggccgaggaggacctggcccccggcaagagcagcgtggccgtgaacaactgcatcagacagctgagctactgcaagaacgacatcagagacaccgtgggcatctggggcgagggcaaggacatgtacctgatcctggagaacgacatgctgagcctggtggaccccatggacagaagcgtgctgcacagccagcccatcgtgagcatcagagtgtggggcgtgggcagagacaacggcagagacttcgcctacgtggccagagacaaggacaccagaatcctgaagtgccacgtgttcagatgcgacacccccgccaaggccatcgccaccagcctgcacgagatctgcagcaagatcatggccgagagaaagaacgccaaggccctggcctgcagcagcctgcaggagagagccaacgtgaacctggacgtgcccctgcaggtggacttccccacccccaagaccgagctggtgcagaagttccacgtgcagtacctgggcatgctgcccgtggacaagcccgtgggcatggacatcctgaacagcgccatcgagaacctgatgaccagcagcaacaaggaggactggctgagcgtgaacatgaacgtggccgacgccaccgtgaccgtgatcagcgagaagaacgaggaggaggtgctggtggagtgcagagtgagattcctgagcttcatgggcgtgggcaaggacgtgcacaccttcgccttcatcatggacaccggcaaccagagattcgagtgccacgtgttctggtgcgagcccaacgccggcaacgtgagcgaggccgtgcaggccgcctgcatgctgagataccagaagtgcctggtggccagaccccccagccagaaggtgagacccccccccccccccgccgacagcgtgaccagaagagtgaccaccaacgtgaagagaggcgtgctgagcctgatcgacaccctgaagcagaagagacccgtgaccgagatgccctag

SEQ ID NO: 268264 - protein, 535 aa, Artificial Sequence
  derived and/or modified sequence
MTEALQWARYHWRRLIRGATRDDDSGPYNYSSLLACGRKSSQTPKLSGRHRIVVPHIQPFKDEYEKFSGAYVNNRIRTTKYTLLNFVPRNLFEQFHRAANLYFLFLVVLNWVPLVEAFQKEITMLPLVVVLTIIAIKDGLEDYRKYKIDKQINNLITKVYSRKEKKYIDRCWKDVTVGDFIRLSCNEVIPADMVLLFSTDPDGICHIETSGLDGESNLKQRQVVRGYAEQDSEVDPEKFSSRIECESPNNDLSRFRGFLEHSNKERVGLSKENLLLRGCTIRNTEAVVGIVVYAGHETKAMLNNSGPRYKRSKLERRANTDVLWCVMLLVIMCLTGAVGHGIWLSRYEKMHFFNVPEPDGHIISPLLAGFYMFWTMIILLQLGQIYFIQSDVDFYNEKMDSIVQCRALNIAEDLGQIQYLFSDKTGTLTENKMVFRRCSVAGFDYCHEENARRLESYQEAVSEDEDFIDTVSGSLSNMAKPRAPSCRTVHNGPLGNKPSNHLAGSSFTLGSGEGASEVPHSRQAAFSSPIVSMNA

SEQ ID NO: 268265 - DNA, 1608 bp, Artificial Sequence
  derived and/or modified sequence
atgaccgaggccctgcagtgggccagataccactggagaagactgatcagaggcgccaccagagacgacgacagcggcccctacaactacagcagcctgctggcctgcggcagaaagagcagccagacccccaagctgagcggcagacacagaatcgtggtgccccacatccagcccttcaaggacgagtacgagaagttcagcggcgcctacgtgaacaacagaatcagaaccaccaagtacaccctgctgaacttcgtgcccagaaacctgttcgagcagttccacagagccgccaacctgtacttcctgttcctggtggtgctgaactgggtgcccctggtggaggccttccagaaggagatcaccatgctgcccctggtggtggtgctgaccatcatcgccatcaaggacggcctggaggactacagaaagtacaagatcgacaagcagatcaacaacctgatcaccaaggtgtacagcagaaaggagaagaagtacatcgacagatgctggaaggacgtgaccgtgggcgacttcatcagactgagctgcaacgaggtgatccccgccgacatggtgctgctgttcagcaccgaccccgacggcatctgccacatcgagaccagcggcctggacggcgagagcaacctgaagcagagacaggtggtgagaggctacgccgagcaggacagcgaggtggaccccgagaagttcagcagcagaatcgagtgcgagagccccaacaacgacctgagcagattcagaggcttcctggagcacagcaacaaggagagagtgggcctgagcaaggagaacctgctgctgagaggctgcaccatcagaaacaccgaggccgtggtgggcatcgtggtgtacgccggccacgagaccaaggccatgctgaacaacagcggccccagatacaagagaagcaagctggagagaagagccaacaccgacgtgctgtggtgcgtgatgctgctggtgatcatgtgcctgaccggcgccgtgggccacggcatctggctgagcagatacgagaagatgcacttcttcaacgtgcccgagcccgacggccacatcatcagccccctgctggccggcttctacatgttctggaccatgatcatcctgctgcagctgggccagatctacttcatccagagcgacgtggacttctacaacgagaagatggacagcatcgtgcagtgcagagccctgaacatcgccgaggacctgggccagatccagtacctgttcagcgacaagaccggcaccctgaccgagaacaagatggtgttcagaagatgcagcgtggccggcttcgactactgccacgaggagaacgccagaagactggagagctaccaggaggccgtgagcgaggacgaggacttcatcgacaccgtgagcggcagcctgagcaacatggccaagcccagagcccccagctgcagaaccgtgcacaacggccccctgggcaacaagcccagcaaccacctggccggcagcagcttcaccctgggcagcggcgagggcgccagcgaggtgccccacagcagacaggccgccttcagcagccccatcgtgagcatgaacgcctag

SEQ ID NO: 268266 - DNA, 1608 bp, Artificial Sequence
  derived and/or modified sequence
atgactgaagccctccagtgggcgcggtatcactggaggcggctaattagaggagcaacacgtgacgatgactccggcccttataactactccagtctgttggcttgcggcaggaaatcgtctcagacaccgaagctctcaggtaggcaccggatcgtggttccacacattcagccgttcaaagatgaatatgagaagtttagcggggcttacgtcaacaatcgtattagaactacaaaatacacactgcttaatttcgtgccaaggaatctgttcgagcaattccatcgcgccgcaaacctctatttcttgtttttggttgtgcttaactgggtccctctggttgaggcttttcagaaggaaataaccatgctcccccttgttgtcgtgctgacaattatcgccatcaaggacggtctggaagattatcgcaagtacaaaatcgacaagcagatcaataacctcatcaccaaggtgtactctcggaaggagaaaaagtacattgatcggtgctggaaggatgtgacagtgggagattttatccgactgtcctgcaatgaggtcattcccgccgacatggttctgcttttttccaccgaccccgacgggatctgtcacatcgagacaagtgggctggatggcgaaagcaatctaaagcaaagacaagtcgtcagaggatatgccgaacaagatagtgaagtcgaccctgagaagttttcctcaaggatcgaatgcgagtccccaaataacgacttaagccgtttcaggggattcttggagcacagtaacaaagagagggtaggtctcagtaaggagaacctgctccttaggggatgcactataaggaataccgaggctgtggtgggcattgtggtgtacgccgggcatgagaccaaggccatgctaaacaactctgggccaaggtacaagcggtctaaactggagaggcgggctaacactgacgttttatggtgcgtgatgttgttagtaattatgtgcctgaccggcgcagttgggcacggaatttggctgtctcggtatgaaaaaatgcattttttcaacgtgcctgagcctgatggacatataatctctcctctgcttgccgggttctacatgttctggacaatgatcatcttactccagctgggtcagatatattttatacagtccgacgtggatttttataatgaaaagatggacagcattgtacagtgtcgggccctcaatattgcagaggaccttggccagattcaatacctgttctccgacaagactgggaccctgacagagaacaaaatggtgtttcgaaggtgtagcgtcgcgggatttgattactgtcatgaagaaaatgcaagaagactcgagtcctatcaggaggccgtgtctgaggacgaggacttcatagatacagtgagtggaagtttatccaatatggccaagccaagggctccctcatgcaggaccgtccacaacgggcctctggggaataaaccttctaatcacctggctggcagttcatttactctgggcagtggtgagggggcaagcgaggtgccacatagccgccaggctgccttttcatcccccatagtatccatgaacgcctag

SEQ ID NO: 268267 - DNA, 1608 bp, Artificial Sequence
  derived and/or modified sequence
atgacagaggccctgcagtgggcccgctaccactggaggaggctcatccggggggccaccagagatgatgattctggcccctacaactacagcagcctgctggcctgtggcaggaagagcagccagacccccaagctgagcggccgccaccgcatcgtggtgccccacatccagcccttcaaggatgaatatgagaagttcagcggggcctacgtgaacaaccgcatccgcaccaccaagtacaccctgctgaactttgtgcccaggaacctgtttgagcagttccaccgggccgccaacctgtacttcctgttcctggtggtgctgaactgggtgcccctggtggaggccttccagaaggagatcaccatgctgcccctggtggtggtgctgaccatcatcgccatcaaggatggcctggaggactacaggaagtacaagattgacaagcagatcaacaacctgatcaccaaggtgtacagcaggaaggagaagaagtacatcgaccgctgctggaaggatgtgacagtgggggacttcatccggctgagctgcaatgaggtgatcccagctgacatggtgctgctcttcagcacagatcctgatggcatctgccacatcgagaccagcggcctggatggagagagcaacctgaagcagaggcaggtggtgcggggctacgccgagcaggacagcgaggtggaccctgagaagttcagcagcagaattgaatgtgagagccccaacaatgacctgagccgcttccggggcttcctggagcacagcaacaaggagcgggtgggcctgagcaaggagaacctgctgctgcggggctgcaccatccggaacacagaggccgtggtgggcatcgtggtgtatgccggccacgagaccaaggccatgctgaacaacagcggcccccgctacaagaggagcaagctggagcggcgggccaacacagatgtgctgtggtgtgtgatgctgctggtgatcatgtgcctgactggagctgtgggccacggcatctggctgagccgctatgagaagatgcacttcttcaacgtgcctgagccagatggccacatcatcagccccctgctggccggcttctacatgttctggaccatgatcatcctgctgcagctgggccagatctacttcatccagagtgatgtggacttctacaatgagaagatggacagcatcgtgcagtgccgggccctgaacattgctgaggacctgggccagatccagtacctgttcagtgacaagacaggcaccctgacagagaacaagatggtgttccgccgctgcagcgtggccggctttgactactgccatgaagaaaatgcccggcggctggagagctaccaggaggccgtgtctgaagatgaggacttcatcgacacagtgtctggcagcctgagcaacatggccaagccccgggcccccagctgcaggacagtgcacaacggccccctgggcaacaagcccagcaaccacctggccggcagcagcttcaccctgggcagcggggagggcgccagcgaggtgccccacagccggcaggccgccttcagcagccccatcgtgtccatgaatgcctag

SEQ ID NO: 268268 - DNA, 1608 bp, Artificial Sequence
  derived and/or modified sequence
atgaccgaggccctgcagtgggcccggtaccactggcggcggctgatcaggggagccacaagagatgatgatagcggcccatacaattactcctcattactcgcttgcggacgcaaatcctcccagacaccgaagctgtcaggcagacatcggatagtggtcccacatatccaaccgtttaaagacgagtatgaaaaattctcgggcgcatacgtcaataaccgtattcgaaccaccaagtataccctgcttaacttcgtgcctcgtaatctgttcgagcaatttcaccgggctgcaaatctttatttcctttttttagtcgtgttaaactgggtgcctctggtagaagcatttcaaaaagagatcacaatgctgccattggtggtggtgttgacaattatcgccataaaggacggactggaagactaccggaagtacaaaattgataagcaaattaacaatctcatcacaaaggtgtatagccgaaaggagaaaaagtatattgatcgctgctggaaggatgtcacagtcggagactttatccgtctatcttgtaatgaagttataccagccgacatggtgctcctattttctaccgaccccgatgggatctgccacattgagacatctggccttgacggcgaaagcaaccttaaacagcggcaagtggtacggggatatgccgagcaagacagcgaagtggatcctgaaaaatttagttcccggatcgaatgcgagtctccaaacaatgacctcagccggttcaggggcttcttggagcactcaaacaaggagagggtgggtctgtcgaaagaaaatctcctgctgcgtggctgcacaatcaggaacactgaggccgttgtaggaatcgtggtttacgccgggcatgaaaccaaagctatgttgaacaactccggcccgaggtacaaacgatcaaaactggagagaagggccaacacggacgtgctatggtgtgtgatgctcctcgtcatcatgtgcttgacgggggcggtcgggcatggcatttggctgtcacgatacgaaaagatgcacttcttcaacgtgcccgagccggatggccacatcatcagcccactgctggccgggttttacatgttctggactatgatcatcttgctgcaactgggccagatctattttatccagagtgacgtagatttttataacgaaaagatggattccattgtgcagtgcagagcgctcaatatcgccgaagacctgggccagattcagtacctattttccgataaaaccggaaccttgacggaaaacaagatggtgtttcggagatgcagcgttgccggatttgactactgtcatgaggagaatgcacggcggttagagtcttatcaagaggccgtaagtgaggatgaggacttcattgacaccgtatccggttcactttcaaatatggcaaagccccgtgctccgagctgcaggacggtgcacaatggcccgttgggcaacaagccttctaatcatttagctgggagctctttcaccctaggcagtggagaaggggcaagtgaagtgccccacagcaggcaggccgcattcagttcccccatcgtctctatgaacgcctag

SEQ ID NO: 268269 - DNA, 1608 bp, Artificial Sequence
  derived and/or modified sequence
atgacagaagcgctgcagtgggccaggtatcattggaggagacttattagaggagctacccgcgacgacgactctgggccatacaactacagttcactcctggcctgcggacgcaagtcctcccagacccccaagcttagtggtaggcaccgaatagtggtcccacacattcaaccctttaaggacgaatacgagaaattttctggcgcatacgtgaacaatcggattcgaactacaaaatataccctgctgaattttgttcctcggaacctgtttgagcagtttcacagggccgctaatctgtatttcctgttcctggtcgtgctaaactgggtgccacttgtggaggcattccagaaggagataaccatgttgccactggtagtagttttgactatcattgctatcaaagatggcttggaggattaccgtaaatataagatcgacaaacagataaataatctgatcactaaagtatactcccgcaaggagaaaaagtacatagacaggtgttggaaagatgtcaccgtgggcgactttatccgcctgagttgtaacgaggtgattcccgcagatatggtgctccttttctcaactgaccccgatgggatatgccacattgaaacctctggcttagatggagagtctaatctgaagcagagacaagtcgtgcgaggatacgcagagcaggatagcgaggtggatcctgagaaattctcctcgagaattgagtgtgaatcccccaataatgacctcagcagattccgtggatttctggagcactccaacaaagagcgggtgggcctatctaaggagaacctgcttctgagaggatgcacaatacgaaacacggaagcggtggtgggaatcgtggtgtacgcgggacacgaaaccaaagccatgctgaataacagtggccctaggtataaaaggtctaagttggaaagacgcgcaaacactgacgtgctctggtgtgtgatgctcctagttatcatgtgcctgaccggcgctgtaggacacggaatctggctgagcagatatgaaaaaatgcatttctttaacgtgcccgagcctgatgggcacattatttcaccgctcctggccggattctacatgttttggacaatgataatcctccttcaactgggccaaatctactttattcagtccgatgtggacttttacaatgagaagatggattcaatcgtgcagtgccgagcccttaatatcgcggaggatctggggcaaattcaatacctgttctcagacaaaacaggaaccctcacagagaataagatggtatttcgaaggtgttccgtggctgggttcgactattgtcatgaagagaacgcacgtcgactcgaaagttatcaggaagccgtctcagaagacgaggatttcattgacacagtctcaggctccctgagcaatatggctaaacctcgtgccccaagctgcagaaccgtgcataatggccctctgggaaataaaccaagcaaccatcttgctggtagctcgttcacactgggctcaggcgagggtgcctctgaagtgcctcacagtcgacaagccgcattcagctccccgatcgtttccatgaacgcatag

SEQ ID NO: 268270 - DNA, 2550 bp, Artificial Sequence
  derived and/or modified sequence
gagcggagggagaagtaggttgcgagctcagcacaggctccggcgctggctcccgcagctgagtttgggagatgtctaagtgattttttttttttcccggaaggcaaatggctggcgtggaagcacaacccgctttcactcttcgaatttgtgcttagctcttttcttgtaccttgcgactcgtgaccaacatgctgtgatgtgtgccgagggaggaattggtcagctacacaacctggatcttaccacagtttggatatgactgaggctctccaatgggccagatatcactggcgacggctgatcagaggtgcaaccagggatgatgattcagggccatacaactattcctcgttgctcgcctgtgggcgcaagtcctctcagacccctaaactgtcaggaaggcaccggattgttgttccccacatccagcccttcaaggatgagtatgagaagttctccggagcctatgtgaacaatcgaatacgaacaacaaagtacacacttctgaattttgtgccaagaaatttatttgaacaatttcacagagctgccaatttatatttcctgttcctagttgtcctgaactgggtacctttggtagaagccttccaaaaggaaatcaccatgttgcctctggtggtggtccttacaattatcgcaattaaagatggcctggaagattatcggaaatacaaaattgacaaacagatcaataatttaataactaaagtttatagtaggaaagagaaaaaatacattgaccgatgctggaaagacgttactgttggggactttattcgcctctcctgcaacgaggtcatccctgcagacatggtactactcttttccactgatccagatggaatctgtcacattgagacttctggtcttgatggagagagcaatttaaaacagaggcaggtggttcggggatatgcagaacaggactctgaagttgatcctgagaagttttccagtaggatagaatgtgaaagcccaaacaatgacctcagcagattccgaggcttcctagaacattccaacaaagaacgcgtgggtctcagtaaagaaaatttgttgcttagaggatgcaccattagaaacacagaggctgttgtgggcattgtggtttatgcaggccatgaaaccaaagcaatgctgaacaacagtgggccacggtataagcgcagcaaattagaaagaagagcaaacacagatgtcctctggtgtgtcatgcttctggtcataatgtgcttaactggcgcagtaggtcatggaatctggctgagcaggtatgaaaagatgcattttttcaatgttcccgagcctgatggacatatcatatcaccactgttggcaggattttatatgttttggaccatgatcattttgttacagcttggacaaatatatttcattcaaagtgatgtggatttctacaatgaaaaaatggattctattgttcagtgccgagccctgaacatcgccgaggatctgggacagattcagtacctcttttccgataagacaggaaccctcactgagaataagatggtttttcgaagatgtagtgtggcaggatttgattactgccatgaagaaaatgccaggaggttggagtcctatcaggaagctgtctctgaagatgaagattttatagacacagtcagtggttccctcagcaatatggcaaaaccgagagcccccagctgcaggacagttcataatgggcctttgggaaataagccctcaaatcatcttgctgggagctcttttactctaggaagtggagaaggagccagtgaagtgcctcattccagacaggctgctttcagtagccccattgtaagtatgaatgcatgactagagtcttgcacatccacaatgtatgatgagagaacagccttgtaattatgatagagtcaaactctgttgtcttttctaccttagaagagactacatgattgcagctcagcaagatcaccacacataattagaagtataaacaaacaatatcacactagtctacttttaaaaaataactcaatgttgagaggtagtataccatttctgaaaaaaaaaaaggagaatatttctggccagggctgattatgtgtgagcctgaagaaggctgccttggtttaagaatcatggctcactcttagaaccagcaaagcttaccagagttatctcgtagtcagataagcaagtgtaatttatagggacattcataggccatgtggtacattgaaggcctttttattgctctgtaatctcccaaatcccaccaaacttgtggtttttccctattcctggctccagaaggtcattttctaatatatcaatttcagagctcaacagaatgtgttcatgagttccagtgggaagtgtcaggaactgtctagtcacatccattaacaaatccattttactccagaaaaactagaggaccatgtagatgatggggaaaagagggaaaggtgctgtgtgaaaaaaattagaaatttttgctgtatttaaaattacctgtataaaagttcaatttcc

SEQ ID NO: 268271 - DNA, 600 bp, Artificial Sequence
  derived and/or modified sequence
gcccccggccggctggccagccggcccccccccccccccgcccggcgctggagactcgctgcaccccggtactcttccgcaagtggcccctctggcccagcggcacgactttgcgccgaaacccagggggaagcccctcgcggaccccgtgcagtgggcgggagtggcggggctggcgaaccccgatggagtaggggtcctgcccaaagagaaagattgctgggctgttcatgctgttttccaagttttttcactgggacttgctctttccgaacatcttggagtgcattcacactggagctaacttcatctattcccgctccactgccccctcctcctgcagccttgagcctgagtcaacagcaggggaagtcccgacgcaaggaagcgtctacacccctgactccagctgaggccccggcttacagtcgcgctaggccgcgccgccaggggagtccttcagcgggacctgaggcccctttagctacggatgaacctcccccgcaaaggcggagcggaataagaggtggctctgctaatattagatctttgcagccaagctccctccgaccctcggcacatcgaggctctgccctgtag

SEQ ID NO: 268272 - protein, 422 aa, Artificial Sequence
  derived and/or modified sequence
MSTSYGCFWRRFIHGIGRSGDISAVQPKAAGSSLLNKITNSLVLDIIKLAGVHTVANCFVVPMATGMSLTLCFLTLRHKRPKAKYIIWPRIDQKSCFKSMITAGFEPVVIENVLEGDELRTDLKAVEAKVQELGPDCILCIHSTTSCFAPRVPDRLEELAVICANYDIPHIVNNAYGVQSSKCMHLIQQGARVGRIDAFVQSLDKNFMVPVGGAIIAGFNDSFIQEISKMYPGRASASPSLDVLITLLSLGSNGYKKLLKERKEMFSYLSNQIKKLSEAYNERLLHTPHNPISLAMTLKTLDEHRDKAVTQLGSMLFTRQVSGARVVPLGSMQTVSGYTFRGFMSHTNNYPCAYLNAASAIGMKMQDVDLFIKRLDRCLKAVRKERSKESDDNYDKTEDVDIEEMALKLDNVLLDTYQDASS

SEQ ID NO: 268273 - DNA, 1269 bp, Artificial Sequence
  derived and/or modified sequence
atgtccacaagctacggatgtttttggcgcagattcattcacgggattggccgctccggagatataagtgccgtgcaacccaaggctgccggatcttctttgctaaataagatcaccaacagtctagttttggacataataaagttagcgggagttcatacggtggctaattgttttgtggtgccaatggctactggaatgtcccttacactttgtttcttgaccctccggcataaaagacccaaagctaagtacataatctggcctcgtatcgaccagaagagttgttttaagtcaatgatcaccgccggattcgaacctgtggttattgaaaatgtacttgagggggacgaactgagaacagatctgaaggctgttgaagccaaggtgcaggagctgggacctgactgcattctatgcattcattccaccacaagctgttttgcacctcgggtgcctgatagactcgaagagctggcggtcatttgtgcaaactacgacatcccgcacatagtgaacaacgcatacggagtgcagtcaagcaaatgcatgcacttaatacagcaaggcgctcgggtcggacgcatcgacgcttttgttcagtctttagacaaaaattttatggttccggtgggcggtgcgatcatcgcggggtttaatgactcattcatccaggagatctcaaagatgtatcctggcagggcttctgcatccccctcccttgatgtcctgatcaccctattaagtctgggaagcaacgggtacaagaaactactcaaggagcgcaaagagatgttttcttatctgagcaaccagataaagaaactgtccgaagcctataatgagagattactgcatacaccgcacaatcctatcagcctagccatgacacttaaaaccttggatgaacaccgcgataaggctgtgacccaactgggatcaatgctgttcaccagacaggtctctggggctagagttgttcctttgggctccatgcagaccgtgagcgggtacaccttcagaggattcatgtctcacacaaacaactacccctgcgcatatctaaatgccgcatctgcaattggcatgaaaatgcaggacgttgacctttttattaagcggttggatcggtgcctgaaagccgtgagaaaggagcgtagcaaggaatccgacgacaactatgacaaaactgaggatgtggatatcgaggagatggcgctcaaactggacaatgtccttctcgacacttatcaggatgcaagtagctag

SEQ ID NO: 268274 - DNA, 1269 bp, Artificial Sequence
  derived and/or modified sequence
atgagcaccagctatggctgcttctggaggcgcttcatccacggcatcggccgcagcggggacatctctgctgtgcagcccaaggccgccggcagcagcctgctgaacaagatcaccaacagcctggtgctggacatcatcaagctggccggcgtgcacacagtggccaactgctttgtggtgcccatggccaccggcatgagcctgaccctgtgcttcctgaccctgcggcacaagaggcccaaggccaagtacatcatctggcccagaattgaccagaagagctgcttcaagtccatgatcacagctggctttgagcctgtggtgattgaaaatgtgctggagggagatgagctgaggacagacctgaaggctgtggaggccaaggtgcaggagctgggccctgactgcatcctgtgcatccacagcaccaccagctgctttgccccccgggtgcctgaccggctggaggagctggccgtcatctgtgccaactatgacatcccccacatcgtgaacaatgcctacggcgtgcagagcagcaagtgcatgcacctgatccagcagggcgcccgggtgggcagaattgatgcctttgtgcagagcctggacaagaacttcatggtgcctgtgggcggggccatcatcgccggcttcaatgacagcttcatccaggagatcagcaagatgtacccaggccgggccagcgccagccccagcctggatgtgctgatcaccctgctgagcctgggcagcaatggctacaagaagctgctgaaggagaggaaggagatgttctcctacctgagcaaccagatcaagaagctgtctgaggcctacaatgaaaggctgctgcacaccccccacaaccccatcagcctggccatgaccctgaagaccctggatgagcaccgggacaaggctgtgacccagctgggctccatgctgttcacccggcaggtgtctggggcccgggtggtgcccctgggctccatgcagacagtgtctggctacaccttccggggcttcatgagccacaccaacaactacccctgtgcctacctgaatgctgccagcgccatcggcatgaagatgcaggatgtggacctcttcatcaagaggctggaccgctgcctgaaggctgtgaggaaggagaggagcaaggagagtgatgacaactatgacaagacagaagatgtggacatcgaggagatggccctgaagctggacaacgtgctgctggacacctaccaggatgccagcagctag

SEQ ID NO: 268275 - DNA, 1269 bp, Artificial Sequence
  derived and/or modified sequence
atgagcaccagctacggctgcttctggcggcggttcatccacggcatcggacgaagcggggacatctccgcggtccaaccgaaagcagctggttcatctcttcttaacaagatcaccaatagtcttgttcttgacattattaaactcgcgggtgtacatactgtcgctaactgtttcgtggtgcccatggcgactgggatgagtctgaccctttgtttcttgactctgcgacataaacgtcccaaagctaagtacattatctggccccgaattgatcagaagtcttgtttcaaatcgatgattaccgctgggtttgaacctgtggtgatcgagaacgtgctggaaggggacgagcttcggacagatctcaaggctgtcgaagcgaaagtacaagaactgggtcctgattgcatactttgtatccattccaccacatcatgtttcgcgcccagagtgcctgataggctagaggaactggccgtcatctgcgcaaactacgacatcccccacatcgtgaacaatgcatacggcgttcaatcttctaagtgcatgcaccttatccagcagggggctagagtgggccggatcgatgctttcgttcagagtctcgataaaaatttcatggtgcctgtgggcggtgctatcattgccggttttaatgattcgttcatacaggagatttctaagatgtacccagggagggcgtcagcttcaccctcccttgacgtactaatcacactgctctctctcggttctaacgggtacaagaagcttctcaaagaacggaaggaaatgttcagctatttgtctaatcagatcaagaaattatccgaagcttacaatgaacgtctccttcacactcctcataaccctatcagcctggcaatgactctcaagacactggatgagcaccgcgacaaggccgtgacacaacttgggtcaatgttgttcacccgacaggtctcgggagcccgagtggtgcctcttggttccatgcagaccgtgagtggttatacgttccgcggcttcatgtcccatacaaacaactatccctgcgcctaccttaacgcggcaagcgccataggaatgaagatgcaggacgtggacttgtttatcaagcggttggacagatgcctgaaagcagtccgcaaagaaagaagtaaagagagcgacgataattacgataagactgaggacgtcgatatcgaggaaatggctcttaagctggataatgtcctgctggatacataccaagacgccagttcatag

SEQ ID NO: 268276 - DNA, 1269 bp, Artificial Sequence
  derived and/or modified sequence
atgtcgacatcctatggttgtttctggaggcgcttcatccacgggatcggacgttccggagatatcagcgcagtacagcccaaggccgcagggtcatcgttgctcaacaagattaccaactctttggtgctcgacattatcaagttggccggagtacacacagtggcgaactgcttcgtggttccgatggcgaccggcatgtcgttaactctgtgtttcctgacattgcggcacaagaggcctaaggcgaaatacattatctggccccgaattgatcaaaagtcatgtttcaagagcatgataaccgccggattcgagcccgtcgtaatagagaacgtgctggagggagatgagctgcgtaccgatttaaaagctgtggaagctaaggtccaagagctcgggcctgactgcatcctttgtatccactctacaaccagctgcttcgctccccgtgtgcccgaccgtctagaagaactcgccgtgatttgtgccaattacgacatcccacatattgtaaacaacgcttacggggtgcaaagcagcaagtgtatgcacctaattcaacagggggctcgcgtcggcagaatcgacgctttcgtccagtcgctggataagaactttatggttcccgtgggtggggcaattattgccggattcaacgatagctttatccaggagatcagtaaaatgtacccgggaagggccagcgcctcccctagcctcgacgttctaataactttactgagcttgggttcaaacggctacaagaaactgctgaaggagcgcaaggagatgttttcttacctctcaaaccagataaaaaaattatctgaggcttacaatgagagattgctgcacacacctcacaatccaatctcactagccatgactttaaaaacacttgacgaacatcgagacaaagccgttacacagcttgggagcatgcttttcactcgtcaggtgtcgggcgcacgggtggtcccattgggatctatgcagacagtcagcggctataccttcaggggtttcatgagtcacacaaacaactatccctgcgcatacctgaatgccgcttccgctataggaatgaagatgcaggacgtagacttgttcataaagaggctcgaccgttgcctgaaagcagtacggaaagagagatccaaagaatctgatgacaactacgataaaacagaggacgtagacatcgaagagatggcccttaagctcgacaacgtgcttctggacacttatcaggacgcatcatcgtag

SEQ ID NO: 268277 - DNA, 5490 bp, Artificial Sequence
  derived and/or modified sequence
aaatacgccaacttcctcctggagcgccatctgagaaggtctgcgcatgtgcacgaacgagaagtgttttttttgttttgttttgttttgttttgttttttgtcccaaggcgctgccgtaccgtccaggcggcgagttgcattctggttccgtcgtgtgtctggcgtgtggagctagtgctcccgcttattcgccactgtcgccaccgctgtcatgaaccgcgagagcttcgcggcgggagagcggctggtgtcgccggcttacgtgcggcagggctgtgaggcccgccgctcgcatgagcacctcatacggctgcttctggagaaggttcattcatggcattggacgatccggtgatatttctgctgtgcaaccaaaagctgcaggctctagccttttgaacaaaattaccaattctttggtcctggacattataaagctggctggtgtccatacagtagccaactgctttgtagttcctatggcaactggtatgagtctaactctgtgtttcttaacattacgacacaaaagaccaaaggcaaagtatattatatggccacgaatagaccagaagtcctgctttaaatccatgatcactgcaggttttgagcctgtggtgatagaaaatgttttggaaggtgacgagctgcgtacagacctgaaagcagtggaggctaaagtccaggaacttgggcctgattgcattctgtgtattcattctactacatcctgttttgctccaagggtgcctgatagattagaagaactggctgtgatttgtgctaattatgacattccacatatagttaataatgcttatggagtgcagtcttcaaagtgtatgcatctcattcagcagggggctcgagttggtagaatagatgcttttgttcagagcttggacaaaaattttatggttccagtaggtggtgctataattgctggctttaatgattcattcattcaggaaatcagcaagatgtatccaggaagagcttcagcttcaccttctttagatgtccttattactttattgtcacttggatcaaatggctataagaagctactaaaagaaagaaaggaaatgttttcatatttgtccaaccaaataaagaagttgtcagaagcctacaatgaaagactgttgcatacacctcacaatcccatatctttagctatgacacttaaaacactagatgaacaccgtgacaaagctgtcactcagcttggctcgatgctttttaccagacaggtttctggagccagggttgtgcctcttgggtccatgcaaactgtgagtggctatactttcagaggctttatgtcacatacaaataattacccttgtgcttacctcaatgctgcatcagccatcggaatgaagatgcaggatgtggacctgttcataaagagacttgacaggtgtttaaaggcagtaagaaaagaacgaagtaaagagagtgatgacaattatgacaaaactgaagatgtggatattgaagaaatggctttaaaactagataatgtacttcttgacacataccaggatgcttcttcatgacatgcgaagggtttcttcttgatcatttgaaagaaatgataaggctgtagtacaagcaagcagtttaaagataagacttgagatttttgaattgagaatttcatgggaatattcagtcaaggagcagactttggtctgaactagccattgatgattgttaagtttcccattcttagactgcatcaatccttgtgatccttaacaggttataatatacaattagcatttttctaattgttagaatatctgtcaattaagcatcatgactcagataatttttactagtgtaatgacagtaaaattacttcaattctctttgaaatgtagagtgcttcctcctaaccattctttaccgtttctgatcacacagaattgagaaagatctcttaggccactagttactagttgtttgttgagatgtgtaagtcacagtgtgcctgtaaaatgggcattccccaaggaagcagagtcaaggtataaactttcgttttgactcaaaagcagtgggtctcaactggggatgattcgcttatctgaacagcatctgcagacatttttggttgtcacaactggtgggatgctgttaacatctagaggatagaggccagggtgctactcaacatcctacaatgcatgggacaactcccacaacaaagaattatccagcccaaaatgtcattagtgctgaggttgagaaatactcctctaaagtagataaactccttgagtaaagagaagtttaccatagcaactttcagtagtacttcaaagaagatagctgtataaatgtcatcaaactatactatatagagaatcttaagtgataaccagggtcacggattccaaacatgtcattataaattgttttatatggtgctcactggtgcatttttccttttggataagggaaaacattattccacttactgtttttgctttaagcagcctgcatatattggttagtttgttcagatgttgtgcacagacatcatcaaaattagctaacatgggtatttttgaacatatttttgccaggaagatgaaaatcacatagtatgataaacaggtgtattcccctctacttgcccatgtgctcatttttctgagtctgaaattccagacttactggctttaacaataatttttgttgttaatttaagaaatagacttacttaagactattttaagaaatagagatgtcatagcctgaagatttactgaagcttctgaacatgccaccatgccaaagctatgtttctcaaacccagctctgtggatcatgttcctaaaagatgctcatggggagaaaatgtttacagacaaataattttgggagctgcctttgcaaacctgcctgttggcatattgaaggctctaagaattccttcactaaataacccagttttaatatatccttatccaaagagaaactcatttttttaaagtgaaatatttgttaacagcccattgaacatacttttaaaaacactatggtagagaatgctgtgttgccttctgggctgcatttttcttattgatttggaattgtaacctatgtatgagaaagggattttctggtattttggtgacgttgtacattgtcccagactgtttgtaaacatgaggtcagacatgtgtaaggtagacgcctatggccactggcttgaccaccttggaagtcaatgactattttgagatgaagtatttaactatgaatatcatgaaggttatttaaaaatgtatttattttatctttggggttcaaacattaaaaaaatttacataggtgtagtaactcatttcaagggaataaatgctggattaaaaagtgtaaatttttcatgagaatttgggactaaattgctgaaccaataaagctgaagagttgcaacctctagagtcaaaaaagggattgaaatgttgttgcaaatgtaaatgctggcagtgcagcttgctatacatgtaagccaaaattgttttatagaacaagtgatctatattgttgtgatcatcatttagcttaagaaaggccagagctgggagagtagcaaatgttttctcatctgcagtgtatcagcagttcttgggcttcagctgctgaatagataataattctaattgaacataaattacatgaactcacatgtgaatgatagatatgttacaatatttcattcctgatgcagaaaatcagctgtggtttttattattaaccctttctttttcagtggttttggaattctagctctattcctcctggcttaaaatttgagggcatagaattcacaagagtttttgaagagttctgtctattcaggctttcctttgtccccaccctagtgtcattttcactcactcccatttctacacataagtattaaaaaggatgtatttattataattcgctagtactgattggtaagcctcataattggcctttgttatctttgtactgtgacgaaggcagtggatgatacattaccaatcattgccgaagataacctcttctatctttttgacccaactacccttattaaaactatcaggtaaaatattggagttaggtttttaaagtcattgggctgtggcagtgtgcttagaaaagaaaatggtggaacatagaatattcttttggtcactacacaatgtgttacttatacatggcagggaagggaattttaaatcaaactcgcagtttggttcttaggtcctctgctgatgaattctcgctctatcagggaatgatatgtgacgccagccttaggaacctggtgttcaactgtaaatctttctatttagctttttgtattagttgaatgaagttatagaatatgaattattgaatacagttctgttcagccaataggcacttgatatacagaatggtaaatttaaatataaattaaatttttctaatattatgatcagcacttcactgtggttctgtgtctttaaccacctcataataagaactgttattgaggactgggctacagaatgtgcttagactacatctatggcttccatagattttagtaaaatttaaacagataatttgtgtttactgctgatgttactttaatattgaattagtagttcatcctgagagttatatttcacagaggaaaataaccaacagctgaaaacaacaataataaagctctggtgagtctgactcatactcggagaaagtttttggaatacatacacatttggtgcatataagagttgggtttccttttcccactttctgagatgtactaacctctgccagacccttaaatgattttgttatgttttgcatttttgaggccaaccttattttgtaactgaaaaaagtccagttttgcatacacagaaatttggtcattttagaagtctcacaacctgaataatttgataataattgaatatgctattaacagctttttaagaaaaggttctattagtcagttttttccttgtctgtcatattatgttggttaatgtctcttatggccaatcttagtaaacagacctaacactcactgcatccttttgtgccttactttttactttccttttgcccttttggtatgtgcgcatgtaagatggtaagtttaaggctaatgaatatatgtttgtaatttcctactcactactctgcagttaaagctaaggccttaggcaaaatctagaaatgtttatattgttttgttttttatcaagtggtgtcaacttgagaaatacaaagaaaggctatgcttaactgtataaccgtgggggattttagccatgagaatatgaagctgatgtcagcctgctaacctgttttaccaaaaggaaaagatgtttccaaaaatgttttcggtgtagactgtttaaagatgaaaataaattatataatttattatatgaaataaatttttgataagtcactgacagta

SEQ ID NO: 268278 - DNA, 1269 bp, Artificial Sequence
  derived and/or modified sequence
atgagcaccagctacggctgcttctggagaagattcatccacggcatcggcagaagcggcgacatcagcgccgtgcagcccaaggccgccggcagcagcctgctgaacaagatcaccaacagcctggtgctggacatcatcaagctggccggcgtgcacaccgtggccaactgcttcgtggtgcccatggccaccggcatgagcctgaccctgtgcttcctgaccctgagacacaagagacccaaggccaagtacatcatctggcccagaatcgaccagaagagctgcttcaagagcatgatcaccgccggcttcgagcccgtggtgatcgagaacgtgctggagggcgacgagctgagaaccgacctgaaggccgtggaggccaaggtgcaggagctgggccccgactgcatcctgtgcatccacagcaccaccagctgcttcgcccccagagtgcccgacagactggaggagctggccgtgatctgcgccaactacgacatcccccacatcgtgaacaacgcctacggcgtgcagagcagcaagtgcatgcacctgatccagcagggcgccagagtgggcagaatcgacgccttcgtgcagagcctggacaagaacttcatggtgcccgtgggcggcgccatcatcgccggcttcaacgacagcttcatccaggagatcagcaagatgtaccccggcagagccagcgccagccccagcctggacgtgctgatcaccctgctgagcctgggcagcaacggctacaagaagctgctgaaggagagaaaggagatgttcagctacctgagcaaccagatcaagaagctgagcgaggcctacaacgagagactgctgcacaccccccacaaccccatcagcctggccatgaccctgaagaccctggacgagcacagagacaaggccgtgacccagctgggcagcatgctgttcaccagacaggtgagcggcgccagagtggtgcccctgggcagcatgcagaccgtgagcggctacaccttcagaggcttcatgagccacaccaacaactacccctgcgcctacctgaacgccgccagcgccatcggcatgaagatgcaggacgtggacctgttcatcaagagactggacagatgcctgaaggccgtgagaaaggagagaagcaaggagagcgacgacaactacgacaagaccgaggacgtggacatcgaggagatggccctgaagctggacaacgtgctgctggacacctaccaggacgccagcagctag

SEQ ID NO: 268279 - DNA, 952 bp, Artificial Sequence
  derived and/or modified sequence
aagcctgacgttgctacgattctgtaattaactccctccactccaaaggggtctggaggctgggatgctctgccagctcagaggatgttgactctggagtgggagtccgaaggactgcaaacagtgggtattgttgtgattatatgtgcatctctgaagcttcttcatttgctgggactgattgatttttcggaagacagcgtggaagatgaactggagatggccaccgtcaggcatcggcctgaagcccttgagcttctggaagcccagagcaaatttaccaagaaagagcttcagatcctttacagaggatttaagaatgaatgccccagtggtgttgttaatgaagaaaccttcaaagagatttactcgcagttctttccacagggagactctacaacatatgcacattttctgttcaatgcatttgatacagaccacaatggagctgtgagtttcgaggatttcatcaaaggtctttccattttgctccgggggacagtacaagaaaaactcaattgggcatttaatctgtatgacataaataaagatggctacatcactaaagaggaaatgcttgatataatgaaagcaatatacgatatgatgggtaaatgtacatatcctgtcctcaaagaagatgctcccagacaacacgttgaaacattttttcagaaaatggacaaaaataaagatggggttgttaccatagatgagttcattgaaagctgccaaaaagatgaaaacataatgcgctccatgcagctctttgaaaatgtgatttaacttgtcaaatagatcctgaatccaacagacaaatgtgaactattctaccacccttaaagttggagctaccacttttagcatagattgctcagcttgacactgaagcatattatgcaaacaagctttgttttaatataaagcaatccccaaaagatttgagctttca

SEQ ID NO: 268280 - DNA, 177 bp, Artificial Sequence
  derived and/or modified sequence
atggccctggtcctgggaagcttgctgttgctgggcctgtgcggcaattccttttccggaggccaacctagttccaccgatgctcctaaagcatggaactacgagctccccgccacaaattacgaaacgcaagacagccacaaagctggccctattgggatcttgttcgagctttag

SEQ ID NO: 268281 - DNA, 177 bp, Artificial Sequence
  derived and/or modified sequence
atggccctggtgctgggcagcctgctgctgctgggcctgtgtggcaacagcttcagcggcggccagcccagcagcacagatgcccccaaggcctggaactatgagctgcctgccaccaactatgagacccaggacagccacaaggccggccccatcggcatcctgtttgagctgtag

SEQ ID NO: 268282 - DNA, 177 bp, Artificial Sequence
  derived and/or modified sequence
atggccctggtgctgggcagcctgctgctgctgggcctgtgcggcaactcattctccggcgggcagccatcatccaccgacgcacctaaagcctggaattacgagctgccagcaactaattacgagactcaggattctcataaggctgggccaatcggcattctctttgagttatag

SEQ ID NO: 268283 - DNA, 177 bp, Artificial Sequence
  derived and/or modified sequence
atggcgctggtcctgggttctctgctgctgttgggtctctgcggcaatagctttagcggtggtcagccctcgtctacagatgccccaaaggcgtggaactatgagttacctgctactaactatgagactcaggactctcataaggctggtcccattggcattctatttgaactgtag

SEQ ID NO: 268284 - DNA, 551 bp, Artificial Sequence
  derived and/or modified sequence
agaggaactgcggggagagcgtggtggtgccggtgcccgtccaacccaaactttttagtctgagtggtggcccgcgacgccccgcttgggtcttctttccatccactggggatgggggcgggggtgggggtagccggcggccgtggttccggagcgggagtcggagggatggtgccttgagtgaatgacccccttggagaacattcttccgcatccctcgcctcaagccagcctcagacagaaaactgaagattcagcagatccagtgcttcctgctcctcttctgcccaggaacacgcttgccttccccaaggcttccagaagctctgaggcaggaggcaccaagttctacctcatgtttggaggatcttgctagctatggccctcgtactcggctccctgttgctgctggggctgtgcgggaactccttttcaggagggcagccttcatccacagatgctcctaaggcttggaattatgaattgcctgcaacaaattatgagacccaagactcccataaagctggacccattggcattctctttgaact

SEQ ID NO: 268285 - DNA, 567 bp, Artificial Sequence
  derived and/or modified sequence
agaggaactgcggggagagcgtggtggtgccggtgcccgtccaacccaaactttttagtctgagtggtggcccgcgacgccccgcttgggtcttctttccatccactggggatgggggcgggggtgggggtagccggcggccgtggttccggagcgggagtcggaggtgagtgtgcgaactggaccggggccccagagacttcggactcgctctcggggagaacggtgaccgagggatggtgccttgagtgaatgacccccttggagaacattcttccgcatccctcgcctcaagccagcctcagacagaaaactgaagattcagcagatccagtgcttcctgctcctcttctgcccaggaacacgcttgccttccccaaggcttccagaagctctgaggcaggaggcaccaagttctacctcatgtttggaggatcttgctagctatggccctcgtactcggctccctgttgctgctggggctgtgcgggaactccttttcaggagggcagccttcatccacagatgctcctaaggcttggaattatgaattgcctgcaacaaatt

SEQ ID NO: 268286 - DNA, 177 bp, Artificial Sequence
  derived and/or modified sequence
atggccctggtgctgggcagcctgctgctgctgggcctgtgcggcaacagcttcagcggcggccagcccagcagcaccgacgcccccaaggcctggaactacgagctgcccgccaccaactacgagacccaggacagccacaaggccggccccatcggcatcctgttcgagctgtag

SEQ ID NO: 268287 - DNA, 288 bp, Artificial Sequence
  derived and/or modified sequence
atgtccgattccgaggaggaatcccaggatcggcagctcaagatcgtggtgctcggggacggcgcgtctgggaagacttccctgacaacctgtttcgctcaggagactttcgggaaacagtataaacaaaccattgggttggatttctttcttagacgcatcaccctgcctgggaacctgaatgtgacacttcaaatatgggatatcggcggacagaccatcggaggcaaaatgctggacaaatacatctatggggcacagctgatctggtcgatatgtgaacagtag

SEQ ID NO: 268288 - DNA, 288 bp, Artificial Sequence
  derived and/or modified sequence
atgtctgacagcgaggaggagagccaggaccggcagctgaagatcgtggtgctgggagatggagccagcggcaagaccagcctgaccacctgctttgcccaggagaccttcggcaagcagtacaagcagaccatcggcctggacttcttcctgcggcgcatcaccctgcccggcaacctgaatgtgaccctgcagatctgggacattggaggccagaccatcggcggcaagatgctggacaagtacatctacggggcccagctgatctggagcatctgtgagcagtag

SEQ ID NO: 268289 - DNA, 288 bp, Artificial Sequence
  derived and/or modified sequence
atgagcgacagcgaggaggagagccaggaccggcagctgaagatcgtggtgctcggtgatggcgcctccggcaagacgagtctaacaacgtgtttcgctcaagaaacatttggcaagcagtataagcaaaccatcggtctggacttcttcctgaggcgtatcacgctgcctgggaacctcaatgtcacgctgcagatctgggatataggcggtcaaactattggcggaaagatgctcgacaaatacatctacggtgcacagctgatatggagcatttgtgagcagtag

SEQ ID NO: 268290 - DNA, 288 bp, Artificial Sequence
  derived and/or modified sequence
atgtctgactccgaagaagaatcccaagacaggcagttgaagatcgtggtgctgggagatggtgccagtggtaagacttctttaacgacctgtttcgctcaggaaacttttgggaaacagtataagcaaactatcggactggattttttcctccgtaggataacacttcctggtaatctcaatgtgacacttcaaatctgggacatcggaggtcagacaatcggaggcaagatgctggataagtacatctatggcgcacagttgatttggagcatttgtgaacaatag

SEQ ID NO: 268291 - DNA, 288 bp, Artificial Sequence
  derived and/or modified sequence
atgagcgacagcgaggaggagagccaggacagacagctgaagatcgtggtgctgggcgacggcgccagcggcaagaccagcctgaccacctgcttcgcccaggagaccttcggcaagcagtacaagcagaccatcggcctggacttcttcctgagaagaatcaccctgcccggcaacctgaacgtgaccctgcagatctgggacatcggcggccagaccatcggcggcaagatgctggacaagtacatctacggcgcccagctgatctggagcatctgcgagcagtag

SEQ ID NO: 268292 - protein, 27 aa, Artificial Sequence
  derived and/or modified sequence
MSPCPEEAAMRREVVKRIETVVKDLWP

SEQ ID NO: 268293 - DNA, 84 bp, Artificial Sequence
  derived and/or modified sequence
atgtctccttgccccgaggaggcagcgatgagacgggaagtggtgaagcgtattgaaacagtggtcaaggacttgtggccctag

SEQ ID NO: 268294 - DNA, 3861 bp, Artificial Sequence
  derived and/or modified sequence
gcggccgctctcagcggagggggcggccccggggcccaggcgccgcggcccggcaccccgtggaagagccgcgcgtacagcccgggcatccagggactacatgaggaaataattgacttttataacttcatgtccccttgtcctgaagaagcagctatgagaagagaggtggtgaaacggatcgaaactgtggtgaaagacctttggccgacggctgatgtacagatatttggcagctttagtacaggtctttatcttccaactagcgacatagacctggtggtcttcgggaaatgggagcgtcctcctttacagctgctggagcaagccctgcggaagcacaacgtggctgagccgtgttccatcaaagtccttgacaaggctacggtaccaataataaagctcacagatcaggagactgaagtgaaagttgacatcagctttaacatggagacgggcgtccgggcagcggagttcatcaagaattacatgaagaaatattcattgctgccttacttgattttagtattgaaacagttccttctgcagagggacctgaatgaagtttttacaggtggaattagctcatacagcctaattttaatggccattagctttctacagttgcatccaagaattgatgcccggagagctgatgaaaaccttggaatgcttcttgtagaattttttgaactctatgggagaaattttaattacttgaaaaccggtattagaatcaaagaaggaggtgcctatatcgccaaagaggagatcatgaaagccatgaccagcgggtacagaccgtcgatgctgtgcattgaggaccccctgctgccagggaatgacgttggccggagctcctatggcgccatgcaggtgaagcaggtcttcgattatgcctacatagtgctcagccatgctgtgtcaccgctggccaggtcctatccaaacagagacgccgaaagtactttaggaagaatcatcaaagtaactcaggaggtgattgactaccggaggtggatcaaagagaagtggggcagcaaagcccacccgtcgccaggcatggacagcaggatcaagatcaaagagcgaatagccacatgcaatggggagcagacgcagaaccgagagcccgagtctccctatggccagcgcttgactttgtcgctgtccagcccccagctcctgtcttcaggctcctcggcctcttctgtgtcttcactttctgggagtgacgttgattcagacacaccgccctgcacaacgcccagtgtttaccagttcagtctgcaagcgccagctcctctcatggccggcttacccaccgccttgccaatgcccagtggcaaacctcagcccaccacttccagaacactgatcatgacaaccaacaatcagaccaggtttactatacctccaccgaccctaggggttgctcctgttccttgcagacaagctggtgtagaaggaactgcgtctttgaaagccgtccaccacatgtcttccccggccattccctcagcgtcccccaacccgctctcgagccctcatctgtatcataagcagcacaacggcatgaaactgtccatgaagggctctcacggccacacccaaggcggcggctacagctctgtgggtagcggaggtgtgcggccccctgtgggcaacaggggacaccaccagtataaccgcaccggctggaggaggaaaaaacacacacacacacgggacagtctgcccgtgagcctcagcagataatggctcctggctgcgtcagcctcccccacccctctgcagactgccccgcggcctcggccaccggcaggggaaccgagaccagcaccccgcacgtcagccgggctcgcggcacgcccgccgctgatcactctgcatgtttcttcgtgtggtggtcgcgtccatcttcaagaacagctcgttgtgctcatctgtgaagccttattaaacgtggacgttgttttctgccttcccaggattcttccttcagtgctgaggcaggtcgggctcaggaactgcagggacgtgaacatgcgcttgcggtttgaggtagccgtgtctgttccttcgcggtttgctattttcatttcctgttcgtcaaagcagcagaggagatcaaaccccgttcgtgtgtctttcctccacggataagcttgggaggtcattgttttactgccctcacattttgtttgaaatttcagaactgtttttctatgtaaatattgaaaacttatgatttgtgcaataactcagatattttttatttaatttcctattttcacataagttatatttaagggaggagggaattttttttaaacaagcttaggtcctttcccgagctgcattttctaagttgggtcatcgtgtcggctggttgtctgacgagcatcgttacaaacaccatgatgaggggtttggggttttattttgatgtcttttcttttggtcggaagtgagtgaaggagccaggtcgccctgaaggttttccaaagggcttggctccagagccacctggcagactgcccgtggccctgctgtcgggccccaggccgttgtcctgctctgaccacagagttttaatgttttggttttcacttcttttaaactggacaacaaatccagcatttcaagtgccagaagtataactttctaaggagagaagggttgtcacattataaaatctttaggaaaatgtgaactggaaaacgcttcggtcagttttagtgacatagcctgtgatgatgggtctggtgactattattgcggaccgtggtacccagttttaggaatgtggagaaaggaattctgttgattccgttgaggaatctgtagcgtatgcattcgttctgttaagagcaaatctaggagaagtgcttcagctgcccagtgcgccgtggggagtgttttaacggatcgtgtcgcaggagagcacagcccagcgttggggccgggaccgctggcgcccgacgtcggaagcatacaggtatactatgcaagtgtattctgccacaacaaccactgtctttgttacctttttttgaacaagaatatatccatcctgcctaaccctgagtttttggagcaccacagttgtcctgggagttggttgcatcttgtaggccatctgacttcctgtttttaaaacgggggtctggtcttgctaaacactacaggtaggttggtctttgaagtccactagtggagaatgtcaagacaagatacttattaccatgacatctgatgcatgtgcagcagtggggagttctagattgatctctgaatgtgatcgacgcccagcaaggacaagctttaaaatgtctgcggtctgcccttttgaagcaggactggctcactctgtcattgggagctgtcagctgcgactgcaggttctctaggaggcattccagaatagagtagcacactgtgtctgcagttctcgatgaccgaaagttatcaaaaatatttaaaatatttaaattgtgaacctattgataaagaatatttataaaaactgatctgtaggcctgtactaatctctacgcattagcaatattgactgtaaacccacattaaggaaaccactacgggtctggcagtgcgtgtcccgtggggtgtgcattttaaaactcgattcatagacacaggtaccatgttccatttccgtcatggtgaagcaaatgaattggcctggctaccactgtggtcgcgtgctacaggtttgacaaaaagatatcatgtttcgatttttttgtgtgtggacaacaatatggaagctaaaattgacatatttttatgtaaagtttttctattctttgatttttaataaactttggaaaccagttt

SEQ ID NO: 268295 - DNA, 603 bp, Artificial Sequence
  derived and/or modified sequence
cccggggcccaggcgccgcggcccggcaccccgtggaagagccgcgcgtacagcccgggcatccaggggtgagtgcgcggggaggccgcgggggcgggggcggggcccatggtcctggccggcgcccgcggtgcagacacccgtcccaggcgcccgggcttttggaggatggatgttgaaggctaaggccaaggcccgactctgcactgaaagttttttttttaaacatcagactcatttatcgtggagtgacttgcccagatcctacaagtaacagtccaagaaaaggggctgctgggtaggacctgcaggtatttgtcttttttactcttgagattggaacgggaaatcgactctctacccctccaccccgcctccgggcaagtgaggaaccccttgtcaaagtggggcgtagataagtgtggagtttcacgtaagttaagttgcagaataatttagcattgccaggaactcgaatcacgtcgaagactacatgaggaaataattgacttttataacttcatgtccccttgtcctgaagaagcagctatgagaagagaggtggtgaaacggatcgaaactgtggtgaaagacctttggccg

SEQ ID NO: 268296 - DNA, 84 bp, Artificial Sequence
  derived and/or modified sequence
atgagcccctgcccagaggaggccgccatgagaagagaggtggtgaagagaattgagaccgtggtgaaggacctgtggccctag

SEQ ID NO: 268297 - DNA, 84 bp, Artificial Sequence
  derived and/or modified sequence
atgagcccctgccccgaggaggccgccatgcggcgggaggtggtgaaacgcattgagaccgtagttaaagacctgtggccttag

SEQ ID NO: 268298 - DNA, 84 bp, Artificial Sequence
  derived and/or modified sequence
atgtctccatgcccagaagaagccgctatgcggagagaggtggtaaagcggattgagaccgtggtcaaggatttgtggccatag

SEQ ID NO: 268299 - DNA, 84 bp, Artificial Sequence
  derived and/or modified sequence
atgagcccctgccccgaggaggccgccatgagaagagaggtggtgaagagaatcgagaccgtggtgaaggacctgtggccctag

SEQ ID NO: 268300 - protein, 161 aa, Artificial Sequence
  derived and/or modified sequence
MKELQDIARLSDRFISVELVDESLFDWNVKLHQVDKDSVLWQDMKETNTEFILLNLTFPDNFPFSPPFMRVLSPRLENGYVLDGGAICMELLTPRGWSSAYTVEAVMRQFAASLVKGQGRICRKAGKSKKSFSRKEAEATFKSLVKTHEKYGWVTPPVSDG

SEQ ID NO: 268301 - DNA, 4317 bp, Artificial Sequence
  derived and/or modified sequence
gcagcagcagcagcaccccgggggcgcgggcgacgccagcccgggacccggcaagggaaagggcaagcgcgcggcggagctggccccgcgcgacaaggcgccggcggctgcggcggcggcggcggcggctgcggcgggggccgggggcccccgcgagagggcagcgggcgccagggcggggccgggcccggcggtggcggcggcggcgggcggcagcctggtccccgcggcgcgccagcaacactgcacgcaggtgcgcagccggcggctcatgaaggagctgcaggacatcgcgcgccttagcgaccgcttcatctccgtggagctggtggacgagagcctgttcgactggaacgtgaagctgcaccaggtggacaaggactcggtgctgtggcaggacatgaaggagaccaacaccgagttcatcctgctcaacctcaccttccccgacaacttccccttctcgccgcccttcatgcgggtgctcagcccgcgcctggagaacggctacgtgctggacggcggcgccatctgcatggagctgctcacgccgcgcggctggtccagcgcctacaccgtggaggccgtcatgcgccagttcgcagccagcctggtcaagggccagggacggatctgtagaaaagctggcaaatcaaaaaagtccttcagtcgcaaggaagctgaagctacctttaagagtttggtgaagacgcatgaaaaatatggttgggtcaccccgcccgtgtccgacggctgatgtctgccacgtgcagtagacgctcgagcgcctgtccacacacacaccagtaccctgacatctcctcaatgctgtgcatcctccacccgtttttactccagccagaactgcatcctgaatgcccaggagacgtttaagttatttatgaaaagatgtgtgtacagagaggaagagggagcaaatgccgttcggattatgtttcgattataaatgaatgatcacctcgaagtcactttagaacacatgttgagatggtgacatttcccagcctgcctgcccctctgcccaccccggtcacattgccctgagcttctttccatgacagcagctccgacgagccggcaggaaactcaatgcccctgctggctccatttccatgtaaatggcgccgttcatatttcacagggacgccgtgcatctccgccgtgcgtccccggcacgtgtttgctgtgctctgtatctctgtttttcttcctggaaggtcaacataacttgaaaatgtgtctttctgtggcccatggtccgctgtgatgacatttagacctcatttgtgctatgacctttggctcatgaaaacacaaatttaacattgccaggttctagtgatttaaaaccacaactgcccacttggtgaaaacgtgctctcgatgctgatttgtggtgtgctgctgtccacagataaaccagtgccattagatggaaggcagaggatactgcgaccacccctggcagacggtggcgtagacaccaggtgcgccctctggggctcagagcaacggatggtcagctgcgaacagtctcgtccgatgttaggaaatggtcctacggccgcgcctttgtgttcctgtcttctctccaccaccaaaagcaaaagatgatttcccattcactgcagtcatctgactcattttaatatctgtgctagtgacaatgaatgtcagaactgccaaaggataccaagtgatcatacgatgatttgcatgatcgggtctatttcacccaatagtcacttgtgtgtcccccgaaattgggatgggtgagcacccttgctgtggtgtaaacttcctgttatttaatctcccccacggtttcatttttctcttctgttaatacttagaactttctaagaaactccatgaaatgaggaaatactgtttctaataatatgaggaaagaagtaaaaatgttcattccaagtggcaagtcttattggacacattttaaataaaatcatgcatacctgatacactgcctcaaggatccagtcattgtgggctatccttccatttaaaatatttcagatattcttaaattttttaaatattgcaaatactacaacatgtaattccagagcagcgttctaagtcaggtaccagaaatgagtcttaggaacccatagtctttgcaaaaattcagtagattgaaatagtccccagaagcagccaaggagctgaagggatgattcgatcaagttcagatgttgccaattgtatcttactgctgtgaaggaggaaaagtcttccgggataatgtattcaattcttcaggcagttttgtctacttggggacctgcccattggttcaaggttttcagagatccaagaggccttgcctcaaagaacaaggattggcgcctttcagcagggctgcccattcaccaaacttattgttacttttgtttttctttaccactttcttatttgcccccaagtgcacacaggcagctctgccagaccaaaatgacagtgtattaagaatgcagggcctgctcagcttccctgtgagtcataatagtcgtgaaacttgatgacagtgaacttacgatgttcattcatccaaccctctatggtggcattctccatcctggaaacctgacatttggctgacggtctttggaccctggagctagtggtcatcatggaattacactgtggagatgaaagacctaggacagaaacatcttgctagggaaagcacctgagtttattcctttctaaatattttcctcttctaatgaaaactaaaagcagctttactttagggggaaaaatatatccaaaggcaggtcatttcagtagtgtttattagctgattgaaaaacaggttcacggtgctctctgagaactgcaccaaggggtgcagccaagagactggtctgaccccgggttgggctgggtggcagccggcgacagagcagagagacactcagctcagtgtcgctccttccatacactcagagtttgatttttcttgcatggcatttccattaggtttgttagaaacttatagaagaaatcaattctttagtgaacgaaataccatttttcactcaattggtaagaatttttcattttaaaagcagtaggaagtgatgtaaaactctaccattgcttggactgttaggagtgcggactccctttctggtagactcccttcgtaggcaagcacggtggtgcccagccatggaggcacccttaggacactgagcacaggcctggctgcctgtgccttggccacagcctccttccaccccactgaagtggacacctgcctctggagcccagggtgagaaggagaggcctgaagcctggggccacgttcccacacaagccaaggaacctattcctctttggacagacagcgagggaataatcagacagtgggtgcaaatgttcatgtcccgatagctccacacacccatgtatctgtgggaactcaaaccaagccagagcccacagagccaaacaaacagaaaatcacaaacccatctgtcctcttctcaatgcagaactccttcccgtccaataattttcctgaaccaatcacccttgttattgggtatcttctccactgctgggtaaggcctgcacatggtctgtctgtaactttctagaagactgagaactgcttatgccttagggagttctatgtgagcagcaaggttattccccctagttacacacacacgcacatgtgccaatactcctgcaaagacttgctgtttctaaaatccactactcagaaaaaccagggtgtcggcttaaagttttcagctccatctatcaaaatttgacctttttttaagagaaaaatatgtagatgagtgaaaaagacctaggattgaaagacaaaaagccatgtgtccatgtaaccctggccagtcactccacctgcctgagccttggtttcctcagctgtgagctcctaccaggtcagtgtgggaattggccaaaatgacgcagcagaagtgctttggagactaaagattgtcaacgaaatgtaagtgtcattttcgtagtattaggacgtttacattacagcaggctttaattagaacccacttagatatcgactcagaatgatcaattacagtggttaaaatacacatacctggtaatcatatacttgctttctgtccccagttcttacattaagtcaaccaactgacccaaaaatcaaccaataactaactggccatctctccactcactcagcattctcctcttaaatgcagggcatgcagaagattaaggtacagccccttccctggataggaactc

SEQ ID NO: 268302 - DNA, 474 bp, Artificial Sequence
  derived and/or modified sequence
atggcaccccaggcccaacctttgccactcctggggaaatgtaaagcctctaatgcgccaaccccccgacccccaagaagacccacgtggaaaaggaagtcagggaaggtctccacaactgtgccacagcctcaaactgtccctggctcatggccacgcgagcgcgaacggaagagggaaagggacagaataaactccttgctcctccagatcattgggcactccaagcaagccctaccgggtccaggggagcctgcacagaggttaacaccagcgccagcggaccccggtggaaggggagagcaggggggagtggctgcccaaggcgcaggactcgccgcaggaaggcgatcagctgtgggaccgtcaaagctctgtaatttggtgtcagcaagcggggctcttgccgtgtttagcataactgggatgtgtccaggccgagacgtgtccgatggtttgagaatgggtcagtag

SEQ ID NO: 268303 - protein, 208 aa, Artificial Sequence
  derived and/or modified sequence
MWKWILTHCASAFPHLPGCCCCCFLLLFLVSSVPVTCQALGQDMVSPEATNSSSSSFSSPSSAGRHVRSYNHLQGDVRWRKLFSFTKYFLKIEKNGKVSGTKKENCPYSILEITSVEIGVVAVKAINSNYYLAMNKKGKLYGSKEFNNDCKLKERIEENGYNTYASFNWQHNGRQMYVALNGKGAPRRGQKTRRKNTSAHFLPMVVHS

SEQ ID NO: 268304 - protein, 66 aa, Artificial Sequence
  derived and/or modified sequence
MWKWILTHCASAFPHLPGCCCCCFLLLFLVSSVPVTCQALGQDMVSPEATNSSSSSFSSPSSAGRH

SEQ ID NO: 268305 - DNA, 627 bp, Artificial Sequence
  derived and/or modified sequence
atgtggaagtggatcctgacccactgcgccagcgccttcccccacctgcccggctgctgctgctgctgcttcctgctgctgttcctggtgagcagcgtgcccgtgacctgccaggccctgggccaggacatggtgagccccgaggccaccaacagcagcagcagcagcttcagcagccccagcagcgccggcagacacgtgagaagctacaaccacctgcagggcgacgtgagatggagaaagctgttcagcttcaccaagtacttcctgaagatcgagaagaacggcaaggtgagcggcaccaagaaggagaactgcccctacagcatcctggagatcaccagcgtggagatcggcgtggtggccgtgaaggccatcaacagcaactactacctggccatgaacaagaagggcaagctgtacggcagcaaggagttcaacaacgactgcaagctgaaggagagaatcgaggagaacggctacaacacctacgccagcttcaactggcagcacaacggcagacagatgtacgtggccctgaacggcaagggcgcccccagaagaggccagaagaccagaagaaagaacaccagcgcccacttcctgcccatggtggtgcacagctag

SEQ ID NO: 268306 - DNA, 201 bp, Artificial Sequence
  derived and/or modified sequence
atgtggaagtggatcctgacccactgcgccagcgccttcccccacctgcccggctgctgctgctgctgcttcctgctgctgttcctggtgagcagcgtgcccgtgacctgccaggccctgggccaggacatggtgagccccgaggccaccaacagcagcagcagcagcttcagcagccccagcagcgccggcagacactag

SEQ ID NO: 268307 - DNA, 627 bp, Artificial Sequence
  derived and/or modified sequence
atgtggaaatggatattgacccactgcgcctcagcgtttcctcaccttccaggctgctgttgctgctgctttttgctgctgtttttggtgtccagtgtgccagttacttgccaggcccttggtcaggacatggtctcccccgaggccacgaattcaagctccagttccttttcctcacccagttccgctggcaggcatgtcaggtcatacaatcatctgcagggcgacgtccgttggagaaagctcttctcattcacaaagtattttctgaaaatcgagaaaaatggaaaagtctccggcaccaaaaaagagaattgtccttatagtattctggagattacttctgtcgaaatcggtgttgtcgccgtgaaagccatcaactccaactactatctagctatgaacaagaaggggaaactctatggctctaaagagttcaacaatgactgcaagttaaaagaacgcatagaagagaatggttacaatacctacgcttccttcaattggcagcataatggtagacagatgtacgtggcccttaacggcaagggcgcgccacgaaggggccaaaaaacacggcgtaaaaacacttctgcacacttcctccccatggtggtgcactcttag

SEQ ID NO: 268308 - DNA, 201 bp, Artificial Sequence
  derived and/or modified sequence
atgtggaagtggattctcacacactgcgcctcagcctttcctcacttgcctgggtgctgttgttgctgcttcctgttgctgtttctagtctcaagcgtaccagtgacgtgtcaggctctgggtcaggatatggtctcccccgaagccacgaacagttcctctagcagtttcagcagtccatcatcagcaggccgccactag

SEQ ID NO: 268309 - DNA, 2193 bp, Artificial Sequence
  derived and/or modified sequence
agggagctaaccagcagccaccacctcgagctctctccttgccttgcatcgggtcttacccttccagtatgttccttctgatgagacaatttccagtgccgagagtttcagtacaatgtggaaatggatactgacacattgtgcctcagcctttccccacctgcccggctgctgctgctgctgctttttgttgctgttcttggtgtcttccgtccctgtcacctgccaagcccttggtcaggacatggtgtcaccagaggccaccaactcttcttcctcctccttctcctctccttccagcgcgggaaggcatgtgcggagctacaatcaccttcaaggagatgtccgctggagaaagctattctctttcaccaagtactttctcaagattgagaagaacgggaaggtcagcgggaccaagaaggagaactgcccgtacagcatcctggagataacatcagtagaaatcggagttgttgccgtcaaagccattaacagcaactattacttagccatgaacaagaaggggaaactctatggctcaaaagaatttaacaatgactgtaagctgaaggagaggatagaggaaaatggatacaatacctatgcatcatttaactggcagcataatgggaggcaaatgtatgtggcattgaatggaaaaggagctccaaggagaggacagaaaacacgaaggaaaaacacctctgctcactttcttccaatggtggtacactcatagaggaaggcaacgtttgtggatgcagtagaaccaatggctcttttgccaagaatagtggatattcttcatgaagacagtagattgaaaggcaaagacacgttgcagatgtctgcttgcttaaaagaaagccagcctttgaaggtttttgtattcactgctgacatatgatgttcttttaattagttctgtgtcatgtcttataatcaagatataggcagatcgaatgggatagaagttattcccaagtgaaaaacattgtggctgggttttttgttgttgttgtcaagtttttgtttttaaacctctgagatagaacttaaaggacatagaacaatctgttgaaagaacgatcttcgggaaagttatttatggaatacgaactcatatcaaagacttcattgctcattcaagcctaatgaatcaatgaacagtaatacatgcaagcatttactggaaagcacttgggtcatatcatatgcacaaccaaaggagttctggatgtggtctcatggaataattgaatagaatttaaaaatataaacatgttagtgtgaaactgttctaacaatacaaatagtatggtatgcttgtgcattctgccttcatccctttctatttctttctaagttatttatttaataggatgttaaatatcttttggggttttaaagagtatctcagcagctgtcttctgatttatcttttctttttattcagcacaccacatgcatgttcacgacaaagtgtttttaaaacttggcgaacacttcaaaaataggagttgggattagggaagcagtatgagtgcccgtgtgctatcagttgacttaatttgcacttctgcagtaataaccatcaacaataaatatggcaatgctgtgccatggcttgagtgagagatgtctgctatcatttgaaaacatatattactctcgaggcttcctgtctcaagaaatagaccagaaggccaaattcttctctttcaatacatcagtttgcctccaagaatatactaaaaaaaggaaaattaattgctaaatacatttaaatagcctagcctcattatttactcatgatttcttgccaaatgtcatggcggtaaagaggctgtccacatctctaaaaaccctctgtaaattccacataatgcatctttcccaaaggaactatcaaagaatttggtatgaagcgcaactctcccaggggcttaaactgagcaaatcaaatatatactggtatatgtgtaaccatatacaaaaacctgttctagctgtatgatctagtctttacaaaaccaaataaaacttgttttctgtaaatttaaagagctttacaaagttccataatgtaaccatatcaaaattcattttgttagagcaggtatagaaaagagtacataagagtttaccaatcatcatcacattgtattccactaaataaatacataagcc

SEQ ID NO: 268310 - DNA, 1131 bp, Artificial Sequence
  derived and/or modified sequence
aattagacagagctagaggcgccggcggaggctgcggccgcaacagccgcggcgaggaagggacctggcagcccccgagctcggtgcaaaggcatcgcgctctctcctcgctcccctgctcccccacccccttctctgcccctttcaccctccctctccctggcgttcccagcagcctagggtttcagatgtcccaccgccggttgaccccctcccccctcttctccacccctgcaaatgaggtttgaccagcagaggcagagcccacctctggcttagaatcactgacatttagactccaggcttcaacctgtttacaagcggactttccaaaggaagggggtgggagatagggccatacaaaacaccagccgccgtcccccaaaacaaaaagtgactttcggcagccttcaaatcggcaggcaccactaaaaacagaaaggaagagagggaagaaaacaacggcgactgggcagctgcctccacttctgacaactccaaagggatatacttgtagaagtggctcgcaggctggggctccgcagagagagaccagaagacctttttggcatctaacatggtgaagaaaggagtaaagaagagaacaaagtaactcctgggggagcgaagagcgctggtgaccaacaccaccaacgccaccaccagctcctgctgctgcggccacccacgtccaccatttaccgggaggctccagaggcgtaggcagcggatccgagaaaggagcgaggggagtcagccggcttttccgaggagttatggatgttggtgcattcacttctggccagatccgcgcccagagggagctaaccagcagccaccacctcgagctctctccttgccttgcatcgggtcttacccttccagtatgttccttctgatgagacaatttccagtgccgagagtttcagtacaatgtggaaatggatactgacacattgtgcctcagcctttccccacctgcccggctgctgctgctgctgctttttgttgctgttcttggtgtcttccgtccctgtcacctgccaagcccttggtcaggacatggtgtcaccagaggccaccaactcttcttcctcctccttctcctctccttccagcgcgggaaggcat

SEQ ID NO: 268311 - DNA, 627 bp, Artificial Sequence
  derived and/or modified sequence
atgtggaagtggatcctgacccactgtgccagcgccttcccccacctgcccggctgctgctgctgctgcttcctgctgctcttcctggtgtcctctgtgcctgtgacctgccaggccctgggccaggacatggtgtccccagaggccaccaacagcagcagcagcagcttcagcagccccagcagcgctggccgccacgtgcgcagctacaaccacctgcagggagatgtgcgctggaggaagctgttctccttcaccaagtacttcctgaagattgagaagaatggcaaggtgtctggcaccaagaaggagaactgcccctacagcatcctggagatcacctctgtggagattggagtggtggccgtgaaggccatcaacagcaactactacctggccatgaacaagaagggcaagctgtatggcagcaaggagttcaacaatgactgcaagctgaaggagcgcatcgaggagaatggctacaacacctacgccagcttcaactggcagcacaacggccggcagatgtatgtggccctgaatggaaaaggagccccccggcggggccagaagaccaggaggaagaacaccagcgcccacttcctgcccatggtggtgcacagctag

SEQ ID NO: 268312 - DNA, 201 bp, Artificial Sequence
  derived and/or modified sequence
atgtggaagtggatcctgacccactgtgccagcgccttcccccacctgcccggctgctgctgctgctgcttcctgctgctcttcctggtgtcctctgtgcctgtgacctgccaggccctgggccaggacatggtgtccccagaggccaccaacagcagcagcagcagcttcagcagccccagcagcgctggccgccactag

SEQ ID NO: 268313 - DNA, 627 bp, Artificial Sequence
  derived and/or modified sequence
atgtggaagtggatcctgacccactgcgccagcgccttcccccacctgccgggctgttgctgctgctgttttttgctcctgttcttggtgtcctccgttcccgtgacttgccaggcactcggccaagatatggtcagccccgaggctacaaactcttcgtcctcatccttctcgtcaccatcctccgctggtcgccatgtgcggtcctacaatcacttgcagggagacgtgagatggaggaagcttttttccttcacgaaatattttctgaagatcgaaaagaatgggaaagtgagcggaaccaagaaggaaaattgcccatattctatcctggaaattacttcagtggagatcggagtcgtggccgtgaaggccattaactctaactattaccttgcaatgaacaaaaagggcaagctttacggttccaaggagttcaataacgactgcaaattgaaggagcgcatcgaggaaaatggttataacacctacgctagcttcaattggcaacacaatggacggcagatgtatgtagctttaaacggcaaaggcgccccgagaagaggacagaaaacacgtcggaaaaatactagcgcacatttcttgcctatggttgtgcattcttag

SEQ ID NO: 268314 - DNA, 201 bp, Artificial Sequence
  derived and/or modified sequence
atgtggaagtggatcctgacccactgcgccagcgccttcccccacctgccagggtgttgttgttgctgcttcctgctgctcttcctggtgagctctgtccccgtgacttgtcaggcattgggacaggacatggtgtcgcctgaggcgacgaatagttcttcgtcctcattctctagcccttcctccgcagggcgacattag

SEQ ID NO: 268315 - DNA, 627 bp, Artificial Sequence
  derived and/or modified sequence
atgtggaagtggatactgacccactgcgcctccgcgttcccgcacctcccagggtgctgctgttgttgttttctcctcctgttcttggtaagctcggtccccgttacctgtcaagctctcggccaggacatggtgtccccggaggccacgaactcaagctcctctagctttagttcacccagcagtgcgggaagacatgtgcggtcctataaccaccttcaaggcgatgtgcggtggagaaagctctttagtttcacaaaatattttctgaagatcgagaaaaatggaaaagtttctggaaccaaaaaagaaaattgtccctatagcatcctggagataacttctgtggagatcggggttgtcgccgtcaaggccattaactcaaattattacttagccatgaacaaaaagggcaaactgtatgggagcaaggagttcaataacgactgtaagcttaaagaacgaatcgaggaaaacggttacaatacgtacgcgtcatttaactggcaacataacggcagacagatgtacgtcgccctgaatgggaagggggcacctcgtcggggtcaaaaaactcggcgtaagaatacatctgcccatttcctacctatggtcgtgcactcttag

SEQ ID NO: 268316 - DNA, 201 bp, Artificial Sequence
  derived and/or modified sequence
atgtggaagtggatacttacacattgcgcttccgcattcccgcaccttcccggatgctgctgttgttgttttctgctgcttttcctggtctccagcgtgcctgttacttgtcaggccctggggcaagacatggtcagccctgaagcaaccaactccagtagctcttccttttcatctccttcaagtgccggacgccactag

SEQ ID NO: 268317 - DNA, 627 bp, Artificial Sequence
  derived and/or modified sequence
atgtggaaatggatactgacacattgtgcctcagcctttccccacctgcccggctgctgctgctgctgctttttgttgctgttcttggtgtcttccgtccctgtcacctgccaagcccttggtcaggacatggtgtcaccagaggccaccaactcttcttcctcctccttctcctctccttccagcgcgggaaggcatgtgcggagctacaatcaccttcaaggagatgtccgctggagaaagctattctctttcaccaagtactttctcaagattgagaagaacgggaaggtcagcgggaccaagaaggagaactgcccgtacagcatcctggagataacatcagtagaaatcggagttgttgccgtcaaagccattaacagcaactattacttagccatgaacaagaaggggaaactctatggctcaaaagaatttaacaatgactgtaagctgaaggagaggatagaggaaaatggatacaatacctatgcatcatttaactggcagcataatgggaggcaaatgtatgtggcattgaatggaaaaggagctccaaggagaggacagaaaacacgaaggaaaaacacctctgctcactttcttccaatggtggtacactcatag

SEQ ID NO: 268318 - DNA, 8094 bp, Artificial Sequence
  derived and/or modified sequence
atgaatggagacatgccccatgtgccaataacgaccctggcagggattgccagcttgaccgatctgctcaaccaactgccactgccttctcccctcccggccacaacaacaaagtctcttctctttaatgcccggattgcggaagaggttaactgcttgctggcatgtcgtgacgataacctcgtcagtcagctggttcactccctgaatcaggttagtaccgaccatatagaactcaaagacaatcttgggtcagatgaccctgagggggatattcctgttctgctgcaggccgtgctggcaaggagccccaatgtctttagagagaagtcaatgcagaatcgctacgtgcagagcgggatgatgatgagccagtacaaactgtcgcagaactccatgcatagctccccagcctcaagtaactatcagcagacaaccattagccattctccctcgagccgtttcgtgccgccgcaaactagttctggtaacaggtttatgcctcaacagaacagtccagtgccttcgccttacgctccccaatctccagccggatatatgccttattcacatcccagcagctacaccactcaccctcagatgcagcaggcctccgtgagcagtcccattgttgccggcggcctgaggaacattcacgacaataaagtcagcggcccgctgagcggcaacagtgccaatcaccacgccgacaatccacgacatggaagctccgaggactatctacacatggtccatagactttcgtccgacgacggtgatagctcgacaatgcggaatgcagcctctttcccacttagaagtccacagccagtgtgttctcccgcagggtctgaagggacacccaagggtagtagacctccactgattcttcagtctcagagtctaccttgtagtagtccccgggacgtcccaccagacatcctactggacagtcctgaacgcaaacaaaaaaaacagaagaagatgaaactgggcaaggacgaaaaagagcaaagcgagaaagccgccatgtatgatatcatctcctccccgagcaaggactctactaaacttacactcaggctctctcgcgtgagatcatctgatatggatcagcaagaggacatgatctccggggtagagaactctaatgtgtccgaaaacgatattccgttcaatgtgcagtatcccggtcagacctcaaagacaccgatcactccccaggacataaatcggccacttaacgcagctcagtgtctgtcacaacaggagcagactgcatttctgccggccaaccaggtgcctgtgctgcaacagaacacttccgtcgcggcgaagcagcctcaaactagtgtggtgcagaaccagcaacagatctcccagcagggaccaatttatgatgaggtggagctcgatgctctggccgagatcgaacggatcgaacgagagtcagccatcgagagagaaaggttctccaaagaggtgcaggataaagataagccactcaagaagaggaagcaagactcatatcctcaggaagctggaggtgccacgggaggaaatcgcccagccagccaagagacaggctccacaggcaacggcagtcggccggccctcatggtgtctattgacctgcatcaggccggccgggtggacagccaggcaagtataactcaggactccgattcgataaagaaacctgaggaaatcaagcaatgtaatgatgcccctgtttctgttctccaggaagacattgtgggatccctgaagtctactcccgaaaatcacccagaaacacctaaaaagaaatctgaccccgagttgtctaaaagcgagatgaagcagtctgaatccagattggccgaatcaaaaccaaatgaaaatcgtctcgtggaaacaaagtcttctgagaacaaactggaaactaaggtggaaactcaaactgaggaattaaaacagaacgaaagcaggactactgaatgcaagcagaatgagtccactatcgttgaaccaaaacagaacgagaacagactgagcgacaccaaacccaatgataataagcagaacaatgggcgaagcgaaacaacaaaaagcaggcccgaaacgccgaagcagaaaggcgagtccaggcccgagacacccaaacagaagtccgatggacaccctgagacccccaagcagaagggcgacggcaggccggaaacccccaagcagaaaggcgagtccagacctgagacacctaagcaaaagaatgagggccggcccgagacaccaaaacatagacacgacaaccggcgtgattccggcaaaccatccaccgagaagaagccggaagtttccaagcataagcaagatactaagagcgactcaccaaggttgaagtctgaacgtgcagaagctctgaagcagaggcctgatgggagaagtgtctctgagagcttacgcagggaccacgataacaaacagaaaagcgatgaccgaggcgaatcagagcgccatcggggggaccagtcccgtgtgcggagacctgagacgctgcgcagcagctcccggaacgagcacggaataaagtctgacagctccaagaccgacaaactggagcgcaaacaccggcacgaaagcggcgacagtcgcgagagaccaagcagtggggaacaaaagtcccggcccgacagcccaagggtgaagcaaggcgacagcaataaaagtagaagtgacaagctgggctttaagagcccgaccagcaaagacgacaagaggacagaggggaataaatccaaggtggacactaacaaagctcatccggacaataaagctgaatttccaagctacctactgggcggcagatctggtgcccttaaaaattttgtgattcccaagatcaaaagggacaaggatggcaatgtgacccaagagacaaaaaagatggagatgaagggggagcccaaagataaggtggagaagatcggactagtcgaggaccttaataagggcgccaaaccagtggtcgttttgcagaaattgagtttagacgatgtgcaaaagctgataaaagatagggaagataaaagccgatcctccctgaagcccatcaaaaacaagcctagcaagtccaataaggggtccatagatcagtcggttctgaaggaactcccgccagagctgctggcggaaatcgagtcgacaatgcccctctgtgaaagggtgaagatgaacaagaggaagcgatcgactgttaacgaaaaacctaagtatgccgagatcagctccgacgaggataacgatagcgatgaggcctttgaaagcagcagaaagaggcacaaaaaggatgatgacaaagcttgggagtatgaggaaagggaccggcgttcaagtggcgaccaccgacgatcagggcatagccacgaaggccggcggagcagcggcggtggtcgataccggaatagatctccatctgatagtgacatggaggattacagtcctccgccttcattgtctgaagttgcccgcaagatgaaaaagaaagagaagcagaagaaacgaaaagcatacgagcccaagttaacacctgaagaaatgatggactctagcacgtttaaaaggttcacagcatctattgagaatattctcgacaacctggaagacatggattttactgccttcggcgatgacgatgagatcccgcaagagctcttactcggtaaacaccagttaaacgaattaggctcagaatctgccaaaatcaaagctatgggaattatggataaactgagtacagacaagaccgttaaagtcctgaacattttggaaaaaaacattcaggacggttctaaacttagcacactgctgaatcataacaatgatactgaggaagaagaacgcctctggcgcgacctgatcatggagcgggtgacgaaatcggcagatgcctgcctgactacaattaatatcatgacctcacccaacatgccaaaggctgtctacattgaggacgtgatagaaagggtaattcagtacaccaagttccacttacagaataccctgtacccacaatatgacccagtctatagattggatcctcacggaggagggctcctatcttctaaggctaagagggccaaatgctccacacacaagcagcgtgtgattgtgatgctgtacaacaaagtgtgcgatatcgtgagctctctatctgagctcctagagatccagcttctgacagacaccaccattctccaggtatcctctatggggatcactcccttctttgtcgagaacgtctcagagttgcaactgtgcgcgatcaaattggttacagccgtgttcagcaggtacgaaaaacatcggcagctgatcctggaggagatttttaccagcctggcacgcctcccgacgtctaagagaagcctgcgcaatttccggttaaactccagcgacatggatggggagccaatgtatatccagatggtgaccgctctggtgctccagcttattcagtgcgtggtgcatttaccaagttctgagaaagatagtaatgcagaagaggatagcaacaagaaaatcgaccaggacgttgtcattactaattcctacgaaaccgcgatgcgcacagcacagaattttctcagtatcttcctaaaaaagtgtggcagcaaacaaggagaagaagactacagacctctgttcgaaaattttgtacaggacctattgtcaactgtgaacaagcctgagtggcccgcagctgaattgctcctcagcctgctcggaaggctgctggtgcaccagtttagtaataaatcaacggagatggccctacgggttgcatcactagattatttaggcacagtggctgctagactgagaaaggatgcagtgaccagtaagatggaccaagggagcatagagagaattctaaaacaggtctctggtggagaggacgagattcagcagctgcagaaagctctcctggactatctggatgaaaataccgaaactgacccctcacttgtgttcagtaggaagttttacatcgcacagtggttccgcgacacgacactggaaacagaaaaagcaatgaaaagtcaaaaggacgaggagagttccgaaggtacccatcatgcaaaggaaattgaaaccaccggccagattatgcacagagctgagaaccgcaaaaaattcttgagatcaataattaagacaactccatcacaattctcaactctcaaaatgaacagcgacacggtggattacgacgatgcttgtctgattgtaagatatttggcatcaatgcgtccatttgcccagtccttcgacatttacctcactcagatactccgggtcctaggagaaaatgctatcgcagtgaggactaaggccatgaaatgtctgtctgaagtggtcgctgtggatcctagcattctagctcgattagatatgcagcgcggcgtccacggcagacttatggataattctactagtgtcagagaggctgcagttgagctcctaggtaggtttgtcctatgccgaccacagctggctgagcaatattacgacatgcttatagagcggatcctggatacaggcatcagcgtgcgtaagcgcgttatcaaaatactgcgggacatttgcattgagcagcccacatttcctaagatcaccgagatgtgcgtgaagatgattcggcgagtgaacgatgaggaaggcattaaaaaactcgtcaacgaaacattccagaagctgtggttcacaccgacccctcacaacgacaaggaagctatgactcgcaaaatcctaaatataaccgatgtcgtggccgcctgtcgggacactggttacgattggtttgaacaactactccaaaatttgctgaaatcagaggaagatagctcgtacaagcccgtcaagaaagcatgtactcagttggtcgacaacctggtcgagcatattctgaagtacgaggagagtctggctgacagtgataacaagggcgtgaactccgggagacttgtagcttgcattacaacccttttcctgttctctaagattcgccctcagctgatggtaaagcatgcaatgaccatgcaaccataccttaccaccaaatgtagcacacagaacgactttatggtgatttgtaatgtagccaaaatcctggagctagtggtccccctaatggaacacccatccgagacatttctggctacaatcgaggaagaccttatgaaattgatcatcaagtatgggatgacggtagtgcagcattgcgtgtcgtgtctcggggctgtggtcaataaggtcacccaaaacttcaagtttgtgtgggcttgttttaatcggtactatggagctataagcaagttgaaatcacagcatcaggaagatcctaacaataccagtttgctgacaaacaagcctgccctgctgcgaagcctgttcacagtcggagctctctgccgtcattttgatttcgatcttgaagacttcaagggaaactccaaagtaaacattaaagacaaagttctggagcttctgatgtatttcacgaaacactcagacgaggaagtgcagactaaagcaatcattggattgggtttcgctttcattcagcacccaagcttgatgtttgaacaggaggtaaagaacctctataacaatatcttgtctgacaagaattcgagcgtcaacctaaaaattcaggtgctgaagaacctgcaaacttacctccaggaagaggatacacggatgcagcaagctgatcgggactggaaaaaagtggcgaagcaggaggacctgaaagaaatgggagacgtgagtagcggcatgagttcatcaataatgcagctgtatctgaaacaggtgctagaggcattttttcacacccaaagctccgtgaggcatttcgccttaaacgtgatcgcgttgacactcaaccaaggcctgatacaccccgtccagtgcgtgccatatctgatcgccatgggtacggatcccgagccagccatgaggaataaggccgaccagcagctggtcgagatcgataagaaatacgctggcttcattcacatgaaggccgtggctggcatgaaaatgtcttatcaggtgcaacaggccatcaacacatgcttaaaggatcctgtaagaggcttccgccaggatgaatcctcttccgccctctgtagccatttatactcaatgatccgaggcaaccggcagcacagacgcgcgtttctcatttctctgctgaacctgttcgatgacactgccaaaacggatgtcactatgctgttatatattgcggacaacctggcctgctttccgtatcagacacaagaagagcccctgttcataatgcatcacatagacatcaccctgagcgtttccgggtctaaccttttgcagtccttcaaggaatcaatggtgaaagacaaaaggaaagagcggaaatcttcccccagcaaagagaacgagtcctcagattctgaggaagaggtctcacgaccaagaaagagcagaaagcgggttgattctgacagtgacagtgacagcgaggacgatattaactcagtgatgaagtgcctgcctgagaactctgcacctttgatagagtttgccaacgtgagtcaagggatcctgctactcctaatgctgaagcagcatctgaagaatctttgtggattctccgactctaaaattcagaagtactcccctagtgagtcggcgaaggtgtacgataaggcaataaatcgcaagacaggcgtacatttccatcctaagcagaccctagattttctccggagcgacatggcaaacagcaagattacagaggaggtgaagcgctcaatcgttaaacagtacctcgacttcaagttgcttatggaacatttggacccagatgaagaggaggaggagggcgaggtatcggcaagcactaatgcaagaaacaaagcgataacttcactgctcggcggcggctccccgaaaaacaacactgcagcagaaacagaagacgatgagtccgatggcgaagaccgggggggggggacttcaggcgtcaggaggcgcaggagccagagaatttcgcagcgtatcacatag

SEQ ID NO: 268319 - DNA, 8094 bp, Artificial Sequence
  derived and/or modified sequence
atgaatggagacatgcctcatgtgcccatcaccaccctggccggcatcgccagcctgacagacctgctgaaccagctgcccctgcccagccccctgcctgccaccaccaccaagagcctgctcttcaatgccagaattgctgaggaggtgaactgcctgctggcctgcagagatgacaacctggtgtcccagctggtgcacagcctgaaccaggtgtccacagaccacatcgagctgaaggacaacctgggcagtgatgatcctgagggggacatccctgtgctgctgcaggccgtgctggcccggagccccaacgtgttccgggagaagtccatgcagaaccgctacgtgcagagcggcatgatgatgagccagtacaagctgagccagaacagcatgcacagcagccctgccagcagcaactaccagcagaccaccatcagccacagccccagcagcagatttgtgcccccccagaccagcagcggcaaccgcttcatgccccagcagaacagccctgtgcccagcccctatgccccccagagccctgctggctacatgccctacagccaccccagcagctacaccacccacccccagatgcagcaggcctctgtgagcagccccatcgtggccggcggcctgaggaacatccatgacaacaaggtgtctggccccctgagcggcaacagcgccaaccaccacgccgacaaccccaggcatggcagcagcgaggactacctgcacatggtgcaccggctgagcagtgatgatggagacagcagcaccatgagaaatgctgccagcttccccctgcggagcccccagcctgtgtgcagccctgctggcagcgagggcacccccaagggcagcaggcctcctctcatcctgcagagccagagcctgccctgcagcagccccagagatgtgcccccagacatcctgctggacagccctgagaggaagcagaagaagcagaagaagatgaagctgggcaaggatgagaaggagcagagcgagaaggccgccatgtatgacatcatcagcagccccagcaaggacagcaccaagctgaccctgcggctgagccgggtgcgcagcagtgacatggaccagcaggaggacatgatcagcggcgtggagaacagcaatgtgtctgaaaatgacatccccttcaacgtgcagtacccaggccagaccagcaagacccccatcaccccccaggacatcaaccggcccctgaatgctgcccagtgcctgagccagcaggagcagacagccttcctgcctgccaaccaggtgcctgtgctgcagcagaacacctctgtggccgccaagcagccccagacctctgtggtgcagaaccagcagcagatcagccagcagggccccatctatgatgaggtggagctggatgccctggccgagattgagcgcatcgagcgggagagcgccatcgagcgggagcgcttcagcaaggaggtgcaggacaaggacaagcccctgaagaagaggaagcaggacagctacccccaggaggccggcggggccaccggcggcaacagacctgccagccaggagaccggcagcactggaaatggcagcaggcctgccctgatggtgtccattgacctgcaccaggccggccgggtggacagccaggccagcatcacccaggacagcgacagcatcaagaagccagaggagatcaagcagtgcaatgatgcccctgtgtctgtgctgcaggaggacatcgtgggcagcctgaagagcaccccagagaaccaccctgagacccccaagaagaagagtgaccctgagctgagcaagtctgagatgaagcagagcgagagccggctggccgagagcaagcccaatgaaaatcggctggtggagaccaagagcagcgagaacaagctggagaccaaggtggagacccagacagaggagctgaagcagaatgaaagcaggaccacagagtgcaagcagaatgaaagcaccatcgtggagcccaagcagaatgaaaatcggctgagtgacaccaagcccaatgacaacaagcagaacaacggccgctctgagaccaccaagagcaggcctgagacccccaagcagaagggggagagcaggcctgagacccccaagcagaagagtgatggccaccctgagacccccaagcagaagggagatggccggcctgagacccccaagcagaagggggagagcaggcctgagacccccaagcagaagaatgaaggccggcctgagacccccaagcacagacatgacaacagaagagacagcggcaagcccagcacagagaagaagccagaggtgtccaagcacaagcaggacaccaagagtgacagcccccggctgaagtctgagcgggcagaggccctgaagcagaggccagatggccgctctgtgtctgagagcctgcggcgggaccatgacaacaagcagaagagtgatgacagaggagagagcgagcggcacagaggagaccagagccgggtgagaagacctgagaccctgcggagcagcagcagaaatgagcacggcatcaagagtgacagcagcaagacagacaagctggagaggaagcacagacatgagagcggggacagccgggagcggcccagcagtggagagcagaagagcaggccagacagcccccgggtgaagcagggcgacagcaacaagagcagaagtgacaagctgggcttcaagagccccaccagcaaggatgacaagaggacagagggcaacaagagcaaggtggacaccaacaaggcccacccagacaacaaggccgagttccccagctacctgctgggcggccgcagcggggccctgaagaacttcgtcatccccaagatcaagagggacaaggatggaaatgtgacccaggagaccaagaagatggagatgaagggggagcccaaggacaaggtggagaagattggcctggtggaggacctgaacaagggggccaagcctgtggtggtgctgcagaagctgagcctggatgatgtgcagaagctgatcaaggaccgggaggacaagagccgcagcagcctgaagcccatcaagaacaagcccagcaagagcaacaagggcagcattgaccagagcgtgctgaaggagctgcccccagagctgctggccgagattgagagcaccatgcccctgtgtgagcgggtgaagatgaacaagaggaagaggagcacagtgaatgagaagcccaagtatgcagagatcagcagtgatgaggacaatgacagtgatgaggcctttgagagcagcaggaagaggcacaagaaggatgatgacaaggcctgggagtatgaggagcgggaccggcgcagcagcggggaccacagaagaagtggccacagccatgagggccgccgcagcagcggcggcggccgctacagaaacagaagccccagcgacagcgacatggaggactacagccccccacccagcctgtctgaggtggccaggaagatgaagaagaaggagaagcagaagaagaggaaggcctatgagcccaagctgaccccagaggagatgatggacagcagcaccttcaagcgcttcaccgccagcattgagaacatcctggacaacctggaggacatggacttcaccgcctttggagatgatgatgagatcccccaggagctgctgctgggcaagcaccagctgaatgagctgggcagcgagagcgccaagatcaaggccatgggcatcatggacaagctgagcacagacaagacagtgaaggtgctgaacatcctggagaagaacatccaggacggcagcaagctgagcaccctgctgaaccacaacaatgacacagaggaggaggagcggctgtggagggacctgatcatggagcgggtgaccaagtctgcagatgcctgcctgaccaccatcaacatcatgaccagccccaacatgcccaaggctgtgtacattgaagatgtgattgaaagagtcatccagtacaccaagttccacctgcagaacaccctgtacccccagtatgaccctgtgtaccgcctggacccccatggaggcggcctgctgagcagcaaggccaagagggccaagtgcagcacccacaagcagagggtgattgtgatgctgtacaacaaggtgtgtgacatcgtgagcagcctgtctgagctgctggagatccagctgctgacagacaccaccatcctgcaggtgtcctccatgggcatcacccccttctttgtggagaatgtgtctgagctgcagctgtgtgccatcaagctggtgacagctgtgttcagccgctatgagaagcaccggcagctgatcctggaggagatcttcaccagcctggcccggctgcccaccagcaagaggagcctgaggaacttccggctgaacagcagtgacatggatggagagcccatgtacatccagatggtgacagccctggtgctgcagctgatccagtgtgtggtgcacctgcccagcagcgagaaggacagcaatgctgaggaggacagcaacaagaagattgaccaggatgtggtgatcaccaacagctatgaaacagccatgaggacagcccagaacttcctgagcatcttcctgaagaagtgtggcagcaagcagggcgaggaggactaccggcccctgtttgaaaattttgtgcaggacctgctgagcacagtgaacaagccagagtggccagctgctgagctgctgctgagcctgctgggccgcctgctggtgcaccagttcagcaacaagagcacagagatggccctgcgggtggccagcctggactacctgggcaccgtggccgcccggctgaggaaggatgctgtgaccagcaagatggaccagggcagcattgaaagaatcctgaagcaggtgtctggaggagaagatgagatccagcagctgcagaaggccctgctggactacctggatgaaaatacagaaacagaccccagcctggtgttcagcaggaagttctacatcgcccagtggttccgggacaccaccctggagacagagaaggccatgaagagccagaaggatgaggagagcagcgagggcacccaccacgccaaggagattgagaccaccggccagatcatgcacagagcagaaaataggaagaagttcctgcggagcatcatcaagaccacccccagccagttcagcaccctgaagatgaacagcgacacagtggactatgatgatgcctgcctgattgtgcgctacctggcctccatgaggccctttgcccagagctttgacatctacctgacccagatcctgcgggtgctgggagaaaatgccatcgctgtgaggaccaaggccatgaagtgcctgtctgaggtggtggccgtggaccccagcatcctggcccggctggacatgcagaggggcgtgcacggccgcctgatggacaacagcacctctgtgcgggaggccgctgtggagctgctgggccgctttgtgctgtgccggccccagctggccgagcagtactatgacatgctgattgaaagaatcctggacaccggcatctctgtgaggaagagggtcatcaagatcctgcgggacatctgcatcgagcagcccaccttccccaagatcacagagatgtgtgtgaagatgatccggcgggtgaatgatgaggagggcatcaagaagctggtgaatgagaccttccagaagctgtggttcacccccaccccccacaatgacaaggaggccatgaccaggaagatcctgaacatcacagatgtggtggccgcctgccgggacaccggctatgactggtttgagcagctgctgcagaacctgctgaagtctgaggaggacagcagctacaagcctgtgaagaaggcctgcacccagctggtggacaacctggtggagcacatcctgaagtatgaggagagcctggccgacagcgacaacaagggcgtgaacagcggccgcctggtggcctgcatcaccaccctcttcctgttcagcaagatccggccccagctgatggtgaagcacgccatgaccatgcagccctacctgaccaccaagtgcagcacccagaatgacttcatggtgatctgcaatgtggccaagatcctggagctggtggtgcccctgatggagcaccccagcgagaccttcctggccaccatcgaggaggacctgatgaagctgatcatcaagtatggcatgacagtggtgcagcactgtgtgtcctgcctgggcgctgtggtgaacaaggtgacccagaacttcaagtttgtgtgggcctgcttcaaccgctactacggggccatcagcaagctgaagagccagcaccaggaggaccccaacaacaccagcctgctgaccaacaagccagccctgctgcggagcctcttcaccgtgggcgccctgtgccgccactttgattttgacctggaggacttcaagggcaacagcaaggtgaacatcaaggacaaggtgctggagctgctgatgtacttcaccaagcacagtgatgaggaggtgcagaccaaggccatcatcggcctgggctttgccttcatccagcaccccagcctgatgtttgagcaggaggtgaagaacctgtacaacaacatcctgagtgacaagaacagctctgtgaacctgaagatccaggtgctgaagaacctgcagacctacctgcaggaggaggacaccaggatgcagcaggccgaccgggactggaagaaggtggccaagcaggaggacctgaaggagatgggagatgtgagcagcggcatgagcagcagcatcatgcagctgtacctgaagcaggtgctggaggccttcttccacacccagagctctgtgcgccactttgccctgaatgtgattgccctgaccctgaaccagggcctcatccaccctgtgcagtgtgtgccctacctgattgccatgggcacagatcctgagcccgccatgaggaacaaggctgaccagcagctggtggagattgacaagaagtatgccggcttcatccacatgaaggctgtggccggcatgaagatgagctaccaggtgcagcaggccatcaacacctgcctgaaggaccctgtgcggggcttccggcaggatgagagcagcagcgccctgtgcagccacctgtacagcatgatccggggcaaccggcagcaccggcgggccttcctgatcagcctgctgaacctgtttgatgacacagccaagacagatgtgaccatgctgctgtacatcgctgacaacctggcctgcttcccctaccagacccaggaggagcccctcttcatcatgcaccacatcgacatcaccctgtctgtgtctggcagcaacctgctgcagagcttcaaggagagcatggtgaaggacaagaggaaggagaggaagagcagccccagcaaagaaaatgaaagcagtgacagcgaggaggaggtgtcccggcccaggaagagcaggaagagggtggacagcgacagcgacagcgacagtgaagatgacatcaacagcgtgatgaagtgcctgcctgagaacagcgcccccctcatcgagtttgccaacgtgtcccagggcatcctgctgctgctgatgctgaagcagcacctgaagaacctgtgtggcttcagtgacagcaagatccagaagtacagccccagcgagagcgccaaggtgtatgacaaggccatcaacaggaagacaggagtgcacttccaccccaagcagaccctggacttcctgcggagtgacatggccaacagcaagatcacagaggaggtgaagaggagcatcgtgaagcagtacctggacttcaagctgctgatggagcacctggaccctgatgaggaggaggaggagggggaggtgtctgccagcaccaatgccaggaacaaggccatcaccagcctgctgggcggcggcagccccaagaacaacacagctgctgagacagaagatgatgaaagtgatggagaagatcggggcggcggcaccagcggcgtgagaagaagaagaagccagaggatcagccagaggatcacctag

SEQ ID NO: 268320 - DNA, 8094 bp, Artificial Sequence
  derived and/or modified sequence
atgaacggcgacatgccccacgtgcccatcaccaccctggccggcattgctagcttgacggacttgctgaaccagcttccattgccctcaccacttccggccactactacaaagtctctgctgttcaatgccaggattgcagaggaggtgaactgcttgctggcctgcagagacgacaacctcgtttcacagttagtgcattcactgaaccaagtctctacagatcacattgagcttaaggataacctcggatctgacgacccggagggcgacatacccgtgttgctgcaagcagtcctggctaggtcacccaatgtttttcgggaaaagtccatgcagaataggtatgtccaatccggcatgatgatgtcgcagtacaagctaagccagaattccatgcattcttcccctgcgagttccaactaccagcaaaccacaatcagccacagcccatcatcaaggttcgtgcccccccaaacctcatccgggaatcggtttatgcctcaacagaactcgcccgtccctagcccttacgctccccagagccctgccggatacatgccatattctcatccctcttcctatactactcatcctcagatgcagcaggcatctgtctcttccccgattgttgccgggggtctccggaacattcatgacaataaggtttcgggacctctgtcgggcaacagtgctaatcaccatgcagataatcctagacacggcagttcggaagactatttgcatatggttcacagactttcttccgatgacggcgattccagcactatgcggaatgccgcttcattcccactgagaagccctcagcctgtttgtagcccggccggctccgagggaaccccgaagggctctcggcccccgctgatcctgcagtctcagagcctgccctgttctagtccacgagatgtgccacccgacattctgctagactcacccgaaagaaaacaaaaaaagcagaaaaaaatgaaattgggaaaagacgagaaagagcagtcagagaaggctgccatgtatgacatcattagttctccaagtaaggacagcaccaagctaacactgaggcttagccgagtgcggtcctccgacatggaccaacaggaggacatgatctctggagtggaaaattcaaatgtttcagagaatgacatcccatttaatgttcagtatcctggtcaaacctcaaagactccaattacgccccaggatataaataggcccctaaatgccgcccaatgtttgtctcagcaggagcagacggcctttttgcctgcaaatcaagtaccagtcttacagcaaaacacaagtgtcgccgctaaacagcctcaaactagtgtcgtccaaaatcaacagcagatttcccagcaaggccctatctatgacgaggtagaactagacgcactagcggagattgaacggattgaacgcgaatcagccattgagagagagcgtttctctaaggaggtgcaggacaaagacaagcctttgaagaagcgtaaacaggattcatacccgcaagaagccggaggcgctaccggcggcaacagaccagcctctcaggaaactgggtcgaccggcaatgggtcaagacctgctctgatggtaagcatcgacctgcaccaagctgggagggtggactcccaagcttctatcacccaggactcagacagcataaagaagccagaggagatcaagcagtgtaacgatgcacccgtctcagtgctgcaagaagacatcgtcgggagcctgaaatccaccccagagaatcatcccgagactcctaaaaagaaatccgatccggagctcagcaaaagtgagatgaaacagtctgaaagccgcctggcagaatccaagccgaacgagaaccgtttggttgaaaccaagagcagtgagaataaactggagactaaagtggaaacgcagaccgaagaactcaagcagaatgaatcacgaactacagaatgcaaacaaaacgagtcaaccatcgtggagcccaagcagaacgagaaccggttgtctgacactaagccaaacgataataaacagaataacggacgcagcgaaacgactaagagccggcctgaaaccccgaaacagaagggggagtcacgcccagagacaccgaagcaaaaatcggacggccacccggagacccccaaacaaaaaggggacgggcgaccagagacacctaagcagaagggagagtcacggccagagactcctaaacagaaaaatgaggggcggccagagaccccaaagcacagacatgacaataggcgggacagtggaaaaccctctacagaaaaaaagcctgaggtctcaaagcataagcaggatactaaaagtgattccccaaggcttaagagcgaaagggccgaagccctaaaacagagaccagatggaaggtctgtgtcggagagcctgagacgggaccatgataacaaacagaaatcggacgacaggggggaatccgaacgtcacagaggcgatcagagtcgcgtccggcgacccgaaactctgcgaagctctagtcgtaacgaacacggaattaagtcagactcgtcaaagaccgataagctcgagagaaaacaccgccacgaaagcggtgattccagagagcgaccgagcagcggcgagcaaaaatcgcgcccagattccccgagagtaaagcaaggggactcaaacaaatccagatccgacaagctgggatttaagagtcccacttccaaggatgacaagagaaccgaggggaataaatccaaagtcgacaccaacaaggcgcatcccgataataaagcggaattcccttcctatctcctggggggaaggagtggcgctcttaagaattttgtgatacctaagatcaagagagacaaggatggcaatgtgactcaggagacaaaaaaaatggaaatgaaaggcgagcctaaagataaagtggagaagatcggcctggttgaagatctgaacaagggcgccaagcccgttgtggtcctgcagaagctgtctctggacgatgtccaaaaactgataaaggacagagaggacaaatctcggtccagtttgaaacctataaagaataagccaagcaaatctaataagggctctattgatcagtctgtattgaaagaattacctcccgaactactggccgagattgaatcaaccatgccactttgtgaacgcgtgaaaatgaataagcggaagcgatctacggtcaacgagaagccgaagtacgcagagatttcgtccgatgaagacaatgacagcgacgaggcctttgaaagctccagaaaacgccacaaaaaagatgatgataaggcatgggagtatgaagagagggatcggcgtagctcaggggaccatagaaggtccgggcactctcatgaaggtcggcggtctagcgggggtggccggtataggaataggagtccatcagactccgatatggaggactattcccctccgccatccttgagcgaagtggcccgcaaaatgaagaaaaaagagaaacagaagaagaggaaagcttatgagcccaagctaaccccggaggaaatgatggactccagcactttcaagcgatttaccgcgtctatcgagaacattctggacaacctggaagacatggactttaccgcattcggcgacgacgatgaaattcctcaggaactgctgctgggcaagcatcagttgaacgagcttggttccgagtctgctaagatcaaggcgatgggtatcatggacaagttgagcacagacaagaccgtgaaagtcctgaacatcttggaaaaaaacatccaggacgggagcaagctttccactcttctgaatcataacaatgataccgaggaggaggagcgcctctggagagatctgatcatggagcgagttacaaagtctgcggacgcttgtctgaccaccataaatatcatgacctctcccaatatgcccaaggccgtgtacattgaggatgtgattgaacgggtgatccagtataccaaattccatctccagaataccctgtacccccagtacgacccggtgtaccgcctcgacccacacggcggtggtttactgagttccaaggcgaagagggctaagtgttcaactcataagcagcgggtgattgtgatgctgtataacaaggtttgtgatatcgtttcctctctatctgagcttctcgagatacaactactcactgatacaacaatcctgcaagtgagctcaatggggatcactcctttctttgtggaaaacgtctctgaactgcaactctgcgcaatcaaactcgttaccgctgtttttagccgctacgaaaaacatcgacagctcatcctggaagaaattttcacctccctggctcggctccccacaagtaagcggtctttgcgcaattttcggctgaacagctccgacatggacggcgagcccatgtacatccaaatggtcaccgctctggtgctccagttgatacagtgtgtggtgcatcttccatcatccgagaaggattcaaatgccgaggaagattccaataagaaaattgaccaggacgtcgtcataaccaactcctatgaaactgcaatgaggaccgctcagaattttctgtctattttcctaaagaagtgtggatctaagcagggagaagaggattaccgtccacttttcgagaactttgttcaggatctgctgtcgaccgtcaataaaccagagtggcccgccgccgagttactgctgagtctactcggaaggcttctggttcaccagttcagtaacaagtccactgagatggcactgcgggtcgccagcctggattatttggggacagtcgccgcccgcttgcgtaaggatgccgttacctccaagatggaccaaggttcaattgagcgcattttgaagcaggtctcaggcggtgaggacgaaatccaacagttgcaaaaggccctcctggattacctggatgagaacaccgaaacggatccatcactcgtcttttccaggaagttctacatagctcaatggttccgtgacactaccctggaaaccgagaaagccatgaagtcacaaaaagacgaggagtcttctgagggaactcaccatgcaaaggagattgagaccacaggccagattatgcaccgggctgagaatcgtaaaaagttcctccgaagtattattaaaactacgccgtctcagttttcaactctcaagatgaactccgacaccgtcgattacgatgatgcatgtctcatagtccgatatttggcaagcatgcgcccctttgcccagagttttgacatatatctaacccaaatcttgcgggtgctgggcgaaaacgcaatagccgtccgcaccaaggccatgaaatgcctgtctgaggtcgtggcagttgacccctcaatactggcccggctcgacatgcagaggggagtccatgggaggctgatggataatagcacctcagtgcgcgaggctgccgtcgagttgttgggtcgattcgtgctctgccgtcctcagctcgccgagcagtactacgacatgctgatcgaacgaatactggatacaggaatcagcgtgaggaagcgagtcatcaagatactccgcgacatctgtatagaacagcctaccttccccaagattactgaaatgtgtgtgaagatgatacgcagagttaatgatgaggagggcattaagaaacttgtaaatgagacctttcaaaagctgtggtttaccccgaccccgcacaatgacaaagaggccatgaccagaaagatattgaatattaccgacgttgtcgcggcatgccgggacacgggttatgattggttcgagcagctactgcaaaatcttcttaagtccgaggaggactcctcgtataaaccagtgaagaaagcatgcacacagctggttgataatttggtggaacatatcttaaagtacgaggagtccctggccgattctgacaacaagggcgtcaatagcggccgcctggtggcctgtatcactacattgtttctcttttcaaagatcaggccccaactcatggttaaacatgccatgacaatgcagccctacctaacaaccaaatgttccactcagaacgacttcatggtgatctgtaatgtggcgaagatcctagagctagtcgtgccacttatggaacacccatccgagaccttcttggctaccatcgaagaggatctgatgaagctcatcattaagtatgggatgactgtcgttcagcattgtgtgtcctgtcttggagcggtggtaaacaaagtgactcagaatttcaagttcgtatgggcctgcttcaataggtactacggtgccatatcgaaacttaaaagccagcaccaagaagaccctaacaatacgtcactgctgacgaataaacctgccctgctgagaagcctgtttaccgtcggagctctttgcaggcacttcgacttcgatcttgaagatttcaaggggaacagcaaggtgaatatcaaggacaaggtgttagaactccttatgtacttcaccaaacactccgacgaggaagtccaaactaaagccattatcgggcttgggttcgctttcattcaacacccttccctgatgttcgaacaagaagttaagaacttatataacaacattctctccgacaagaactctagcgtgaacctaaaaatccaagtattgaaaaatttgcagacataccttcaggaagaagatacgcggatgcagcaagcagaccgcgactggaagaaagtggccaaacaggaggatctcaaagagatgggcgacgtctcctcaggaatgagtagctcaatcatgcagttgtacctcaaacaagtgcttgaggctttctttcacacccaatcaagcgttcgtcacttcgccctgaatgtcattgcactgacactcaatcaaggtctcattcacccggtgcagtgtgtcccatatctgatcgcgatgggaactgacccggagccggcaatgcgaaacaaagctgatcagcagctcgtggaaattgataaaaagtatgccggttttatccatatgaaagctgtggccggcatgaaaatgtcgtatcaggtacagcaagccatcaacacatgtctgaaggacccggtccgaggctttcgtcaggacgagagctcaagtgcactgtgctcacacctgtactctatgatacgcggcaaccgtcagcatagacgagctttcctgatttctctgctgaatctttttgatgatacagccaagaccgatgtgacaatgctgctgtatattgctgataatttagcctgctttccgtatcagactcaagaagagcctttatttatcatgcatcatatcgacatcactctgtccgtgtccggaagtaaccttctgcagtcctttaaggaaagcatggtcaaggacaagagaaaggagcggaagtcaagtcctagcaaggagaacgaatcatcagactccgaggaggaggtatctcggccccgcaagtccagaaagagggtggacagcgattccgattcagattctgaggatgacatcaatagcgttatgaagtgcctgcctgaaaatagcgcccctcttatcgagtttgccaacgtctctcagggtattctgttgttattgatgcttaagcagcaccttaagaacctgtgtggattttcagactcaaaaatccaaaagtatagcccaagtgaatccgcaaaagtttatgataaggccattaaccgtaagaccggtgtgcacttccaccccaaacagacactcgatttcctgaggagcgatatggccaatagtaaaatcaccgaagaggtcaagcgaagtatcgtcaaacagtatctagacttcaagctgcttatggaacatttggacccagacgaagaggaggaagaaggggaggtgtccgcgagcactaatgccagaaacaaggccattacctctctcttaggcgggggctcccccaaaaataacacagccgctgagacagaagatgacgagagcgatggggaggaccgtgggggcggcacatccggggtgcggcgacgccgtagtcagcgaatttctcagcggattacctag

SEQ ID NO: 268321 - DNA, 8729 bp, Artificial Sequence
  derived and/or modified sequence
acggaacgagagagagacacacacagggctccttccccccgccctcccccccctccctccgtcggtaccgactcacccgacaccaccaagccgcagggagggacgcccccgccgacaggagaattggttcccgggcccgcggcgatgcccccccggtagctcgggcccgtggtcgggtgtttgtgagtgtttctatgtgggagaaggaggaggaggaggaagaagaagcaacgatttgtcttctcggctggtctccccccggctctacatgttccccgcactgaggagacggaagaggagccgtagccaccccccctcccggcccggattatagtctctcgccacagcggcctcggcctccccttggattcagacgccgattcgcccagtgtttgggaaatgggaagtaatgacagctggcacctgaactaagtacttttataggcaacaccattccagaaattcaggatgaatggggatatgccccatgtccccattactactcttgcggggattgctagtctcacagacctcctgaaccagctgcctcttccatctcctttacctgctacaactacaaagagccttctctttaatgcacgaatagcagaagaggtgaactgccttttggcttgtagggatgacaatttggtttcacagcttgtccatagcctcaaccaggtatcaacagatcacatagagttgaaagataaccttggcagtgatgacccagaaggtgacataccagtcttgttgcaggccgtcctggcaaggagtcctaatgttttcagggagaaaagcatgcagaacagatatgtacaaagtggaatgatgatgtctcagtataaactttctcagaattccatgcacagtagtcctgcatcttccaattatcaacaaaccactatctcacatagcccctccagccggtttgtgccaccacagacaagctctgggaacagatttatgccacagcaaaatagcccagtgcctagtccatacgccccacaaagccctgcaggatacatgccatattcccatccttcaagttacacaacacatccacagatgcaacaagcatcggtatcaagtcccattgttgcaggtggtttgagaaacatacatgataataaagtttctggtccgttgtctggcaattcagctaatcatcatgctgataatcctagacatggttcaagtgaggactacctacacatggtgcacaggctaagtagtgacgatggagattcttcaacaatgaggaatgctgcatcttttcccttgagatctccacagccagtatgctcccctgctggaagtgaaggaactcctaaaggctcaagaccacctttaatcctacaatctcagtctctaccttgttcatcacctcgagatgttccaccagatatcttgctagattctccagaaagaaaacaaaagaagcagaagaaaatgaaattaggcaaggatgaaaaagagcagagtgagaaagcggcaatgtatgatataattagttctccatccaaggactctactaaacttacattaagactttctcgtgtaaggtcttcagacatggaccagcaagaggatatgatttctggtgtggaaaatagcaatgtttcagaaaatgatattccttttaatgtgcagtacccaggacagacttcaaaaacacccattactccacaagatataaaccgcccactaaatgctgctcaatgtttgtcgcagcaagaacaaacagcattccttccagcaaatcaagtgcctgttttacaacagaacacttcagttgctgcaaaacaaccccagacttctgtggtacagaatcaacaacagatatcacaacagggacctatatatgatgaagtggaattggatgcattggctgaaattgagcgaatagagagagaatcagctattgaaagggagcgcttctcaaaagaagttcaagataaagataagcctttgaaaaaaagaaaacaagattcttacccacaggaggctgggggtgctacaggaggtaatagaccagcttctcaggagacgggttctacgggaaatgggtcaaggccagcattaatggttagcattgatcttcatcaggcaggaagagtggactctcaggcttctataactcaggattcagactccataaaaaagcctgaagaaatcaaacaatgtaatgatgcacctgtttctgttcttcaggaagatattgttggaagtcttaaatctacaccagaaaaccatcctgagacacctaaaaaaaagtctgatcctgagctttcaaagagtgaaatgaaacaaagtgaaagtagattagcagaatctaaaccaaatgaaaaccgattggtggagacaaaatcaagtgaaaataagttagaaactaaagttgagacccaaacagaagaacttaaacagaatgagagcagaacaactgaatgcaaacaaaacgagagcaccatagttgagcctaaacaaaatgaaaatagactgtctgacacaaaaccaaatgacaacaaacaaaataatggcagatcagaaacaacaaaatcaaggcctgaaaccccaaagcaaaagggtgaaagccggcctgagactccaaaacaaaagagtgatgggcatcctgaaaccccaaaacagaagggtgatggaaggcctgaaactccaaagcaaaaaggtgagagccgccctgaaactccaaagcaaaaaaatgaagggcgacctgaaacaccaaaacacaggcatgacaataggagggattctggaaagccatctacagagaaaaaacctgaagtgtctaaacataaacaagatactaaatctgactcacctcggttaaaatcagaacgagctgaagccttaaagcagagacctgatgggcgatctgtttctgagtcactaagacgtgaccatgataataaacaaaaatcagatgacaggggtgaatcagagcgacatcgaggggatcagtctagggttcgaagaccagaaacattgagatcctctagtagaaatgaacatggcattaaatctgatagttcaaaaactgataaactagaacgaaaacacaggcatgaatcaggggactcaagggaaagaccatcttctggggaacaaaaatcaagacctgacagtcctcgtgttaaacaaggagattctaataaatcaagatctgataaacttggttttaaatcaccaactagtaaagatgacaaaaggacagagggtaacaagagtaaagtagacactaataaagcacaccctgacaataaggcagaatttccaagttatttgttggggggcaggtctggtgcgttgaaaaattttgtcattccgaaaatcaagagggataaagatggcaatgttactcaggagacaaagaaaatggaaatgaaaggagagccgaaagacaaagtagaaaaaataggattagttgaagatctaaataaaggagctaagcctgtagttgtgctacaaaaactgtctttggatgatgttcagaaacttattaaagatagagaggacaaatcaagaagttcccttaaacctatcaagaataaaccatcaaagtcaaataaaggtagtatagatcaatcagtgttaaaagaattaccccctgaactcctggcagaaattgagtccaccatgccactttgtgaacgtgtgaaaatgaacaaacgcaagcgtagcacagttaatgaaaagccaaaatatgctgaaatcagttcagatgaagataatgatagtgatgaagcttttgaatcctctaggaaacgacataaaaaagatgatgataaagcttgggaatatgaagagcgtgacagaagaagctctggggatcataggagaagtggccactctcatgaaggaagaaggagttcaggtggtggtcgttatcgaaaccgaagtccgtcagattctgacatggaagattattctcctcctcccagccttagtgaggttgctaggaaaatgaagaaaaaagaaaaacagaagaaaaggaaagcatatgaaccaaaactaacacctgaagaaatgatggactcttcaacttttaagagattcacagcctcaatagagaatattttggataatttggaagatatggattttactgcgtttggtgatgatgatgaaattcctcaggaactgctcttaggaaaacatcagcttaatgaacttggcagtgaatctgctaaaataaaagcaatgggtataatggataagctttcaactgacaaaactgtgaaagtcttaaatatcttggagaagaatattcaggatgggtcaaagctttccactttgttaaatcataataacgatactgaagaagaagaaaggttatggagagaccttattatggagagagttacaaaatcagcggatgcttgtcttacaactatcaacattatgacatcccctaacatgccaaaagctgtgtacattgaggatgtaattgaaagagttatacagtacactaaatttcatttgcagaatacactttatcctcagtatgatcctgtttacagattagatcctcatggaggaggcttattaagttcaaaagcaaaacgggctaaatgttctacccataagcagagagtaatagtaatgctttataacaaagtttgtgacattgttagcagcttatcagaattgctagagatacaacttcttacagacacaacaattcttcaggtttcatctatgggaataacaccattttttgtggaaaatgtcagtgaactacagttgtgtgccattaagttagtcactgcagtattctcaagatatgaaaaacataggcagttaattttggaagaaatttttacttcacttgcaagattaccaaccagcaagaggagtttaaggaacttcaggttaaacagtagtgatatggatggagaacctatgtatattcagatggttacagcactggttttacaacttattcagtgtgtggtacacttaccatcatcagagaaggactctaatgcagaagaagattcaaataaaaaaattgaccaggatgttgtcattactaactcttatgaaacagctatgcgaacagcccaaaacttcctctccatcttccttaaaaaatgtggtagtaagcaaggtgaagaagattacagaccactgtttgaaaattttgttcaagaccttctttcaacagtcaataagcctgaatggccagctgctgaactactccttagtttgttagggagactgttggttcatcagttcagtaacaagtcaacagagatggctttaagagtggcatctcttgattaccttggaactgttgctgcacggctaagaaaagatgctgttacaagcaaaatggatcaaggatctatagaacgcattttaaaacaggtttcaggaggggaagatgaaatccaacaattacaaaaagcattgcttgattacttggatgaaaacactgagactgatccttcactagtgttttctcgtaaattctatatagcccagtggtttcgagacacaactctggaaacagaaaaagcaatgaaatcacaaaaagatgaagaatcatctgaaggaacacatcatgcaaaggaaattgagacaactggccaaattatgcatcgagctgaaaaccgaaaaaagtttcttagaagcattatcaaaaccacaccttctcagtttagcacattaaagatgaactctgatactgtggactatgatgatgcttgcttgattgttcgatacttggcctccatgaggccgtttgcccagagctttgatatttatttgacacagatcctacgagttcttggtgaaaatgcaattgctgttcgaacaaaagccatgaagtgtttgtctgaggttgttgctgtagaccccagtattctagcaaggcttgatatgcaacgaggtgttcatggacgattgatggataattcgactagtgtccgagaagcagcagtagaattactaggtcgatttgtcctttgtcgacctcagcttgctgaacagtattatgatatgctgattgaaagaatattggatactggtatcagtgtcaggaaaagagtaataaagattctcagagacatttgtattgaacaaccaacatttccaaaaatcacagaaatgtgtgtaaaaatgattcgcagagtcaatgatgaagagggcattaagaaattagtaaatgaaacattccagaaactctggtttactccaactccacacaatgacaaagaagcaatgacaaggaaaattttaaacattaccgatgtggttgcagcatgcagagatactggatatgactggtttgagcaactgcttcaaaacttgttgaagtccgaagaggattcctcatataaacctgtgaagaaagcttgtactcaacttgttgataacctagttgagcacattcttaaatatgaggaatctctagctgactctgacaataaaggtgtgaattctggaagattggtagcttgcataaccactttgttcttattcagcaaaataagaccccagctcatggttaaacatgcaatgactatgcaaccataccttaccactaaatgtagtacgcaaaatgatttcatggttatctgcaatgttgcaaaaatcctagagctagttgtaccactgatggagcatccaagtgaaacttttcttgccactattgaggaagatctaatgaagctcatcatcaaatatggcatgactgtagtgcaacattgtgtgagctgtcttggagctgttgtaaataaagtgacacaaaattttaaatttgtgtgggcttgtttcaatagatactatggtgccatttcaaaattaaaaagtcaacaccaagaggacccaaataacacttcacttctaacaaacaaaccagcacttcttagatcccttttcaccgttggagcactatgtcggcattttgattttgatctggaagattttaaaggcaacagcaaggttaacataaaagataaagtacttgaactattgatgtattttacaaaacactcagatgaagaagtacaaacaaaagctatcattggtctaggatttgcctttattcagcatccaagtctaatgttcgagcaagaagtgaagaatctatataataatattttatctgataagaactcctcagtcaatttaaaaatacaagtgttaaaaaacctccagacctacctacaagaagaagatacacgtatgcagcaggcagatagagactggaagaaagttgcaaaacaggaagacttaaaagaaatgggtgatgtttcctcagggatgagtagttccatcatgcagctttatctcaaacaggtgcttgaggcattttttcacacccagtcaagtgtacgccactttgccctaaatgtcattgcattgactctaaatcaaggtcttattcatccagttcagtgtgtgccatatttaattgctatgggcacagacccagaacctgctatgcggaacaaggctgatcagcaacttgtggaaatagacaaaaaatatgctggattcattcatatgaaagcagtggctggtatgaagatgtcttaccaggtacaacaggcaatcaacacatgcctaaaagatcctgtaaggggtttcagacaagacgagtcctctagcgctttgtgttcacacctttactccatgatccgtggaaaccgccaacacagacgagcctttcttatttctttactcaacctctttgatgacacagcaaaaacagacgtgactatgctcttgtatatagcagacaatctagcctgttttccataccagacacaggaagagccgttgtttataatgcatcatatagacattacactctcagtttctggtagtaacctactgcagtcattcaaggagtctatggtaaaggacaaaaggaaagagagaaaatcatcacctagtaaggaaaatgagtcaagcgacagtgaagaagaagtttccaggcctcggaagtcacggaaacgtgtagattcagattcagattcagattcagaagacgatataaattcagtgatgaaatgtttgccagaaaattcagctcctttaatcgaatttgcaaatgtgtcccagggtattttattacttctcatgttaaaacaacatttgaagaatctttgtggattttctgatagtaaaattcagaagtactctccatctgaatctgcaaaagtatatgataaagcgataaaccgaaaaacaggagttcattttcatccaaaacaaacactggacttcctgcggagtgacatggctaattccaaaatcacagaagaggtgaaaaggagtatagtaaaacagtatctagatttcaaacttctcatggaacatctggaccctgatgaagaagaagaagaaggggaggtttcagctagcacaaatgctcggaacaaagcaattacctcactgcttggaggaggcagccctaaaaataatacagcagcagagacagaagatgatgaaagtgatggggaggatagaggaggaggcacttcaggggtgaggcggaggaggagtcaacgtatttcgcagcgtattacgtaaaatgatttttatgtgcttatatatgtcagtctattaaatgtacaccaagtaatgtaatacttaaaagagaaaacattttgtagatagagattctctacttacccgtttatacatccttttgtagaaagtttaacataaaagacaataaaaaaacagaaatgagattt

SEQ ID NO: 268322 - DNA, 8093 bp, Artificial Sequence
  derived and/or modified sequence
atgaacggcgatatgccccacgtgccaatcaccaccctggccggtatagcctcactgacagacctcctgaatcaactgccactccctagtcctcttccggctacgaccaccaaatccttgttatttaacgcgagaatagcggaggaggttaactgtctcctcgcctgtagagacgacaacctggtgagccagttggtgcattccctgaatcaggtgtcaacagaccatatcgagctgaaggacaatttgggtagcgacgaccccgagggcgatattccagttctgctgcaggccgtgttggcccgatctccaaatgtgttccgggaaaagtcaatgcagaatcggtacgttcagagtggcatgatgatgtcccagtataaactgagtcagaattcaatgcatagcagccccgcttcttctaattaccagcaaaccactatttctcactcaccatccagtcgtttcgttcctcctcagaccagcagcggcaacaggttcatgcctcaacaaaattctcctgtcccaagtccctacgcacctcagagtccagccggatacatgccttactcacatccctcctcttataccactcacccacagatgcaacaggcctccgtctcaagccccatcgttgccggtggactgcgcaacattcacgataacaaagtgagtgggcctttatcaggtaattcggctaaccatcacgctgacaatccaagacacggctctagcgaagattatctgcatatggtgcatcgcttgagctctgacgacggcgactcaagcaccatgcgtaacgccgcatcctttcctctgcgttcgccccagcccgtctgttctcccgctggctcggaaggtacacctaagggatctagaccccctctgattctgcagagccagtccttgccgtgttccagtcccagagacgtccccccagacatcctcttggattctccagagcggaagcaaaagaagcaaaagaagatgaaactcgggaaggatgagaaggagcagagtgagaaagctgccatgtacgatatcattagctcgccatctaaggacagcaccaagctcacccttcggctctccagggtgaggagttcagacatggaccaacaggaggacatgatttctggcgtggaaaactctaacgtgtccgagaatgatatcccgttcaacgtacagtacccaggacaaacgagcaagacccctattacaccccaagatattaatcgcccactcaacgctgcccaatgcctaagccagcaggagcagaccgcgtttctgccagctaatcaggtaccagtattgcaacagaacacatcggtagcagcgaagcagccacaaacatcagtcgtgcaaaatcaacagcagatttctcagcaaggccctatctacgatgaggttgagctggatgcactggccgagatcgagagaatcgaaagggagtccgctatcgagcgcgagaggttttctaaagaggtgcaagataaagacaagcccctgaagaaaagaaaacaggactcatatccccaggaagctggcggagcaacaggaggaaaccgcccagcctcccaagagacggggagtaccggcaatggtagtaggcccgctctgatggtgtccattgacttgcaccaggccggacgggtcgattcacaggccagtatcacacaagactcagacagcataaaaaagcccgaggaaattaagcagtgtaatgatgctcccgtgagcgtgctgcaggaggacatagttgggtctctgaaatctacccccgagaatcatcccgagacacctaagaaaaagtcagatcctgaattatctaagtctgagatgaaacagagcgaaagccgactggccgagtctaagcctaacgagaacaggttagttgaaacaaaatcatccgagaataagctggagactaaagtcgagacacagacagaggaattaaagcagaatgagtcccgcaccaccgaatgtaagcagaatgaatcgacgattgtcgaacccaagcagaatgagaataggctgtccgatacaaagcctaacgataacaaacagaacaatggcagatcggagactactaaatcccgccctgagactccaaaacagaagggcgagtctagaccggagacgcccaagcaaaagagcgacggccatcctgagaccccaaagcagaaaggagatgggaggcctgagactcctaagcaaaagggtgaatcgcgtcccgagacgcccaagcagaagaacgaggggaggcccgagaccccaaaacaccgtcatgataatcgtcgcgactccggcaagccaagcaccgaaaagaaaccagaggtatctaagcacaagcaggacacaaaatctgacagtcctagacttaaaagcgaaagagccgaggcccttaagcagcgaccagacggacggagtgtaagcgagagcctgagacgggaccacgacaataagcagaaaagcgacgaccggggtgaaagcgaacggcacagaggagatcagagtagggttcgacggccagaaacattgcgaagcagctccaggaacgagcacggcataaagtctgacagctctaagactgacaaactggagagaaaacacaggcatgaaagcggcgactcaagggaaagaccctcttccggagagcagaaaagtcgcccagactcccccagggtcaagcagggcgactcaaataagagccgatctgacaagctcggtttcaagtcccctaccagcaaagacgataagcgcaccgaggggaacaagtctaaggtagatacgaacaaagcacacccagataacaaggccgagttccctagctatttgctggggggtagaagcggcgctctaaagaacttcgtcatccccaagattaaaagggacaaggatggaaatgtcacacaggagaccaagaagatggagatgaaaggagaaccgaaagataaggtcgaaaagattgggctcgttgaggaccttaacaagggagccaaacctgtggttgtcctacaaaaactgagcctggatgacgttcagaaactgattaaagaccgggaagacaagtcgcggtcaagtcttaagcccatcaaaaacaaaccatccaagagtaataaagggagtatagaccagtcagtcctgaaagaactcccacctgagctcctggcagagatcgaaagcacaatgccactgtgtgaaagggtgaagatgaacaaacggaagcgcagcaccgtgaacgagaaaccaaaatatgcggagatatccagcgacgaggataacgattcagacgaagctttcgagagctccagaaagcgacataaaaaagatgatgacaaagcttgggaatacgaagagcgggacaggagatcctccggcgatcatcgcaggagtggtcactcacatgaagggagacgcagcagcggaggtggaagatatagaaaccgaagtccatccgatagcgacatggaggactattctcctccgccttctctctctgaggttgcaagaaagatgaagaaaaaagaaaagcaaaagaagcgaaaagcatacgagcccaaacttacccctgaagagatgatggactcctctactttcaaacggtttacggcctcaattgaaaacatcctggacaacctggaggacatggactttacagcttttggcgacgatgatgaaattccacaggagctcttgctgggaaagcatcaacttaatgagctgggttctgagtccgcaaagataaaagccatggggatcatggacaaattgtcaaccgataagactgtaaaggtcctgaacattctggagaagaacatccaggatggtagcaaactgtctacattgctgaatcacaataacgacaccgaggaggaggaacgactctggcgggatctaatcatggagagggtcaccaaaagcgccgacgcctgcctgacaacaattaacatcatgactagtcctaatatgccgaaggcagtttacatcgaggacgtcatcgagagagttatccagtacaccaagtttcatctacagaacaccctgtacccgcaatatgatccagtgtaccggttggaccctcacggaggaggcctgctgtcttctaaagctaaacgcgcaaaatgctcaacacataagcagagagtaattgtaatgctttataataaagtctgcgacatagtgagcagtctaagcgaactgttggaaatacagctgctgacggatacaaccatcctgcaggtgagttcaatgggcatcacacccttctttgtcgaaaacgtaagcgaattacagttatgtgctattaagcttgtcacagcggtgttctccagatacgagaagcacagacaactgatcttggaagagatctttacctccctcgctcggcttcccactagtaagcgctcgcttaggaatttcagactgaactcatccgacatggatggggagcccatgtacattcagatggtcaccgcattggtcttgcagttgattcagtgtgtggtccacttgccgtcaagtgaaaaagactccaatgctgaggaagactcaaataagaaaatcgatcaagacgttgtgattactaactcatacgagacagcaatgcggacagcccagaattttctgtctattttcctaaaaaaatgtggctccaaacaaggcgaggaggactatagacccctctttgagaactttgttcaagacctgctgagcactgtgaataagcccgaatggccggctgcagaactgctgctgtccttactgggcaggctgctggtgcaccagttttctaataagtcgactgagatggccttgcgcgttgcgtcactggactacctgggaactgttgccgctcgcctgaggaaggacgcagtgacctcaaaaatggaccaagggtccatagagcgcatcttgaagcaggtgagtgggggagaagacgagatacagcagctccagaaagcactgctggattaccttgacgagaatacggaaacagatccgagcctggttttcagtaggaaattctacatagcccagtggtttagggatacaacactggagaccgagaaggccatgaaatcccagaaggatgaggagtcatcagaaggcacacaccacgcaaaagaaatcgaaacaaccggtcagatcatgcatcgcgcagagaaccgtaagaaattcctgaggtctatcatcaaaaccaccccttcccaattctccaccctgaaaatgaactctgacacagtcgactacgatgatgcttgcctcattgtaagatacctggctagtatgagaccatttgctcagtccttcgatatctacctgacccagattctgagagtgctgggcgaaaatgcaattgccgtacggaccaaagccatgaaatgtctgtccgaggttgtggccgtggatccctctattttggcccgactggatatgcaacggggtgttcatggaaggcttatggataactcgacttctgttagagaggccgctgtcgagttacttggcaggtttgtactctgccgcccacagctggccgagcagtattacgatatgctgatagagcggatcctagatactggaatcagcgtgcgaaaacgtgtgattaagattctccgcgatatttgtatcgagcagcccacatttccaaaaatcacagaaatgtgtgtgaaaatgatccgacgggtaaatgacgaggagggcattaagaagttggtgaacgagacttttcagaaactctggttcacaccgactccccacaacgacaaggaagctatgacccgcaaaatactgaacatcacggatgttgtggccgcatgccgggataccggctatgactggtttgagcagcttttgcagaaccttctcaaaagcgaggaggactcttcttacaagcccgtaaaaaaagcttgcactcagctggtcgacaatctggttgagcacattctcaagtacgaagagagcctagccgactcggataataaaggggtgaattctggaagactggtcgcctgtatcacaacgctctttctgtttagtaagatccgaccccaattgatggtgaagcatgcgatgaccatgcagccctatctcacgactaagtgttccacccaaaatgactttatggtgatttgcaacgtggctaaaatcctagagctagtggtgccactgatggagcacccctcagaaaccttcctcgctaccatagaggaggacctgatgaagttgattattaaatatgggatgaccgttgtgcagcactgcgtgagctgtctgggggcagtggtcaacaaggtgacccaaaatttcaaattcgtctgggcttgcttcaatcgctattacggtgctatcagcaaactgaagagccagcatcaggaggaccctaacaacacctcgctgctcacaaataaacctgcactgctcaggtcactcttcactgtcggggcactgtgccggcatttcgacttcgatttagaggactttaaaggtaatagtaaagtcaacattaaggataaagtgctggaattgctgatgtacttcacaaaacatagtgacgaagaagtgcagactaaggccattatcgggttggggtttgctttcatccaacaccctagtctgatgttcgagcaagaggtcaaaaacttatataacaatatactgagtgacaaaaatagcagcgtgaatctcaagatccaggtgctgaaaaacttgcaaacatacctacaggaggaggatacacgcatgcagcaagccgatagggattggaaaaaggtggccaagcaggaggacctcaaggaaatgggggacgtgtcttccgggatgtcctccagcatcatgcagctgtacttgaagcaggtgctggaggcgttttttcatacccaatcttccgtaaggcatttcgctctgaacgtgatagctttgaccttgaaccaggggctcatacaccctgtccagtgtgtgccgtacctcattgcaatgggtaccgaccctgaacctgcaatgcgcaataaggccgaccaacagctggtggagatcgacaagaagtatgcgggtttcatccacatgaaggctgtggctggaatgaaaatgagttaccaagtgcagcaagccattaacacctgtttgaaggatcctgttcgcggatttcggcaggacgaaagttcttccgccctctgctcgcatctgtatagcatgattagaggcaacagacaacatcgcagagcattcctgatcagcttgcttaatcttttcgacgacacagcaaaaaccgatgtgactatgctgctttatattgcagataatcttgcttgcttcccctaccagactcaggaggaacctttgtttatcatgcatcacatcgatataactctgagcgtgtccggctccaatttactgcaatcctttaaggagagtatggtcaaagataagaggaaggaaagaaaaagtagcccaagtaaagagaacgagtcatcggactccgaagaggaagtctcccggccacggaagtccaggaagcgcgttgacagcgactctgattctgattctgaagacgatatcaactcagtgatgaagtgtctgcccgaaaattccgcacccctcatcgagtttgccaatgtgagtcagggcattctgcttttgctgatgctcaagcagcacctgaaaaacttgtgcggcttttccgattctaaaatccagaagtatagcccttccgaatcagccaaggtctacgataaagccatcaatagaaagacaggtgtgcactttcaccccaagcagacattggactttttaagaagtgacatggccaattcaaaaatcaccgaagaagtgaagcgatctatcgtcaagcagtatctcgactttaagctgctaatggagcatctggacccagacgaggaagaagaggaaggggaagtttctgcaagcacaaatgctcggaataaggcgattaccagcttactcgggggtggctcacccaagaataacacggccgctgagactgaggacgatgaatctgacggcgaggatcgcggtggaggcactagtggcgtaagacgtcggagaagccagagaatatctcagcgaatcacata

SEQ ID NO: 268323 - DNA, 8094 bp, Artificial Sequence
  derived and/or modified sequence
atgaacggcgacatgccccacgtgcccatcaccaccctggccggcatcgccagcctgaccgacctgctgaaccagctgcccctgcccagccccctgcccgccaccaccaccaagagcctgctgttcaacgccagaatcgccgaggaggtgaactgcctgctggcctgcagagacgacaacctggtgagccagctggtgcacagcctgaaccaggtgagcaccgaccacatcgagctgaaggacaacctgggcagcgacgaccccgagggcgacatccccgtgctgctgcaggccgtgctggccagaagccccaacgtgttcagagagaagagcatgcagaacagatacgtgcagagcggcatgatgatgagccagtacaagctgagccagaacagcatgcacagcagccccgccagcagcaactaccagcagaccaccatcagccacagccccagcagcagattcgtgcccccccagaccagcagcggcaacagattcatgccccagcagaacagccccgtgcccagcccctacgccccccagagccccgccggctacatgccctacagccaccccagcagctacaccacccacccccagatgcagcaggccagcgtgagcagccccatcgtggccggcggcctgagaaacatccacgacaacaaggtgagcggccccctgagcggcaacagcgccaaccaccacgccgacaaccccagacacggcagcagcgaggactacctgcacatggtgcacagactgagcagcgacgacggcgacagcagcaccatgagaaacgccgccagcttccccctgagaagcccccagcccgtgtgcagccccgccggcagcgagggcacccccaagggcagcagaccccccctgatcctgcagagccagagcctgccctgcagcagccccagagacgtgccccccgacatcctgctggacagccccgagagaaagcagaagaagcagaagaagatgaagctgggcaaggacgagaaggagcagagcgagaaggccgccatgtacgacatcatcagcagccccagcaaggacagcaccaagctgaccctgagactgagcagagtgagaagcagcgacatggaccagcaggaggacatgatcagcggcgtggagaacagcaacgtgagcgagaacgacatccccttcaacgtgcagtaccccggccagaccagcaagacccccatcaccccccaggacatcaacagacccctgaacgccgcccagtgcctgagccagcaggagcagaccgccttcctgcccgccaaccaggtgcccgtgctgcagcagaacaccagcgtggccgccaagcagccccagaccagcgtggtgcagaaccagcagcagatcagccagcagggccccatctacgacgaggtggagctggacgccctggccgagatcgagagaatcgagagagagagcgccatcgagagagagagattcagcaaggaggtgcaggacaaggacaagcccctgaagaagagaaagcaggacagctacccccaggaggccggcggcgccaccggcggcaacagacccgccagccaggagaccggcagcaccggcaacggcagcagacccgccctgatggtgagcatcgacctgcaccaggccggcagagtggacagccaggccagcatcacccaggacagcgacagcatcaagaagcccgaggagatcaagcagtgcaacgacgcccccgtgagcgtgctgcaggaggacatcgtgggcagcctgaagagcacccccgagaaccaccccgagacccccaagaagaagagcgaccccgagctgagcaagagcgagatgaagcagagcgagagcagactggccgagagcaagcccaacgagaacagactggtggagaccaagagcagcgagaacaagctggagaccaaggtggagacccagaccgaggagctgaagcagaacgagagcagaaccaccgagtgcaagcagaacgagagcaccatcgtggagcccaagcagaacgagaacagactgagcgacaccaagcccaacgacaacaagcagaacaacggcagaagcgagaccaccaagagcagacccgagacccccaagcagaagggcgagagcagacccgagacccccaagcagaagagcgacggccaccccgagacccccaagcagaagggcgacggcagacccgagacccccaagcagaagggcgagagcagacccgagacccccaagcagaagaacgagggcagacccgagacccccaagcacagacacgacaacagaagagacagcggcaagcccagcaccgagaagaagcccgaggtgagcaagcacaagcaggacaccaagagcgacagccccagactgaagagcgagagagccgaggccctgaagcagagacccgacggcagaagcgtgagcgagagcctgagaagagaccacgacaacaagcagaagagcgacgacagaggcgagagcgagagacacagaggcgaccagagcagagtgagaagacccgagaccctgagaagcagcagcagaaacgagcacggcatcaagagcgacagcagcaagaccgacaagctggagagaaagcacagacacgagagcggcgacagcagagagagacccagcagcggcgagcagaagagcagacccgacagccccagagtgaagcagggcgacagcaacaagagcagaagcgacaagctgggcttcaagagccccaccagcaaggacgacaagagaaccgagggcaacaagagcaaggtggacaccaacaaggcccaccccgacaacaaggccgagttccccagctacctgctgggcggcagaagcggcgccctgaagaacttcgtgatccccaagatcaagagagacaaggacggcaacgtgacccaggagaccaagaagatggagatgaagggcgagcccaaggacaaggtggagaagatcggcctggtggaggacctgaacaagggcgccaagcccgtggtggtgctgcagaagctgagcctggacgacgtgcagaagctgatcaaggacagagaggacaagagcagaagcagcctgaagcccatcaagaacaagcccagcaagagcaacaagggcagcatcgaccagagcgtgctgaaggagctgccccccgagctgctggccgagatcgagagcaccatgcccctgtgcgagagagtgaagatgaacaagagaaagagaagcaccgtgaacgagaagcccaagtacgccgagatcagcagcgacgaggacaacgacagcgacgaggccttcgagagcagcagaaagagacacaagaaggacgacgacaaggcctgggagtacgaggagagagacagaagaagcagcggcgaccacagaagaagcggccacagccacgagggcagaagaagcagcggcggcggcagatacagaaacagaagccccagcgacagcgacatggaggactacagccccccccccagcctgagcgaggtggccagaaagatgaagaagaaggagaagcagaagaagagaaaggcctacgagcccaagctgacccccgaggagatgatggacagcagcaccttcaagagattcaccgccagcatcgagaacatcctggacaacctggaggacatggacttcaccgccttcggcgacgacgacgagatcccccaggagctgctgctgggcaagcaccagctgaacgagctgggcagcgagagcgccaagatcaaggccatgggcatcatggacaagctgagcaccgacaagaccgtgaaggtgctgaacatcctggagaagaacatccaggacggcagcaagctgagcaccctgctgaaccacaacaacgacaccgaggaggaggagagactgtggagagacctgatcatggagagagtgaccaagagcgccgacgcctgcctgaccaccatcaacatcatgaccagccccaacatgcccaaggccgtgtacatcgaggacgtgatcgagagagtgatccagtacaccaagttccacctgcagaacaccctgtacccccagtacgaccccgtgtacagactggacccccacggcggcggcctgctgagcagcaaggccaagagagccaagtgcagcacccacaagcagagagtgatcgtgatgctgtacaacaaggtgtgcgacatcgtgagcagcctgagcgagctgctggagatccagctgctgaccgacaccaccatcctgcaggtgagcagcatgggcatcacccccttcttcgtggagaacgtgagcgagctgcagctgtgcgccatcaagctggtgaccgccgtgttcagcagatacgagaagcacagacagctgatcctggaggagatcttcaccagcctggccagactgcccaccagcaagagaagcctgagaaacttcagactgaacagcagcgacatggacggcgagcccatgtacatccagatggtgaccgccctggtgctgcagctgatccagtgcgtggtgcacctgcccagcagcgagaaggacagcaacgccgaggaggacagcaacaagaagatcgaccaggacgtggtgatcaccaacagctacgagaccgccatgagaaccgcccagaacttcctgagcatcttcctgaagaagtgcggcagcaagcagggcgaggaggactacagacccctgttcgagaacttcgtgcaggacctgctgagcaccgtgaacaagcccgagtggcccgccgccgagctgctgctgagcctgctgggcagactgctggtgcaccagttcagcaacaagagcaccgagatggccctgagagtggccagcctggactacctgggcaccgtggccgccagactgagaaaggacgccgtgaccagcaagatggaccagggcagcatcgagagaatcctgaagcaggtgagcggcggcgaggacgagatccagcagctgcagaaggccctgctggactacctggacgagaacaccgagaccgaccccagcctggtgttcagcagaaagttctacatcgcccagtggttcagagacaccaccctggagaccgagaaggccatgaagagccagaaggacgaggagagcagcgagggcacccaccacgccaaggagatcgagaccaccggccagatcatgcacagagccgagaacagaaagaagttcctgagaagcatcatcaagaccacccccagccagttcagcaccctgaagatgaacagcgacaccgtggactacgacgacgcctgcctgatcgtgagatacctggccagcatgagacccttcgcccagagcttcgacatctacctgacccagatcctgagagtgctgggcgagaacgccatcgccgtgagaaccaaggccatgaagtgcctgagcgaggtggtggccgtggaccccagcatcctggccagactggacatgcagagaggcgtgcacggcagactgatggacaacagcaccagcgtgagagaggccgccgtggagctgctgggcagattcgtgctgtgcagaccccagctggccgagcagtactacgacatgctgatcgagagaatcctggacaccggcatcagcgtgagaaagagagtgatcaagatcctgagagacatctgcatcgagcagcccaccttccccaagatcaccgagatgtgcgtgaagatgatcagaagagtgaacgacgaggagggcatcaagaagctggtgaacgagaccttccagaagctgtggttcacccccaccccccacaacgacaaggaggccatgaccagaaagatcctgaacatcaccgacgtggtggccgcctgcagagacaccggctacgactggttcgagcagctgctgcagaacctgctgaagagcgaggaggacagcagctacaagcccgtgaagaaggcctgcacccagctggtggacaacctggtggagcacatcctgaagtacgaggagagcctggccgacagcgacaacaagggcgtgaacagcggcagactggtggcctgcatcaccaccctgttcctgttcagcaagatcagaccccagctgatggtgaagcacgccatgaccatgcagccctacctgaccaccaagtgcagcacccagaacgacttcatggtgatctgcaacgtggccaagatcctggagctggtggtgcccctgatggagcaccccagcgagaccttcctggccaccatcgaggaggacctgatgaagctgatcatcaagtacggcatgaccgtggtgcagcactgcgtgagctgcctgggcgccgtggtgaacaaggtgacccagaacttcaagttcgtgtgggcctgcttcaacagatactacggcgccatcagcaagctgaagagccagcaccaggaggaccccaacaacaccagcctgctgaccaacaagcccgccctgctgagaagcctgttcaccgtgggcgccctgtgcagacacttcgacttcgacctggaggacttcaagggcaacagcaaggtgaacatcaaggacaaggtgctggagctgctgatgtacttcaccaagcacagcgacgaggaggtgcagaccaaggccatcatcggcctgggcttcgccttcatccagcaccccagcctgatgttcgagcaggaggtgaagaacctgtacaacaacatcctgagcgacaagaacagcagcgtgaacctgaagatccaggtgctgaagaacctgcagacctacctgcaggaggaggacaccagaatgcagcaggccgacagagactggaagaaggtggccaagcaggaggacctgaaggagatgggcgacgtgagcagcggcatgagcagcagcatcatgcagctgtacctgaagcaggtgctggaggccttcttccacacccagagcagcgtgagacacttcgccctgaacgtgatcgccctgaccctgaaccagggcctgatccaccccgtgcagtgcgtgccctacctgatcgccatgggcaccgaccccgagcccgccatgagaaacaaggccgaccagcagctggtggagatcgacaagaagtacgccggcttcatccacatgaaggccgtggccggcatgaagatgagctaccaggtgcagcaggccatcaacacctgcctgaaggaccccgtgagaggcttcagacaggacgagagcagcagcgccctgtgcagccacctgtacagcatgatcagaggcaacagacagcacagaagagccttcctgatcagcctgctgaacctgttcgacgacaccgccaagaccgacgtgaccatgctgctgtacatcgccgacaacctggcctgcttcccctaccagacccaggaggagcccctgttcatcatgcaccacatcgacatcaccctgagcgtgagcggcagcaacctgctgcagagcttcaaggagagcatggtgaaggacaagagaaaggagagaaagagcagccccagcaaggagaacgagagcagcgacagcgaggaggaggtgagcagacccagaaagagcagaaagagagtggacagcgacagcgacagcgacagcgaggacgacatcaacagcgtgatgaagtgcctgcccgagaacagcgcccccctgatcgagttcgccaacgtgagccagggcatcctgctgctgctgatgctgaagcagcacctgaagaacctgtgcggcttcagcgacagcaagatccagaagtacagccccagcgagagcgccaaggtgtacgacaaggccatcaacagaaagaccggcgtgcacttccaccccaagcagaccctggacttcctgagaagcgacatggccaacagcaagatcaccgaggaggtgaagagaagcatcgtgaagcagtacctggacttcaagctgctgatggagcacctggaccccgacgaggaggaggaggagggcgaggtgagcgccagcaccaacgccagaaacaaggccatcaccagcctgctgggcggcggcagccccaagaacaacaccgccgccgagaccgaggacgacgagagcgacggcgaggacagaggcggcggcaccagcggcgtgagaagaagaagaagccagagaatcagccagagaatcacctag

SEQ ID NO: 268324 - protein, 1299 aa, Artificial Sequence
  derived and/or modified sequence
HRMSFHPGRGCPRGRGGHGARPSAPSFRPQNLRLLHPQQPPVQYQYEPPSAPSTTFSNSPAPNFLPPRPDFVPFPPPMPPSAQGPLPPCPIRPPFPNHQMRHPFPVPPCFPPMPPPMPCPNNPPVPGAPPGQGTFPFMMPPPSMPHPPPPPVMPQQVNYQYPPGYSHHNFPPPSFNSFQNNPSSFLPSANNSSSPHFRHLPPYPLPKAPSERRSPERLKHYDDHRHRDHSHGRGERHRSLDRRERGRSPDRRRQDSRYRSDYDRGRTPSRHRSYERSSRSPSREKKRARWEEEKDRWSDNQSSGKDKNYTSIKEKEPEETMPDKNEEEEEELLKPVWIRCTHSENYYSSDPMDQVGDSTVVGTSRLRDLYDKFEEELGSRQEKAKAARPPWEPPKTKLDEDLESSSESECESDEDSTCSSSSDSEVFDVIAEIKRKKAHPDRLHDELWYNDPGQMNDGPLCKCSAKARRTGIRHSIYPGEEAIKPCRPMTNNAGRLFHYRITVSPPTNFLTDRPTVIEYDDHEYIFEGFSMFAHAPLTNIPLCKVIRFNIDYTIHFIEEMMPENFCVKGLELFSLFLFRDILELYDWNLKGPLFEDSPPCCPRFHFMPRFVRFLPDGGKEVLSMHQILLYLLRCSKALVPEEEIANMLQWEELEWQKYAEECKGMIVTNPGTKPSSVRIDQLDREQFNPDVITFPIIVHFGIRPAQLSYAGDPQYQKLWKSYVKLRHLLANSPKVKQTDKQKLAQREEALQKIRQKNTMRREVTVELSSQGFWKTGIRSDVCQHAMMLPVLTHHIRYHQCLMHLDKLIGYTFQDRCLLQLAMTHPSHHLNFGMNPDHARNSLSNCGIRQPKYGDRKVHHMHMRKKGINTLINIMSRLGQDDPTPSRINHNERLEFLGDAVVEFLTSVHLYYLFPSLEEGGLATYRTAIVQNQHLAMLAKKLELDRFMLYAHGPDLCRESDLRHAMANCFEALIGAVYLEGSLEEAKQLFGRLLFNDPDLREVWLNYPLHPLQLQEPNTDRQLIETSPVLQKLTEFEEAIGVIFTHVRLLARAFTLRTVGFNHLTLGHNQRMEFLGDSIMQLVATEYLFIHFPDHHEGHLTLLRSSLVNNRTQAKVAEELGMQEYAITNDKTKRPVALRTKTLADLLESFIAALYIDKDLEYVHTFMNVCFFPRLKEFILNQDWNDPKSQLQQCCLTLRTEGKEPDIPLYKTLQTVGPSHARTYTVAVYFKGERIGCGKGPSIQQAEMGAAMDALEKYNFPQMAHQKRFIERKYRQELKEMRWEREHQEREPDETEDIKK

SEQ ID NO: 268325 - DNA, 3900 bp, Artificial Sequence
  derived and/or modified sequence
caccgtatgagcttccaccctggcagagggtgtccccggggcaggggaggtcacggtgccaggccttccgccccatctttccgcccgcagaacttgaggttgttacacccacaacagccgcccgtacagtaccagtacgaacccccatcagctccgagtaccactttctcaaattccccggcacccaattttctccccccgcggccagacttcgtaccttttcccccaccgatgccaccgagcgcccaggggcccctaccaccctgtcccatccgaccccctttccccaaccatcaaatgcgacatcccttccccgtccccccctgctttccaccaatgcctccaccgatgccctgccccaacaatccacctgtccccggagctcccccgggtcaaggaactttcccctttatgatgccgcctccctctatgcctcatcccccaccaccacctgtcatgccacagcaggtgaattaccagtatccacctggctactcccatcataacttccctcctcctagttttaattctttccagaacaaccccagctcctttttaccatccgcaaacaactctagtagtccccactttagacacctgccaccgtatcctttaccaaaggctccctctgaacgccgatcacccgagcgactcaagcactacgatgatcacagacatagagaccattctcatgggaggggagaacggcataggagcctcgaccgaagggagcgagggaggtcgcctgacagaagaaggcaggatagtcgctaccgtagcgactacgaccgaggtagaactccctcacgccatagatcttacgagcgatcatcgcgctcgcccagtcgtgaaaaaaagcgcgcgagatgggaggaagagaaagaccgatggtctgataatcagtcctctggtaaagataagaactacacaagcattaaagagaaggaaccagaggagactatgccagataagaatgaggaagaggaagaagaactactcaagccagtgtggatccggtgtacccatagtgagaactactatagcagcgatccaatggatcaggtgggcgacagtaccgtggtggggacatcgcgtctgcgagatctctacgacaaatttgaggaagagctcgggagtcgtcaggaaaaggccaaagctgcccgcccgccctgggagccaccaaaaaccaagctggacgaggacctggagtcaagttcggaatctgagtgcgagagcgatgaggattcgacctgctcatccagctctgacagcgaggtctttgacgtgatcgcagaaattaaaagaaagaaggcccatcctgacaggcttcatgacgagctgtggtataatgaccccggtcagatgaacgacggacccctgtgcaagtgctccgcgaaggcaaggcggactggtatacgacactctatataccctggagaagaagctattaagccatgcaggcccatgaccaataacgctggccggctgtttcattaccggattacagtctcacccccaaccaatttccttaccgaccgccccaccgtcatcgagtacgacgaccacgaatacatctttgagggattctctatgtttgctcacgcacctctgaccaacattcccctttgtaaagttatccggttcaatattgattacacgatccactttatcgaggagatgatgccagaaaatttttgcgtgaaaggcttagaactattcagtctgttcctgttcagggacatcctggagttatatgactggaatctgaaaggaccactttttgaagacagccccccctgctgccctcggttccatttcatgccccgattcgtaaggttcttaccagacggcgggaaggaagtcttatcaatgcatcaaattctgctgtatctgttaaggtgctccaaagccctggtgccagaagaggaaattgccaatatgctccagtgggaagagttggagtggcagaaatatgctgaagagtgcaagggcatgatcgttaccaatcctgggacgaagccatcctccgttcggatcgatcaacttgatcgggagcagttcaaccctgatgttatcacatttccgatcatcgtgcactttggcattcgcccagcccagctgagctatgccggagacccccagtaccagaaactatggaaaagctatgtgaaattgaggcaccttctggccaactcgcctaaagtgaagcagacggacaagcagaaattagcccaacgcgaggaggcgctccagaagatacggcagaaaaacaccatgcgcagggaagtgaccgtggagttgtcctctcaggggttttggaaaacaggaatccgcagcgatgtgtgccagcatgccatgatgctgccagtactgacccaccacataagataccaccagtgtctgatgcatctggataagctgatcggttacacctttcaggataggtgtttgttacaactggccatgactcacccgagtcatcacctgaatttcggaatgaatccagaccacgcgaggaactccctgagcaactgtggcataaggcagccaaaatatggggatcgaaaagtccaccacatgcacatgcgaaagaagggtatcaacaccctgatcaacatcatgagccggctggggcaggatgacccaaccccgtcacggattaatcacaatgaacgcttagagtttttgggggacgccgtcgtggagttcctgacatctgtacatctctactatctgttcccctctctggaagagggcggactcgcaacttatcgcacagctatcgtgcagaatcagcatctggcaatgttggcaaagaaattggaactggatagatttatgttatacgctcacggaccagacttgtgtcgcgaatcagacctgagacatgccatggctaattgcttcgaagcccttataggagctgtgtatctcgaggggtctctcgaagaagcaaagcagttattcggaagactgctgtttaacgaccctgacttgagggaggtatggctgaactaccctttacaccccttgcagttacaggagccgaatacggatcgccagctaatcgaaacttctccggtgctgcagaaacttaccgaatttgaagaagctataggtgtcatctttacccatgtccggctgctggcccgggccttcacgctgcgcactgtggggttcaatcacctgaccctcgggcataaccagaggatggaatttttaggcgactctattatgcagctggtggcgacggagtatctctttattcactttcccgatcaccacgaagggcaccttactctgctgcgttcatctctagtaaacaaccgtactcaagccaaagtggccgaggagctcggcatgcaggaatacgccattactaacgataaaactaagaggcctgtggccttgcgcactaagactctagccgatcttctggagagtttcatagctgctctttacatcgacaaagacctcgaatacgtccacactttcatgaacgtatgtttttttccaaggcttaaagagttcatactcaaccaagattggaatgaccctaaatcacagctccagcagtgctgtctcacacttagaactgagggcaaagagcccgatataccactctacaagacactgcaaaccgtgggaccatcccatgctcggacgtataccgtggcggtgtactttaagggagaacgcattgggtgcgggaagggcccctccattcaacaggctgagatgggagctgccatggacgcattggagaaatataacttccctcagatggcgcatcaaaagaggtttattgaacgcaagtacagacaggagctgaaggagatgcggtgggagagagagcaccaagagagagaaccagacgaaacagaagatataaaaaaatag

SEQ ID NO: 268326 - DNA, 3900 bp, Artificial Sequence
  derived and/or modified sequence
cacaggatgtccttccaccctggccggggctgcccccggggccggggcggccacggggcccggcccagcgcccccagcttccggccccagaacctgcggctgctgcacccccagcagccccctgtgcagtaccagtatgagccccccagcgcccccagcaccaccttcagcaacagccctgcccccaacttcctgccccccaggccagactttgtgcccttccccccacccatgcctccttctgcccagggccccctgcccccctgccccatccggccccccttccccaaccaccagatgaggcaccccttccctgtgcccccctgcttcccccccatgcccccacccatgccctgccccaacaacccccctgtgcctggggcccctcctggccagggcaccttccccttcatgatgcctcctccttccatgccccaccccccacctcctcctgtgatgccccagcaggtgaactaccagtacccacctggctacagccaccacaacttccccccacccagcttcaacagcttccagaacaaccccagcagcttcctgcccagcgccaacaacagcagcagcccccacttccgccacctgcccccctaccccctgcccaaggcccccagcgagcggcgcagccctgagcggctgaagcactatgatgaccaccgccaccgggaccacagccacggccgcggggagcggcacaggagcctggaccggcgggagcggggccgcagcccagacagaagacggcaggacagccgctacagaagtgactatgaccggggccgcacccccagccgccacaggagctatgaaagaagcagccgcagccccagccgggagaagaagagggcccgctgggaggaggagaaggaccgctggagcgacaaccagagcagcggcaaggacaagaactacaccagcatcaaggagaaggagcctgaggagaccatgccagacaagaatgaggaggaggaggaggagctgctgaagcctgtgtggatccgctgcacccacagcgagaactactacagcagtgaccccatggaccaggtgggggacagcacagtggtgggcaccagccggctgcgggacctgtatgacaagtttgaggaggagctgggcagccggcaggagaaggccaaggccgcccggcccccctgggagccccccaagaccaagctggatgaggacctggagagcagcagcgagagtgaatgtgagagtgatgaggacagcacctgcagcagcagcagtgacagcgaggtgtttgatgtgattgctgagatcaagaggaagaaggcccacccagaccggctgcatgatgagctgtggtacaatgaccccggccagatgaatgatggccccctgtgcaagtgcagcgccaaggcccggaggacaggcatccgccacagcatctacccaggagaggaggccatcaagccctgccggcccatgaccaacaatgccggccgcctcttccactaccgcatcaccgtgtccccacccaccaacttcctgacagaccggcccaccgtgattgaatatgatgaccacgagtacatctttgagggcttctccatgtttgcccacgcccccctgaccaacatccccctgtgcaaggtgatccgcttcaacatcgactacaccatccacttcatcgaggagatgatgcctgagaacttctgtgtgaagggcctggagctgttcagcctcttcctgttccgggacatcctggagctgtatgactggaacctgaagggccccctgtttgaggacagccccccctgctgcccccgcttccacttcatgcccaggtttgtgcgcttcctgcctgatggcggcaaggaggtgctgtccatgcaccagatcctgctgtacctgctgcgctgcagcaaggccctggtgcctgaggaggagatcgccaacatgctgcagtgggaggagctggagtggcagaagtatgcagaagaatgtaaaggcatgattgtgaccaaccctggcaccaagcccagctctgtgagaattgaccagctggaccgggagcagttcaacccagatgtgatcaccttccccatcatcgtgcacttcggcatccggcctgcccagctgtcctatgctggggacccccagtaccagaagctgtggaagagctatgtgaagctgcggcacctgctggccaacagccccaaggtgaagcagacagacaagcagaagctggcccagcgggaggaggccctgcagaagatccggcagaagaacaccatgaggcgggaggtgacagtggagctgagcagccagggcttctggaagacaggcatccgcagtgatgtgtgccagcacgccatgatgctgcctgtgctgacccaccacatccgctaccaccagtgcctgatgcacctggacaagctgattggctacaccttccaggaccgctgcctgctgcagctggccatgacccaccccagccaccacctgaactttggcatgaacccagaccacgccaggaacagcctgagcaactgtggcatccggcagcccaagtacggggacaggaaggtgcaccacatgcacatgaggaagaagggcatcaacaccctcatcaacatcatgagccggctgggccaggatgaccccacccccagccgcatcaaccacaatgaaaggctggagttcctgggagatgctgtggtggagttcctgacctctgtgcacctgtactacctgttccccagcctggaggagggcggcctggccacctacagaacagccatcgtgcagaaccagcacctggccatgctggccaagaagctggagctggaccgcttcatgctgtatgcccacggccctgacctgtgccgggagagtgacctgcggcatgccatggccaactgctttgaggccctgattggagctgtgtacctggagggcagcctggaggaggccaagcagctgtttggccgcctgctcttcaatgaccctgacctgcgggaggtgtggctgaactaccccctgcaccccctgcagctgcaggagcccaacacagaccggcagctgattgagaccagccctgtgctgcagaagctgacagaatttgaggaggccatcggggtcatcttcacccacgtgcggctgctggcccgggccttcaccctgaggacagtgggcttcaaccacctgaccctgggccacaaccagaggatggagttcctgggggacagcatcatgcagctggtggccacagagtacctgttcatccacttcccagaccaccacgagggccacctgaccctgctgcggagcagcctggtgaacaacagaacccaggccaaggtggccgaggagctgggcatgcaggagtatgccatcaccaatgacaagaccaagaggcctgtggccctgcggaccaagaccctggccgacctgctggagagcttcatcgccgccctgtacatcgacaaggacctggagtatgtgcacaccttcatgaatgtgtgcttcttcccccggctgaaggagttcatcctgaaccaggactggaatgaccccaagagccagctgcagcagtgctgcctgaccctgaggacagagggcaaggagccagacatccccctgtacaagaccctgcagacagtgggccccagccacgcccggacctacacagtggccgtgtacttcaagggggagcgcatcggctgtgggaagggccccagcatccagcaggccgagatgggcgccgccatggatgccctggagaagtacaacttcccccagatggcccaccagaagcgcttcattgaaaggaagtaccggcaggagctgaaggagatgcgctgggagcgggagcaccaggagcgggagccagatgaaacagaggacatcaagaagtag

SEQ ID NO: 268327 - DNA, 3900 bp, Artificial Sequence
  derived and/or modified sequence
caccggatgagcttccaccccggccggggctgcccccggggccggggtggccacggcgcacgcccatccgcccctagctttagaccacaaaatttgcgcctgctccacccacagcagccccctgtgcagtaccagtatgaacctccttccgcaccttccactactttttccaatagccctgcacctaacttcctccctccacggccagatttcgtcccatttcccccacctatgcctccgtccgcccaaggccccctgccaccttgtcccatacggccccctttccctaaccatcaaatgcggcacccctttcccgtccctccttgcttcccaccaatgcccccaccaatgccctgtcctaataaccccccagtgccgggagcgccccccggacagggaacgttccctttcatgatgcctcccccaagcatgcctcatcctccgccaccccccgtgatgcctcagcaggtcaactaccaataccctcccggctattctcatcataacttcccgcctccttccttcaacagctttcagaataacccatcttctttcctcccaagcgcaaacaactcctcaagcccacatttccgccatctcccgccttatccactacctaaggcaccgagcgaacgcagaagtccagagcggctgaagcattatgacgatcaccgtcaccgcgaccacagtcacggaagaggggaacggcatcgttctctggatagaagagagagaggccgctccccggataggaggagacaggatagccgatatcgctctgattatgaccgcggacgaactccaagccgccacaggagctatgaacgatctagcagatccccctcaagagaaaagaagagggcccggtgggaagaggagaaggatagatggtctgacaaccaaagttccggtaaggacaaaaactacaccagcattaaggagaaagagcctgaggagaccatgccagacaaaaatgaggaggaagaagaggagctacttaagccagtgtggatacgctgtacccacagtgaaaactattacagctccgacccgatggaccaagtcggcgattcaaccgttgtggggacttccaggctaagagacctttatgacaaattcgaggaagagcttggctctagacaggagaaggctaaggccgctcggcctccttgggagcccccgaagacaaagctggacgaagacctggagagctcttcagagagtgaatgtgaaagcgatgaggactctacatgttcatctagctcagattccgaagtctttgatgtcattgccgaaatcaagaggaaaaaggcacaccccgacaggctgcatgacgaattatggtacaacgacccgggccagatgaacgatgggcctctttgcaagtgcagcgcaaaggcacgacgaactggtattaggcatagtatctaccccggggaggaggccatcaagccatgccgaccaatgactaacaatgctgggaggctgtttcattatagaatcactgtttcccccccaactaactttctgacagacaggcctaccgtaatagagtacgatgaccacgaatacatattcgaggggttctccatgtttgcacatgcccctctgacaaacattcccttgtgtaaagttatccgctttaatatagactataccatccattttatcgaggaaatgatgcccgagaatttctgtgtgaagggacttgaactgttcagcctgttcctgttccgtgacatcttagagctctatgactggaatctcaagggccccctttttgaagactcacctccttgttgcccccggtttcactttatgcctagattcgttagattcttgcccgacggggggaaagaggtgctgagcatgcaccaaatcctgctatatttactgcgatgttccaaggctttggtgcccgaggaggagattgccaacatgctccagtgggaggaactcgaatggcaaaaatatgccgaggaatgtaagggtatgatagtaaccaacccgggtaccaaaccctcatctgtgcgaatcgaccagctggacagggaacagtttaaccccgacgttattacttttcccataatcgtgcactttgggatccgccctgcccagctgagctacgccggagaccctcagtatcagaaactgtggaaatcctatgtgaaattgcgacacctgctggctaacagccctaaggtgaagcagactgacaagcagaagttagcgcaaagagaagaggccctgcagaagatccgccagaaaaacactatgagaagggaggttacagtggagttgagctcccagggcttttggaaaaccggaataaggtccgatgtgtgtcaacacgccatgatgctccccgtactgacacaccacattagataccaccagtgcttgatgcaccttgacaaattgattggctacacctttcaggacagatgcctcctgcagttggctatgacacacccatctcaccacttgaattttggaatgaatcccgatcacgcgcgcaatagcctgagtaactgtggaattaggcaaccgaaatatggcgaccggaaggtccatcacatgcacatgcgcaagaagggaattaatacactgatcaacattatgtctagacttgggcaggacgaccctaccccctcccgcatcaaccataatgaaaggttggaatttctgggcgacgctgtggtggaattccttactagtgtccacctctactatctgttccccagccttgaagagggtgggctggctacgtacaggaccgccattgtacagaatcagcatttagcgatgttggctaaaaaactcgagctggatcggtttatgctatacgcccacggaccagacctgtgccgagaatccgatctgagacatgccatggccaactgtttcgaagccctcatcggcgccgtctatcttgaggggagtctggaggaggccaagcagctgttcggcaggctgctatttaacgatcccgacctccgggaggtgtggctcaactaccctctgcaccctctccaattacaagagccgaacacagatcgccagctaatcgaaacttctccagtgctccagaaactgacagagtttgaagaggctatcggcgtgatttttacccacgtaagattattggctagagctttcaccctacgaacggttggatttaaccatctcacactgggccacaatcagcgcatggaattccttggagactcgattatgcagctcgttgctactgagtacctgtttatccacttcccagaccatcatgagggccacctaaccctgctccggtcttcactggtgaataacagaactcaagcaaaggttgcggaggaactaggcatgcaggagtatgctatcacgaatgacaaaaccaagagacccgtggccctcaggactaagacactggccgacttgctggaaagcttcattgccgctctgtacatagacaaggacctggagtatgtccacacatttatgaatgtatgttttttcccgcgtcttaaggaatttatcctaaatcaggactggaatgaccctaaatcgcaactccagcaatgttgcctgaccctgagaaccgaggggaaggagcctgacatcccactctataagacattacagactgtgggaccatctcacgcacggacttacaccgtcgctgtatacttcaagggcgagcggataggatgtgggaaaggtccttctatacagcaggcagagatgggagctgccatggatgctctcgaaaagtacaacttcccacaaatggcacatcaaaaacggttcatcgagcggaagtacagacaggaattaaaggagatgagatgggaaagagaacatcaagaacgcgaaccagacgagaccgaggatatcaagaaatag

SEQ ID NO: 268328 - DNA, 3900 bp, Artificial Sequence
  derived and/or modified sequence
catagaatgagcttccatcctgggcgtggctgcccacgcggaaggggcggacatggagccagacctagcgccccatcgttccgccctcagaatctgcggttactccacccacagcagcctcctgtccagtatcagtacgaacccccaagtgcccctagcactaccttttccaatagccccgctcctaacttcctcccaccgagacccgattttgttcccttcccccctccaatgccgccaagcgcacagggaccactccccccttgtccaattagacccccttttccaaaccatcagatgagacacccttttcccgtaccaccgtgcttcccaccgatgcctcccccaatgccttgtcctaacaatcctcccgttcccggagctcctcccggacagggaacgtttccctttatgatgcctccaccctcaatgccccacccaccccctccacctgtcatgccacagcaggtaaactaccagtatccaccgggttatagccatcacaactttcctcccccttccttcaatagctttcaaaacaacccaagctctttcctgccttccgccaataattccagctcccctcatttcagacacctgcccccatacccgctgcctaaggcaccctcagagcggagatcgcccgaacgactcaaacactacgacgatcacagacacagggaccattcgcacgggaggggtgagagacacaggtctttggatcggcgagaaaggggccgttctcccgacagaaggagacaggactcccgttacagaagcgactatgataggggccgtaccccgtcgcgccaccggtcctacgagcgtagctccagatctccctctcgagagaagaagagagctcgctgggaagaagaaaaagaccgctggtccgacaaccaatccagcggaaaggacaagaattacacaagcattaaagagaaggaacctgaagaaaccatgcctgataagaatgaggaggaggaagaggagctgcttaaacctgtttggataaggtgcacacactccgagaattattactccagtgacccaatggatcaggtcggggattcgacagtcgtcggcacttccaggctgcgcgatctgtacgacaaattcgaggaggagctaggtagtaggcaagaaaaagcaaaggccgcaaggccgccttgggaacctcctaaaacaaaactggacgaagatctggagtccagtagcgagtccgaatgtgagagcgacgaagacagtacatgcagttcttcctcagattctgaggtgtttgacgtcatcgcagaaatcaaacgaaagaaggctcacccggataggcttcacgacgagctctggtacaacgaccccggtcagatgaatgatggtccgttgtgtaaatgctccgccaaggcccgtaggacaggtattcggcactccatctatccaggggaagaggcaattaagccttgtcgacctatgaccaacaatgcgggacgtctttttcactataggatcacagtctctccacccaccaattttctgaccgatcggcctacagtaattgagtacgatgaccacgagtatatcttcgaggggttctccatgtttgcacatgcaccattaaccaacattcccttatgcaaggtgatcaggttcaacatagactataccattcactttatagaggagatgatgcctgagaacttttgtgtaaaaggcctggaactcttctctctcttcttgttcagggacatcctcgagctatacgactggaacctgaagggacctcttttcgaagattctcctccttgctgtcccagattccactttatgccgcgttttgtcagattcctaccagacggcggaaaggaagtgctcagcatgcatcaaatccttttgtaccttcttaggtgcagtaaggccctggtgcctgaggaggaaatagctaatatgctgcaatgggaggagctggagtggcaaaagtatgcagaggaatgtaaggggatgattgtgacaaatccaggaacaaaaccttctagtgtgcggatcgaccagcttgaccgggagcagtttaatcccgatgtgatcactttccccatcattgtccacttcggcatacggcctgcacagctgtcttatgccggtgacccccagtatcaaaagttgtggaagagttatgtgaaactgcgccacttgttggctaacagtcccaaagtgaagcaaacagataagcagaagctggcccagcgggaagaggcacttcagaaaattcggcagaagaataccatgcggcgtgaggttaccgttgaactgtccagccagggattttggaagactggcatacgaagcgacgtttgtcagcatgcaatgatgctccccgtgctaactcatcacatccgatatcaccaatgtcttatgcatcttgacaagctcatcggctatacctttcaggaccgctgcctgctgcaactagctatgacacacccatcccatcacttgaatttcggcatgaaccccgaccatgcccgtaacagcttgtctaattgtggcatcagacagcccaaatacggcgatcgaaaggtgcatcacatgcacatgagaaaaaagggcattaacacactcatcaatatcatgtctcgactgggccaagacgatcccactccgtcccggatcaatcataacgagagactggagttccttggcgatgctgtggtcgaattcctgacctccgtccacctgtactatttatttcctagccttgaagaagggggtctagctacctaccgcacagcgattgttcaaaatcagcacctcgccatgcttgccaaaaagttggagctggatcgatttatgctttatgcacatggcccagacctgtgtcgagagagtgatctacgccatgcaatggccaactgctttgaggctttgattggtgctgtttacctggaagggagcctcgaggaagcgaaacaattgtttggccgtttactctttaatgatccggatctccgtgaggtgtggctgaactaccctttgcacccgctgcagctgcaggagccgaacactgacagacagttgattgagacatctcctgttttgcagaaattgaccgagtttgaggaagctattggagtaatctttactcacgttagactactggccagggcattcacacttagaacggtgggatttaaccatctaacactcggccataaccagaggatggagtttctaggagacagcattatgcagctagtcgctaccgagtacctgtttatccatttccccgaccatcatgaggggcatctgacactcttgaggtcatccctggttaacaataggacacaagcaaaggtcgccgaagaattagggatgcaagaatatgccatcacaaatgacaaaactaagcgccctgtcgccttaagaactaagactcttgctgacctcctagagagcttcatcgcagccctatacatcgataaggaccttgagtacgtgcataccttcatgaatgtatgcttcttccccagactgaaagagtttattttaaaccaggactggaacgaccctaagtcacagctacagcagtgctgcctgactctgaggaccgaaggcaaggagccagatatccccctttacaagactttgcagacagttggtccatctcacgcaaggacctacacagttgctgtctacttcaagggcgaacgaatagggtgcggtaaaggaccttccattcagcaggctgaaatgggagccgctatggatgctctggagaagtataatttcccccagatggctcaccagaaacggttcattgaacgtaaatacaggcaggaacttaaagagatgaggtgggagcgggaacatcaggagagggaacctgacgagaccgaggatatcaaaaaatag

SEQ ID NO: 268329 - DNA, 3900 bp, Artificial Sequence
  derived and/or modified sequence
cacagaatgagcttccaccccggcagaggctgccccagaggcagaggcggccacggcgccagacccagcgcccccagcttcagaccccagaacctgagactgctgcacccccagcagccccccgtgcagtaccagtacgagccccccagcgcccccagcaccaccttcagcaacagccccgcccccaacttcctgccccccagacccgacttcgtgcccttccccccccccatgccccccagcgcccagggccccctgcccccctgccccatcagaccccccttccccaaccaccagatgagacaccccttccccgtgcccccctgcttcccccccatgcccccccccatgccctgccccaacaacccccccgtgcccggcgccccccccggccagggcaccttccccttcatgatgcccccccccagcatgccccaccccccccccccccccgtgatgccccagcaggtgaactaccagtacccccccggctacagccaccacaacttccccccccccagcttcaacagcttccagaacaaccccagcagcttcctgcccagcgccaacaacagcagcagcccccacttcagacacctgcccccctaccccctgcccaaggcccccagcgagagaagaagccccgagagactgaagcactacgacgaccacagacacagagaccacagccacggcagaggcgagagacacagaagcctggacagaagagagagaggcagaagccccgacagaagaagacaggacagcagatacagaagcgactacgacagaggcagaacccccagcagacacagaagctacgagagaagcagcagaagccccagcagagagaagaagagagccagatgggaggaggagaaggacagatggagcgacaaccagagcagcggcaaggacaagaactacaccagcatcaaggagaaggagcccgaggagaccatgcccgacaagaacgaggaggaggaggaggagctgctgaagcccgtgtggatcagatgcacccacagcgagaactactacagcagcgaccccatggaccaggtgggcgacagcaccgtggtgggcaccagcagactgagagacctgtacgacaagttcgaggaggagctgggcagcagacaggagaaggccaaggccgccagacccccctgggagccccccaagaccaagctggacgaggacctggagagcagcagcgagagcgagtgcgagagcgacgaggacagcacctgcagcagcagcagcgacagcgaggtgttcgacgtgatcgccgagatcaagagaaagaaggcccaccccgacagactgcacgacgagctgtggtacaacgaccccggccagatgaacgacggccccctgtgcaagtgcagcgccaaggccagaagaaccggcatcagacacagcatctaccccggcgaggaggccatcaagccctgcagacccatgaccaacaacgccggcagactgttccactacagaatcaccgtgagcccccccaccaacttcctgaccgacagacccaccgtgatcgagtacgacgaccacgagtacatcttcgagggcttcagcatgttcgcccacgcccccctgaccaacatccccctgtgcaaggtgatcagattcaacatcgactacaccatccacttcatcgaggagatgatgcccgagaacttctgcgtgaagggcctggagctgttcagcctgttcctgttcagagacatcctggagctgtacgactggaacctgaagggccccctgttcgaggacagccccccctgctgccccagattccacttcatgcccagattcgtgagattcctgcccgacggcggcaaggaggtgctgagcatgcaccagatcctgctgtacctgctgagatgcagcaaggccctggtgcccgaggaggagatcgccaacatgctgcagtgggaggagctggagtggcagaagtacgccgaggagtgcaagggcatgatcgtgaccaaccccggcaccaagcccagcagcgtgagaatcgaccagctggacagagagcagttcaaccccgacgtgatcaccttccccatcatcgtgcacttcggcatcagacccgcccagctgagctacgccggcgacccccagtaccagaagctgtggaagagctacgtgaagctgagacacctgctggccaacagccccaaggtgaagcagaccgacaagcagaagctggcccagagagaggaggccctgcagaagatcagacagaagaacaccatgagaagagaggtgaccgtggagctgagcagccagggcttctggaagaccggcatcagaagcgacgtgtgccagcacgccatgatgctgcccgtgctgacccaccacatcagataccaccagtgcctgatgcacctggacaagctgatcggctacaccttccaggacagatgcctgctgcagctggccatgacccaccccagccaccacctgaacttcggcatgaaccccgaccacgccagaaacagcctgagcaactgcggcatcagacagcccaagtacggcgacagaaaggtgcaccacatgcacatgagaaagaagggcatcaacaccctgatcaacatcatgagcagactgggccaggacgaccccacccccagcagaatcaaccacaacgagagactggagttcctgggcgacgccgtggtggagttcctgaccagcgtgcacctgtactacctgttccccagcctggaggagggcggcctggccacctacagaaccgccatcgtgcagaaccagcacctggccatgctggccaagaagctggagctggacagattcatgctgtacgcccacggccccgacctgtgcagagagagcgacctgagacacgccatggccaactgcttcgaggccctgatcggcgccgtgtacctggagggcagcctggaggaggccaagcagctgttcggcagactgctgttcaacgaccccgacctgagagaggtgtggctgaactaccccctgcaccccctgcagctgcaggagcccaacaccgacagacagctgatcgagaccagccccgtgctgcagaagctgaccgagttcgaggaggccatcggcgtgatcttcacccacgtgagactgctggccagagccttcaccctgagaaccgtgggcttcaaccacctgaccctgggccacaaccagagaatggagttcctgggcgacagcatcatgcagctggtggccaccgagtacctgttcatccacttccccgaccaccacgagggccacctgaccctgctgagaagcagcctggtgaacaacagaacccaggccaaggtggccgaggagctgggcatgcaggagtacgccatcaccaacgacaagaccaagagacccgtggccctgagaaccaagaccctggccgacctgctggagagcttcatcgccgccctgtacatcgacaaggacctggagtacgtgcacaccttcatgaacgtgtgcttcttccccagactgaaggagttcatcctgaaccaggactggaacgaccccaagagccagctgcagcagtgctgcctgaccctgagaaccgagggcaaggagcccgacatccccctgtacaagaccctgcagaccgtgggccccagccacgccagaacctacaccgtggccgtgtacttcaagggcgagagaatcggctgcggcaagggccccagcatccagcaggccgagatgggcgccgccatggacgccctggagaagtacaacttcccccagatggcccaccagaagagattcatcgagagaaagtacagacaggagctgaaggagatgagatgggagagagagcaccaggagagagagcccgacgagaccgaggacatcaagaagtag

SEQ ID NO: 268330 - DNA, 4179 bp, Artificial Sequence
  derived and/or modified sequence
cacagaatgtcgttccacccgggacgagggtgtccccgaggacgaggaggacatggagccagaccctcagcaccatcctttaggccccaaaatctgaggctgcttcaccctcagcagcctcctgtgcaatatcaatatgaacctccaagtgccccttccaccactttctcaaactctccagcccccaattttctccctccacgaccagactttgtacccttccccccacccatgcctccgtcagcgcaaggccctcttcccccctgcccaatcaggccgcctttccccaaccaccagatgaggcaccccttcccagttcctccttgttttcctcccatgccaccaccaatgccttgtcctaataaccccccagtccctggggcacctcctggacaaggcactttccccttcatgatgccccctccctccatgcctcatcccccgccccctccagtcatgccgcagcaggttaattatcagtaccctccgggctattctcaccacaacttcccacctcccagttttaatagtttccagaacaaccctagttctttcctgcccagtgctaataacagcagtagtcctcatttcagacatctccctccatacccactcccaaaggctcccagtgagagaaggtccccagaaaggctgaaacactatgatgaccacaggcaccgagatcacagtcatgggcgaggtgagaggcatcggtccctggatcggcgggagcgaggccgcagtcccgacaggagaagacaagacagccggtacagatctgattatgaccgagggagaacaccatctcgccaccgcagctacgaacggagcagtcgctccccaagtagggagaagaagagagctcgttgggaggaagaaaaagaccgttggagtgacaaccagagttctggcaaagacaagaactatacctcaatcaaggaaaaagagcccgaggagaccatgcctgacaagaatgaggaggaagaagaagaacttcttaagcctgtgtggattcgatgcactcattcagaaaactactactccagtgaccccatggatcaggtgggagattctacagtggttggaacgagtaggcttcgtgacttatatgacaaatttgaggaggagttggggagcaggcaagaaaaggccaaagctgctcggcctccgtgggaacctccaaagacgaagctcgatgaagatttagagagttccagtgaatccgagtgtgagtctgatgaggacagcacctgttctagcagctcagactctgaagtttttgacgttattgcagaaatcaaacgcaaaaaggcccaccctgaccgacttcatgatgaactttggtacaacgatccaggccagatgaatgatggaccactctgcaaatgcagcgcaaaggcaagacgcacaggaattaggcacagcatttatcctggagaagaggccatcaagccctgtcgtcctatgaccaacaatgctggcagacttttccactaccggatcacagtctccccgcctacgaactttttaactgacaggccaactgttatagaatacgatgatcacgagtatatctttgaaggattttctatgtttgcacatgcccccctgaccaatattccactgtgtaaagtaattagattcaacatagactacacgattcatttcattgaagagatgatgccggagaatttttgtgtgaaagggcttgaactcttttcactgttcctattcagagatattttggaattatatgactggaatcttaaaggtcctttgtttgaagacagccctccctgctgcccaagatttcatttcatgccacgttttgtaagatttcttccagatggaggaaaggaagtgctgtccatgcaccagattctcctgtacttgttaaggtgcagcaaagccctggtgcctgaggaggagattgccaatatgcttcagtgggaggagctggagtggcagaaatatgcagaagaatgcaaaggcatgattgttaccaaccctgggacgaaaccaagctctgtccgtatcgatcaactggatcgtgaacagttcaaccccgatgtgattacttttccgattatcgtccactttgggatacgccctgcacagttgagttatgcaggagacccacagtaccaaaaactgtggaagagttatgtgaaacttcgccacctcctagcaaatagtcccaaagtcaaacaaactgacaaacagaagctggcacagagggaggaagccctccaaaaaatacggcagaagaatacaatgagacgagaagtaacggtggagctaagtagccaaggattctggaaaactggcatccgttctgatgtctgtcagcatgcaatgatgctacctgttctgacccatcatatccgctaccaccaatgcctaatgcatttggacaagttgataggatatactttccaagatcgttgtctgttgcagctggccatgactcatccaagtcatcatttaaattttggaatgaatcctgatcatgccaggaattcattatctaactgtggaattcggcagcccaaatacggagacagaaaagttcatcacatgcacatgcggaagaaagggattaacaccttgataaatatcatgtcacgccttggccaagatgacccaactccctcgaggattaaccacaatgaacggttggaattcctgggtgatgctgttgttgaatttctgaccagcgtccatttgtactatttgtttcctagtctggaagaaggaggattagcaacctatcggactgccattgttcagaatcagcaccttgccatgctagcaaagaaacttgaactggatcgatttatgctgtatgctcacgggcctgacctttgtagagaatcggaccttcgacatgcaatggccaattgttttgaagcgttaataggagctgtttacttggagggaagcctggaggaagccaagcagttatttggacgcttgctctttaatgatccggacctgcgcgaagtctggctcaattatcctctccacccactccaactacaagagccaaatactgatcgacaacttattgaaacttctccagttctacaaaaacttactgagtttgaagaagcaattggagtaatttttactcatgttcgacttctggcaagggcattcacattgagaactgtgggatttaaccatctgaccctaggccacaatcagagaatggaattcctaggtgactccataatgcaactggtagccacagagtacttattcattcatttcccagatcatcatgaaggacacttaactttgttgcgaagctctttggtgaataatagaactcaggccaaggtagcggaggagctgggcatgcaggagtacgccataaccaacgacaagaccaagaggcctgtggcgcttcgcaccaagaccttggcggaccttttggaatcatttattgcagcgctgtacattgataaggatttggaatatgttcatactttcatgaatgtctgcttctttccacgattgaaagagttcattttgaatcaggattggaatgaccccaaatcccagcttcagcagtgttgcttgacacttaggacagaaggaaaagagccagacattcctctgtacaagactctgcagacagtgggcccatcccatgcccgaacctacactgtggctgtttatttcaagggagaaagaataggctgtgggaaaggaccaagtattcagcaagcggaaatgggagcagcaatggatgcgcttgaaaaatataattttccccagatggcccatcagaagcggttcatcgaacggaagtacagacaagagttaaaagaaatgaggtgggaaagagagcatcaagagagagagccagatgagactgaagacatcaagaaataaaggagggcatgcaagtgtggagtatttacttgctcagtaactgtgactgttgtctattgagacctagcctagttttcctgcagacaatgaatgaagtgtgctcattgaaataaaatacagagtcaaatcgctattgttgttttaatgatctgtttttagctggatggtctttattacaaagtattagatttttcttctatttaacggaaaacttgactttggtgaatgtgcattacttccttttattttgctctttaaataataaaattcaagaagcat

SEQ ID NO: 268331 - protein, 262 aa, Artificial Sequence
  derived and/or modified sequence
MTILGTTFGMVFSLLQVVSGESGYAQNGDLEDAELDDYSFSCYSQLEVNGSQHSLTCAFEDPDVNITNLEFEICGALVEVKCLNFRKLQEIYFIETKKFLLIGKSNICVKVGEKSLTCKKIDLTTIVKPEAPFDLSVVYREGANDFVVTFNTSHLQKKYVKVLMHDVAYRQEKDENKWTHVNLSSTKLTLLQRKLQPAAMYEIKVRSIPDHYFKGFWSEWSPSYYFRTPEINNSSGLSLSYGPVSPIIRRLWNIFVRNQEKI

SEQ ID NO: 268332 - protein, 261 aa, Artificial Sequence
  derived and/or modified sequence
MTILGTTFGMVFSLLQVVSGESGYAQNGDLEDAELDDYSFSCYSQLEVNGSQHSLTCAFEDPDVNITNLEFEICGALVEVKCLNFRKLQEIYFIETKKFLLIGKSNICVKVGEKSLTCKKIDLTTIVKPEAPFDLSVVYREGANDFVVTFNTSHLQKKYVKVLMHDVAYRQEKDENKWTHVNLSSTKLTLLQRKLQPAAMYEIKVRSIPDHYFKGFWSEWSPSYYFRTPEINNSSGLSLSYGPVSPIIRRLWNIFVRNQEK

SEQ ID NO: 268333 - protein, 59 aa, Artificial Sequence
  derived and/or modified sequence
MTILGTTFGMVFSLLQVVSGESGYAQNGDLEDAELDDYSFSCYSQLEVNGSQHSLTCAF

SEQ ID NO: 268334 - protein, 52 aa, Artificial Sequence
  derived and/or modified sequence
MTILGTTFGMVFSLLQVVSGESGYAQNGDLEDAELDDYSFSCYSQLEVNGSQ

SEQ ID NO: 268335 - DNA, 789 bp, Artificial Sequence
  derived and/or modified sequence
atgaccatcttgggcaccacattcggaatggtgtttagtctgttgcaagtagtcagtggagagagcggatatgcacagaatggagatttagaggacgctgaactcgatgattactctttttcctgctatagtcagcttgaggtgaatggctcccagcacagtctgacatgtgcctttgaggacccagatgttaatattaccaacctcgaatttgagatatgtggcgctctcgtcgaagtgaagtgtctaaatttccgtaaactccaagaaatctacttcatcgagaccaagaagtttctcctgatcggcaagtccaatatctgtgtgaaggtaggcgagaagtcacttacatgtaagaaaatcgacttgacaactattgtgaaacctgaggctcccttcgacctcagcgtggtttatcgggagggtgctaacgacttcgtcgtgaccttcaacactagccatctgcagaagaaatacgtaaaggtgctaatgcatgacgtcgcctacaggcaagagaaagacgagaacaagtggactcacgtcaatctgagctccaccaagttaacactgctgcagcggaaacttcagcccgccgccatgtatgaaattaaagtgaggagcattcctgaccattactttaagggtttctggtcagaatggtctccatcttattacttccggactcccgaaatcaataacagttccggtctctctttgtcgtacggccctgtgtctccaatcattagaagactctggaacatctttgttcgaaaccaggaaaagatctag

SEQ ID NO: 268336 - DNA, 789 bp, Artificial Sequence
  derived and/or modified sequence
atgaccatcctgggcaccaccttcggcatggtgttcagcctgctgcaggtggtgtctggagagagcggctacgcccagaatggagacctggaggatgctgagctggatgactacagcttcagctgctacagccagctggaggtgaatggcagccagcacagcctgacctgtgcctttgaggaccctgatgtgaacatcaccaacctggagtttgagatctgtggggccctggtggaggtgaagtgcctgaacttcaggaagctgcaggagatctacttcatcgagaccaagaagttcctgctgattggcaagagcaacatctgtgtgaaggtgggggagaagagcctgacctgcaagaagattgacctgaccaccatcgtgaagccagaggccccctttgacctgtctgtggtgtaccgggagggcgccaatgactttgtggtgaccttcaacaccagccacctgcagaagaagtatgtgaaggtgctgatgcatgatgtggcctaccggcaggagaaggatgagaacaagtggacccacgtgaacctgagcagcaccaagctgaccctgctgcagaggaagctgcagcctgctgccatgtatgagatcaaggtgcgcagcatcccagaccactacttcaagggcttctggagcgagtggagccccagctactacttccgcaccccagagatcaacaacagcagcggcctgagcctgtcctatggccctgtgagccccatcatccggcggctgtggaacatctttgtgaggaaccaggagaagatctag

SEQ ID NO: 268337 - DNA, 789 bp, Artificial Sequence
  derived and/or modified sequence
atgaccatcctgggcaccaccttcggcatggtgttcagcctgctgcaggttgtgtccggcgagtcaggctatgctcaaaatggagatttggaagacgcggagctagatgactacagcttcagctgctattctcagttggaagttaatggaagccagcattccctgacatgcgcgtttgaggatccagatgtgaatatcaccaatctggagtttgaaatatgtggtgccctcgtggaagtgaagtgtctgaattttcgcaagctccaagaaatctatttcattgagaccaaaaaatttttgctaatagggaagagcaatatttgtgtcaaagtgggcgagaagtctctaacatgcaagaagattgatctgacaacaatcgtcaagcccgaggccccctttgatctatccgtggtgtatcgagagggcgccaacgactttgtcgtgacatttaatacctcgcatctgcagaagaaatatgtgaaggtgctgatgcacgatgtggcttatcgacaagagaaagacgagaacaagtggacacacgtcaacctaagtagcaccaaacttacactgctacaacgcaagcttcagcccgctgctatgtacgaaatcaaggtcagatccatccctgaccattattttaaggggttctggtccgagtggtccccatcctattattttaggacacccgaaatcaataattccagcggactgagtctgtcctacggacccgtgagtccaataatcagacggttgtggaacatcttcgtgcgcaatcaagaaaaaatctag

SEQ ID NO: 268338 - DNA, 789 bp, Artificial Sequence
  derived and/or modified sequence
atgaccatattgggcacaactttcgggatggtgtttagccttctacaggttgtttctggtgagtcaggctacgcccaaaacggcgatttagaggacgcggaactcgatgactactctttcagctgctactcccagctggaagtcaatggcagccagcacagtctgacgtgcgcctttgaggaccccgatgtgaatataacgaacctcgagtttgagatctgtggtgcgcttgtagaggtgaagtgccttaactttagaaagctgcaagagatctactttatcgaaacaaaaaagttcctcctcatcggaaagagtaacatctgtgtgaaagtgggggagaagagtcttacctgcaagaagatagatctgaccaccatagtgaaacctgaggcgcctttcgacctgtccgtggtgtatcgggaaggagctaatgactttgtggtgacctttaatacgagccaccttcaaaaaaaatatgtcaaggtcttgatgcatgatgtggcataccgtcaggagaaggatgagaacaaatggacccatgtgaacctttcttcaacaaaacttacacttcttcaacggaagcttcaacctgccgcaatgtatgagattaaggtgaggtccatcccagatcactacttcaaggggttttggtcagagtggagcccctcatactacttccggacccctgagattaacaacagcagcgggttgagtctgtcttacggcccagtgagcccaattattagaaggctgtggaacattttcgtccggaaccaggagaagatttag

SEQ ID NO: 268339 - DNA, 789 bp, Artificial Sequence
  derived and/or modified sequence
atgaccatcctgggcaccaccttcggcatggtgttcagcctgctgcaggtggtgagcggcgagagcggctacgcccagaacggcgacctggaggacgccgagctggacgactacagcttcagctgctacagccagctggaggtgaacggcagccagcacagcctgacctgcgccttcgaggaccccgacgtgaacatcaccaacctggagttcgagatctgcggcgccctggtggaggtgaagtgcctgaacttcagaaagctgcaggagatctacttcatcgagaccaagaagttcctgctgatcggcaagagcaacatctgcgtgaaggtgggcgagaagagcctgacctgcaagaagatcgacctgaccaccatcgtgaagcccgaggcccccttcgacctgagcgtggtgtacagagagggcgccaacgacttcgtggtgaccttcaacaccagccacctgcagaagaagtacgtgaaggtgctgatgcacgacgtggcctacagacaggagaaggacgagaacaagtggacccacgtgaacctgagcagcaccaagctgaccctgctgcagagaaagctgcagcccgccgccatgtacgagatcaaggtgagaagcatccccgaccactacttcaagggcttctggagcgagtggagccccagctactacttcagaacccccgagatcaacaacagcagcggcctgagcctgagctacggccccgtgagccccatcatcagaagactgtggaacatcttcgtgagaaaccaggagaagatctag

SEQ ID NO: 268340 - DNA, 453 bp, Artificial Sequence
  derived and/or modified sequence
atgaccatcctgggcaccaccttcggcatggtgttcagcctgctgcaggtggtgagcggcgagagcggctacgcccagaacggcgacctggaggacgccgagctggacgactacagcttcagctgctacagccagctggaggtgaacggcagccagcacagcctgacctgcgccttcgaggaccccgacgtgaacatcaccaacctggagttcgagatctgcggcgccctggtggaggtgaagtgcctgaacttcagaaagctgcaggagatctacttcatcgagaccaagaagttcctgctgatcggcaagagcaacatctgcgtgaaggtgggcgagaagagcctgacctgcaagaagatcgacctgaccaccatcggcaagaagctgtacatcaaggtgtggctgagcctgctgggctacctgaagaccctgtgcctggacatcctgtag

SEQ ID NO: 268341 - DNA, 543 bp, Artificial Sequence
  derived and/or modified sequence
atgaccatcctgggcaccaccttcggcatggtgttcagcctgctgcaggtggtgagcggcgagagcggctacgcccagaacggcgacctggaggacgccgagctggacgactacagcttcagctgctacagccagctggaggtgaacggcagccagcacagcctgacctgcgccttcgaggaccccgacgtgaacatcaccaacctggagttcgagatctgcggcgccctggtggaggtgaagtgcctgaacttcagaaagctgcaggagatctacttcatcgagaccaagaagttcctgctgatcggcaagagcaacatctgcgtgaaggtgggcgagaagagcctgacctgcaagaagatcgacctgaccaccatcgtgaagcccgaggcccccttcgacctgagcgtggtgtacagagagggcgccaacgacttcgtggtgaccttcaacaccagccacctgcagaagaagtacgtgaaggtgctgatgcacgacgtggcctacagacaggagaaggacgagaacaagtggaccgactag

SEQ ID NO: 268342 - DNA, 453 bp, Artificial Sequence
  derived and/or modified sequence
atgaccattctgggcacaacctttggcatggtcttttcactcctgcaggtggtttcaggagaatccggatatgctcagaacggcgatctggaagacgccgagttggatgattacagcttttcctgctatagccagttagaggtcaacgggtctcagcatagcctgacctgtgcgtttgaagatcctgacgtgaacatcacaaacctcgagtttgaaatctgcggcgccctggtcgaagttaagtgcttaaactttagaaagctgcaggaaatctattttatagagacaaaaaaattcctgctaatcggcaagtccaacatttgtgtgaaagtcggtgaaaagtcactgacatgcaaaaagatcgatcttacaaccatcgggaagaaactttacatcaaagtatggctcagcctcctgggttatctgaaaacactgtgtctggacattctgtag

SEQ ID NO: 268343 - DNA, 543 bp, Artificial Sequence
  derived and/or modified sequence
atgaccatcctgggcactaccttcggcatggtgttcagcttgctccaggtagtgagtggagaatcagggtacgcacagaatggcgatctcgaggatgccgagttggatgactatagctttagctgttattctcagttggaggtgaatggcagccagcactccctcacttgtgccttcgaggacccagacgttaacattacgaatctcgagttcgagatatgcggcgcgttagtcgaagtcaaatgcctaaacttccgcaagctgcaggaaatctacttcattgagaccaagaagttcttgctaataggcaagtctaacatatgtgttaaagtgggtgaaaaatcgctgacctgcaaaaaaatagacctgacgactatcgtgaagccagaagccccttttgatctctcagtggtctaccgggaaggcgccaacgactttgtagtaacctttaacacctcacacctgcaaaagaaatacgtgaaggtgctgatgcacgatgttgcttacagacaggagaaggatgagaacaaatggaccgattag

SEQ ID NO: 268344 - DNA, 612 bp, Artificial Sequence
  derived and/or modified sequence
ttcctccctccctcccttcctcttactctcattcatttcatacacactggctcacacatctactctctctctctatctctctcagaatgacaattctaggtacaacttttggcatggttttttctttacttcaagtcgtttctggagaaagtggctatgctcaaaatggagacttggaagatgcagaactggatgactactcattctcatgctatagccagttggaagtgaatggatcgcagcactcactgacctgtgcttttgaggacccagatgtcaacatcaccaatctggaatttgaaatatgtggggccctcgtggaggtaaagtgcctgaatttcaggaaactacaagagatatatttcatcgagacaaagaaattcttactgattggaaagagcaatatatgtgtgaaggttggagaaaagagtctaacctgcaaaaaaatagacctaaccactataggtaagaagttgtatataaaagtatggttgtcacttttgggctacctgaaaacactgtgtctggacattctgtaggttaaaagtagacaaatagtggaaacaactggcaatagataatagctaattccctactgtaaatttttataat

SEQ ID NO: 268345 - DNA, 1287 bp, Artificial Sequence
  derived and/or modified sequence
gtcttcctccctccctcccttcctcttactctcattcatttcatacacactggctcacacatctactctctctctctatctctctcagaatgacaattctaggtacaacttttggcatggttttttctttacttcaagtcgtttctggagaaagtggctatgctcaaaatggagacttggaagatgcagaactggatgactactcattctcatgctatagccagttggaagtgaatggatcgcagcactcactgacctgtgcttttgaggacccagatgtcaacatcaccaatctggaatttgaaatatgtggggccctcgtggaggtaaagtgcctgaatttcaggaaactacaagagatatatttcatcgagacaaagaaattcttactgattggaaagagcaatatatgtgtgaaggttggagaaaagagtctaacctgcaaaaaaatagacctaaccactatagttaaacctgaggctccttttgacctgagtgtcgtctatcgggaaggagccaatgactttgtggtgacatttaatacatcacacttgcaaaagaagtatgtaaaagttttaatgcacgatgtagcttaccgccaggaaaaggatgaaaacaaatggacggattaagcctatcgtatggcccagtctccccgatcataagaagactctggaacatctttgtaagaaaccaagaaaaaatttaaatgtgagtttcaatcctgaaagtttcctggactgccagattcatagggtggatgacattcaagctagagatgaagtggaaggttttctgcaagatacgtttcctcagcaactagaagaatctgagaagcagaggcttggaggggatgtgcagagccccaactgcccatctgaggatgtagtcatcactccagaaagctttggaagagattcatccctcacatgcctggctgggaatgtcagtgcatgtgacgcccctattctctcctcttccaggtccctagactgcagggagagtggcaagaatgggcctcatgtgtaccaggacctcctgcttagccttgggactacaaacagcacgctgccccctccattttctctccaatctggaatcctgacattgaacccagttgctcagggtcagcccattcttacttccctgggatcaaatcaagaagaagcatatgtcaccatgtccagcttctaccaaaaccagtgaagtgtaagaaacccagactgaacttaccgtgagcgacaaagatgatttaaaagggaagtctagagttcctagtctccctca

SEQ ID NO: 268346 - DNA, 453 bp, Artificial Sequence
  derived and/or modified sequence
atgaccatcctgggcaccaccttcggcatggtgttcagcctgctgcaggtggtgtctggagagagcggctacgcccagaatggagacctggaggatgctgagctggatgactacagcttcagctgctacagccagctggaggtgaatggcagccagcacagcctgacctgtgcctttgaggaccctgatgtgaacatcaccaacctggagtttgagatctgtggggccctggtggaggtgaagtgcctgaacttcaggaagctgcaggagatctacttcatcgagaccaagaagttcctgctgattggcaagagcaacatctgtgtgaaggtgggggagaagagcctgacctgcaagaagattgacctgaccaccatcggcaagaagctgtacatcaaggtgtggctgagcctgctgggctacctgaagaccctgtgcctggacatcctgtag

SEQ ID NO: 268347 - DNA, 543 bp, Artificial Sequence
  derived and/or modified sequence
atgaccatcctgggcaccaccttcggcatggtgttcagcctgctgcaggtggtgtctggagagagcggctacgcccagaatggagacctggaggatgctgagctggatgactacagcttcagctgctacagccagctggaggtgaatggcagccagcacagcctgacctgtgcctttgaggaccctgatgtgaacatcaccaacctggagtttgagatctgtggggccctggtggaggtgaagtgcctgaacttcaggaagctgcaggagatctacttcatcgagaccaagaagttcctgctgattggcaagagcaacatctgtgtgaaggtgggggagaagagcctgacctgcaagaagattgacctgaccaccatcgtgaagccagaggccccctttgacctgtctgtggtgtaccgggagggcgccaatgactttgtggtgaccttcaacaccagccacctgcagaagaagtatgtgaaggtgctgatgcatgatgtggcctaccggcaggagaaggatgagaacaagtggacagactag

SEQ ID NO: 268348 - DNA, 453 bp, Artificial Sequence
  derived and/or modified sequence
atgaccatcctgggcaccaccttcggcatggtgttcagcctgctgcaggtagtgtcaggggagtcaggatacgcccagaatggggatctggaggatgccgagctggacgattattcattctcctgctatagccaattggaggtgaacggctcacagcacagtctgacctgcgctttcgaagacccagatgttaacatcacaaacctggaattcgagatttgtggcgctctggtggaggtgaagtgccttaactttagaaaattacaggagatatatttcatagagaccaagaaattcctgcttataggtaagagcaatatttgcgtgaaagtgggagaaaagagcctgacctgtaagaagattgacctgacaacgattggaaaaaagctgtacatcaaagtatggcttagtttacttgggtatctgaagacgctgtgcctggacattctttag

SEQ ID NO: 268349 - DNA, 543 bp, Artificial Sequence
  derived and/or modified sequence
atgaccatcctgggcaccaccttcggcatggtgttcagcctgctgcaagttgtgagcggagaaagtggatatgcacagaacggcgatctggaggacgcagagctcgacgattattcattctcctgctatagtcagctggaggtgaatggctcccagcattccctgacctgtgccttcgaagatcctgatgtaaatatcaccaacctcgagtttgaaatttgtggggccttagtcgaggtcaagtgtttgaattttcgcaagctgcaagaaatctacttcatcgagactaagaagttcctccttattggaaaaagtaatatttgtgtgaaagtaggcgagaaatcccttacctgtaagaagattgacctgaccaccatagtcaagcccgaggctcctttcgacttaagcgtggtgtaccgagagggggctaacgacttcgtagtcaccttcaacacctctcacctacagaaaaaatatgttaaggtgctcatgcacgacgtagcataccggcaggaaaaggatgaaaacaaatggaccgattag

SEQ ID NO: 268350 - DNA, 453 bp, Artificial Sequence
  derived and/or modified sequence
atgactatcctgggcactacatttggtatggtgttctctctcctccaagtcgtgtctggagaatctggctacgcacagaatggcgacctcgaagacgccgaattggatgattactctttttcttgttatagccagttagaagtgaacggctctcaacacagtctgacttgtgccttcgaagatccagacgtgaatattacaaacctggagttcgagatttgcggggctctggtcgaagtcaaatgtctgaattttcgcaagctccaggaaatttattttatcgagaccaagaagttccttttaataggaaaaagcaatatctgtgtgaaggtgggggagaaatccctcacatgcaaaaagatcgatctgactactattgggaagaagctatatatcaaggtttggctttccttacttggctatctgaaaacactgtgtctggatattctctag

SEQ ID NO: 268351 - DNA, 543 bp, Artificial Sequence
  derived and/or modified sequence
atgacaattctggggaccacctttgggatggtgttctctcttttacaggtggttagtggtgagagcggctacgctcaaaacggggatttggaggatgccgagctcgatgattatagcttttcttgttactcacaactggaagtaaatggctcccagcatagcctgacttgtgcattcgaagatccagacgtgaatattacgaacctagagtttgagatctgtggtgccctggtcgaggtgaagtgcctgaacttcagaaagcttcaggagatttatttcattgaaacaaaaaagtttctgctgattggcaagagcaatatctgcgtgaaggtgggagagaagtcattgacatgtaaaaagattgacctgacgactattgtgaaaccagaggcccctttcgatttgtctgtggtgtaccgcgaaggagccaacgatttcgtggtgacattcaacacctcacatttgcaaaagaaatatgtcaaggtactaatgcacgacgtggcctatagacaggagaaagatgagaacaagtggactgactag

SEQ ID NO: 268352 - DNA, 786 bp, Artificial Sequence
  derived and/or modified sequence
atgaccatcttgggtaccaccttcggaatggtgtttagcctgctgcaagtggtttctggcgaaagcggttatgcccagaatggtgatctcgaagacgctgagctggacgactattcatttagctgctattcccagttggaagtgaacggatcgcagcatagcctgacctgtgccttcgaagatccagatgtgaatatcaccaatctggagttcgaaatctgtggcgcactagtggaagtgaaatgcttgaacttccggaagctccaggaaatttactttattgagactaaaaagtttctgctaatcgggaagtccaacatctgtgtcaaggtgggcgaaaaaagtttgacttgtaagaagatcgatctaaccacaatagttaaacctgaggctccgttcgatctgtcggtggtctatcgcgagggagcaaacgatttcgttgtcacattcaatacttcccacctacaaaaaaagtatgttaaggttcttatgcatgatgtggcctaccgacaggagaaagacgagaacaaatggacacatgtgaatctgagcagcactaaacttactctcctccagagaaagctgcagcctgctgcaatgtacgaaattaaagtaaggagtattcccgaccactactttaagggtttctggtccgagtggtcaccaagctactatttccgcacacctgagatcaataactctagcgggctgagcctttcgtacgggcccgtatccccaattattcggcgactgtggaatatcttcgtgagaaatcaggagaaatag

SEQ ID NO: 268353 - DNA, 180 bp, Artificial Sequence
  derived and/or modified sequence
atgacaatcctggggaccacattcggtatggtctttagcctgctacaggtggtgagcggcgaatccggctacgcgcagaatggggacctggaagacgctgagttagatgattatagcttttcctgttactcacagttagaggtgaacgggagtcaacactccctgacctgtgccttctag

SEQ ID NO: 268354 - DNA, 159 bp, Artificial Sequence
  derived and/or modified sequence
atgacaatcctgggaacaacgtttggcatggttttctcgttactgcaggtagtgtccggcgaatccggatacgctcagaatggagacctggaggacgcggaactcgacgactacagctttagttgttactcccagctagaggtcaatggctcacagtag

SEQ ID NO: 268355 - DNA, 1004 bp, Artificial Sequence
  derived and/or modified sequence
cttcctccctccctcccttcctcttactctcattcatttcatacacactggctcacacatctactctctctctctatctctctcagaatgacaattctaggtacaacttttggcatggttttttctttacttcaagtcgtttctggagaaagtggctatgctcaaaatggagacttggaagatgcagaactggatgactactcattctcatgctatagccagttggaagtgaatggatcgcagcactcactgacctgtgcttttgaggacccagatgtcaacatcaccaatctggaatttgaaatatgtggggccctcgtggaggtaaagtgcctgaatttcaggaaactacaagagatatatttcatcgagacaaagaaattcttactgattggaaagagcaatatatgtgtgaaggttggagaaaagagtctaacctgcaaaaaaatagacctaaccactatagttaaacctgaggctccttttgacctgagtgtcgtctatcgggaaggagccaatgactttgtggtgacatttaatacatcacacttgcaaaagaagtatgtaaaagttttaatgcacgatgtagcttaccgccaggaaaaggatgaaaacaaatggacgcatgtgaatttatccagcacaaagctgacactcctgcagagaaagctccaaccggcagcaatgtatgagattaaagttcgatccatccctgatcactattttaaaggcttctggagtgaatggagtccaagttattacttcagaactccagagatcaataatagctcaggattaagcctatcgtatggcccagtctccccgatcataagaagactctggaacatctttgtaagaaaccaagaaaagtgagtgtttttggtgcttaaaaagtgttgtgttggcaacatcccagtggccaagaatgatattccaggacaaggaacagttgaacctcaccttttggtatttgattcatcctgtaactagggtccctcctaaga

SEQ ID NO: 268356 - DNA, 562 bp, Artificial Sequence
  derived and/or modified sequence
aaatgctagagactattcatttaggaccagagtggcattagctttcctacagccatcctcacctgcttgacacccttggatgttgggtttttttgtttgtttgtttgtttgtttgttgttttttttttccacagctcttgtggtccccagcctctctcttgagcagggctggctttttttttttaataagatagctggtgcccaagattgttttccaccttaaggataaaacctgttaagaaaggtcatagtttgccagcccctgccctaaacaaataattcttgaatgcctactgtggtgtgtaagatatgagtaaataccagggatacacagagaacaaaagagaaaaactgctattcttgtgaaacttggaagttggagaatgacaattctaggtacaacttttggcatggttttttctttacttcaagtcgtttctggagaaagtggctatgctcaaaatggagacttggaagatgcagaactggatgactactcattctcatgctatagccagttggaagtgaatggatcgcagcactcactgacctgtgcttttga

SEQ ID NO: 268357 - DNA, 551 bp, Artificial Sequence
  derived and/or modified sequence
cttttaaagtgggcccttagtcaggagcggtggctcatgcctgtagtcctagcactttgggaggctgaggcaggcagatcacttgaggtcaggagttcgagacaagcctggccaacatggcgaaaccccgtctccactgaaaacacaaaaattaggctggcatagtggcatttgcctgtagtcctagctactcaggaggctgaggcaggagaattgcttgaacctgggaggtggaaattgcagtgagccgagatcatgctattgtactccagcctgggcaacaaagcaagactctgtctcaaaaaaataaaaattaaaaaaataaagtagcctctagcctaagatagcttgagcctaggtgtgaatctactgccttactctgatgtaagcacaaatgacaattctaggtacaacttttggcatggttttttctttacttcaagtcgtttctggagaaagtggctatgctcaaaatggagacttggaagatgcagaactggatgactactcattctcatgctatagccagttggaagtgaatggatcgcagc

SEQ ID NO: 268358 - DNA, 786 bp, Artificial Sequence
  derived and/or modified sequence
atgaccatcctgggcaccaccttcggcatggtgttcagcctgctgcaggtggtgtctggagagagcggctacgcccagaatggagacctggaggatgctgagctggatgactacagcttcagctgctacagccagctggaggtgaatggcagccagcacagcctgacctgtgcctttgaggaccctgatgtgaacatcaccaacctggagtttgagatctgtggggccctggtggaggtgaagtgcctgaacttcaggaagctgcaggagatctacttcatcgagaccaagaagttcctgctgattggcaagagcaacatctgtgtgaaggtgggggagaagagcctgacctgcaagaagattgacctgaccaccatcgtgaagccagaggccccctttgacctgtctgtggtgtaccgggagggcgccaatgactttgtggtgaccttcaacaccagccacctgcagaagaagtatgtgaaggtgctgatgcatgatgtggcctaccggcaggagaaggatgagaacaagtggacccacgtgaacctgagcagcaccaagctgaccctgctgcagaggaagctgcagcctgctgccatgtatgagatcaaggtgcgcagcatcccagaccactacttcaagggcttctggagcgagtggagccccagctactacttccgcaccccagagatcaacaacagcagcggcctgagcctgtcctatggccctgtgagccccatcatccggcggctgtggaacatctttgtgaggaaccaggagaagtag

SEQ ID NO: 268359 - DNA, 180 bp, Artificial Sequence
  derived and/or modified sequence
atgaccatcctgggcaccaccttcggcatggtgttcagcctgctgcaggtggtgtctggagagagcggctacgcccagaatggagacctggaggatgctgagctggatgactacagcttcagctgctacagccagctggaggtgaatggcagccagcacagcctgacctgtgccttctag

SEQ ID NO: 268360 - DNA, 159 bp, Artificial Sequence
  derived and/or modified sequence
atgaccatcctgggcaccaccttcggcatggtgttcagcctgctgcaggtggtgtctggagagagcggctacgcccagaatggagacctggaggatgctgagctggatgactacagcttcagctgctacagccagctggaggtgaatggcagccagtag

SEQ ID NO: 268361 - DNA, 786 bp, Artificial Sequence
  derived and/or modified sequence
atgaccatcctgggcaccaccttcggcatggtgttcagcctgctgcaggtggtttcaggggagtcaggctacgctcagaacggtgacctggaagacgccgagctcgacgactattctttctcctgctattctcagcttgaggtgaatgggtcccaacacagtctgacttgtgcctttgaggaccctgatgtgaatatcacaaacctcgaattcgaaatctgcggcgctctggtcgaggtcaaatgcttgaacttcaggaagctgcaggagatttacttcattgaaactaagaaattcctgctcatcgggaaaagtaacatttgtgttaaagttggagagaagtctctgacctgcaagaaaatcgacctcacgaccatcgtgaagcccgaagcacccttcgacctctcagtggtctatagggagggcgcgaatgattttgtcgtaacattcaataccagccacctgcagaaaaagtacgtcaaggtcctgatgcacgatgtcgcttacaggcaggagaaggatgagaataagtggacccacgtgaatctgagcagcacaaaacttaccttactccagagaaagcttcagcctgcggcgatgtatgagataaaggtgagatctatacctgaccactattttaagggcttttggtccgagtggtccccttcgtactacttcagaacacccgagatcaacaacagcagtggactgtctctgtcctatgggcccgtgagtcctatcatacgcagactctggaacattttcgtccgaaaccaggaaaagtag

SEQ ID NO: 268362 - DNA, 180 bp, Artificial Sequence
  derived and/or modified sequence
atgaccatcctgggcaccaccttcggcatggtgttcagcctgctgcaggtcgtgagcggggagtctggttatgcgcaaaacggcgaccttgaggatgcagagttggacgactacagcttctcctgttactcccaattagaggtgaacgggtcccagcactccctcacctgtgcattttag

SEQ ID NO: 268363 - DNA, 159 bp, Artificial Sequence
  derived and/or modified sequence
atgaccatcctgggcaccaccttcggcatggtgttcagcctgctgcaggttgtgtctggggagagtggttatgcacaaaacggagatctggaggacgccgaactcgacgattactccttcagctgttactctcaactcgaagtgaatggctcgcagtag

SEQ ID NO: 268364 - DNA, 786 bp, Artificial Sequence
  derived and/or modified sequence
atgactattctgggaactacctttggtatggttttttctctcctgcaggtggtgagtggcgagtcaggttatgcccaaaatggagatctagaggatgcagagctggacgattatagcttctcttgctactctcagttggaggtcaatggaagtcaacacagcctaacttgcgcgtttgaggatcctgatgtgaacatcaccaacctcgagttcgaaatttgcggtgcgttagtggaagtgaagtgtctcaactttcgcaaactccaggagatctactttattgagaccaaaaaatttctgctaattggcaaatcaaatatatgcgtgaaagtgggagaaaagtcattaacatgtaaaaagattgatttaaccacaatcgtgaaaccggaagccccttttgacctctctgttgtataccgggaaggcgctaacgacttcgtggtgacctttaacacaagccacctgcaaaagaaatatgtgaaagtgcttatgcacgatgtcgcctaccggcaggagaaggatgagaataagtggacccatgtgaatctcagctctaccaaacttacgctgttgcagcgaaaactccagccagccgctatgtacgaaattaaggtgcggtctatacccgaccactacttcaaagggttctggtcagagtggtccccaagttattacttcagaacccccgagatcaataattcctcgggtctgtcactgagctatggccctgtctctcccatcatcaggcggctgtggaatatttttgttaggaaccaagagaaatag

SEQ ID NO: 268365 - DNA, 180 bp, Artificial Sequence
  derived and/or modified sequence
atgacaatcctgggaactacctttggaatggttttctctctgctgcaggttgtcagtggggagagcggatatgcacaaaatggtgacctggaagatgccgagctggacgactactccttttcctgctattcacagttggaagtgaacggtagccaacactccctcacgtgtgcgttctag

SEQ ID NO: 268366 - DNA, 159 bp, Artificial Sequence
  derived and/or modified sequence
atgacaattctcgggaccacctttggaatggtgttttcactgctccaggtggtgagcggcgaatcgggttacgcccaaaacggtgacttggaagatgctgagctcgacgactactccttttcatgttactcacaactggaggtcaacgggtcacagtag

SEQ ID NO: 268367 - DNA, 786 bp, Artificial Sequence
  derived and/or modified sequence
atgaccatcctgggcaccaccttcggcatggtgttcagcctgctgcaggtggtgagcggcgagagcggctacgcccagaacggcgacctggaggacgccgagctggacgactacagcttcagctgctacagccagctggaggtgaacggcagccagcacagcctgacctgcgccttcgaggaccccgacgtgaacatcaccaacctggagttcgagatctgcggcgccctggtggaggtgaagtgcctgaacttcagaaagctgcaggagatctacttcatcgagaccaagaagttcctgctgatcggcaagagcaacatctgcgtgaaggtgggcgagaagagcctgacctgcaagaagatcgacctgaccaccatcgtgaagcccgaggcccccttcgacctgagcgtggtgtacagagagggcgccaacgacttcgtggtgaccttcaacaccagccacctgcagaagaagtacgtgaaggtgctgatgcacgacgtggcctacagacaggagaaggacgagaacaagtggacccacgtgaacctgagcagcaccaagctgaccctgctgcagagaaagctgcagcccgccgccatgtacgagatcaaggtgagaagcatccccgaccactacttcaagggcttctggagcgagtggagccccagctactacttcagaacccccgagatcaacaacagcagcggcctgagcctgagctacggccccgtgagccccatcatcagaagactgtggaacatcttcgtgagaaaccaggagaagtag

SEQ ID NO: 268368 - DNA, 180 bp, Artificial Sequence
  derived and/or modified sequence
atgaccatcctgggcaccaccttcggcatggtgttcagcctgctgcaggtggtgagcggcgagagcggctacgcccagaacggcgacctggaggacgccgagctggacgactacagcttcagctgctacagccagctggaggtgaacggcagccagcacagcctgacctgcgccttctag

SEQ ID NO: 268369 - DNA, 159 bp, Artificial Sequence
  derived and/or modified sequence
atgaccatcctgggcaccaccttcggcatggtgttcagcctgctgcaggtggtgagcggcgagagcggctacgcccagaacggcgacctggaggacgccgagctggacgactacagcttcagctgctacagccagctggaggtgaacggcagccagtag

SEQ ID NO: 268370 - protein, 1415 aa, Artificial Sequence
  derived and/or modified sequence
MPDQFDQAVVLNQLRYSGMLETVRIRKAGYAVRRPFQDFYKRYKVLMRNLALPEDVRGKCTSLLQLYDASNSEWQLGKTKVFLRESLEQKLEKRREEEVSHAAMVIRAHVLGFLARKQYRKVLYCVVIIQKNYRAFLLRRRFLHLKKAAIVFQKQLRGQIARRVYRQLLAEKREQEEKKKQEEEEKKKREEEERERERERREAELRAQQEEETRKQQELEALQKSQKEAELTRELEKQKENKQVEEILRLEKEIEDLQRMKEQQELSLTEASLQKLQERRDQELRRLEEEACRAAQEFLESLNFDEIDECVRNIERSLSVGSEFSSELAESACEEKPNFNFSQPYPEEEVDEGFEADDDAFKDSPNPSEHGHSDQRTSGIRTSDDSSEEDPYMNDTVVPTSPSADSTVLLAPSVQDSGSLHNSSSGESTYCMPQNAGDLPSPDGDYDYDQDDYEDGAITSGSSVTFSNSYGSQWSPDYRCSVGTYNSSGAYRFSSEGAQSSFEDSEEDFDSRFDTDDELSYRRDSVYSCVTLPYFHSFLYMKGGLMNSWKRRWCVLKDETFLWFRSKQEALKQGWLHKKGGGSSTLSRRNWKKRWFVLRQSKLMYFENDSEEKLKGTVEVRTAKEIIDNTTKENGIDIIMADRTFHLIAESPEDASQWFSVLSQVHASTDQEIQEMHDEQANPQNAVGTLDVGLIDSVCASDSPDRPNSFVIITANRVLHCNADTPEEMHHWITLLQRSKGDTRVEGQEFIVRGWLHKEVKNSPKMSSLKLKKRWFVLTHNSLDYYKSSEKNALKLGTLVLNSLCSVVPPDEKIFKETGYWNVTVYGRKHCYRLYTKLLNEATRWSSAIQNVTDTKAPIDTPTQQLIQDIKENCLNSDVVEQIYKRNPILRYTHHPLHSPLLPLPYGDINLNLLKDKGYTTLQDEAIKIFNSLQQLESMSDPIPIIQGILQTGHDLRPLRDELYCQLIKQTNKVPHPGSVGNLYSWQILTCLSCTFLPSRGILKYLKFHLKRIREQFPGSEMEKYALFTYESLKKTKCREFVPSRDEIEALIHRQEMTSTVYCHGGGSCKITINSHTTAGEVVEKLIRGLAMEDSRNMFALFEYNGHVDKAIESRTVVADVLAKFEKLAATSEVGDLPWKFYFKLYCFLDTDNVPKDSVEFAFMFEQAHEAVIHGHHPAPEENLQVLAALRLQYLQGDYTLHAAIPPLEEVYSLQRLKARISQSTKTFTPCERLEKRRTSFLEGTLRRSFRTGSVVRQKVEEEQMLDMWIKEEVSSARASIIDKWRKFQGMNQEQAMAKYMALIKEWPGYGSTLFDVECKEGGFPQELWLGVSADAVSVYKRGEGRPLEVFQYEHILSFGAPLANTYKIVVDERELLFETSEVVDVAKLMKAYISMIVKKRYSTTRSASSQGSSR

SEQ ID NO: 268371 - protein, 1397 aa, Artificial Sequence
  derived and/or modified sequence
MLETVRIRKAGYAVRRPFQDFYKRYKVLMRNLALPEDVRGKCTSLLQLYDASNSEWQLGKTKVFLRESLEQKLEKRREEEVSHAAMVIRAHVLGFLARKQYRKVLYCVVIIQKNYRAFLLRRRFLHLKKAAIVFQKQLRGQIARRVYRQLLAEKREQEEKKKQEEEEKKKREEEERERERERREAELRAQQEEETRKQQELEALQKSQKEAELTRELEKQKENKQVEEILRLEKEIEDLQRMKEQQELSLTEASLQKLQERRDQELRRLEEEACRAAQEFLESLNFDEIDECVRNIERSLSVGSEFSSELAESACEEKPNFNFSQPYPEEEVDEGFEADDDAFKDSPNPSEHGHSDQRTSGIRTSDDSSEEDPYMNDTVVPTSPSADSTVLLAPSVQDSGSLHNSSSGESTYCMPQNAGDLPSPDGDYDYDQDDYEDGAITSGSSVTFSNSYGSQWSPDYRCSVGTYNSSGAYRFSSEGAQSSFEDSEEDFDSRFDTDDELSYRRDSVYSCVTLPYFHSFLYMKGGLMNSWKRRWCVLKDETFLWFRSKQEALKQGWLHKKGGGSSTLSRRNWKKRWFVLRQSKLMYFENDSEEKLKGTVEVRTAKEIIDNTTKENGIDIIMADRTFHLIAESPEDASQWFSVLSQVHASTDQEIQEMHDEQANPQNAVGTLDVGLIDSVCASDSPDRPNSFVIITANRVLHCNADTPEEMHHWITLLQRSKGDTRVEGQEFIVRGWLHKEVKNSPKMSSLKLKKRWFVLTHNSLDYYKSSEKNALKLGTLVLNSLCSVVPPDEKIFKETGYWNVTVYGRKHCYRLYTKLLNEATRWSSAIQNVTDTKAPIDTPTQQLIQDIKENCLNSDVVEQIYKRNPILRYTHHPLHSPLLPLPYGDINLNLLKDKGYTTLQDEAIKIFNSLQQLESMSDPIPIIQGILQTGHDLRPLRDELYCQLIKQTNKVPHPGSVGNLYSWQILTCLSCTFLPSRGILKYLKFHLKRIREQFPGSEMEKYALFTYESLKKTKCREFVPSRDEIEALIHRQEMTSTVYCHGGGSCKITINSHTTAGEVVEKLIRGLAMEDSRNMFALFEYNGHVDKAIESRTVVADVLAKFEKLAATSEVGDLPWKFYFKLYCFLDTDNVPKDSVEFAFMFEQAHEAVIHGHHPAPEENLQVLAALRLQYLQGDYTLHAAIPPLEEVYSLQRLKARISQSTKTFTPCERLEKRRTSFLEGTLRRSFRTGSVVRQKVEEEQMLDMWIKEEVSSARASIIDKWRKFQGMNQEQAMAKYMALIKEWPGYGSTLFDVECKEGGFPQELWLGVSADAVSVYKRGEGRPLEVFQYEHILSFGAPLANTYKIVVDERELLFETSEVVDVAKLMKAYISMIVKKRYSTTRSASSQGSSR

SEQ ID NO: 268372 - DNA, 2233 bp, Artificial Sequence
  derived and/or modified sequence
cgcaggtcccgcccctctcgtagcctcgccccgcccgccgcgcaggcgccgtccgagggctccgtttgaaacatggcgcgggctggccctcggctggtgctgagcgaggaggcggttcgggcgaagagcggcttagggcctcaccgcgacctggctgagcttcagtcattgtctattcctggaacttaccaagagaagatcacccacctgggacattctctgatgagtttaacaggtctgaaatctttggatctctcgcgcaactccttggttagtctggagggcattcagtacctgactgcattggagagtctcaatctctactacaactgcatctcctcgttggcagaagtgtttcggctccacgccttaaccgagctcgtggatgtggacttccggctgaaccccgtggtgaaggttgagcctgactaccgcctttttgttgtgcacctgctccccaagctccagcagctggacgatcgccccgtgagagcaagcgagcggaaggcttcccgactgcattttgcatcagaggactcactcgactccaaagagagcgtcccagcttctttgaaagagggcagaatccagacatctgttgagcccgcagttggtacagtaccagtgtggggactctgggaagcagggccgtgagacgaggaggagcagctgcagagggtgctgtctggagaagatgccttggagccagctctgtggagagcttccgccactgtacggagcggagccagaggcctcccgtgcccccaggccacacacgtacttcaccccacacccagactccatggataccgaggactcggcctcttctcagaagttggatttgtcaggagaaatggtgcctggtcccctgccagcccccggaaagtgcaggaagcgaagaatgcctgttggaagattccagacgttttcggaccaggagggtttgggctgcccggagagaactcatgggtcctccgtgcccaaggagagcctgagcagacaggacagctcagaaagcaggaacgggaggaccttgtctcagcctgaggcctcggagactgaggagcagaggtctcggggtgtgaccgacaccagagagccgtctcccgggtcacactcggctctacccgggaagaagacggccctgcaggcggcgctcctggagacgctcttggacctggtggacaggagctggggcggctgcaggtccctgcacagcaacgaggcattccttgctcaggcaagacacatcttgtcatctgttgaagaattcacagcagctcaggacagctctgcgatggtgggtgaagatgtcggctccctggctctggagagtaagtccctgcaaagccgccttgctgagcagcagcagcagcacgcccgggagatgagcgaggtgacggcggagctgcaccacacacacaaggagctggatgatttgagacaacatttagataaatctttggaagagaacagtaggttaaaatcgcttttgttgagtatgaaaaaggaagtgaagagtgcagacactgcagccacgttaaatttgcagatcgctggacttcaaacaagtgtgaagaggctgtgtggcgagattgtggaactgaagcagcacctggagcactacgacaagatccaggagctcacgcagatgctgcaggagagccacagctccctggtcagcaccaatgaacacctgctgcaggagctgagccaggtgcgggcgcagcacagagccgaggtggagcagatgcactggagctaccaggagctcaagaagaccatggccctgtttccacacagcagcgccagccatggaggctgccaggcctgctgactcctgccgagaagctgggccaccccttaagcttcctggtaaagttacattgtctgcacctttgtacttctttattgagtgtactggctggcaagagttctctcttctgttggtaattatttaggatttttggaatgtattcaggacctgtagcttggttttctaaagcacctcgtaaaatgatatgattactccaagccctctgcatgttttcagacagaacacattgacatattttgagacaaactgactattaatcttgtatccagtatcctgagatgaagtaaatgcagtgttctactgcctgatgtgaaagagagctatgtatgataattaaagaaaataattttctgtgtaacaagcaatctttatttaataaacaaatacattgttctg

SEQ ID NO: 268373 - protein, 542 aa, Artificial Sequence
  derived and/or modified sequence
MTKSNGEEPKMGGRMERFQQGVRKRTLLAKKKVQNITKEDVKSYLFRNAFVLLTVTAVIVGTILGFTLRPYRMSYREVKYFSFPGELLMRMLQMLVLPLIISSLVTGMAALDSKASGKMGMRAVVYYMTTTIIAVVIGIIIVIIIHPGKGTKENMHREGKIVRVTAADAFLDLIRNMFPPNLVEACFKQFKTNYEKRSFKVPIQANETLVGAVINNVSEAMETLTRITEELVPVPGSVNGVNALGLVVFSMCFGFVIGNMKEQGQALREFFDSLNEAIMRLVAVIMWYAPVGILFLIAGKIVEMEDMGVIGGQLAMYTVTVIVGLLIHAVIVLPLLYFLVTRKNPWVFIGGLLQALITALGTSSSSATLPITFKCLEENNGVDKRVTRFVLPVGATINMDGTALYEALAAIFIAQVNNFELNFGQIITISITATAASIGAAGIPQAGLVTMVIVLTSVGLPTDDITLIIAVDWFLDRLRTTTNVLGDSLGAGIVEHLSRHELKNRDVEMGNSVIEENEMKKPYQLIAQDNETEKPIDSETKM

SEQ ID NO: 268374 - DNA, 1629 bp, Artificial Sequence
  derived and/or modified sequence
atgacgaaatctaacggcgaggagcctaaaatggggggccggatggaaagattccaacaaggcgtacgcaaacgcacactcttggctaagaagaaggtgcagaacatcactaaggaggatgtgaaaagctatctgtttagaaacgcatttgtgctgctgaccgtaacagcagtgatcgtggggaccattttaggctttacactgagaccatacaggatgagctaccgggaggtcaagtatttcagctttccgggagagctgctgatgcggatgctccagatgctggtgcttccactcattatctccagtttagtgactggaatggccgccctggactcaaaggcaagcgggaaaatgggtatgcgtgcagtggtttattatatgacaacaacaatcattgcagttgtcattggaattataatcgtgattataatccatcctgggaaggggacaaaggagaatatgcacagggaaggcaaaatcgtgagagtaacagctgcggacgcttttttggatcttattcggaacatgtttccacccaatctggtggaagcctgcttcaagcaattcaaaactaactacgagaagcgcagtttcaaggtcccgattcaggccaatgaaacattagtgggcgctgtgatcaataacgtgagcgaggcgatggaaaccctcaccagaattaccgaggaactagtgccggtgcctgggtcggtgaacggtgtcaatgcactgggcttggttgttttttctatgtgcttcggcttcgtaatcgggaacatgaaagagcagggtcaagcgctcagagaatttttcgactccctgaacgaggcaattatgcgtctggtcgccgtgataatgtggtatgcccctgtgggtattttatttctcatcgccggaaagatcgtggaaatggaggatatgggcgtgatcggggggcagctggccatgtacaccgtaacagtcattgtgggcctgctgatacacgcagtcattgtcttgcccctgctttacttccttgtgacaaggaagaacccatgggtctttatcggtggtctgttgcaggccttgatcaccgctttagggaccagtagcagctctgccaccctacccattacctttaagtgcctggaggagaacaacggagtagacaagcgcgtgacgcgattcgtgctgccagtgggggctactataaacatggacggtactgcactgtacgaagcattggctgcaatctttatcgcccaggtaaacaacttcgaactgaactttggccagataataactataagcataaccgccaccgcagctagcataggggccgccggtatcccccaggcagggctcgttacaatggttatcgtgctgacatccgtcggtctcccaaccgacgacataacactaataatcgccgttgattggtttttggataggctacgcaccacgacaaacgtgttgggcgacagtctgggtgcaggtattgtggaacacctctcacgccacgagctcaaaaatcgggacgttgagatgggaaatagcgtcattgaggagaatgagatgaagaaaccttatcagctgatcgctcaggataatgagaccgagaaacctattgattccgagacgaaaatgtag

SEQ ID NO: 268375 - DNA, 1629 bp, Artificial Sequence
  derived and/or modified sequence
atgaccaagagcaatggagaggagcccaagatgggcggccgcatggagcgcttccagcagggcgtgaggaagaggaccctgctggccaagaagaaggtgcagaacatcaccaaggaggatgtgaagagctacctgttcagaaatgcctttgtgctgctgactgtgacagctgtgattgtgggcaccatcctgggcttcaccctgcggccctacaggatgagctaccgggaggtgaagtacttctccttccctggagagctgctgatgaggatgctgcagatgctggtgctgcccctcatcatcagcagcctggtgacaggcatggccgccctggacagcaaggccagcggcaagatgggcatgagagctgtggtgtactacatgaccaccaccatcatcgctgtggtgattggcatcatcatcgtcatcatcatccaccctgggaagggcaccaaggagaacatgcaccgggagggcaagatcgtgcgggtgacagctgctgatgccttcctggacctgatccggaacatgtttcctcccaacctggtggaggcctgcttcaagcagttcaagaccaactatgagaagaggagcttcaaggtgcccatccaggccaatgagaccctggtgggcgccgtcatcaacaacgtgtctgaggccatggagaccctgacccgcatcacagaggagctggtgcctgtgcccggctctgtgaatggagtgaatgccctgggcctggtggtgttctccatgtgctttggatttgtgattggcaacatgaaggagcagggccaggccctgcgggagttctttgacagcctgaatgaggccatcatgaggctggtggccgtcatcatgtggtacgcccctgtgggcatcctcttcctgattgctgggaagatcgtggagatggaggacatgggcgtcatcggcggccagctggccatgtacacagtgaccgtcatcgtgggcctgctgattcatgctgtgattgtgctgcccctgctgtacttcctggtgaccaggaagaacccctgggtgttcatcggcggcctgctgcaggccctgatcacagccctgggcaccagcagcagcagcgccaccctgcccatcaccttcaagtgcctggaggagaacaacggggtggacaagagggtgaccaggtttgtgctgcctgtgggcgccaccatcaacatggatggaacagccctgtatgaggccctggccgccatcttcatcgcccaggtgaacaactttgagctgaactttggccagatcatcaccatcagcatcacagccacagctgccagcatcggggctgctggcatcccccaggccggcctggtgaccatggtgattgtgctgacctctgtgggcctgcccacagatgacatcaccctcatcatcgctgtggactggttcctggaccggctgcggaccaccaccaacgtgctgggggacagcctgggcgccggcatcgtggagcacctgagcagacatgagctgaagaacagagatgtggagatgggcaacagcgtcatcgaggagaatgagatgaagaagccctaccagctgattgcccaggacaatgaaacagagaagcccatcgacagcgagaccaagatgtag

SEQ ID NO: 268376 - DNA, 1629 bp, Artificial Sequence
  derived and/or modified sequence
atgaccaagagcaacggcgaggagcccaagatgggcggccggatggagcgttttcagcagggagtccgtaagaggacattgttagctaagaaaaaggtccaaaacattacgaaggaagatgtcaaatcatatctgtttagaaatgccttcgtgctgctgacagtgacagcggttatcgtgggcaccatactggggttcacactgcggccttatagaatgagctatagagaggttaagtattttagcttccctggtgaattacttatgaggatgctgcagatgctggtcctgccacttattatcagttctctcgttacaggaatggctgctctggactctaaagcctctgggaagatggggatgcgggccgtcgtgtattacatgacgactactattattgcggtggtgattggcattatcatcgtgatcattatccatccaggcaagggcacaaaggaaaatatgcacagagaaggaaagatcgtaagggtcaccgccgcggatgcatttttggatctgattcgaaatatgtttcccccgaatttggttgaagcctgcttcaaacagttcaaaaccaactacgagaagcggtccttcaaggtgcctattcaggccaacgaaacactggtcggtgccgtgattaacaacgtcagtgaagctatggagactctgacaagaatcaccgaagagctggtgccagtgcctggcagcgtgaatggcgtgaacgctctgggactggtggtgttcagcatgtgtttcggctttgtgatcggcaacatgaaagagcagggccaggccctgagagagttttttgactcactcaatgaagctataatgagactggtggccgtgataatgtggtacgctccggttggcatcctatttctaatcgcgggcaagattgtggagatggaggacatgggcgtgattggcggtcagctcgcaatgtacacggtcacagtcatcgtgggactcctgatccacgccgtgatcgtccttccattgctttacttcctggtcacccgcaagaacccgtgggtgtttattgggggattacttcaggcactgatcaccgccttgggcacatcttctagctcggcgaccttgccaataacttttaagtgcctggaggagaataacggcgttgataagagggtaacacgattcgtccttcctgtaggggcgaccattaatatggatgggaccgcgctgtatgaggcgctggccgcaatcttcatcgctcaggtcaacaacttcgagcttaattttggccagattattactatttccatcacagcaacagcagcgagcatcggggcagcgggcatcccacaggccggtctggtgacaatggtcattgtactgacatctgtgggtcttccaactgacgacattacactcatcattgctgtagactggttccttgacagactgcggactactaccaacgtgctgggagacagcttgggggccggcattgttgagcacctgtcacggcatgagcttaaaaacagggacgtcgagatgggtaacagcgtgattgaagagaatgagatgaagaagccatatcagctgattgcccaggacaatgagaccgagaagcccattgacagtgaaacaaaaatgtag

SEQ ID NO: 268377 - DNA, 1629 bp, Artificial Sequence
  derived and/or modified sequence
atgaccaagtccaatggggaagaacccaagatggggggtcgcatggagagattccaacagggcgtccggaagcgtaccttattggctaaaaaaaaggtgcaaaatattacaaaggaagacgtgaagtcatatctcttccgaaatgcctttgtgctcctaacagtcacagcagtgatagtgggcaccattctgggtttcaccctccgcccatatcgcatgtcatatcgcgaggttaaatatttcagctttcccggagagttgctgatgcgcatgctgcagatgctggtcctgcccctgataatctcatccctcgtgaccgggatggccgctctcgactccaaggctagcgggaaaatgggtatgcgagccgtggtctactacatgacgaccaccattattgctgtggtgatagggataatcatcgtgataattatccacccagggaagggcaccaaggaaaacatgcatagggaaggtaagatcgtgagagttactgcagcggacgctttcctagatttaatcagaaatatgtttcctcctaacctcgtagaggcctgcttcaagcaattcaagacaaattatgaaaaacgttcgtttaaggttccaatacaggccaatgagactcttgtaggcgctgtgatcaataacgtatctgaggcgatggagacactgacgagaatcaccgaagagctggttcctgtgccgggttctgtgaacggtgttaacgcgcttggcctagtggtcttcagcatgtgtttcgggttcgtgatcggcaatatgaaagagcagggccaagcattaagagagttttttgacagcctgaacgaagctatcatgagactggttgctgtcataatgtggtacgcccctgtggggatattgtttctaatcgctggaaagatcgtggagatggaggacatgggcgtgatcggaggccagctggctatgtacactgtcactgtgattgttggcctcctgatccacgctgtgattgtactcccacttctgtatttcctggtcacccggaagaatccctgggtgtttatcgggggactcctgcaggctctgatcactgcgctggggacttcaagctcttccgcaacattgcccataacatttaaatgtctggaggagaacaacggtgtggacaaaagggtgacccgcttcgttcttcctgtcggcgcaaccatcaacatggacgggactgccctgtacgaggctctggccgctatctttatcgcccaggtcaacaactttgaactcaatttcggtcagatcatcaccatatctattaccgcaacagccgctagcattggtgctgctggcattcctcaggctggtctggtgactatggttatagtgctgacatcagtgggtctgcccactgacgatatcacactcatcatcgcagtcgattggtttttagataggctgcgcactactacaaatgtgcttggcgactctctgggcgctggcatcgttgagcatctgtcgagacacgagttgaagaatagggatgtggagatgggtaactccgtgatcgaggagaatgaaatgaagaagccctaccagctcatcgctcaggacaatgagacagaaaagcccatcgacagcgaaaccaagatgtag

SEQ ID NO: 268378 - DNA, 4170 bp, Artificial Sequence
  derived and/or modified sequence
gctttatttttcaattcttcctagtcccggttttgcatttctaatgacagtgaactgacaaagcgtgaaagtggtctaaggagcaaaacaaagccagcaagcctgcttctggtgtgccaagattaatcaatattccagaaacctcggggtttccccctcctccctgtgcggtttccattccccactcctcctttcccgggcacagactcctccccttttcttaagttgccctgatagtaacttgcagtttcagagcacatgcacactgtcagggctagcctgcctgcttacgcgcgctgcggattgttgctccgttgtacctgctggggaattcacctcgttactgcttgatatcttccaccccttacaaaatcagaaaagttgtgttttctaataccaaagaggaggtttggctttctgtgggtgattcccagacactgaagtgcaaagaagagaccctcctagaaaagtaaaatatgactaaaagcaatggagaagagcccaagatggggggcaggatggagagattccagcagggagtccgtaaacgcacacttttggccaagaagaaagtgcagaacattacaaaggaggatgttaaaagttacctgtttcggaatgcttttgtgctgctcacagtcaccgctgtcattgtgggtacaatccttggatttaccctccgaccatacagaatgagctaccgggaagtcaagtacttctcctttcctggggaacttctgatgaggatgttacagatgctggtcttaccacttatcatctccagtcttgtcacaggaatggcggcgctagatagtaaggcatcagggaagatgggaatgcgagctgtagtctattatatgactaccaccatcattgctgtggtgattggcataatcattgtcatcatcatccatcctgggaagggcacaaaggaaaacatgcacagagaaggcaaaattgtacgagtgacagctgcagatgccttcctggacttgatcaggaacatgttccctccaaatctggtagaagcctgctttaaacagtttaaaaccaactatgagaagagaagctttaaagtgcccatccaggccaacgaaacgcttgtgggtgctgtgataaacaatgtgtctgaggccatggagactcttacccgaatcacagaggagctggtcccagttccaggatctgtgaatggagtcaatgccctgggtctagttgtcttctccatgtgcttcggttttgtgattggaaacatgaaggaacaggggcaggccctgagagagttctttgattctcttaacgaagccatcatgagactggtagcagtaataatgtggtatgcccccgtgggtattctcttcctgattgctgggaagattgtggagatggaagacatgggtgtgattggggggcagcttgccatgtacaccgtgactgtcattgttggcttactcattcacgcagtcatcgtcttgccactcctctacttcttggtaacacggaaaaacccttgggtttttattggagggttgctgcaagcactcatcaccgctctggggacctcttcaagttctgccaccctacccatcaccttcaagtgcctggaagagaacaatggcgtggacaagcgcgtcaccagattcgtgctccccgtaggagccaccattaacatggatgggactgccctctatgaggctttggctgccattttcattgctcaagttaacaactttgaactgaacttcggacaaattattacaatcagcatcacagccacagctgccagtattggggcagctggaattcctcaggcgggcctggtcactatggtcattgtgctgacatctgtcggcctgcccactgacgacatcacgctcatcatcgcggtggactggttcctggatcgcctccggaccaccaccaacgtactgggagactccctgggagctgggattgtggagcacttgtcacgacatgaactgaagaacagagatgttgaaatgggtaactcagtgattgaagagaatgaaatgaagaaaccatatcaactgattgcacaggacaatgaaactgagaaacccatcgacagtgaaaccaagatgtagactaacataaagaaacactttcttgagcaccaggtgttaaaaaccattataaaatctttccatctcattacagctcattcgctccagcaagcccgtcatcttccctttcctcccttctgataagactggaaaatagtcctccaaaacacaagggaggattttgggtggccaaagtgtacaattttcatcccacaattgaaatttttaaatcatttcatgttagtcttaccgaataaggtaccaagatcacaaatagtgttgatcagatcttacaagtttatgtggcacacaatcctataaatgtgatttttttatataagttaaagagacaaatagtaggctaaaaacattttaaaatcaacttttgaaatttaaaaatctttcagaatacaattcagttttagtttcaaaatgttaacaacttgaattacaaccggttatcagttggacagtaagattttatccctttctcttctgactggtatacctatttcattagtagctaggtgcacatatacatctagcacagctgtgaggacagacagaaggcaaagtttccatgtggccttgagcaagtcccatctcacctctaggcctcagtgtcctcatctataaaatgagggacttccctagaagtcttcatggtctcttccagcccagacatcctgtgatgtcatgaaagcacctgccctctgtttcccctcagaacaccctgtaccatccatggagcacgaggccttcagaaaagacacttcaatgggagtgaacatttctaactaaggacaggatggctgtgtgtggtggtcaccaggtcctgtgagcaaagtgcaggttatgcaagtcgccaggcaggaggccattccaggagtgggattattcatcaaactctttgcccagttcatcccaatgggggaagtattcccttctttcctactctgggaagaatgtctcctgccactcctcaactgatgatagacttcgaaaacagatgagaagactagcagctagcaagggtgcttgtggtcacactgtggaacactaaagagctaggaaagagttgagcacaggcaacattacaaacaaaggatttgaaaacaccaagagtacaggtcttctttaaggaagaataaaaaagaagaggttcatttttctggctttttttttcacctgaaacactttttctcgagtccaaaatcattccccccgtgaagtctgcttaccaaaacataagacgacttatatatttgaaagaagtcaaatgaatgagctctctaatagaagtccatgagttgagtgggtatttcttatttgaaagtgtttttctttaatcaaaagtccttagaatgagggaaacaaaatatttatttgttttggaatcccacttatcaaatcattcaaaactttcagctggagtggggtttgcttttgttttgtttgtgtccataagagaaatggtagaagatgaatcagtatgaagacactgtcaatgaggttatgagaaaaaaacagcaggggcattagtttcaggcaaggcagctcccaggtttagagattaatttttaccccctaaggaatatccagtcaaagacgctgagtgggagctgtcaggcagtagcagctgtgtttgagtttctggctgaaaatggtgaagaatggacttaattatgctaacaaactgaaaaatctagacatagatcctctgatatacaattagagatatttttatatagaccccaagcattctgtgcataaaagttaacattaggctgtggtgcagtaaccatttaatgtcgaggctctatttcggaaatacactacaaatgttaaagtacgtggctgtcctcttaagacactagtagagcaaagacttaatcatatcaacttaattctgttacacaatatgtgttttttaatatactaaccatttcttatggaaaggtcctgtggggagcccatcctctcgccaagccatcacaggctctgcatacacatgcactcagtgtggactgggaagcattactttgtagatgtattttcaataaagaaaaaaatagttttacattaa

SEQ ID NO: 268379 - DNA, 1629 bp, Artificial Sequence
  derived and/or modified sequence
atgaccaagagcaacggcgaggagcccaagatgggcggcagaatggagagattccagcagggcgtgagaaagagaaccctgctggccaagaagaaggtgcagaacatcaccaaggaggacgtgaagagctacctgttcagaaacgccttcgtgctgctgaccgtgaccgccgtgatcgtgggcaccatcctgggcttcaccctgagaccctacagaatgagctacagagaggtgaagtacttcagcttccccggcgagctgctgatgagaatgctgcagatgctggtgctgcccctgatcatcagcagcctggtgaccggcatggccgccctggacagcaaggccagcggcaagatgggcatgagagccgtggtgtactacatgaccaccaccatcatcgccgtggtgatcggcatcatcatcgtgatcatcatccaccccggcaagggcaccaaggagaacatgcacagagagggcaagatcgtgagagtgaccgccgccgacgccttcctggacctgatcagaaacatgttcccccccaacctggtggaggcctgcttcaagcagttcaagaccaactacgagaagagaagcttcaaggtgcccatccaggccaacgagaccctggtgggcgccgtgatcaacaacgtgagcgaggccatggagaccctgaccagaatcaccgaggagctggtgcccgtgcccggcagcgtgaacggcgtgaacgccctgggcctggtggtgttcagcatgtgcttcggcttcgtgatcggcaacatgaaggagcagggccaggccctgagagagttcttcgacagcctgaacgaggccatcatgagactggtggccgtgatcatgtggtacgcccccgtgggcatcctgttcctgatcgccggcaagatcgtggagatggaggacatgggcgtgatcggcggccagctggccatgtacaccgtgaccgtgatcgtgggcctgctgatccacgccgtgatcgtgctgcccctgctgtacttcctggtgaccagaaagaacccctgggtgttcatcggcggcctgctgcaggccctgatcaccgccctgggcaccagcagcagcagcgccaccctgcccatcaccttcaagtgcctggaggagaacaacggcgtggacaagagagtgaccagattcgtgctgcccgtgggcgccaccatcaacatggacggcaccgccctgtacgaggccctggccgccatcttcatcgcccaggtgaacaacttcgagctgaacttcggccagatcatcaccatcagcatcaccgccaccgccgccagcatcggcgccgccggcatcccccaggccggcctggtgaccatggtgatcgtgctgaccagcgtgggcctgcccaccgacgacatcaccctgatcatcgccgtggactggttcctggacagactgagaaccaccaccaacgtgctgggcgacagcctgggcgccggcatcgtggagcacctgagcagacacgagctgaagaacagagacgtggagatgggcaacagcgtgatcgaggagaacgagatgaagaagccctaccagctgatcgcccaggacaacgagaccgagaagcccatcgacagcgagaccaagatgtag

SEQ ID NO: 268380 - protein, 1813 aa, Artificial Sequence
  derived and/or modified sequence
MADADILSETFQLLIDSAKDFSKRLWGLVPFGLYLPAPPLYCPQPAILSEEDGDDLLLKAEKNNRQKVSGILQRVLLLFRAAQCSFPVAQWYILQLRWARKVMQKIRMKGSLPSLSPFPQSLLNYCKGGIAFFRPGAAGDHKLDEVSIRAIGCFRELCALCWMLHVRDKLSYSCRQYQKARENVKGEKDLEVEFDSCMIEHCLSAVEWAYRMLPFSRFFNMEELIQDIILSLIGELPPIRKVAEIFVKAFPYPEDVRVPLRDKYHSLHQRLRHCVVKGPQTEEMMSVVMHSIQKVRVKALKRVQRNIGSFEVNIWEPIEEEKPDEAPGVDRYSLGTSLSRSTLTELGDSVVHSDADTFSEALSVEEKSRINIYQRNAPNHMELTSIHKPTDKRKMCNQKENPTKKEDHEKLSQNTLPVIGVWEFERDDDEYIKFLDLFLSYILERDLPYSRDADIPFLTSFSGKLREHELNSLLFDVHTTLKRHQSKTKSQNVFRAGSCFVVAPESYESEKSSSLNDEYGMHLENQKLSSSVLVNQGIKPFLQYPSNEVNKNEGMSGLFGLKQRSIYKIQDDTREKCLIQRSSNHIFWTPKSIKTRRCIFKAIQCNDINPQEDLPLALNTFGSIGRLLEWMIRWSNRRLLCDSGITESSSEYSPVIRVKTSTAAILTSLWLLEQPYFATYKAKNAIIKMVENRDTGCQIGPNIERESKSDAGGSVAVATPGGTEERNGQNKSCQNILKMPTEAKNPDIKEINDDIISITHNTKKEFIDIDENLLEVEAFTEEEMDMHISDYEEDIEESVGGFRSPSLAICMMTLPQQLEEEFTEEVQCQREEPLETIMEEKSTEQKGMIEAFSHPGHTTPQSMQVDTSSEISSAQISTYKEKSSSVPLLISNGVNVASQPPAPTPQKTQRNEFTAQLPDCSESVRQMLQDEMFKLVQLQQINFMSLMQIVGSSFANLPDTQQLVQQSQSVHLGESQESNLRGCGDVEDSNKNLKERFFIKPQSMGENAREPRKNSPHCHEGTIPSGQNSTGNVQNVPHGSIPLCQLNGQPRKKGPIPSSQNLPSTSFYPAPAGNTHLYLLSTPSVVQKAPRLIPHAKTFSPGDGFPLLQFKSKQEFQPLFLHTGSIPQVPFRPLPQPREAWGLSDSFQPALPQRAAQTTPASHLNVSQYNTEARKKEVEQKTWAETVITEIPNHVNLDQYVGQENLTPQQDSSVFIKPEKLFDVKPGTLEISPHHSFGLPLLYLPLKPPNMFPSTSRASITVPSTPIQPIAEERKYPRLSLLHSHLSPENRCKKTQLIPLENLIAFKQSQQKLTHNLFEQGDAGHLQLLKVKIEPPEVRQGKDSKKRQRRRAEKELQEKRCEKLRRKPNVTFRPENSIINNDDSEIIKKPKEQQEHCGSHPLDDFDVPFEMLQDDNTSAGLHFMASVKKKAIGSQDASTNTDPEHEPLTAPQLLVPDVYLNLKLSSEMSEKPWSPSIPHTVTNLVGHTYINVIDIEANDLLQELPVREEPSNDNVIKQQSDHLAVPSSAELHYMAASVTNAVPPHNFKSQEVTPACLDGKSLRAGITEVKEPSVTSPTPSDIQQNKGLPKPEFRFKGQSTKSDSAEDYLLWKRLQGVSAACPAPSSAAHQLEHLSAKLQKIDEQLLAIQNIAENIEQDFPKPEMLDLHCDKIGPVDHIEFSSGPEFKKTLASKTISISEEVRFLTHMDEEDQSDKKETSEPEFSITENYSGQKTCVFPTADSAVSLSSSSDQNTTSPGMNSSDELCESVSVHPLQMTGLTDIADIIDDLIIKDGVSSEELGLTEQAMGTSRFS

SEQ ID NO: 268381 - DNA, 9027 bp, Artificial Sequence
  derived and/or modified sequence
ggttctgagcaggcgccgtggcagcgcccgcgccccctgcccgccctccgccgtcgccaggacgcaggctcgcgtcagggctggcggtagggcccgcagctgtcggcctggcgtcttcaccccgcgcagtcggcctcgcctagccttctcgcgcctgactggccggaccctgcccctggcggagaatcttgggactgttttacttaattggtcattgatagcttaacaaacatggagataagattagaaatcttgacatcaacaggtattaagcagaaaaaaccatggccacgtgtctcctggttgggaaaggaaaaagaagccgtttttcttttggatgataaattcataaatgaaattaatttgctatcaggaaagataaagaagaaaattcctagtctgcagcctttcttgaaggatgttattgtcctaacaacatccagtaatgatgcctggctggctggggtactaactacaggagagcttttcctttggaacaaagatcaagattgtttgaaaactataccaataactgaaaagcctaaggaaatgatcaaagctacagtcgcaagctctttgagactgtacttgtatgtatctggaaatgggaaaagaattgtgctcataacaccttctggatgcatatttctttgggaatatttggaattaaagaatatcttatcttctaaaagcctttcattggcgggtcggtggtcccaggtcatacctgaagaagcagttctcttgccttccaccgaagataaagaagctgtagtgaatgctgtttttataaaaaatgagttatttggagactgctgcctgtgttcatttactttttattctggggaatgcctgaagttaacatttctagcaattcggtggcatgagaatgtatttacatctgtaagatcattgccataccatgttcattgggctcaacaagactgtcatctctgtagtttaattcctaaatgtgaatcagtaaagtcaagaggagctctaatttctgccttttcaagagatggccttaccctggcagtaactcttaatcagaaagaccccaaggcaactcaggtattatttataaacacactgaattttgttactctctgtggtagccttaaaggatgtagtaacaagagtcccgtggttccagctacacttattaggtcctactgggtaggtgatatcagctggacgcatgatagtctttttctggcttgtatgttaaaacgtggctctctggttttattgacctgccaaggtgaattgctaacattaattacatttggttgctctatagaatttggcccagcagaatttattcctcttcatccactaataacgtatagaccacagcagtttacgtttcaagattcaaataattctgttgattcatcagcttctgatagtgaccctatgagacagagattttctataaaagcacactcacggttaccctacctcgttatatctgatggatatatggtcacaacccttcgatttcttgatagcctatctccatcagtacacatgagatcacttctacttgattcaacccagaggcttgagaaaatatatcaaagtgtgatattgtctaagccaaaaggcaaaggactgaacttgcgatcactgaattccctaaggtctagcctgttagaacaccaaggaaatgaaagttcagccgatttcactgtccccaaattcttgcaggcagaagaaacaataaatgaaaatgcagcagattttcaggattttgaagcagaagaaactaacgaaggcagacactttccagacaacttatgtcctttttggaacaaaagagatgatgtgctgtgtagtagtatgaaggaaggaagattggaatttgcatctatgtttgatacgatacatgcaaaggatgatagtgaggagacagatagaaccattacagaactgcattctatccagaaaagtctacttgcagcgtggactataggaatttcaaaaactgtgacagaaaaaaatttaatgttaaattacatagtagtttgtatcactcattttttttacattcttcaatttataaaatgtccttttcctaaacttgatcttgttttaagcaaaagctcaagacataatgcatggatactttgtatctttcaactttttcatcagtgtttatcaatccattattgggatataagatacaaacaagatgtggggcatttgataaagctgacctcaaatactgtaaaacttttgctgactcagcaacaaaagggtcagttattctcagagaaacttttagcttgtttttatttactcaaaatggtagctgacaatttaaatggtgtatacattcttcaacctgaagttatttcagcatcagctgatggaagtaaaataacagctcaagactcattggtggtacctatttttcagatgtttcaagatagtggttttcagaaaaactggtcttggaactcatttttcaagattcatcctcaagtagtaaatcctgtgcaacagccaggacacagattgcttattctctggagaatactgtacaaaaaaactttatggtatcaagcacaattaaatcgaagagttcctgaagctgatagtcagttaactgaaaagatgacacatgaagcatctactgtcaagtccctgttatgtcatttgcaggctaacctacagagtactggagattgcttgaatcaaaccttagaacttaaatctatcaatggggaagaatgttttttattaggatcatatgaaaagtctgttcagctgtggaaaaaagctctacaagaaatcgaagagaaaggaggaagaaggacgtattttcttcagatacgctattatctttctctcttatactgccacctctatagctataatttaaatgatgctcaaggattgtgtgatcagctagcaagagaaatcctgagatggtcccaactacctgtaaaagaaaataaagatttttcaggtgctgcaaagtctcattttgagtgtggaatggtgggcggtgttcatcctgaggcagcagtgagagtcgtccagtccatggctcgtttcatggctgcctatttcaccaatcagcagctttgcattttgccccctcatcatgtgaatgttcttcccccacttcatattaaaacagagcagtcctttcgacttattcctctgcaacactctaaggtggccagtgttgttagagatcagaatctctctaatgtgtggacagttgaatatgcacttgaattactatttattggtggcctggttccagaggctgtgtggttggcatataaacttggagactggaagacgtctgtttcaattggtgtggctttccagctgttctgtaaacgtgatagcaatttcatgaggtccaagaaaaagagtctgaatctaccactccgtatgactccagcacagatttttcaggaaaaactgcagtgtgttttaggtcaaccagcctctttggaagcaaaaaatgaaatgggctcaaaatataaacagtttacagatcccattgaagaggaagatgcaaatctgctatttggttcagtacaagaagtactgaaagcatcagttatggccgatgcagatattctttcggagacatttcaacttctgatagactctgccaaggacttcagtaaaagactgtggggcttagtgccattcggcttgtatcttccagctcctccattgtactgtccccagccagctattcttagtgaagaagatggtgatgatcttcttttaaaagctgaaaaaaataatcgccagaaggtatctggaatccttcagcgtgttctcctgcttttccgggcggctcagtgttcttttcctgtagcacagtggtatatattgcagttgaggtgggcaagaaaagtcatgcagaagattcgaatgaaaggatcccttccttcactgagtccttttcctcagtcattacttaattactgtaaaggaggtatcgcattttttagacctggagcagctggagaccacaagcttgatgaagtttccattagagcaataggttgcttcagagaactttgtgctctgtgttggatgctgcatgtccgtgataagttatcctatagttgcaggcaatatcagaaagcaagagaaaatgtaaaaggagaaaaggaccttgaagtggagtttgattcttgtatgattgagcactgtcttagtgcagtggaatgggcttatagaatgctgcctttctctcggttttttaatatggaagaacttattcaggatataattttgagccttattggagaactgccaccaatcagaaaggtagcagaaattttcgtgaaagcatttccctatcctgaggacgtgagggttcctttaagagacaaatatcactctcttcaccagagactcagacactgtgttgtgaaaggaccccagactgaggaaatgatgtctgttgtcatgcattctatccagaaagtgagggtgaaagctctaaaacgtgtgcagagaaatataggctcttttgaagtgaatatatgggaaccaattgaagaagagaaaccagatgaggctccaggtgttgacagatattccctggggactagtttgagcagaagtacactcacagaactaggagattctgtggttcacagtgatgcagatacgttctctgaagctttgtcggttgaagaaaaaagtaggataaatatctatcaaagaaatgccccaaatcacatggaattaacatcaattcataagccaactgataaaaggaaaatgtgtaatcagaaagaaaatcctacaaagaaagaagatcatgaaaagttatcacaaaatacacttcctgtaataggtgtttgggaatttgaacgtgatgatgatgaatatattaaattccttgatctgtttttgagttacattcttgaaagagacctaccttattccagggatgctgacattccatttctaactagtttttctggaaagcttagagaacatgaacttaattctttactttttgatgtacatacaacattaaaacgacatcagagcaaaactaaaagccagaatgtgtttagagctggttcttgctttgttgttgctcctgagtcctatgaatcagaaaaatcatcctctttaaatgatgaatatggcatgcatttagaaaaccagaaactttcatcatcagtactggttaatcaagggatcaaaccttttttacaatatccttcgaatgaagtcaataagaatgaaggaatgagtggattatttggtttaaaacaaaggtcaatttacaaaatacaagatgacactagagagaaatgtctaatccagagatcatcaaaccacattttttggactcccaagtccattaaaactagaagatgtattttcaaagctattcagtgcaatgatattaaccctcaagaagatcttcctttagcactaaacacttttggcagtataggaagactgctggaatggatgataaggtggtctaatagaaggctactctgtgattctggtataactgagtcatcctctgagtacagtccagtaattcgtgtaaagacctctacagctgccattcttacatcattatggcttttggaacaaccctattttgctacatataaggcaaaaaatgccattattaagatggtagagaatcgtgacactgggtgtcagattggacccaatattgagagggagagcaaatcagatgctggcggttcagttgcagtagcaactccaggtggaactgaggaaagaaatggtcagaataaatcttgtcaaaatatcttgaaaatgccaactgaagcaaaaaatcctgatataaaagaaatcaatgatgatattatttccatcactcataatactaaaaaagaatttatagatattgatgagaatcttttagaagtagaagcatttacagaagaggaaatggatatgcacatatcagactatgaagaagacattgaagaatctgttggaggtttcagaagtcccagtcttgccatttgcatgatgactttaccacagcagttagaagaagagttcacagaagaggttcagtgtcaaagggaagaaccactggagacaattatggaggaaaaatcgactgaacaaaaaggtatgatcgaagccttttcacatcctgggcataccactcctcaatcaatgcaagtagatacgagttcagaaatttctagtgcacagatttctacatataaagaaaaatcttcctcagttccacttctgatatcaaatggagtcaatgttgcttcacaaccacctgctccaacacctcagaagacccagagaaatgaattcacggctcagttaccagattgttcggagtccgttaggcagatgctgcaagatgaaatgtttaaattagttcagctgcaacagatcaacttcatgagcctaatgcaaatagtaggatcatcctttgctaatctcccagatacacaacaacttgtacagcagtctcagtctgtgcatttaggggaaagccaagaatcaaacctaagaggatgtggtgatgttgaagacagcaacaaaaatcttaaggagagattttttattaaaccacagtcaatgggagagaacgccagagagcctcgcaagaacagcccacactgccatgaaggaactatcccatctggtcaaaatagtactggaaacgtacagaatgttccacatgggagtattcctttatgtcaattaaatggccagccccggaaaaaaggaccaattccatcatctcaaaacttaccatccacttcgttttatccagctcctgctggaaatactcacctctaccttttgtccacaccttctgttgttcagaaggcacctagacttatcccacatgcaaaaacatttagtcctggtgatggctttcctttgcttcaatttaagtctaaacaagaattccagccccttttcttacatacaggaagtattccacaagttcccttcaggcctttgccacaaccaagagaggcttggggattatctgactccttccaacctgctctgccacagagagcagcacaaactactccagcatcccatttgaatgtaagccagtataacactgaagccagaaaaaaagaagttgagcagaagacgtgggcagaaactgtaattacagaaattcctaatcatgtgaacttggatcaatatgttggacaagaaaatttgacacctcaacaggactcttcagtgtttataaaaccagaaaaactatttgatgttaagccagggacccttgagatatctcctcaccattcctttggacttccgttactatacctgccacttaaacctcctaatatgtttccatcaacctcaagagcatctattacagttccctcaacacctatccaacctatagcagaagaaagaaaatacccaagattgtcattacttcattcacatttgtccccagaaaataggtgcaaaaaaacacaacttatcccacttgaaaacctcattgcgtttaaacaaagccaacagaaactaacacataatttatttgaacaaggtgatgctggacaccttcaacttctaaaggtcaaaatagaaccacctgaagtaagacaaggaaaggacagtaaaaaaaggcaaagaagaagagctgagaaagagctgcaagaaaaaagatgtgagaaactgaggagaaaaccaaatgtgacttttcgaccagagaattccataattaataatgatgattcagaaatcattaagaaacccaaggaacaacaagaacattgtggttcccatcctttggatgacttcgacgttccttttgaaatgctacaagatgataatacttcagctggattgcatttcatggcctctgtaaaaaagaaagctataggaagtcaagatgcaagtacaaatacagacccagaacatgagcctttgactgctcctcagctcttggtcccagatgtctatctaaatctgaagctttccagtgaaatgtcagagaaaccttggtcaccctcaatacctcatacagtaacaaacttggttggacatacttatataaatgtgattgacattgaagctaatgatcttctacaggaattacctgtgagagaagagccttcaaatgataatgttatcaaacagcaaagcgatcatctagcagttccatcgtctgcagagttacattatatggcagcttcagttactaatgctgttcccccacataattttaagagtcaagaagtaactccagcttgtctggatggaaaaagcttgagagcaggcattacagaagtgaaggagcctagtgtcacctcacctacaccatcagacatacagcagaacaaaggtctgccaaaaccagagttccgattcaaaggacagagcacaaagtcagactctgcagaagattatctattgtggaaacggctgcaaggtgtctctgcagcttgccctgcaccaagctctgcagctcaccaactagagcatctcagtgctaagcttcagaaaattgacgagcagttgctagcaatacagaacattgctgaaaacatagaacaggatttccccaagcctgaaatgctagatctacattgtgataagattggaccagtggatcacattgaattctcttctggccctgaattcaaaaaaacattagcttcaaaaaccattagcatttctgaagaagtgcgttttttgacccatatggatgaagaagatcaaagtgacaaaaaggagacttcagaacctgaattttcaataacagaaaattattctggtcagaaaacctgtgtgtttcctactgccgattcagctgtcagcctttccagttccagtgatcagaatactacttctcctggtatgaatagcagtgatgaattgtgtgagagtgtttcagtacatccgctccagatgactggattgactgatattgcagacattattgatgaccttataattaaagacggagtttccagtgaagaacttggcttaacagaacaagctatgggcacctccaggttttcc

SEQ ID NO: 268382 - DNA, 5442 bp, Artificial Sequence
  derived and/or modified sequence
atggccgacgccgacatcctgagcgagaccttccagctgctgatcgacagcgccaaggacttcagcaagagactgtggggcctggtgcccttcggcctgtacctgcccgccccccccctgtactgcccccagcccgccatcctgagcgaggaggacggcgacgacctgctgctgaaggccgagaagaacaacagacagaaggtgagcggcatcctgcagagagtgctgctgctgttcagagccgcccagtgcagcttccccgtggcccagtggtacatcctgcagctgagatgggccagaaaggtgatgcagaagatcagaatgaagggcagcctgcccagcctgagccccttcccccagagcctgctgaactactgcaagggcggcatcgccttcttcagacccggcgccgccggcgaccacaagctggacgaggtgagcatcagagccatcggctgcttcagagagctgtgcgccctgtgctggatgctgcacgtgagagacaagctgagctacagctgcagacagtaccagaaggccagagagaacgtgaagggcgagaaggacctggaggtggagttcgacagctgcatgatcgagcactgcctgagcgccgtggagtgggcctacagaatgctgcccttcagcagattcttcaacatggaggagctgatccaggacatcatcctgagcctgatcggcgagctgccccccatcagaaaggtggccgagatcttcgtgaaggccttcccctaccccgaggacgtgagagtgcccctgagagacaagtaccacagcctgcaccagagactgagacactgcgtggtgaagggcccccagaccgaggagatgatgagcgtggtgatgcacagcatccagaaggtgagagtgaaggccctgaagagagtgcagagaaacatcggcagcttcgaggtgaacatctgggagcccatcgaggaggagaagcccgacgaggcccccggcgtggacagatacagcctgggcaccagcctgagcagaagcaccctgaccgagctgggcgacagcgtggtgcacagcgacgccgacaccttcagcgaggccctgagcgtggaggagaagagcagaatcaacatctaccagagaaacgcccccaaccacatggagctgaccagcatccacaagcccaccgacaagagaaagatgtgcaaccagaaggagaaccccaccaagaaggaggaccacgagaagctgagccagaacaccctgcccgtgatcggcgtgtgggagttcgagagagacgacgacgagtacatcaagttcctggacctgttcctgagctacatcctggagagagacctgccctacagcagagacgccgacatccccttcctgaccagcttcagcggcaagctgagagagcacgagctgaacagcctgctgttcgacgtgcacaccaccctgaagagacaccagagcaagaccaagagccagaacgtgttcagagccggcagctgcttcgtggtggcccccgagagctacgagagcgagaagagcagcagcctgaacgacgagtacggcatgcacctggagaaccagaagctgagcagcagcgtgctggtgaaccagggcatcaagcccttcctgcagtaccccagcaacgaggtgaacaagaacgagggcatgagcggcctgttcggcctgaagcagagaagcatctacaagatccaggacgacaccagagagaagtgcctgatccagagaagcagcaaccacatcttctggacccccaagagcatcaagaccagaagatgcatcttcaaggccatccagtgcaacgacatcaacccccaggaggacctgcccctggccctgaacaccttcggcagcatcggcagactgctggagtggatgatcagatggagcaacagaagactgctgtgcgacagcggcatcaccgagagcagcagcgagtacagccccgtgatcagagtgaagaccagcaccgccgccatcctgaccagcctgtggctgctggagcagccctacttcgccacctacaaggccaagaacgccatcatcaagatggtggagaacagagacaccggctgccagatcggccccaacatcgagagagagagcaagagcgacgccggcggcagcgtggccgtggccacccccggcggcaccgaggagagaaacggccagaacaagagctgccagaacatcctgaagatgcccaccgaggccaagaaccccgacatcaaggagatcaacgacgacatcatcagcatcacccacaacaccaagaaggagttcatcgacatcgacgagaacctgctggaggtggaggccttcaccgaggaggagatggacatgcacatcagcgactacgaggaggacatcgaggagagcgtgggcggcttcagaagccccagcctggccatctgcatgatgaccctgccccagcagctggaggaggagttcaccgaggaggtgcagtgccagagagaggagcccctggagaccatcatggaggagaagagcaccgagcagaagggcatgatcgaggccttcagccaccccggccacaccaccccccagagcatgcaggtggacaccagcagcgagatcagcagcgcccagatcagcacctacaaggagaagagcagcagcgtgcccctgctgatcagcaacggcgtgaacgtggccagccagccccccgcccccaccccccagaagacccagagaaacgagttcaccgcccagctgcccgactgcagcgagagcgtgagacagatgctgcaggacgagatgttcaagctggtgcagctgcagcagatcaacttcatgagcctgatgcagatcgtgggcagcagcttcgccaacctgcccgacacccagcagctggtgcagcagagccagagcgtgcacctgggcgagagccaggagagcaacctgagaggctgcggcgacgtggaggacagcaacaagaacctgaaggagagattcttcatcaagccccagagcatgggcgagaacgccagagagcccagaaagaacagcccccactgccacgagggcaccatccccagcggccagaacagcaccggcaacgtgcagaacgtgccccacggcagcatccccctgtgccagctgaacggccagcccagaaagaagggccccatccccagcagccagaacctgcccagcaccagcttctaccccgcccccgccggcaacacccacctgtacctgctgagcacccccagcgtggtgcagaaggcccccagactgatcccccacgccaagaccttcagccccggcgacggcttccccctgctgcagttcaagagcaagcaggagttccagcccctgttcctgcacaccggcagcatcccccaggtgcccttcagacccctgccccagcccagagaggcctggggcctgagcgacagcttccagcccgccctgccccagagagccgcccagaccacccccgccagccacctgaacgtgagccagtacaacaccgaggccagaaagaaggaggtggagcagaagacctgggccgagaccgtgatcaccgagatccccaaccacgtgaacctggaccagtacgtgggccaggagaacctgaccccccagcaggacagcagcgtgttcatcaagcccgagaagctgttcgacgtgaagcccggcaccctggagatcagcccccaccacagcttcggcctgcccctgctgtacctgcccctgaagccccccaacatgttccccagcaccagcagagccagcatcaccgtgcccagcacccccatccagcccatcgccgaggagagaaagtaccccagactgagcctgctgcacagccacctgagccccgagaacagatgcaagaagacccagctgatccccctggagaacctgatcgccttcaagcagagccagcagaagctgacccacaacctgttcgagcagggcgacgccggccacctgcagctgctgaaggtgaagatcgagccccccgaggtgagacagggcaaggacagcaagaagagacagagaagaagagccgagaaggagctgcaggagaagagatgcgagaagctgagaagaaagcccaacgtgaccttcagacccgagaacagcatcatcaacaacgacgacagcgagatcatcaagaagcccaaggagcagcaggagcactgcggcagccaccccctggacgacttcgacgtgcccttcgagatgctgcaggacgacaacaccagcgccggcctgcacttcatggccagcgtgaagaagaaggccatcggcagccaggacgccagcaccaacaccgaccccgagcacgagcccctgaccgccccccagctgctggtgcccgacgtgtacctgaacctgaagctgagcagcgagatgagcgagaagccctggagccccagcatcccccacaccgtgaccaacctggtgggccacacctacatcaacgtgatcgacatcgaggccaacgacctgctgcaggagctgcccgtgagagaggagcccagcaacgacaacgtgatcaagcagcagagcgaccacctggccgtgcccagcagcgccgagctgcactacatggccgccagcgtgaccaacgccgtgcccccccacaacttcaagagccaggaggtgacccccgcctgcctggacggcaagagcctgagagccggcatcaccgaggtgaaggagcccagcgtgaccagccccacccccagcgacatccagcagaacaagggcctgcccaagcccgagttcagattcaagggccagagcaccaagagcgacagcgccgaggactacctgctgtggaagagactgcagggcgtgagcgccgcctgccccgcccccagcagcgccgcccaccagctggagcacctgagcgccaagctgcagaagatcgacgagcagctgctggccatccagaacatcgccgagaacatcgagcaggacttccccaagcccgagatgctggacctgcactgcgacaagatcggccccgtggaccacatcgagttcagcagcggccccgagttcaagaagaccctggccagcaagaccatcagcatcagcgaggaggtgagattcctgacccacatggacgaggaggaccagagcgacaagaaggagaccagcgagcccgagttcagcatcaccgagaactacagcggccagaagacctgcgtgttccccaccgccgacagcgccgtgagcctgagcagcagcagcgaccagaacaccaccagccccggcatgaacagcagcgacgagctgtgcgagagcgtgagcgtgcaccccctgcagatgaccggcctgaccgacatcgccgacatcatcgacgacctgatcatcaaggacggcgtgagcagcgaggagctgggcctgaccgagcaggccatgggcaccagcagattcagctag

SEQ ID NO: 268383 - DNA, 5442 bp, Artificial Sequence
  derived and/or modified sequence
atggccgatgcggatattctgagcgagactttccagctactaatcgattccgcgaaggacttttccaagcggttgtgggggctggtcccttttggcctatatctacctgcccctcctctttactgtccacaacctgccatcctgtctgaagaggatggcgatgacctattgctcaaagctgaaaagaataatagacagaaagtgtctggcatcctgcaacgcgtccttctgcttttcagagcggcacagtgttcgtttcccgtggcccagtggtatatcttgcaacttagatgggcgaggaaggtcatgcaaaagatccggatgaaggggagcttgcccagtctttcacctttcccccagagcctgctgaactactgtaagggcgggatcgcatttttccgtccaggcgcagccggggatcacaaactggacgaagtttcgattagagcaattgggtgttttagggaactctgtgccctatgttggatgttgcacgtccgggacaaactgagctattcttgccgtcagtatcagaaagctagggagaatgtgaagggcgagaaagatcttgaggtggagtttgacagctgtatgatagagcattgcctgagcgccgtggagtgggcttaccggatgctcccattctcccgatttttcaacatggaagagttgatccaagacataatcttgtctcttattggcgaactgccacccatccggaaggttgctgaaatctttgtgaaggcttttccctatcccgaggatgtgcgggtgcctctccgcgataagtatcacagcctgcaccagcgcctgcgccattgtgtcgtaaaagggcctcagaccgaggagatgatgagtgtggtgatgcactccatccaaaaggtcagggtcaaggcacttaagagagtgcagaggaatatcggcagctttgaggtaaacatctgggaaccaattgaagaagaaaagccagatgaggcgccaggggtagacagatacagcttgggaacttcactatcacggtcgactttgaccgagttaggggactctgtggttcactccgatgccgataccttctctgaggcgctgtcggttgaggaaaagtcccgcatcaacatataccagcgaaatgcccctaatcatatggagctgactagcatccacaaaccaaccgataaaagaaagatgtgtaatcagaaagaaaatccaaccaagaaagaggaccacgaaaaactgtctcaaaatacactgcccgtgatcggcgtctgggagtttgagagggacgacgacgaatacattaaatttctcgatctgttcctgtcctatattctggaaagagacttaccttacagcagggacgccgacatccctttcctgaccagcttttcagggaagcttcgcgaacatgagctgaattctttgctctttgatgtgcatacgacactgaaaagacaccagagcaaaacgaagtcccagaatgtgttccgggctggcagctgctttgtcgtggccccggagtcttacgaatccgagaaatcttcttccctgaatgacgagtacggaatgcatctggagaaccagaaactgtcttcctcagtgcttgttaaccagggtattaaacccttcctgcaatacccatccaatgaggtaaataaaaatgagggaatgtcgggcctgtttgggctcaagcaaagatctatttacaagatccaagacgatacaagagagaaatgcttgatccagaggtcctccaaccatattttttggacacccaaaagcatcaagacacgcaggtgtatttttaaagcaatacagtgcaatgacataaatccccaggaggacctgcccctggcccttaatacgtttgggagcatagggcgcctgctggaatggatgatccggtggagcaatcgccgattgctgtgcgattctggcatcaccgagagcagtagcgagtactctccagtgatcagagtcaagacctctaccgctgccatccttacatccttatggctccttgagcagccctatttcgcaacatataaagcaaagaacgcaatcattaaaatggtggagaatcgagacacagggtgccagattggaccaaacatcgaacgtgagagtaagtccgacgccgggggatcagtggccgtggctactccagggggaactgaggagcgtaatgggcaaaataagagctgtcagaacatcctcaagatgccaacagaggctaagaacccagacattaaagagatcaacgacgatatcattagtatcacccacaatactaagaaggagttcatcgatattgatgagaacctgcttgaggtggaagccttcacagaagaggagatggacatgcatatctcagactatgaggaggacatcgaggaatctgtcggaggcttcagaagtccttcactcgcgatttgcatgatgactctcccccaacagctggaagaagaattcactgaggaagttcagtgccagcgggaggaacccctcgagacaatcatggaggagaaaagtactgagcaaaaaggtatgattgaagccttctctcatcctggccacactaccccgcagtccatgcaagtcgacacatccagcgaaatatcctccgcacagatcagcacctacaaggaaaagtcctcctcagtccccctgctgatctccaacggagtgaatgtcgcctcacagccccccgctcccacaccacagaaaacgcaacgcaacgagtttaccgcccaacttccagattgttccgagagcgtcagacaaatgctccaggacgagatgttcaaattagtccagctacagcagatcaattttatgtccttgatgcaaattgtcggctcaagcttcgcgaatctgccagacacccagcagctggtgcaacagtctcagtccgtgcacttgggggaatcacaagagtcgaatttgaggggttgtggggacgtggaggacagcaacaagaatctgaaggagcgcttttttattaagccccagtcaatgggagaaaacgctcgggagcctaggaagaactcaccccactgccacgagggaactattccatccggccagaacagtaccggtaacgttcaaaatgtgccacacggcagcatccctctctgccaacttaatggccagccaagaaaaaagggccccatcccgagttcacagaacctccctagcaccagcttctacccagcaccagctgggaacacacacctgtatctcctgtccacgccatctgttgtccagaaagctccgcgactgattcctcacgccaaaacattctcaccgggcgacggcttcccactattgcaattcaaaagtaaacaggagttccagccactgttccttcatactggctcaatcccccaggtccccttccgccctctacctcagcctcgagaagcatggggcttgagcgatagtttccagccggccctgccccaacgggcggcacaaactacacccgcgtcgcacctaaatgttagccagtacaacaccgaagcaagaaagaaggaggtcgaacagaagacctgggctgagaccgtgatcaccgaaatccccaatcacgtgaacctagatcagtatgtgggacaggaaaatctgactccgcaacaagattcttcagtgttcatcaagccagagaagctgttcgatgtgaaacctggtactctggaaatctcacctcatcattcctttggcctgcccctcctctacctgccactgaagccacccaatatgttcccctcaacttcaagagcgagcattaccgtacccagcaccccaattcagcctatcgcggaggaacgaaaatacccacgactctcgcttttgcacagtcatctgagtcctgagaacaggtgcaagaagactcagctgatccctcttgaaaacttgattgccttcaaacagagccagcagaaactgacacataatcttttcgagcagggagatgccggacacttacagctgctgaaggtcaaaatcgagcctcccgaggtcagacagggcaaggattctaaaaagaggcagagacggcgcgccgaaaaggagctgcaggagaaaaggtgcgagaagctgcggcgtaagcccaacgtaacatttcgaccggagaatagtatcatcaataacgatgactcagaaataatcaagaagcctaaggagcagcaggaacattgtggttctcaccccttagatgactttgatgtcccttttgaaatgctgcaggacgataacacgtctgctggccttcattttatggccagtgtgaagaaaaaagcaattggcagtcaggacgcatccacaaacactgacccggaacacgaacctctgactgctcctcaattgcttgttcctgacgtatacctcaacctgaagctcagttctgagatgtccgaaaagccctggagccccagcattcctcacaccgtgaccaatctggtcgggcacacatatatcaatgtgatcgacattgaggctaatgaccttctgcaggaacttccagttcgggaagaacccagcaacgacaatgtgatcaagcagcagtccgatcatttagccgtcccctccagcgccgagctgcattacatggctgcctccgtaacaaacgctgtcccaccacataattttaagtcacaggaggtaactccagcctgtcttgacggaaaatcactcagagcggggatcacagaggtgaaagaaccctcggtcacctcccctaccccttcagatatccaacagaataagggcttacccaagcccgaattcaggttcaagggccaatctaccaagagtgactccgcagaagactaccttctgtggaaaagactgcaaggcgtttctgcagcatgtcccgccccttcttctgccgctcaccagctcgagcatctttcagccaagctgcaaaagatagatgagcagctgttagcgattcagaacatcgctgaaaacatagaacaagacttcccaaagcccgagatgctcgacttgcattgcgacaagataggacccgtggatcatattgagttctcctctgggcccgagtttaagaaaaccttagccagcaagaccattagtatctccgaagaggttagattcctgacacacatggacgaagaggaccagtctgacaaaaaagaaacctctgaacccgagtttagcattactgagaactattcagggcagaaaacatgtgtgttcccaaccgctgatagtgcagtgtctttgtcttccagcagcgaccagaacaccacatcacctggaatgaattcttcagacgagctgtgcgagtccgttagcgtgcacccattacagatgaccggcctcacagatatcgcggatattattgacgacttgatcatcaaagatggcgtatccagcgaagagctaggtcttacagaacaggctatgggtacctcccggtttagttag

SEQ ID NO: 268384 - DNA, 5442 bp, Artificial Sequence
  derived and/or modified sequence
atggctgatgctgacatcctgtctgagaccttccagctgctgattgattctgccaaggacttcagcaagaggctgtggggcctggtgcccttcggcctgtacctgcctgccccacccctgtactgcccccagcctgccatcctgtctgaagaagatggagatgacctgctgctgaaggccgagaagaacaaccggcagaaggtgtctggcatcctgcagagggtgctgctgctcttccgggccgcccagtgcagcttccctgtggcccagtggtacatcctgcagctgcgctgggccaggaaggtgatgcagaagatccgcatgaagggcagcctgcccagcctgagccccttcccccagagcctgctgaactactgcaagggcggcatcgccttcttccggcctggagctgctggggaccacaagctggatgaggtgtccatccgggccatcggctgcttccgggagctgtgtgccctgtgctggatgctgcacgtgcgggacaagctgagctacagctgccggcagtaccagaaggcccgggagaatgtgaagggggagaaggacctggaggtggagtttgacagctgcatgattgagcactgcctgtctgctgtggagtgggcctacaggatgctgcccttcagccgcttcttcaacatggaggagctgatccaggacatcatcctgagcctgattggagagctgccccccatcaggaaggtggccgagatctttgtgaaggccttcccctacccagaagatgtgcgggtgcccctgcgggacaagtaccacagcctgcaccagaggctgcggcactgtgtggtgaagggcccccagacagaggagatgatgtctgtggtgatgcacagcatccagaaggtgcgggtgaaggccctgaagagggtgcagagaaatattggcagctttgaggtgaacatctgggagcccatcgaggaggagaagccagatgaggcccctggggtggaccgctacagcctgggcaccagcctgagccgcagcaccctgacagagctgggggacagcgtggtgcacagtgatgctgacaccttcagcgaggccctgtctgtggaggagaagagccgcatcaacatctaccagagaaatgcccccaaccacatggagctgaccagcatccacaagcccacagacaagaggaagatgtgcaaccagaaggagaaccccaccaagaaggaggaccacgagaagctgagccagaacaccctgcctgtgattggagtgtgggagtttgaaagagatgatgatgagtacatcaagttcctggacctcttcctgagctacatcctggagcgggacctgccctacagcagagatgctgacatccccttcctgaccagcttcagcggcaagctgcgggagcacgagctgaacagcctgctgtttgatgtgcacaccaccctgaagaggcaccagagcaagaccaagagccagaatgtgttccgggccggcagctgctttgtggtggcccctgagagctatgaaagtgagaagagcagcagcctgaatgatgaatatggcatgcacctggagaaccagaagctgagcagctctgtgctggtgaaccagggcatcaagcccttcctgcagtaccccagcaatgaggtgaacaagaatgaaggcatgagcggcctgtttggcctgaagcagaggagcatctacaagatccaggatgacacccgggagaagtgcctgatccagaggagcagcaaccacatcttctggacccccaagagcatcaagacccggcgctgcatcttcaaggccatccagtgcaatgacatcaacccccaggaggacctgcccctggccctgaacaccttcggcagcatcggccgcctgctggagtggatgatccgctggagcaacagaaggctgctgtgtgacagcggcatcacagagagcagcagcgagtacagccctgtgatccgggtgaagaccagcacagctgccatcctgaccagcctgtggctgctggagcagccctactttgccacctacaaggccaagaatgccatcatcaagatggtggagaacagagacaccggctgccagatcggccccaacatcgagcgggagagcaagagtgatgctgggggctctgtggccgtggccacccctgggggcacagaggagagaaatggccagaacaagagctgccagaacatcctgaagatgcccacagaggccaagaacccagacatcaaggagatcaatgatgacatcatcagcatcacccacaacaccaagaaggagttcattgatattgatgagaacctgctggaggtggaggccttcacagaggaggagatggacatgcacatcagtgactatgaagaagatattgaggagagcgtgggcggcttccgcagccccagcctggccatctgcatgatgaccctgccccagcagctggaggaggagttcacagaggaggtgcagtgccagcgggaggagcccctggagaccatcatggaggagaagagcacagagcagaagggcatgattgaggccttcagccaccctggccacaccaccccccagagcatgcaggtggacaccagcagcgagatcagcagcgcccagatcagcacctacaaggagaagagcagctctgtgcccctgctgatcagcaatggagtgaatgtggccagccagcccccagcccccaccccccagaagacccagagaaatgagttcaccgcccagctgcctgactgcagcgagagcgtgcggcagatgctgcaggatgagatgttcaagctggtgcagctgcagcagatcaacttcatgagcctgatgcagatcgtgggcagcagctttgccaacctgcctgacacccagcagctggtgcagcagagccagagcgtgcacctgggggagagccaggagagcaacctgcggggctgtggagatgtggaggacagcaacaagaacctgaaggagcgcttcttcatcaagccccagagcatgggagaaaatgcccgggagcccaggaagaacagcccccactgccacgagggcaccatccccagcggccagaacagcactggaaatgtgcagaatgtgccccacggcagcatccccctgtgccagctgaatggccagcccaggaagaagggccccatccccagcagccagaacctgcccagcaccagcttctacccagccccagctggcaacacccacctgtacctgctgagcacccccagcgtggtgcagaaggcccccaggctcatcccccacgccaagaccttcagccctggagatggcttccccctgctgcagttcaagagcaagcaggagttccagcccctcttcctgcacacaggcagcatcccccaggtgcccttccggcccctgccccagccccgggaggcctggggcctgagtgacagcttccagcctgccctgccccagagagctgcccagaccaccccagccagccacctgaatgtgtcccagtacaacacagaggccaggaagaaggaggtggagcagaagacctgggccgagaccgtcatcacagagatccccaaccacgtgaacctggaccagtatgtgggccaggagaacctgaccccccagcaggacagctctgtgttcatcaagccagagaagctgtttgatgtgaagccaggcaccctggagatcagcccccaccacagctttggcctgcccctgctgtacctgcccctgaagccacccaacatgttccccagcaccagccgggccagcatcaccgtgcccagcacccccatccagcccatcgccgaggagaggaagtacccccggctgagcctgctgcacagccacctgagcccagaaaatcgctgcaagaagacccagctgatccccctggagaacctgattgccttcaagcagagccagcagaagctgacccacaacctgtttgagcagggagatgctggccacctgcagctgctgaaggtgaagattgagcccccagaggtgcggcagggcaaggacagcaagaagaggcagaggcggcgggcagagaaggagctgcaggagaagagatgtgagaagctgcggaggaagcccaacgtgaccttccggccagaaaattccatcatcaacaatgatgacagcgagatcatcaagaagcccaaggagcagcaggagcactgcggcagccaccccctggatgactttgatgtgccctttgagatgctgcaggatgacaacaccagcgctggcctgcacttcatggcctctgtgaagaagaaggccatcggcagccaggatgccagcaccaacacagatcctgagcacgagcccctgacagccccccagctgctggtgcctgatgtgtacctgaacctgaagctgagcagcgagatgtctgagaagccctggagccccagcatcccccacacagtgaccaacctggtgggccacacctacatcaacgtgattgatattgaggccaatgacctgctgcaggagctgcctgtgcgggaggagcccagcaatgacaacgtcatcaagcagcagagcgaccacctggccgtgcccagcagcgctgagctgcactacatggccgcctctgtgaccaatgctgtgcccccccacaacttcaagagccaggaggtgaccccagcctgcctggatggcaagagcctgcgggccggcatcacagaggtgaaggagcccagcgtgaccagccccacccccagcgacatccagcagaacaagggcctgcccaagccagagttccgcttcaagggccagagcaccaagagtgacagcgctgaggactacctgctgtggaagaggctgcagggcgtgtctgctgcctgcccagcccccagcagcgctgcccaccagctggagcacctgagcgccaagctgcagaagattgatgagcagctgctggccatccagaacattgctgaaaatattgagcaggacttccccaagccagagatgctggacctgcactgtgacaagattggccctgtggaccacatcgagttcagcagcggccctgagttcaagaagaccctggccagcaagaccatcagcatcagcgaggaggtgcgcttcctgacccacatggatgaggaggaccagagcgacaagaaggagaccagcgagcctgagttcagcatcacagagaactacagcggccagaagacctgtgtgttccccacagctgacagcgctgtgtccctgagcagcagcagtgaccagaacaccaccagccctggcatgaacagcagtgatgagctgtgtgagagcgtgtctgtgcaccccctgcagatgacaggcctgacagacattgctgacatcattgatgacctgatcatcaaggatggagtgtcctctgaggagctgggcctgacagagcaggccatgggcaccagccgcttctcctag

SEQ ID NO: 268385 - DNA, 5442 bp, Artificial Sequence
  derived and/or modified sequence
atggccgacgccgacatcctgagcgagaccttccagctgctgatcgatagcgcgaaggacttttcaaaacgcttgtggggtctcgtgcccttcgggctctacctccccgcaccacctctgtattgcccgcagcccgctattctgagcgaggaggacggtgacgatttactcttaaaggctgaaaaaaacaatcgccagaaggtgtcagggattcttcagcgcgtgcttctcctgtttcgggccgctcaatgtagtttcccggtggctcagtggtacatccttcagctgaggtgggctagaaaagtaatgcaaaagattagaatgaaagggtcacttccaagtctgtccccatttccccagtcactactcaactactgtaaaggaggaattgccttcttcaggcccggcgctgctggcgaccacaaactggatgaggtgtcaatacgtgccatcggatgctttcgcgaactatgcgccttgtgttggatgttgcacgtccgagacaaattgtcatatagctgccgtcagtatcagaaagccagagaaaatgttaagggggaaaaggatctggaagtggaattcgattcatgcatgatagagcattgcctgtctgccgtggaatgggcttaccgcatgttgccattctccagattttttaacatggaggagctgatccaggatatcattctctccctgattggggaattgccgcctatcagaaaagtagccgaaatttttgttaaggccttcccctatccagaggacgttcgggtgccgctacgtgacaaatatcacagcctccaccaacggctgcgccattgcgtcgttaaaggcccccagaccgaagaaatgatgagtgtcgtgatgcattccattcagaaggtcagggttaaggcgttgaaacgggttcagcgtaacatcggctcttttgaggtgaatatctgggaacccattgaagaggagaaaccagacgaagcccctggagttgaccgctactcacttggcacatccctctcgcggagtaccttaacagagttaggggactcagtggttcattctgacgcggacaccttcagcgaggcactatcagtggaggagaagagtcgaattaatatctaccagcgcaatgcacctaaccatatggagctgacctccatacacaaaccaaccgataaaagaaagatgtgcaatcagaaggagaacccgactaaaaaggaagatcacgaaaaattgagccagaatacccttccggtcattggtgtctgggagttcgaacgtgacgatgacgagtacattaagttcctcgacctgtttctgagttatatcctggaaagagatctaccatatagcagggatgccgatattcccttccttacgtcattctcaggtaaattgagggagcatgaactcaattcacttctgttcgacgtacacacaaccctgaagagacaccagagcaagaccaaaagtcaaaacgtgttccgcgccggctcttgttttgttgttgcgcccgagtcctacgaatcggagaaatcctcgtcactgaacgatgaatatggaatgcatttggagaaccagaaactgagttcctccgttttagtaaatcagggcataaagccattcctccaatatccaagcaatgaagtcaacaaaaacgagggcatgagcggtctgtttggcctgaagcaacgctcaatctataaaatccaggatgataccagagagaaatgtctcattcagcgatcctcaaatcacatcttctggacgcccaagagcattaagactcggaggtgtatctttaaggctatccagtgcaatgacattaatccccaggaggacctccccctggctctgaatacttttggttccatcggccggctgcttgaatggatgattagatggtcaaacagacggcttctgtgcgactcaggcatcacagagagttcctcggagtatagccccgtgattcgggtgaaaacctcaacggctgcaatcctgacgtcactgtggctgcttgagcaaccatatttcgccacatacaaggccaaaaacgccattattaaaatggtggagaatagggacaccggatgccagatcggccccaatattgagcgcgaatctaagagcgacgccgggggttcagtagctgtagctacccctggggggacagaggagagaaacggccaaaacaagtcttgccagaatattctaaagatgcctacagaggccaaaaaccctgatattaaggaaatcaacgatgacatcatatccatcactcacaatacgaagaaggagtttattgacattgacgagaatttactcgaggtagaggcgttcactgaggaggagatggatatgcacatatctgattacgaagaagatattgaggaatccgtgggaggctttcggtctccctctctcgcgatctgtatgatgacactgccacagcagctcgaggaggagtttacagaagaggtacagtgtcagcgggaagaaccgctcgaaaccatcatggaagaaaaaagcacggaacagaaaggcatgatagaagcattcagccaccctggccataccaccccccagagcatgcaggttgatacctcctcagaaatcagctctgcccaaatctctacctacaaggaaaagtctagctctgtccctctgctcatcagcaacggcgtgaatgtggcctcacagcctcctgcccccactccacaaaagacacagaggaacgagtttaccgcccagctaccagattgtagtgaaagcgtgcggcagatgctgcaagacgaaatgtttaagctggtccagttgcagcagattaactttatgagtttgatgcaaatcgtaggctcctcatttgccaatctccctgacacacaacagctagtgcagcaatcgcaatccgtgcaccttggagagtcacaggaaagcaacctcaggggctgcggcgacgtggaggatagcaataaaaatctaaaagaacgcttttttattaaacctcagtccatgggagaaaatgcccgagaacctcggaagaattcgccccactgccatgagggtaccattcccagtggtcagaattctacaggcaacgtgcagaacgtcccacacggtagcattccactgtgccaacttaatggccagcccaggaaaaagggacccattccatcgtcccagaaccttccttccacttctttctaccctgctccagccggtaacacccacctgtatctgctgtcaacaccctcggtggttcagaaggcacctaggctgatccctcatgcaaaaacgttctcaccaggcgacggctttcccctgcttcagttcaaatctaaacaggaatttcaaccacttttccttcataccggtagtataccacaggtcccgtttcggcctttgccccaaccacgcgaagcttgggggctgagcgactcttttcagccagccttaccccagcgggcagctcagacaacgcctgcgagccacctcaacgtgagccagtacaataccgaggcccgtaagaaagaggtggaacagaagacatgggctgagacagtaattactgagatcccaaatcacgtgaacctggaccaatacgttggccaggaaaacctgactccgcaacaggattcaagcgtgttcataaagccagaaaagctcttcgacgtcaagcccggaacgcttgaaatctcaccccaccactctttcggactcccgctattatacttaccccttaagcctcctaatatgttcccctctacgtcccgggcctcaattaccgtgcccagcacccccattcagcctattgccgaagaacggaaataccctaggctgagcctcctacacagccatctgtctcctgaaaaccgttgcaagaaaacccagttgatcccacttgagaacctgatcgctttcaagcagagtcagcagaaattgacgcataaccttttcgagcaaggagacgcaggtcacttgcaattactgaaggtcaagatcgaaccaccagaggtgcggcagggaaaggactctaagaagcgtcagcggagacgcgccgaaaaggaacttcaagagaagcgatgcgaaaaactgcgccgtaagccaaacgtcacttttaggccagagaattccatcataaataacgacgactcagagattattaagaagcccaaggagcagcaggagcactgcggttcacatccacttgacgacttcgacgtgccctttgaaatgttacaggacgacaatacatcagccggcctacacttcatggccagcgtaaaaaaaaaagccataggctcccaggacgcctctactaacactgacccggagcatgaacctctgacagcaccgcaactcctggttcccgatgtgtacctcaacctgaaactatccagcgaaatgagcgaaaagccatggtccccctccattcctcacacagttacgaacttggtgggtcacacgtacatcaacgtgatcgacattgaagccaatgatctgcttcaagagctgccagtgcgcgaggaacccagtaatgacaatgtcattaagcagcagtcagaccacctggcagtgccaagctccgccgaactacactacatggcagcttccgttacaaatgctgtccctcctcacaatttcaagtctcaagaagttaccccagcatgtctggacggaaaaagtttacgtgccggcattacagaagttaaggagcctagcgtgacttcccccactccctccgatattcagcaaaataaaggattgcctaaacctgagtttaggtttaaaggccagagcaccaaatcagactctgctgaggactacctgctgtggaaacgcctgcagggagtcagcgctgcctgcccggctcccagctctgccgcccatcaactcgagcacctgtctgctaaactccagaaaatagatgagcagctgctggccatccagaatatagccgaaaatatcgaacaggattttcccaagcctgaaatgctggatttacattgcgataagataggcccagtggaccatattgagttctctagcgggccggagtttaagaagaccctcgctagcaagaccatctctatctcagaggaggtgcgctttttgactcacatggacgaggaagaccagagtgacaagaaagagacctccgaacccgaattctccattacagagaactattcagggcagaaaacgtgtgtttttccaaccgcagacagcgctgtgagcctgtcttcaagttcagaccagaacacaacctctccgggcatgaactcttcggacgaactctgtgagtcagtgtccgtgcatccactccagatgaccggtttaaccgacattgccgatataatcgacgaccttatcatcaaagatggagtctcatccgaggaactggggctcaccgaacaggcaatgggaaccagtagattcagttag

SEQ ID NO: 268386 - DNA, 5441 bp, Artificial Sequence
  derived and/or modified sequence
atggctgatgcggacatactgtctgaaactttccagctgctcattgactccgctaaagatttctcgaagcgcttgtggggccttgtgccatttggtctgtatctgccagcgcctcccctctactgccctcagcctgccatcttatcagaagaagacggagacgacctgctgcttaaagctgaaaagaacaaccggcaaaaggtctcaggtatcttacagagagtattgcttctgttccgtgctgcgcaatgcagctttccagtggcacaatggtacattcttcaacttcggtgggccaggaaggtgatgcagaagataaggatgaaaggttccctgccttcactaagcccattcccccagagtctactgaattactgcaagggcggtatcgccttcttcaggccgggtgctgccggagaccacaagctcgacgaagtttccattcgcgcaatcggttgttttcgagaactgtgcgccttgtgttggatgctgcatgtacgggacaagctgagttattcatgccgtcagtatcagaaagctcgagagaacgttaaaggggagaaagatctggaagtggaatttgacagctgtatgatagagcactgtctgtccgctgtcgagtgggcttatcgcatgctcccatttagcaggtttttcaatatggaggaattaatacaagacatcattttatctctgattggtgagctgcctcctatcagaaaggtggccgaaatatttgttaaagcgttcccttaccccgaagacgttcgtgtgccattgcgggacaagtaccacagcctgcatcagcgactgcgacactgcgtggtgaaagggccacaaacagaggagatgatgtctgttgtgatgcacagcatacaaaaggtcagggtgaaggctctaaagcgtgtccagcggaacattggcagcttcgaggtgaatatctgggaacctattgaggaggagaaacctgacgaagcaccgggtgttgacagatactcattgggcacatctctgtctagaagcacactaacggaattgggagatagtgtcgtgcattctgacgccgatactttctcagaggccttgagtgtcgaggagaagtccagaattaacatataccagcgaaatgcgcctaaccacatggagttgactagtatccacaagcctaccgacaaacgaaagatgtgcaaccagaaagagaaccccaccaagaaagaggaccatgagaaactctcccaaaacacattgccagtgatcggggtgtgggagtttgaacgcgacgacgatgaatacatcaagtttctcgacctatttttgagctatattctagaacgggacctcccctactcaagggacgccgatattccatttttaacatcgttctcaggaaaattgcgagaacatgagctaaactcactgctctttgacgtgcacactacactcaaacgccaccagagcaagacgaagagtcagaacgtcttcagagccggatcatgtttcgtggttgctcctgaatcctatgaaagcgaaaagagctcatcactgaacgatgagtatggcatgcatttggaaaaccagaagctgtcttccagtgtgttggtgaaccagggcattaagccattccttcagtatccctctaatgaagtgaacaagaacgagggaatgtcgggtttgttcggactcaaacagagatcaatttacaagatccaggatgacacaagagaaaagtgtctgatccagcggagttctaatcacatcttttggacccccaagtccataaagacccgacgttgtatcttcaaggctattcagtgcaacgatatcaaccctcaagaagatttaccgctggctctgaatactttcggatcaatcgggcgactgctggaatggatgataagatggtcaaatcgtcgtctactctgcgattccgggatcacggagtcttcgtcggagtatagccctgtcattcgggtgaaaacatctacagcagctatcctcacgagcctctggctgcttgaacagccctattttgcaacgtacaaagcaaagaacgccatcatcaaaatggtcgagaaccgcgataccggctgtcagattggaccgaacatcgagcgcgaaagcaagtccgacgctggagggtctgtcgctgtagcaacccctgggggaacagaagagagaaacgggcagaacaaatcctgccaaaacattctaaaaatgcccacagaggccaagaacccggatatcaaggaaattaacgatgacatcattagtatcactcataacaccaaaaaggaatttattgatatcgacgagaatttgcttgaggtggaggcctttaccgaggaagagatggacatgcatatttccgattacgaagaagacattgaggaatctgttggcggtttcaggtcaccaagtctcgccatttgcatgatgacattgccgcagcagctggaagaggagtttactgaagaagtgcaatgccaacgggaggaaccactggagacgatcatggaagagaaatccacagaacagaagggaatgatagaagctttctcccatcctggccatacgactccccagagcatgcaggtggacacgtcctcggagatctcgtctgcgcaaatctccacatacaaagaaaaatctagtagcgtacctctgctcatcagcaatggcgtaaacgttgcctcccagcctccggcaccaaccccccagaagacacagcggaatgaatttaccgctcagctgccggactgttctgagagcgtgcgtcagatgctgcaggacgagatgttcaagctcgtgcaattacagcagatcaatttcatgagcttgatgcagattgtcgggtcaagctttgccaacctcccagatacgcaacagctcgtgcaacaatctcagtctgtgcatctgggagaatctcaggagtccaacctccgaggttgtggcgatgtcgaagactcaaacaaaaatctcaaagaaagattttttatcaagcctcagagtatgggggagaacgctagagaaccaagaaagaactcccctcactgtcacgagggcacaataccttccggacagaactccacggggaacgtacagaacgtgccacacgggagtatacccctgtgtcagctgaacggtcagccccgtaagaaaggtccaattcctagtagccagaatctgcccagtacctctttctatcctgcacccgctggaaatacacacctgtatctactgagcacgcctagcgtagtgcagaaggccccaaggctaattccgcacgctaagactttctctcccggtgatggtttcccgttgctccagttcaagtcaaaacaggaatttcaaccactattcctgcatacgggtagtatcccgcaggtgccctttagaccgttgccacaacctcgagaggcatggggcctgagcgatagcttccaacccgcactgcctcagagggccgctcaaacgaccccagcgagccacctgaacgtctcacagtacaatactgaggccaggaagaaagaggtggagcagaagacttgggccgagactgtgattacggaaataccaaatcacgtcaatctggaccaatatgtcgggcaggagaaccttaccccacaacaggactcttccgtgtttataaaacctgagaagctgtttgacgtaaagccagggacactggaaatcagcccacatcacagcttcggtctgcccctgctgtacctcccactgaagcctcctaacatgttcccgtccaccagccgcgcaagcatcacagtccccagcacgccgatacagcccatcgctgaagaaagaaaatacccaagactgtcattattgcatagccatctgagccccgaaaacaggtgcaaaaaaacgcagctgatacccctggagaatctcattgcctttaagcagtcacagcagaagttgacacataacttgttcgagcaaggggacgctggccaccttcaactccttaaggtgaagatcgagccaccagaggtacgacaggggaaagactctaagaaacgacagcggagaagggcagaaaaagagttgcaagagaagcggtgcgaaaaactgaggaggaaacccaatgtgacattccgtccagagaattcgattatcaacaacgacgattcagagattatcaagaagccaaaggagcagcaggagcactgcgggagccaccccctggacgacttcgatgtgccattcgagatgctgcaggacgacaatacgtcagctggcctgcactttatggcgagtgtaaaaaaaaaagctatagggtcgcaggacgcaagcacaaatacagatcccgagcacgaacctctgactgccccacagctcctggtccctgatgtgtacctcaacctgaaacttagtagtgagatgtccgaaaaaccctggtctccgtcaataccccacacggttaccaatctggtgggacatacctacatcaatgtgatcgatatcgaggccaatgatttattacaagagctccccgttcgagaagagcctagtaacgacaatgttattaaacagcagtcagaccatctggcagtccctagctcggccgaattacattatatggctgcaagtgttaccaatgcagtacccccacacaattttaagagccaggaagttacccccgcatgcttagatggcaagagcctaagagctgggatcaccgaggtgaaagagccaagtgtaactagcccaactccgagtgacattcagcagaacaaaggtctccctaagccggaatttagatttaagggacagtcaacgaagagcgattctgctgaggactacctcctgtggaagcgactacagggagtgtcagccgcatgtccagccccttcctccgctgcgcaccaactggaacatctgagcgctaaattgcaaaaaatcgacgaacagctcttggccattcagaatattgccgaaaacatcgagcaggatttccccaaacctgagatgctcgatctgcattgcgataaaattggaccagttgaccacatagaatttagttccggacctgagttcaagaaaactttggcatccaaaacaattagcatttctgaggaagttaggtttctgactcacatggatgaggaggatcagtctgacaagaaggagacttccgaacccgagttctccatcaccgagaattacagcggccaaaagacctgtgtcttcccaacagctgattccgctgtgtctttgagtagtagctctgatcagaacactactagccctggtatgaatagctcagacgagctgtgtgaaagcgtgtctgtacaccctctccagatgaccgggctcaccgacattgctgatattattgatgacctgatcattaaagacggggtttcaagcgaggaattgggcctcactgaacaggcaatgggaacaagtcggttcagtta

SEQ ID NO: 268387 - protein, 2095 aa, Artificial Sequence
  derived and/or modified sequence
MADADILSETFQLLIDSAKDFSKRLWGLVPFGLYLPAPPLYCPQPAILSEEDGDDLLLKAEKNNRQKVSGILQRVLLLFRAAQCSFPVAQWYILQLRWARKVMQKIRMKGSLPSLSPFPQSLLNYCKGGIAFFRPGAAGDHKLDEVSIRAIGCFRELCALCWMLHVRDKLSYSCRQYQKARENVKGEKDLEVEFDSCMIEHCLSAVEWAYRMLPFSRFFNMEELIQDIILSLIGELPPIRKVAEIFVKAFPYPEDVRVPLRDKYHSLHQRLRHCVVKGPQTEEMMSVVMHSIQKVRVKALKRVQRNIGSFEVNIWEPIEEEKPDEAPGVDRYSLGTSLSRSTLTELGDSVVHSDADTFSEALSVEEKSRINIYQRNAPNHMELTSIHKPTDKRKMCNQKENPTKKEDHEKLSQNTLPVIGVWEFERDDDEYIKFLDLFLSYILERDLPYSRDADIPFLTSFSGKLREHELNSLLFDVHTTLKRHQSKTKSQNVFRAGSCFVVAPESYESEKSSSLNDEYGMHLENQKLSSSVLVNQGIKPFLQYPSNEVNKNEGMSGLFGLKQRSIYKIQDDTREKCLIQRSSNHIFWTPKSIKTRRCIFKAIQCNDINPQEDLPLALNTFGSIGRLLEWMIRWSNRRLLCDSGITESSSEYSPVIRVKTSTAAILTSLWLLEQPYFATYKAKNAIIKMVENRDTGCQIGPNIERESKSDAGGSVAVATPGGTEERNGQNKSCQNILKMPTEAKNPDIKEINDDIISITHNTKKEFIDIDENLLEVEAFTEEEMDMHISDYEEDIEESVGGFRSPSLAICMMTLPQQLEEEFTEEVQCQREEPLETIMEEKSTEQKGMIEAFSHPGHTTPQSMQVDTSSEISSAQISTYKEKSSSVPLLISNGVNVASQPPAPTPQKTQRNEFTAQLPDCSESVRQMLQDEMFKLVQLQQINFMSLMQIVGSSFANLPDTQQLVQQSQSVHLGESQESNLRGCGDVEDSNKNLKERFFIKPQSMGENAREPRKNSPHCHEGTIPSGQNSTGNVQNVPHGSIPLCQLNGQPRKKGPIPSSQNLPSTSFYPAPAGNTHLYLLSTPSVVQKAPRLIPHAKTFSPGDGFPLLQFKSKQEFQPLFLHTGSIPQVPFRPLPQPREAWGLSDSFQPALPQRAAQTTPASHLNVSQYNTEARKKEVEQKTWAETVITEIPNHVNLDQYVGQENLTPQQDSSVFIKPEKLFDVKPGTLEISPHHSFGLPLLYLPLKPPNMFPSTSRASITVPSTPIQPIAEERKYPRLSLLHSHLSPENRCKKTQLIPLENLIAFKQSQQKLTHNLFEQGDAGHLQLLKVKIEPPEVRQGKDSKKRQRRRAEKELQEKRCEKLRRKPNVTFRPENSIINNDDSEIIKKPKEQQEHCGSHPLDDFDVPFEMLQDDNTSAGLHFMASVKKKAIGSQDASTNTDPEHEPLTAPQLLVPDVYLNLKLSSEMSEKPWSPSIPHTVTNLVGHTYINVIDIEANDLLQELPVREEPSNDNVIKQQSDHLAVPSSAELHYMAASVTNAVPPHNFKSQGLPKPEFRFKGQSTKSDSAEDYLLWKRLQGVSAACPAPSSAAHQLEHLSAKLQKIDEQLLAIQNIAENIEQDFPKPEMLDLHCDKIGPVDHIEFSSGPEFKKTLASKTISISEEVRFLTHMDEEDQSDKKETSEPEFSITENYSGQKTCVFPTADSAVSLSSSSDQNTTSPGMNSSDELCESVSVHPLQMTGLTDIADIIDDLIIKDGVSSEELGLTEQAMGTSRIQHYSGRHSQRTDKERREIQAWMKRKRKERMAKYLNELAEKRGQEHDPFCPRSNPLYMTSREIRLRQKMKHEKDRLLLSEHYSRRISQAYGLMNELLSESVQLPTLPQKPLPNKPSPTQSSSCQHCPSPRGENQHGHSFLINRPGKVKYMSKPSYIHKRKSFGQPQGSPWPHGTATFTIQKKAGGAKAAVRKATQSPVTFQKGSNAPCHSLQHTKKHGSAGLAPQTKQVCVEYEREETVVSPWTIPSEIHKILHESHNSLLQDLSPTEEEEPEHPFGVGGVDSVSESTGSILSKLDWNAIEDMVASVEDQGLSVHWALDL

SEQ ID NO: 268388 - DNA, 11250 bp, Artificial Sequence
  derived and/or modified sequence
ggttctgagcaggcgccgtggcagcgcccgcgccccctgcccgccctccgccgtcgccaggacgcaggctcgcgtcagggctggcggtagggcccgcagctgtcggcctggcgtcttcaccccgcgcagtcggcctcgcctagccttctcgcgcctgactggccggaccctgcccctggcggagaatcttgggactgttttacttaattggtcattgatagcttaacaaacatggagataagattagaaatcttgacatcaacaggtattaagcagaaaaaaccatggccacgtgtctcctggttgggaaaggaaaaagaagccgtttttcttttggatgataaattcataaatgaaattaatttgctatcaggaaagataaagaagaaaattcctagtctgcagcctttcttgaaggatgttattgtcctaacaacatccagtaatgatgcctggctggctggggtactaactacaggagagcttttcctttggaacaaagatcaagattgtttgaaaactataccaataactgaaaagcctaaggaaatgatcaaagctacagtcgcaagctctttgagactgtacttgtatgtatctggaaatgggaaaagaattgtgctcataacaccttctggatgcatatttctttgggaatatttggaattaaagaatatcttatcttctaaaagcctttcattggcgggtcggtggtcccaggtcatacctgaagaagcagttctcttgccttccaccgaagataaagaagctgtagtgaatgctgtttttataaaaaatgagttatttggagactgctgcctgtgttcatttactttttattctggggaatgcctgaagttaacatttctagcaattcggtggcatgagaatgtatttacatctgtaagatcattgccataccatgttcattgggctcaacaagactgtcatctctgtagtttaattcctaaatgtgaatcagtaaagtcaagaggagctctaatttctgccttttcaagagatggccttaccctggcagtaactcttaatcagaaagaccccaaggcaactcaggtattatttataaacacactgaattttgttactctctgtggtagccttaaaggatgtagtaacaagagtcccgtggttccagctacacttattaggtcctactgggtaggtgatatcagctggacgcatgatagtctttttctggcttgtatgttaaaacgtggctctctggttttattgacctgccaaggtgaattgctaacattaattacatttggttgctctatagaatttggcccagcagaatttattcctcttcatccactaataacgtatagaccacagcagtttacgtttcaagattcaaataattctgttgattcatcagcttctgatagtgaccctatgagacagagattttctataaaagcacactcacggttaccctacctcgttatatctgatggatatatggtcacaacccttcgatttcttgatagcctatctccatcagtacacatgagatcacttctacttgattcaacccagaggcttgagaaaatatatcaaagtgtgatattgtctaagccaaaaggcaaaggactgaacttgcgatcactgaattccctaaggtctagcctgttagaacaccaaggaaatgaaagttcagccgatttcactgtccccaaattcttgcaggcagaagaaacaataaatgaaaatgcagcagattttcaggattttgaagcagaagaaactaacgaaggcagacactttccagacaacttatgtcctttttggaacaaaagagatgatgtgctgtgtagtagtatgaaggaaggaagattggaatttgcatctatgtttgatacgatacatgcaaaggatgatagtgaggagacagatagaaccattacagaactgcattctatccagaaaagtctacttgcagcgtggactataggaatttcaaaaactgtgacagaaaaaaatttaatgttaaattacatagtagtttgtatcactcattttttttacattcttcaatttataaaatgtccttttcctaaacttgatcttgttttaagcaaaagctcaagacataatgcatggatactttgtatctttcaactttttcatcagtgtttatcaatccattattgggatataagatacaaacaagatgtggggcatttgataaagctgacctcaaatactgtaaaacttttgctgactcagcaacaaaagggtcagttattctcagagaaacttttagcttgtttttatttactcaaaatggtagctgacaatttaaatggtgtatacattcttcaacctgaagttatttcagcatcagctgatggaagtaaaataacagctcaagactcattggtggtacctatttttcagatgtttcaagatagtggttttcagaaaaactggtcttggaactcatttttcaagattcatcctcaagtagtaaatcctgtgcaacagccaggacacagattgcttattctctggagaatactgtacaaaaaaactttatggtatcaagcacaattaaatcgaagagttcctgaagctgatagtcagttaactgaaaagatgacacatgaagcatctactgtcaagtccctgttatgtcatttgcaggctaacctacagagtactggagattgcttgaatcaaaccttagaacttaaatctatcaatggggaagaatgttttttattaggatcatatgaaaagtctgttcagctgtggaaaaaagctctacaagaaatcgaagagaaaggaggaagaaggacgtattttcttcagatacgctattatctttctctcttatactgccacctctatagctataatttaaatgatgctcaaggattgtgtgatcagctagcaagagaaatcctgagatggtcccaactacctgtaaaagaaaataaagatttttcaggtgctgcaaagtctcattttgagtgtggaatggtgggcggtgttcatcctgaggcagcagtgagagtcgtccagtccatggctcgtttcatggctgcctatttcaccaatcagcagctttgcattttgccccctcatcatgtgaatgttcttcccccacttcatattaaaacagagcagtcctttcgacttattcctctgcaacactctaaggtggccagtgttgttagagatcagaatctctctaatgtgtggacagttgaatatgcacttgaattactatttattggtggcctggttccagaggctgtgtggttggcatataaacttggagactggaagacgtctgtttcaattggtgtggctttccagctgttctgtaaacgtgatagcaatttcatgaggtccaagaaaaagagtctgaatctaccactccgtatgactccagcacagatttttcaggaaaaactgcagtgtgttttaggtcaaccagcctctttggaagcaaaaaatgaaatgggctcaaaatataaacagtttacagatcccattgaagaggaagatgcaaatctgctatttggttcagtacaagaagtactgaaagcatcagttatggccgatgcagatattctttcggagacatttcaacttctgatagactctgccaaggacttcagtaaaagactgtggggcttagtgccattcggcttgtatcttccagctcctccattgtactgtccccagccagctattcttagtgaagaagatggtgatgatcttcttttaaaagctgaaaaaaataatcgccagaaggtatctggaatccttcagcgtgttctcctgcttttccgggcggctcagtgttcttttcctgtagcacagtggtatatattgcagttgaggtgggcaagaaaagtcatgcagaagattcgaatgaaaggatcccttccttcactgagtccttttcctcagtcattacttaattactgtaaaggaggtatcgcattttttagacctggagcagctggagaccacaagcttgatgaagtttccattagagcaataggttgcttcagagaactttgtgctctgtgttggatgctgcatgtccgtgataagttatcctatagttgcaggcaatatcagaaagcaagagaaaatgtaaaaggagaaaaggaccttgaagtggagtttgattcttgtatgattgagcactgtcttagtgcagtggaatgggcttatagaatgctgcctttctctcggttttttaatatggaagaacttattcaggatataattttgagccttattggagaactgccaccaatcagaaaggtagcagaaattttcgtgaaagcatttccctatcctgaggacgtgagggttcctttaagagacaaatatcactctcttcaccagagactcagacactgtgttgtgaaaggaccccagactgaggaaatgatgtctgttgtcatgcattctatccagaaagtgagggtgaaagctctaaaacgtgtgcagagaaatataggctcttttgaagtgaatatatgggaaccaattgaagaagagaaaccagatgaggctccaggtgttgacagatattccctggggactagtttgagcagaagtacactcacagaactaggagattctgtggttcacagtgatgcagatacgttctctgaagctttgtcggttgaagaaaaaagtaggataaatatctatcaaagaaatgccccaaatcacatggaattaacatcaattcataagccaactgataaaaggaaaatgtgtaatcagaaagaaaatcctacaaagaaagaagatcatgaaaagttatcacaaaatacacttcctgtaataggtgtttgggaatttgaacgtgatgatgatgaatatattaaattccttgatctgtttttgagttacattcttgaaagagacctaccttattccagggatgctgacattccatttctaactagtttttctggaaagcttagagaacatgaacttaattctttactttttgatgtacatacaacattaaaacgacatcagagcaaaactaaaagccagaatgtgtttagagctggttcttgctttgttgttgctcctgagtcctatgaatcagaaaaatcatcctctttaaatgatgaatatggcatgcatttagaaaaccagaaactttcatcatcagtactggttaatcaagggatcaaaccttttttacaatatccttcgaatgaagtcaataagaatgaaggaatgagtggattatttggtttaaaacaaaggtcaatttacaaaatacaagatgacactagagagaaatgtctaatccagagatcatcaaaccacattttttggactcccaagtccattaaaactagaagatgtattttcaaagctattcagtgcaatgatattaaccctcaagaagatcttcctttagcactaaacacttttggcagtataggaagactgctggaatggatgataaggtggtctaatagaaggctactctgtgattctggtataactgagtcatcctctgagtacagtccagtaattcgtgtaaagacctctacagctgccattcttacatcattatggcttttggaacaaccctattttgctacatataaggcaaaaaatgccattattaagatggtagagaatcgtgacactgggtgtcagattggacccaatattgagagggagagcaaatcagatgctggcggttcagttgcagtagcaactccaggtggaactgaggaaagaaatggtcagaataaatcttgtcaaaatatcttgaaaatgccaactgaagcaaaaaatcctgatataaaagaaatcaatgatgatattatttccatcactcataatactaaaaaagaatttatagatattgatgagaatcttttagaagtagaagcatttacagaagaggaaatggatatgcacatatcagactatgaagaagacattgaagaatctgttggaggtttcagaagtcccagtcttgccatttgcatgatgactttaccacagcagttagaagaagagttcacagaagaggttcagtgtcaaagggaagaaccactggagacaattatggaggaaaaatcgactgaacaaaaaggtatgatcgaagccttttcacatcctgggcataccactcctcaatcaatgcaagtagatacgagttcagaaatttctagtgcacagatttctacatataaagaaaaatcttcctcagttccacttctgatatcaaatggagtcaatgttgcttcacaaccacctgctccaacacctcagaagacccagagaaatgaattcacggctcagttaccagattgttcggagtccgttaggcagatgctgcaagatgaaatgtttaaattagttcagctgcaacagatcaacttcatgagcctaatgcaaatagtaggatcatcctttgctaatctcccagatacacaacaacttgtacagcagtctcagtctgtgcatttaggggaaagccaagaatcaaacctaagaggatgtggtgatgttgaagacagcaacaaaaatcttaaggagagattttttattaaaccacagtcaatgggagagaacgccagagagcctcgcaagaacagcccacactgccatgaaggaactatcccatctggtcaaaatagtactggaaacgtacagaatgttccacatgggagtattcctttatgtcaattaaatggccagccccggaaaaaaggaccaattccatcatctcaaaacttaccatccacttcgttttatccagctcctgctggaaatactcacctctaccttttgtccacaccttctgttgttcagaaggcacctagacttatcccacatgcaaaaacatttagtcctggtgatggctttcctttgcttcaatttaagtctaaacaagaattccagccccttttcttacatacaggaagtattccacaagttcccttcaggcctttgccacaaccaagagaggcttggggattatctgactccttccaacctgctctgccacagagagcagcacaaactactccagcatcccatttgaatgtaagccagtataacactgaagccagaaaaaaagaagttgagcagaagacgtgggcagaaactgtaattacagaaattcctaatcatgtgaacttggatcaatatgttggacaagaaaatttgacacctcaacaggactcttcagtgtttataaaaccagaaaaactatttgatgttaagccagggacccttgagatatctcctcaccattcctttggacttccgttactatacctgccacttaaacctcctaatatgtttccatcaacctcaagagcatctattacagttccctcaacacctatccaacctatagcagaagaaagaaaatacccaagattgtcattacttcattcacatttgtccccagaaaataggtgcaaaaaaacacaacttatcccacttgaaaacctcattgcgtttaaacaaagccaacagaaactaacacataatttatttgaacaaggtgatgctggacaccttcaacttctaaaggtcaaaatagaaccacctgaagtaagacaaggaaaggacagtaaaaaaaggcaaagaagaagagctgagaaagagctgcaagaaaaaagatgtgagaaactgaggagaaaaccaaatgtgacttttcgaccagagaattccataattaataatgatgattcagaaatcattaagaaacccaaggaacaacaagaacattgtggttcccatcctttggatgacttcgacgttccttttgaaatgctacaagatgataatacttcagctggattgcatttcatggcctctgtaaaaaagaaagctataggaagtcaagatgcaagtacaaatacagacccagaacatgagcctttgactgctcctcagctcttggtcccagatgtctatctaaatctgaagctttccagtgaaatgtcagagaaaccttggtcaccctcaatacctcatacagtaacaaacttggttggacatacttatataaatgtgattgacattgaagctaatgatcttctacaggaattacctgtgagagaagagccttcaaatgataatgttatcaaacagcaaagcgatcatctagcagttccatcgtctgcagagttacattatatggcagcttcagttactaatgctgttcccccacataattttaagagtcaaggtctgccaaaaccagagttccgattcaaaggacagagcacaaagtcagactctgcagaagattatctattgtggaaacggctgcaaggtgtctctgcagcttgccctgcaccaagctctgcagctcaccaactagagcatctcagtgctaagcttcagaaaattgacgagcagttgctagcaatacagaacattgctgaaaacatagaacaggatttccccaagcctgaaatgctagatctacattgtgataagattggaccagtggatcacattgaattctcttctggccctgaattcaaaaaaacattagcttcaaaaaccattagcatttctgaagaagtgcgttttttgacccatatggatgaagaagatcaaagtgacaaaaaggagacttcagaacctgaattttcaataacagaaaattattctggtcagaaaacctgtgtgtttcctactgccgattcagctgtcagcctttccagttccagtgatcagaatactacttctcctggtatgaatagcagtgatgaattgtgtgagagtgtttcagtacatccgctccagatgactggattgactgatattgcagacattattgatgaccttataattaaagacggagtttccagtgaagaacttggcttaacagaacaagctatgggcacctccagaattcagcattattctggcagacattcacaaagaactgacaaggaaagaagagagattcaagcctggatgaaaagaaaacgaaaagaaagaatggcaaagtacttaaatgagctggcagaaaagagagggcaagaacatgatcctttctgtcccagaagcaatccactttacatgacttcaagggaaataaggctgagacaaaagatgaagcatgaaaaagacagattgctgctctctgaacactatagtcgtcgaatctcacaagcgtacggtctgatgaatgaactgttatctgagtcagtacagctaccaactctaccacagaaaccattgcctaacaaacccagccctactcagtcttccagttgtcaacactgcccttctccaagaggagagaatcaacatggtcacagttttctaataaatcgacctggaaaagtcaaatatatgtccaaaccgagttatatccataagaggaagtcttttgggcaacctcaaggctcaccttggccacatggaactgccactttcaccatacagaaaaaagctggtggagccaaagcagcagtaagaaaggctacgcagtctccagttaccttccaaaaaggctctaatgctccgtgtcatagtctgcagcatacaaaaaaacatggaagtgctgggcttgcacctcaaaccaagcaggtgtgtgtagagtatgaaagagaggagactgtggtgagtccctggacgataccttcagaaatccataagattcttcatgagagtcacaattcccttctacaagacttgtctccaactgaagaggaagagccagagcatccttttggggtgggcggtgtggacagcgtgtctgagagcactggcagcatcctcagcaagctggactggaatgccatcgaagacatggtggccagcgtggaggaccagggcctgtctgtccactgggccctggacctgtaagacctggatatcattgggtttccatgcacaggccagcacctcagtaatgtggttctgaaagattaacaggtttaagggacagaagcaatgaaagaagcaatgtgaattttccatttgctttcatattattacctggattagccattaccagaggaaaaataaacatttctcagtaactttgcctttatggggaaagggttgactattgatgtattatatgtttttgtatttgatgcatcattaggcataatttttaaaatgataagtacctttcaagccaagtttgcataacctactttcaataaaaaccctctatcttgcctcctcctttattaccctctgagttttgagaaacaaccatatacagatgaatctaataggaaaaaaaaaaatcttttcattgagaagaaaatcagtctcacctgagaactcaattatgaaccctattttaaaacacctatgcagggtttagcctaggagtgaaaagaaaaaccaactaccttttaccaaccctgaatctctaaataagcaaagtttcatggaggccaggagatcttctgtcttctgccctgtagcctgaagccttggaggaagaaacaggaatggatgctttgggcaggaaagtaagggaatatgactccggcctctagaaggctcatcttaaatttgtaagaaccatggtacagagacctgattagtttttggtattgtgctccaataatgtcatagttttaagagataatttttatgagaattgactaagaaccagtatccttcaactacttcatcaatgtttggtataatataaaagcacactatcatctgaaaaagctattaaatacccctctttttccaaatatctacctgtgtgaagccaggttttacaacatgtattgcagcaagttgaatgcagaagcaggtatggtaattcagctgccttctatcaagctaaacattaaagagatttgtagaactataaaacaatgctactctccttaccaaattgttttagaaaatagctttataggctaacattattgttaattgtcatttaattgttttgtcatttaaaatattttaaattgttttctgttagtttcttttttgtatattctatgggtattttattgatacatgatagttgtacatttttatggggtgcatgtgatattttgatatgtgcatacaatgtgtagcaatcaaatcagggtaattgggatattcatcacctcaaacatttatcatttatttgtgttggaaacattcaaaccttttcttctagctatttatccattgttggatacttatatcaattctatatcttagctgttgtgaatagagctgcaataaatgtaggagtgcagatatctcttt

SEQ ID NO: 268389 - DNA, 6288 bp, Artificial Sequence
  derived and/or modified sequence
atggccgacgccgacatcctgagcgagaccttccagctgctgatcgacagcgccaaggacttcagcaagagactgtggggcctggtgcccttcggcctgtacctgcccgccccccccctgtactgcccccagcccgccatcctgagcgaggaggacggcgacgacctgctgctgaaggccgagaagaacaacagacagaaggtgagcggcatcctgcagagagtgctgctgctgttcagagccgcccagtgcagcttccccgtggcccagtggtacatcctgcagctgagatgggccagaaaggtgatgcagaagatcagaatgaagggcagcctgcccagcctgagccccttcccccagagcctgctgaactactgcaagggcggcatcgccttcttcagacccggcgccgccggcgaccacaagctggacgaggtgagcatcagagccatcggctgcttcagagagctgtgcgccctgtgctggatgctgcacgtgagagacaagctgagctacagctgcagacagtaccagaaggccagagagaacgtgaagggcgagaaggacctggaggtggagttcgacagctgcatgatcgagcactgcctgagcgccgtggagtgggcctacagaatgctgcccttcagcagattcttcaacatggaggagctgatccaggacatcatcctgagcctgatcggcgagctgccccccatcagaaaggtggccgagatcttcgtgaaggccttcccctaccccgaggacgtgagagtgcccctgagagacaagtaccacagcctgcaccagagactgagacactgcgtggtgaagggcccccagaccgaggagatgatgagcgtggtgatgcacagcatccagaaggtgagagtgaaggccctgaagagagtgcagagaaacatcggcagcttcgaggtgaacatctgggagcccatcgaggaggagaagcccgacgaggcccccggcgtggacagatacagcctgggcaccagcctgagcagaagcaccctgaccgagctgggcgacagcgtggtgcacagcgacgccgacaccttcagcgaggccctgagcgtggaggagaagagcagaatcaacatctaccagagaaacgcccccaaccacatggagctgaccagcatccacaagcccaccgacaagagaaagatgtgcaaccagaaggagaaccccaccaagaaggaggaccacgagaagctgagccagaacaccctgcccgtgatcggcgtgtgggagttcgagagagacgacgacgagtacatcaagttcctggacctgttcctgagctacatcctggagagagacctgccctacagcagagacgccgacatccccttcctgaccagcttcagcggcaagctgagagagcacgagctgaacagcctgctgttcgacgtgcacaccaccctgaagagacaccagagcaagaccaagagccagaacgtgttcagagccggcagctgcttcgtggtggcccccgagagctacgagagcgagaagagcagcagcctgaacgacgagtacggcatgcacctggagaaccagaagctgagcagcagcgtgctggtgaaccagggcatcaagcccttcctgcagtaccccagcaacgaggtgaacaagaacgagggcatgagcggcctgttcggcctgaagcagagaagcatctacaagatccaggacgacaccagagagaagtgcctgatccagagaagcagcaaccacatcttctggacccccaagagcatcaagaccagaagatgcatcttcaaggccatccagtgcaacgacatcaacccccaggaggacctgcccctggccctgaacaccttcggcagcatcggcagactgctggagtggatgatcagatggagcaacagaagactgctgtgcgacagcggcatcaccgagagcagcagcgagtacagccccgtgatcagagtgaagaccagcaccgccgccatcctgaccagcctgtggctgctggagcagccctacttcgccacctacaaggccaagaacgccatcatcaagatggtggagaacagagacaccggctgccagatcggccccaacatcgagagagagagcaagagcgacgccggcggcagcgtggccgtggccacccccggcggcaccgaggagagaaacggccagaacaagagctgccagaacatcctgaagatgcccaccgaggccaagaaccccgacatcaaggagatcaacgacgacatcatcagcatcacccacaacaccaagaaggagttcatcgacatcgacgagaacctgctggaggtggaggccttcaccgaggaggagatggacatgcacatcagcgactacgaggaggacatcgaggagagcgtgggcggcttcagaagccccagcctggccatctgcatgatgaccctgccccagcagctggaggaggagttcaccgaggaggtgcagtgccagagagaggagcccctggagaccatcatggaggagaagagcaccgagcagaagggcatgatcgaggccttcagccaccccggccacaccaccccccagagcatgcaggtggacaccagcagcgagatcagcagcgcccagatcagcacctacaaggagaagagcagcagcgtgcccctgctgatcagcaacggcgtgaacgtggccagccagccccccgcccccaccccccagaagacccagagaaacgagttcaccgcccagctgcccgactgcagcgagagcgtgagacagatgctgcaggacgagatgttcaagctggtgcagctgcagcagatcaacttcatgagcctgatgcagatcgtgggcagcagcttcgccaacctgcccgacacccagcagctggtgcagcagagccagagcgtgcacctgggcgagagccaggagagcaacctgagaggctgcggcgacgtggaggacagcaacaagaacctgaaggagagattcttcatcaagccccagagcatgggcgagaacgccagagagcccagaaagaacagcccccactgccacgagggcaccatccccagcggccagaacagcaccggcaacgtgcagaacgtgccccacggcagcatccccctgtgccagctgaacggccagcccagaaagaagggccccatccccagcagccagaacctgcccagcaccagcttctaccccgcccccgccggcaacacccacctgtacctgctgagcacccccagcgtggtgcagaaggcccccagactgatcccccacgccaagaccttcagccccggcgacggcttccccctgctgcagttcaagagcaagcaggagttccagcccctgttcctgcacaccggcagcatcccccaggtgcccttcagacccctgccccagcccagagaggcctggggcctgagcgacagcttccagcccgccctgccccagagagccgcccagaccacccccgccagccacctgaacgtgagccagtacaacaccgaggccagaaagaaggaggtggagcagaagacctgggccgagaccgtgatcaccgagatccccaaccacgtgaacctggaccagtacgtgggccaggagaacctgaccccccagcaggacagcagcgtgttcatcaagcccgagaagctgttcgacgtgaagcccggcaccctggagatcagcccccaccacagcttcggcctgcccctgctgtacctgcccctgaagccccccaacatgttccccagcaccagcagagccagcatcaccgtgcccagcacccccatccagcccatcgccgaggagagaaagtaccccagactgagcctgctgcacagccacctgagccccgagaacagatgcaagaagacccagctgatccccctggagaacctgatcgccttcaagcagagccagcagaagctgacccacaacctgttcgagcagggcgacgccggccacctgcagctgctgaaggtgaagatcgagccccccgaggtgagacagggcaaggacagcaagaagagacagagaagaagagccgagaaggagctgcaggagaagagatgcgagaagctgagaagaaagcccaacgtgaccttcagacccgagaacagcatcatcaacaacgacgacagcgagatcatcaagaagcccaaggagcagcaggagcactgcggcagccaccccctggacgacttcgacgtgcccttcgagatgctgcaggacgacaacaccagcgccggcctgcacttcatggccagcgtgaagaagaaggccatcggcagccaggacgccagcaccaacaccgaccccgagcacgagcccctgaccgccccccagctgctggtgcccgacgtgtacctgaacctgaagctgagcagcgagatgagcgagaagccctggagccccagcatcccccacaccgtgaccaacctggtgggccacacctacatcaacgtgatcgacatcgaggccaacgacctgctgcaggagctgcccgtgagagaggagcccagcaacgacaacgtgatcaagcagcagagcgaccacctggccgtgcccagcagcgccgagctgcactacatggccgccagcgtgaccaacgccgtgcccccccacaacttcaagagccagggcctgcccaagcccgagttcagattcaagggccagagcaccaagagcgacagcgccgaggactacctgctgtggaagagactgcagggcgtgagcgccgcctgccccgcccccagcagcgccgcccaccagctggagcacctgagcgccaagctgcagaagatcgacgagcagctgctggccatccagaacatcgccgagaacatcgagcaggacttccccaagcccgagatgctggacctgcactgcgacaagatcggccccgtggaccacatcgagttcagcagcggccccgagttcaagaagaccctggccagcaagaccatcagcatcagcgaggaggtgagattcctgacccacatggacgaggaggaccagagcgacaagaaggagaccagcgagcccgagttcagcatcaccgagaactacagcggccagaagacctgcgtgttccccaccgccgacagcgccgtgagcctgagcagcagcagcgaccagaacaccaccagccccggcatgaacagcagcgacgagctgtgcgagagcgtgagcgtgcaccccctgcagatgaccggcctgaccgacatcgccgacatcatcgacgacctgatcatcaaggacggcgtgagcagcgaggagctgggcctgaccgagcaggccatgggcaccagcagaatccagcactacagcggcagacacagccagagaaccgacaaggagagaagagagatccaggcctggatgaagagaaagagaaaggagagaatggccaagtacctgaacgagctggccgagaagagaggccaggagcacgaccccttctgccccagaagcaaccccctgtacatgaccagcagagagatcagactgagacagaagatgaagcacgagaaggacagactgctgctgagcgagcactacagcagaagaatcagccaggcctacggcctgatgaacgagctgctgagcgagagcgtgcagctgcccaccctgccccagaagcccctgcccaacaagcccagccccacccagagcagcagctgccagcactgccccagccccagaggcgagaaccagcacggccacagcttcctgatcaacagacccggcaaggtgaagtacatgagcaagcccagctacatccacaagagaaagagcttcggccagccccagggcagcccctggccccacggcaccgccaccttcaccatccagaagaaggccggcggcgccaaggccgccgtgagaaaggccacccagagccccgtgaccttccagaagggcagcaacgccccctgccacagcctgcagcacaccaagaagcacggcagcgccggcctggccccccagaccaagcaggtgtgcgtggagtacgagagagaggagaccgtggtgagcccctggaccatccccagcgagatccacaagatcctgcacgagagccacaacagcctgctgcaggacctgagccccaccgaggaggaggagcccgagcaccccttcggcgtgggcggcgtggacagcgtgagcgagagcaccggcagcatcctgagcaagctggactggaacgccatcgaggacatggtggccagcgtggaggaccagggcctgagcgtgcactgggccctggacctgtag

SEQ ID NO: 268390 - DNA, 6288 bp, Artificial Sequence
  derived and/or modified sequence
atggccgacgcagacattctcagcgagactttccaattactgatcgactcggccaaggacttttccaagcgattgtggggtctggttccgtttgggctgtatttacccgcacctcccctgtattgcccccagcccgctatcttatcagaggaggatggggacgatctcctgctgaaggccgaaaaaaacaacagacagaaagtttctggaattctgcaaagagtcttactacttttcagagcagcccagtgttcgttccccgtggcccaatggtatattctgcaactgcgatgggctaggaaggtcatgcaaaagatcagaatgaaagggtctctacctagtttatcccccttcccgcagagtctgctcaactattgcaaggggggcatcgcctttttcagaccaggggcagcaggtgaccataaattagatgaggtcagcatcagggcgatcggatgtttccgggagttatgcgccctttgttggatgctccatgtgcgggacaagctgagctactcttgtagacagtatcagaaggcccgtgagaacgtgaaaggcgagaaggatcttgaagttgaatttgactcctgtatgatagaacattgcctgagtgccgtagaatgggcctatagaatgttaccatttagcagatttttcaacatggaggagctcatacaagatataatactttccctcattggggagctgccacctatcagaaaggtggctgagatattcgttaaggccttcccatatcctgaggatgtccgggtaccactgagggataagtatcattcactgcaccagcgccttcggcattgcgtggtgaaaggcccccaaacagaagagatgatgagtgtggtaatgcactcaattcagaaagtccgagttaaggcactgaagcgcgtgcagcgtaacattggatctttcgaggtgaacatctgggagccgattgaggaagagaagcctgacgaggctccgggtgtagaccggtactctctggggacgtcactgagcaggagcacactcaccgagctaggggattccgtcgtacattctgacgccgatacatttagcgaggccttatccgtggaagaaaagagtcgtattaacatatatcagaggaacgctccgaaccacatggagctcacgtcaatccacaaacctacagacaagcgcaagatgtgtaatcagaaagaaaacccaactaagaaggaggaccatgagaagctctcccagaatactcttcccgtaatcggagtctgggaatttgaacgggacgatgacgaatacataaagttcctggacttgttcttgagctatattctagagagagatctcccctactctcgcgatgcagacattccatttctcacgtctttttccggcaagctgcgggaacacgaactgaattctctcctttttgatgtccatacaacccttaaaagacaccagagtaaaacaaagtctcagaacgtattccgggcaggttcatgctttgtcgtggctccggagtcgtatgaaagtgaaaaatcgtcttctctaaatgatgaatatggcatgcatctggagaatcagaagctaagctccagcgtccttgtcaatcaaggtattaaacctttcctccagtatccctctaatgaagtgaataaaaacgagggtatgtccggactgttcggactgaaacagcggtctatctacaagatccaggatgacacaagagaaaagtgtctgatccagcggtcatcgaatcacatcttctggacgcctaagtcaattaagacgcgaagatgtatcttcaaggcaatacagtgtaatgacattaatcctcaggaggacctgcccttggccctgaatacattcggatctatcggccgcctgttagagtggatgatccgatggtctaaccgcagactgctgtgcgactctggaatcaccgaatcaagttcagagtactcacctgttatccgtgtgaagacatctacagcagctattcttaccagcctgtggttgctagagcagccgtacttcgctacctataaggccaagaatgcaattattaagatggtggagaatcgagacaccggctgtcagattggacccaacatcgaacgggaaagtaagtcagacgctggggggagcgtggccgttgcaaccccggggggcacggaagagcgcaatggtcagaacaagtcatgccagaacattctcaagatgcctaccgaggcgaagaatcccgacattaaggagattaacgatgatattatatcaattacacacaatacgaagaaggagttcattgacatcgatgagaacttacttgaagtggaggcattcacagaggaagaaatggacatgcacatctctgactacgaggaagacattgaggagtcggtcggcgggttcaggagtccatctctcgccatttgtatgatgaccttaccacaacagctggaagaggaattcactgaagaggttcagtgccagagggaagagccgttggagacgatcatggaggaaaagagcacagaacagaaagggatgatagaggcattttcacacccaggccacacgacaccgcagtctatgcaggttgatacatcttcagaaatctcatcagcccaaatctctacatacaaagaaaagtcatctagtgtgccccttttgatctctaacggtgtgaatgtcgcaagccagccaccagctcccacgcctcagaagacgcagaggaacgagttcacagcccagctgcccgactgttcagagagcgtcaggcagatgctccaggacgaaatgtttaaactggtgcagctccagcagatcaacttcatgtcactgatgcagattgtgggatcttcatttgccaacttgccagatactcagcagctggtccagcagagccaatctgtccacctgggagagtctcaagagtcgaatctcagaggctgcggcgatgttgaagattccaataaaaacttgaaggagcggttttttatcaagcctcagagtatgggagagaatgcaagggaaccccggaaaaactcaccgcattgccacgaggggacaatcccgtctggccaaaactccactggcaatgtgcagaacgtgccccatggtagtatccccctttgccaattaaacggacaaccacggaagaagggccctatccccagttctcagaatctcccctccacttcattttatcctgcacccgcggggaacacacatctctatttgctgagtactccatccgttgtacagaaggctccgcgactgattccgcatgccaaaaccttctctcccggtgacggatttcctctgctccagtttaaatctaaacaggagttccagccactgtttctacacaccggatctatcccgcaagtgccatttcgaccattgccccagccaagagaggcctggggcttgagcgatagcttccagcctgctcttcctcaaagggctgcccagactactcccgcgtctcatcttaacgtgagtcaatacaatactgaagctagaaagaaggaagtcgagcagaagacatgggccgagacagttatcaccgaaatcccgaaccacgtgaatttagaccagtatgtcggccaggagaatctcaccccccagcaagactcatctgtcttcatcaagccagagaaactgttcgacgtcaagcccggcacacttgagatatctcctcaccacagctttggtctgcctctgttgtatctcccgttaaaacctcccaacatgttcccatcgacttcacgcgcaagcattacagtgccatcaaccccaatccaaccaatagccgaagaaagaaaatatccgaggctgtcgctgcttcactctcacctgagtcctgaaaatcggtgtaagaaaacacagctgattccactggagaacctgatcgcctttaaacaatcacagcagaaactgactcacaatctattcgaacaaggagatgctggacatttacagctcttgaaggtgaagattgaaccacccgaagtacgccaaggtaaggattccaaaaaaagacaacgccgaagggccgaaaaggagttgcaggagaaacgctgtgaaaagctgaggagaaagcccaatgtgaccttcagacccgaaaattcaattatcaataatgacgacagcgaaatcattaaaaagccaaaggagcagcaagaacattgcggaagccacccattagatgattttgatgttcctttcgaaatgttacaagatgataacacatctgctggcctgcatttcatggcaagtgtcaagaagaaagcaatcggatctcaagatgcaagtaccaataccgatcctgagcatgagcccctgaccgctcctcaactgctggtgccggacgtctacttgaatctgaaactctcctctgagatgtcggagaaaccttggtcgccatcgatcccccatacagtgacaaatctcgtgggccacacctatatcaatgtcatagacattgaggctaacgatttacttcaggaactccctgtgagagaggaaccctccaatgataatgtcatcaagcagcaatctgatcacctggcggtcccctccagcgccgaactccactacatggctgcgtcggtgacgaatgctgttcccccgcacaacttcaagagccaaggactaccaaagcccgagtttagattcaagggtcagagcacaaagagtgactcagccgaagattatctgttatggaagcgattacagggggtgagcgccgcctgtcctgctccatcaagcgcagcacatcagctcgagcacttatcggcaaaactgcaaaaaattgacgaacagcttctagctattcagaacatagccgagaatatcgaacaagacttccccaagcccgagatgctggaccttcactgtgataagatcggacccgtggaccacatagaatttagctctgggcccgagtttaaaaaaaccctagctagcaaaacaatctccatatccgaggaggtgcgcttcctgactcacatggacgaagaagatcaatccgataagaaggagacgtctgaaccggaatttagtatcacagagaattacagcgggcagaaaacatgcgtttttcctacagctgactcggcagtgtcgttaagtagtagctctgatcagaatactacatctcccggaatgaattcaagcgatgaactctgtgaaagcgtctcggttcatccactccagatgactgggctgaccgacatagctgacatcattgatgacctcatcatcaaagatggagtctctagtgaagagctcgggctgaccgaacaggctatggggacttctcggatacaacactattcaggacgccacagtcaacgcaccgataaggagcggcgagagattcaggcttggatgaaaagaaaacgaaaggagagaatggcaaagtatctgaatgagcttgcagagaagcgcgggcaggaacacgaccctttttgtcctagatcgaatcccttgtacatgactagccgggaaattagactgcgccagaaaatgaagcacgaaaaggataggctgctactgtccgaacactattcaagacgcatcagccaggcctatggactcatgaacgaactgctctctgaaagtgttcagctgcctaccctgccacagaaacccctgccaaacaagccttcaccaacccagtcaagttcttgccagcattgtccatcacccagaggcgaaaatcagcatggacactcattcttaattaaccgtcccggaaaggtaaagtatatgagtaagcccagttatattcataagcgtaaatcttttggacaaccacaagggtccccatggccccatggaacagctacttttaccatccagaagaaggctggtggcgccaaggctgccgttcgcaaggctacacaatcccccgtgactttccagaagggaagcaatgccccttgtcattctttgcagcacacaaagaagcacggaagcgctggcttggctcctcaaacgaaacaggtctgcgttgagtatgaaagggaggaaacggtagtttcaccatggacaatacccagcgagatccataaaattctgcacgagtcccacaactccctactccaggacctgagccctacagaggaggaagagcctgagcatccttttggagttggaggcgtggactctgtgtctgagagcaccggctctatcctgagtaagctcgactggaacgcaattgaagatatggtagccagtgtggaagatcagggtttatccgtccattgggcgctcgatctttag

SEQ ID NO: 268391 - DNA, 6288 bp, Artificial Sequence
  derived and/or modified sequence
atggctgatgctgacatcctgtctgagaccttccagctgctgattgattctgccaaggacttcagcaagaggctgtggggcctggtgcccttcggcctgtacctgcctgccccacccctgtactgcccccagcctgccatcctgtctgaagaagatggagatgacctgctgctgaaggccgagaagaacaaccggcagaaggtgtctggcatcctgcagagggtgctgctgctcttccgggccgcccagtgcagcttccctgtggcccagtggtacatcctgcagctgcgctgggccaggaaggtgatgcagaagatccgcatgaagggcagcctgcccagcctgagccccttcccccagagcctgctgaactactgcaagggcggcatcgccttcttccggcctggagctgctggggaccacaagctggatgaggtgtccatccgggccatcggctgcttccgggagctgtgtgccctgtgctggatgctgcacgtgcgggacaagctgagctacagctgccggcagtaccagaaggcccgggagaatgtgaagggggagaaggacctggaggtggagtttgacagctgcatgattgagcactgcctgtctgctgtggagtgggcctacaggatgctgcccttcagccgcttcttcaacatggaggagctgatccaggacatcatcctgagcctgattggagagctgccccccatcaggaaggtggccgagatctttgtgaaggccttcccctacccagaagatgtgcgggtgcccctgcgggacaagtaccacagcctgcaccagaggctgcggcactgtgtggtgaagggcccccagacagaggagatgatgtctgtggtgatgcacagcatccagaaggtgcgggtgaaggccctgaagagggtgcagagaaatattggcagctttgaggtgaacatctgggagcccatcgaggaggagaagccagatgaggcccctggggtggaccgctacagcctgggcaccagcctgagccgcagcaccctgacagagctgggggacagcgtggtgcacagtgatgctgacaccttcagcgaggccctgtctgtggaggagaagagccgcatcaacatctaccagagaaatgcccccaaccacatggagctgaccagcatccacaagcccacagacaagaggaagatgtgcaaccagaaggagaaccccaccaagaaggaggaccacgagaagctgagccagaacaccctgcctgtgattggagtgtgggagtttgaaagagatgatgatgagtacatcaagttcctggacctcttcctgagctacatcctggagcgggacctgccctacagcagagatgctgacatccccttcctgaccagcttcagcggcaagctgcgggagcacgagctgaacagcctgctgtttgatgtgcacaccaccctgaagaggcaccagagcaagaccaagagccagaatgtgttccgggccggcagctgctttgtggtggcccctgagagctatgaaagtgagaagagcagcagcctgaatgatgaatatggcatgcacctggagaaccagaagctgagcagctctgtgctggtgaaccagggcatcaagcccttcctgcagtaccccagcaatgaggtgaacaagaatgaaggcatgagcggcctgtttggcctgaagcagaggagcatctacaagatccaggatgacacccgggagaagtgcctgatccagaggagcagcaaccacatcttctggacccccaagagcatcaagacccggcgctgcatcttcaaggccatccagtgcaatgacatcaacccccaggaggacctgcccctggccctgaacaccttcggcagcatcggccgcctgctggagtggatgatccgctggagcaacagaaggctgctgtgtgacagcggcatcacagagagcagcagcgagtacagccctgtgatccgggtgaagaccagcacagctgccatcctgaccagcctgtggctgctggagcagccctactttgccacctacaaggccaagaatgccatcatcaagatggtggagaacagagacaccggctgccagatcggccccaacatcgagcgggagagcaagagtgatgctgggggctctgtggccgtggccacccctgggggcacagaggagagaaatggccagaacaagagctgccagaacatcctgaagatgcccacagaggccaagaacccagacatcaaggagatcaatgatgacatcatcagcatcacccacaacaccaagaaggagttcattgatattgatgagaacctgctggaggtggaggccttcacagaggaggagatggacatgcacatcagtgactatgaagaagatattgaggagagcgtgggcggcttccgcagccccagcctggccatctgcatgatgaccctgccccagcagctggaggaggagttcacagaggaggtgcagtgccagcgggaggagcccctggagaccatcatggaggagaagagcacagagcagaagggcatgattgaggccttcagccaccctggccacaccaccccccagagcatgcaggtggacaccagcagcgagatcagcagcgcccagatcagcacctacaaggagaagagcagctctgtgcccctgctgatcagcaatggagtgaatgtggccagccagcccccagcccccaccccccagaagacccagagaaatgagttcaccgcccagctgcctgactgcagcgagagcgtgcggcagatgctgcaggatgagatgttcaagctggtgcagctgcagcagatcaacttcatgagcctgatgcagatcgtgggcagcagctttgccaacctgcctgacacccagcagctggtgcagcagagccagagcgtgcacctgggggagagccaggagagcaacctgcggggctgtggagatgtggaggacagcaacaagaacctgaaggagcgcttcttcatcaagccccagagcatgggagaaaatgcccgggagcccaggaagaacagcccccactgccacgagggcaccatccccagcggccagaacagcactggaaatgtgcagaatgtgccccacggcagcatccccctgtgccagctgaatggccagcccaggaagaagggccccatccccagcagccagaacctgcccagcaccagcttctacccagccccagctggcaacacccacctgtacctgctgagcacccccagcgtggtgcagaaggcccccaggctcatcccccacgccaagaccttcagccctggagatggcttccccctgctgcagttcaagagcaagcaggagttccagcccctcttcctgcacacaggcagcatcccccaggtgcccttccggcccctgccccagccccgggaggcctggggcctgagtgacagcttccagcctgccctgccccagagagctgcccagaccaccccagccagccacctgaatgtgtcccagtacaacacagaggccaggaagaaggaggtggagcagaagacctgggccgagaccgtcatcacagagatccccaaccacgtgaacctggaccagtatgtgggccaggagaacctgaccccccagcaggacagctctgtgttcatcaagccagagaagctgtttgatgtgaagccaggcaccctggagatcagcccccaccacagctttggcctgcccctgctgtacctgcccctgaagccacccaacatgttccccagcaccagccgggccagcatcaccgtgcccagcacccccatccagcccatcgccgaggagaggaagtacccccggctgagcctgctgcacagccacctgagcccagaaaatcgctgcaagaagacccagctgatccccctggagaacctgattgccttcaagcagagccagcagaagctgacccacaacctgtttgagcagggagatgctggccacctgcagctgctgaaggtgaagattgagcccccagaggtgcggcagggcaaggacagcaagaagaggcagaggcggcgggcagagaaggagctgcaggagaagagatgtgagaagctgcggaggaagcccaacgtgaccttccggccagaaaattccatcatcaacaatgatgacagcgagatcatcaagaagcccaaggagcagcaggagcactgcggcagccaccccctggatgactttgatgtgccctttgagatgctgcaggatgacaacaccagcgctggcctgcacttcatggcctctgtgaagaagaaggccatcggcagccaggatgccagcaccaacacagatcctgagcacgagcccctgacagccccccagctgctggtgcctgatgtgtacctgaacctgaagctgagcagcgagatgtctgagaagccctggagccccagcatcccccacacagtgaccaacctggtgggccacacctacatcaacgtgattgatattgaggccaatgacctgctgcaggagctgcctgtgcgggaggagcccagcaatgacaacgtcatcaagcagcagagcgaccacctggccgtgcccagcagcgctgagctgcactacatggccgcctctgtgaccaatgctgtgcccccccacaacttcaagagccagggcctgcccaagccagagttccgcttcaagggccagagcaccaagagtgacagcgctgaggactacctgctgtggaagaggctgcagggcgtgtctgctgcctgcccagcccccagcagcgctgcccaccagctggagcacctgagcgccaagctgcagaagattgatgagcagctgctggccatccagaacattgctgaaaatattgagcaggacttccccaagccagagatgctggacctgcactgtgacaagattggccctgtggaccacatcgagttcagcagcggccctgagttcaagaagaccctggccagcaagaccatcagcatcagcgaggaggtgcgcttcctgacccacatggatgaggaggaccagagcgacaagaaggagaccagcgagcctgagttcagcatcacagagaactacagcggccagaagacctgtgtgttccccacagctgacagcgctgtgtccctgagcagcagcagtgaccagaacaccaccagccctggcatgaacagcagtgatgagctgtgtgagagcgtgtctgtgcaccccctgcagatgacaggcctgacagacattgctgacatcattgatgacctgatcatcaaggatggagtgtcctctgaggagctgggcctgacagagcaggccatgggcaccagccgcatccagcactacagcggccgccacagccagaggacagacaaggagcggcgggagatccaggcctggatgaagaggaagaggaaggagaggatggccaagtacctgaatgagctggccgagaagaggggccaggagcatgaccccttctgccccaggagcaaccccctgtacatgaccagccgggagatccggctgcggcagaagatgaagcatgagaaggaccggctgctgctgtctgagcactacagccgccgcatcagccaggcctacggcctgatgaatgagctgctgtctgagagcgtgcagctgcccaccctgccccagaagcccctgcccaacaagcccagccccacccagagcagcagctgccagcactgccccagccccagaggagagaaccagcacggccacagcttcctgatcaacagacctgggaaggtgaagtacatgagcaagcccagctacatccacaagaggaagagctttggccagccccagggcagcccctggccccatggaacagccaccttcaccatccagaagaaggccggcggggccaaggctgctgtgaggaaggccacccagagccctgtgaccttccagaagggcagcaatgccccctgccacagcctgcagcacaccaagaagcacggcagcgctggcctggccccccagaccaagcaggtgtgtgtggagtatgaaagagaggagaccgtggtgagcccctggaccatccccagcgagatccacaagatcctgcacgagagccacaacagcctgctgcaggacctgagccccacagaggaggaggagcctgagcacccctttggagtgggcggcgtggacagcgtgtctgagagcacaggcagcatcctgagcaagctggactggaatgccatcgaggacatggtggcctctgtggaggaccagggcctgtctgtgcactgggccctggacctgtag

SEQ ID NO: 268392 - DNA, 6288 bp, Artificial Sequence
  derived and/or modified sequence
atggccgacgccgacatcctgagcgagaccttccagctgctgatcgacagtgccaaggatttctctaagcgcctctggggattggtgcctttcggcttgtaccttcctgctcctccattgtattgccctcagcccgctatactcagcgaggaggacggagatgatctgctgctcaaagccgagaaaaacaaccgccagaaggttagtggaattcttcagcgcgtgctgctcttattccgagccgcccagtgctctttcccagtggctcagtggtacatcttacaacttcgatgggcacgaaaggtgatgcagaaaattcgtatgaaaggaagcctgccttctctgtctcccttccctcagtcgctgctgaattactgcaaagggggtatagcatttttccgccctggagcagccggcgaccataagctggacgaagtatctatacgggcgattgggtgcttccgcgaactgtgtgccctgtgttggatgttgcatgtgcgtgacaagctgagttacagttgccgccagtaccagaaggctcgcgaaaacgtgaagggtgagaaagatctggaagtggagtttgactcgtgcatgatcgaacactgcctgtcggcagttgaatgggcctataggatgctgcccttctcacgtttctttaatatggaagaacttattcaggatatcatactttccctgatcggcgagttgcctcccatccggaaagtggccgagatttttgtgaaggccttcccctaccccgaagatgttagggtacctctcagagacaaataccatagtctacaccaacgcctgaggcattgcgttgttaaaggcccacagactgaagaaatgatgagcgttgttatgcacagcatccaaaaagtgcgagtgaaggccctaaagcgcgtgcagaggaatattggctcttttgaggttaacatatgggagccgatcgaggaggagaagccagacgaagccccgggcgtcgatagatacagcctggggaccagcctgtctcgctccaccctgactgaattaggcgacagtgtcgttcactcagacgctgatacattcagcgaggctctgtctgtcgaggagaagagccggatcaatatttaccaaagaaacgctcctaatcatatggaactcacgagcatccataagcctaccgacaagcgtaaaatgtgtaaccagaaagaaaacccaaccaaaaaggaagaccacgagaagctgagtcagaacacacttcctgtcatcggagtctgggaattcgagcgtgatgatgatgagtacattaagtttctcgacctgttcctctcatatattttagagcgcgaccttccctatagccgagacgctgatattccattcctgacctccttctctggcaagttgcgggagcacgagctcaattccctactcttcgacgtgcataccactctcaagaggcatcagagcaagacaaagtcccagaacgtttttcgagccggaagctgttttgtggtagcgcctgagagttacgagtcggaaaaatcttctagcttaaatgatgaatacgggatgcacctcgagaaccagaaactgagttcatctgtcttagtaaaccagggcatcaaaccattccttcaatatccgagcaatgaagtgaacaaaaacgagggtatgtcagggctattcggcctgaagcagcgcagcatttataaaatacaggacgacacgagggagaaatgcctgatccagcgctcgtctaatcatattttttggacaccgaaatctatcaagactagacgctgtatctttaaggccattcaatgcaacgatattaaccctcaggaagacctgccattggccctgaatacattcggctcaattgggaggctgctcgaatggatgatcaggtggagcaacagacggttgctgtgtgattctggaataaccgagagtagctcagagtattcaccggtgatccgggtcaaaacctctaccgccgccatactgacatcgctgtggcttctggagcagccctatttcgccacctataaagccaagaacgctataatcaaaatggttgagaatcgcgataccggatgccagattggtcccaatattgaaagggagagcaaatccgacgccggaggctccgtggccgtcgctacaccgggcggcactgaagagcggaacggccagaacaaatcatgccagaatattctcaagatgcccacggaggccaaaaatccagacatcaaggaaattaacgacgatatcatttccataacacacaacaccaagaaagaatttattgatattgacgaaaacctgctagaggtggaggcctttaccgaggaagaaatggacatgcatatttccgattacgaggaagatattgaagaaagcgtgggcggattccgatccccgtcacttgccatatgcatgatgactcttccccagcagcttgaagaagaattcaccgaagaggtccagtgccagcgggaagaaccccttgaaactatcatggaagagaaatcaacagaacaaaaaggcatgattgaggccttctctcaccctgggcacaccaccccgcagagcatgcaggtagatacctcctcagaaatttcttccgcacagatctcaacctacaaggaaaagagttcttccgtgcctctcttgatcagtaatggggtaaatgtggcctcccaacccccggcaccaacccctcagaagacccagcgaaatgaatttacagcacaactgccagattgtagcgaaagtgttcgccagatgctacaggacgagatgttcaaattggtgcagttacagcagattaactttatgtcactcatgcagattgtggggtcaagcttcgccaacctccctgacacgcagcagctcgtacagcagtcccagagcgtacatctcggagaatcacaggagtctaaccttaggggatgcggagatgtcgaggatagcaataaaaacttgaaggagaggttcttcatcaaaccccaatctatgggcgagaacgccagggagccccgcaagaactcccctcactgccacgaaggtacaattcctagtggccaaaattcaacaggaaacgttcagaacgtgccccacggtagcattcccctgtgtcagttgaatgggcaaccccgcaagaaggggcccatcccttcttctcagaatctcccgtctactagcttctaccccgccccagctggtaacacacatctctacttgttgagcacaccgagtgtggtgcagaaggctccaagactgattcctcacgctaaaactttcagtcccggcgacggcttccctctgttgcagttcaaaagcaaacaagagtttcagccgctctttctacacacgggttcgatcccccaagtcccattccgcccactgccccagccccgagaggcatggggtctctctgactccttccagcccgccctgccccaacgggcggctcagacaacgcctgcctcccacctcaacgttagccaatacaatacagaggctagaaagaaagaagtggagcagaagacatgggcagaaacagttataacagagatcccaaatcacgtgaatctcgatcagtacgtggggcaagagaatctgaccccacaacaagacagcagcgtgttcattaaacctgagaagctttttgacgtgaaacccgggacactggaaatctccccccatcacagcttcggccttcccctcctgtatcttccattgaagccgcctaacatgttccccagtactagtcgggcaagtattaccgttccttcaacgcctattcaaccaattgccgaggagcgcaagtacccaagactgagcctactccatagtcatctgagccccgaaaatcggtgcaagaagacacagttgatcccgctggaaaatctgatcgccttcaaacagtctcagcagaaactgacacacaacctgttcgagcagggcgatgccggacacctccaactgcttaaggtgaagatcgagccaccagaggtgagacaaggaaaagactccaaaaagagacagcgtcgtcgggccgaaaaggaactacaagagaaaagatgtgagaagctgcgcaggaaacccaatgtaacatttagacctgagaacagcattatcaacaacgacgattcggaaataataaaaaagcctaaggaacagcaggagcactgtgggtctcatcctctggatgacttcgacgtaccgttcgaaatgcttcaagacgacaacacctcagctggcctgcatttcatggcttctgtgaaaaaaaaagctatcgggtctcaagacgccagcactaataccgacccagagcacgagcctctgaccgcacctcaactactagttcctgatgtgtaccttaatctcaagctgagcagcgaaatgtctgaaaaaccatggagccccagtatcccacacaccgtgacgaatcttgtcgggcacacatacatcaatgtgatcgacatcgaggctaacgacttgctgcaggaactccccgtgagggaagaacctagcaacgataacgtgattaagcagcagtcagaccacctcgctgtgccttcgtctgctgagctgcattacatggccgcatcagtgacaaacgccgttcctcctcacaatttcaaatcacaaggcttgccaaaaccggagttccgcttcaagggacagagtaccaaatcagattctgcagaagactatttgctttggaagagattacagggcgttagcgcggcctgccccgctccctcctctgctgcccatcagctcgagcacctctctgctaagttgcagaagattgatgaacagttactagctatacaaaacattgctgagaatatcgagcaagactttcctaaacctgaaatgctggaccttcactgcgataaaatagggccggtagatcacatcgaattttccagcggtcctgagttcaagaagacattagcttccaagacaataagtataagcgaagaggtgaggtttctcacacatatggacgaagaggaccagtccgacaaaaaggaaaccagcgaaccagagttttcaattacagagaattacagtggtcagaaaacatgtgtgtttcccacagcggatagcgctgttagcttgtcttcatcgtccgaccagaatacgaccagccctggtatgaactccagcgacgagctgtgcgagagtgtttctgtccaccccttgcaaatgaccggactgacggatatcgctgacatcattgacgaccttatcatcaaggacggtgtcagcagcgaagaactgggactcaccgagcaggcgatggggacctctagaatccagcattacagtggccgacacagccagcgcacagacaaagaacgacgagagatccaggcctggatgaagcgcaagcgaaaggaaagaatggctaaatacctgaacgagctggcagaaaagcgtggacaagagcatgatcctttctgtccacgcagcaatcccctgtatatgacttcaagggagatccgcctgagacagaagatgaaacacgagaaggacaggctgctgctttctgagcactacagtcgcagaatcagccaggcctacgggctcatgaacgaactcttatcagaaagcgtccaattgcctaccttacctcagaaaccactccctaataagcctagcccgacccagagttcatcgtgccaacattgccccagccctagaggtgagaatcagcatggtcactccttccttatcaacagaccaggcaaagtgaagtatatgtcaaagccatcctacatccataagcgcaaatcttttggtcagccccaggggtcgccttggccacatggaaccgcaacctttacaattcagaagaaggctggcggggctaaagctgcggttaggaaagccacccagtctcccgttacgtttcagaaaggtagcaatgcgccctgccattctttgcagcacacaaaaaagcacggctctgccgggctcgcaccacaaacgaaacaggtgtgcgttgaatatgagagggaagaaactgttgtcagcccttggacaattccatctgagatacataagattttacacgagtcgcacaactctttattgcaggacctgtcccctactgaggaggaagagcccgagcacccttttggtgtgggaggagtggacagcgtctctgagagcacgggtagcattctctctaaattggattggaatgctatagaggatatggtagcctccgtggaagatcagggcctgtccgtgcactgggcactcgacctgtag

SEQ ID NO: 268393 - DNA, 6288 bp, Artificial Sequence
  derived and/or modified sequence
atggcggacgccgacatcctgtcagaaacctttcagctattgatcgactctgccaaggatttcagcaagaggctttgggggttagtgccttttgggctgtatctccccgctccgccactctattgtccccagccagccatcttaagcgaggaagacggagatgatctcttacttaaagcagagaaaaataaccgccagaaggtttctggaatcctccagagagtgctgttgctgttcagggccgctcagtgcagtttcccagtggcccagtggtatattctacagttgcggtgggccaggaaggtgatgcagaagataagaatgaagggctctctgccaagcttaagtcccttcccacaatcactcctcaattattgtaaaggtggcatcgcctttttcagacctggggctgctggagaccataagctggacgaggttagcatcagagctattggatgctttcgcgagctctgtgctctctgctggatgctgcacgttagagacaagttgagctactcctgtaggcaataccaaaaggccagagagaacgtgaaaggggagaaggacctggaggtggagttcgatagttgcatgatcgagcattgcctgtccgctgtggagtgggcctaccggatgcttccattcagcagattctttaatatggaagagttgattcaggatattattttaagcctgataggggaactgccccctatccggaaagtggccgagatttttgtaaaggcatttccatatccagaggacgtgagagttcctctgagagataaataccattccctgcaccagcggctccgccactgcgtggtgaagggccctcaaactgaggagatgatgagtgttgtgatgcactcgattcagaaggtaagggttaaggcacttaagcgggtgcagaggaacatcgggtctttcgaagtaaatatctgggagccaattgaggaagagaagcccgatgaggcgccaggagttgatcggtactctctcggaacgtccctgtctcgatcaacactgacagaactgggggatagcgtggtgcattccgatgcagatacattcagcgaggccctgtccgtggaagagaagagcaggatcaacatataccagcgcaatgcaccaaatcatatggagcttaccagcatccacaaaccaacagacaagagaaagatgtgcaatcagaaggagaatcctactaagaaagaagatcacgaaaaactgagccagaataccttgccagtaatcggcgtttgggagttcgaacgcgatgatgatgaatatataaagtttctggacctgtttctgtcttacattctggaacgggatttgccatattcgcgggacgctgatatccctttcctaactagcttttctggcaaacttagggagcacgagctaaactctctgctatttgacgtgcacacaaccttgaagcggcatcagtccaagaccaagtcccagaatgtgtttcgcgcagggtcttgttttgtggtcgccccagagagctatgagtctgaaaagagcagttcattaaatgacgagtacggcatgcacctcgaaaaccagaagttgtcatccagtgttctggttaatcagggcattaaaccttttctacagtatccctctaacgaggttaataagaatgaaggcatgtcagggctgttcggactgaaacaacgctcgatatacaagattcaggacgacaccagggagaagtgtctaatacagcggtcttctaaccacatcttttggactcccaaatctatcaagactcgtaggtgcatctttaaagctatacagtgtaacgatatcaatccacaggaggacttgcccctggcattgaatacttttggatccataggcaggctgcttgaatggatgattcggtggagtaaccgcagactcttatgtgacagcgggatcaccgaatcttcttctgaatactctccagtgattcgggtgaagacctctaccgccgctatcctgactagcctgtggctcttagagcagccgtacttcgccacgtacaaagccaaaaacgctattataaagatggtcgagaatagagacactggatgtcaaatcggaccaaacattgaaagggaatccaagtccgacgccggaggctccgtcgccgtagctacacccggaggcacggaggagagaaatggacaaaacaagtcatgccagaatatactgaagatgccgactgaagctaagaatccagatattaaagagatcaatgacgatatcatctcaatcacacacaacactaaaaaggaatttatagatatcgacgagaaccttttggaggtcgaggccttcactgaggaggaaatggacatgcacattagcgattatgaggaggatatcgaggagtctgtgggcggttttcgaagcccttctctggctatttgcatgatgacactcccccagcagctcgaagaggaattcactgaagaagtgcagtgtcagagagaagaaccactcgaaacaataatggaggagaagtcaactgaacagaagggcatgatagaggccttcagtcaccctggccacacaacaccacaatctatgcaagtagacactagcagcgaaattagctccgcccagatctccacgtacaaagagaaatcctctagcgtgccgcttctcatttcgaacggcgtcaacgtggcgagccaacccccagcgccaacaccgcagaaaacccagagaaacgaattcaccgcccagcttccagattgttcggaatcggtgcgccagatgctgcaggacgaaatgtttaaattagtacagctgcagcagattaatttcatgtctttgatgcagatcgtcggaagcagcttcgcaaatctccccgatacccaacaactggtgcaacagagccaatccgtgcatttgggcgaatcgcaagagtcaaatttgagggggtgcggagatgtcgaggattccaataagaatctcaaggagcggttcttcattaaacctcagagtatgggcgagaatgctcgggaaccccgaaaaaatagccctcactgccatgaggggactattccatctggccagaattctaccgggaacgtgcaaaatgtcccacacggcagcattcccctctgccagttgaatggacaacctagaaagaagggcccaattccctcctctcagaatctcccttcaacgagtttctaccctgcccctgctgggaatacacacctttacttactctccaccccctccgttgtgcagaaggccccaaggctcattccacacgctaagactttttctcctggcgacggctttcccctccttcagtttaagtccaagcaagaattccagcctttgtttttgcatacggggtcgatcccacaggtgccattcagacccctgccacagcccagagaggcttggggtctatcagattcctttcagccggctctgccgcagcgtgctgcacagaccactcccgcttcccatctcaatgtgagccagtataacactgaggccaggaagaaggaggtggaacagaagacatgggccgaaaccgtcattaccgagatcccaaaccatgtaaatctggaccagtatgtgggacaagagaacttgacaccccagcaggacagctctgttttcattaaacccgagaagttgttcgacgtcaaaccgggaaccctggaaatcagtccgcaccacagtttcggattgccactgctttatttgcccctgaagccacccaatatgtttccctccactagtcgcgctagcatcacagtgcctagcacccctattcagccgattgcagaggagcgaaaatatccccgactgagtctgctccattcccatctgtcacccgaaaatcgctgtaaaaaaacgcaacttattccactggagaatctcatagcgttcaagcagagtcaacaaaaattgacgcataacttatttgaacagggcgacgcagggcacctgcagttgttaaaggttaagatcgagccaccggaggtgagacaggggaaggatagtaagaaacgccagcggaggcgggcagaaaaggagctgcaagagaaacgatgtgagaagttgcggagaaagcccaacgtgacctttcgtcctgaaaactcgatcatcaataacgatgacagtgagattataaaaaaacctaaggagcaacaggagcattgcgggagtcaccccttggatgactttgatgtaccatttgaaatgcttcaggacgataatacatccgcagggctgcacttcatggctagtgtaaaaaaaaaggccattggctcacaggatgcctcgacgaatacagatcctgagcacgaacctttgacagccccacaactcctagtcccagatgtgtaccttaacctgaagctgtcaagcgaaatgtctgaaaaaccttggagcccaagcattccccatacggtgactaatctggttggacacacctatataaatgtgatcgacatcgaagcaaatgacctactgcaggagttaccagttagggaggagccaagtaacgataatgtgataaagcagcagagcgaccacctggcggtcccatcgtctgctgagctgcactacatggcagcatccgtcactaacgctgtgcctccccataacttcaagagccaagggcttccaaaacccgagttccggtttaaaggccagtcaaccaagtcagacagcgccgaagactacctactctggaagaggctgcagggcgtgagtgcggcttgtccagcaccaagctccgctgcgcaccagttggaacatctttcagcaaagttacagaaaatcgacgagcagcttttagccattcagaacattgcggaaaacatagagcaggacttcccaaaacctgaaatgctggacctccactgtgataaaatcgggccagtcgaccatatcgagttcagcagcggacccgagttcaagaaaacactggcatccaaaaccatttccatatccgaagaagttcggtttcttacccatatggacgaagaagatcagtctgacaaaaaggaaacaagtgaacccgaattttccatcacggaaaactattcaggtcagaagacatgtgtgtttcctaccgcggattccgctgtatctctttcttcatcttctgaccaaaacaccacgtcccctggcatgaatagcagcgacgagctctgcgagtctgttagcgtgcaccccctgcagatgaccggcctcaccgatatcgccgacattattgatgatctaatcattaaggacggagtgagttctgaggaactgggactgactgagcaggccatgggcacatctcgcatccaacactattccggaagacacagtcagcgtacagacaaagagaggcgcgagatccaggcgtggatgaagcgcaagagaaaagagcggatggcaaagtacctcaacgagctcgctgagaagcggggacaggagcacgatcctttctgtccacgctctaacccattgtatatgacgagtcgggagatccgacttcgccagaagatgaaacatgaaaaagaccggctgctgttgagcgaacattactctaggcgtatatcacaggcttatggactgatgaacgagttactgtccgaatcagtgcagttgcctacacttccacaaaaaccactgcccaataaaccgtccccaacccagagctctagctgccagcattgtccttcccctcgcggtgaaaaccagcatggccatagctttcttattaatcgtcccggaaaggtcaaatatatgtcaaagccttcttacattcataagaggaaaagcttcggtcaaccgcagggcagtccctggccccatgggactgccaccttcacaatccagaagaaggccggaggtgctaaggctgctgttagaaaagcgacacagtctcccgtcacattccagaagggatcaaatgccccatgtcacagcctgcagcatacaaagaagcatggaagcgcagggttagctccacagaccaaacaggtatgtgtcgagtacgagagggaggagactgtagtgtctccttggactatcccttccgagatccacaagatcctgcatgaatcccataactccttgcttcaagatttatcgcccaccgaagaggaggaacctgaacacccctttggagtgggaggcgtggatagcgtaagcgagtctaccggctccatactgtccaaactagattggaacgctatcgaagatatggtggccagtgtcgaggaccaaggcctgagcgtgcactgggctcttgatctgtac

SEQ ID NO: 268394 - DNA, 2805 bp, Artificial Sequence
  derived and/or modified sequence
atggcccgccgcagtgtgctctactttatcctgctgaatgccttaattaataaaggccaggcgtgcttttgtgatcactacgcctggactcagtggacttcctgctccaaaacttgtaactctgggacgcaatctcggcataggcagatcgtggtggataaatactatcaggaaaatttctgcgaacagatctgcagtaaacaggagacgagagagtgcaattggcaacgctgccccatcaattgtctgctcggcgatttcggcccgtggagtgattgtgatccctgtattgagaagcagagtaaagttcggtccgtacttcggccctcacagttcgggggacagccatgtactgcccctctggtcgctttccagccatgcattccatcgaaactgtgcaaaatcgaagaggctgactgcaagaacaaattcaggtgcgactctgggagatgtatcgccaggaaactagagtgcaacggcgaaaatgactgcggcgacaactcggatgaacgagactgcggacgcacaaaggcagtgtgtaccagaaaatataatccaattcccagcgttcaattgatgggcaatggattccattttctcgcaggagagcctagaggcgaggtgctggacaattcatttactgggggcatatgtaagacagtaaagagttcaagaacatcgaatccatatcgggtcccagctaatctcgagaacgtgggctttgaggtacagactgccgaggatgatctgaagaccgacttttataaagacctgacgagtctcggtcacaacgagaaccagcagggcagcttttcctctcaaggtggatctagtttctctgtccctatcttctactccagcaaacggagcgagaacatcaatcacaattcagcatttaagcaggccatccaggcctcccataaaaaggactcttccttcattagaatacataaggtaatgaaggtgctgaacttcacgactaaggctaaagatttgcacctgagcgacgtctttcttaaggccctaaatcacctcccgttagagtacaacagcgccctttacagtcggatcttcgacgatttcggaacccactactttacatccggttcccttggaggggtttatgacctgctgtatcagtttagctcagaggagctgaagaacagtggtctgaccgaggaagaagccaagcactgtgtgcgaattgaaacgaagaagagagtgctttttgccaagaagacgaaagtcgagcatcgctgcactactaacaaactctctgagaagcatgaaggctccttcatccagggtgccgaaaagtcaatttctctgatccgtggagggcgctccgagtatggtgcggccctagcttgggagaaaggctcctccggattagaagagaagacgttttctgagtggttggagagcgtgaaggagaaccctgcagtgatcgactttgaattggcacccatcgtggacttggtgcggaacatcccctgtgcagtgacaaaaagaaataatctccgtaaagccttgcaggagtacgccgcaaagtttgacccatgccagtgcgctccctgtcccaataatgggcgtcccactttaagcggaacagaatgtctgtgcgtttgccaaagcggcacatacggcgaaaattgtgaaaagcagtctcccgactataagtccaacgcagtcgacggtcaatggggatgctggtcatcttggtcaacatgtgacgccacctataagaggtcgaggacacgggaatgtaataaccccgcgcctcagcggggtggaaagcgctgtgaaggagaaaagcgccaggaggaggattgcactttctccatcatggaaaataacggccagccatgtatcaatgatgacgaagaaatgaaggaggtagatctgcctgagatcgaggcggactcgggttgtccacagcctgttccacccgagaatggatttataaggaatgagaaacagctgtatctagtcggggaagatgtggaaatcagctgccttactggttttgagacggtgggctatcaatacttccggtgtctgcccgacggcacctggcggcagggcgatgtggaatgccagcgtaccgagtgcattaaacccgtcgtgcaggaggtccttacaattactcctttccagcgcctctaccgaatcggggagtctattgaattgacctgtcctaagggtttcgtggtggccggtcccagcagatatacctgtcaaggtaattcctggaccccccccatctccaactccctcacctgcgagaaggacaccctgactaaacttaagggccattgccaactggggcagaaacagtcagggagcgagtgtatttgcatgtcacctgaagaggattgctcccaccactccgaggatctttgtgtgtttgacacagactcaaatgattacttcacgtctccagcctgcaagtttcttgccgaaaagtgtctgaacaaccaacagctacactttctgcatatcggcagctgccaggacgggcgtcagctcgaatggggcctggaaagaacacggctgtcgagcaacagcaccaagaaggagagttgcggatatgacacatgttacgactgggagaagtgttccgcttcaacatcgaagtgcgtgtgtttactgcctcctcaatgttttaaaggtggaaatcagctttattgcgttaaaatgggctcgagcacttcagagaagacattgaacatatgcgaggtgggaaccatcagatgtgccaacaggaagatggagatattgcaccctggcaagtgcctggcctag

SEQ ID NO: 268395 - DNA, 2805 bp, Artificial Sequence
  derived and/or modified sequence
atggcacggcgatccgtactatactttatcctgttaaacgccctgatcaacaaaggccaggcttgcttttgcgaccactatgcctggactcagtggacttcatgtagcaagacatgtaatagtgggacacagagtaggcacagacaaatcgtggttgacaaatattatcaggagaatttctgtgaacaaatttgtagcaagcaggaaacccgcgagtgcaattggcagcgatgccccatcaattgcctgctgggtgactttggcccgtggtctgattgcgatccctgtattgagaagcaatctaaggtgagatccgtgcttcgaccttcccagtttggcgggcagccatgtacagcaccactggtagctttccaaccctgtatcccttcaaagttgtgcaaaatcgaagaagctgactgtaagaacaaatttcgttgtgatagcggacgttgcatagcccggaaactggagtgtaacggagagaacgactgtggtgataacagcgacgagcgcgactgtggtcgcactaaggccgtgtgcacgcgcaagtataatccgataccgtccgtacaactgatgggcaacggctttcatttcttggcgggcgagcccagaggggaggtgctcgacaatagcttcaccgggggtatttgtaagactgtcaagtccagccgtacctctaacccctatcgtgttcccgccaacctggagaacgtggggtttgaagttcagaccgctgaagatgacctgaagaccgacttctacaaggaccttacatctctcggccataatgagaaccagcaaggttccttttcctcccagggggggtcttcatttagcgtgcctattttttatagctctaagcgtagcgaaaatatcaatcataacagcgcttttaaacaagccatccaagcgtctcataagaaggacagctccttcattcggattcataaggtgatgaaagtcctcaactttacaacgaaggccaaagatttgcacctaagcgacgtctttcttaaagcccttaatcaccttccactggaatacaacagcgcactgtacagccgcatctttgatgattttggaacccactactttacatcgggcagtctgggcggcgtctatgatttattgtaccagttctcatccgaggagctgaagaacagtgggctcaccgaggaggaagcaaagcactgtgtgaggatagaaacaaagaaaagggttttgtttgctaagaagaccaaggtggaacatcgatgtactactaataaactgagtgaaaaacatgaaggcagttttattcagggagccgaaaagagcatatcactgatccgaggtgggcggtcagaatatggcgctgcattggcctgggagaaaggctcttccggcctggaggaaaagacattttccgaatggctggagtccgtgaaagagaatccagcagtcatcgactttgaactcgcccctatcgtggatcttgttcgaaatataccatgcgctgtcacaaaacggaacaatctacgtaaagcattgcaggagtatgccgccaaattcgacccctgtcaatgtgctccttgtcccaataacggtagaccgacactgtccggaaccgagtgcctgtgcgtttgtcagtcgggcacctatggggaaaactgcgagaagcagtctcctgactacaagagcaatgccgttgatggccagtggggctgttggtctagctggtcaacgtgtgatgccacctacaagcggtcaagaactcgcgagtgcaataatccagccccccagcgcggtgggaagcgctgtgagggagagaaacggcaggaagaagactgtactttcagcatcatggaaaacaacgggcagccctgcataaacgacgatgaggagatgaaagaggttgacttgccggagattgaagccgactctgggtgtccacagcctgtacctcctgaaaatggcttcatcagaaatgagaaacagctctatctagttggggaagacgttgaaatatcatgcctgacagggttcgagacagtgggataccaatattttagatgccttccagatgggacgtggagacaaggcgatgtcgagtgtcagcgcaccgagtgcattaagcctgtggtgcaagaggtcctcacaataacacctttccagaggctgtacagaatcggcgagtctattgagttgacctgtcctaagggcttcgtcgtggccgggccgtcacggtacacatgtcaaggtaattcttggactcccccgatatctaattcattgacgtgtgaaaaggataccctcacaaaattgaaaggccactgtcaactcgggcagaaacaatccggatcagaatgtatatgcatgtcaccagaggaggattgttcacatcattctgaggatctttgcgtcttcgatacagatagcaacgactatttcaccagcccagcctgtaagtttcttgccgagaaatgtctgaacaatcagcagctgcacttcctacacatcgggtcatgtcaggatggaagacagctcgagtggggactggagcgtacccgcctgtcgagtaatagtactaagaaggagagttgtggatacgatacctgttatgattgggaaaagtgtagcgcttctacttcaaagtgcgtgtgcctcctgccaccccagtgcttcaagggtggaaatcaactgtattgtgtaaagatgggcagtagcacctccgaaaagactctgaatatttgcgaagtgggaacaatccgctgtgcaaatcgtaaaatggaaattctgcatcccggaaagtgcttggcatag

SEQ ID NO: 268396 - DNA, 2805 bp, Artificial Sequence
  derived and/or modified sequence
atggccaggagatctgtgctgtacttcatcctgctgaatgccctgatcaacaagggccaggcctgcttctgtgaccactacgcctggacccagtggaccagctgcagcaagacctgcaacagcggcacccagagccgccaccggcagatcgtggtggacaagtactaccaggagaacttctgtgagcagatctgcagcaagcaggagacccgggagtgcaactggcagcgctgccccatcaactgcctgctgggggactttggcccctggagcgactgtgacccctgcatcgagaagcagagcaaggtgcgctctgtgctgcggcccagccagtttggaggccagccctgcacagcccccctggtggccttccagccctgcatccccagcaagctgtgcaagattgaggaggccgactgcaagaacaagttccgctgtgacagcggccgctgcatcgccaggaagctggagtgcaatggagaaaatgactgtggggacaacagtgatgagcgggactgtggccgcaccaaggctgtgtgcaccaggaagtacaaccccatccccagcgtgcagctgatgggaaatggcttccacttcctggccggggagcccagaggagaggtgctggacaacagcttcaccggcggcatctgcaagacagtgaagagcagcaggaccagcaacccctacagagtgcctgccaacctggagaatgtgggctttgaggtgcagacagcagaagatgacctgaagacagacttctacaaggacctgaccagcctgggccacaatgaaaaccagcagggcagcttcagcagccagggcggcagcagcttctctgtgcccatcttctacagcagcaagagaagtgagaacatcaaccacaacagcgccttcaagcaggccatccaggccagccacaagaaggacagcagcttcatccgcatccacaaggtgatgaaggtgctgaacttcaccaccaaggccaaggacctgcacctgagtgatgtgttcctgaaggccctgaaccacctgcccctggagtacaacagcgccctgtacagccgcatctttgatgactttggcacccactacttcaccagcggcagcctgggcggcgtgtatgacctgctgtaccagttcagcagcgaggagctgaagaacagcggcctgacagaggaggaggccaagcactgtgtgcgcatcgagaccaagaagagggtgctgtttgccaagaagaccaaggtggagcaccgctgcaccaccaacaagctgtctgagaagcatgagggcagcttcatccagggcgctgagaagagcatcagcctcatccggggcggccgctcagaatatggagctgccctggcctgggagaagggcagcagcggcctggaggagaagaccttcagcgagtggctggagagcgtgaaggagaacccagctgtgattgactttgagctggcccccatcgtggacctggtgaggaacatcccctgtgctgtgaccaagaggaacaacctgaggaaggccctgcaggagtatgctgccaagtttgacccctgccagtgtgccccctgccccaacaacggccggcccaccctgtctggaacagagtgcctgtgtgtgtgccagagcggcacctacggggagaactgtgagaagcagagcccagactacaagagcaatgctgtggatggccagtggggctgctggagctcctggagcacctgtgatgccacctacaagaggagcaggacccgggagtgcaacaacccagccccccagagaggaggcaagagatgtgagggggagaagaggcaggaggaggactgcaccttcagcatcatggagaacaacggccagccctgcatcaatgatgatgaggagatgaaggaggtggacctgcctgagattgaggccgacagcggctgcccccagcctgtgcccccagaaaatggcttcatcagaaatgagaagcagctgtacctggtgggggaggatgtggagatcagctgcctgaccggctttgagaccgtgggctaccagtacttccgctgcctgcctgatggcacctggaggcagggagatgtggagtgccagaggacagagtgcatcaagcctgtggtgcaggaggtgctgaccatcacccccttccagaggctgtaccgcatcggggagagcattgagctgacctgccccaagggctttgtggtggccggccccagccgctacacctgccagggcaacagctggaccccacccatcagcaacagcctgacctgtgagaaggacaccctgaccaagctgaagggccactgccagctgggccagaagcagagcggcagcgagtgcatctgcatgagccctgaggaggactgcagccaccacagcgaggacctgtgtgtgtttgacacagacagcaatgactacttcaccagccctgcctgcaagttcctggccgagaagtgcctgaacaaccagcagctgcacttcctgcacatcggcagctgccaggacggccggcagctggagtggggcctggagaggacccggctgagcagcaacagcaccaagaaggagagctgtggctatgacacctgctatgactgggagaagtgcagcgccagcaccagcaaatgtgtgtgcctgctgcccccccagtgcttcaagggcggcaaccagctgtactgtgtgaagatgggcagcagcaccagcgagaagaccctgaacatctgtgaggtgggcaccatccgctgtgccaacaggaagatggagatcctgcaccctgggaagtgcctggcctag

SEQ ID NO: 268397 - DNA, 2805 bp, Artificial Sequence
  derived and/or modified sequence
atggcccggcggagcgtgctgtacttcatcctgctgaacgccctgatcaacaagggacaggcctgtttttgcgatcactacgcatggactcaatggacaagctgcagtaaaacctgcaacagcggaacacaatcaaggcacagacagattgtagtggataagtattatcaggaaaatttctgtgagcagatatgtagtaagcaggaaacacgtgagtgcaactggcagcgctgccctattaactgtctgctgggcgattttggtccctggtccgactgcgacccttgtatcgaaaaacagagcaaagttcgctcagtcttgcgcccaagtcagttcggcggccagccctgtacagccccccttgtcgcattccagccttgcattccgagtaagttgtgtaagattgaggaagccgattgcaaaaataagttcagatgtgacagcggcagatgcattgcccggaaactggagtgtaatggagaaaatgattgcggtgacaattccgatgagcgagactgcggacgaacgaaagccgtctgcacaagaaaatataaccctatcccatccgtccagctcatgggaaatgggtttcactttttggccggagaaccccgtggagaggtcctggataacagctttacaggcggaatatgtaaaaccgtgaaaagcagccggacttctaatccatacagggtcccagccaatctcgaaaatgtggggttcgaggtccagactgcggaggatgatttgaagactgacttctataaggacctgacctctctcgggcacaatgagaaccagcaggggtccttttcaagccaaggcggaagctcattctccgttccgattttttacagctcaaagcgatctgagaacattaaccacaattctgcatttaagcaagcaatacaggctagccataaaaaggactctagcttcatccgaattcataaagtaatgaaagtgctgaatttcactacaaaggctaaggatctgcacctctccgacgttttccttaaagccctgaaccacctccccctggagtacaatagtgcactgtattctaggatcttcgacgacttcggaactcactatttcacttctggcagcctcgggggcgtctacgacctcctttaccagttttcctctgaagagcttaagaacagcgggctgaccgaggaggaagcaaagcattgcgtccggatcgaaacaaagaagcgcgttctctttgcaaaaaagaccaaggtcgaacaccgttgcactacgaataaactgtctgaaaagcatgagggatccttcatccagggcgcagagaagtcgataagcctcattagagggggccgcagtgagtacggggcggcattggcctgggagaagggatcctcgggacttgaagagaaaactttttcagagtggctggagtcggttaaggaaaaccccgccgttatcgatttcgagctcgcacccatcgtagacctggttagaaatattccctgtgccgtcacgaaaaggaacaacttgagaaaggcccttcaggagtacgcagccaaattcgacccttgtcaatgtgccccttgcccaaataacggccgacctaccctttccggcaccgagtgcctttgcgtgtgccaaagtgggacatatggggagaactgcgaaaagcagtcccccgactacaagagtaacgcagtggatggccagtggggatgttggtccagttggagtacatgtgatgcaacgtacaagaggtcacggacacgggagtgcaacaatcccgcaccccaaagaggagggaagagatgcgagggtgagaagcggcaagaagaagactgtacgttctctatcatggagaacaatggccagccctgcatcaacgacgatgaggaaatgaaggaagttgatttgccagagattgaggccgactcggggtgtcctcagccagtccctcctgagaatggatttatcagaaatgaaaagcaactttatcttgtaggcgaggatgtggaaattagctgcctaacgggatttgaaactgttgggtatcagtacttcaggtgtctccccgacggtacttggcgccagggggatgtggaatgccaacgcacggagtgcatcaagcccgtcgtccaagaggttctgactataaccccattccagcggttatacaggattggcgagagtatcgagctgacctgtcctaagggatttgtggttgcaggacctagtagatatacctgccagggtaactcatggacacctccaatcagcaatagccttacctgtgagaaagataccctgaccaagctcaaaggacactgccagctgggccagaaacagtccggctcagagtgcatctgcatgtcccctgaggaagattgttcacaccactccgaagatctctgtgtattcgacaccgattcaaatgactacttcacgtccccagcgtgcaagtttttggccgaaaaatgccttaacaatcagcagctgcactttttacatatagggtcctgccaggacggccgtcaactggagtggggactagagcgcacccgcctttccagtaacagcacaaaaaaagaaagctgtggttacgatacttgttatgactgggagaagtgttccgcttcgacatctaaatgcgtatgtctgttaccccctcaatgcttcaagggaggtaatcagttgtattgcgtcaaaatggggtcttctactagcgaaaaaactctcaatatctgtgaggtcgggaccatacgctgtgccaataggaagatggagattcttcacccggggaaatgtctagcgtag

SEQ ID NO: 268398 - DNA, 2805 bp, Artificial Sequence
  derived and/or modified sequence
atggcccggcggagcgtgctgtacttcatcctgctgaacgccctgattaacaagggccaagcgtgcttttgtgaccattatgcttggacacagtggacctcctgctccaaaacttgtaactccggcacccagtctagacacagacagatcgtggtggataagtattaccaagaaaacttctgcgaacagatatgctccaaacaggaaacccgagagtgcaattggcaacgctgccccatcaactgcttgcttggggactttggaccatggtcggattgcgacccctgcatcgaaaaacaatcaaaagttcggagcgtgctccggcccagtcagttcggcggccagccctgtacagctccattagttgcatttcagccctgcattccatctaagctatgcaaaatcgaggaagcagactgtaagaataagttcagatgcgactccgggagatgtatagcgaggaagctagagtgtaatggtgagaatgattgcggagacaactccgacgagcgggactgcggacggacgaaggctgtctgtacccgcaagtataaccccatcccgtcagtgcagctgatggggaacggctttcatttcctagcaggcgagccaaggggagaagtccttgataattcctttacgggaggcatatgtaagacggttaagagctctcgaacctcgaacccctaccgcgtgcccgcaaacctagaaaacgtaggctttgaagtgcaaacagctgaggatgatcttaagacggacttttataaggaccttacgtcccttggccacaatgagaatcagcaggggagcttttcctcccagggagggagttccttttccgtgccgatattttatagttccaagagatctgagaatatcaatcacaattccgctttcaaacaggctatccaggcgagccataagaaagacagcagcttcataaggatacataaagtgatgaaagttttgaattttactaccaaggccaaggacctgcacctgagcgacgtgttcctcaaggcgctgaatcatctcccccttgaatacaacagcgccttgtacagtaggatattcgacgattttgggacacactactttaccagtggctctctgggtggtgtgtacgatttgctgtaccagttcagtagcgaagaactcaagaattcaggactcacagaagaggaggctaagcactgcgtccggattgaaactaagaagcgggtgctttttgctaagaagaccaaggttgagcatcgatgcacaactaataagctgtctgagaaacacgagggatcttttattcagggggccgaaaaatctatctccctgattcgtggcggccgatccgaatacggagccgcgctagcctgggaaaaaggcagcagcggcttagaagaaaagacattcagcgaatggctcgagagcgttaaagaaaaccccgccgtcatcgacttcgaacttgcccctatagttgatctggtgagaaacatcccttgtgccgtgacgaagcggaacaatctgaggaaggccctgcaagagtatgcggctaagtttgatccctgccagtgcgctccatgtcctaacaatggtaggcccactctgtcgggcacagaatgcttatgcgtctgccaaagcggcacatacggggagaattgcgagaagcagtctcctgactataagagcaatgcagtggacggacagtggggctgctggagctcctggtcgacctgcgacgcaacttacaagagatcacgcacccgagagtgcaataaccccgccccccagcgagggggaaagcggtgtgaaggggagaaaagacaggaagaagactgtaccttctcaattatggagaacaatggtcagccctgcattaatgacgatgaggaaatgaaggaggtggacctgcctgaaatcgaagcagatagcggatgtccccagccggtgccacctgagaacgggttcattcggaacgagaaacagctatatctggtgggcgaggacgttgagattagctgcttaacagggttcgagacagtggggtatcagtatttcaggtgcttgccagacggcacttggagacaaggagacgtggaatgtcagcgaactgagtgcatcaaaccggtggtgcaggaggtgttgaccatcacgcccttccagcgtctttatagaatcggggaatcaatcgagttaacttgcccaaagggattcgtggtggcaggccccagccggtatacgtgtcagggaaactcttggacaccacccatcagtaattctttgacttgtgagaaagatacactaacaaaattgaagggccattgtcaactcggacaaaaacagtcgggctctgagtgcatctgtatgtctccagaagaagattgtagccatcattcagaggacctgtgcgtttttgacaccgatagcaacgactatttcaccagcccagcttgtaaattcctggcggagaagtgtctaaacaaccaacagctgcactttcttcatattgggagctgtcaggacggacgtcagcttgagtgggggctcgaaaggacccggctgtcctcgaattccacaaagaaggaatcctgtggctacgatacatgctatgattgggagaaatgcagcgctagcacctctaaatgtgtgtgcctgctccccccacaatgctttaaggggggtaatcagttatactgcgttaaaatgggtagtagcacatctgaaaagaccttgaacatatgtgaggtaggcaccattcggtgcgccaatagaaaaatggagatcttacatccagggaaatgtctggcatag

SEQ ID NO: 268399 - DNA, 2805 bp, Artificial Sequence
  derived and/or modified sequence
atggctcgacgtagcgtgctgtatttcatcctgctcaatgctcttattaacaaggggcaggcttgcttttgtgatcactacgcctggacacagtggacctcatgcagcaagacatgcaattctggcacacagagtcgacatagacagattgtggttgataaatattaccaggagaatttttgcgagcagatctgttccaaacaggaaacccgtgaatgtaactggcagcgctgcccaataaattgtctactcggcgattttgggccttggtctgactgtgacccttgtatcgaaaaacaatccaaggtcagaagcgtcctcaggccgtcgcagttcgggggacaaccgtgcaccgcgccactcgttgcctttcagccgtgcatcccctccaaactgtgcaaaatagaagaggccgactgcaagaacaaatttaggtgcgactcaggcaggtgcattgctcgcaaacttgaatgcaatggcgaaaacgactgcggtgataattcggacgaacgtgactgcgggaggaccaaagcagtgtgcacacggaagtacaaccccatcccgtctgttcagctcatgggtaacggttttcacttcctagccggtgagcccagaggcgaagttctggacaactccttcaccggcggtatatgcaagactgtgaagtcttcccgtacctcaaacccatatcgcgttcctgccaatctggagaacgtgggctttgaggtccaaactgccgaagacgatctgaagactgacttctacaaggaccttaccagtctgggccacaacgaaaaccagcagggctccttttccagtcagggaggttctagcttctctgtgccaatcttttacagcagcaagagaagcgagaatatcaaccataatagcgcattcaagcaagcaatccaagctagccacaaaaaggattccagtttcatccggatacataaagtcatgaaggtgctcaattttacaaccaaagccaaagatttacacctcagtgatgtgtttctcaaagctctgaatcatctgccattggagtataacagcgctctgtattcgcgaatcttcgacgacttcggcacgcattatttcacttccggctccttgggtggcgtgtatgacttgctctaccaattctcctcagaggaattaaagaatagtggcctgactgaagaggaggccaagcactgcgtcagaatcgaaacaaagaagagggtgttgtttgcgaagaaaactaaagtcgagcatcgctgcaccacaaacaagctaagcgagaagcatgagggctcctttattcagggggctgagaagagcatcagcctaattagaggagggcgttccgagtacggagcagcactcgcctgggaaaaaggttcctccggcctggaagagaaaaccttctccgaatggctggagtccgtcaaagaaaaccctgctgtcatcgatttcgaactggcacccattgtcgatctcgttaggaacataccatgcgccgtgactaagagaaacaacttgaggaaggctctccaagagtacgccgcaaagtttgatccatgtcaatgtgcaccatgtccaaataatgggcgacccaccttgagcggaacagagtgtctgtgcgtctgccagagcggtacctatggtgagaattgtgagaaacagtcaccggactataagagcaatgctgttgacggccaatgggggtgttggagctcctggtcaacatgcgacgcaacgtataaacggtcccggacgcgggagtgtaataaccctgccccacagagaggaggtaagcggtgcgagggcgagaaacgccaagaggaagattgcacgttttccatcatggaaaataacgggcagccctgcatcaatgatgacgaagagatgaaagaggtagatctgcctgagatcgaagcagactcaggctgtcctcagcccgtccctccagagaacgggtttatcaggaacgagaaacagctctacctcgtgggcgaagatgtggaaatcagttgcttgacagggttcgaaacagtcggataccagtattttaggtgcctccccgacggcacttggaggcagggagatgtagagtgccaacgcactgagtgcatcaagccagtagtgcaggaggtcctgacaattacaccgttccagaggttatatcgaatcggcgaaagtattgaattaacatgtccgaaagggttcgttgtcgcaggcccaagccggtacacgtgtcaaggcaactcctggacgcctccgatctctaatagcttgacctgtgagaaggatactcttacaaaacttaagggccactgccagttagggcagaaacagagtggctctgaatgcatctgtatgtctccggaagaagactgcagccatcactctgaggatctctgtgtgttcgacaccgacagcaacgactactttacatccccggcttgcaaattcctcgccgagaaatgcttgaacaatcagcaactgcactttctgcacattgggtcttgtcaggatgggcgacaactcgagtgggggctggaacgcacgcgcttgtccagcaactctactaaaaaagaatcatgtgggtatgacacctgctatgattgggaaaagtgctccgcctccacatctaagtgtgtgtgtctgttaccaccacagtgttttaaaggcggaaatcagctatactgtgtcaaaatggggagcagtacctcagagaagacccttaatatctgtgaagtaggaacaatcagatgtgcgaaccgaaagatggagatccttcaccccggaaagtgtctcgcatag

SEQ ID NO: 268400 - DNA, 2805 bp, Artificial Sequence
  derived and/or modified sequence
atggcacgtcgctctgtgctgtactttatcctgcttaacgccctgatcaacaaaggacaggcctgtttctgcgaccactatgcctggacacaatggacttcctgctccaagacgtgcaatagcgggacacagagccgccataggcagatcgtggtcgataaatattatcaagaaaacttctgcgagcagatttgcagtaaacaagaaacgcgtgaatgtaactggcagcgttgccccataaactgcctgcttggtgacttcggcccatggtcagattgcgatccatgtatcgaaaagcagagcaaagtgcggtctgtccttaggccaagccagttcggaggacagccgtgtaccgccccacttgttgcatttcagccttgcatccccagcaaactgtgcaaaatcgaagaagccgactgtaaaaataaattccgatgcgactctggccgttgcatagcgcgtaagctggagtgtaacggagagaatgattgcggagataatagtgacgaaagagactgcggaaggactaaggcagtctgtaccaggaagtataatcctataccgtctgtccagctgatgggtaacggcttccactttctcgcaggggagcctagaggcgaagtccttgacaactcattcacgggtgggatctgcaagaccgtgaagagcagtcgaaccagcaacccatatcgggtacctgctaatctggagaatgtaggtttcgaggtccagacagcggaggatgacctcaagaccgacttttacaaagatctgacgagtttaggtcacaacgagaaccagcagggatcgttctctagtcaaggaggtagcagtttctccgtgcctatcttttatagtagcaagaggtctgaaaacattaaccacaacagtgccttcaaacaggctatccaagcctctcacaagaaagacagtagctttatccgcattcataaggtcatgaaagtattaaacttcacgacgaaggctaaggacctccatctcagtgacgtattcttaaaggctctgaatcatctgccgcttgagtataactctgctctttattcgagaattttcgacgacttcggcactcactactttacaagcggatctctcggtggtgtgtatgatctgttgtatcagtttagcagcgaggagctgaaaaattcaggattgacagaggaagaggctaaacactgtgtccgcatagagaccaaaaaacgtgttctgttcgccaaaaagacaaaggtggaacacagatgtacaactaacaagctcagcgagaagcacgagggttctttcattcagggagctgagaaaagtatcagcctgatccgcggtggaaggagcgagtacggggctgcactggcatgggagaaggggagctccgggcttgaggagaagacgttctcggagtggctggagtccgtaaaggagaaccctgccgtgattgatttcgagctggccccaatcgtggacctggttagaaacatcccttgtgcagtgacgaagcgcaataatctccgcaaagccctgcaagaatacgcagccaagtttgacccttgtcagtgtgccccatgtccaaataatggccgtccaacactgtcaggcacagagtgtctgtgcgtctgccagtccgggacctacggggaaaactgtgagaagcagagccctgactataagtccaacgctgttgacggccagtggggctgttggtcatcatggagcacgtgcgacgctacttacaagcgtagccgtacccgggagtgtaacaaccctgcaccacagaggggaggaaaacggtgcgagggtgagaagcgtcaggaggaagactgcacattttcaatcatggagaataacggccaaccctgtataaacgacgacgaagaaatgaaagaggtggatctcccagagattgaggcagactccgggtgtccgcagcccgtcccaccggaaaacggcttcattcgcaatgaaaagcagttatatttggtgggagaggacgtcgaaatctcttgtctgaccggttttgagactgtggggtaccagtactttcgatgcctgccagatggtacctggcgccaaggtgatgtcgaatgtcagcgtacggaatgcataaagccagtcgtgcaggaagtgctgaccatcacccccttccagaggctgtaccgtatcggcgagagcatcgagctgacttgtccaaaagggttcgtggtagctggcccttctcgatacacatgccaaggcaactcctggaccccgcctattagtaactccctgacctgcgagaaagacacactcactaagctcaaaggccactgtcagttgggccagaaacagagtggctccgagtgtatctgcatgtcacctgaagaggactgctctcaccatagtgaagacctctgtgtctttgacacagattccaatgactacttcaccagtccagcttgtaagtttttagcagagaaatgcctgaacaatcaacagttgcatttccttcatatcggttcctgtcaggatggaagacagctcgaatggggtctggagaggacccggctctcctcaaactcaaccaagaaggaatcttgcggttacgatacatgctacgactgggagaaatgcagcgcttcaacgagcaaatgcgtgtgcctgctgccccctcaatgctttaagggagggaaccaactgtactgcgtgaaaatgggttcttctacatcagagaaaactttgaacatctgcgaagttggtaccatccggtgcgccaataggaagatggaaatcctgcatcctgggaagtgtctggcgtag

SEQ ID NO: 268401 - DNA, 3661 bp, Artificial Sequence
  derived and/or modified sequence
ctaaaatatacccgtctctcttaattttgtatgtcttcaacataacattcattaaattttattctgaaactgagtcttaaaaactgaaatacttttaaagagagatgtttctagcttaaatatttcatcatatagtaagattcctgctgagagctcataataagaaatatgaaaccagttactctggacttggattttgatgtgctgaagtatctgctggtatttcttcaagtcatagatgcataggcctggaggctctcaaggcatggccagacgctctgtcttgtacttcatcctgctgaatgctctgatcaacaagggccaagcctgcttctgtgatcactatgcatggactcagtggaccagctgctcaaaaacttgcaattctggaacccagagcagacacagacaaatagtagtagataagtactaccaggaaaacttttgtgaacagatttgcagcaagcaggagactagagaatgtaactggcaaagatgccccatcaactgcctcctgggagattttggaccatggtcagactgtgacccttgtattgaaaaacagtctaaagttagatctgtcttgcgtcccagtcagtttgggggacagccatgcactgcgcctctggtagcctttcaaccatgcattccatctaagctctgcaaaattgaagaggctgactgcaagaataaatttcgctgtgacagtggccgctgcattgccagaaagttagaatgcaatggagaaaatgactgtggagacaattcagatgaaagggactgtgggaggacaaaggcagtatgcacacggaagtataatcccatccctagtgtacagttgatgggcaatgggtttcattttctggcaggagagcccagaggagaagtccttgataactctttcactggaggaatatgtaaaactgtcaaaagcagtaggacaagtaatccataccgtgttccggccaatctggaaaatgtcggctttgaggtacaaactgcagaagatgacttgaaaacagatttctacaaggatttaacttctcttggacacaatgaaaatcaacaaggctcattctcaagtcagggggggagctctttcagtgtaccaattttttattcctcaaagagaagtgaaaatatcaaccataattctgccttcaaacaagccattcaagcctctcacaaaaaggattctagttttattaggatccataaagtgatgaaagtcttaaacttcacaacgaaagctaaagatctgcacctttctgatgtctttttgaaagcacttaaccatctgcctctagaatacaactctgctttgtacagccgaatattcgatgactttgggactcattacttcacctctggctccctgggaggcgtgtatgaccttctctatcagtttagcagtgaggaactaaagaactcaggtttaaccgaggaagaagccaaacactgtgtcaggattgaaacaaagaaacgcgttttatttgctaagaaaacaaaagtggaacataggtgcaccaccaacaagctgtcagagaaacatgaaggttcatttatacagggagcagagaaatccatatccctgattcgaggtggaaggagtgaatatggagcagctttggcatgggagaaagggagctctggtctggaggagaagacattttctgagtggttagaatcagtgaaggaaaatcctgctgtgattgactttgagcttgcccccatcgtggacttggtaagaaacatcccctgtgcagtgacaaaacggaacaacctcaggaaagctttgcaagagtatgcagccaagttcgatccttgccagtgtgctccatgccctaataatggccgacccaccctctcagggactgaatgtctgtgtgtgtgtcagagtggcacctatggtgagaactgtgagaaacagtctccagattataaatccaatgcagtagacggacagtggggttgttggtcttcctggagtacctgtgatgctacttataagagatcgagaacccgagaatgcaataatcctgccccccaacgaggagggaaacgctgtgagggggagaagcgacaagaggaagactgcacattttcaatcatggaaaacaatggacaaccatgtatcaatgatgacgaagaaatgaaagaggtcgatcttcctgagatagaagcagattccgggtgtcctcagccagttcctccagaaaatggatttatccggaatgaaaagcaactatacttggttggagaagatgttgaaatttcatgccttactggctttgaaactgttggataccagtacttcagatgcttaccagacgggacctggagacaaggggatgtggaatgccaacggacggagtgcatcaagccagttgtgcaggaagtcctgacaattacaccatttcagagattgtatagaattggtgaatccattgagctaacttgccccaaaggctttgttgttgctgggccatcaaggtacacatgccaggggaattcctggacaccacccatttcaaactctctcacctgtgaaaaagatactctaacaaaattaaaaggccattgtcagctgggacagaaacaatcaggatctgaatgcatttgtatgtctccagaagaagactgtagccatcattcagaagatctctgtgtgtttgacacagactccaacgattactttacttcacccgcttgtaagtttttggctgagaaatgtttaaataatcagcaactccattttctacatattggttcctgccaagacggccgccagttagaatggggtcttgaaaggacaagactttcatccaacagcacaaagaaagaatcctgtggctatgacacctgctatgactgggaaaaatgttcagcctccacttccaaatgtgtctgcctattgcccccacagtgcttcaagggtggaaaccaactctactgtgtcaaaatgggatcatcaacaagtgagaaaacattgaacatctgtgaagtgggaactataagatgtgcaaacaggaagatggaaatactgcatcctggaaagtgtttggcctagcacaattactgctaggcccagcacaatgaacagatttaccatcccgaagaaccaactcctacaaatgagaattcttgcacaaacagcagactggcatgctcaaagttactgacaaaaattattttctgttagtttgagatcattattctcccctgactctcctgtttgggcatgtcttattcagttccagctcatgacgccctgtagcatacccctaggtaccaacttccacagcagtctcgtaaattctcctgttcacattgtacaaaaataatgtgacttctgaggcccttatgtagcctgtgacattaagcattctcgcaattagaaataagaataaaacccataattttcttcaatgagttaataaacagaaatctccagaacctctgaaacacattcttgaagcccagctttcatatcttcattcaacaaataatttctgagtgtgtatacaggatgtcaagtactgaccaaagtcctgagaactcggcagataataaaacagacaaaagcctttgccttcatgaagcatacattcattcaggggtagacacacaaaaaatgaaataaacaggtaaaatatgtagc

SEQ ID NO: 268402 - DNA, 3551 bp, Artificial Sequence
  derived and/or modified sequence
ttgccttgtgttagctagcaataagaaaagaagctttgtttggattaacatatataccctcttcattctgcatacctattttttccccaataatttgcagcttaggtccgaggacaccacaaactctgcttaaagggcctggaggctctcaaggcatggccagacgctctgtcttgtacttcatcctgctgaatgctctgatcaacaagggccaagcctgcttctgtgatcactatgcatggactcagtggaccagctgctcaaaaacttgcaattctggaacccagagcagacacagacaaatagtagtagataagtactaccaggaaaacttttgtgaacagatttgcagcaagcaggagactagagaatgtaactggcaaagatgccccatcaactgcctcctgggagattttggaccatggtcagactgtgacccttgtattgaaaaacagtctaaagttagatctgtcttgcgtcccagtcagtttgggggacagccatgcactgcgcctctggtagcctttcaaccatgcattccatctaagctctgcaaaattgaagaggctgactgcaagaataaatttcgctgtgacagtggccgctgcattgccagaaagttagaatgcaatggagaaaatgactgtggagacaattcagatgaaagggactgtgggaggacaaaggcagtatgcacacggaagtataatcccatccctagtgtacagttgatgggcaatgggtttcattttctggcaggagagcccagaggagaagtccttgataactctttcactggaggaatatgtaaaactgtcaaaagcagtaggacaagtaatccataccgtgttccggccaatctggaaaatgtcggctttgaggtacaaactgcagaagatgacttgaaaacagatttctacaaggatttaacttctcttggacacaatgaaaatcaacaaggctcattctcaagtcagggggggagctctttcagtgtaccaattttttattcctcaaagagaagtgaaaatatcaaccataattctgccttcaaacaagccattcaagcctctcacaaaaaggattctagttttattaggatccataaagtgatgaaagtcttaaacttcacaacgaaagctaaagatctgcacctttctgatgtctttttgaaagcacttaaccatctgcctctagaatacaactctgctttgtacagccgaatattcgatgactttgggactcattacttcacctctggctccctgggaggcgtgtatgaccttctctatcagtttagcagtgaggaactaaagaactcaggtttaaccgaggaagaagccaaacactgtgtcaggattgaaacaaagaaacgcgttttatttgctaagaaaacaaaagtggaacataggtgcaccaccaacaagctgtcagagaaacatgaaggttcatttatacagggagcagagaaatccatatccctgattcgaggtggaaggagtgaatatggagcagctttggcatgggagaaagggagctctggtctggaggagaagacattttctgagtggttagaatcagtgaaggaaaatcctgctgtgattgactttgagcttgcccccatcgtggacttggtaagaaacatcccctgtgcagtgacaaaacggaacaacctcaggaaagctttgcaagagtatgcagccaagttcgatccttgccagtgtgctccatgccctaataatggccgacccaccctctcagggactgaatgtctgtgtgtgtgtcagagtggcacctatggtgagaactgtgagaaacagtctccagattataaatccaatgcagtagacggacagtggggttgttggtcttcctggagtacctgtgatgctacttataagagatcgagaacccgagaatgcaataatcctgccccccaacgaggagggaaacgctgtgagggggagaagcgacaagaggaagactgcacattttcaatcatggaaaacaatggacaaccatgtatcaatgatgacgaagaaatgaaagaggtcgatcttcctgagatagaagcagattccgggtgtcctcagccagttcctccagaaaatggatttatccggaatgaaaagcaactatacttggttggagaagatgttgaaatttcatgccttactggctttgaaactgttggataccagtacttcagatgcttaccagacgggacctggagacaaggggatgtggaatgccaacggacggagtgcatcaagccagttgtgcaggaagtcctgacaattacaccatttcagagattgtatagaattggtgaatccattgagctaacttgccccaaaggctttgttgttgctgggccatcaaggtacacatgccaggggaattcctggacaccacccatttcaaactctctcacctgtgaaaaagatactctaacaaaattaaaaggccattgtcagctgggacagaaacaatcaggatctgaatgcatttgtatgtctccagaagaagactgtagccatcattcagaagatctctgtgtgtttgacacagactccaacgattactttacttcacccgcttgtaagtttttggctgagaaatgtttaaataatcagcaactccattttctacatattggttcctgccaagacggccgccagttagaatggggtcttgaaaggacaagactttcatccaacagcacaaagaaagaatcctgtggctatgacacctgctatgactgggaaaaatgttcagcctccacttccaaatgtgtctgcctattgcccccacagtgcttcaagggtggaaaccaactctactgtgtcaaaatgggatcatcaacaagtgagaaaacattgaacatctgtgaagtgggaactataagatgtgcaaacaggaagatggaaatactgcatcctggaaagtgtttggcctagcacaattactgctaggcccagcacaatgaacagatttaccatcccgaagaaccaactcctacaaatgagaattcttgcacaaacagcagactggcatgctcaaagttactgacaaaaattattttctgttagtttgagatcattattctcccctgactctcctgtttgggcatgtcttattcagttccagctcatgacgccctgtagcatacccctaggtaccaacttccacagcagtctcgtaaattctcctgttcacattgtacaaaaataatgtgacttctgaggcccttatgtagcctgtgacattaagcattctcgcaattagaaataagaataaaacccataattttcttcaatgagttaataaacagaaatctccagaacctctgaaacacattcttgaagcccagctttcatatcttcattcaacaaataatttctgagtgtgtatacaggatgtcaagtactgaccaaagtcctgagaactcggcagataataaaacagacaaaagcctttgccttcatgaagcatacattcattcaggggtagacacacaaaaaatgaaataaacaggtaaaatatgtagc

SEQ ID NO: 268403 - DNA, 2805 bp, Artificial Sequence
  derived and/or modified sequence
atggccagaagaagcgtgctgtacttcatcctgctgaacgccctgatcaacaagggccaggcctgcttctgcgaccactacgcctggacccagtggaccagctgcagcaagacctgcaacagcggcacccagagcagacacagacagatcgtggtggacaagtactaccaggagaacttctgcgagcagatctgcagcaagcaggagaccagagagtgcaactggcagagatgccccatcaactgcctgctgggcgacttcggcccctggagcgactgcgacccctgcatcgagaagcagagcaaggtgagaagcgtgctgagacccagccagttcggcggccagccctgcaccgcccccctggtggccttccagccctgcatccccagcaagctgtgcaagatcgaggaggccgactgcaagaacaagttcagatgcgacagcggcagatgcatcgccagaaagctggagtgcaacggcgagaacgactgcggcgacaacagcgacgagagagactgcggcagaaccaaggccgtgtgcaccagaaagtacaaccccatccccagcgtgcagctgatgggcaacggcttccacttcctggccggcgagcccagaggcgaggtgctggacaacagcttcaccggcggcatctgcaagaccgtgaagagcagcagaaccagcaacccctacagagtgcccgccaacctggagaacgtgggcttcgaggtgcagaccgccgaggacgacctgaagaccgacttctacaaggacctgaccagcctgggccacaacgagaaccagcagggcagcttcagcagccagggcggcagcagcttcagcgtgcccatcttctacagcagcaagagaagcgagaacatcaaccacaacagcgccttcaagcaggccatccaggccagccacaagaaggacagcagcttcatcagaatccacaaggtgatgaaggtgctgaacttcaccaccaaggccaaggacctgcacctgagcgacgtgttcctgaaggccctgaaccacctgcccctggagtacaacagcgccctgtacagcagaatcttcgacgacttcggcacccactacttcaccagcggcagcctgggcggcgtgtacgacctgctgtaccagttcagcagcgaggagctgaagaacagcggcctgaccgaggaggaggccaagcactgcgtgagaatcgagaccaagaagagagtgctgttcgccaagaagaccaaggtggagcacagatgcaccaccaacaagctgagcgagaagcacgagggcagcttcatccagggcgccgagaagagcatcagcctgatcagaggcggcagaagcgagtacggcgccgccctggcctgggagaagggcagcagcggcctggaggagaagaccttcagcgagtggctggagagcgtgaaggagaaccccgccgtgatcgacttcgagctggcccccatcgtggacctggtgagaaacatcccctgcgccgtgaccaagagaaacaacctgagaaaggccctgcaggagtacgccgccaagttcgacccctgccagtgcgccccctgccccaacaacggcagacccaccctgagcggcaccgagtgcctgtgcgtgtgccagagcggcacctacggcgagaactgcgagaagcagagccccgactacaagagcaacgccgtggacggccagtggggctgctggagcagctggagcacctgcgacgccacctacaagagaagcagaaccagagagtgcaacaaccccgccccccagagaggcggcaagagatgcgagggcgagaagagacaggaggaggactgcaccttcagcatcatggagaacaacggccagccctgcatcaacgacgacgaggagatgaaggaggtggacctgcccgagatcgaggccgacagcggctgcccccagcccgtgccccccgagaacggcttcatcagaaacgagaagcagctgtacctggtgggcgaggacgtggagatcagctgcctgaccggcttcgagaccgtgggctaccagtacttcagatgcctgcccgacggcacctggagacagggcgacgtggagtgccagagaaccgagtgcatcaagcccgtggtgcaggaggtgctgaccatcacccccttccagagactgtacagaatcggcgagagcatcgagctgacctgccccaagggcttcgtggtggccggccccagcagatacacctgccagggcaacagctggaccccccccatcagcaacagcctgacctgcgagaaggacaccctgaccaagctgaagggccactgccagctgggccagaagcagagcggcagcgagtgcatctgcatgagccccgaggaggactgcagccaccacagcgaggacctgtgcgtgttcgacaccgacagcaacgactacttcaccagccccgcctgcaagttcctggccgagaagtgcctgaacaaccagcagctgcacttcctgcacatcggcagctgccaggacggcagacagctggagtggggcctggagagaaccagactgagcagcaacagcaccaagaaggagagctgcggctacgacacctgctacgactgggagaagtgcagcgccagcaccagcaagtgcgtgtgcctgctgcccccccagtgcttcaagggcggcaaccagctgtactgcgtgaagatgggcagcagcaccagcgagaagaccctgaacatctgcgaggtgggcaccatcagatgcgccaacagaaagatggagatcctgcaccccggcaagtgcctggcctag

SEQ ID NO: 268404 - protein, 377 aa, Artificial Sequence
  derived and/or modified sequence
MGCFKGVVAVGYINEAIDEGNPLRTLETLLLPTANISDVDPAHAQHYQDVLYHAKSQKLGDSESVSKVLWLDEIQQAVDDANVDKDRAKQWVTLVVDVNQCLEGKKSSDILSVLKSSTSNANDIIPECADKYYDALVKAKELKSERVSSDGSWLKLNLHKKYDYYYNTDSKESSWVTPESCLYKESWLTGKEIEDIIEEVTVGYIRENIWSASEELLLRFQATSSGPILREEFEARKSFLHEQEENVVKIQAFWKGYKQRKEYMHRRQTFIDNTDSIVKIQSWFRMATARKSYLSRLQYFRDHNNEIVKIQSLLRANKARDDYKTLVGSENPPLTVIRKFVYLLDQSDLDFQEELEVARLREEVVTKIRANQQLEKT

SEQ ID NO: 268405 - DNA, 1134 bp, Artificial Sequence
  derived and/or modified sequence
atggggtgtttcaaaggcgtcgttgccgtggggtatattaatgaggcaattgatgagggcaatccactccgcaccctggaaaccctgctcttaccaaccgctaatatttctgacgtcgatcctgcacacgcacagcactaccaggatgtgttgtatcacgctaagagccagaaactgggggatagcgagagcgtcagcaaggtactgtggctggacgagatacaacaggccgtcgacgatgcaaacgtcgacaaggacagagcaaaacaatgggtgactctcgtggtagatgtgaaccagtgcctggagggaaagaaaagctccgatatcctctctgtgctcaaatcaagtacctccaatgctaatgacattattccagagtgcgccgataaatactatgatgccttggtcaaggcgaaggagctaaaatcggagagagtgtcttccgatgggtcatggctgaagctgaacctgcataaaaaatacgattattattataacacagacagcaaggaaagctcctgggtgactcctgagagctgtttgtacaaggagtcatggttgaccgggaaagaaatcgaggatattatagaggaggtcacagtgggatatattcgggagaacatctggagtgcatcagaagagcttctattgcgtttccaggccaccagcagtggacccattctgcgggaggagtttgaggctcgcaaaagcttccttcatgagcaagaggagaacgtggtaaaaattcaggccttctggaaagggtataaacagaggaaggagtacatgcacaggagacaaactttcatcgataacacagactctatcgtgaagatccagtcgtggttccggatggccaccgcccggaagagctacctcagtcggcttcaatatttccgcgaccacaataatgagattgtcaagatacagtctctgttaagagccaacaaggcaagggatgattacaagaccctggtcggctccgagaacccacccctcactgtaataagaaaatttgtctatctacttgaccaatccgaccttgatttccaagaagagcttgaggtggccagacttcgagaggaagtagtgaccaagattagggcaaaccagcaacttgagaagacgtag

SEQ ID NO: 268406 - DNA, 1647 bp, Artificial Sequence
  derived and/or modified sequence
agcagcttgtattcttagaaacgcagcagacagcaactttagcaggtgatttcaatcaagtcagctgaaatgcactcacttccaggtgatcggccttggttctgttaagaccatttttggatggggtgttttaaaggagttgtagctgtagggtacatcaatgaagctattgatgaagggaatcctttgaggactttagaaactttgctcctacctactgcgaatattagtgatgtggacccagcccatgcccagcactaccaggatgttttataccatgctaaatcacagaaactcggagactctgagagtgtttccaaagtgctttggctggatgagatacagcaagccgtcgatgatgccaacgtggacaaggacagagcaaaacaatgggttactctggtggttgatgttaatcagtgtttggaaggaaaaaaatcaagtgatattttgtctgtattgaagtcttccacttctaatgcaaatgacataatcccggagtgtgctgacaaatactatgatgcccttgtgaaggcaaaagagctcaaatctgaaagagtgtctagtgacggttcatggctcaaactcaacctgcacaaaaaatatgactactattacaacactgattcaaaagagagttcctgggtcacacctgaatcatgcttgtataaagaatcatggctcacaggaaaagaaatcgaggacattattgaggaagtcacagtaggttacattcgtgagaatatatggtctgcttcagaagagttgcttcttcgctttcaagccacaagctcaggacccatccttagggaagagtttgaagctagaaaatcatttttgcatgaacaagaagagaatgtggtcaaaatacaggctttttggaaaggatataaacaacggaaggagtatatgcacaggcggcaaacgttcattgataatactgattctattgtgaagattcagtcctggttccgaatggcaactgcaagaaagagctatctttcaagactacagtatttcagagatcataataatgaaattgtgaaaatacagtcactgttgagagcgaacaaagctagagatgactacaaaacattggttggctctgaaaacccaccattaacagtaattcgcaaatttgtatacctgctggaccaaagtgatttggatttccaggaggaactagaggttgcacgattaagggaagaagtagtgaccaagatcagggccaatcaacagctggaaaagacctgaacctgatggacatcaagattggactgctggtgaagaacaggatcacactagaggatgtaatttcacatagtaaaaagctgaacaagaaaaaaggaggagaaatggaaatactgaataacaccgacaaccaaggaataaaaagtttgagtaaggagaggagaaaaacactagaaacatatcagcagctgttttaccttttacagaccaaccctttatacttggctaagctgattttccagatgccacagaacaagtccactaaatttatggatactgttattttcacactatataattatgcctctaatcagcgagaagaatatctacttctcaagctttttaaaactgctctggaggaagaaataaaatcaaaagtggaccaggtacaggaca

SEQ ID NO: 268407 - DNA, 1134 bp, Artificial Sequence
  derived and/or modified sequence
atgggctgcttcaagggcgtggtggccgtgggctacatcaatgaggccattgatgagggcaaccccctgcggaccctggagaccctgctgctgcccacagccaacatcagtgatgtggaccctgcccacgcccagcactaccaggatgtgctgtaccacgccaagagccagaagctgggggacagcgagagcgtgtccaaggtgctgtggctggatgagatccagcaggccgtggatgatgccaacgtggacaaggaccgggccaagcagtgggtgaccctggtggtggatgtgaaccagtgcctggagggcaagaagagcagtgacatcctgtctgtgctgaagagcagcaccagcaatgccaatgacatcatcccagaatgtgccgacaagtactatgatgccctggtgaaggccaaggagctgaagtctgagcgggtgtccagtgatggctcctggctgaagctgaacctgcacaagaagtatgactactactacaacacagacagcaaggagagctcctgggtgaccccagagagctgcctgtacaaggagagctggctgaccgggaaggagattgaggacatcatcgaggaggtgacagtgggctacatccgggagaacatctggagcgccagcgaggagctgctgctgcgcttccaggccaccagcagcggccccatcctgcgggaggagtttgaggccaggaagagcttcctgcacgagcaggaggagaatgtggtgaagatccaggccttctggaagggctacaagcagaggaaggagtacatgcaccggcggcagaccttcatcgacaacacagacagcatcgtgaagatccagagctggttcaggatggccacagccaggaagagctacctgagccggctgcagtacttccgggaccacaacaatgaaattgtgaagatccagagcctgctgcgggccaacaaggccagagatgactacaagaccctggtgggcagcgagaacccccccctgaccgtcatcaggaagtttgtgtacctgctggaccagagcgacctggacttccaggaggagctggaggtggcccggctgcgggaggaggtggtgaccaagatccgggccaaccagcagctggagaagacctag

SEQ ID NO: 268408 - DNA, 1134 bp, Artificial Sequence
  derived and/or modified sequence
atgggctgcttcaagggcgtggtggccgtgggctacatcaacgaggctatcgacgaggggaacccactgagaacccttgagacactgctcctaccaacggctaatatttccgatgttgatccagcacacgcccagcattatcaggacgtgctctatcacgccaaaagccagaaactcggcgacagcgagagtgtgtccaaagttctttggttagatgagatccagcaggctgtcgatgatgcgaacgtggataaagacagggccaagcagtgggtcactcttgtagtcgacgtcaatcagtgtctggaaggaaaaaaatccagtgatatcctgagtgtgctcaaatccagtacctccaatgctaacgatatcatccctgagtgtgccgacaaatattacgacgctctggtgaaggccaaagagctgaagtccgaaagagtctcctccgacgggtcatggcttaagctgaacctgcataagaaatacgattattactataacactgatagcaaagagagctcttgggtgacacccgagagttgcttgtataaagagtcctggctgacagggaaggaaatagaagatattattgaagaggtcaccgtggggtatatcagggagaacatctggtctgcgtcagaggagctgctgctcaggttccaggccacgagctcaggaccaattctgcgggaggagtttgaggcgcggaaaagctttctgcatgagcaggaggaaaatgttgtaaaaattcaggccttttggaagggatacaaacaaaggaaggagtatatgcaccggaggcagacgtttattgataatacggattccattgttaagattcagtcgtggtttagaatggccactgcacgtaagtcatatctctccagactgcagtactttagggatcacaacaacgaaatcgtcaagatccagagcctcctcagagcaaacaaagcgagagatgactataaaacactggttggctccgaaaatccccccttgactgtgattcggaaatttgtctacctgctcgatcagagtgatctggactttcaggaagaactggaggtagcaaggctgcgcgaggaggtcgtgacgaagatcagggcaaaccagcagctagaaaagacgtag

SEQ ID NO: 268409 - DNA, 1134 bp, Artificial Sequence
  derived and/or modified sequence
atgggctgttttaagggtgtagtcgcagtcggctacattaacgaggccatagacgaaggcaatcccctgcggactttagaaaccctcctgctaccaaccgcaaatatatccgacgttgatccagcccatgcacagcattaccaggatgtcctctatcatgcgaagagtcagaagttgggggactccgagagcgtgagcaaggttctgtggctcgacgaaattcagcaagccgttgacgatgccaacgtagataaggaccgcgctaaacagtgggtcactttagttgtcgacgttaaccagtgtttggaagggaaaaaaagctcagatatcctgtccgtgctcaagagttccacctctaacgctaacgacatcattccggagtgcgctgataaatattatgatgcactggtaaaggcaaaggagctgaaatccgagcgtgtctccagtgacgggtcatggctgaaattaaacttacacaagaagtatgactactattataatacagattcaaaagagtcctcatgggtgacaccggaatcctgcctttataaggagagctggctcactggcaaggaaatcgaagacatcattgaggaggtgacagtgggctacattcgtgagaacatctggtccgcctccgaggaactgctgctgcgatttcaggctacctctagcggaccaatccttcgagaggagttcgaagcccgtaagtccttcttacatgaacaggaagaaaatgttgtcaaaatccaagcattctggaaggggtacaaacagcgcaaggagtatatgcacagaaggcaaaccttcatcgacaatactgacagcatagtgaaaatccaatcgtggtttcgaatggcgactgcgcgtaagtcctacctaagcaggttgcagtacttccgggatcacaataatgagattgttaaaatacagagcctcctgagagcaaacaaggccagagatgattataagaccctcgttgggtcggagaaccctcctctcactgtcattcgcaagttcgtgtatctgctagaccaatcagatctagactttcaagaggagttagaggttgctcgtcttcgtgaagaggtggtgacaaagatacgggctaaccagcagctagagaagacttag

SEQ ID NO: 268410 - DNA, 1134 bp, Artificial Sequence
  derived and/or modified sequence
atgggctgcttcaagggcgtggtggccgtgggctacatcaacgaggccatcgacgagggcaaccccctgagaaccctggagaccctgctgctgcccaccgccaacatcagcgacgtggaccccgcccacgcccagcactaccaggacgtgctgtaccacgccaagagccagaagctgggcgacagcgagagcgtgagcaaggtgctgtggctggacgagatccagcaggccgtggacgacgccaacgtggacaaggacagagccaagcagtgggtgaccctggtggtggacgtgaaccagtgcctggagggcaagaagagcagcgacatcctgagcgtgctgaagagcagcaccagcaacgccaacgacatcatccccgagtgcgccgacaagtactacgacgccctggtgaaggccaaggagctgaagagcgagagagtgagcagcgacggcagctggctgaagctgaacctgcacaagaagtacgactactactacaacaccgacagcaaggagagcagctgggtgacccccgagagctgcctgtacaaggagagctggctgaccggcaaggagatcgaggacatcatcgaggaggtgaccgtgggctacatcagagagaacatctggagcgccagcgaggagctgctgctgagattccaggccaccagcagcggccccatcctgagagaggagttcgaggccagaaagagcttcctgcacgagcaggaggagaacgtggtgaagatccaggccttctggaagggctacaagcagagaaaggagtacatgcacagaagacagaccttcatcgacaacaccgacagcatcgtgaagatccagagctggttcagaatggccaccgccagaaagagctacctgagcagactgcagtacttcagagaccacaacaacgagatcgtgaagatccagagcctgctgagagccaacaaggccagagacgactacaagaccctggtgggcagcgagaacccccccctgaccgtgatcagaaagttcgtgtacctgctggaccagagcgacctggacttccaggaggagctggaggtggccagactgagagaggaggtggtgaccaagatcagagccaaccagcagctggagaagacctag

SEQ ID NO: 268411 - protein, 162 aa, Artificial Sequence
  derived and/or modified sequence
MDFFSSHLLADSSSPATNSSHTDAHEILVSDFLVSDENLQKMENVLDLWSSGLKTNIISELSKWRLNFIDWHRMEMRKEKEKHAAHLKQLCNQINELKELQKTFEISIGRKDEVISSLSHAIGKQKEKIELMRTFFHWRIGHVRARQDVYEGKLADQYYQRT

SEQ ID NO: 268412 - DNA, 156 bp, Artificial Sequence
  derived and/or modified sequence
atggacttcttcagcagccacctgctggccgacagcagcagccccgccaccaacagcagccacaccgacgcccacgagatcctggtgagcgacttcctggtgagcgacgagaacctgcagaagatggagaacgtgctggacctgtggagcagctag

SEQ ID NO: 268413 - DNA, 489 bp, Artificial Sequence
  derived and/or modified sequence
atggacttcttcagcagccacctgctggccgacagcagcagccccgccaccaacagcagccacaccgacgcccacgagatcctggtgagcgacttcctggtgagcgacgagaacctgcagaagatggagaacgtgctggacctgtggagcagcggcctgaagaccaacatcatcagcgagctgagcaagtggagactgaacttcatcgactggcacagaatggagatgagaaaggagaaggagaagcacgccgcccacctgaagcagctgtgcaaccagatcaacgagctgaaggagctgcagaagaccttcgagatcagcatcggcagaaaggacgaggtgatcagcagcctgagccacgccatcggcaagcagaaggagaagatcgagctgatgagaaccttcttccactggagaatcggccacgtgagagccagacaggacgtgtacgagggcaagctggccgaccagtactaccagagaacctag

SEQ ID NO: 268414 - DNA, 99 bp, Artificial Sequence
  derived and/or modified sequence
atggacttcttcagcagccacctgctggccgacagcagcagccccgccaccaacagcagccacaccgacgcccacgagatcctggtgagcgacttctag

SEQ ID NO: 268415 - DNA, 156 bp, Artificial Sequence
  derived and/or modified sequence
atggacttcttcagtagccatttattggctgactctagctccccagctacaaacagcagtcataccgatgctcatgaaattctggtgagtgattttttggtttcagatgagaacctccaaaagatggagaatgtcctagacctctggtcttcttag

SEQ ID NO: 268416 - DNA, 489 bp, Artificial Sequence
  derived and/or modified sequence
atggacttcttctcgtcccatctgttagcggacagctctagccctgccaccaattcttctcacacagatgcccacgaaatactagttagcgatttcctggtgagcgacgaaaacctgcagaaaatggaaaacgtgctcgatttgtggtcatccggacttaagactaacatcatcagcgaattatcaaaatggcggctgaatttcatcgattggcacagaatggagatgaggaaggaaaaagagaagcacgccgcacatctcaagcaactgtgcaatcagatcaatgaactgaaggagctccagaagactttcgagatctccattgggaggaaagatgaggtgatcagttccctgtcccacgcaataggaaaacaaaaggaaaagattgaactgatgaggaccttcttccattggcgaataggtcacgtcagagcacgccaggacgtctatgagggtaagctggctgatcagtattatcagcggacttag

SEQ ID NO: 268417 - DNA, 99 bp, Artificial Sequence
  derived and/or modified sequence
atggacttcttttcttctcatcttctcgccgattcctcctcacctgccactaattcgagtcacacagacgcacacgaaatcctggtctcagacttctag

SEQ ID NO: 268418 - DNA, 156 bp, Artificial Sequence
  derived and/or modified sequence
atggacttcttcagcagccacctgctggccgacagcagcagccctgccaccaacagcagccacacagatgcccacgagatcctggtgtctgacttcctggtgtctgatgagaacctgcagaagatggagaatgtgctggacctgtggagcagctag

SEQ ID NO: 268419 - DNA, 489 bp, Artificial Sequence
  derived and/or modified sequence
atggacttcttcagcagccacctgctggccgacagcagcagccctgccaccaacagcagccacacagatgcccacgagatcctggtgtctgacttcctggtgtctgatgagaacctgcagaagatggagaatgtgctggacctgtggagcagcggcctgaagaccaacatcatcagcgagctgagcaagtggaggctgaacttcatcgactggcacaggatggagatgaggaaggagaaggagaagcacgccgcccacctgaagcagctgtgcaaccagatcaatgagctgaaggagctgcagaagacctttgagatcagcatcggcaggaaggatgaggtgatcagcagcctgagccacgccatcggcaagcagaaggagaagattgagctgatgaggaccttcttccactggagaattggccacgtgcgggcccggcaggatgtgtatgagggcaagctggccgaccagtactaccagaggacatag

SEQ ID NO: 268420 - DNA, 99 bp, Artificial Sequence
  derived and/or modified sequence
atggacttcttcagcagccacctgctggccgacagcagcagccctgccaccaacagcagccacacagatgcccacgagatcctggtgtctgacttctag

SEQ ID NO: 268421 - DNA, 156 bp, Artificial Sequence
  derived and/or modified sequence
atggacttcttcagcagccacctgctggccgacagcagcagccccgcaaccaattcttcgcacaccgatgcgcatgagatcctcgtgtctgacttccttgtatccgacgagaacttgcagaagatggagaatgtccttgacctgtggagcagctag

SEQ ID NO: 268422 - DNA, 489 bp, Artificial Sequence
  derived and/or modified sequence
atggacttcttcagcagccacctgctggccgacagcagcagccccgccacaaattcaagtcacaccgatgctcatgagatcctagttagcgattttttagtgtctgacgagaatttgcagaagatggagaacgtgctagacctgtggtccagcgggctcaaaactaacattatctcagaattgagtaagtggcgtctaaacttcatagattggcaccgaatggagatgcgaaaagagaaagagaaacatgcagcccatctgaaacaactgtgcaatcaaatcaacgagctgaaggagctgcagaagacatttgaaatttccatcggccggaaggacgaagtgatttcctccctcagtcatgctatcggcaagcagaaggagaagatcgagctgatgaggacattctttcactggaggatcggccacgtgagggcacgtcaggacgtgtatgaagggaagctggctgatcagtattatcaacggacatag

SEQ ID NO: 268423 - DNA, 99 bp, Artificial Sequence
  derived and/or modified sequence
atggacttcttcagcagccacctgctggccgacagcagcagccccgcaaccaacagctcccacactgatgcccacgaaatacttgtctctgacttctag

SEQ ID NO: 268424 - DNA, 156 bp, Artificial Sequence
  derived and/or modified sequence
atggactttttttctagtcatctgttggcagattccagtagccctgccacaaacagctcgcacactgatgcacacgagatcctggtaagtgattttcttgtgtccgacgagaacctccagaaaatggaaaatgtcttggatttatggagcagctag

SEQ ID NO: 268425 - DNA, 489 bp, Artificial Sequence
  derived and/or modified sequence
atggactttttcagctcccacctcctcgcggatagcagctcacctgcgacgaactctagtcacaccgacgcacatgagatcctagtgagtgattttctcgtaagtgatgagaacctacagaagatggagaatgtgctcgacctctggtcctccggcctaaaaacaaatatcatctctgaactctcgaagtggcggctgaacttcatcgactggcaccgcatggagatgagaaaagagaaagaaaagcacgccgcacacttaaagcagctgtgcaatcagatcaatgaactcaaggagctgcagaaaaccttcgagatatccattgggaggaaggatgaggtcatttcttcattgtcacatgcaattggtaagcaaaaggagaagatagagctcatgcgcaccttctttcattggcgaattggacatgtccgggctagacaggacgtgtatgaaggaaagttggcagatcaatattatcaaaggacgtag

SEQ ID NO: 268426 - DNA, 99 bp, Artificial Sequence
  derived and/or modified sequence
atggattttttcagcagccaccttttggccgactcttctagccccgctaccaacagcagccacaccgacgcacatgaaattctggttagcgatttttag

SEQ ID NO: 268427 - DNA, 401 bp, Artificial Sequence
  derived and/or modified sequence
ctgtcaggttgccgtctaggtagcggttgtgcttgctgaggctgcacttgctgacactgcagctgcgacgcggctaagaggcgcagagcgaggagtcgggatttggtcgcgagcggcgacggaaataactctgaagtaagagaaactgcaatagaagttggaaaaggatgtgatttccatatttcaagtcattcaaagacagatgagtcatcaccagtgttatcgccaaggaagccttctcacccagtcatggattttttcagttcacatcttttagctgactcttcctcaccagcaacaaattctagtcatacagatgcccatgaaatacttgtgagcgattttcttgtttctgatgaaaaccttcagaagatggaaaatgtgcttgatctttggagttc

SEQ ID NO: 268428 - DNA, 896 bp, Artificial Sequence
  derived and/or modified sequence
aattcctccctgcagtttgaaactgtcaggttgccgtctaggtagcggttgtgcttgctgaggctgcacttgctgacactgcagctgcgacgcggctaagaggcgcagagcgaggagtcgggatttggtcgcgagcggcgacggaagaatatgaagaactgcttcattatgctatagtgactccaaatattgaaccctgtgcttcacagtcatctcatcctaagggagaattggtgccagatgtcagaatttctacaattcatgatattcttcatagtcaaggaaataactctgaagtaagagaaactgcaatagaagttggaaaaggatgtgatttccatatttcaagtcattcaaagacagatgagtcatcaccagtgttatcgccaaggaagccttctcacccagtcatggattttttcagttcacatcttttagctgactcttcctcaccagcaacaaattctagtcatacagatgcccatgaaatacttgtgagcgattttcttgtttctgatgaaaaccttcagaagatggaaaatgtgcttgatctttggagttcaggtcttaagacaaacatcatatctgaactaagtaaatggagacttaattttattgactggcaccgaatggaaatgagaaaagagaaagaaaaacatgcagcacatttaaaacaactgtgtaatcagatcaatgaattgaaggagctgcaaaaaacctttgaaatctccattgggagaaaagatgaggtgatttctagcttgtctcatgccataggcaagcaaaaggaaaagatagagttgatgagaacattcttccactggcgaatcggccatgtcagagccagacaggatgtttatgaaggtaaactagctgaccagtactaccagagaact

SEQ ID NO: 268429 - DNA, 443 bp, Artificial Sequence
  derived and/or modified sequence
tgtcaggttgccgtctaggtagcggttgtgcttgctgaggctgcacttgctgacactgcagctgcgacgcggctaagaggcgcagagcgaggagtcgggatttggtcgcgagcggcgacgagcatttgtgcagaatgtcatcagatgaggagaaatactcacttccagttgtgcaaaatgactccagtcgaggcagttctgtctcttcgaatcttcaggaaataactctgaagtaagagaaactgcaatagaagttggaaaaggatgtgatttccatatttcaagtcattcaaagacagatgagtcatcaccagtgttatcgccaaggaagccttctcacccagtcatggattttttcagttcacatcttttagctgactcttcctcaccagcaacaaattctagtcatacagatgcccatgaaatacttgtgagcgattttc

SEQ ID NO: 268430 - DNA, 231 bp, Artificial Sequence
  derived and/or modified sequence
atgaccagcctgatgcccggcgccggcctgctgcccatccccacccccaaccccctgaccaccctgggcgtgagcctgagcagcctgggcgccatccccgccgccgccctggaccccaacatcgccaccctgggcgagatcccccagccccccctgatgggcaacgtggaccccagcaagatcgacgagatcagaagaaccgtgtacgtgggcaacctgaacagccagtag

SEQ ID NO: 268431 - DNA, 231 bp, Artificial Sequence
  derived and/or modified sequence
atgacttcactgatgccaggggcaggcctcttgcctatcccaacacctaatccactcacgacgctgggtgtgtccctatcgagtttaggagctatccccgccgcagccctggatcctaacattgccactctgggcgagataccccagcccccacttatggggaacgttgacccctccaagattgatgagattagaagaaccgtgtacgttgggaacttaaactctcagtag

SEQ ID NO: 268432 - DNA, 231 bp, Artificial Sequence
  derived and/or modified sequence
atgaccagcctgatgcctggggccggcctgctgcccatccccacccccaaccccctgaccaccctgggcgtgtccctgagcagcctgggcgccatcccagctgctgccctggaccccaacatcgccaccctgggggagatcccccagccccccctgatgggaaatgtggaccccagcaagattgatgagatcagaagaacagtgtatgtgggcaacctgaacagccagtag

SEQ ID NO: 268433 - DNA, 231 bp, Artificial Sequence
  derived and/or modified sequence
atgaccagcctgatgcccggcgccggcctgctgcccatccccacccccaatccactgaccacactgggtgtctcactgagctctctgggcgctattccagccgccgccctagatcccaacattgccaccctgggtgagataccccagcctccactgatgggaaatgttgatcccagtaaaatcgatgagataaggagaactgtgtacgtaggaaacctgaatagccagtag

SEQ ID NO: 268434 - DNA, 231 bp, Artificial Sequence
  derived and/or modified sequence
atgacaagcttgatgcctggagcagggcttctccctatacctactcctaatcccctgaccactctaggagtcagcctgtcttctctgggcgcaattccggctgcagctcttgaccccaacatagctacattgggagagataccacagccccctctgatgggcaacgtggaccccagtaaaatagatgaaatacgtaggaccgtttatgtgggaaacctgaacagtcagtag

SEQ ID NO: 268435 - DNA, 580 bp, Artificial Sequence
  derived and/or modified sequence
agaactgctctctccaaagtcacctcctggttctcagtctacaacgcacctcttgctttttcctccaaagtatgttatgttaagtttcgtgatccatcaagtgttggcgtggcccagcatctaactaacacggtttttattgacagagctctgatagttgttccttgtgcagaagtgatgcagccaacacgaacggttgtcatgtgtaacacaactttcgatcaccgcgaaaacaccgtcctgggaaagcgtccatgcttgatatcgtttggttcatgaacattaagtttccagtacaggtaaaatcccagaggaatccaaagccctctctttattggctcctgctccaaccatgacaagtctgatgcctggtgcaggattgcttccaataccgaccccaaatcctttgactactcttggtgtttcacttagcagtttgggagctataccagcagcagcactagaccccaacattgcaacacttggagagataccacagccaccacttatgggaaacgtggatccttccaaaatagatgaaattaggagaacggtttatgttggaaatctgaattcccag

SEQ ID NO: 268436 - protein, 458 aa, Artificial Sequence
  derived and/or modified sequence
MSNDGRSRNRDRRYDEVPSDLPYQDTTIRTHPTLHDSERAVSADPLPPPPLPLQPPFGPDFYSSDTEEPAIAPDLKPVRRFVPDSWKNFFRGKKKDPEWDKPVSDIRYISDGVECSPPASPARPNHRSPLNSCKDPYGGSEGTFSSRKEADAVFPRDPYGSLDRHTQTVRTYSEKVEEYNLRYSYMKSWAGLLRILGVVELLLGAGVFACVTAYIHKDSEWYNLFGYSQPYGMGGVGGLGSMYGGYYYTGPKTPFVLVVAGLAWITTIIILVLGMSMYYRTILLDSNWWPLTEFGINVALFILYMAAAIVYVNDTNRGGLCYYPLFNTPVNAVFCRVEGGQIAAMIFLFVTMIVYLISALVCLKLWRHEAARRHREYMEQQEINEPSLSSKRKMCEMATSGDRQRDSEVNFKELRTAKMKPELLSGHIPPPRPANFFVFLVEMGFHRVSQDDLDLLTS

SEQ ID NO: 268437 - protein, 558 aa, Artificial Sequence
  derived and/or modified sequence
MSNDGRSRNRDRRYDEVPSDLPYQDTTIRTHPTLHDSERAVSADPLPPPPLPLQPPFGPDFYSSDTEEPAIAPDLKPVRRFVPDSWKNFFRGKKKDPEWDKPVSDIRYISDGVECSPPASPARPNHRSPLNSCKDPYGGSEGTFSSRKEADAVFPRDPYGSLDRHTQTVRTYSEKVEEYNLRYSYMKSWAGLLRILGVVELLLGAGVFACVTAYIHKDSEWYNLFGYSQPYGMGGVGGLGSMYGGYYYTGPKTPFVLVVAGLAWITTIIILVLGMSMYYRTILLDSNWWPLTEFGINVALFILYMAAAIVYVNDTNRGGLCYYPLFNTPVNAVFCRVEGGQIAAMIFLFVTMIVYLISALVCLKLWRHEAARRHREYMEQQEINEPSLSSKRKMCEMATSGDRQRDSEVNFKELRTAKMKPELLSGHIPPGHIPKPIVMPDYVAKYPVIQTDDERERYKAVFQDQFSEYKELSAEVQAVLRKFDELDAVMSRLPHHSESRQEHERISRIHEEFKKKKNDPTFLEKKERCDYLKNKLSHIKQRIQEYDKVMNWDVQGYS

SEQ ID NO: 268438 - protein, 442 aa, Artificial Sequence
  derived and/or modified sequence
MSNDGRSRNRDRRYDEVPSDLPYQDTTIRTHPTLHDSERAVSADPLPPPPLPLQPPFGPDFYSSDTEEPAIAPDLKPVRRFVPDSWKNFFRGKKKDPEWDKPVSDIRYISDGVECSPPASPARPNHRSPLNSCKDPYGGSEGTFSSRKEADAVFPRDPYGSLDRHTQTVRTYSEKVEEYNLRYSYMKSWAGLLRILGVVELLLGAGVFACVTAYIHKDSEWYNLFGYSQPYGMGGVGGLGSIALVCLKLWRHEAARRHREYMEQQEINEPSLSSKRKMCEMATSGDRQRDSEVNFKELRTAKMKPELLSGHIPPGHIPKPIVMPDYVAKYPVIQTDDERERYKAVFQDQFSEYKELSAEVQAVLRKFDELDAVMSRLPHHSESRQEHERISRIHEEFKKKKNDPTFLEKKERCDYLKNKLSHIKQRIQEYDKVMNWDVQGYS

SEQ ID NO: 268439 - protein, 516 aa, Artificial Sequence
  derived and/or modified sequence
MSNDGRSRNRDRRYDEVPSDLPYQDTTIRTHPTLHDSERAVSADPLPPPPLPLQPPFGPDFYSSDTEEPAIAPDLKPVRRFVPDSWKNFFRGKKKDPEWDKPVSDIRYISDGVECSPPASPARPNHRSPLNSCKDPYGGSEGTFSSRKEADAVFPRDPYGSLDRHTQTVRTYSEKVEEYNLRYSYMKSWAGLLRILGVVELLLGAGVFACVTAYIHKDSEWYNLFGYSQPYGMGGVGGLGSMYGGYYYTGPKTPFVLVVAGLAWITTIIILVLGMSMYYRTILLDSNWWPLTEFGINVALFILYMAAAIVYVNDTNRGGLCYYPLFNTPVNAVFCRVEGGQIAAMIFLFVTMIVYLISALVCLKLWRHEAARRHREYMEQQEINEPSLSSKRKMCEMATSGDRQRDSEVNFKELRTAKMKPELLSGHIPPGHIPKPIVMPDYVAKYPVIQTDDERERYKAVFQDQFSEYKELSAEVQAVLRKFDELDAVMSRLPHHSESRQEHERISRIHEEFKKK

SEQ ID NO: 268440 - protein, 145 aa, Artificial Sequence
  derived and/or modified sequence
MSNDGRSRNRDRRYDEVPSDLPYQDTTIRTHPTLHDSERAVSADPLPPPPLPLQPPFGPDFYSSDTEEPAIAPDLKPVRRFVPDSWKNFFRGKKKDPEWDKPVSDIRYISDGVECSPPASPARPNHRSPLNSCKDPYGGSEGTFS

SEQ ID NO: 268441 - DNA, 1377 bp, Artificial Sequence
  derived and/or modified sequence
atgtccaatgatggccgctcccgaaaccgcgaccggcgatacgacgaggtgccctctgatctgccctaccaggatactaccatcagaacacaccccaccctccatgacagtgagcgggccgtgagcgcggatcccctacctcccccgcccttgccactgcaaccaccgtttggtcccgatttttatagctcggacaccgaagagcctgcaatcgccccggacctgaagcccgttaggagatttgtgccggatagttggaaaaatttcttccgaggtaaaaagaaagatcctgagtgggataaacccgttagcgacatccggtacattagtgatggagtggaatgtagcccaccagcctctccagccagaccaaatcatcgctccccactgaacagctgtaaggacccctacggcgggagcgagggaactttttcttctaggaaggaggccgatgccgtatttccacgcgatccatacgggtctttagatcgccatactcagacagtccgaacgtattcagagaaggtcgaggagtacaatctgcgctattcgtacatgaaatcctgggccgggctcctccgcattctcggagtggttgaacttctgctcggcgccggagtcttcgcctgcgtgaccgcttacatacataaggacagcgaatggtataatttatttgggtatagtcagccctatggaatgggtggcgtcgggggcttaggcagtatgtatggaggctactattacactggtcctaagactcccttcgttttggtagtcgcagggttggcttggataactactattatcatcctggtgctgggtatgtcgatgtactatcgaacaattctcctggattcaaactggtggcctttaaccgaatttggtatcaacgtagctctgtttatcttgtatatggccgccgcaattgtgtacgtaaacgatacaaataggggcgggctttgttactatcctctttttaacacacccgtaaacgcagtgttctgtcgcgttgaggggggtcaaatagctgccatgatttttctctttgtgaccatgatcgtgtacctgattagcgctctggtctgcttaaagttgtggcggcatgaagcagctagaagacaccgcgaatacatggaacagcaagaaatcaatgagccctccttatctagtaagagaaaaatgtgtgaaatggctacaagtggtgatcgtcagcgggactctgaagtgaatttcaaagaattgcgcaccgccaaaatgaaaccggagttgcttagtgggcatattccccccccgcgccccgcaaattttttcgtttttctggtggagatggggtttcatcgcgtcagccaggatgatctggatcttctcacctcatag

SEQ ID NO: 268442 - DNA, 1677 bp, Artificial Sequence
  derived and/or modified sequence
atgagtaatgatgggcgctccagaaacagagatcgacgctacgatgaggtaccgagcgatttgccttatcaggacaccacaatccggactcaccccaccctgcatgattccgagcgtgcagtctcagcagatcccttgcctccgcctccccttccccttcagcctccattcgggcctgatttctatagctcagataccgaggaacctgcaatcgcacccgatctgaaaccagtgcggcggtttgtgccggattcttggaagaacttctttcgaggaaagaaaaaggaccccgaatgggacaagcccgtctccgacatcaggtacataagcgacggtgtcgaatgttcccctccagcttcaccggcacggccaaaccacaggagtccgttaaactcttgtaaggacccttacggcggctccgaaggaacattcagttcccgcaaggaggctgacgccgtattcccgcgtgatccatatgggagcctggatcgccatacacagacggtacgaacatacagtgagaaggtggaagagtacaatctgaggtactcctacatgaaaagctgggccgggctactgcgtatcctcggcgtggtagaactgttactgggcgccggcgtgttcgcttgcgtgactgcatacatccataaagacagcgagtggtacaatttgtttggctattcccagccatacggcatgggaggcgtgggcgggctgggatccatgtacgggggctattactacacaggccccaagacaccctttgttcttgtggtggctggacttgcttggattactactatcattatattggtgctgggcatgtctatgtactatcggacaatcttattagatagtaattggtggccgctgactgagttcggaatcaatgtcgccctctttatactttatatggcagcagctatcgtatacgtaaacgacactaatagaggcggactctgctactatcccctgtttaacactcccgtaaatgctgttttctgtagggtggagggtggtcagatcgctgcaatgatctttctctttgtgacaatgatcgtgtatttgattagcgctcttgtgtgtttgaagctctggaggcatgaggctgctcggaggcatagagagtacatggagcagcaggagatcaacgagccctccctctcctcaaagcgcaagatgtgcgagatggcaacctctggggaccgacagcgcgacagcgaggtgaatttcaaggagttgaggacagcaaaaatgaaacctgagctcctttctgggcacatacctccaggccatattccaaaacccattgttatgcctgattacgtcgcaaagtatcccgtgatccagacggacgacgaaagagagcgttataaagctgtgttccaggatcaattctctgagtacaaggaacttagcgctgaggtgcaggcagtgctacggaagtttgatgaactggatgccgtgatgagtcgactgccccatcactccgagtccaggcaggaacacgagcggatctcaagaattcatgaagaattcaaaaaaaaaaaaaacgatcccacttttctcgagaaaaaagaaagatgtgactacttgaaaaataaactgtcccatattaagcagaggattcaagagtatgacaaggtaatgaactgggacgtgcagggatatagctag

SEQ ID NO: 268443 - DNA, 1551 bp, Artificial Sequence
  derived and/or modified sequence
atgtctaacgatggaagaagtagaaatagggaccgacgatatgatgaagtgccgtccgatttgccttaccaggatacaaccatccggacccaccccactcttcacgactccgagagagcagtcagcgcggacccactaccgccccctccgctcccgctgcaaccgccattcgggcctgacttctattcgagtgatacagaggaacctgcaattgctccggatcttaagcctgtgaggcgcttcgtgcccgatagttggaagaactttttccgtgggaagaagaaggaccctgaatgggacaaacctgtcagtgacattcggtacattagcgacggagtggagtgtagcccacccgcctctcccgcccggcctaatcacaggagccccctaaactcttgcaaggatccatatggcggatccgagggaacctttagctctcggaaggaggcagacgcagtgttcccccgcgacccatatgggtctttggatcgacatacgcaaacggtccgcacttactccgagaaagtggaggaatataacctacgttatagttatatgaaatcctgggccggtttactgaggatcctgggcgtggtggaactgctccttggggcaggagtgttcgcctgtgttacagcatacatacataaagatagcgaatggtacaacctcttcggatactcccagccctatggcatgggcggcgtaggcggtcttggatccatgtacggcggttactattatactggccccaaaacccccttcgtgttagtggttgctggtttagcctggatcaccacaatcattatcttggtgctgggcatgtcaatgtattatcgaacaatcctactggactcaaactggtggccccttaccgagttcggaataaatgtggcgctttttatcctgtatatggcggccgctatagtgtacgtcaatgacaccaaccgcggcgggttgtgttattatcctctgttcaacacacctgttaacgcagtattctgtcgggtcgaaggcggccaaatcgctgccatgatattcttattcgtgacaatgattgtctacctgataagtgccctagtgtgtctgaaactttggcgtcacgaggccgcccgaagacacagggagtatatggagcagcaggagatcaatgagcctagtctcagttctaagcgtaaaatgtgtgagatggccacgagcggcgacagacagagggatagtgaggtgaatttcaaggaactaagaacagcaaaaatgaagccagaattactgagcggccacatcccccccggacacattcctaagcccattgtaatgcccgattacgtggccaagtaccctgtgattcagacagatgacgaaagagaaagatacaaggcagtcttccaggaccagttttctgagtataaagaactgtcagcggaagtccaggccgttctgaggaagttcgacgaactcgacgctgtgatgtctcgccttcctcatcattctgagtccaggcaggagcacgaacgcatttctagaatccacgaggagtttaagaagaagtag

SEQ ID NO: 268444 - DNA, 1377 bp, Artificial Sequence
  derived and/or modified sequence
atgagcaatgatggccgcagcaggaacagagaccggcgctatgatgaggtgcccagcgacctgccctaccaggacaccaccatccgcacccaccccaccctgcatgattctgaaagagctgtgtctgctgaccccctgcccccaccacccctgcccctgcagcccccatttggaccagacttctacagcagtgacacagaggagcccgccatcgccccagacctgaagcctgtgagaagatttgtgcctgacagctggaagaacttcttccggggcaagaagaaggaccctgagtgggacaagcctgtgtctgacatccgctacatcagtgatggagtggagtgcagccccccagccagccctgcccggcccaaccacaggagccccctgaacagctgcaaggacccctatggaggcagcgagggcaccttcagcagcaggaaggaggctgatgctgtgttcccccgggacccctacggcagcctggacagacacacccagacagtgaggacctacagcgagaaggtggaggagtacaacctgcgctacagctacatgaagtcctgggccggcctgctgcgcatcctgggcgtggtggagctgctgctgggcgctggggtgtttgcctgtgtgacagcctacatccacaaggacagcgagtggtacaacctgtttggctacagccagccctacggcatgggcggcgtgggcggcctgggctccatgtatggaggctactactacacaggccccaagaccccatttgtgctggtggtggccggcctggcctggatcaccaccatcatcatcctggtgctgggcatgtccatgtactaccgcaccatcctgctggacagcaactggtggcccctgacagaatttggcatcaacgtggccctcttcatcctgtacatggctgctgccatcgtgtatgtgaatgacaccaacagaggaggcctgtgctactaccccctcttcaacacccctgtgaatgctgtgttctgccgggtggagggcggccagattgctgccatgatcttcctgtttgtgaccatgattgtgtacctgatcagcgccctggtgtgcctgaagctgtggaggcatgaggccgcccggcggcaccgggagtacatggagcagcaggagatcaatgagcccagcctgagcagcaagaggaagatgtgtgagatggccaccagcggggaccggcagagggacagcgaggtgaacttcaaggagctgaggacagccaagatgaagccagagctgctgagcggccacatccccccacccaggcctgccaacttctttgtgttcctggtggagatgggcttccaccgggtgtcccaggatgacctggacctgctgaccagctag

SEQ ID NO: 268445 - DNA, 1677 bp, Artificial Sequence
  derived and/or modified sequence
atgagcaatgatggccgcagcaggaacagagaccggcgctatgatgaggtgcccagcgacctgccctaccaggacaccaccatccgcacccaccccaccctgcatgattctgaaagagctgtgtctgctgaccccctgcccccaccacccctgcccctgcagcccccatttggaccagacttctacagcagtgacacagaggagcccgccatcgccccagacctgaagcctgtgagaagatttgtgcctgacagctggaagaacttcttccggggcaagaagaaggaccctgagtgggacaagcctgtgtctgacatccgctacatcagtgatggagtggagtgcagccccccagccagccctgcccggcccaaccacaggagccccctgaacagctgcaaggacccctatggaggcagcgagggcaccttcagcagcaggaaggaggctgatgctgtgttcccccgggacccctacggcagcctggacagacacacccagacagtgaggacctacagcgagaaggtggaggagtacaacctgcgctacagctacatgaagtcctgggccggcctgctgcgcatcctgggcgtggtggagctgctgctgggcgctggggtgtttgcctgtgtgacagcctacatccacaaggacagcgagtggtacaacctgtttggctacagccagccctacggcatgggcggcgtgggcggcctgggctccatgtatggaggctactactacacaggccccaagaccccatttgtgctggtggtggccggcctggcctggatcaccaccatcatcatcctggtgctgggcatgtccatgtactaccgcaccatcctgctggacagcaactggtggcccctgacagaatttggcatcaacgtggccctcttcatcctgtacatggctgctgccatcgtgtatgtgaatgacaccaacagaggaggcctgtgctactaccccctcttcaacacccctgtgaatgctgtgttctgccgggtggagggcggccagattgctgccatgatcttcctgtttgtgaccatgattgtgtacctgatcagcgccctggtgtgcctgaagctgtggaggcatgaggccgcccggcggcaccgggagtacatggagcagcaggagatcaatgagcccagcctgagcagcaagaggaagatgtgtgagatggccaccagcggggaccggcagagggacagcgaggtgaacttcaaggagctgaggacagccaagatgaagccagagctgctgagcggccacatccccccaggccacatccccaagcccatcgtgatgccagactatgtggccaagtaccctgtgatccagacagatgatgagcgggagcgctacaaggctgtgttccaggaccagttcagcgagtacaaggagctgtctgctgaggtgcaggccgtgctgaggaagtttgatgagctggatgctgtgatgagccggctgccccaccacagcgagagccggcaggagcacgagcgcatcagccgcatccacgaggagttcaagaagaagaagaatgaccccaccttcctggagaagaaggagcgctgtgactacctgaagaacaagctgagccacatcaagcagaggatccaggagtatgacaaggtgatgaactgggatgtgcagggctacagctag

SEQ ID NO: 268446 - DNA, 1551 bp, Artificial Sequence
  derived and/or modified sequence
atgagcaatgatggccgcagcaggaacagagaccggcgctatgatgaggtgcccagcgacctgccctaccaggacaccaccatccgcacccaccccaccctgcatgattctgaaagagctgtgtctgctgaccccctgcccccaccacccctgcccctgcagcccccatttggaccagacttctacagcagtgacacagaggagcccgccatcgccccagacctgaagcctgtgagaagatttgtgcctgacagctggaagaacttcttccggggcaagaagaaggaccctgagtgggacaagcctgtgtctgacatccgctacatcagtgatggagtggagtgcagccccccagccagccctgcccggcccaaccacaggagccccctgaacagctgcaaggacccctatggaggcagcgagggcaccttcagcagcaggaaggaggctgatgctgtgttcccccgggacccctacggcagcctggacagacacacccagacagtgaggacctacagcgagaaggtggaggagtacaacctgcgctacagctacatgaagtcctgggccggcctgctgcgcatcctgggcgtggtggagctgctgctgggcgctggggtgtttgcctgtgtgacagcctacatccacaaggacagcgagtggtacaacctgtttggctacagccagccctacggcatgggcggcgtgggcggcctgggctccatgtatggaggctactactacacaggccccaagaccccatttgtgctggtggtggccggcctggcctggatcaccaccatcatcatcctggtgctgggcatgtccatgtactaccgcaccatcctgctggacagcaactggtggcccctgacagaatttggcatcaacgtggccctcttcatcctgtacatggctgctgccatcgtgtatgtgaatgacaccaacagaggaggcctgtgctactaccccctcttcaacacccctgtgaatgctgtgttctgccgggtggagggcggccagattgctgccatgatcttcctgtttgtgaccatgattgtgtacctgatcagcgccctggtgtgcctgaagctgtggaggcatgaggccgcccggcggcaccgggagtacatggagcagcaggagatcaatgagcccagcctgagcagcaagaggaagatgtgtgagatggccaccagcggggaccggcagagggacagcgaggtgaacttcaaggagctgaggacagccaagatgaagccagagctgctgagcggccacatccccccaggccacatccccaagcccatcgtgatgccagactatgtggccaagtaccctgtgatccagacagatgatgagcgggagcgctacaaggctgtgttccaggaccagttcagcgagtacaaggagctgtctgctgaggtgcaggccgtgctgaggaagtttgatgagctggatgctgtgatgagccggctgccccaccacagcgagagccggcaggagcacgagcgcatcagccgcatccacgaggagttcaagaagaagtag

SEQ ID NO: 268447 - DNA, 1448 bp, Artificial Sequence
  derived and/or modified sequence
gcccgataccggtttcagagtcctgggcagcgtgcgcgctcttcctggcggctgcgcaggtgtgaaaatcacaaatgtcaaatgatggaagatccaggaatcgggacaggcgctacgatgaggtcccaagcgacctgccctatcaagataccaccataagaacccacccaactcttcatgacagtgagcgggcagtgagcgctgatcccttgccaccaccccctctcccattacagccaccattcggcccagacttctactcaagtgacacagaagaaccagctatagcgccagatctcaaaccagtaaggcgctttgtccctgactcctggaagaactttttcagagggaagaaaaaggaccccgaatgggataagccggtgtctgatatcaggtacatctccgatggagtggagtgttcaccaccagcctctccagcaagaccaaaccaccgttcgcccctcaactcctgcaaagatccctacggagggtcagaaggaacctttagttcccggaaagaggctgacgcagtgtttccccgggatccctatggatctctagaccgacacacacaaacagttcgaacatacagtgagaaggtggaggagtataacctgagatactcctacatgaagtcgtgggcaggcctgctgagaatactgggtgtggtggagctgcttttgggggccggtgtctttgcttgtgtcacagcttacattcacaaggacagtgagtggtacaacttgtttggatattcacaaccgtatggcatgggaggcgttggtggattgggcagtatgtatgggggctattactacactggccctaagaccccttttgtactcgtggttgctggattagcttggatcaccaccattattattctggttcttggcatgtccatgtattaccggaccattcttctggactctaattggtggcccctaactgaatttggaattaacgttgccttgtttattttgtatatggccgcagccatagtctatgtgaatgataccaaccgaggtggcctctgctactatccgttatttaatacaccagtgaatgcagtgttctgccgggtagaaggaggacagatagctgcaatgatcttcctgtttgtcaccatgatagtttatctcattagtgctttggtttgcctaaagttatggaggcatgaggcagctcggagacatagagaatatatggaacaacaggagataaatgagccatcattgtcatcgaaaaggaaaatgtgtgaaatggccaccagtggtgacagacaaagagactcagaagttaatttcaaggaactgagaacagcaaaaatgaaacctgaactactgagtggacacatccccccaccacgcccagctaatttttttgtatttttagtagagatggggtttcaccgtgttagccaggatgatcttgatctcctgacctcg

SEQ ID NO: 268448 - DNA, 2153 bp, Artificial Sequence
  derived and/or modified sequence
gcccgataccggtttcagagtcctgggcagcgtgcgcgctcttcctggcggctgcgcaggtgtgaaaatcacaaatgtcaaatgatggaagatccaggaatcgggacaggcgctacgatgaggtcccaagcgacctgccctatcaagataccaccataagaacccacccaactcttcatgacagtgagcgggcagtgagcgctgatcccttgccaccaccccctctcccattacagccaccattcggcccagacttctactcaagtgacacagaagaaccagctatagcgccagatctcaaaccagtaaggcgctttgtccctgactcctggaagaactttttcagagggaagaaaaaggaccccgaatgggataagccggtgtctgatatcaggtacatctccgatggagtggagtgttcaccaccagcctctccagcaagaccaaaccaccgttcgcccctcaactcctgcaaagatccctacggagggtcagaaggaacctttagttcccggaaagaggctgacgcagtgtttccccgggatccctatggatctctagaccgacacacacaaacagttcgaacatacagtgagaaggtggaggagtataacctgagatactcctacatgaagtcgtgggcaggcctgctgagaatactgggtgtggtggagctgcttttgggggccggtgtctttgcttgtgtcacagcttacattcacaaggacagtgagtggtacaacttgtttggatattcacaaccgtatggcatgggaggcgttggtggattgggcagtatgtatgggggctattactacactggccctaagaccccttttgtactcgtggttgctggattagcttggatcaccaccattattattctggttcttggcatgtccatgtattaccggaccattcttctggactctaattggtggcccctaactgaatttggaattaacgttgccttgtttattttgtatatggccgcagccatagtctatgtgaatgataccaaccgaggtggcctctgctactatccgttatttaatacaccagtgaatgcagtgttctgccgggtagaaggaggacagatagctgcaatgatcttcctgtttgtcaccatgatagtttatctcattagtgctttggtttgcctaaagttatggaggcatgaggcagctcggagacatagagaatatatggaacaacaggagataaatgagccatcattgtcatcgaaaaggaaaatgtgtgaaatggccaccagtggtgacagacaaagagactcagaagttaatttcaaggaactgagaacagcaaaaatgaaacctgaactactgagtggacacatccccccaggccacattcctaaacctatcgtgatgcccgactatgtggcaaaataccctgtgattcagacagatgatgagcgagaacgctataaagctgtgttccaagaccagttttcagagtacaaagagctgtctgcagaagttcaggctgtcctgaggaagtttgatgagctggatgcagtgatgagcagattgccacatcattcggaaagccgacaggaacatgagagaatttcaagaatccatgaagagtttaagaaaaaaaagaatgatcctacatttctggaaaaaaaagaacgctgtgattacctaaagaataaactttctcacataaagcaaagaattcaagaatatgataaagtaatgaattgggatgtacaaggttattcttaacgcttatttgaaaccactttatttttttattttattttatttttttgagatgaagtctcgctctgttacccaggctggaatgcagtggcacaatctcggctcactgcaacctccacctcccgggttcaagcaattctcctgttcaagcaattagcctccccagtagctgggattacaggcgtgcgctgccacaccccgctaatttttgtatttttagtagagacgaggtttcaccatgttggtcaggctgggaaactactttttttaaaaaatagcaagtttactatttatttactgcctttttaatgctagcctctgtggtagagaagcaagcgcttcccaaatcagcttccaattggtttaaccagtatgcaacattaaagattttactcagacattttt

SEQ ID NO: 268449 - DNA, 1908 bp, Artificial Sequence
  derived and/or modified sequence
gcggggcggggcgcgcacctcggggcgatctcggtgctccttacctgggaggtctcccggcttagtttcggcctcgttgggtcggaatctccaaagacagtgggtttcagccagaaacgcgaagacgaacgcctagccggcgcgggcagaaccgaggacacaatgagatttgtgggaccgggcgcccagaggctggcgcgggggagaccccacagctaaaatgctcggtacccccgggcagtcgtgggttagttagaaccgcagagcctttcccgacccctcggaagcgcagaagtatccgaaatctacccgtttcttgggtccagcaaaacttttaagccaggtgtgaaaatcacaaatgtcaaatgatggaagatccaggaatcgggacaggcgctacgatgaggtcccaagcgacctgccctatcaagataccaccataagaacccacccaactcttcatgacagtgagcgggcagtgagcgctgatcccttgccaccaccccctctcccattacagccaccattcggcccagacttctactcaagtgacacagaagaaccagctatagcgccagatctcaaaccagtaaggcgctttgtccctgactcctggaagaactttttcagagggaagaaaaaggaccccgaatgggataagccggtgtctgatatcaggtacatctccgatggagtggagtgttcaccaccagcctctccagcaagaccaaaccaccgttcgcccctcaactcctgcaaagatccctacggagggtcagaaggaacctttagttcccggaaagaggctgacgcagtgtttccccgggatccctatggatctctagaccgacacacacaaacagttcgaacatacagtgagaaggtggaggagtataacctgagatactcctacatgaagtcgtgggcaggcctgctgagaatactgggtgtggtggagctgcttttgggggccggtgtctttgcttgtgtcacagcttacattcacaaggacagtgagtggtacaacttgtttggatattcacaaccgtatggcatgggaggcgttggtggattgggcagtatgtatgggggctattactacactggccctaagaccccttttgtactcgtggttgctggattagcttggatcaccaccattattattctggttcttggcatgtccatgtattaccggaccattcttctggactctaattggtggcccctaactgaatttggaattaacgttgccttgtttattttgtatatggccgcagccatagtctatgtgaatgataccaaccgaggtggcctctgctactatccgttatttaatacaccagtgaatgcagtgttctgccgggtagaaggaggacagatagctgcaatgatcttcctgtttgtcaccatgatagtttatctcattagtgctttggtttgcctaaagttatggaggcatgaggcagctcggagacatagagaatatatggaacaacaggagataaatgagccatcattgtcatcgaaaaggaaaatgtgtgaaatggccaccagtggtgacagacaaagagactcagaagttaatttcaaggaactgagaacagcaaaaatgaaacctgaactactgagtggacacatccccccaggccacattcctaaacctatcgtgatgcccgactatgtggcaaaataccctgtgattcagacagatgatgagcgagaacgctataaagctgtgttccaagaccagttttcagagtacaaagagctgtctgcagaagttcaggctgtcctgaggaagtttgatgagctggatgcagtgatgagcagattgccacatcattcggaaagccgacaggaacatgagagaatttcaagaatccatgaagagtttaagaaaaaaaa

SEQ ID NO: 268450 - DNA, 1377 bp, Artificial Sequence
  derived and/or modified sequence
atgagcaacgacggccggagccggaaccgggaccggcggtacgacgaagtaccatccgacttaccttaccaggataccactatccgcactcaccccactttgcacgacagcgagcgcgctgtctctgcagacccactgccaccaccacctcttccactccagcctcctttcggacccgatttttattccagtgataccgaagaacctgccattgctccagacttgaagccagtgagacggttcgtgcccgactcctggaagaacttttttcggggaaagaagaaggatccagagtgggataagcccgttagtgatatccgctatatttctgatggcgttgagtgttcacctccagcctctcctgctcggccgaatcaccggtctccgctgaactcatgcaaggatccatacgggggtagcgaagggacattcagtagtcgaaaagaagctgacgccgttttccccagggacccctacggatcattggatcgccacactcagaccgtacgaacctactccgaaaaggtggaagaatataaccttcgttatagctatatgaaaagctgggccggactgctgagaattctgggagtggtggagctgctcctgggggcgggggtgttcgcttgcgtcactgcctacatccataaggattctgaatggtacaatctgtttggctacagtcagccgtacggaatgggaggcgtgggcggcctggggtccatgtatgggggctactactacactggccccaagacaccctttgtgctcgtggtggctgggcttgcctggataacgaccataatcatcttagtattgggaatgagcatgtattacaggactatccttctagattccaactggtggccattgaccgagttcggaatcaatgtcgcccttttcatcttgtatatggctgccgctatcgtttacgtcaacgatacgaataggggaggcctgtgctactatcccctgtttaatacacccgtaaacgcagtgttctgtcgtgtcgaaggcggacaaatcgcagctatgattttcctgtttgtaactatgattgtgtacctgatcagcgcgttggtgtgcttgaaactgtggcgacacgaggccgctcggcgacatcgggagtacatggaacaacaggaaatcaacgagccaagcttaagcagcaaaagaaaaatgtgcgagatggcgacctccggggaccgacaaagggattccgaagtcaattttaaggaactgagaacagccaaaatgaagcctgagctcttaagcgggcatatccctccaccacggccagccaacttctttgtttttctggtggaaatgggctttcaccgggtgagccaggacgatctcgatcttttgacgtcatag

SEQ ID NO: 268451 - DNA, 1677 bp, Artificial Sequence
  derived and/or modified sequence
atgagcaacgacggccggagccggaaccgggaccggcggtacgacgaagtgccctccgatttgccttatcaagataccacaattagaacccacccgactctgcacgattccgaaagagccgtttcagccgaccccctgccccccccccctttgccacttcaacccccctttggccctgacttttactcctctgatactgaggaacctgctattgcccccgacctgaaacctgtgcgccgtttcgtcccagattcctggaaaaattttttccgaggcaaaaagaaggaccccgagtgggataagccagtgtcagacatcagatacatcagcgacggggtggagtgtagtcctccggcatcccccgctcgcccaaaccataggtccccactcaatagctgcaaagatccctacggcggcagtgagggcacatttagtagccgtaaggaggcagacgccgtatttccgcgcgatccctacgggagcctagacaggcacacacagaccgtaaggacatacagtgaaaaggtggaagagtataaccttaggtactcctacatgaagagctgggcgggtctactgagaatcttaggtgtggtcgaactactgttgggcgccggcgtcttcgcatgcgtgactgcctatatccataaggacagcgagtggtataatctattcgggtattcccagccttatggcatggggggggtgggagggctagggtccatgtacggaggttattattacactgggcccaagacccctttcgtgcttgtggtagccggtcttgcatggatcacaaccattataattctggtgctgggcatgagcatgtattatcgaacgatattgctggactctaactggtggcccctcaccgaatttggcatcaacgtggccctcttcattctatacatggcagcggcaattgtatatgttaatgacacaaatcgtggcggtctgtgctactaccctctttttaacactccagttaatgcagtgttctgtagggtagaagggggccagattgccgcgatgatcttcctgttcgtgactatgattgtctacctgatctccgcgcttgtatgtttgaagctctggcgccacgaggcagctcgaaggcatcgcgaatacatggagcagcaggaaatcaatgagccatccctgtcctctaaaaggaaaatgtgtgaaatggccacttccggagacagacagagagatagtgaagtgaacttcaaagaactgaggacagcgaagatgaagccagaactgctctcggggcacatccccccaggccacatccccaagcctatagtgatgcctgactacgtcgcaaagtaccccgtgatacagacagatgacgagagagagcggtacaaggcggtgttccaggaccagtttagcgagtataaagagctcagcgccgaggttcaggcagtcctacggaaatttgatgagctcgacgccgtaatgagtaggctgcctcaccactcagagtctcggcaggagcatgaaaggatcagcagaatccacgaggagtttaaaaagaagaaaaatgaccccacatttttggaaaaaaaagagagatgcgactatttaaaaaacaagcttagccacatcaaacagcgcatccaagagtacgataaggtgatgaattgggatgttcaaggctattcatag

SEQ ID NO: 268452 - DNA, 1551 bp, Artificial Sequence
  derived and/or modified sequence
atgagcaacgacggccggagccggaaccgggaccggcggtacgacgaagttccatctgatctgccttaccaggacaccaccatccgcacacaccctacactgcacgattccgagagagcagtgtccgcagatccactcccccccccccctttaccgttgcaacccccattcggtcccgatttttactcttccgacaccgaggagcccgcaatagctccggacttgaaacccgtgcggcgtttcgtgccagattcttggaagaattttttcagaggcaagaagaaggatcccgagtgggacaagcccgtctccgatatcaggtatatcagcgacggtgtggagtgtagtccaccagctagtccagcccggcccaaccacagaagcccattgaattcctgcaaagatccctacggcgggtccgagggcactttctcctcacgcaaggaagccgacgcagtcttccctcgggacccctatgggtccttggaccgtcacacacagaccgtcagaacgtattcagaaaaggtggaagagtacaatttaaggtatagctacatgaagtcatgggccggtctactgcggatcctcggtgttgtggagttgttgcttggtgcaggagttttcgcttgcgtcactgcctatatacacaaagatagcgaatggtataacctgtttggctacagtcagccgtacgggatgggtggcgtggggggcctggggagcatgtatggcggctattactacactggacctaaaacccccttcgttctggtggtggctggactggcctggataacaaccattatcattcttgtcttgggcatgagcatgtattatcgcactatattgctggatagtaactggtggccattgactgaatttggtattaatgtagctttattcatcttgtacatggccgccgctatagtctacgtcaacgataccaaccgcggggggctgtgctactaccctctgtttaacactccggttaatgcggtgttttgtagggtggaaggaggacagattgcagcaatgatctttctgtttgtgaccatgatcgtctacttgatctccgcgctcgtatgcctgaaactgtggcgccacgaagctgccaggcgccatcgcgagtatatggagcaacaggagatcaatgaaccttcactgtccagtaagcggaagatgtgcgagatggccaccagtggagatagacagagggactccgaagtgaattttaaggagctcaggacggccaaaatgaaaccagaattgttatcagggcacattcccccagggcacatacctaaaccaatcgtgatgcccgattacgtcgcaaagtacccggtgatacagaccgacgacgagagggagagatataaggctgtgtttcaggatcagttttcagaatataaagagctgtccgccgaggttcaggctgtactacggaagtttgatgagctcgacgctgttatgtcacgcctgcctcaccactcagagtcccgccaggagcatgaacgtatcagtaggattcatgaggagtttaagaagaagtag

SEQ ID NO: 268453 - DNA, 1377 bp, Artificial Sequence
  derived and/or modified sequence
atgtccaacgatggcagatctcgcaatagagacaggcggtatgacgaagtgccttccgatctgccttaccaagataccacaatcagaacacaccccacattgcacgatagtgaaagggcggtatctgccgatcctttgccgcctccccctctgcccctccagcccccatttggcccagacttttatagttctgacactgaggagccagctattgctcccgacctgaagcccgtgcgaagatttgtgcctgattcttggaagaatttctttcgcggaaagaagaaagatcccgagtgggacaagcccgtgtctgatattcggtatatcagcgatggagttgagtgtagcccccctgcttctcccgcacgaccgaaccaccgatcaccgctgaactcctgtaaggatccttacgggggaagcgagggaactttctctagccgcaaggaagccgacgcagtctttcccagagacccgtatggaagtctggataggcacacgcaaacggtaagaacatactctgaaaaggtcgaagaatataaccttagatattcctatatgaaatcttgggcagggctcttgcgaatcctcggcgtagtggagttacttcttggggctggcgtctttgcctgtgtcaccgcctacattcacaaggactccgagtggtacaacctgttcggctactcacagccttatgggatgggaggggtggggggactggggagcatgtacggcggatactactacaccgggccaaagacccccttcgtactggttgttgcaggccttgcttggatcacaacaatcattatcctcgttcttgggatgtctatgtactaccggactattcttctcgacagtaactggtggccactgactgagttcggtataaatgttgccctctttattctgtacatggccgctgccatagtctacgtcaatgatacaaacagaggcggtttatgttactacccccttttcaacaccccagtaaatgcggtcttctgccgggttgaggggggacaaatcgccgctatgatattcttattcgtgaccatgattgtctacctgatctcagccctggtgtgtctcaaattgtggaggcatgaagccgcacgcaggcacagggagtacatggaacagcaggaaatcaatgaacctagtctgtcctctaaacggaagatgtgcgagatggccactagcggggacagacagcgggactctgaagttaactttaaggaattgaggacagccaagatgaaacccgagctcttgtctggccatatcccccctcctcgccctgcaaactttttcgtcttcctcgttgagatgggctttcaccgcgtgagccaggacgatttggaccttctgacttcgtag

SEQ ID NO: 268454 - DNA, 1677 bp, Artificial Sequence
  derived and/or modified sequence
atgtctaacgacggacggtctcggaaccgcgaccggagatatgacgaggtgccttcagatctgccttatcaggacaccacaattcgtactcaccctaccctgcatgactctgaacgcgctgtttccgccgacccactccctccacctcccctgccattgcagcccccattcggtccagacttttactcctctgacaccgaagagcccgctattgcacccgatctgaagcccgtgaggagatttgtgccagactcatggaaaaactttttccgcggaaagaaaaaggatcccgaatgggacaaaccagtcagtgatattagatacatctcggacggcgtggaatgttctccgccagctagtccggctaggccgaatcaccgctccccattaaactcatgcaaggacccctatggcggaagcgaaggcactttctccagtaggaaggaagcagacgcagtctttccacgagacccttatgggtccttggatcgccacactcagaccgttaggacgtattctgagaaggtggaggagtataacctgcgctactcttatatgaagtcgtgggctgggctcctgcgtattcttggggttgtggagctgttgctgggagctggggtgtttgcttgtgttacagcctatatccacaaagacagcgaatggtacaatctgttcggctatagtcagccctatgggatggggggagtagggggtttgggcagtatgtacggaggctattactatacagggcctaaaactccatttgtgttagtagtagccggactggcctggattactacaatcataattctggtcctgggtatgtccatgtattacagaacgatcttgctagatagtaattggtggcccttgaccgaattcggcatcaatgtagcactgttcatcttgtatatggccgcagctatagtctatgtgaacgataccaaccgagggggattgtgttattatcccctcttcaacactcccgtcaacgctgtgttttgccgagtggaaggcggacagattgccgcaatgatctttttgtttgtcactatgatcgtatacttgatcagcgcgcttgtgtgcctgaaactgtggcggcatgaggcagctaggcgccacagggaatacatggaacagcaggagatcaacgagccttcgctctcatcaaagaggaaaatgtgcgagatggctacctccggggatcgacagagagactcagaggttaatttcaaggaactgcggaccgcgaaaatgaagccagagctcctttcaggccacatcccgccagggcatatccctaagcctattgttatgcctgactacgtcgcaaagtacccagttattcagaccgacgatgagcgcgagcggtacaaggctgtgttccaagatcagttcagcgaatacaaggaactctcggctgaagtgcaggctgtgttgagaaagttcgatgagctggatgccgtaatgtcccgcctcccacaccacagtgaatccaggcaggagcacgaacgcattagtcgcatccatgaggagttcaagaagaaaaaaaatgatccgacattcctcgaaaagaaagagaggtgcgattatctgaaaaataaactctcgcacataaagcagcgtatccaagaatatgataaggtgatgaactgggacgtgcaagggtatagctag

SEQ ID NO: 268455 - DNA, 1551 bp, Artificial Sequence
  derived and/or modified sequence
atgagtaacgatgggagatcgagaaaccgggataggcgatacgacgaggtgccctctgatctgccctatcaggatacaaccataagaacccatcccacgctccacgactccgagagagcagtctctgcagatcctcttccccctcctcctctgcctctccaaccaccctttgggcctgacttctattcaagcgatacagaggaacccgcaatcgcacccgatcttaagcccgtgagaaggtttgtacccgattcctggaagaatttcttcaggggtaaaaaaaaggaccctgagtgggacaagcccgtgagtgatattagatacatatctgatggggttgagtgcagcccccctgcatctccggcacgccctaatcatcgcagccccttgaattcctgcaaggacccatacgggggttccgaagggacgttttctagccgcaaggaagccgacgctgtctttccacgggacccctacggaagtctcgacagacacacgcagaccgtaagaacctattctgagaaagtcgaagagtataatctccgctattcatacatgaagagctgggctggactgctgcggatactaggcgtggtagagcttctcctgggggcaggggtgttcgcttgcgtgactgcctacattcacaaggactctgaatggtacaacctgtttggctactcacagccctacggaatgggaggagtaggaggcctcggtagcatgtatgggggatattactacactggcccaaagactccctttgttctggtggtcgcgggactggcctggattaccacaataatcatacttgtccttggaatgtcaatgtactaccgcacaattctcctagatagtaactggtggcccctcactgagtttggcattaacgtggccctcttcatcctgtacatggctgcggctattgtgtacgtgaacgacactaatcgcggtggcttgtgttactaccctctcttcaatactccagtgaatgcagtcttttgtcgggtggaaggcggtcaaatagcagccatgattttcctgtttgtcactatgatcgtctatttgataagtgccctggtgtgccttaaattgtggcggcatgaagccgctcgaaggcaccgggagtacatggagcagcaggagatcaatgaaccttccctctcctccaaaaggaagatgtgcgagatggccacatctggcgatcgtcagcgggattcagaagtgaatttcaaggagctcagaaccgccaagatgaagccggagctgctgagtggccacataccacccggtcacattcctaaaccaatagtgatgcccgactacgtggcaaaatacccagtgattcagactgatgacgaaagagaacgatataaagccgtctttcaggatcagttttccgagtacaaagagctgagcgctgaggttcaggctgtgctgcggaaatttgacgaactggacgcagtcatgagtaggttgccacaccattctgaaagcaggcaggagcacgagagaattagtaggatccatgaggaattcaagaaaaagtag

SEQ ID NO: 268456 - DNA, 1377 bp, Artificial Sequence
  derived and/or modified sequence
atgagcaacgacggcagaagcagaaacagagacagaagatacgacgaggtgcccagcgacctgccctaccaggacaccaccatcagaacccaccccaccctgcacgacagcgagagagccgtgagcgccgaccccctgccccccccccccctgcccctgcagccccccttcggccccgacttctacagcagcgacaccgaggagcccgccatcgcccccgacctgaagcccgtgagaagattcgtgcccgacagctggaagaacttcttcagaggcaagaagaaggaccccgagtgggacaagcccgtgagcgacatcagatacatcagcgacggcgtggagtgcagcccccccgccagccccgccagacccaaccacagaagccccctgaacagctgcaaggacccctacggcggcagcgagggcaccttcagcagcagaaaggaggccgacgccgtgttccccagagacccctacggcagcctggacagacacacccagaccgtgagaacctacagcgagaaggtggaggagtacaacctgagatacagctacatgaagagctgggccggcctgctgagaatcctgggcgtggtggagctgctgctgggcgccggcgtgttcgcctgcgtgaccgcctacatccacaaggacagcgagtggtacaacctgttcggctacagccagccctacggcatgggcggcgtgggcggcctgggcagcatgtacggcggctactactacaccggccccaagacccccttcgtgctggtggtggccggcctggcctggatcaccaccatcatcatcctggtgctgggcatgagcatgtactacagaaccatcctgctggacagcaactggtggcccctgaccgagttcggcatcaacgtggccctgttcatcctgtacatggccgccgccatcgtgtacgtgaacgacaccaacagaggcggcctgtgctactaccccctgttcaacacccccgtgaacgccgtgttctgcagagtggagggcggccagatcgccgccatgatcttcctgttcgtgaccatgatcgtgtacctgatcagcgccctggtgtgcctgaagctgtggagacacgaggccgccagaagacacagagagtacatggagcagcaggagatcaacgagcccagcctgagcagcaagagaaagatgtgcgagatggccaccagcggcgacagacagagagacagcgaggtgaacttcaaggagctgagaaccgccaagatgaagcccgagctgctgagcggccacatccccccccccagacccgccaacttcttcgtgttcctggtggagatgggcttccacagagtgagccaggacgacctggacctgctgaccagctag

SEQ ID NO: 268457 - DNA, 1677 bp, Artificial Sequence
  derived and/or modified sequence
atgagcaacgacggcagaagcagaaacagagacagaagatacgacgaggtgcccagcgacctgccctaccaggacaccaccatcagaacccaccccaccctgcacgacagcgagagagccgtgagcgccgaccccctgccccccccccccctgcccctgcagccccccttcggccccgacttctacagcagcgacaccgaggagcccgccatcgcccccgacctgaagcccgtgagaagattcgtgcccgacagctggaagaacttcttcagaggcaagaagaaggaccccgagtgggacaagcccgtgagcgacatcagatacatcagcgacggcgtggagtgcagcccccccgccagccccgccagacccaaccacagaagccccctgaacagctgcaaggacccctacggcggcagcgagggcaccttcagcagcagaaaggaggccgacgccgtgttccccagagacccctacggcagcctggacagacacacccagaccgtgagaacctacagcgagaaggtggaggagtacaacctgagatacagctacatgaagagctgggccggcctgctgagaatcctgggcgtggtggagctgctgctgggcgccggcgtgttcgcctgcgtgaccgcctacatccacaaggacagcgagtggtacaacctgttcggctacagccagccctacggcatgggcggcgtgggcggcctgggcagcatgtacggcggctactactacaccggccccaagacccccttcgtgctggtggtggccggcctggcctggatcaccaccatcatcatcctggtgctgggcatgagcatgtactacagaaccatcctgctggacagcaactggtggcccctgaccgagttcggcatcaacgtggccctgttcatcctgtacatggccgccgccatcgtgtacgtgaacgacaccaacagaggcggcctgtgctactaccccctgttcaacacccccgtgaacgccgtgttctgcagagtggagggcggccagatcgccgccatgatcttcctgttcgtgaccatgatcgtgtacctgatcagcgccctggtgtgcctgaagctgtggagacacgaggccgccagaagacacagagagtacatggagcagcaggagatcaacgagcccagcctgagcagcaagagaaagatgtgcgagatggccaccagcggcgacagacagagagacagcgaggtgaacttcaaggagctgagaaccgccaagatgaagcccgagctgctgagcggccacatcccccccggccacatccccaagcccatcgtgatgcccgactacgtggccaagtaccccgtgatccagaccgacgacgagagagagagatacaaggccgtgttccaggaccagttcagcgagtacaaggagctgagcgccgaggtgcaggccgtgctgagaaagttcgacgagctggacgccgtgatgagcagactgccccaccacagcgagagcagacaggagcacgagagaatcagcagaatccacgaggagttcaagaagaagaagaacgaccccaccttcctggagaagaaggagagatgcgactacctgaagaacaagctgagccacatcaagcagagaatccaggagtacgacaaggtgatgaactgggacgtgcagggctacagctag

SEQ ID NO: 268458 - DNA, 1551 bp, Artificial Sequence
  derived and/or modified sequence
atgagcaacgacggcagaagcagaaacagagacagaagatacgacgaggtgcccagcgacctgccctaccaggacaccaccatcagaacccaccccaccctgcacgacagcgagagagccgtgagcgccgaccccctgccccccccccccctgcccctgcagccccccttcggccccgacttctacagcagcgacaccgaggagcccgccatcgcccccgacctgaagcccgtgagaagattcgtgcccgacagctggaagaacttcttcagaggcaagaagaaggaccccgagtgggacaagcccgtgagcgacatcagatacatcagcgacggcgtggagtgcagcccccccgccagccccgccagacccaaccacagaagccccctgaacagctgcaaggacccctacggcggcagcgagggcaccttcagcagcagaaaggaggccgacgccgtgttccccagagacccctacggcagcctggacagacacacccagaccgtgagaacctacagcgagaaggtggaggagtacaacctgagatacagctacatgaagagctgggccggcctgctgagaatcctgggcgtggtggagctgctgctgggcgccggcgtgttcgcctgcgtgaccgcctacatccacaaggacagcgagtggtacaacctgttcggctacagccagccctacggcatgggcggcgtgggcggcctgggcagcatgtacggcggctactactacaccggccccaagacccccttcgtgctggtggtggccggcctggcctggatcaccaccatcatcatcctggtgctgggcatgagcatgtactacagaaccatcctgctggacagcaactggtggcccctgaccgagttcggcatcaacgtggccctgttcatcctgtacatggccgccgccatcgtgtacgtgaacgacaccaacagaggcggcctgtgctactaccccctgttcaacacccccgtgaacgccgtgttctgcagagtggagggcggccagatcgccgccatgatcttcctgttcgtgaccatgatcgtgtacctgatcagcgccctggtgtgcctgaagctgtggagacacgaggccgccagaagacacagagagtacatggagcagcaggagatcaacgagcccagcctgagcagcaagagaaagatgtgcgagatggccaccagcggcgacagacagagagacagcgaggtgaacttcaaggagctgagaaccgccaagatgaagcccgagctgctgagcggccacatcccccccggccacatccccaagcccatcgtgatgcccgactacgtggccaagtaccccgtgatccagaccgacgacgagagagagagatacaaggccgtgttccaggaccagttcagcgagtacaaggagctgagcgccgaggtgcaggccgtgctgagaaagttcgacgagctggacgccgtgatgagcagactgccccaccacagcgagagcagacaggagcacgagagaatcagcagaatccacgaggagttcaagaagaagtag

SEQ ID NO: 268459 - protein, 890 aa, Artificial Sequence
  derived and/or modified sequence
MEYEWKPDEQGLQQILQLLKESQSPDTTIQRTVQQKLEQLNQYPDFNNYLIFVLTKLKSEDEPTRSLSGLILKNNVKAHFQNFPNGVTDFIKSECLNNIGDSSPLIRATVGILITTIASKGELQNWPDLLPKLCSLLDSEDYNTCEGAFGALQKICEDSAEILDSDVLDRPLNIMIPKFLQFFKHSSPKIRSHAVACVNQFIISRTQALMLHIDSFIENLFALAGDEEPEVRKNVCRALVMLLEVRMDRLLPHMHNIVEYMLQRTQDQDENVALEACEFWLTLAEQPICKDVLVRHLPKLIPVLVNGMKYSDIDIILLKGDVEEDETIPDSEQDIRPRFHRSRTVAQQHDEDGIEEEDDDDDEIDDDDTISDWNLRKCSAAALDVLANVYRDELLPHILPLLKELLFHHEWVVKESGILVLGAIAEGCMQGMIPYLPELIPHLIQCLSDKKALVRSITCWTLSRYAHWVVSQPPDTYLKPLMTELLKRILDSNKRVQEAACSAFATLEEEACTELVPYLAYILDTLVFAFSKYQHKNLLILYDAIGTLADSVGHHLNKPEYIQMLMPPLIQKWNMLKDEDKDLFPLLECLSSVATALQSGFLPYCEPVYQRCVNLVQKTLAQAMLNNAQPDQYEAPDKDFMIVALDLLSGLAEGLGGNIEQLVARSNILTLMYQCMQDKMPEVRQSSFALLGDLTKACFQHVKPCIADFMPILGTNLNPEFISVCNNATWAIGEISIQMGIEMQPYIPMVLHQLVEIINRPNTPKTLLENTAITIGRLGYVCPQEVAPMLQQFIRPWCTSLRNIRDNEEKDSAFRGICTMISVNPSGVIQDFIFFCDAVASWINPKDDLRDMFCKILHGFKNQVGDENWRRFSDQFPLPLKERLAAFYGV

SEQ ID NO: 268460 - DNA, 2673 bp, Artificial Sequence
  derived and/or modified sequence
atggagtacgagtggaagcccgacgagcagggcctgcagcagatcctgcagctgctgaaggagagccagagccccgacaccaccatccagagaaccgtgcagcagaagctggagcagctgaaccagtaccccgacttcaacaactacctgatcttcgtgctgaccaagctgaagagcgaggacgagcccaccagaagcctgagcggcctgatcctgaagaacaacgtgaaggcccacttccagaacttccccaacggcgtgaccgacttcatcaagagcgagtgcctgaacaacatcggcgacagcagccccctgatcagagccaccgtgggcatcctgatcaccaccatcgccagcaagggcgagctgcagaactggcccgacctgctgcccaagctgtgcagcctgctggacagcgaggactacaacacctgcgagggcgccttcggcgccctgcagaagatctgcgaggacagcgccgagatcctggacagcgacgtgctggacagacccctgaacatcatgatccccaagttcctgcagttcttcaagcacagcagccccaagatcagaagccacgccgtggcctgcgtgaaccagttcatcatcagcagaacccaggccctgatgctgcacatcgacagcttcatcgagaacctgttcgccctggccggcgacgaggagcccgaggtgagaaagaacgtgtgcagagccctggtgatgctgctggaggtgagaatggacagactgctgccccacatgcacaacatcgtggagtacatgctgcagagaacccaggaccaggacgagaacgtggccctggaggcctgcgagttctggctgaccctggccgagcagcccatctgcaaggacgtgctggtgagacacctgcccaagctgatccccgtgctggtgaacggcatgaagtacagcgacatcgacatcatcctgctgaagggcgacgtggaggaggacgagaccatccccgacagcgagcaggacatcagacccagattccacagaagcagaaccgtggcccagcagcacgacgaggacggcatcgaggaggaggacgacgacgacgacgagatcgacgacgacgacaccatcagcgactggaacctgagaaagtgcagcgccgccgccctggacgtgctggccaacgtgtacagagacgagctgctgccccacatcctgcccctgctgaaggagctgctgttccaccacgagtgggtggtgaaggagagcggcatcctggtgctgggcgccatcgccgagggctgcatgcagggcatgatcccctacctgcccgagctgatcccccacctgatccagtgcctgagcgacaagaaggccctggtgagaagcatcacctgctggaccctgagcagatacgcccactgggtggtgagccagccccccgacacctacctgaagcccctgatgaccgagctgctgaagagaatcctggacagcaacaagagagtgcaggaggccgcctgcagcgccttcgccaccctggaggaggaggcctgcaccgagctggtgccctacctggcctacatcctggacaccctggtgttcgccttcagcaagtaccagcacaagaacctgctgatcctgtacgacgccatcggcaccctggccgacagcgtgggccaccacctgaacaagcccgagtacatccagatgctgatgccccccctgatccagaagtggaacatgctgaaggacgaggacaaggacctgttccccctgctggagtgcctgagcagcgtggccaccgccctgcagagcggcttcctgccctactgcgagcccgtgtaccagagatgcgtgaacctggtgcagaagaccctggcccaggccatgctgaacaacgcccagcccgaccagtacgaggcccccgacaaggacttcatgatcgtggccctggacctgctgagcggcctggccgagggcctgggcggcaacatcgagcagctggtggccagaagcaacatcctgaccctgatgtaccagtgcatgcaggacaagatgcccgaggtgagacagagcagcttcgccctgctgggcgacctgaccaaggcctgcttccagcacgtgaagccctgcatcgccgacttcatgcccatcctgggcaccaacctgaaccccgagttcatcagcgtgtgcaacaacgccacctgggccatcggcgagatcagcatccagatgggcatcgagatgcagccctacatccccatggtgctgcaccagctggtggagatcatcaacagacccaacacccccaagaccctgctggagaacaccgccatcaccatcggcagactgggctacgtgtgcccccaggaggtggcccccatgctgcagcagttcatcagaccctggtgcaccagcctgagaaacatcagagacaacgaggagaaggacagcgccttcagaggcatctgcaccatgatcagcgtgaaccccagcggcgtgatccaggacttcatcttcttctgcgacgccgtggccagctggatcaaccccaaggacgacctgagagacatgttctgcaagatcctgcacggcttcaagaaccaggtgggcgacgagaactggagaagattcagcgaccagttccccctgcccctgaaggagagactggccgccttctacggcgtgtag

SEQ ID NO: 268461 - DNA, 2673 bp, Artificial Sequence
  derived and/or modified sequence
atggagtacgaatggaaacccgacgagcaggggcttcagcagatactgcagctgctaaaggagtcccagagtccagataccacaatccagaggacagttcagcagaaacttgagcagcttaaccaatatccagacttcaataactacttgatatttgtgctaacaaagctgaagagcgaggatgagccaactcgctccctgtccggacttatcctcaagaacaatgtgaaagctcacttccagaattttcctaacggcgtgacggattttatcaagtccgagtgtttgaacaacataggtgatagttcgcctttgataagggcaactgtgggtatcctgatcaccactatcgcatccaaaggtgagctacagaactggcctgatcttctgcctaaattgtgttccctacttgatagtgaagattacaacacctgtgaaggagcctttggagctcttcaaaagatctgcgaagacagcgcagagatcctcgattccgatgttctcgatagaccactcaatataatgatccctaaattcctgcagtttttcaaacactcctccccaaaaataaggtcacacgcggtcgcatgcgtcaaccagtttattatatctcgcacccaggccctcatgcttcacattgactcttttatcgagaatctgtttgccctcgcgggggatgaggaacctgaggtcaggaagaacgtgtgcagagcgctggtgatgcttctggaagtccggatggataggctcttaccccacatgcacaatatcgtggagtacatgctgcagcgaacacaggaccaagacgaaaacgtcgcccttgaggcgtgtgagttttggcttaccctggctgagcagccaatttgcaaagacgtacttgtaaggcacctgccgaaactgataccagtcctggttaacggaatgaaatatagcgatattgacatcattctgctcaagggggatgttgaggaggacgaaacgatccctgattcggaacaggacatcagacccagattccatagaagccgtactgttgcccaacaacacgatgaggatgggatcgaggaggaagacgacgacgatgacgagatcgatgatgacgacacgatctccgattggaatctacgaaagtgctctgccgctgcactggacgtacttgctaatgtctacagagacgaactgctgccccacattttgccccttctgaaggaattgctgtttcatcacgagtgggtagtcaaggagtctgggatacttgttctcggcgctatcgccgaggggtgtatgcaaggcatgattccttacttgcccgagctgataccccatctgatccagtgtctatctgacaagaaggctctcgtgcggagtatcacttgttggacgttgtcaagatacgcgcactgggtcgtgagccagccacctgatacttaccttaagcctctgatgaccgaactgcttaagcggattctcgatagtaacaaacgggttcaggaggccgcctgttctgcttttgctacccttgaagaggaggcctgtaccgagctggtgccttatttggcctatatcctggatacactggtgttcgcttttagcaaataccagcacaagaacctactcatcttgtacgacgcgatcggaactcttgcggactccgtcggacatcatctcaataagcctgagtacatccaaatgctcatgcctcccttgatccagaagtggaacatgctgaaggatgaggacaaagatctgttccccttgctagagtgcctcagttccgtggccacggccctacagtccggttttttgccctactgcgagcctgtttatcagcgatgtgttaatctggtacagaaaactctcgcacaggcaatgctcaacaacgctcagcccgatcagtatgaagctcccgataaagactttatgatcgtggctctcgacttgctgagtggtttagcggaaggcttaggagggaacatcgagcagctggtcgctcgatcaaacattctgaccctcatgtaccagtgcatgcaggacaaaatgccggaggtgagacagagctcatttgccctgctgggagacctcacaaaggcttgctttcaacatgtaaagccttgcattgctgatttcatgcccatcttgggcacaaacctgaatccagagtttatctccgtgtgcaataatgcgacgtgggccatcggtgaaatcagtattcagatgggaatcgagatgcagccttacattcccatggtgcttcaccagctagtggagattataaaccgccctaacacgcccaaaacgctcctggagaacactgccatcacgattggaaggctcgggtatgtgtgtccgcaggaggtggcaccaatgctccagcagtttattaggccatggtgtacctcgttaagaaacattcgggacaacgaagaaaaggacagtgcctttaggggcatttgcactatgatcagtgtcaatccctctggggtcattcaggattttatcttcttctgcgatgcagtggcctcctggatcaatcccaaggacgatttacgcgacatgttttgtaagatcctccacgggttcaaaaaccaggtaggggatgaaaattggcggaggttctcagaccagtttcctctgcccctcaaggagaggctggccgcattttatggagtctag

SEQ ID NO: 268462 - DNA, 2673 bp, Artificial Sequence
  derived and/or modified sequence
atggagtatgagtggaagccagatgagcagggcctgcagcagatcctgcagctgctgaaggagagccagagcccagacaccaccatccagaggacagtgcagcagaagctggagcagctgaaccagtacccagacttcaacaactacctgatctttgtgctgaccaagctgaagtcagaagatgagcccaccaggagcctgagcggcctcatcctgaagaacaacgtgaaggcccacttccagaacttccccaatggagtgacagacttcatcaagtctgagtgcctgaacaacattggagacagcagccccctcatccgggccaccgtgggcatcctgatcaccaccatcgccagcaagggggagctgcagaactggccagacctgctgcccaagctgtgcagcctgctggacagcgaggactacaacacctgtgagggcgcctttggagccctgcagaagatctgtgaagattctgctgagatcctggacagtgatgtgctggaccggcccctgaacatcatgatccccaagttcctgcagttcttcaagcacagcagccccaagatccgcagccatgctgtggcctgtgtgaaccagttcatcatcagcaggacccaggccctgatgctgcacatcgacagcttcatcgagaacctgtttgccctggccggagatgaggagcctgaggtgaggaagaatgtgtgccgggccctggtgatgctgctggaggtgaggatggaccggctgctgccccacatgcacaacatcgtggagtacatgctgcagaggacccaggaccaggatgaaaatgtggccctggaggcctgtgagttctggctgaccctggccgagcagcccatctgcaaggatgtgctggtgcgccacctgcccaagctgatccctgtgctggtgaatggcatgaagtacagcgacatcgacatcatcctgctgaagggagatgtggaggaggatgagaccatcccagattctgagcaggacatccggccccgcttccacaggagcaggacagtggcccagcagcatgatgaagatggcatcgaggaggaggatgatgatgatgatgaaattgatgatgatgacaccatcagtgactggaacctgaggaaatgttctgctgctgccctggatgtgctggccaacgtgtacagagatgagctgctgccccacatcctgcccctgctgaaggagctgctcttccaccacgagtgggtggtgaaggagagcggcatcctggtgctgggcgccatcgccgagggctgcatgcagggcatgatcccctacctgcctgagctgatcccccacctgatccagtgcctgagtgacaagaaggccctggtgcgcagcatcacctgctggaccctgagccgctatgcccactgggtggtgtcccagcccccagacacctacctgaagcccctgatgacagagctgctgaagaggatcctggacagcaacaagagggtgcaggaggccgcctgcagcgcctttgccaccctggaggaggaggcctgcacagagctggtgccctacctggcctacatcctggacaccctggtgtttgccttcagcaagtaccagcacaagaacctgctgatcctgtatgatgccatcggcaccctggccgacagcgtgggccaccacctgaacaagccagagtacatccagatgctgatgcctcctctcatccagaagtggaacatgctgaaggatgaggacaaggacctcttccccctgctggagtgcctgagctctgtggccacagccctgcagagcggcttcctgccctactgtgagcctgtgtaccagagatgtgtgaacctggtgcagaagaccctggcccaggccatgctgaacaatgcccagcctgaccagtatgaggccccagacaaggacttcatgattgtggccctggacctgctgagcggcctggccgagggcctgggcggcaacatcgagcagctggtggcccggagcaacatcctgaccctgatgtaccagtgcatgcaggacaagatgcctgaggtgcggcagagcagctttgccctgctgggggacctgaccaaggcctgcttccagcacgtgaagccctgcatcgctgacttcatgcccatcctgggcaccaacctgaaccctgagttcatctctgtgtgcaacaatgccacctgggccatcggggagatcagcatccagatgggcatcgagatgcagccctacatccccatggtgctgcaccagctggtggagatcatcaaccggcccaacacccccaagaccctgctggagaacacagccatcaccatcggccgcctgggctacgtgtgcccccaggaggtggcccccatgctgcagcagttcatccggccctggtgcaccagcctgaggaacatccgggacaatgaggagaaggacagcgccttccggggcatctgcaccatgatctctgtgaaccccagcggggtcatccaggacttcatcttcttctgtgatgctgtggcctcctggatcaaccccaaggatgacctgcgggacatgttctgcaagatcctgcacggcttcaagaaccaggtgggagatgagaactggaggcgcttcagtgaccagttccccctgcccctgaaggagcggctggccgccttctacggcgtgtag

SEQ ID NO: 268463 - DNA, 2673 bp, Artificial Sequence
  derived and/or modified sequence
atggagtacgagtggaagcccgacgagcagggcctgcagcagatcttacaactcctgaaagagagccagtctccggacacaaccatccagcgaacagttcagcagaaacttgagcagctgaaccagtatccagacttcaacaactacctgatttttgtgctcaccaagttaaaaagtgaggatgaacccacccggagcctgtcagggctgatcctaaaaaataacgtgaaagcacacttccagaatttccccaacggcgtgactgatttcatcaaaagcgagtgtctgaacaatatcggggactcctccccgctgattagggccactgtgggtatcctcattaccaccatagctagcaaaggtgaactgcagaactggcctgatctcttaccgaaattatgctcattgctggattccgaagattacaatacctgtgaaggggcattcggagccctccagaagatttgtgaagactcagctgagattctcgattccgacgtccttgacagaccccttaacattatgatccccaaattcttacagttcttcaaacatagttcgcccaagatccggagccacgcggtggcctgtgtgaatcagtttataatatcaaggacgcaggccctgatgctgcatatcgacagctttatcgagaacctgtttgccctcgctggcgatgaggagccagaggtgcggaaaaatgtctgtcgggcactcgtcatgctcctggaagtgcgcatggaccgtttgctcccacacatgcacaacatcgtggagtacatgctgcagcgaactcaggatcaagatgagaatgtggccttggaggcttgcgagttttggctgacactggctgagcaacccatctgcaaggacgttctcgtgcggcatcttcccaagctgattccagttctcgtgaatggcatgaagtactcagatatcgatataatccttctgaaaggtgacgtggaggaggacgagaccatccctgacagtgaacaagatattcgaccgaggtttcataggagcaggactgtagcccaacagcacgatgaggatggaatcgaagaagaggatgacgatgatgatgaaatcgatgacgatgacacaatttcagattggaatctgaggaagtgcagtgctgcggcgctcgatgtgcttgccaatgtttaccgagacgaactgcttccacacattctgccacttttgaaagaactgcttttccaccacgagtgggtggttaaagagagcggaattctggtgctgggggcaattgccgaaggatgcatgcagggtatgattccatacctgcccgagctcattccccatctcatccagtgtctctccgacaaaaaggcccttgtgcggagcatcacttgttggaccctgtcccgatatgcccactgggtggtgagccagccccctgatacgtacctcaagccgctgatgaccgagttgctgaagaggatactggacagcaataaacgggtacaggaggccgcttgtagcgccttcgcaaccctggaggaggaggcctgcacagaactcgtgccatacttggcatatatcctcgataccctggtgttcgcattttccaaataccagcacaaaaacttgttgattttatacgacgccatagggacgctggccgactcggtgggtcaccacctcaataagcccgaatatattcaaatgctcatgccaccgctgatccaaaaatggaatatgctgaaggacgaggacaaggacttattccctctcctcgagtgcctctcatcagtagccacagctctgcagagcggtttcttgccgtactgtgagcctgtctaccagaggtgtgttaacttagtacaaaagactttggcccaagcaatgctcaacaacgcccagcccgatcagtacgaggcccctgacaaggactttatgattgtggccctggaccttctgagtggactagctgaaggtcttgggggcaatatagagcagcttgtggctcggtccaacatccttacattgatgtaccagtgcatgcaggataagatgcccgaagtacggcagagcagctttgccttactgggagacctcacaaaagcctgttttcaacatgtgaagccctgtatagcggattttatgcccattctggggacgaatctgaaccctgagtttataagcgtctgcaataatgccacctgggcaatcggtgagattagtatccagatgggcatcgagatgcagccctatattccaatggtattgcaccagctggttgagataattaaccggcctaacaccccgaagactctgctggaaaacactgcaattactatcggtcgcttgggctacgtgtgccctcaagaggtggcccctatgctgcagcagtttatcaggccctggtgcacctccctccgaaacattagagataacgaagaaaaagactctgcatttcggggtatctgcactatgatcagtgtgaatcccagcggagtgatccaggatttcattttcttctgtgatgctgttgccagctggattaatccaaaggacgatctgagggacatgttttgtaagattttgcatggatttaagaaccaggtgggcgacgaaaactggagaagattctcagatcagtttcccctacctctgaaagagcgcctggcggcattttatggtgtctag

SEQ ID NO: 268464 - DNA, 2673 bp, Artificial Sequence
  derived and/or modified sequence
atggagtatgaatggaaacctgacgagcagggattgcagcagattctgcagctcctgaaggaatcccagagcccagatacaacaattcagcgcaccgtgcagcagaaactggaacagctcaaccagtatccggatttcaacaattacctcatattcgttctgacaaagctaaagtcggaggatgagccgacgcgaagcctgtctggccttattctcaagaacaatgttaaagcccacttccagaacttccccaacggtgtgacagacttcattaagtcagaatgcctgaataacataggtgatagctcaccattgattagggctaccgtggggatccttatcaccaccattgccagcaagggtgagttgcaaaactggccagacttgctcccaaaattgtgttccctgcttgatagcgaggactacaatacttgtgagggcgctttcggagcgttacagaagatttgcgaagatagcgccgaaatcctagatagcgacgttctcgaccgaccgctgaacatcatgatacctaagtttttacagttcttcaaacacagcagccccaaaattagatcacatgccgtggcttgtgtcaatcaatttattatatctcgaacccaggccctgatgctccatatcgattcctttatagagaatctattcgccttggccggagatgaggaacctgaagtccggaagaatgtctgtcgggcactggtcatgctgctagaggtgcgtatggatcggctgctgccccacatgcacaatattgtcgagtacatgctgcagaggactcaggatcaggacgagaacgtcgcgctggaggcttgcgaattttggctgacactagccgagcaaccaatctgtaaagatgtcctggtacgccacctgcctaagctaattcctgttctggttaacggaatgaagtacagtgatattgacattatcctgttgaagggtgatgtggaggaggatgagaccatccccgactccgagcaggacattcgcccaagatttcaccgtagccggacggtggcccaacagcacgacgaggacggcatagaggaggaagacgacgacgatgacgaaatcgatgacgatgataccatatctgactggaatctgcggaaatgttccgccgctgccctggatgtattggccaatgtgtaccgggacgaattgctaccccacatcctccctttgttgaaagaattgctgtttcaccacgagtgggtagtaaaagaatcaggcattctcgtgctcggggcaatagctgagggttgcatgcaggggatgatcccatacctcccagaactgatcccacatcttattcaatgtttgtccgataaaaaagcactggtacgaagcattacctgctggacactctctcgctacgctcactgggtagtgtcacaaccacccgacacatacttaaagccgcttatgacagaactcctcaagcgcattctggattcaaacaaacgagtccaggaagcggcatgttctgcatttgcgaccttggaggaagaagcctgcacagagctggtgccttatcttgcatacattctagatacgttggtctttgccttctccaaataccagcacaagaacctgctcattctgtacgacgcaataggtacactagctgactcagtggggcaccatctgaacaaacccgagtacatccagatgcttatgcctccgttgattcagaagtggaatatgctgaaggacgaggataaagatttgtttcctctcctggagtgtctgagttccgtggcaacggccttgcagagcggcttcttaccgtactgcgaacctgtgtatcaacggtgcgtcaacttggttcaaaaaactctcgctcaagcaatgctgaacaatgcacagccagaccagtacgaggcgcctgataaagatttcatgatagttgcactcgatctcttgtcaggacttgctgagggtctgggcggaaatatcgaacagctagtagcccgatcaaatattctcaccctaatgtatcagtgcatgcaagacaagatgcctgaggtacggcagagttcgtttgcactcttgggcgatctcaccaaagcctgttttcaacatgtgaaaccttgcattgccgacttcatgcctattctgggtactaatcttaatccggagtttatcagtgtttgcaataatgctacctgggctatcggtgagatcagcattcagatggggatcgagatgcagccctacattccaatggtcctgcaccagctggtcgagattataaatcggcctaataccccgaagaccttgctggaaaacactgcaatcactataggtaggctgggatatgtgtgtccccaagaggtcgccccaatgctccaacagttcattcgaccctggtgcacgtcattgcgcaacatcagagataatgaagaaaaagacagcgcctttcgcggaatctgtacgatgatttctgtgaaccctagtggcgtcatccaggactttatctttttttgcgatgccgtagcctcctggataaaccctaaggacgatctgagggacatgttctgtaaaatcctacatggattcaaaaaccaggtcggcgatgaaaactggcgtcgcttttctgatcagtttcctttgccccttaaagagagactggccgcattctatggagtatag

SEQ ID NO: 268465 - protein, 128 aa, Artificial Sequence
  derived and/or modified sequence
MEYEWKPDEQGLQQILQLLKESQSPDTTIQRTVQQKLEQLNQYPDFNNYLIFVLTKLKSEDEPTRSLSGLILKNNVKAHFQNFPNGVTDFIKSECLNNIGDSSPLIRATVGLTLLHVSISLSSVGLKL

SEQ ID NO: 268466 - DNA, 132 bp, Artificial Sequence
  derived and/or modified sequence
atgacccacgataaatcctggcgtcgctgcagtatatctggtagcacgaaatgcaggtgtggtagcagaatcgccggacctaatgctctgggctctggcggatctcgcagttcttcctcctcgagtagatag

SEQ ID NO: 268467 - DNA, 387 bp, Artificial Sequence
  derived and/or modified sequence
atggagtacgagtggaagcccgacgagcagggcctgcagcagatcctgcagctgctgaaggagagccagagccccgacaccaccatccagagaaccgtgcagcagaagctggagcagctgaaccagtaccccgacttcaacaactacctgatcttcgtgctgaccaagctgaagagcgaggacgagcccaccagaagcctgagcggcctgatcctgaagaacaacgtgaaggcccacttccagaacttccccaacggcgtgaccgacttcatcaagagcgagtgcctgaacaacatcggcgacagcagccccctgatcagagccaccgtgggcctgaccctgctgcacgtgagcatcagcctgagcagcgtgggcctgaagctgtag

SEQ ID NO: 268468 - DNA, 387 bp, Artificial Sequence
  derived and/or modified sequence
atggagtatgagtggaagccagacgaacagggtctgcagcagattctccagctgctcaaggagtcgcagtctcctgacaccactattcagaggaccgtccaacagaagctggaacagctgaaccagtatcccgattttaataattacctgattttcgtgctgacaaagctgaagagcgaggatgaacctaccagatccctttctggcctgatccttaagaacaatgtcaaggcccacttccagaactttcctaatggggtgacagacttcataaagtctgaatgtctgaataatattggagatagcagtcctctgatcagagccactgttgggctgacccttttacatgtctcaataagtctgtccagtgtgggccttaagctgtag

SEQ ID NO: 268469 - DNA, 387 bp, Artificial Sequence
  derived and/or modified sequence
atggagtatgagtggaagccagatgagcagggcctgcagcagatcctgcagctgctgaaggagagccagagcccagacaccaccatccagaggacagtgcagcagaagctggagcagctgaaccagtacccagacttcaacaactacctgatctttgtgctgaccaagctgaagtcagaagatgagcccaccaggagcctgagcggcctcatcctgaagaacaacgtgaaggcccacttccagaacttccccaatggagtgacagacttcatcaagtctgagtgcctgaacaacattggagacagcagccccctcatccgggccaccgtgggcctgaccctgctgcacgtgtccatcagcctgagctctgtgggcctgaagctgtag

SEQ ID NO: 268470 - DNA, 387 bp, Artificial Sequence
  derived and/or modified sequence
atggagtacgagtggaagcccgacgagcagggcctgcagcagatccttcagctgctgaaagaaagccagagcccagataccaccatccagagaacagtgcagcaaaaactggagcagctaaaccaatatccagacttcaacaactatctaatcttcgtcttgacaaagctaaagagtgaggatgagcccacccgctctctgtctgggctcatattgaagaataatgttaaagctcactttcagaattttccaaatggggtgacagattttataaagtcagagtgcttgaataacattggcgatagctcccctctcatcagggccaccgtggggttaactctgttgcatgtcagcattagtctctcttccgttggtctgaaactgtag

SEQ ID NO: 268471 - DNA, 387 bp, Artificial Sequence
  derived and/or modified sequence
atggagtatgagtggaagcctgacgaacagggtcttcagcagatcctacaattgctgaaggaatctcagtctcccgacaccactatccagaggacagtgcagcagaaactggagcaactcaaccagtacccggacttcaataactacctgatctttgttctgactaaactcaagtcagaggacgagcccaccagatctctgtccggtctgatcctgaagaacaatgtcaaggcacactttcagaactttcccaatggcgtgaccgattttatcaagtccgaatgcttaaataatatcggcgatagttctccccttattagggcaacagtgggcctcactctattgcacgtgagtatctctctgtcatctgtcggcttaaaactctag

SEQ ID NO: 268472 - DNA, 863 bp, Artificial Sequence
  derived and/or modified sequence
cagattctctttgttccgcagccatttcaggccccggacaggaggcagtgccgcttcggccgaaggcccgagcgcccgaggcgtctgggatggtgtgggaccggcaaaccaagatggagtatgagtggaaacctgacgagcaagggcttcagcaaatcctgcagctgttgaaggagtcccagtccccagacaccaccatccagagaaccgtgcaacaaaaactggaacaacttaatcagtatccagactttaacaactacttgatttttgttcttacaaaattaaaatctgaagatgaacccacaagatcattgagtggtcttatcttgaagaataatgtgaaagcacactttcagaacttcccaaatggtgtaacagactttattaaaagtgaatgtttaaataatattggtgactcctctcctctgattagagccactgttggtctcacgctgttgcatgtgtcaatcagtttatcatcagtaggactcaagctctaatgttgcacattgattcttttattgagaatctctttgcattagctggtgatgaagaaccagaggtacggaaaaatgtgtgccgagcacttgtgatgttgctcgaagttcgaatggatcgcctgcttcctcacatgcataatatagttgagtacatgctacagaggactcaagatcaagatgaaaatgtggctttagaagcctgtgaattttggctaactttagctgaacagccaatatgcaaagatgtactcgtaaggcatcttcctaagttgattcctgtgttagtgaatggcatgaagtactcagacatagatattatcctacttaagggtgatgttgaagaagacgaaacgattcctgata

SEQ ID NO: 268473 - DNA, 586 bp, Artificial Sequence
  derived and/or modified sequence
gcacagagttgggagtgactccagagcctccagcgagatgctgctgattctgctgtcagtggccctgctggccctgagctcagctgagagttcaagtgaagatgtcagccaggaagaatctctcttcctaatatcaggaaagccagaaggacgacgcccacaaggaggaaaccagccccaacgtcccccacctcctccaggaaagccacaaggaccacccccacaaggaggaaaccagtcccaaggtcccccacctcctccaggaaagccagaaggacgacccccacaaggaggcaaccagtcccaaggtcccccacctcatccaggaaagccagaaagaccacccccacaaggaggaaaccagtcccaaggaaagccacaaggaccaccccaacaagaaggcaacaagcctcaaggtcccccacctcctggaaagccacaaggcccacccccagcaggaggcaatccccagcagcctcaggcacctcctgctggaaagccccaggggccacctccacctcctcaagggggcaggccacccagacctgcccagggacaacagcctccccagtaatctaggattcaa

SEQ ID NO: 268474 - protein, 525 aa, Artificial Sequence
  derived and/or modified sequence
MWAVLRLALRPCARASPAGPRAYHGDSVASLGTQPDLGSALYQENYKQMKALVNQLHERVEHIKLGGGEKARALHISRGKLLPRERIDNLIDPGSPFLELSQFAGYQLYDNEEVPGGGIITGIGRVSGVECMIIANDATVKGGAYYPVTVKKQLRAQEIAMQNRLPCIYLVDSGGAYLPRQADVFPDRDHFGRTFYNQAIMSSKNIAQVKAATGEEVSAEDLGGADLHCRKSGVSDHWALDDHHALHLTRKVVRNLNYQKKLDVTIEPSEEPLFPADELYGIVGANLKRSFDVREVIARIVDGSRFTEFKAFYGDTLVTGFARIFGYPVGIVGNNGVLFSESAKKGTHFVQLCCQRNIPLLFLQNITGFMVGREYEAEGIAKDGAKMVAAVACAQVPKITLIIGGSYGAGNYGMCGRAYSPRFLYIWPNARISVMGGEQAANVLATITKDQRAREGKQFSSADEAALKEPIIKKFEEEGNPYYSSARVWDDGIIDPADTRLVLGLSFSAALNAPIEKTDFGIFRM

SEQ ID NO: 268475 - DNA, 1578 bp, Artificial Sequence
  derived and/or modified sequence
atgtgggccgtgttgcgtctggcattgcgcccatgcgcgcgtgcaagcccagccggtcctcgagcctaccatggcgattctgtcgcatctttgggaacgcaaccagatctgggctcagcgttgtaccaggaaaactacaagcagatgaaggctctggtcaaccaactgcacgagcgggtagaacatattaaattggggggaggggaaaaggcccgggcgctccacatcagtcggggaaaactgctccccagagaaaggatcgataatctgatagatcccggcagcccattcctcgagctgagtcagtttgcaggatatcagttatacgataacgaggaagtgcccggcggcggcattatcactggcatcggcagggtgagcggggtggagtgcatgatcattgccaacgacgctacagtgaagggtggggcctactatccagtaacagtaaaaaagcagttgcgcgctcaggagattgctatgcagaataggctaccttgtatttatctcgtagattcagggggggcctacttgcctcggcaagcagatgtatttccagacagagatcacttcgggcgaacattttacaatcaggctatcatgagcagtaaaaacatcgctcaggttaaagccgcgaccggggaggaggtgtccgcagaggacctgggtggggccgatctccattgccgaaagagcggggtgagcgaccactgggctcttgatgaccatcatgccctgcacctgacacggaaagtagtaagaaatttaaactatcagaagaaattagacgtgacaatcgagcctagcgaggaaccactctttccagccgacgagctgtatgggattgtgggggccaatctcaagcggagctttgacgtccgcgaagtgatcgcccgaatcgtggacggatcccgatttacagagttcaaggctttttacggcgacacactcgtgacagggttcgccagaattttcggctaccccgtgggtattgttggcaacaacggcgtcctgttcagtgagtctgccaaaaaggggactcacttcgtgcaactttgctgtcaaagaaatatccccctgctgtttctgcaaaacataacgggtttcatggtagggagagaatacgaggcagaaggcatcgccaaggatggagcaaaaatggtggcagccgtggcttgcgctcaagtgccgaaaatcacattgatcatcgggggttcctacggagctggaaattacggtatgtgcggccgggcgtattctccgcgttttctttacatctggcccaatgctagaatatcggtgatgggcggggagcaggcagcaaacgtactggcaaccatcaccaaagaccagagagctagggaggggaagcagttttcttctgctgatgaagcagcccttaaagaaccaattatcaaaaagttcgaggaagaaggcaacccttactatagctccgccagggtatgggatgacgggataatagaccccgcagatactcggctggtcctcggcttgtcgttttcagccgctcttaatgctcccattgaaaagaccgatttcggcatctttcgaatgtag

SEQ ID NO: 268476 - DNA, 1578 bp, Artificial Sequence
  derived and/or modified sequence
atgtgggccgtgctgcggctggccctgcggccctgtgcccgggccagccctgctggcccccgggcctaccacggggacagcgtggccagcctgggcacccagcctgacctgggcagcgccctgtaccaggagaactacaagcagatgaaggccctggtgaaccagctgcacgagcgggtggagcacatcaagctgggcggcggggagaaggcccgggccctgcacatcagccggggcaagctgctgccccgggagagaattgacaacctgattgatcctggcagccccttcctggagctgagccagtttgctggctaccagctgtatgacaatgaggaggtgcctgggggcggcatcatcactggaattggccgggtgtctggagtggagtgcatgatcatcgccaatgatgccaccgtgaagggcggggcctactaccctgtgacagtgaagaagcagctgcgggcccaggagatcgccatgcagaaccggctgccctgcatctacctggtggacagcggcggggcctacctgccccggcaggctgatgtgtttcctgaccgggaccactttggaagaaccttctacaaccaggccatcatgagcagcaagaacatcgcccaggtgaaggccgccactggagaggaggtgtctgctgaggacctgggcggcgctgacctgcactgcaggaagagcggcgtgtctgaccactgggccctggatgaccaccacgccctgcacctgaccaggaaggtggtgaggaacctgaactaccagaagaagctggatgtgaccatcgagcccagcgaggagcccctcttcccagcagatgagctgtatggcatcgtgggcgccaacctgaagaggagctttgatgtgcgggaggtgattgcccgcatcgtggatggcagccgcttcacagagttcaaggccttctatggagacaccctggtgactggatttgcccgcatcttcggctaccctgtgggcatcgtgggcaacaatggagtgctcttcagcgagagcgccaagaagggcacccactttgtgcagctgtgctgccagaggaacatccccctgctcttcctgcagaacatcaccggcttcatggtgggccgggagtatgaagctgagggcatcgccaaggatggagccaagatggtggccgctgtggcctgtgcccaggtgcccaagatcaccctcatcattggaggcagctatggagctggcaactacggcatgtgtggccgggcctacagcccccgcttcctgtacatctggcccaatgcccgcatctctgtgatgggcggggagcaggccgccaacgtgctggccaccatcaccaaggaccagagggcccgggagggcaagcagttcagcagcgcagatgaagctgccctgaaggagcccatcatcaagaagtttgaggaggagggcaacccctactacagcagcgcccgggtgtgggatgatggcatcatcgaccctgctgacacccggctggtgctgggcctgtccttctctgctgccctgaatgcccccatcgagaagacagactttggcatcttcaggatgtag

SEQ ID NO: 268477 - DNA, 1988 bp, Artificial Sequence
  derived and/or modified sequence
ggggaaagcaccggctccaggccagcgtgggccgctctctcgctcggtgcccgccgccatgtgggccgtcctgaggttagccctgcggccgtgtgcccgcgcctctcccgccgggccgcgcgcctatcacggggactcggtggcctcgctgggcacccagccggacttgggctctgccctctaccaggagaactacaagcagatgaaagcactagtaaatcagctccatgaacgagtggagcatataaaactaggaggtggtgagaaagcccgagcacttcacatatcaagaggaaaactattgcccagagaaagaattgacaatctcatagacccagggtctccatttctggaattatcccagtttgcaggttaccagttatatgacaatgaggaggtgccaggaggtggcattattacaggcattggaagagtatcaggagtagaatgcatgattattgccaatgatgccaccgtcaaaggaggtgcctactacccagtgactgtgaaaaaacaattacgggcccaagaaattgccatgcaaaacaggctcccctgcatctacttagttgattcgggaggagcatacttacctcgacaagcagatgtgtttccagatcgagaccactttggccgtacattctataatcaggcaattatgtcttctaaaaatattgcacaggttaaagcggcaactggggaagaagtatctgctgaggatcttggaggtgctgatcttcattgcagaaagtctggagtaagtgaccactgggctttggatgatcatcatgcccttcacttaactaggaaggttgtgaggaatctaaattatcagaagaaattggatgtcaccattgaaccttctgaagagcctttatttcctgctgatgaattgtatggaatagttggtgctaaccttaagaggagctttgatgtccgagaggtcattgctagaatcgtggatggaagcagattcactgagttcaaagccttttatggagacacattagttacaggatttgctcgaatatttgggtacccagtaggtatcgttggaaacaacggagttctcttttctgaatctgcaaaaaagggtactcactttgtccagttatgctgccaaagaaatattcctctgctgttccttcaaaacattactggatttatggttggtagagagtatgaagctgaaggaattgccaaggatggtgccaagatggtggccgctgtggcctgtgcccaagtgcctaagataaccctcatcattgggggctcctatggagccggaaactatgggatgtgtggcagagcatatagcccaagatttctctacatttggccaaatgctcgtatctcagtgatgggaggagagcaggcagccaatgtgttggccacgataacaaaggaccaaagagcccgggaaggaaagcagttctccagtgctgatgaagcggctttaaaagagcccatcattaagaagtttgaagaggaaggaaacccttactattccagcgcaagggtatgggatgatgggatcattgatccagcagacaccagactggtcttgggtctcagttttagtgcagccctcaacgcaccaatagagaagactgacttcggtatcttcaggatgtaactggaataaaggatgttttctgttggacatgtactgaaaattaacacatgtagtagccttaaaattttagacttctcgaacatgaggctgttacagtaatttttttaacactgtgcattgtacttttctaccttaaaaaaatcagtgaggatatttatttaatgaacatcaattccttttaaattttcttagagaaatttctctgtggctcagttttaccacccataaagcggagacagtaatttacggttatcctttctgacccacaaagtatgaaaagttctgtaatctgtaaactcagttctgtaatctgtattattgagatgattaatataaagttgtattttcactg

SEQ ID NO: 268478 - DNA, 1578 bp, Artificial Sequence
  derived and/or modified sequence
atgtgggccgtgctgcggctggccctgcggccctgcgcccgggcctcaccagccggccctagagcttaccatggtgattccgtcgccagtcttggcacgcaaccagaccttggttctgcactgtatcaggagaactacaaacaaatgaaagctctcgtgaatcaactgcatgagcgggttgaacacatcaaattgggcggaggggagaaggctagagctctgcacatcagtaggggcaaattgctgcccagggaacgcattgacaacttaattgaccctgggagcccattcttggaattgtctcagtttgccgggtatcagctgtatgacaacgaagaagtccctggtggcggaatcattacggggatcgggcgtgtatcgggcgtcgaatgcatgattatcgcaaacgacgccaccgtgaaaggcggcgcatattaccctgttaccgtaaaaaaacaattgcgagcccaagaaatagccatgcaaaaccgtttgccctgtatttatctcgtcgactcaggtggtgcatacctgcctaggcaggctgatgtgttccctgatagggatcactttggtagaaccttctataaccaggcgatcatgagctccaagaacatagctcaggtaaaagccgcgacaggcgaggaagtaagtgcggaggatctgggcggcgctgacttgcactgtcgcaagtccggggtgagtgaccactgggccctggacgaccaccacgctctacacctcacaaggaaggtggtgaggaacctgaactaccagaaaaagctcgacgtgaccattgagccatctgaggaaccactcttcccagctgacgaactgtatggaattgtgggcgccaacctgaagaggtcatttgacgtcagggaagtgattgccaggattgtggacgggtcaaggttcacagagttcaaagcgttctatggcgataccctcgtgactgggttcgctcgcatctttggctacccagttggcattgtcggtaacaacggcgttctgtttagcgaatcagctaagaagggcacgcacttcgtacagctctgctgtcagcgtaacatcccactactgtttctgcaaaatattaccggcttcatggtcggtagggagtacgaggccgaaggcatagccaaggatggggccaagatggtagccgcggtggcttgtgctcaggtccccaaaataacgctcattatcggcggaagctacggcgcaggaaattacgggatgtgtggtcgggcttatagcccacgctttctctacatctggcctaacgcccggatcagcgttatggggggggaacaggctgccaacgtgctggcaactatcaccaaggaccaacgggcacgagaaggcaagcagtttagcagcgcggacgaggcagctctgaaagagccaatcatcaagaagttcgaggaggagggtaatccctattactccagtgcaagggtgtgggacgatgggatcatcgatcctgccgatacacggctggtgctgggcctgagtttctctgccgccttgaacgccccaattgagaagacagacttcggaatttttcgcatgtag

SEQ ID NO: 268479 - DNA, 1578 bp, Artificial Sequence
  derived and/or modified sequence
atgtgggcagtcctgcggctcgcgctgcgtccatgtgccagagcatccccagcaggacccagagcctaccacggagacagtgtggcgtctctagggacccagccagatctaggatccgccttgtaccaagaaaattacaagcagatgaaggcattagtaaaccagctccatgaaagagtggagcatatcaagttgggaggtggggagaaggcccgtgccttgcatatttcaaggggcaagctgctgccgagggagcgcatcgataaccttatcgacccaggctccccatttcttgagctgagccaattcgcagggtaccagctgtacgacaacgaggaagtgcccggaggtgggataattaccggcattgggcgagtctcaggtgtcgagtgtatgatcatcgctaatgatgcgacggtgaaaggcggagcatactaccctgtaactgtgaagaaacagctacgggcacaggagattgccatgcagaaccgactgccctgtatttatctggtagattcaggcggagcatatctgcctagacaagccgacgtttttccggatagagaccacttcgggcgaaccttctacaatcaagccattatgagttctaagaatatagctcaggtgaaggccgctactggcgaggaagtgtcagccgaagacctcgggggtgctgatctacattgtcggaagtccggggtgagcgatcattgggccctggatgaccatcatgcccttcatctgacacgaaaggtggtccggaacctgaactatcaaaaaaaacttgatgtcacgattgagccgagcgaggagccgctctttccggctgacgaactctatggtatcgtgggcgctaatttgaaacggagcttcgatgtgcgtgaagtgattgctagaatcgttgatggcagcaggtttacagaatttaaggccttctacggcgatactctcgtcacagggtttgctaggattttcggatatcccgtgggaatcgtcggaaacaacggtgtactgttctccgagtcagcaaaaaaaggaacccatttcgtccagctctgctgtcaaagaaacatccctcttctgtttctgcagaatattaccggatttatggtgggcagagagtacgaggcagagggcatcgcaaaggatggggctaaaatggtcgccgctgtcgcttgcgcccaagtccccaaaataacccttatcattggcggaagctacggagctggtaactacggcatgtgcggtcgagcatattcacccaggtttttgtacatctggcctaatgcccgaatctcagtaatgggcggagagcaggccgcaaacgtccttgccactatcaccaaagaccagcgggcacgggaaggcaaacagttcagtagcgcagatgaggcagctcttaaagagcctattattaagaaattcgaggaagaagggaatccatactactccagtgcacgagtttgggacgatggaataattgatcccgcagatacgcgactcgtgctcggcctatcttttagtgccgcactcaatgcccctattgagaagaccgatttcgggatcttccgcatgtag

SEQ ID NO: 268480 - DNA, 1578 bp, Artificial Sequence
  derived and/or modified sequence
atgtgggccgtgctgagactggccctgagaccctgcgccagagccagccccgccggccccagagcctaccacggcgacagcgtggccagcctgggcacccagcccgacctgggcagcgccctgtaccaggagaactacaagcagatgaaggccctggtgaaccagctgcacgagagagtggagcacatcaagctgggcggcggcgagaaggccagagccctgcacatcagcagaggcaagctgctgcccagagagagaatcgacaacctgatcgaccccggcagccccttcctggagctgagccagttcgccggctaccagctgtacgacaacgaggaggtgcccggcggcggcatcatcaccggcatcggcagagtgagcggcgtggagtgcatgatcatcgccaacgacgccaccgtgaagggcggcgcctactaccccgtgaccgtgaagaagcagctgagagcccaggagatcgccatgcagaacagactgccctgcatctacctggtggacagcggcggcgcctacctgcccagacaggccgacgtgttccccgacagagaccacttcggcagaaccttctacaaccaggccatcatgagcagcaagaacatcgcccaggtgaaggccgccaccggcgaggaggtgagcgccgaggacctgggcggcgccgacctgcactgcagaaagagcggcgtgagcgaccactgggccctggacgaccaccacgccctgcacctgaccagaaaggtggtgagaaacctgaactaccagaagaagctggacgtgaccatcgagcccagcgaggagcccctgttccccgccgacgagctgtacggcatcgtgggcgccaacctgaagagaagcttcgacgtgagagaggtgatcgccagaatcgtggacggcagcagattcaccgagttcaaggccttctacggcgacaccctggtgaccggcttcgccagaatcttcggctaccccgtgggcatcgtgggcaacaacggcgtgctgttcagcgagagcgccaagaagggcacccacttcgtgcagctgtgctgccagagaaacatccccctgctgttcctgcagaacatcaccggcttcatggtgggcagagagtacgaggccgagggcatcgccaaggacggcgccaagatggtggccgccgtggcctgcgcccaggtgcccaagatcaccctgatcatcggcggcagctacggcgccggcaactacggcatgtgcggcagagcctacagccccagattcctgtacatctggcccaacgccagaatcagcgtgatgggcggcgagcaggccgccaacgtgctggccaccatcaccaaggaccagagagccagagagggcaagcagttcagcagcgccgacgaggccgccctgaaggagcccatcatcaagaagttcgaggaggagggcaacccctactacagcagcgccagagtgtgggacgacggcatcatcgaccccgccgacaccagactggtgctgggcctgagcttcagcgccgccctgaacgcccccatcgagaagaccgacttcggcatcttcagaatgtag

SEQ ID NO: 268481 - DNA, 1083 bp, Artificial Sequence
  derived and/or modified sequence
atgggggacgcatttcagcactcgagccaaagtatccctcgatttatcaaggagagcctgaagcagatcctggaagagagcgactcaaggcagattttctatttcctttgcttaaatctgctctttacctttgtcgaactcttctacggagtgctcaccaactcactgggcttgatcagtgatggcttccacatgctgtttgactgtagcgccctggttatggggttgttcgcggcccttatgtccaggtggaaagcgacgcgcatcttcagctacggatatggcagaattgagatcctgtcagggttcattaacggtttgttcctcattgtgatcgccttcttcgtgttcatggagtccgtggccaggttaatcgatccacccgaattggacacccatatgttgactccctgccactcacatgcccatggagctagccagggcagctgccacagcagcgatcattcccattcacaccatatgcatggacattccgatcacggccatgggcacagccacgggagcgcaggcggaggtatgaatgccaacatgagaggtgtcttcctacacgtcctggctgatacattagggtctatcggcgtcattgtcagcacggtcctaatcgagcagtttggatggtttattgctgatccactgtgtagtctctttatagccatcctaatattcctctccgttgtccccctgatcaaggacgcgtgtcaggtgctactgctgaggctcccccctgagtacgaaaaggagctgcacatcgccctagagaaaatacaaaagattgagggcctcatctcatatagggacccacacttttggagacattcagcgagtattgtcgctgggaccattcacatccaggtgacaagcgatgtgttggaacagcggattgtccaacaggttactggaatcttaaaggacgccggcgttaacaatctcaccatccaggttgagaaggaggcctactttcagcacatgtcaggcctgagcacaggtttccatgatgtcctcgcgatgaccaaacaaatggagagtatgaagtattgcaaggatggcacatacatcatgtag

SEQ ID NO: 268482 - DNA, 1083 bp, Artificial Sequence
  derived and/or modified sequence
atgggagatgccttccagcacagcagccagagcatcccccgcttcatcaaggagagcctgaagcagatcctggaggagagtgacagccggcagatcttctacttcctgtgcctgaacctgctcttcacctttgtggagctgttctatggagtgctgaccaacagcctgggcctcatcagtgatggcttccacatgctgtttgactgcagcgccctggtgatgggcctgtttgctgccctgatgagccgctggaaggccacccgcatcttctcctatggctacggcagaattgagatcctgagcggcttcatcaatggcctcttcctgattgtcatcgccttctttgtgttcatggagagcgtggcccggctgattgatcctcctgagctggacacccacatgctgaccccctgccacagccacgcccatggagccagccagggcagctgccacagcagtgaccacagccacagccaccacatgcacggccacagcgaccacggccacggccacagccacggcagcgctgggggcggcatgaatgccaacatgaggggcgtcttcctgcacgtgctggccgacaccctgggcagcattggagtcatcgtgtccacagtgctgattgagcagtttggctggttcatcgctgaccccctgtgcagcctcttcatcgccatcctgatcttcctgtctgtggtgcccctcatcaaggatgcctgccaggtgctgctgctgcggctgcccccagaatatgagaaggagctgcacatcgccctggagaagatccagaagattgagggcctcatctcctacagagacccccacttctggaggcacagcgccagcatcgtggccggcaccatccacatccaggtgaccagtgatgtgctggagcagagaattgtgcagcaggtgacaggcatcctgaaggatgctggggtgaacaacctgaccatccaggtggagaaggaggcctacttccagcacatgagcggcctgagcacaggcttccatgatgtgctggccatgaccaagcagatggagagcatgaagtactgcaaggatggcacctacatcatgtag

SEQ ID NO: 268483 - DNA, 1083 bp, Artificial Sequence
  derived and/or modified sequence
atgggcgacgccttccagcacagcagccagagcatcccccggttcattaaggagagcctaaaacagatcctcgaggaatccgattctagacagattttttattttctgtgcttaaatctgctgtttacattcgttgagctgttctatggcgtgctgaccaactctctggggctgattagtgatggctttcatatgttattcgattgcagcgctctcgtcatgggcctcttcgctgctctaatgagtagatggaaggccacgcgaattttttcttacggttacggccggatagagattttgtccggtttcattaacggtttgtttctgatcgtcattgcctttttcgtgttcatggagagcgtcgcaaggctgattgacccacctgagctggatacacacatgctcaccccttgtcattcgcatgcccacggagcatctcagggaagctgccactcgtctgatcatagccactcacaccatatgcacggtcatagcgatcacggacacggtcacagccatggttctgccggaggggggatgaatgccaatatgcgaggcgtgttccttcacgtgctcgccgatactttgggatcaatcggggtcattgtgtctactgtgctgatcgaacagtttggctggttcattgccgaccccctgtgctctctctttattgccattctcatatttctgagcgttgttccactgattaaagatgcctgtcaggtgctactgttacgtctcccccccgagtatgagaaagagctgcacatcgccctggagaagatccagaaaattgaagggcttatttcgtaccgagatccccatttctggcggcacagcgcctctatcgtcgcaggcacaattcatatccaagtgacgtccgatgtcctagaacagcgcatagtccagcaagtgaccggcatcctcaaagacgcgggcgtgaataacctaaccattcaggtagaaaaagaggcctattttcaacacatgagtggtctttctacgggatttcacgatgtgctcgctatgaccaagcagatggaaagtatgaagtattgcaaggatgggacatacataatgtag

SEQ ID NO: 268484 - DNA, 1083 bp, Artificial Sequence
  derived and/or modified sequence
atgggggacgcatttcagcattccagtcaatcaattccaagattcatcaaggagtctcttaaacaaatcttggaggaaagcgattcccgccagattttctatttcttatgcttgaacctgctgtttaccttcgtggagctcttttatggagttctgaccaacagccttggcttaatcagtgacggctttcatatgctctttgattgttcagctctggtgatgggtttgtttgcagcacttatgtcaaggtggaaagctacaagaatttttagttacggctacgggagaatcgagatactgtctggcttcatcaatggactctttctgattgtcattgccttttttgtgtttatggagtccgtggcccgtttgatagacccacccgaactcgacactcacatgctgacgccctgccactctcacgctcatggggctagccaggggtcttgccattcctcagaccactcccactcacatcacatgcatggacactcagaccacggtcacgggcattcacacggaagtgccggaggtgggatgaatgcaaacatgaggggcgtatttctgcatgtgttggctgatacattggggagtattggtgtaattgtgtctaccgtgcttatcgaacaatttgggtggttcatcgccgaccctctttgttcactgttcattgctattctgatatttcttagcgtcgttcctctgattaaggatgcatgccaggtgctgctgttgaggttgccaccagaatatgaaaaagagctgcatatagctctggagaaaattcagaaaattgaaggtttgattagctatcgggaccctcacttttggagacacagcgcgtctatcgttgctggcaccatccacatccaggtgactagcgatgttctcgaacagagaatcgtgcagcaggtaaccgggatactgaaagatgccggtgtcaataatctcactatccaggtggagaaagaggcctatttccagcacatgtcaggtctgtcaaccggcttccatgacgtgttagcaatgaccaagcagatggagtccatgaagtactgtaaagatggaacatacatcatgtag

SEQ ID NO: 268485 - DNA, 1667 bp, Artificial Sequence
  derived and/or modified sequence
cacgtcctgtctggaggagtggtagtgagtgctatattcttcattttgtctgccaatatcttatcatctccctctaagagaggacaaaaaggtacccttattggatattctcctgaaggaacacctctttataacttcatgggtgatgcttttcagcatagctctcaatcgatccctaggtttattaaggaatcactaaaacaaattcttgaggagagtgactctaggcagatcttttacttcttgtgcttgaatctgctttttacctttgtggaattattctatggcgtgctgaccaatagtctgggcctgatctcggatggattccacatgctttttgactgctctgctttagtcatgggactttttgctgccctgatgagtaggtggaaagccactcggattttctcctatgggtacggccgaatagaaattctgtctggatttattaatggactttttctaatagtaatagcgttttttgtgtttatggagtcagtggctagattgattgatcctccagaattagacactcacatgttaacaccatgccatagccatgcccatggagcttctcaaggaagctgtcactcatctgatcacagccattcacaccatatgcatggacacagtgaccatgggcatggtcacagccacggatctgcgggtggaggcatgaatgctaacatgaggggtgtatttctacatgttttggcagatacacttggcagcattggtgtgatcgtatccacagttcttatagagcagtttggatggttcatcgctgacccactctgttctctttttattgctatattaatatttctcagtgttgttccactgattaaagatgcctgccaggttctactcctgagattgccaccagaatatgaaaaagaactacatattgctttagaaaagatacagaaaattgaaggattaatatcataccgagaccctcatttttggcgtcattctgctagtattgtggcaggaacaattcatatacaggtgacatctgatgtgctagaacaaagaatagtacagcaggttacaggaatacttaaagatgctggagtaaacaatttaacaattcaagtggaaaaggaggcatactttcaacatatgtctggcctaagtactggatttcatgatgttctggctatgacaaaacaaatggaatccatgaaatactgcaaagatggtacttacatcatgtgagataactcaagaattacccctggagaataaacaatgaagattaaatgactcagtatttgtaatattgccagaaggataaaaattacacattaactgtacagaaacagagttccctactactggatcaaggaatctttcttgaaggaaatttaaatacagaatgaaacattaatggtaaaagtggagtaattatttaaattatgtgtataaaaggaatcaaattttgagtaaacatgatgtattacatcatcttcaaaaatagatatgatggattctagtgaagaccaaaattacttctgtttactttctatcaggaagcatctccattgtaaatatgtatttacatgtttattacaaagacccaaatgaaaaatttttagtccattttttgcatagcctaaagataaaataggaataaaagttctatatttatggattttctgtat

SEQ ID NO: 268486 - DNA, 1083 bp, Artificial Sequence
  derived and/or modified sequence
atgggcgacgccttccagcacagcagccagagcatccccagattcatcaaggagagcctgaagcagatcctggaggagagcgacagcagacagatcttctacttcctgtgcctgaacctgctgttcaccttcgtggagctgttctacggcgtgctgaccaacagcctgggcctgatcagcgacggcttccacatgctgttcgactgcagcgccctggtgatgggcctgttcgccgccctgatgagcagatggaaggccaccagaatcttcagctacggctacggcagaatcgagatcctgagcggcttcatcaacggcctgttcctgatcgtgatcgccttcttcgtgttcatggagagcgtggccagactgatcgacccccccgagctggacacccacatgctgaccccctgccacagccacgcccacggcgccagccagggcagctgccacagcagcgaccacagccacagccaccacatgcacggccacagcgaccacggccacggccacagccacggcagcgccggcggcggcatgaacgccaacatgagaggcgtgttcctgcacgtgctggccgacaccctgggcagcatcggcgtgatcgtgagcaccgtgctgatcgagcagttcggctggttcatcgccgaccccctgtgcagcctgttcatcgccatcctgatcttcctgagcgtggtgcccctgatcaaggacgcctgccaggtgctgctgctgagactgccccccgagtacgagaaggagctgcacatcgccctggagaagatccagaagatcgagggcctgatcagctacagagacccccacttctggagacacagcgccagcatcgtggccggcaccatccacatccaggtgaccagcgacgtgctggagcagagaatcgtgcagcaggtgaccggcatcctgaaggacgccggcgtgaacaacctgaccatccaggtggagaaggaggcctacttccagcacatgagcggcctgagcaccggcttccacgacgtgctggccatgaccaagcagatggagagcatgaagtactgcaaggacggcacctacatcatgtag

SEQ ID NO: 268487 - DNA, 1017 bp, Artificial Sequence
  derived and/or modified sequence
atgcgccatctgtacgtggtggttgacggtagtagaacaatggaggatcaagacctgaaacctaatcgtttgacctgtaccctgaaacttctagagtactttgttgaggaatatttcgatcaaaacccaatctcccagatcggcattatcgtgacaaagagcaagagggccgagaagttgactgagctttcaggcaacccacggaagcacatcacgtccctgaaagaagcagtagacatgacatgtcatggcgagccttcactgtacaattccctgagcatggcgatgcagactctgaaacatatgcccggacatacatctagagaagtcttaatcattttttcatctttgacaacttgcgaccccagcaatatttatgatctgattaaaacactcaaagccgcaaagattcgggtgtcagtgattggtctctctgcagaagttagagtgtgcaccgtacttgcccgagaaaccggaggaacataccatgtgattctcgacgagtctcattataaagagcttctaacacatcatctgtccccccctcccgcttcaagttcctctgagtgtagcttgattcggatggggtttccccagcacactatagcttccctgtccgatcaagacgccaaaccttcctttagcatggctcacttagacgggaacacagagccaggcttaactctcggcggttacttctgtccacagtgtcgtgccaaatactgcgagcttccagtagagtgcaagatctgtggcctgaccctggtatccgccccccatttagcacgctcctaccatcatctgttccctctcgacgcatttcaggagatcccactggaagaatacaatggggagagattctgctacggatgccaaggtgaattaaaagatcagcacgtctacgtctgcgcagtttgccaaaacgttttctgcgttgattgcgacgtatttgtgcacgattcactgcattgttgcccagggtgcatccataagattcccgccccatctggtgtgtag

SEQ ID NO: 268488 - DNA, 1017 bp, Artificial Sequence
  derived and/or modified sequence
atgaggcacctgtatgtggtggtggatggcagcaggaccatggaggaccaggacctgaagcccaaccggctgacctgcaccctgaagctgctggagtactttgtggaggagtactttgaccagaaccccatcagccagatcggcatcatcgtgaccaagagcaagagagctgagaagctgacagagctgagcggcaaccccaggaagcacatcaccagcctgaaggaggccgtggacatgacctgccacggggagcccagcctgtacaacagcctgtccatggccatgcagaccctgaagcacatgcctggccacaccagccgggaggtgctgatcatcttcagcagcctgaccacctgtgaccccagcaacatctatgacctgatcaagaccctgaaggccgccaagatccgggtgtctgtcatcggcctgtctgctgaggtgcgggtgtgcaccgtgctggcccgggagaccggcggcacctaccacgtgatcctggatgagagccactacaaggagctgctgacccaccacctgagccccccaccagccagcagcagcagtgaatgttccctcatccgcatgggcttcccccagcacaccatcgccagcctgagtgaccaggatgccaagcccagcttctccatggcccacctggatggcaacacagagcccggcctgaccctgggcggctacttctgcccccagtgccgggccaagtactgtgagctgcctgtggagtgcaagatctgtggcctgaccctggtgtctgccccccacctggcccggagctaccaccacctgttccccctggatgccttccaggagatccccctggaggagtacaatggagagcgcttctgctacggctgccagggcgagctgaaggaccagcacgtgtatgtgtgtgctgtgtgccagaatgtgttctgtgtggactgtgatgtgtttgtgcatgacagcctgcactgctgccccggctgcatccacaagatcccagcccccagcggcgtgtag

SEQ ID NO: 268489 - DNA, 1017 bp, Artificial Sequence
  derived and/or modified sequence
atgcggcacctgtacgtggtggtggacggcagccggaccatggaggatcaggatttgaaacctaacaggctgacatgcaccctgaaacttctggagtattttgtggaggagtattttgaccagaatccgatctcccagatcggcataattgtaaccaaatcaaaacgcgccgaaaagcttactgagttgagcggaaatcctcgaaaacacatcactagtttaaaggaagctgtggacatgacatgccacggggagccaagcctgtataactcactgtccatggctatgcagactctgaaacatatgccaggacacacttcacgggaagttttgatcatcttcagctctcttacgacctgcgatccgagcaacatttacgacttgattaagactctcaaagcggccaagatccgggtgtccgtaataggcctgtctgcagaggtgagagtgtgtaccgtgctcgccagagagacgggggggacatatcacgtgatcttggatgaaagccactacaaagaactgctaacacaccacctatcacctcctccagcttcctctagctctgaatgctccctgatccgtatgggatttccgcagcacacaatcgctagcctcagcgatcaggacgctaagccttcattcagtatggcccatcttgacggcaacaccgagccaggtttgacattaggcgggtacttttgtccccaatgcagggccaagtattgtgagcttccagttgagtgcaagatttgcggactaaccctcgtttccgcgcctcatctcgcccggtcttaccaccatttgtttcccctcgacgcctttcaggagatccccctcgaggaatacaatggcgagagattctgctacggttgtcagggggaattaaaggatcagcacgtgtacgtctgtgcagtttgccagaatgtcttttgcgtcgactgcgatgtttttgttcatgattcactgcattgctgtcccggatgcattcataaaattccggcgccttcaggcgtgtag

SEQ ID NO: 268490 - DNA, 1017 bp, Artificial Sequence
  derived and/or modified sequence
atgagacacctttatgttgtcgtggatggttctaggacaatggaggaccaggatcttaagccgaatcggttgacttgcactctgaagctcctcgagtacttcgtcgaggaatacttcgatcagaatcctatatcccagattggcatcatcgtgacaaagagcaaaagggccgaaaagctgacagagctgagcgggaatccccgaaagcacatcacatcgctcaaagaggcagttgacatgacttgtcatggagagccctccctttataactcactgtccatggctatgcagaccttgaagcatatgcctggccacacgtcgcgggaggtgctcattatcttctcctcattaaccacttgcgatccctccaatatatatgatttgattaagaccctgaaagctgccaaaatccgcgtgtcggtcataggactttctgccgaggtgcgtgtgtgcacagttctcgctagggaaaccggcggaacctatcatgtcattctagacgaaagccattacaaggagctactgacccaccacctctccccaccaccagcttccagctccagtgagtgctcccttatcagaatgggattccctcaacacactattgcgtctctatctgatcaggacgccaagccgtccttttctatggcccatttggatggtaatacagagcccggtttgaccctgggtggatacttttgccctcagtgcagagcaaagtactgcgagctccctgtagaatgcaaaatttgcggccttaccttagtctccgccccacacctcgcccgtagctatcatcacttattccctctcgacgccttccaagaaatccctctggaggagtacaatggcgagaggttctgctatgggtgccagggagaactgaaggaccagcatgtatacgtctgcgcggtgtgtcaaaacgtgttctgcgtcgactgcgacgttttcgtccatgattcactacattgctgtccaggatgcattcacaaaataccggcacctagtggggtctag

SEQ ID NO: 268491 - DNA, 1956 bp, Artificial Sequence
  derived and/or modified sequence
gactagctaggcggctgggagcgttttcgtggcggggaacggaggttgaattgccctgcctgggctcatagggaaggaggatgtgaaggagcttgtgaaggcagaggaagattattgaataataaaatacagttttgaaaaaaatggatgaagaacctgaaagaactaagcgatgggaaggaggctatgaaagaacatgggagattcttaaagaagatgaatctggatcacttaaagctacaatagaagacattctattcaaggcaaagagaaaaagatgcgccacctttatgtggtagtagatggatcaagaacaatggaagaccaagatttaaagcctaatagactgacgtgtactttaaagttgttggaatactttgtagaggaatattttgatcaaaatcctattagtcagattggaataattgtaactaagagtaaaagagctgaaaaattgactgaactttcaggaaacccaagaaaacatataacgtctttgaaggaagctgtggatatgacctgccatggagagccatctctttataattccctaagcatggctatgcagactctaaaacacatgcctggacatacaagtcgagaagtactaatcatctttagcagccttacaacttgcgatccatctaatatttatgatctaatcaagaccctaaaggcagctaaaattagagtatctgttattggattgtctgcagaagttcgcgtttgcactgtacttgctcgtgaaactggtggcacgtaccatgttattttagatgaaagccattacaaagagttgctcacacatcatcttagtcctcctcctgctagctcaagttctgaatgctcacttattcgtatgggatttcctcagcacaccattgcttctttatctgaccaggatgcaaaaccctctttcagcatggcgcatttggatggcaatactgagccagggcttacattaggaggctatttctgcccacagtgtcgggcaaagtactgtgagctacctgttgaatgtaaaatctgtggtcttactttggtgtctgctccccacttggcacggtcttaccatcatttgtttcctttggatgcttttcaagaaattcccctagaagaatataatggagaaagattttgttatggatgtcagggggaattgaaagaccaacatgtttatgtttgtgctgtgtgccaaaatgttttctgtgtggactgtgatgtttttgttcatgattctctacactgttgccctggctgtattcataagattccagctccttcaggtgtttgattccagcatgtagtatacattgtatgtgttaaaaagaaatttgcaactgtgaataaaaggacttctttagaagaagcttcatttaaaacatgaaaggataatctgacttaagaaactttttgctaagaaaaggtaatattttattaaattttaaatttgtgttgtcacagaaatacctgaaattcagtagtacttcattcaattaattttgttttctattattttgagttatactgttttcaaagtcattatgcagtatgtataaacttataagaattaaattgatgtgataattttatgtttttataattaaatatagaatctttatgatttatgttaattcattaatttagtgtaagaagaaagttaagtctgaatgtaaattcagtgtaagatgaaaatttatcaatacttatgaaattaggctgggcgctgtggctcacacctgtaatcccaacactttgggaggctgaggtgggcagatcacttgaggtcaggagttcgagaccagcctggccaacatggtgaaaccccgtcactactaaaaatacaaaaaataattagccgggcatggtggttcacgcctggagtcccagctacttgggaggctgaggcaggagaatcgcttgaacccaggaggcggaggttgcagtgagccgaga

SEQ ID NO: 268492 - DNA, 1017 bp, Artificial Sequence
  derived and/or modified sequence
atgagacacctgtacgtggtggtggacggcagcagaaccatggaggaccaggacctgaagcccaacagactgacctgcaccctgaagctgctggagtacttcgtggaggagtacttcgaccagaaccccatcagccagatcggcatcatcgtgaccaagagcaagagagccgagaagctgaccgagctgagcggcaaccccagaaagcacatcaccagcctgaaggaggccgtggacatgacctgccacggcgagcccagcctgtacaacagcctgagcatggccatgcagaccctgaagcacatgcccggccacaccagcagagaggtgctgatcatcttcagcagcctgaccacctgcgaccccagcaacatctacgacctgatcaagaccctgaaggccgccaagatcagagtgagcgtgatcggcctgagcgccgaggtgagagtgtgcaccgtgctggccagagagaccggcggcacctaccacgtgatcctggacgagagccactacaaggagctgctgacccaccacctgagccccccccccgccagcagcagcagcgagtgcagcctgatcagaatgggcttcccccagcacaccatcgccagcctgagcgaccaggacgccaagcccagcttcagcatggcccacctggacggcaacaccgagcccggcctgaccctgggcggctacttctgcccccagtgcagagccaagtactgcgagctgcccgtggagtgcaagatctgcggcctgaccctggtgagcgccccccacctggccagaagctaccaccacctgttccccctggacgccttccaggagatccccctggaggagtacaacggcgagagattctgctacggctgccagggcgagctgaaggaccagcacgtgtacgtgtgcgccgtgtgccagaacgtgttctgcgtggactgcgacgtgttcgtgcacgacagcctgcactgctgccccggctgcatccacaagatccccgcccccagcggcgtgtag

SEQ ID NO: 268493 - protein, 220 aa, Artificial Sequence
  derived and/or modified sequence
MEEDEFIGEKTFQRYCAEFIKHSQQIGDSWEWRPSKDCSDGYMCKIHFQIKNGSVMSHLGASTHGQTCLPMEEAFELPLDDCEVIETAAASEVIKYEYHVLYSCSYQVPVLYFRASFLDGRPLTLKDIWEGVHECYKMRLLQGPWDTITQQEHPILGQPFFVLHPCKTNEFMTPVLKNSQKINKNVNYITSWLSIVGPVVGLNLPLSYAKATSQDERNVP

SEQ ID NO: 268494 - protein, 125 aa, Artificial Sequence
  derived and/or modified sequence
MEEDEFIGEKTFQRYCAEFIKHSQQIGDSWEWRPSKDCSDGYMCKIHFQIKNGSVMSHLGASTHGQTCLPMEVKSCSVTQAGVQLRDLSSLQPPPSGFKQFSCLSLPSNWDYRGSPLHLANFLYF

SEQ ID NO: 268495 - DNA, 663 bp, Artificial Sequence
  derived and/or modified sequence
atggaggaagacgaatttatcggggagaaaacattccagcgttactgcgctgaattcataaaacatagccaacagataggcgatagctgggagtggagaccctcaaaggactgcagtgacggttatatgtgcaaaatccactttcagatcaagaacggctcagtgatgagtcacttaggcgcttcaacccacggtcagacttgtcttccaatggaggaggctttcgaactgccgttggatgattgcgaggttatcgaaacagccgccgcgtccgaggtaattaaatatgagtaccacgtgttgtacagctgctcttatcaagtcccagtactgtatttcagagcgtcattccttgatggccggcctctgactcttaaagacatctgggagggcgtacacgaatgctataagatgcgcctgcttcagggtccctgggacacaatcacccagcaggagcaccctatcctcggccagccatttttcgttttgcatccctgtaaaacaaatgagtttatgacaccagtccttaagaatagtcagaaaattaacaaaaacgtgaactacattactagctggctctctattgttggacctgtcgtgggactgaacctccctctgtcatatgccaaagctacaagtcaggatgagcggaacgtcccttag

SEQ ID NO: 268496 - DNA, 378 bp, Artificial Sequence
  derived and/or modified sequence
atggaagaggacgagtttatcggggaaaaaacttttcagcgatactgcgccgagttcattaagcactctcaacagataggcgattcttgggagtggcgaccttccaaggactgctcagacggatacatgtgcaaaatccattttcaaattaaaaatggtagcgtgatgagccacctgggcgcgagtacgcatggacaaacttgccttcctatggaagtaaagtcgtgtagcgtgactcaagctggagtacagttgagagacctttccagcttgcaacccccgcccagcgggttcaaacaattcagttgcctgtccctcccaagtaactgggactatcgtgggtcccccctgcacctggcaaacttcttgtatttctag

SEQ ID NO: 268497 - DNA, 663 bp, Artificial Sequence
  derived and/or modified sequence
atggaggaagacgaatttatcggggagaaaacgttccaacgctactgcgcagagtttattaaacacagtcaacagattggggattcttgggaatggcgaccttcgaaggactgctcagatggctacatgtgcaagatccatttccagatcaagaatggatccgtaatgagtcaccttggtgcttcgacacacgggcagacatgcctgcccatggaggaagcattcgagttgcctttggacgattgcgaggtgatagagacagctgctgcgtccgaggtcataaaatatgagtatcacgtgctgtattcatgtagctatcaggtgcctgtgttatacttcagagcctccttcctggacggccgcccgttaactctgaaggacatttgggagggcgtgcacgaatgctacaagatgcgcctcctgcaaggcccatgggacaccatcacccagcaagaacatccaatactgggacaacctttcttcgtgctacacccttgtaagacaaacgagttcatgacacctgtcttaaagaatagccaaaagattaataaaaacgtgaactacattaccagctggttgtcaatcgtcggaccggtcgtgggcctcaacctccccttgtcatacgcaaaagcaacctcccaggacgagcgcaacgtgccatag

SEQ ID NO: 268498 - DNA, 663 bp, Artificial Sequence
  derived and/or modified sequence
atggaggaggatgagttcatcggggagaagaccttccagcgctactgtgccgagttcatcaagcacagccagcagatcggggacagctgggagtggaggcccagcaaggactgcagtgatggctacatgtgcaagatccacttccagatcaagaatggatctgtgatgagccacctgggcgccagcacccacggccagacctgcctgcccatggaggaggcctttgagctgcccctggatgactgtgaggtgattgaaacagctgctgccagcgaggtgatcaagtatgagtaccacgtgctgtacagctgcagctaccaggtgcctgtgctgtacttccgggccagcttcctggatggccggcccctgaccctgaaggacatctgggagggcgtgcatgagtgctacaagatgaggctgctgcagggcccctgggacaccatcacccagcaggagcaccccatcctgggccagcccttctttgtgctgcacccctgcaagaccaatgagttcatgacccctgtgctgaagaacagccagaagatcaacaagaatgtgaactacatcacctcctggctgagcatcgtgggccctgtggtgggcctgaacctgcccctgtcctatgccaaggccaccagccaggatgaaagaaatgtgccctag

SEQ ID NO: 268499 - DNA, 378 bp, Artificial Sequence
  derived and/or modified sequence
atggaggaggatgagttcatcggggagaagaccttccagcgctactgtgccgagttcatcaagcacagccagcagatcggggacagctgggagtggaggcccagcaaggactgcagtgatggctacatgtgcaagatccacttccagatcaagaatggatctgtgatgagccacctgggcgccagcacccacggccagacctgcctgcccatggaggtgaagagctgcagcgtgacccaggccggcgtgcagctgcgggacctgagcagcctgcagcccccacccagcggcttcaagcagttcagctgcctgagcctgcccagcaactgggactaccggggcagccccctgcacctggccaacttcctgtacttctag

SEQ ID NO: 268500 - DNA, 663 bp, Artificial Sequence
  derived and/or modified sequence
atggaggaggacgagttcatcggcgagaagaccttccagcggtactgtgccgagttcatcaagcactcacagcagataggagattcctgggagtggcggccctcgaaggactgctccgatggatacatgtgtaagatccatttccagattaagaatgggtccgtgatgagtcacctgggggcaagtacacatggccagacctgcctgccaatggaagaggcgtttgagctgcccctcgacgactgtgaggttatcgagacagctgccgcatctgaggttatcaagtatgaataccatgtcctttactcatgctcttatcaggtaccagtcttgtacttccgtgcgagctttctggatggtcggcctctgactttgaaagatatttgggagggcgttcacgagtgctataagatgaggttgcttcagggaccctgggatacaatcacccagcaagaacacccaatactcggccagccattctttgtgctgcacccgtgtaagactaacgagttcatgactcccgtactgaaaaatagccaaaaaattaacaaaaacgttaattacatcacttcttggcttagtatagtcgggccagtcgttggactcaacctgccactcagctatgcaaaagccacgtctcaggacgaacggaatgtgccctag

SEQ ID NO: 268501 - DNA, 378 bp, Artificial Sequence
  derived and/or modified sequence
atggaggaggacgagttcatcggcgagaagaccttccagcggtactgtgcggaattcattaaacacagccagcagataggcgattcgtgggaatggagaccttccaaggactgctccgacggctacatgtgtaagatccatttccagatcaaaaatggttccgtgatgtcacaccttggggcttctacacatggacagacttgccttccgatggaagtcaaatcttgctcagtcacgcaggcgggcgtgcagctacgagatctgagtagccttcagccacctccatccggatttaaacagttctcctgcttgagtctcccttctaactgggattacaggggcagtcctttgcacctggcgaacttcctgtatttctag

SEQ ID NO: 268502 - DNA, 663 bp, Artificial Sequence
  derived and/or modified sequence
atggaggaggacgagttcatcggcgagaagaccttccagcggtactgcgcagaatttataaagcatagccagcagattggcgattcatgggagtggaggcctagtaaagactgttccgatggctacatgtgtaagatccatttccaaataaagaacggctctgtcatgtcccacctgggagccagtacccacgggcagacatgccttcccatggaagaagcattcgagctgcccctggacgattgcgaagtcattgagactgccgccgctagtgaagtgatcaagtacgagtaccacgttctctattcttgctcttaccaggtgcctgtcttgtattttagggcaagcttcctggacgggcggccactgactttgaaggacatttgggaaggcgtgcacgagtgttataaaatgagattgctgcagggcccatgggataccattacacagcaggaacaccctatactaggccagccattcttcgtacttcatccgtgtaaaaccaacgaatttatgactcccgtcctaaagaactcgcagaagattaataaaaatgtaaattacatcacatcatggttgagcatcgtgggtccggttgtgggattgaacctcccgctctcttatgctaaggccacatcccaggatgaacgcaatgtgccgtag

SEQ ID NO: 268503 - DNA, 663 bp, Artificial Sequence
  derived and/or modified sequence
atggaggaggatgagttcattggggaaaaaacctttcagcggtactgcgcagaatttattaaacattcacaacagatcggcgattcgtgggaatggcgtccatcaaaggattgctctgatggttatatgtgcaaaatccatttccagattaaaaacgggagcgttatgtcccatttgggggctagcactcatggacagacttgtctgcccatggaagaggctttcgagttgccactggatgattgtgaagtgatcgaaactgcagccgcatccgaagtaataaagtatgaatatcatgtgctttactcctgtagctaccaggtcccggtgctgtacttccgcgcatcttttctggatggacggccactgacgctcaaagatatttgggagggcgtgcacgaatgttacaaaatgaggctgcttcagggcccttgggacactatcacccaacaggagcaccctattttaggacagcccttcttcgtactacatccctgcaaaacaaatgaattcatgacgccagtgctcaagaacagccaaaaaatcaataagaacgtgaactacattacctcttggcttagcatagtggggccagtcgttggtctcaatctcccattgtcttacgctaaagcgacctcacaggatgagagaaatgtcccctag

SEQ ID NO: 268504 - DNA, 378 bp, Artificial Sequence
  derived and/or modified sequence
atggaggaggacgagttcatcggcgagaagacctttcagcgctattgtgcggagtttatcaagcattcccaacagataggagatagctgggaatggcgtcccagcaaggattgcagcgacggttatatgtgcaagatacactttcaaatcaagaacggaagcgtcatgtcacacctgggagcctccacacatggccagacctgcttacccatggaggtgaaatcctgctctgtgacacaagcaggagtgcaactccgagatttatcttccctgcagcctccgccttccggctttaagcagttttcttgcctgtctctaccgagtaactgggattatcgcggttccccgctccatctcgcaaatttcctctacttctag

SEQ ID NO: 268505 - DNA, 663 bp, Artificial Sequence
  derived and/or modified sequence
atggaggaagatgaatttattggagagaaaactttccaaagatactgtgcagagttcataaaacattctcaacagattggagacagttgggagtggcgcccatctaaagattgctcggatggttacatgtgcaaaattcatttccagattaaaaacggctctgtgatgtcacatctaggcgcttccactcatggtcagacctgtttacctatggaggaggcctttgagctgccactagacgattgcgaggtgatcgaaacagccgctgcctccgaggtgatcaaatacgagtatcatgtgttatactcttgctcttaccaagtgccagtgctgtattttcgcgctagcttcttggatggcagacccttgacccttaaagatatctgggaaggcgtacacgaatgttataagatgcggcttctgcaggggccatgggacaccatcacacaacaagaacacccaatcctgggacagccctttttcgttctgcacccctgcaaaacaaatgagtttatgaccccagtgcttaaaaatagccagaagattaataagaacgtgaactacattactagttggttgtcaattgtggggccagtggtagggcttaacctgccactgagttacgctaaggctacatctcaagatgagagaaacgtaccctag

SEQ ID NO: 268506 - DNA, 3033 bp, Artificial Sequence
  derived and/or modified sequence
agtgcgcacgctccgactcggccgtggcggacctgactgaaggaggccgcggacctgactgaaggaggccacggccacttctggttggcctcggggcgcgctggctcggctcttcctccgccctcgaggcccccgcagtcccatcattcagttccgtagggtcaccggcgcggcagtggcctcgcagggcgctgggtccctctccccagctctcctccccctggccccgtcgccccgccctcgccgggctgggctgcggggtcaggggccgagcggagagggttatcatttaacatggaagaagatgagttcattggagaaaaaacattccaacgttattgtgcagaattcattaaacattcacaacagataggtgatagttgggaatggagaccatcaaaggactgttctgatggctacatgtgcaaaatacactttcaaattaagaatgggtctgtgatgtcacatctaggagcatctacccatggacagacatgtcttcccatggaggaggctttcgagctacccttggatgattgtgaagtgattgaaactgcagcagcgtccgaagtgattaaatatgagtatcatgtcttatattcctgtagctaccaagtgcctgtactttactttagggcaagctttttagatgggagacctttaactctgaaggacatatgggaaggagttcatgagtgctataagatgcgactgctacagggaccatgggacactattacgcaacaggaacatccaatacttgggcaacccttttttgtacttcatccctgcaagacgaatgaattcatgactcctgtattaaagaattctcagaaaatcaataagaatgtcaactatatcacatcatggctgagcattgtagggccagttgttgggctgaatctacctctgagttatgccaaagcaacgtctcaggatgaacgaaatgtcccttaacaagattcttctattgagtttaggaattgcggcacgaagaatgccaagagtttacctggccagccctggctttaataggactgataccatggaatatttcatctcaccaagatgtgacatggattatttttcccttggacacaaatgtctacagcaactggtgtttgataggctgaatgtttagaagaaacacttcaaagggatacatcatggccaggcatggtggctcacacctgtaatccaagcactttgggaggccaaggtgggagcatcacttgatcctgggagttcgagaccagcctgggcaacatggtgaaaccctgtcggtacaaaaaaatacaaaaatttgcctgtttatggtggtgtgttcctgtagtcccagctccccaggaggctgaggtgggaggttggctttaacccaggaggcagaggttgcagtgagctgagactgtgccactgcagtccagcctgggtgacagagccagacactgtctcggggaaaaaaaaaaaaaaaaaaagacacatcactataaatagcaaaaaaacaaatctaacttattaatactaggaataccaacattattagggcacttgcaggttattcttttctaggccaagtacttcacttccatttgtctgacatggagattgagggagaaatgtatttgtgtgttcattttaatgtaagatatataaaaattaaattactggatttacctgtccctgaaactggtgttataaacatgacctatcttaagtgattttcccacaatcaaactcaggaacaatagattatttctgttttactccaaaagagagagagagagtgagtgtgagtgtgtgtgtgtgtgtgtgtgtatgtgtgggtgtttgtgtagatagttgtaaaacaaagaaaaaacacaatattttactgtgagataatatgttttaccagcaaagtgtggcatagtaattagaagttttctaaaaagctataggagatatttaaacattaaaatttctttttgacctatagtaataaaacaatggtcattttacccctctgcttctcaaccccacagctgctctgctgtactctttgagggctcttgagcgagtcttcatgtccctgagacttattttcctcatctttaatttgaaactaacaagctacctcatagggttgctgtgagaaccacatgagatcattaatgcatgataagatattgtaaagtattatacgaatattcattaaatgctcacctttcttgtatataattggtattcactaaggctgtaaataagtttcatagccagttaagtattaagataaacctaacctggaacaattttttttttggttgcttgttttgttttttgctttcatttgctaggagctgaaacgaagattaaaatgtcattggctttttagagagtctagattagtgtgtctttgaatgagggatatacttaaaatcacctgaggatcgtttacagctacagatgctggggccacctgacacagtctctctgggggtgattctgctctggagaacctctggtctggatatacctttattgtgacattgatttgtattgttttgctctactgacaggccttttccaatccatacaagctgaacttgcttcctaatgtttgtctaggccttacatggatagtaaggaagcttaggagacatgtacacaaggcagcccacttgtaggaaactgcttcaggtgaggacatcattcaccagtggatcaccgagcaccgtgacagcaccctcagtccacgtctgcagattaagagctgaactctcacagagaaagtggaagtagagaaagggttaattcaaactgctagaaaagctaaaagtaaattttaaaatgctgagctgcccatattcatgctaggatgagagccggcttaaatgcttgctgggcattttggtatttaccacttagcatgttttcaacttctgtgagggattttccccccaatctccctaatgtaaacacagatttctcagcaagtcatttctcaagccatgtcatttctagtgtaaaataaattataataatgtgtcatctgaa

SEQ ID NO: 268507 - DNA, 1438 bp, Artificial Sequence
  derived and/or modified sequence
agtgcgcacgctccgactcggccgtggcggacctgactgaaggaggccgcggacctgactgaaggaggccacggccacttctggttggcctcggggcgcgctggctcggctcttcctccgccctcgaggcccccgcagtcccatcattcagttccgtagggtcaccggcgcggcagtggcctcgcagggcgctgggtccctctccccagctctcctccccctggccccgtcgccccgccctcgccgggctgggctgcggggtcaggggccgagcggagagggttatcatttaacatggaagaagatgagttcattggagaaaaaacattccaacgttattgtgcagaattcattaaacattcacaacagataggtgatagttgggaatggagaccatcaaaggactgttctgatggctacatgtgcaaaatacactttcaaattaagaatgggtctgtgatgtcacatctaggagcatctacccatggacagacatgtcttcccatggaggtgaagtcttgctctgtcacccaggctggagtgcagttgcgtgatctcagctcactgcaacctccgccttctgggttcaagcagttctcctgcctcagccttccgagtaactgggactacaggggttcaccactacacctggctaattttttgtatttttagtagagataaggtttcaccatgttggtcaggctggtcttgaactcctgacatcaagtaatccatccgcctcagcctcccaaagtgctgagattacaggcatgagccactgtgcctggccctgagcttaaaataaaagttaaattaaaaaaaaaataatgttgatgttttcatttttgcaatcaatagcttagttagactcaaattgcaaactgtcattgcctgtagtaggcagtggcatagaactcaattcagctcttttaacctgagttttaagctgctttcagattgccccacacatacatggttcaggagtcagccagagacttgggctgagtttaaacatagaatctggggttgtcctcttctggctgtcttctttcttgggcatctgcatcattctctagcacctatggtttttccaggctctttcccccagtttcctccagtcagaaagatggcaagagtttttgctgcctgccctcccccagtccttgtgccaacaccaccaccattgcagctgcctccagggaaaaactgcaaaaaccaaatcacttgctccaggtgttgactcctcttcaaaatctatttttgttaaatctccaaagcctcaaataggttttcttcctagaatttatatctgttatttgtagcaggattggtctgtaaggcactcagtcttctacatcatgggtcagcagattacagcccttgggttaaatccagccacctgcttgttttattaataaagttttgttggaactaaacc

SEQ ID NO: 268508 - DNA, 2418 bp, Artificial Sequence
  derived and/or modified sequence
agtgcgcacgctccgactcggccgtggcggacctgactgaaggaggccgcggacctgactgaaggaggccacggccacttctggttggcctcggggcgcgctggctcggctcttcctccgccctcgaggcccccgcagtcccatcattcagttccgtagggtcaccggcgcggcagtggcctcgcagggcgctgggtccctctccccagctctcctccccctggccccgtcgccccgccctcgccgggctgggctgcggggtcaggggccgagcggagagggtagagacggggtttcaccgtgttagccaagatggtctcgatctcctgacctcgtgatccgcccgcctcggcctcccaaagtgctgggattacaggcgtgagccactgcgcccggcctgttgtacagttattaaagttatcatttaacatggaagaagatgagttcattggagaaaaaacattccaacgttattgtgcagaattcattaaacattcacaacagataggtgatagttgggaatggagaccatcaaaggactgttctgatggctacatgtgcaaaatacactttcaaattaagaatgggtctgtgatgtcacatctaggagcatctacccatggacagacatgtcttcccatggaggaggctttcgagctacccttggatgattgtgaagtgattgaaactgcagcagcgtccgaagtgattaaatatgagtatcatgtcttatattcctgtagctaccaagtgcctgtactttactttagggcaagctttttagatgggagacctttaactctgaaggacatatgggaaggagttcatgagtgctataagatgcgactgctacagggaccatgggacactattacgcaacaggaacatccaatacttgggcaacccttttttgtacttcatccctgcaagacgaatgaattcatgactcctgtattaaagaattctcagaaaatcaataagaatgtcaactatatcacatcatggctgagcattgtagggccagttgttgggctgaatctacctctgagttatgccaaagcaacgtctcaggatgaacgaaatgtcccttaacaagattcttctattgagtttaggaattgcggcacgaagaatgccaagagtttacctggccagccctggctttaataggactgataccatggaatatttcatctcaccaagatgtgacatggattatttttcccttggacacaaatgtctacagcaactggtgtttgataggctgaatgtttagaagaaacacttcaaagggatacatcatggccaggcatggtggctcacacctgtaatccaagcactttgggaggccaaggtgggagcatcacttgatcctgggagttcgagaccagcctgggcaacatggtgaaaccctgtcggtacaaaaaaatacaaaaatttgcctgtttatggtggtgtgttcctgtagtcccagctccccaggaggctgaggtgggaggttggctttaacccaggaggcagaggttgcagtgagctgagactgtgccactgcagtccagcctgggtgacagagccagacactgtctcggggaaaaaaaaaaaaaaaaaaagacacatcactataaatagcaaaaaaacaaatctaacttattaatactaggaataccaacattattagggcacttgcaggttattcttttctaggccaagtacttcacttccatttgtctgacatggagattgagggagaaatgtatttgtgtgttcattttaatgtaagatatataaaaattaaattactggatttacctgtccctgaaactggtgttataaacatgacctatcttaagtgattttcccacaatcaaactcaggaacaatagattatttctgttttactccaaaagagagagagagagtgagtgtgagtgtgtgtgtgtgtgtgtgtgtatgtgtgggtgtttgtgtagatagttgtaaaacaaagaaaaaacacaatattttactgtgagataatatgttttaccagcaaagtgtggcatagtaattagaagttttctaaaaagctataggagatatttaaacattaaaatttctttttgacctatagtaataaaacaatggtcattttacccctctgcttctcaaccccacagctgctctgctgtactctttgagggctcttgagcgagtcttcatgtccctgagacttattttcctcatctttaatttgaaactaacaagctacctcatagggttgctgtgagaaccacatgagatcattaatgcatgataagatattgtaaagtattatacgaatattcattaaatgctcacctttcttgtatataattggtattcactaaggctgtaaataagtttcatagccagttaagtattaagataaacctaacctgg

SEQ ID NO: 268509 - DNA, 663 bp, Artificial Sequence
  derived and/or modified sequence
atggaggaggacgagttcatcggcgagaagaccttccagagatactgcgccgagttcatcaagcacagccagcagatcggcgacagctgggagtggagacccagcaaggactgcagcgacggctacatgtgcaagatccacttccagatcaagaacggcagcgtgatgagccacctgggcgccagcacccacggccagacctgcctgcccatggaggaggccttcgagctgcccctggacgactgcgaggtgatcgagaccgccgccgccagcgaggtgatcaagtacgagtaccacgtgctgtacagctgcagctaccaggtgcccgtgctgtacttcagagccagcttcctggacggcagacccctgaccctgaaggacatctgggagggcgtgcacgagtgctacaagatgagactgctgcagggcccctgggacaccatcacccagcaggagcaccccatcctgggccagcccttcttcgtgctgcacccctgcaagaccaacgagttcatgacccccgtgctgaagaacagccagaagatcaacaagaacgtgaactacatcaccagctggctgagcatcgtgggccccgtggtgggcctgaacctgcccctgagctacgccaaggccaccagccaggacgagagaaacgtgccctag

SEQ ID NO: 268510 - DNA, 378 bp, Artificial Sequence
  derived and/or modified sequence
atggaggaggacgagttcatcggcgagaagaccttccagagatactgcgccgagttcatcaagcacagccagcagatcggcgacagctgggagtggagacccagcaaggactgcagcgacggctacatgtgcaagatccacttccagatcaagaacggcagcgtgatgagccacctgggcgccagcacccacggccagacctgcctgcccatggaggtgaagagctgcagcgtgacccaggccggcgtgcagctgagagacctgagcagcctgcagcccccccccagcggcttcaagcagttcagctgcctgagcctgcccagcaactgggactacagaggcagccccctgcacctggccaacttcctgtacttctag

SEQ ID NO: 268511 - protein, 800 aa, Artificial Sequence
  derived and/or modified sequence
MSSNSFPYNEQSGGGEATELGQEATSTISPSGAFGLFSSDLKKNEDLKQMLESNKDSAKLDAMKRIVGMIAKGKNASELFPAVVKNVASKNIEIKKLVYVYLVRYAEEQQDLALLSISTFQRALKDPNQLIRASALRVLSSIRVPIIVPIMMLAIKEASADLSPYVRKNAAHAIQKLYSLDPEQKEMLIEVIEKLLKDKSTLVAGSVVMAFEEVCPDRIDLIHKNYRKLCNLLVDVEEWGQVVIIHMLTRYARTQFVSPWKEGDELEDNGKNFYESDDDQKEKTDKKKKPYTMDPDHRLLIRNTKPLLQSRNAAVVMAVAQLYWHISPKSEAGIISKSLVRLLRSNREVQYIVLQNIATMSIQRKGMFEPYLKSFYVRSTDPTMIKTLKLEILTNLANEANISTLLREFQTYVKSQDKQFAAATIQTIGRCATNILEVTDTCLNGLVCLLSNRDEIVVAESVVVIKKLLQMQPAQHGEIIKHMAKLLDSITVPVARASILWLIGENCERVPKIAPDVLRKMAKSFTSEDDLVKLQILNLGAKLYLTNSKQTKLLTQYILNLGKYDQNYDIRDRTRFIRQLIVPNVKSGALSKYAKKIFLAQKPAPLLESPFKDRDHFQLGTLSHTLNIKATGYLELSNWPEVAPDPSVRNVEVIELAKEWTPAGKAKQENSAKKFYSESEEEEDSSDSSSDSESESGSESGEQGESGEEGDSNEDSSEDSSSEQDSESGRESGLENKRTAKRNSKAKGKSDSEDGEKENEKSKTSDSSNDESSSIEDSSSDSESESEPESESESRRVTKE

SEQ ID NO: 268512 - protein, 255 aa, Artificial Sequence
  derived and/or modified sequence
MPRSVVGTACMYFKRFYLNNSVMEYHPRIIMLTCAFLACKVDEFNVSSPQFVGNLRESPLGQEKALEQILEYELLLIQQLNFHLIVHNPYRPFEGFLIDLKTRYPILENPEILRKTADDFLNRIALTDAYLLYTPSQIALTAILSSASRAGITMESYLSESLMLKENRTCLSQLLDIMKSMRNLVKKYEPPRSEEVAVLKQKLERCHSAELALNVITKKRKGYEDDDYVSKKSKHEEVCFTPKMNSKLFLLYILV

SEQ ID NO: 268513 - DNA, 768 bp, Artificial Sequence
  derived and/or modified sequence
atgcccagaagcgtggtgggcaccgcctgcatgtacttcaagagattctacctgaacaacagcgtgatggagtaccaccccagaatcatcatgctgacctgcgccttcctggcctgcaaggtggacgagttcaacgtgagcagcccccagttcgtgggcaacctgagagagagccccctgggccaggagaaggccctggagcagatcctggagtacgagctgctgctgatccagcagctgaacttccacctgatcgtgcacaacccctacagacccttcgagggcttcctgatcgacctgaagaccagataccccatcctggagaaccccgagatcctgagaaagaccgccgacgacttcctgaacagaatcgccctgaccgacgcctacctgctgtacacccccagccagatcgccctgaccgccatcctgagcagcgccagcagagccggcatcaccatggagagctacctgagcgagagcctgatgctgaaggagaacagaacctgcctgagccagctgctggacatcatgaagagcatgagaaacctggtgaagaagtacgagccccccagaagcgaggaggtggccgtgctgaagcagaagctggagagatgccacagcgccgagctggccctgaacgtgatcaccaagaagagaaagggctacgaggacgacgactacgtgagcaagaagagcaagcacgaggaggtgtgcttcacccccaagatgaacagcaagctgttcctgctgtacatcctggtgtag

SEQ ID NO: 268514 - DNA, 2391 bp, Artificial Sequence
  derived and/or modified sequence
gcaaatactatgagaaaaggttattggaattctgttcggtgtttaagccagcaatgccaagatctgttgtgggtacggcttgtatgtatttcaaacgtttttatcttaataactcagtaatggaatatcaccccaggataataatgctcacttgtgcatttttggcctgcaaagtagatgaattcaatgtatctagtcctcagtttgttggaaacctccgggagagtcctcttggacaggagaaggcacttgaacagatactggaatatgaactacttcttatacagcaacttaatttccaccttattgtccacaatccttacagaccatttgagggcttcctcatcgacttaaagacccgctatcccatattggagaatccagagattttgaggaaaacagctgatgactttcttaatagaattgcattgacggatgcttaccttttatacacaccttcccaaattgccctgactgccattttatctagtgcctccagggctggaattactatggaaagttatttatcagagagtctgatgctgaaagagaacagaacttgcctgtcacagttactagatataatgaaaagcatgagaaacttagtaaagaagtatgaaccacccagatctgaagaagttgctgttctgaaacagaagttggagcgatgtcattctgctgagcttgcacttaacgtaatcacgaagaagaggaaaggctatgaagatgatgattacgtctcaaagaaatccaaacatgaggaggtatgttttactccaaagatgaactctaagttatttttgttatacattctggtgtgactatactgttaagatttattctccaagagtacaggcattatagagttgtgggttttttcattttttgcatacttccttacgtacagtactgttgtccattattaaagggatttttctctcttctgtctttatttaatgaagaatccttcctgtgttcatagaaagcagaagcaatatgtatacatactacatttttgctttttttcttattctccaaggatttttcccttacccccttttaaaaaaaattttctatctgtcaagtcaaataagtgaataatcagaggcaaaaggtcacagccataacctttattcctcactggaggagtctggtgagaccatgccaacattactaacagtgaactattacaaaatttcctggtttatcttttgtaatccacatgggtaaaaggaggagaacattttcttaaagggaggtaagaggtaaacaatactggttatgcttcagtgttatccttaccacactttttttccttcttaggaagaatggactgatgacgacctggtagaatctctctaaccatttgaagttgatttctcaatgctaactaatcaagagaagtaggaagcatatcaaacgtttaactttatttaaaaagtataatgtgaaaacataaaatatattaaaacttttctattgttttctttccctttcacagtaactttatgtaaaataaaccatcttcaaaagagctagaatagcacctgttttgaatattcttattccatcgtgactaatatcaaattaaagctgcaactcatttgcctaattttttaagcaaaatatgataggcaaacctatgctttttttaaaaaaggcaccacaaaaaacaaaacttagtagccagctttaaaagtgttaaggaatgtgttttgccctctagaaacctttataaatggctttttgaatgccatcctgatatatttagctatttgtccattactattaaactgcagaaggtatttcaactgttacatggtactgaaagccagtcgtctgggtaatgaatattatttttctttagttacccgaaaacatttccaaatgggtttttaaaaaaaaccagatatatgattttgaatagctgtctacatcaaactcttacgctagtatagataagtaggtagcagcaaattgtatattcagttgtggttgttttttaattttgttttgatgtaaggtcttgctatgttgcccaggctgtctcagactcctaggctctagtgatcctctgcctcagttttctgagtaattgggactacaggcacacatcaccacagccttataattaacctattagatcctataagtgaatccgtgtaagtagattataacagttactaggaattttgcagattaaatatgttagagaaatgtaattcaaattgaaatgagtcaatataaaaatatgaaagcacagactattacagcaaattacttacatatgaatcatggccagctgtatttcactatgtgaccttggtaagttattaaacctctaagtgccagtttcccacactgaaaatggggaagataaaaatgcctact

SEQ ID NO: 268515 - DNA, 768 bp, Artificial Sequence
  derived and/or modified sequence
atgccaagatcagtcgtaggcacggcttgcatgtactttaagagattctatctaaataatagcgtcatggaataccaccctagaattattatgttgacctgtgctttcctggcttgcaaagtcgacgaattcaatgtgagttccccccaattcgtgggcaacctgagagagagcccactgggccaagagaaggctctggagcaaatcctcgagtacgagctgttgttgattcagcaactgaacttccacctcattgtgcacaatccctaccgcccattcgagggctttctcatcgacctcaagactcggtatcccatccttgaaaatccagagatcctacggaagactgcggacgattttctcaatcgcattgcactcacggatgcttatttactatacacaccatcacaaattgctctgacagccattctgtcttccgcttctagggcgggcataacgatggagtcatacttaagcgaaagccttatgctaaaagaaaatcgaacatgcctgtctcaactcttggatatcatgaaaagtatgaggaatttggtgaagaagtatgaacctccaagatctgaggaggttgccgttctgaagcaaaagctggagagatgtcactctgctgaactggccctcaacgtgatcacaaaaaaacgtaagggatatgaggatgatgattacgtcagtaaaaaatcaaagcacgaggaggtttgcttcactcctaaaatgaactcgaagctgtttttgctttatatccttgtttag

SEQ ID NO: 268516 - DNA, 768 bp, Artificial Sequence
  derived and/or modified sequence
atgcccaggtctgtggtgggcacagcctgcatgtacttcaagcgcttctacctgaacaacagcgtgatggagtaccacccccgcatcatcatgctgacctgtgccttcctggcctgcaaggtggatgagttcaacgtgagcagcccccagtttgtgggcaacctgcgggagagccccctgggccaggagaaggccctggagcagatcctggagtatgagctgctgctgatccagcagctgaacttccacctgattgtgcacaacccctaccggccctttgagggcttcctgattgacctgaagacccgctaccccatcctggagaaccctgagatcctgaggaagacagcagatgacttcctgaaccgcatcgccctgacagatgcctacctgctgtacacccccagccagatcgccctgacagccatcctgagcagcgccagccgggccggcatcaccatggagagctacctgtctgagagcctgatgctgaaggagaacagaacctgcctgagccagctgctggacatcatgaagtccatgaggaacctggtgaagaagtatgagccccccaggtctgaggaggtggccgtgctgaagcagaagctggagcgctgccacagcgctgagctggccctgaatgtcatcaccaagaagaggaagggctatgaagatgatgattatgtgtccaagaagagcaagcatgaggaggtgtgcttcacccccaagatgaacagcaagctgttcctgctgtacatcctggtgtag

SEQ ID NO: 268517 - DNA, 768 bp, Artificial Sequence
  derived and/or modified sequence
atgccccggagcgtggtgggcaccgcctgcatgtacttcaagcggttttatctaaacaacagtgtgatggaatatcacccaagaatcataatgctgacttgcgcgttcctggcctgtaaggtagatgagtttaacgtgagcagtcctcaatttgtgggcaacctcagggagtcacctcttggccaggaaaaggccctcgagcagatcctagaatatgagctgctgttgatccagcagctcaactttcatctgatagtacataacccatacaggcctttcgaaggttttcttatcgacctaaagactcgataccccatcctggaaaatccggaaattttacgcaagacagctgatgattttctcaatcgcatagcgttaaccgacgcctatttgttatataccccgagtcagatcgccttgactgctatactgtcatcggcatccagggctgggatcacaatggagtcctatttatcagagtccttgatgctgaaggagaataggacttgcctaagtcagctcttggatatcatgaaatccatgcggaatttagttaaaaaatacgaaccaccgcgcagtgaggaagtggctgtattgaaacaaaagcttgagcggtgccactcggccgagctggcactcaacgtaataaccaagaagagaaagggatatgaggatgatgactatgtgagtaagaaaagcaaacatgaggaggtgtgttttacccccaagatgaactcaaagctgtttctactttacattctggtctag

SEQ ID NO: 268518 - DNA, 768 bp, Artificial Sequence
  derived and/or modified sequence
atgcccagatcggtcgtgggcacagcctgcatgtactttaagcgcttctacttaaataactccgtgatggagtatcacccccgaatcatcatgctgacatgcgcatttcttgcctgtaaggtggatgagtttaacgtgtcctcaccccaatttgtgggtaatctgcgagagagccctttgggacaggagaaagcccttgagcaaatcctcgagtacgaactgctcctaatccagcagcttaattttcacttaatcgtgcacaatccctatcgcccattcgaaggctttcttatagacctgaaaacgcgttaccccattttggagaacccggaaatcctcagaaagactgccgatgactttctaaacagaatagccctgacagatgcctacctgctatacactccgtctcaaatcgccctgacagccatcctgtctagtgccagccgcgcagggattacaatggaatcctacctctccgagagtctcatgctgaaagagaacaggacctgtctatctcaacttctggatataatgaagtctatgcggaacttggtgaaaaagtacgaaccacccaggagcgaagaagttgccgtactcaaacagaagttagagcgctgccactccgcagagctcgcccttaatgtaataaccaagaaaaggaagggatatgaggacgatgattacgtttctaagaagtcaaagcatgaagaggtgtgcttcacacccaaaatgaacagcaagctcttcctgctatacattctggtgtag

SEQ ID NO: 268519 - protein, 1291 aa, Artificial Sequence
  derived and/or modified sequence
MSSAVGPRGPRPPTVPPPMQELPDLSHLTEEERNIIMAVMDRQKEEEEKEEAMLKCVVRDMAKPAACKTPRNAENQPHQPSPRLHQQFESYKEQVRKIGEEARRYQGEHKDDAPTCGICHKTKFADGCGHLCSYCRTKFCARCGGRVSLRSNNEDKYVMWVCNLCRKQQEILTKSGAWFFGSGPQQTSQDGTLSDTATGAGSEVPREKKARLQERSRSQTPLSTAAASSQDAAPPSAPPDRSKGAEPSQQALGPEQKQASSRSRSEPPRERKKTPGLSEQNGKGALKSERKRVPKTSAQPVEGAVEERERKERRESRRLEKGRSQDYPDTPEKRDEGKAADEEKQRKEEDYQTRYRSDPNLARYPVKPPPEEQQMRMHARVSRARHERRHSDVALPRTEAGAALPEGKAGKRAPAAARASPPDSPRAYSAERTAETRAPGAKQLTNHSPPAPRHGPVPAEAPELKAQEPLRKQSRLDPSSAVLMRKAKREKVETMLRNDSLSSDQSESVRPSPPKPHRSKRGGKKRQMSVSSSEEEGVSTPEYTSCEDVELESESVSEKGDLDYYWLDPATWHSRETSPISSHPVTWQPSKEGDRLIGRVILNKRTTMPKDSGALLGLKVVGGKMTDLGRLGAFITKVKKGSLADVVGHLRAGDEVLEWNGKPLPGATNEEVYNIILESKSEPQVEIIVSRPIGDIPRIPESSHPPLESSSSSFESQKMERPSISVISPTSPGALKDAPQVLPGQLSVKLWYDKVGHQLIVNVLQATDLPARVDGRPRNPYVKMYFLPDRSDKSKRRTKTVKKILEPKWNQTFVYSHVHRRDFRERMLEITVWDQPRVQEEESEFLGEILIELETALLDDEPHWYKLQTHDESSLPLPQPSPFMPRRHIHGESSSKKLQRSQRISDSDISDYEVDDGIGVVPPGYRSSARESKSTTLTVPEQQRTTHHRSRSVSPHRGNDQGKPRSRLPNVPLQRSLDEIHPTRRSRSPTRHHDASRSPVDHRTRDVDSQYLSEQDRMHRQRSPTQSPPADTSFSSRRGRQLPQVPVRSGSIEQESGHKKLKSTIQRSTETGMAAEMRKMVRQPSRESTDGSINSYSSEGNLIFPGVRLGADSQFSDFLDGLGPAQLVGRQTLATPAMGDIQIGMEDKKGQLEVEVIRARSLTQKPGSKSTPAPYVKVYLLENGACIAKKKTRIARKTLDPLYQQSLVFDESPQGKVLQVIVWGDYGRMDHKCFMGVAQILLEELDLSSMVIGWYKLFPPSSLVDPTLTPLTRRASQSSLESSTGPPCIRS

SEQ ID NO: 268520 - protein, 1475 aa, Artificial Sequence
  derived and/or modified sequence
MSSAVGPRGPRPPTVPPPMQELPDLSHLTEEERNIIMAVMDRQKEEEEKEEAMLKCVVRDMAKPAACKTPRNAENQPHQPSPRLHQQFESYKEQVRKIGEEARRYQGEHKDDAPTCGICHKTKFADGCGHLCSYCRTKFCARCGGRVSLRSNNEDICVMWVCNLCRKQQEILTKSGAWFFGSGPQQTSQDGTLSDTATGAGSEVPREKKARLQERSRSQTPLSTAAASSQDAAPPSAPPDRSKGAEPSQQALGPEQKQASSRSRSEPPRERKKTPGLSEQNGKGALKSERKRVPKTSAQPVEGAVEERERKERRESRRLEKGRSQDYPDTPEKRDEGKAADEEKQRKEEDYQTRYRSDPNLARYPVKPPPEEQQMRMHARVSRARHERRHSDVALPRTEAGAALPEGKAGKRAPAAARASPPDSPRAYSAERTAETRAPGAKQLTNHSPPAPRHGPVPAEAPELKAQEPLRKQSRLDPSSAVLMRKAKREKVETMLRNDSLSSDQSESVRPSPPKPHRSKRGGKKRQMSVSSSEEEGVSTPEYTSCEDVELESESVSEKGDLDYYWLDPATWHSRETSPISSHPVTWQPSKEGDRLIGRVILNKRTTMPKDSGALLGLKVVGGKMTDLGRLGAFITKVKKGSLADVVGHLRAGDEVLEWNGKPLPGATNEEVYNIILESKSEPQVEIIVSRPIGDIPRIPESSHPPLESSSSSFESQKMERPSISVISPTSPGALKDAPQVLPGQLSVKLWYDKVGHQLIVNVLQATDLPARVDGRPRNPYVKMYFLPDRSDKSKRRTKTVKKILEPKWNQTFVYSHVHRRDFRERMLEITVWDQPRVQEEESEFLGEILIELETALLDDEPHWYKLQTHDESSLPLPQPSPFMPRRHIHGESSSKKLQRSQRISDSDISDYEVDDGIGVVPPGYRSSARESKSTTLTVPEQQRTTHHRSRSVSPHRGNDQGKPRSRLPNVPLQRSLDEIHPTRRSRSPTRHHDASRSPVDHRTRDVDSQYLSEQDSELLMLPRAKRGRSAECLHTTRMHRQRSPTQSPPADTSFSSRRGRQLPQVPVRSGSIEQASLVVEERTRQMKMKVHRFKQTTGSGSSQELDREQYSKYNIHKDQYRSCDNVSAKSSDSDVSDVSAISRTSSASRLSSTSFMSEQSERPRGRIRRMGTSGRSIMKSTSVSGEMYTLEHNDGSQSDTAVGTVGAGGKKRRSSLSAKVVAIVSRRSRSTSQLSQTESGHKKLKSTIQRSTETGMAAEMRKMVRQPSRESTDGSINSYSSEGNLIFPGVRLGADSQFSDFLDGLGPAQLVGRQTLATPAMGDIQIGMEDKKGQLEVEVIRARSLTQKPGSKSTPAPYVKVYLLENGACIAKKKTRIARKTLDPLYQQSLVFDESPQGKVLQVIVWGDYGRMDHKCFMGVAQILLEELDLSSMVIGWYKLFPPSSLVDPTLTPLTRRASQSSLESSTGPPCIRS

SEQ ID NO: 268521 - protein, 1371 aa, Artificial Sequence
  derived and/or modified sequence
MSSAVGPRGPRPPTVPPPMQELPDLSHLTEEERNIIMAVMDRQKEEEEKEEAMLKCVVRDMAKPAACKTPRNAENQPHQPSPRLHQQFESYKEQVRKIGEEARRYQGEHKDDAPTCGICHKTKFADGCGHLCSYCRTKFCARCGGRVSLRSNNENKIVMWVCNLCRKQQEILTKSGAWFFGSGPQQTSQDGTLSDTATGAGSEVPREKKARLQERSRSQTPLSTAAASSQDAAPPSAPPDRSKGAEPSQQALGPEQKQASSRSRSEPPRERKKTPGLSEQNGKGALKSERKRVPKTSAQPVEGAVEERERKERRESRRLEKGRSQDYPDTPEKRDEGKAADEEKQRKEEDYQTRYRSDPNLARYPVKPPPEEQQMRMHARVSRARHERRHSDVALPRTEAGAALPEGKAGKRAPAAARASPPDSPRAYSAERTAETRAPGAKQLTNHSPPAPRHGPVPAEAPELKAQEPLRKQSRLDPSSAVLMRKAKREKVETMLRNDSLSSDQSESVRPSPPKPHRSKRGGKKRQMSVSSSEEEGVSTPEYTSCEDVELESESVSEKGDLDYYWLDPATWHSRETSPISSHPVTWQPSKEGDRLIGRVILNKRTTMPKDSGALLGLKVVGGKMTDLGRLGAFITKVKKGSLADVVGHLRAGDEVLEWNGKPLPGATNEEVYNIILESKSEPQVEIIVSRPIGDIPRIPESSHPPLESSSSSFESQKMERPSISVISPTSPGALKDAPQVLPGQLSVKLWYDKVGHQLIVNVLQATDLPARVDGRPRNPYVKMYFLPDRSDKSKRRTKTVKKILEPKWNQTFVYSHVHRRDFRERMLEITVWDQPRVQEEESEFLGEILIELETALLDDEPHWYKLQTHDESSLPLPQPSPFMPRRHIHGESSSKKLQRSQRISDSDISDYEVDDGIGVVPPVGYRSSARESKSTTLTVPEQQRTTHHRSRSVSPHRGNDQGKPRSRLPNVPLQRSLDEIHPTRRSRSPTRHHDASRSPVDHRTRDVDSQYLSEQDSELLMLPRAKRGRSAECLHTTSELQPFLDRARSASTNCLRPDTSLHSPERERGRWSPSLDRRRPPSPRIQIQHASPENDRMHRQRSPTQSPPADTSFSSRRGRQLPQVPVRSGSIEQESGHKKLKSTIQRSTETGMAAEMRKMVRQPSRESTDGSINSYSSEGNLIFPGVRLGADSQFSDFLDGLGPAQLVGRQTLATPAMGDIQIGMEDKKGQLEVEVIRARSLTQKPGSKSTPAPYVKVYLLENGACIAKKKTRIARKTLDPLYQQSLVFDESPQGKVLQVIVWGDYGRMDHKCFMGVAQILLEELDLSSMVIGWYKLFPPSSLVDPTLTPLTRRASQSSLESSTGPPCIRS

SEQ ID NO: 268522 - protein, 1541 aa, Artificial Sequence
  derived and/or modified sequence
MSSAVGPRGPRPPTVPPPMQELPDLSHLTEEERNIIMAVMDRQKEEEEKEEAMLKCVVRDMAKPAACKTPRNAENQPHQPSPRLHQQFESYKEQVRKIGEEARRYQGEHKDDAPTCGICHKTKFADGCGHLCSYCRTKFCARCGGRVSLRSNNEDKYVMWVCNLCRKQQEILTKSGAWFFGSGPQQTSQDGTLSDTATGAGSEVPREKKARLQERSRSQTPLSTAAASSQDAAPPSAPPDRSKGAEPSQQALGPEQKQASSRSRSEPPRERKKTPGLSEQNGKGALKSERKRVPKTSAQPVEGAVEERERKERRESRRLEKGRSQDYPDTPEKRDEGKAADEEKQRKEEDYQTRYRSDPNLARYPVKPPPEEQQMRMHARVSRARHERRHSDVALPRTEAGAALPEGKAGKRAPAAARASPPDSPRAYSAERTAETRAPGAKQLTNHSPPAPRHGPVPAEAPELKAQEPLRKQSRLDPSSAVLMRKAKREKVETMLRNDSLSSDQSESVRPSPPKPHRSKRGGKKRQMSVSSSEEEGVSTPEYTSCEDVELESESVSEKGDLDYYWLDPATWHSRETSPISSHPVTWQPSKEGDRLIGRVILNKRTTMPKDSGALLGLKVVGGKMTDLGRLGAFITKVKKGSLADVVGHLRAGDEVLEWNGKPLPGATNEEVYNIILESKSEPQVEIIVSRPIGDIPRIPESSHPPLESSSSSFESQKMERPSISVISPTSPGALKDAPQVLPGQLSVKLWYDKVGHQLIVNVLQATDLPARVDGRPRNPYVKMYFLPDRSDKSKRRTKTVKKILEPKWNQTFVYSHVHRRDFRERMLEITVWDQPRVQEEESEFLGEILIELETALLDDEPHWYKLQTHDESSLPLPQPSPFMPRRHIHGESSSKKLQRSQRISDSDISDYEVDDGIGVVPPVGYRSSARESKSTTLTVPEQQRTTHHRSRSVSPHRGNDQGKPRSRLPNVPLQRSLDEIHPTRRSRSPTRHHDASRSPVDHRTRDVDSQYLSEQDSELLMLPRAKRGRSAECLHTTRHLVRHYKTLPPKMPLLQSSSHWNIYSELQPFLDRARSASTNCLRPDTSLHSPERERMHRQRSPTQSPPADTSFSSRRGRQLPQVPVRSGSIEQASLVVEERTRQMKMKVHRFKQTTGSGSSQELDREQYSKYNIHKDQYRSCDNVSAKSSDSDVSDVSAISRTSSASRLSSTSFMSEQSERPRGRISSFTPKMQGRRMGTSGRSIMKSTSVSGEMYTLEHNDGSQSDTAVGTVGAGGKKRRSSLSAKVVAIVSRRSRSTSQLSQTESGHKKLKSTIQRSTETGMAAEMRKMVRQPSRESTDGSINSYSSEGNLIFPGVRLGADSQFSDFLDGLGPAQLVGRQTLATPAMGDIQIGMEDKKGQLEVEVIRARSLTQKPGSKSTPAPYVKVYLLENGACIAKKKTRIARKTLDPLYQQSLVFDESPQGKVLQVIVWGDYGRMDHKCFMGVAQILLEELDLSSMVIGWYKLFPPSSLVDPTLTPLTRRASQSSLESSTGPPCIRS

SEQ ID NO: 268523 - protein, 1481 aa, Artificial Sequence
  derived and/or modified sequence
MSSAVGPRGPRPPTVPPPMQELPDLSHLTEEERNIIMAVMDRQKEEEEKEEAMLKCVVRDMAKPAACKTPRNAENQPHQPSPRLHQQFESYKEQVRKIGEEARRYQGEHKDDAPTCGICHKTKFADGCGHLCSYCRTKFCARCGGRVSLRSNNENKIVMWVCNLCRKQQEILTKSGAWFFGSGPQQTSQDGTLSDTATGAGSEVPREKKARLQERSRSQTPLSTAAASSQDAAPPSAPPDRSKGAEPSQQALGPEQKQASSRSRSEPPRERKKTPGLSEQNGKGALKSERKRVPKTSAQPVEGAVEERERKERRESRRLEKGRSQDYPDTPEKRDEGKAADEEKQRKEEDYQTRYRSDPNLARYPVKPPPEEQQMRMHARVSRARHERRHSDVALPRTEAGAALPEGKAGKRAPAAARASPPDSPRAYSAERTAETRAPGAKQLTNHSPPAPRHGPVPAEAPELKAQEPLRKQSRLDPSSAVLMRKAKREKVETMLRNDSLSSDQSESVRPSPPKPHRSKRGGKKRQMSVSSSEEEGVSTPEYTSCEDVELESESVSEKGDLDYYWLDPATWHSRETSPISSHPVTWQPSKEGDRLIGRVILNKRTTMPKDSGALLGLKVVGGKMTDLGRLGAFITKVKKGSLADVVGHLRAGDEVLEWNGKPLPGATNEEVYNIILESKSEPQVEIIVSRPIGDIPRIPESSHPPLESSSSSFESQKMERPSISVISPTSPGALKDAPQVLPGQLSVKLWYDKVGHQLIVNVLQATDLPARVDGRPRNPYVKMYFLPDRSDKSKRRTKTVKKILEPKWNQTFVYSHVHRRDFRERMLEITVWDQPRVQEEESEFLGEILIELETALLDDEPHWYKLQTHDESSLPLPQPSPFMPRRHIHGESSSKKLQRSQRISDSDISDYEVDDGIGVVPPVGYRSSARESKSTTLTVPEQQRTTHHRSRSVSPHRGNDQGKPRSRLPNVPLQRSLDEIHPTRRSRSPTRHHDASRSPVDHRTRDVDSQYLSEQDSELLMLPRAKRGRSAECLHTTSELQPFLDRARSASTNCLRPDTSLHSPERERMHRQRSPTQSPPADTSFSSRRGRQLPQVPVRSGSIEQASLVVEERTRQMKMKVHRFKQTTGSGSSQELDREQYSKYNIHKDQYRSCDNVSAKSSDSDVSDVSAISRTSSASRLSSTSFMSEQSERPRGRISSFTPKMQGRRMGTSGRSIMKSTSVSGEMYTLEHNDGSQSDTAVGTVGAGGKKRRSSLSAKVVAIVSRRSRSTSQLSQTESGHKKLKSTIQRSTETGMAAEMRKMVRQPSRESTDGSINSYSSEGNLIFPGVRLGADSQFSDFLDGLGPAQLVGRQTLATPAMAPYVKVYLLENGACIAKKKTRIARKTLDPLYQQSLVFDESPQGKVLQVIVWGDYGRMDHKCFMGVAQILLEELDLSSMVIGWYKLFPPSSLVDPTLTPLTRRASQSSLESSTGPPCIRS

SEQ ID NO: 268524 - protein, 1481 aa, Artificial Sequence
  derived and/or modified sequence
MSSAVGPRGPRPPTVPPPMQELPDLSHLTEEERNIIMAVMDRQKEEEEKEEAMLKCVVRDMAKPAACKTPRNAENQPHQPSPRLHQQFESYKEQVRKIGEEARRYQGEHKDDAPTCGICHKTKFADGCGHLCSYCRTKFCARCGGRVSLRSNNEDKVVMWVCNLCRKQQEILTKSGAWFFGSGPQQTSQDGTLSDTATGAGSEVPREKKARLQERSRSQTPLSTAAASSQDAAPPSAPPDRSKGAEPSQQALGPEQKQASSRSRSEPPRERKKTPGLSEQNGKGALKSERKRVPKTSAQPVEGAVEERERKERRESRRLEKGRSQDYPDTPEKRDEGKAADEEKQRKEEDYQTRYRSDPNLARYPVKPPPEEQQMRMHARVSRARHERRHSDVALPRTEAGAALPEGKAGKRAPAAARASPPDSPRAYSAERTAETRAPGAKQLTNHSPPAPRHGPVPAEAPELKAQEPLRKQSRLDPSSAVLMRKAKREKVETMLRNDSLSSDQSESVRPSPPKPHRSKRGGKKRQMSVSSSEEEGVSTPEYTSCEDVELESESVSEKGDLDYYWLDPATWHSRETSPISSHPVTWQPSKEGDRLIGRVILNKRTTMPKDSGALLGLKVVGGKMTDLGRLGAFITKVKKGSLADVVGHLRAGDEVLEWNGKPLPGATNEEVYNIILESKSEPQVEIIVSRPIGDIPRIPESSHPPLESSSSSFESQKMERPSISVISPTSPGALKDAPQVLPGQLSVKLWYDKVGHQLIVNVLQATDLPARVDGRPRNPYVKMYFLPDRSDKSKRRTKTVKKILEPKWNQTFVYSHVHRRDFRERMLEITVWDQPRVQEEESEFLGEILIELETALLDDEPHWYKLQTHDESSLPLPQPSPFMPRRHIHGESSSKKLQRSQRISDSDISDYEVDDGIGVVPPVGYRSSARESKSTTLTVPEQQRTTHHRSRSVSPHRGNDQGKPRSRLPNVPLQRSLDEIHPTRRSRSPTRHHDASRSPVDHRTRDVDSQYLSEQDSELLMLPRAKRGRSAECLHTTSELQPFLDRARSASTNCLRPDTSLHSPERERMHRQRSPTQSPPADTSFSSRRGRQLPQVPVRSGSIEQASLVVEERTRQMKMKVHRFKQTTGSGSSQELDREQYSKYNIHKDQYRSCDNVSAKSSDSDVSDVSAISRTSSASRLSSTSFMSEQSERPRGRISSFTPKMQGRRMGTSGRSIMKSTSVSGEMYTLEHNDGSQSDTAVGTVGAGGKKRRSSLSAKVVAIVSRRSRSTSQLSQTESGHKKLKSTIQRSTETGMAAEMRKMVRQPSRESTDGSINSYSSEGNLIFPGVRLGADSQFSDFLDGLGPAQLVGRQTLATPAMAPYVKVYLLENGACIAKKKTRIARKTLDPLYQQSLVFDESPQGKVLQVIVWGDYGRMDHKCFMGVAQILLEELDLSSMVIGWYKLFPPSSLVDPTLTPLTRRASQSSLESSTGPPCIRS

SEQ ID NO: 268525 - DNA, 3876 bp, Artificial Sequence
  derived and/or modified sequence
atgtcaagcgccgtgggccctcggggcccacgccctcccacagtcccccccccaatgcaggagctgccagacctgtcccacctcactgaagaagagaggaatatcattatggcagtcatggaccgacaaaaggaggaggaggaaaaagaggaagcgatgctgaaatgtgtggtgcgggatatggctaaaccggcagcatgtaagaccccacggaatgctgagaaccaaccacaccagccgtcacctaggctgcatcaacaattcgagtcttataaggagcaagtgagaaagatcggagaggaggcgagacggtaccagggcgaacataaagacgacgccccaacttgcgggatctgccacaaaactaaatttgccgacggctgtggccacctgtgctcatattgtcgaactaagttttgcgctcggtgcggcggccgcgtgtctctgaggagtaataatgaagacaagtatgttatgtgggtgtgtaacctttgcagaaaacagcaagagatactgaccaaatccggtgcctggttcttcggcagcgggccccaacagacgtcccaggacggaacattgagcgataccgcaaccggtgctgggtctgaggtgcctcgtgagaagaaagcgaggctgcaggagcggtcccgttcccagactcctctgtccaccgcggcagctagtagccaagacgccgctcccccatcagctccacccgaccggtcaaaaggagccgagccttcccagcaggccctgggtcccgagcaaaagcaggcgagctctaggagtcgctccgagccaccacgcgagcggaaaaagaccccaggcctgtcagagcagaacggcaaaggggccctgaagagtgagagaaagcgggtgcctaagacttctgctcagccagttgaaggcgccgttgaggagagggagcgcaaagagaggcgagagagcagaaggctggaaaaagggagatctcaggactacccagacacgcctgagaaacgggacgaaggaaaggctgctgatgaggagaaacagcgtaaggaagaggactatcagacacggtaccggagcgatcctaaccttgccaggtatcctgttaaacctccccccgaagaacaacagatgcgcatgcacgccagagtcagtagagcgagacatgaaagaagacatagcgatgtggccctgcccagaacagaagccggcgcagctcttccagagggaaaggcaggaaaacgagcccctgccgctgccagagctagccctccggattcccctcgcgcatactcagccgagcgcactgcagagacaagagcgcccggcgcaaagcaactgactaatcactccccacccgcgcctagacatggaccagtgcctgccgaagctcccgaattaaaggcccaagaaccgctcagaaagcagtcacgcttggatccgtcttccgcagtactaatgaggaaagccaaacgggagaaggtggaaacaatgctgcgaaatgactccctgtcgtctgaccagtctgaatccgtgcgcccctccccacccaaacctcaccgcagcaaacggggcggcaagaaacggcagatgtccgttagctcttccgaggaagagggtgtaagtaccccagagtacacatcgtgcgaggatgttgaactcgaaagcgagtcagttagcgaaaaaggcgacttagactattactggcttgaccctgctacttggcattcccgggaaacctcacctatcagcagccatcctgtcacctggcagccctcaaaggagggcgataggcttataggacgagtaatattaaataagcgcacaactatgcctaaagacagtggtgcactgttaggcctcaaagtggtcggggggaaaatgaccgatctcggccgtctgggcgctttcatcactaaggtgaagaaaggttccctggcagacgtggtaggacacctgcgagctggtgatgaagtgctcgagtggaatggcaagcccctgccaggggctacaaacgaggaggtgtataatattatcctggaaagtaagagcgaaccgcaggtcgagataattgtatctagaccgatcggcgatatccccagaattcctgaaagcagtcatcctccactcgagtcaagttcaagctcctttgaaagccagaagatggagagaccttctatttcagtgatctctccgacaagccctggagctctgaaagatgcaccccaagtcctcccagggcagcttagtgttaagctctggtacgataaggtcggccaccagttgattgtgaatgtgttgcaggctacggacctgccagctcgggtcgatgggaggccccggaacccatatgtcaaaatgtacttcctgccggacagatcagacaagagtaagcgccggaccaagacagtgaaaaaaattcttgaacctaagtggaatcagacctttgtttatagtcacgtgcatcggagggacttcagggaacgcatgctggagataacggtctgggatcagcctcgagtgcaggaagaagagtccgaattcctcggcgagattctcattgagctggaaacggcactgctcgatgacgagcctcattggtacaagctgcaaacccatgacgaatcctccctccctctgcctcagccttcacctttcatgccgcggaggcacatacatggcgagagtagttctaagaagctgcagagatctcaacgcatctccgactccgacatctcagattacgaggtcgacgacggaataggtgtagtcccaccaggctaccgctcctctgcccgagaatcgaagagcaccacactgacagtgccagaacagcagcgcacaacgcaccaccggagcaggtcggtttctccccacagagggaacgaccagggaaagcctaggagccggctaccaaatgtgcccctccagaggtctttggacgagatccatcctactcgacgtagccgcagtcccactcgtcaccatgacgcctcacgatcaccggtggaccatagaacacgcgatgtcgactctcagtacctgagcgagcaggatagaatgcatcgtcagaggagcccaacacagtcaccacctgcggacacctccttcagcagcagaagaggaagacagctgcctcaagtgcccgtgcgtagtggctctatcgaacaagagtccggacataaaaagctgaagtctaccattcagagaagcactgagaccggcatggcagctgaaatgaggaagatggtacgacagccatccagagaatcaaccgatggatctattaattcttactccagcgagggaaacttaatcttccccggagttcgcctaggggccgattcccagttttccgatttcctggatggactgggcccagcccagctagtggggcgccagacactggccacccctgcgatgggggacatccagataggcatggaggacaaaaaaggccaattggaggtcgaggtgatcagggcccggtcattgacacagaaacccggatcgaagagcacccccgccccatatgtgaaagtgtatctgttggagaacggcgcttgtattgccaaaaaaaaaacccgcattgctaggaagaccttggatccactgtatcagcagagcttggtttttgacgaatcccctcagggcaaggttctgcaggtgatagtttggggagactacggtcgtatggaccacaaatgcttcatgggggtagcccaaatactgctagaagagctcgaccttagctctatggtcataggatggtataaactgtttcctccctcttcgctcgtcgatccaacactaaccccgttaaccagacgcgccagccagtcaagtctggagagctccactggacccccttgcataagaagctag

SEQ ID NO: 268526 - DNA, 4428 bp, Artificial Sequence
  derived and/or modified sequence
atgagttccgccgtcggaccaagggggccacgcccgcccactgtccccccccctatgcaggagctgcctgacctgtctcacctgactgaagaggagcgcaatattattatggcggtgatggatcgccaaaaggaggaagaagaaaaagaagaagcaatgttaaagtgcgtggtgcgggacatggccaagcccgcagcttgcaagactccgagaaacgccgaaaaccagccacatcagccaagtccccgactgcatcagcagttcgagagttacaaggagcaagttcgaaagatcggggaagaggccagaaggtaccagggcgagcacaaagacgacgcaccaacctgcggcatctgtcataagaccaaattcgctgacggttgtgggcacctgtgctcctactgccgcaccaagttctgcgctcggtgtggtggccgcgtgtccctgagatccaacaacgaagatatctgcgttatgtgggtctgcaacctgtgcagaaaacagcaggaaatccttaccaagtccggcgcgtggttctttgggtccggcccgcagcaaacctcccaagacgggactttgagtgatacggcaactggagccggtagcgaggtgcctagagagaagaaagctcgactccaggaacgctccagaagtcagacccctctgtctacggctgccgcctcctcccaggacgccgctccaccgtccgcaccaccggataggtcaaaaggcgccgaaccttcccagcaagccctgggccctgagcagaagcaagcgtctagccggtcaagatcggaaccaccgagggaaagaaagaagactcctgggctttccgagcagaacggaaagggggcactaaaaagtgagcgtaaacgcgtgccaaaaaccagcgcacagcctgtcgagggagctgtggaggagcgagaaagaaaggagagaagagagtctcggcgactcgaaaaaggccgatcccaggactaccctgatacgccagagaaaagggacgaaggcaaggccgccgacgaggaaaaacaaagaaaagaagaggactatcagacaaggtacagaagcgatccaaatctggcacgctacccagtgaaacccccgccagaggagcagcagatgcgcatgcacgctagggtgagccgagcccgacatgagaggcgtcacagtgacgtagcactgcccagaacggaagccggagccgccttacccgagggaaaggcgggaaaaagagcgcccgccgccgcacgggcaagccctcccgattcccccagagcctattccgccgagcggaccgcagaaacccgggcgccaggagccaaacagctgactaatcatagcccccccgctcccaggcatggacctgttccagcagaggctcctgagctgaaggctcaagaaccactccgaaagcagagccggctggatccaagctctgccgtgctcatgaggaaggcaaaaagggagaaagtggaaacaatgctccgcaacgattcactcagctcggaccagtccgagtcagtgcgccctagtccacccaaacctcacaggtctaagcgcggcggcaagaagagacagatgtcagtgtccagttccgaagaagagggcgtgtctactcccgagtacactagctgcgaagacgttgaacttgaatctgagagtgtgtctgagaaaggcgacttggactactattggctggaccctgccacatggcactctcgggaaacgtctcccatttcctcgcatcccgtcacgtggcagccttctaaggaaggcgaccgcctgattgggagagtcatactgaacaaacggacaacgatgcctaaagacagcggggcactgctaggattaaaagtcgttggcggtaagatgaccgacttaggccggctgggtgcttttatcaccaaggtcaaaaagggatcgttagctgatgttgttggccaccttagggccggtgatgaggtcctcgaatggaacggcaagccgctcccaggtgcaacaaatgaagaagtttacaacatcatcctggaatctaagtcagagccgcaggtcgagatcattgtgagcaggccaataggtgacatcccacgtatcccagaatcatctcacccacccctcgaatcatcatcaagctcttttgaaagtcagaaaatggagcgcccatccatttccgtgataagccccacctcacccggcgcacttaaggatgctcctcaggtattgcctggccaactgtctgtaaaactgtggtatgacaaggttgggcaccaacttatcgtgaatgttctgcaggcaacagacctcccggcgcgggtcgacggacgcccaaggaatccatacgtgaaaatgtacttcctcccagaccgaagcgacaaatccaagagacgcacaaagacggtcaaaaaaatcctggagccaaagtggaaccagacctttgtgtacagtcacgtgcacaggcgcgattttcgcgaaagaatgctggagatcacggtctgggatcagcccagagtccaggaggaggagagcgagtttctcggtgagattctgatcgagctggagactgccctccttgacgacgaaccacactggtacaagctccagacgcacgacgaaagttcgctcccactgcctcagccctcacccttcatgccccgaagacacatccacggcgagtcctcaagtaagaagttgcagagaagccaacgaatttctgacagcgacatatctgactatgaagtggacgatggaatcggcgtggtgccccctggataccgctcgagtgcgcgggagagcaagagtacaaccttgaccgtgcctgaacaacagcgcacgacccatcaccgctctcgaagtgttagtccacacagaggaaacgatcagggtaaaccgcggagccggctcccaaatgtcccattgcaaaggtccctggatgagatccaccccacccgaaggtctagatcccctacccggcaccatgatgccagccggtccccagttgatcatcgaacccgtgacgtggatagccagtatcttagcgaacaggactctgagctcttgatgctccctcgggcaaagcgcggtaggtctgccgagtgtttgcatactaccaggatgcacaggcaaagatcccccacacagtcgccacccgcggatacaagttttagcagccgaagagggagacagctcccacaggtgcccgtcaggtcaggcagtatcgagcaagcctccctggtcgtcgaggaacgaactaggcagatgaagatgaaggttcataggtttaaacaaaccacaggaagtggcagtagccaggagttggatcgcgagcagtatagcaaatacaacattcacaaggaccagtataggagctgcgacaacgtgagtgccaagagttctgacagtgacgtttctgacgtctctgccatttcacgcacttctagtgccagcagactatcatccaccagctttatgtccgagcagagtgaaaggccgcgggggagaatccgacgcatgggcacttcaggacgctccatcatgaagagcacctctgtgtcaggcgaaatgtacacgctggagcacaacgacggttcgcagagcgatactgccgtgggtacggtgggcgccggagggaagaagcgcaggtccagcttaagcgcgaaagtggtagctatcgtgtcgagaagatcgcgcagcacctcgcagctctcccagactgaaagcgggcataaaaaacttaaatcgacaattcagcggtcgactgagacgggcatggccgccgaaatgcgtaaaatggttaggcagcccagccgggagagcactgacggctcaatcaatagttattcttcggagggaaacctcatattcccaggggttagactgggggctgactcccaatttagcgatttcctggacgggctgggtcctgcccaactggtgggtcggcagactttggcaacacccgccatgggagacatccagattggcatggaggacaaaaaaggtcagttggaggtcgaggtgattcgagcccgctctttaacccagaagcctggctctaagagcacccctgcaccctacgtgaaagtgtacttacttgagaacggcgcatgcatcgccaaaaagaaaacccgaattgctaggaagaccctggatccgctgtaccagcagagccttgttttcgacgagagtccccagggtaaagtcttacaggtcatcgtttggggtgattatggtcggatggaccataaatgtttcatgggcgtggcacagatactgctcgaagagctcgacctgtcttcaatggttattggctggtacaaactgtttcccccgtctagccttgtcgatcctacactaaccccgctgactcgcagggccagccagagcagcctcgaatcctccactgggcccccctgtatccgcagttag

SEQ ID NO: 268527 - DNA, 4116 bp, Artificial Sequence
  derived and/or modified sequence
atgtccagtgccgtaggcccaagggggcctaggcctcctaccgtgcctccccctatgcaggaactccccgacctgagtcatctgaccgaagaggagcgaaacatcattatggccgtgatggatcgtcagaaagaggaggaggagaaggaggaagctatgttgaaatgcgttgtgagagacatggcaaagccggcggcatgtaaaactcccaggaacgctgagaaccagcctcatcaacccagtccccggttgcaccagcagtttgagagctacaaggagcaggtccgtaagataggagaggaagccagaagataccagggcgaacataaagacgatgcgcctacatgtggaatctgccataaaacaaagttcgccgacggatgcgggcatctgtgttcgtactgtcgaacaaagttttgtgctcgctgtggtggacgtgtgtcgttacggtcaaataacgagaacaagatagtcatgtgggtatgcaatctgtgcagaaagcaacaagagattttgactaagagtggtgcctggttctttggctcgggaccccaacagacatctcaggacggtaccctcagcgacactgcgacaggggcaggttcggaggtgccccgtgagaaaaaggcccggctacaggaacgaagtcggagtcaaacccctttgtcaaccgcagcagctagctcacaggacgcggctcccccatctgctccacccgacagaagtaaaggagccgaaccctctcagcaagctttggggcccgagcagaagcaggccagctctcgctctaggtcggagccaccaagagaaaggaagaagactcccggtctttccgagcaaaatggtaaaggagccctgaagtcagagaggaaacgggtcccaaagaccagtgcacagcctgtcgagggagccgtggaggaaagagaacggaaggagagacgagagagtcgccggctcgaaaaaggacgaagtcaggactacccagatacccccgaaaaaagggacgaaggaaaggccgctgatgaggagaagcagagaaaggaggaggactatcagacgcgctatcggtcagatcctaatctagcaagatatcccgttaagcccccccccgaagagcagcaaatgagaatgcacgcaagagtgtcacgagcgcgccacgagcgacggcactctgacgtggcgttgccaagaacagaggccggagcggcgttgcctgagggtaaggcaggcaaaagggcaccagcagcagcacgggcctcgcctcctgattctccacgggcctacagcgccgaacgtacggccgagacgagggcaccaggggctaaacaattaaccaatcatagccctcctgccccacggcatggcccagtgccagcggaagcccctgagctgaaggcacaggaacccctgcgaaaacagagccggttggacccaagctctgccgttctgatgcgaaaggctaagcgtgagaaagtggagacgatgctccgcaatgactccctatctagtgatcagagtgaaagcgtccgcccatcaccaccgaaaccacaccgttctaaaagaggcgggaaaaagaggcagatgtcggtatcaagctcggaagaggaaggggtgagtactcccgaatatacttcatgtgaagatgttgagttagagtcggagtctgtatctgaaaaaggcgatctcgactattactggctggatcctgcgacttggcactcccgggagactagccctattagttctcacccagtcacttggcagcccagcaaggaaggtgacagactgatcgggagagttattcttaataagcgcaccacaatgcccaaagactctggggcccttttgggcctcaaggtggtgggcggtaagatgacagatctgggccggctcggagcctttataaccaaagtcaagaaaggaagcctcgcagatgtagtgggacatctgcgcgccggagatgaagttttagagtggaatggaaagccacttcctggggctaccaacgaggaagtctacaatattattctggaatctaagtcagagccacaagttgaaatcatagttagcagacctattggcgacatcccaagaatccccgagagttctcatccgcctttggagtcctcaagttcgagctttgagagccaaaaaatggagcgcccaagcatctctgtcataagtccgacttcgccaggcgccctgaaagacgcgccacaagttttgcccgggcagctcagcgtgaaactgtggtacgacaaggtgggtcatcaattgatcgttaacgtcctgcaggccaccgatctccccgctagggtcgacggacggccacgaaacccatatgttaagatgtacttcctgcctgacaggtccgataaatccaagcgccgcactaaaaccgtgaaaaagatcctagagccgaagtggaatcaaaccttcgtctattcccacgttcaccggagggactttcgcgagaggatgctggagatcacagtttgggaccaaccacgcgtacaggaagaagaatccgaatttttgggcgagatcctgatcgaactggagacagcacttcttgatgacgagccacactggtacaaactgcagacccacgatgagtccagcctccccctgccacagccctcgccatttatgccaagacggcatatccatggggaatcctcaagtaaaaagctccagagatcacagcgaatatcagattccgacatttctgattacgaggtcgatgatggcatcggggtcgtccctccagttggttaccgaagttccgcccgagagtccaagtctactacacttaccgttcccgagcagcaacggaccacccatcatcgcagtaggagtgtaagtccacaccgcggaaatgaccagggtaaaccacgctcaagactgcccaatgtgccactgcaacggtctctcgacgagatccacccaacccgtcgttctcggagtcccacgcggcatcacgacgctagtcgctcaccagtagatcaccggactcgcgatgtcgattcccagtatttgagcgaacaggacagcgaactcctgatgttgcctagagccaaacgcggcagatcagccgagtgtttgcatactacatcggagctgcagccttttctggatcgggccaggagtgcttccaccaactgcctgaggcccgatacgagcctgcatagcccggaaagagagcgggggcgatggagccccagcctggatagacgacggccccccagcccaagaatccagatccaacacgcatcccctgagaatgatcgaatgcatcggcagcggtctcccacgcagtccccacccgccgataccagtttttcatctcggaggggccgccagcttccccaagtgccagtgcgcagtggcagtatcgagcaggagtccggccacaagaagctcaagtccaccattcagaggagtactgagaccggaatggcagccgagatgcgtaagatggttcgacagcctagtcgcgagtcgacggacggttccattaacagttactcatctgagggcaacttgatttttccaggagttaggctgggggcagacagccaattctctgactttctcgacggcctaggaccagcccagcttgttggaagacagaccctggcaaccccagctatgggagacatccagattggcatggaagacaaaaaaggccagctcgaggtcgaggtaatccgtgcgcggagcctcactcaaaaacctggctccaaaagtacgcccgccccctacgtgaaggtctatttactagaaaacggggcctgcatcgctaagaagaaaaccaggatagctcgaaaaacactggaccccctgtatcagcagtcactggtctttgatgaatcgcctcagggaaaagttcttcaggtgattgtgtggggggattatggccggatggaccacaaatgttttatgggtgtggctcagatcctattggaagaactggacttaagcagcatggtaattggctggtacaagctttttccaccaagctctttggttgatcctaccctcacaccacttacccgccgcgcaagccagagctctctcgagtctagtaccggccctccttgtatcaggagctag

SEQ ID NO: 268528 - DNA, 4626 bp, Artificial Sequence
  derived and/or modified sequence
atgtccagtgccgtcgggccacggggccccagaccaccaaccgttcccccaccaatgcaggagctcccagatctttcccacctcaccgaggaagaacggaatatcattatggctgtcatggatcgccagaaagaggaggaggagaaggaagaagccatgctaaagtgtgtcgtgagagacatggcaaaaccagccgcttgcaagactcccagaaacgcagaaaatcaacctcatcaaccctcaccaagactgcaccagcaattcgagtcctacaaagaacaggtgcgcaagatcggcgaggaggcgagaagataccaaggcgaacataaggacgacgctccgacctgcgggatttgccataagacgaaattcgcagacggctgtgggcacctgtgctcctattgtcgcaccaagttctgcgcaagatgcggcggccgcgtctctctcagaagcaataacgaggataagtatgttatgtgggtgtgcaacttgtgtagaaaacagcaggaaattctgaccaagagtggggcatggttctttggctccggtccacagcagaccagtcaggacggcaccctgtcagataccgccacaggcgcagggtctgaggtgcctcgagagaagaaggccagattacaggagagatctaggagccagaccccgctctcaaccgccgcagcgtcgtctcaggatgctgcccccccttccgcccctcctgatagatcaaagggggctgaaccaagccagcaggcgctgggccccgagcagaagcaggcatcatcacgctccaggtctgaaccgcctagggaacggaagaaaacccctgggctgagtgagcagaacggaaaaggagcacttaaatctgagcggaagcgggtcccaaaaacttcggcacagccggtcgaaggggccgtagaggagagggagcggaaggaaagacgggaaagtcggagactggaaaaaggtagaagtcaggattacccagacactccagagaaaagggatgagggcaaggccgccgacgaggaaaagcagcggaaggaagaggactaccagactcggtataggagcgatccaaatctcgccagataccctgtgaagccacccccggaggaacaacaaatgaggatgcacgcacgcgtttcacgggccaggcacgaacgacgccactcggacgttgccctgccacggacagaagcgggagccgcacttccagaggggaaagcgggtaagcgagctcccgccgccgccagagcaagtccacccgatagccctcgggcctatagcgctgagaggactgctgagacacgcgctcctggtgcaaagcagctgaccaatcactccccaccggccccccgtcatggtccagtgccagcagaagccccagagttaaaggcccaagagcccctaaggaagcaaagccggctcgacccaagcagtgccgtactgatgcgaaaggccaagagggagaaggtagagactatgttaagaaatgactccctaagctcggatcaaagcgaaagcgtgcgaccaagtccccccaaaccacacaggtccaaaagagggggcaaaaagaggcagatgtctgtctctagttccgaagaagagggggtgagcacaccagagtatacatcatgcgaggacgtggaactggagagcgaatctgtgagtgagaagggggatctggattactattggctggatcccgcaacatggcactccagggagacatctccaattagttcccatcctgttacatggcagccttctaaagagggcgatcgcctcattgggagggtcatcttgaacaaacgtaccacaatgccaaaagacagcggtgctctgctgggtctgaaagtcgtgggtggcaagatgacagacttgggcagactgggtgcttttatcaccaaggtgaaaaaggggagcctggcggacgtggtgggtcacctcagagccggcgacgaagtgttggagtggaatggtaagccactgccaggcgcaaccaatgaagaagtgtacaatattatcctggagtctaagagtgaaccacaagtcgaaattattgtctcccggcctataggcgatatccctcggatccctgagagtagccaccccccactggagtcctcctcttcgtccttcgagtcccagaagatggaacggccaagcatttctgtgatctcacccaccagccccggcgccttaaaggacgcaccacaagtactgccaggccagctgagcgtcaagctttggtacgataaagtgggccaccagctgatcgtcaacgtgctccaagccaccgacctgcccgcgagggtggacggtagaccacgcaatccatatgtaaagatgtactttctcccagacagaagtgataagagtaagcgccgaacaaaaacggtcaaaaagattctggaacctaagtggaatcaaacctttgtttattctcatgtgcaccggagggacttccgagaaagaatgctggaaataaccgtctgggatcagcccagagtccaggaggaagaaagcgagtttcttggcgagatactcattgagctggagacggcattgctggatgatgagccgcactggtacaaactgcagactcacgacgaaagttccctgcctttgcctcagccttcccccttcatgcctcgacgacatatacacggagagtcgtcctcaaaaaaactccaaaggagccaacgaatcagcgattcagacatctctgattacgaggtggatgatgggattggcgtggtgccccctgtcggatatcgaagctccgcaagggagagcaagagcacgaccctgactgtgcccgagcagcagaggacgacccatcaccggtcccggtccgtgagccctcatagaggaaacgaccaggggaaaccgaggtcgcggctgcctaacgttcctctgcagcgatctctggacgagatccatcccactcgaaggtcacgttcacctacaaggcaccacgacgcatcacggtccccagtggatcacaggacaagagacgtggatagccaatatttgtctgagcaggattccgagttacttatgctgccaagggccaaacggggacggtccgccgaatgtttacacacgacacgtcacttggtccgacactataagactctgcccccgaaaatgccactgctccaatcgtcaagccactggaatatctacagcgagcttcagccatttctcgacagggcgagatcagctagcacgaactgtttacggcccgacacatccttgcattcacctgaacgggaacgtatgcatcgccagagaagtccaacccagtccccaccagccgacactagctttagctcccgtcgcgggcgccaactcccacaggtcccagtgcggtctggctccattgagcaagcttccctcgtcgtggaggaacggacaagacagatgaagatgaaagtgcacagatttaaacaaaccacaggcagtgggtcaagccaggaactggaccgcgagcagtactccaaatacaacatccacaaagatcagtatcggagttgtgacaacgtcagtgcaaaatcttctgattcagacgtgtcggatgtgtctgctattagtcggacgtcgtctgcgtccaggttgtcatccacttcattcatgtccgagcaaagcgagcggcctaggggaaggataagcagcttcaccccgaaaatgcagggcagaaggatgggcaccagcggacggtctattatgaaaagcacctcagtctccggcgagatgtatacactggagcataatgatgggtctcaatccgataccgccgtcggcaccgtcggtgctggaggcaagaagcggagaagtagtcttagcgcaaaggtagtcgctattgtatctagaaggagccggtccacaagccagctgtcacagactgaaagcgggcacaaaaaactgaagtcaaccattcagcgaagcaccgaaaccggcatggcagcagagatgcgtaagatggtgcgacagccaagccgcgaatctacagatgggagcatcaattcgtattcgtccgagggtaatctgatcttccccggtgtcagactgggagctgacagtcagttctctgactttttggatggtctgggacctgcacagttggtaggtcggcaaactcttgccaccccagccatgggtgacatacagatcgggatggaggacaagaaaggccagctggaagtcgaagtcattcgggctcggagcttgacacaaaagcccggctctaaatcaaccccagctccgtatgtcaaagtgtatttgctggagaatggagcctgcattgctaaaaagaagacgagaatcgctcgaaaaacgttggaccctctgtatcaacagtcgctcgtgtttgacgaatcccctcagggcaaagttctgcaggttatcgtgtggggcgattacggtagaatggatcataagtgcttcatgggagtggcccaaatcctgctcgaagaactggatttgtcaagcatggttataggctggtataagctctttcccccctcttcacttgtcgaccccactcttacacccctgacgagaagagcctcccagtcaagtctggagtcttccaccgggccgccgtgtatcagatcttag

SEQ ID NO: 268529 - DNA, 4446 bp, Artificial Sequence
  derived and/or modified sequence
atgagtagcgctgtgggcccaaggggcccacggccaccgaccgtgccccccccaatgcaggagctacccgatctgtcccaccttacagaagaagaaagaaacataatcatggccgtcatggaccgccagaaggaggaagaagagaaggaagaagccatgttgaagtgcgtggtcagggacatggcaaaaccggcagcctgtaaaacaccgcgtaatgcagagaaccaacctcaccaaccttcccccaggttgcaccagcagtttgagagctataaggagcaggtgaggaaaatcggagaggaagcaagacgctaccagggtgaacacaaggacgacgcacctacatgtggcatctgccacaaaactaaattcgctgacgggtgcggccatctgtgttcttattgccgtactaagttctgcgctcggtgcggtgggagggtgtctttaaggagcaataatgaaaacaaaatagtgatgtgggtttgcaacttatgtcgaaagcagcaggaaatcctgaccaaaagtggagcctggttcttcggctcagggccccagcaaacgagtcaagatgggaccctgagtgacacggcgacgggagctggctcagaggttcctcgagaaaaaaaggcccggttacaagaaagaagtcgcagccaaacccctctttctacagctgcagcctcttctcaggacgcagccccaccaagcgcgcctccagaccgctccaagggtgccgagccctcccagcaggctctcggccctgaacaaaaacaggcatccagccgttcacgatccgagcccccccgggaacggaagaaaactccaggcctctccgagcaaaatggaaaaggagcacttaagagtgagagaaagcgggttcccaaaacctcagcccagcccgtggaaggcgcagtcgaggaaagggaaaggaaggagcgaagagaaagtaggcgcttagagaagggtaggtctcaggactatcctgataccccagagaaacgggatgaaggaaaggccgccgatgaagagaaacaacggaaggaggaagactatcaaacacggtacagatccgaccctaatctggcccggtatcccgtgaagccgccacccgaagagcagcagatgcgtatgcatgcacgcgtttcccgggctcggcacgagaggagacactcagacgttgcactacctcggactgaagccggagcggctcttccagaaggtaaagccgggaagagggctcccgccgcagcaagagccagcccgccagactcccctcgggcctattcagcagagcggaccgctgagaccagagcccctggtgcaaagcagctcacaaatcatagccctccagcaccaaggcatgggcctgtgcccgccgaagctcccgagctcaaagcacaggagccattgcgaaagcaaagtagactcgatccttcgtctgccgtcctcatgcgtaaggccaaaagagaaaaagtggagactatgctgcgcaatgattcactgagctctgaccagagcgaaagcgtgcgcccatctccccccaaaccacaccgatccaaaaggggggggaaaaaacgacagatgtccgtgagctcctccgaagaagagggggtgagtactcctgagtatacctcgtgtgaggacgtcgaactggagagtgaatctgtttctgaaaaaggggaccttgactattattggctggaccctgctacgtggcactcaagggaaacttctcccataagctcccaccctgtcacctggcagccctccaaagaaggcgacagactcataggccgcgtgattctcaataagagaacgaccatgccgaaggatagcggagctttgctgggattaaaggtcgtggggggtaagatgactgatctcggccggttaggtgctttcatcacgaaagttaaaaaagggtccctggcagacgtagtcggacacctgcgcgccggagacgaagtgctggagtggaacggcaagccccttcctggagccactaatgaggaggtgtacaatataatcctggagtccaagagcgaaccacaggtcgaaatcatcgtatcccggccgatcggggatattccacgtatccccgagagctcacatccaccactcgagagttcttcgtctagttttgagtcacagaaaatggagagacccagcattagtgttattagcccaacttccccaggggccctgaaggacgcaccacaagtgttgccaggacagttgagcgtcaaactctggtacgataaggtggggcaccagctcattgtgaatgtgttgcaagcgaccgacttgccggcccgggtggacggacgaccccgcaatccatacgtgaagatgtatttcctgcccgacagaagcgataaaagtaaacggagaaccaagactgtcaagaagatcctggaacctaagtggaaccaaaccttcgtttattcccacgtacatcgtagggattttcgggaaagaatgctggagatcacagtgtgggaccagcccagggttcaggaggaggaaagcgagtttttgggggagatcttgatcgagctggagactgcactcctcgatgacgaacctcattggtataaactgcaaacccacgatgagagctctctaccactgcctcaacccagtcctttcatgcctcgtcggcacatccacggggaatcaagtagcaaaaaactacagagatctcagcggatatctgattccgacatttctgactatgaggttgatgacggcattggcgtggtgccacctgttggataccgctcttctgctcgcgagtccaaatctactaccctgactgtccctgagcaacagcggactacccatcaccgctctagatctgtttcccctcatcgtggaaatgaccagggtaagcctcgctcacggctgccaaatgtgcctctgcaaaggtccctagacgagatacaccccactagacggtctaggagtcccactcgccaccatgatgccagccgctcccccgtggaccataggaccagggacgtagactctcagtacctctctgagcaggattccgaacttctgatgctccctcgggcgaagagaggtaggtccgctgagtgcctgcacactacctcagaactgcaaccttttttggatagggctcgctccgcttccacgaattgcctccggcccgatacaagccttcatagccccgaaagagaaagaatgcaccgccagcgctcgcctacgcagagcccacccgctgatactagcttctcctcgaggcgcggaaggcaactgcctcaggtgccagtgcggtccgggagcatcgagcaggcctcactggtcgtggaagagcggacccgacagatgaaaatgaaggtacatcggtttaagcagaccaccggatcaggaagctcccaggagcttgacagggaacagtactccaagtataacatccataaagaccagtaccgcagctgcgataacgtctccgcaaaatcgtcagactccgacgtgtcagacgtgtcggctatctcacggacaagctcagctagtagactgtcctcaacatcattcatgtccgagcagagcgagcggccccgcggccggatcagcagttttacccctaaaatgcagggtcggaggatgggcacatctggtcggagtattatgaagtcaacaagcgtcagcggcgaaatgtacacgcttgaacacaatgacggaagccagagcgacaccgcagtgggcacggttggtgccggcggtaaaaagcggcgcagctcacttagtgccaaagttgtcgctatcgtgtcccgccgaagccgcagcacaagccaactgtcccagactgaaagtggccacaaaaaattaaagagcaccatccagcgctcaacagagacagggatggcagcagagatgcggaaaatggtgagacaaccctcccgcgagtctactgacggatcaatcaacagttactctagtgagggaaatttgattttcccaggtgtgaggcttggcgccgatagtcagttctctgatttcctcgatggtctaggtcccgctcagctcgtgggaagacagacacttgcgacacctgccatggcaccatatgttaaggtctacttgctcgagaatggagcttgtattgccaaaaaaaaaacaaggatcgcccggaagactctggatccactgtaccagcagtcattagttttcgacgagtcgcctcaaggaaaagttctccaagtgatcgtctggggggattacggaagaatggatcataaatgctttatgggtgtggcacaaattcttctggaggaattagatctcagctccatggtcataggctggtacaagttgttccctccctcctctctagttgaccctacactgacaccacttactcggcgggcatctcagagctcccttgaaagcagcactggcccgccttgtattcgctcttag

SEQ ID NO: 268530 - DNA, 4446 bp, Artificial Sequence
  derived and/or modified sequence
atgagcagcgcagtgggaccccgcggccctcgacccccaacagtgcctccaccaatgcaggaactgccggacctgtctcatctcacagaggaagagcgaaatatcatcatggcggtaatggaccggcagaaagaggaggaagaaaaggaggaagcgatgcttaaatgtgttgtgagagacatggctaaacctgccgcttgtaaaacacctcgtaatgctgagaatcaaccccatcagccttctccccgcttgcaccagcaatttgagagttataaggagcaagtcagaaaaattggggaggaggcgaggcggtaccagggtgagcacaaagatgatgctccaacttgtggcatttgccacaagaccaaatttgccgatgggtgcggacacctctgctcctattgtcgcaccaagttctgcgccagatgcggaggaagagtcagtctgaggtctaacaacgaggacaaggtagttatgtgggtttgtaacctgtgtcggaagcagcaggagattttaaccaaatccggagcatggttcttcgggagtggtcctcagcaaacaagccaggatggcactctatccgacactgcgacgggcgcaggtagtgaagtaccaagagaaaaaaaagcacgattacaggagaggagcagatcccagacacccttgtcgactgccgctgctagtagtcaggacgcagccccacccagcgcccctcctgataggtctaaaggtgccgagcctagccagcaagcgttaggccccgaacagaaacaggcttcaagccgatctaggtccgaacctccgagggaacggaaaaagacccctgggcttagcgaacagaatggaaagggcgccctgaagagtgagcgcaagcgtgttcccaagactagtgctcagcccgtcgagggcgccgtggaggagcgggagaggaaggagcgtagagagtctagaagattagagaagggcaggtctcaggactatccagatacacctgagaagcgagacgaaggaaaggccgcagacgaggaaaaacagcgcaaagaggaggattaccaaaccagatacaggtccgaccccaatctcgctaggtatccagttaaacctcctcccgaggaacaacagatgcggatgcacgccagggtgagtagagctaggcacgagcgtcgccattctgacgttgccctgccacgcacagaagctggagcggctctgccagagggcaaggccggtaaacgtgcccccgcagctgcccgggcctcgcctcccgacagcccaagggcttattccgccgagcgcactgccgagacacgagccccaggagctaagcagctgaccaatcattcaccgcctgcgcccaggcacggccctgtcccagcagaagcaccagagttaaaggcccaggaaccactccgtaagcaatcacgcctggatccctccagtgcagtgctgatgcgcaaggccaagcgtgaaaaggtggagactatgctccggaacgattccctgagctcagatcagtccgaatccgtccggccctccccccctaagccacaccgctccaagcgcgggggcaagaagcgccagatgtctgtatcatcctctgaagaagaaggcgtctcgacacctgagtacacatcgtgtgaagacgtcgaattggaatctgagtccgtgagcgagaagggagacctggactactactggttggatcccgcgacatggcattcacgggagaccagccccatttcttcacaccctgtgacttggcaacccagcaaggagggagaccgcctgatcggtagggtgattctgaataaaagaacaactatgccaaaggatagtggagccctgttggggctgaaggtagtgggaggcaaaatgaccgatttgggaaggttgggcgcattcatcacaaaagttaaaaagggcagtctggccgatgtggtgggacacctccgggcaggtgatgaggtacttgaatggaatgggaaacccctgcctggggcaaccaacgaagaggtgtacaatattattctcgagagcaagagcgaacctcaagtggaaatcattgttagccgccccatcggagatattccccgcatccctgaatcgtcacacccccctctagagagtagctcctcgtctttcgagagtcagaagatggagcgccccagcatctctgtgatttccccaactagccctggggctcttaaagatgccccacaggtcttgccaggtcagctctccgttaagctgtggtatgataaggtggggcaccagctgattgtcaacgtgctgcaagctactgacctccccgctagggtcgatggccgaccgcgaaatccttatgtaaagatgtactttttaccagacagatccgacaaaagtaagcggagaactaagacagtgaagaaaatattggaacccaagtggaaccagacctttgtctactcacacgttcatagacgagattttagagaacgtatgctcgaaataacagtgtgggaccagccacgcgtgcaagaagaggaaagcgagtttctaggggaaattctgatcgaactagaaaccgccctgctggacgatgagccgcattggtataagttgcaaacacacgatgagtcgagtctcccgttgccgcaaccttcaccgttcatgccaaggagacacatccacggggaatccagctccaaaaagttgcagcgatctcagaggattagtgacagcgacattagcgattacgaagtggacgatggaataggggtggtgcctcccgtgggctaccgcagtagtgctagggagtcaaagtcaactaccttgactgtgcccgagcagcagcgaacgacgcaccaccgttcgagatctgtgagccctcatagagggaacgaccagggaaagccacgaagcaggctgcccaatgtgccactacagcggagcctggatgaaatacaccccactagacgttctcgcagccctaccagacatcatgacgcttcccgtagccccgtagaccatcgcactagggacgtagactcacaatatctttcagaacaggactcggaactgttgatgctcccacgagcaaaaagaggccggtctgcagagtgccttcacactacctccgaattgcaacccttcctggacagggctagatctgcgtctaccaactgcctgcgaccagatacatctttacattccccagagcgggaacggatgcaccggcaacgcagtcctacccagtctccacccgctgacacttccttttcttctcggcggggacggcagctgcctcaggtgcctgtgaggtcaggaagcatcgagcaggcgagcctggtagttgaagaacgcactaggcagatgaagatgaaagtacatagatttaagcagacaacaggcagcgggagttcccaggagcttgaccgcgaacagtactcgaaatacaatatccacaaagatcagtatcgctcctgtgacaacgtcagtgcaaagagttccgactccgacgtcagtgacgttagtgctattagcagaacttccagcgctagccgcctttcgtccacatcatttatgtccgagcaaagcgaacggcccagaggccggatctccagtttcacgcctaaaatgcagggaagacgcatgggaaccagcggtaggagtatcatgaagtccacttcggtgagtggggaaatgtacaccctagagcataacgatggatcccagtctgacaccgctgtgggcactgtcggagcaggagggaaaaagcggaggtcttctctctccgctaaggtggtggccatagtatcccggaggagcagaagtacttctcagttaagccagacagagtctggccacaagaagctgaagagcaccattcagcggtctacggagacaggcatggccgcagaaatgagaaagatggtgagacagccatctcgagaaagtacagatggtagcatcaactcctactcgagcgagggtaatttgatcttccccggcgtgaggcttggggcggacagtcaatttagtgatttcttggatgggctcggtcctgcccagctcgtggggcgacagacgttggctactccggctatggctccctacgttaaggtctacctgttggagaacggagcttgtattgccaaaaagaagacccggatcgctaggaagactctggaccccttgtatcaacagagcctggtatttgacgagagccctcaggggaaggttctgcaggtaatcgtgtggggcgactatggcaggatggaccacaaatgtttcatgggtgtcgcacagatccttctagaagagctggatctttcatccatggtgatcgggtggtacaagctttttccaccatcaagcctggtggatcctaccctcactcctttgactaggagagcctcccagagtagtctggaatcatcaacgggacccccctgcattcgaagctag

SEQ ID NO: 268531 - DNA, 3876 bp, Artificial Sequence
  derived and/or modified sequence
atgagcagcgctgtgggcccccggggcccccggccccccaccgtgcccccacccatgcaggagctgcctgacctgagccacctgacagaggaggagaggaacatcatcatggctgtgatggaccggcagaaggaggaggaggagaaggaggaggccatgctgaagtgtgtggtgcgggacatggccaagccagctgcctgcaagaccccaagaaatgctgagaaccagccccaccagcccagcccccggctgcaccagcagtttgagagctacaaggagcaggtgaggaagatcggggaggaggcccggcgctaccagggcgagcacaaggatgatgcccccacctgtggcatctgccacaagaccaagtttgctgatggctgcggccacctgtgcagctactgcaggaccaagttctgtgcccgctgtggcggccgggtgtccctgcggagcaacaatgaagacaagtatgtgatgtgggtgtgcaacctgtgcaggaagcagcaggagatcctgaccaagagcggggcctggttcttcggcagcggcccccagcagaccagccaggacggcaccctgagtgacacagccaccggggccggcagcgaggtgccccgggagaagaaggcccggctgcaggagaggagccgcagccagacccccctgagcacagctgctgccagcagccaggatgctgccccacccagcgcccccccagacaggagcaaaggagctgagcccagccagcaggccctgggccctgagcagaagcaggccagcagccgcagccgctctgagcccccccgggagaggaagaagaccccaggcctgtctgagcagaatggaaaaggagccctgaagtctgagaggaagagggtgcccaagaccagcgcccagcctgtggagggcgctgtggaggagcgggagaggaaggagcggcgggagagccggcggctggagaagggccgcagccaggactacccagacaccccagagaagagagatgagggcaaggccgcagatgaggagaagcagaggaaggaggaggactaccagacccgctacagaagtgaccccaacctggcccgctaccctgtgaagcccccacctgaggagcagcagatgaggatgcacgcccgggtgtcccgggcccggcatgagcggcggcacagtgatgtggccctgcccaggacagaggccggggccgccctgcctgagggcaaggccggcaagagggccccagctgctgcccgggccagccccccagacagcccccgggcctacagcgctgagaggacagctgagacccgggcccctggggccaagcagctgaccaaccacagccccccagcccccaggcatggccctgtgcctgctgaggcccctgagctgaaggcccaggagcccctgaggaagcagagccggctggaccccagcagcgctgtgctgatgaggaaggccaagcgggagaaggtggagaccatgctgagaaatgacagcctgagcagtgaccagagcgagagcgtgcggcccagcccccccaagccccacaggagcaagaggggcggcaagaagaggcagatgtctgtgagcagcagcgaggaggagggcgtgtccaccccagagtacaccagctgtgaagatgtggagctggagagcgagagcgtgtctgagaagggggacctggactactactggctggaccctgccacctggcacagccgggagaccagccccatcagcagccaccctgtgacctggcagcccagcaaggagggggaccggctgattggccgggtcatcctgaacaagaggaccaccatgcccaaggacagcggggccctgctgggcctgaaggtggtgggcggcaagatgacagacctgggccgcctgggcgccttcatcaccaaggtgaagaagggcagcctggctgatgtggtgggccacctgcgggctggagatgaggtgctggagtggaatggcaagcccctgcccggggccaccaatgaggaggtgtacaacatcatcctggagagcaagtctgagccccaggtggagatcatcgtgtcccggcccatcggggacatcccccgcatccctgagagcagccacccccccctggagagcagcagcagcagctttgagagccagaagatggagcggcccagcatcagcgtcatcagccccaccagccctggggccctgaaggatgccccccaggtgctgcccggccagctgtctgtgaagctgtggtatgacaaggtgggccaccagctgattgtgaatgtgctgcaggccacagacctgcctgcccgggtggatggccggcccaggaacccctacgtgaagatgtacttcctgcctgacagaagtgacaagagcaagaggaggaccaagacagtgaagaagatcctggagcccaagtggaaccagacctttgtgtacagccacgtgcaccggcgggacttccgggagaggatgctggagatcaccgtgtgggaccagccccgggtgcaggaggaggagagcgagttcctgggggagatcctgattgagctggagacagccctgctggatgatgagccccactggtacaagctgcagacccatgatgagagcagcctgcccctgccccagcccagccccttcatgccccggcggcacatccacggggagagcagcagcaagaagctgcagaggagccagaggatcagtgacagcgacatcagtgactatgaggtggatgatggcatcggcgtggtgcccccaggctaccgcagcagcgcccgggagagcaagagcaccaccctgactgtgcctgagcagcagaggaccacccaccacaggagccgctctgtgagcccccacagaggaaatgaccagggcaagcccaggagccggctgcccaacgtgcccctgcagaggagcctggatgagatccaccccacccggcgcagccgcagccccaccaggcaccatgatgccagccgcagccctgtggaccacaggaccagagatgtggacagccagtacctgtctgagcaggacaggatgcaccggcagaggagccccacccagagccccccagctgacaccagcttcagcagcagaagaggccggcagctgccccaggtgcctgtgcgcagcggcagcattgagcaggagagcggccacaagaagctgaagagcaccatccagaggagcacagaaacaggcatggctgctgagatgaggaagatggtgcggcagcccagccgggagagcacagatggcagcatcaacagctacagcagcgagggcaacctgatcttccctggggtgcggctgggcgctgacagccagttcagtgacttcctggatggcctgggccctgcccagctggtgggccggcagaccctggccaccccagccatgggagacatccagatcggcatggaggacaagaagggccagctggaggtggaggtgatccgggcccggagcctgacccagaagccaggcagcaagagcaccccagccccctacgtgaaggtgtacctgctggagaatggagcctgcatcgccaagaagaagacccgcatcgccaggaagaccctggaccccctgtaccagcagagcctggtgtttgatgagagcccccagggcaaggtgctgcaggtgattgtgtggggagactatggccgcatggaccacaagtgcttcatgggcgtggcccagatcctgctggaggagctggacctgagctccatggtgattggctggtacaagctgtttcctcccagcagcctggtggaccccaccctgacccccctgacccggcgggccagccagagcagcctggagagcagcacaggccccccctgcatccgctcctag

SEQ ID NO: 268532 - DNA, 4428 bp, Artificial Sequence
  derived and/or modified sequence
atgagcagcgctgtgggcccccggggcccccggccccccaccgtgcccccacccatgcaggagctgcctgacctgagccacctgacagaggaggagaggaacatcatcatggctgtgatggaccggcagaaggaggaggaggagaaggaggaggccatgctgaagtgtgtggtgcgggacatggccaagccagctgcctgcaagaccccaagaaatgctgagaaccagccccaccagcccagcccccggctgcaccagcagtttgagagctacaaggagcaggtgaggaagatcggggaggaggcccggcgctaccagggcgagcacaaggatgatgcccccacctgtggcatctgccacaagaccaagtttgctgatggctgcggccacctgtgcagctactgcaggaccaagttctgtgcccgctgtggcggccgggtgtccctgcggagcaacaatgaagacatctgtgtgatgtgggtgtgcaacctgtgcaggaagcagcaggagatcctgaccaagagcggggcctggttcttcggcagcggcccccagcagaccagccaggacggcaccctgagtgacacagccaccggggccggcagcgaggtgccccgggagaagaaggcccggctgcaggagaggagccgcagccagacccccctgagcacagctgctgccagcagccaggatgctgccccacccagcgcccccccagacaggagcaaaggagctgagcccagccagcaggccctgggccctgagcagaagcaggccagcagccgcagccgctctgagcccccccgggagaggaagaagaccccaggcctgtctgagcagaatggaaaaggagccctgaagtctgagaggaagagggtgcccaagaccagcgcccagcctgtggagggcgctgtggaggagcgggagaggaaggagcggcgggagagccggcggctggagaagggccgcagccaggactacccagacaccccagagaagagagatgagggcaaggccgcagatgaggagaagcagaggaaggaggaggactaccagacccgctacagaagtgaccccaacctggcccgctaccctgtgaagcccccacctgaggagcagcagatgaggatgcacgcccgggtgtcccgggcccggcatgagcggcggcacagtgatgtggccctgcccaggacagaggccggggccgccctgcctgagggcaaggccggcaagagggccccagctgctgcccgggccagccccccagacagcccccgggcctacagcgctgagaggacagctgagacccgggcccctggggccaagcagctgaccaaccacagccccccagcccccaggcatggccctgtgcctgctgaggcccctgagctgaaggcccaggagcccctgaggaagcagagccggctggaccccagcagcgctgtgctgatgaggaaggccaagcgggagaaggtggagaccatgctgagaaatgacagcctgagcagtgaccagagcgagagcgtgcggcccagcccccccaagccccacaggagcaagaggggcggcaagaagaggcagatgtctgtgagcagcagcgaggaggagggcgtgtccaccccagagtacaccagctgtgaagatgtggagctggagagcgagagcgtgtctgagaagggggacctggactactactggctggaccctgccacctggcacagccgggagaccagccccatcagcagccaccctgtgacctggcagcccagcaaggagggggaccggctgattggccgggtcatcctgaacaagaggaccaccatgcccaaggacagcggggccctgctgggcctgaaggtggtgggcggcaagatgacagacctgggccgcctgggcgccttcatcaccaaggtgaagaagggcagcctggctgatgtggtgggccacctgcgggctggagatgaggtgctggagtggaatggcaagcccctgcccggggccaccaatgaggaggtgtacaacatcatcctggagagcaagtctgagccccaggtggagatcatcgtgtcccggcccatcggggacatcccccgcatccctgagagcagccacccccccctggagagcagcagcagcagctttgagagccagaagatggagcggcccagcatcagcgtcatcagccccaccagccctggggccctgaaggatgccccccaggtgctgcccggccagctgtctgtgaagctgtggtatgacaaggtgggccaccagctgattgtgaatgtgctgcaggccacagacctgcctgcccgggtggatggccggcccaggaacccctacgtgaagatgtacttcctgcctgacagaagtgacaagagcaagaggaggaccaagacagtgaagaagatcctggagcccaagtggaaccagacctttgtgtacagccacgtgcaccggcgggacttccgggagaggatgctggagatcaccgtgtgggaccagccccgggtgcaggaggaggagagcgagttcctgggggagatcctgattgagctggagacagccctgctggatgatgagccccactggtacaagctgcagacccatgatgagagcagcctgcccctgccccagcccagccccttcatgccccggcggcacatccacggggagagcagcagcaagaagctgcagaggagccagaggatcagtgacagcgacatcagtgactatgaggtggatgatggcatcggcgtggtgcccccaggctaccgcagcagcgcccgggagagcaagagcaccaccctgactgtgcctgagcagcagaggaccacccaccacaggagccgctctgtgagcccccacagaggaaatgaccagggcaagcccaggagccggctgcccaacgtgcccctgcagaggagcctggatgagatccaccccacccggcgcagccgcagccccaccaggcaccatgatgccagccgcagccctgtggaccacaggaccagagatgtggacagccagtacctgtctgagcaggacagcgagctgctgatgctgccccgggccaagaggggccgctctgctgagtgcctgcacaccaccaggatgcaccggcagaggagccccacccagagccccccagctgacaccagcttcagcagccggcggggccggcagctgccccaggtgcctgtgcgcagcggcagcattgagcaggccagcctggtggtggaggagaggacccggcagatgaagatgaaggtgcaccgcttcaagcagaccaccggcagcggcagcagccaggagctggaccgggagcagtacagcaagtacaacatccacaaggaccagtaccgcagctgtgacaacgtgtctgccaagagcagtgacagtgatgtgtctgatgtgtctgccatcagcaggaccagcagcgccagccggctgagcagcaccagcttcatgtctgagcagagcgagcggccccggggccgcatccggaggatgggcaccagcggccgcagcatcatgaagagcacctctgtgtctggagagatgtacaccctggagcacaatgatggcagccagagcgacacagctgtgggcaccgtgggcgctgggggcaagaagagaagaagcagcctgagcgccaaggtggtggccatcgtgtccagaagaagccgcagcaccagccagctgagccagacagagagcggccacaagaagctgaagagcaccatccagaggagcacagaaacaggcatggctgctgagatgaggaagatggtgcggcagcccagccgggagagcacagatggcagcatcaacagctacagcagcgagggcaacctgatcttccctggggtgcggctgggcgctgacagccagttcagtgacttcctggatggcctgggccctgcccagctggtgggccggcagaccctggccaccccagccatgggagacatccagatcggcatggaggacaagaagggccagctggaggtggaggtgatccgggcccggagcctgacccagaagccaggcagcaagagcaccccagccccctacgtgaaggtgtacctgctggagaatggagcctgcatcgccaagaagaagacccgcatcgccaggaagaccctggaccccctgtaccagcagagcctggtgtttgatgagagcccccagggcaaggtgctgcaggtgattgtgtggggagactatggccgcatggaccacaagtgcttcatgggcgtggcccagatcctgctggaggagctggacctgagctccatggtgattggctggtacaagctgtttcctcccagcagcctggtggaccccaccctgacccccctgacccggcgggccagccagagcagcctggagagcagcacaggccccccctgcatccgctcctag

SEQ ID NO: 268533 - DNA, 4116 bp, Artificial Sequence
  derived and/or modified sequence
atgagcagcgctgtgggcccccggggcccccggccccccaccgtgcccccacccatgcaggagctgcctgacctgagccacctgacagaggaggagaggaacatcatcatggctgtgatggaccggcagaaggaggaggaggagaaggaggaggccatgctgaagtgtgtggtgcgggacatggccaagccagctgcctgcaagaccccaagaaatgctgagaaccagccccaccagcccagcccccggctgcaccagcagtttgagagctacaaggagcaggtgaggaagatcggggaggaggcccggcgctaccagggcgagcacaaggatgatgcccccacctgtggcatctgccacaagaccaagtttgctgatggctgcggccacctgtgcagctactgcaggaccaagttctgtgcccgctgtggcggccgggtgtccctgcggagcaacaatgaaaacaagatcgtgatgtgggtgtgcaacctgtgcaggaagcagcaggagatcctgaccaagagcggggcctggttcttcggcagcggcccccagcagaccagccaggacggcaccctgagtgacacagccaccggggccggcagcgaggtgccccgggagaagaaggcccggctgcaggagaggagccgcagccagacccccctgagcacagctgctgccagcagccaggatgctgccccacccagcgcccccccagacaggagcaaaggagctgagcccagccagcaggccctgggccctgagcagaagcaggccagcagccgcagccgctctgagcccccccgggagaggaagaagaccccaggcctgtctgagcagaatggaaaaggagccctgaagtctgagaggaagagggtgcccaagaccagcgcccagcctgtggagggcgctgtggaggagcgggagaggaaggagcggcgggagagccggcggctggagaagggccgcagccaggactacccagacaccccagagaagagagatgagggcaaggccgcagatgaggagaagcagaggaaggaggaggactaccagacccgctacagaagtgaccccaacctggcccgctaccctgtgaagcccccacctgaggagcagcagatgaggatgcacgcccgggtgtcccgggcccggcatgagcggcggcacagtgatgtggccctgcccaggacagaggccggggccgccctgcctgagggcaaggccggcaagagggccccagctgctgcccgggccagccccccagacagcccccgggcctacagcgctgagaggacagctgagacccgggcccctggggccaagcagctgaccaaccacagccccccagcccccaggcatggccctgtgcctgctgaggcccctgagctgaaggcccaggagcccctgaggaagcagagccggctggaccccagcagcgctgtgctgatgaggaaggccaagcgggagaaggtggagaccatgctgagaaatgacagcctgagcagtgaccagagcgagagcgtgcggcccagcccccccaagccccacaggagcaagaggggcggcaagaagaggcagatgtctgtgagcagcagcgaggaggagggcgtgtccaccccagagtacaccagctgtgaagatgtggagctggagagcgagagcgtgtctgagaagggggacctggactactactggctggaccctgccacctggcacagccgggagaccagccccatcagcagccaccctgtgacctggcagcccagcaaggagggggaccggctgattggccgggtcatcctgaacaagaggaccaccatgcccaaggacagcggggccctgctgggcctgaaggtggtgggcggcaagatgacagacctgggccgcctgggcgccttcatcaccaaggtgaagaagggcagcctggctgatgtggtgggccacctgcgggctggagatgaggtgctggagtggaatggcaagcccctgcccggggccaccaatgaggaggtgtacaacatcatcctggagagcaagtctgagccccaggtggagatcatcgtgtcccggcccatcggggacatcccccgcatccctgagagcagccacccccccctggagagcagcagcagcagctttgagagccagaagatggagcggcccagcatcagcgtcatcagccccaccagccctggggccctgaaggatgccccccaggtgctgcccggccagctgtctgtgaagctgtggtatgacaaggtgggccaccagctgattgtgaatgtgctgcaggccacagacctgcctgcccgggtggatggccggcccaggaacccctacgtgaagatgtacttcctgcctgacagaagtgacaagagcaagaggaggaccaagacagtgaagaagatcctggagcccaagtggaaccagacctttgtgtacagccacgtgcaccggcgggacttccgggagaggatgctggagatcaccgtgtgggaccagccccgggtgcaggaggaggagagcgagttcctgggggagatcctgattgagctggagacagccctgctggatgatgagccccactggtacaagctgcagacccatgatgagagcagcctgcccctgccccagcccagccccttcatgccccggcggcacatccacggggagagcagcagcaagaagctgcagaggagccagaggatcagtgacagcgacatcagtgactatgaggtggatgatggcatcggcgtggtgccccctgtgggctaccgcagcagcgcccgggagagcaagagcaccaccctgactgtgcctgagcagcagaggaccacccaccacaggagccgctctgtgagcccccacagaggaaatgaccagggcaagcccaggagccggctgcccaacgtgcccctgcagaggagcctggatgagatccaccccaccaggaggagccgcagccccaccaggcaccatgatgccagccgcagccctgtggaccacaggaccagagatgtggacagccagtacctgtctgagcaggacagcgagctgctgatgctgccccgggccaagaggggccgctctgcagaatgtctgcacaccaccagcgagctgcagcccttcctggaccgggcccggagcgccagcaccaactgcctgcggccagacaccagcctgcacagccctgagcgggagcggggccgctggagccccagcctggacagaagaagaccacccagcccccgcatccagatccagcacgccagcccagaaaatgacaggatgcaccggcagaggagccccacccagagccccccagctgacaccagcttcagcagcagaagaggccggcagctgccccaggtgcctgtgcgcagcggcagcattgagcaggagagcggccacaagaagctgaagagcaccatccagaggagcacagaaacaggcatggctgctgagatgaggaagatggtgcggcagcccagccgggagagcacagatggcagcatcaacagctacagcagcgagggcaacctgatcttccctggggtgcggctgggcgctgacagccagttcagtgacttcctggatggcctgggccctgcccagctggtgggccggcagaccctggccaccccagccatgggagacatccagatcggcatggaggacaagaagggccagctggaggtggaggtgatccgggcccggagcctgacccagaagccaggcagcaagagcaccccagccccctacgtgaaggtgtacctgctggagaatggagcctgcatcgccaagaagaagacccgcatcgccaggaagaccctggaccccctgtaccagcagagcctggtgtttgatgagagcccccagggcaaggtgctgcaggtgattgtgtggggagactatggccgcatggaccacaagtgcttcatgggcgtggcccagatcctgctggaggagctggacctgagctccatggtgattggctggtacaagctgtttcctcccagcagcctggtggaccccaccctgacccccctgacccggcgggccagccagagcagcctggagagcagcacaggccccccctgcatccgctcctag

SEQ ID NO: 268534 - DNA, 4626 bp, Artificial Sequence
  derived and/or modified sequence
atgagcagcgctgtgggcccccggggcccccggccccccaccgtgcccccacccatgcaggagctgcctgacctgagccacctgacagaggaggagaggaacatcatcatggctgtgatggaccggcagaaggaggaggaggagaaggaggaggccatgctgaagtgtgtggtgcgggacatggccaagccagctgcctgcaagaccccaagaaatgctgagaaccagccccaccagcccagcccccggctgcaccagcagtttgagagctacaaggagcaggtgaggaagatcggggaggaggcccggcgctaccagggcgagcacaaggatgatgcccccacctgtggcatctgccacaagaccaagtttgctgatggctgcggccacctgtgcagctactgcaggaccaagttctgtgcccgctgtggcggccgggtgtccctgcggagcaacaatgaagacaagtatgtgatgtgggtgtgcaacctgtgcaggaagcagcaggagatcctgaccaagagcggggcctggttcttcggcagcggcccccagcagaccagccaggacggcaccctgagtgacacagccaccggggccggcagcgaggtgccccgggagaagaaggcccggctgcaggagaggagccgcagccagacccccctgagcacagctgctgccagcagccaggatgctgccccacccagcgcccccccagacaggagcaaaggagctgagcccagccagcaggccctgggccctgagcagaagcaggccagcagccgcagccgctctgagcccccccgggagaggaagaagaccccaggcctgtctgagcagaatggaaaaggagccctgaagtctgagaggaagagggtgcccaagaccagcgcccagcctgtggagggcgctgtggaggagcgggagaggaaggagcggcgggagagccggcggctggagaagggccgcagccaggactacccagacaccccagagaagagagatgagggcaaggccgcagatgaggagaagcagaggaaggaggaggactaccagacccgctacagaagtgaccccaacctggcccgctaccctgtgaagcccccacctgaggagcagcagatgaggatgcacgcccgggtgtcccgggcccggcatgagcggcggcacagtgatgtggccctgcccaggacagaggccggggccgccctgcctgagggcaaggccggcaagagggccccagctgctgcccgggccagccccccagacagcccccgggcctacagcgctgagaggacagctgagacccgggcccctggggccaagcagctgaccaaccacagccccccagcccccaggcatggccctgtgcctgctgaggcccctgagctgaaggcccaggagcccctgaggaagcagagccggctggaccccagcagcgctgtgctgatgaggaaggccaagcgggagaaggtggagaccatgctgagaaatgacagcctgagcagtgaccagagcgagagcgtgcggcccagcccccccaagccccacaggagcaagaggggcggcaagaagaggcagatgtctgtgagcagcagcgaggaggagggcgtgtccaccccagagtacaccagctgtgaagatgtggagctggagagcgagagcgtgtctgagaagggggacctggactactactggctggaccctgccacctggcacagccgggagaccagccccatcagcagccaccctgtgacctggcagcccagcaaggagggggaccggctgattggccgggtcatcctgaacaagaggaccaccatgcccaaggacagcggggccctgctgggcctgaaggtggtgggcggcaagatgacagacctgggccgcctgggcgccttcatcaccaaggtgaagaagggcagcctggctgatgtggtgggccacctgcgggctggagatgaggtgctggagtggaatggcaagcccctgcccggggccaccaatgaggaggtgtacaacatcatcctggagagcaagtctgagccccaggtggagatcatcgtgtcccggcccatcggggacatcccccgcatccctgagagcagccacccccccctggagagcagcagcagcagctttgagagccagaagatggagcggcccagcatcagcgtcatcagccccaccagccctggggccctgaaggatgccccccaggtgctgcccggccagctgtctgtgaagctgtggtatgacaaggtgggccaccagctgattgtgaatgtgctgcaggccacagacctgcctgcccgggtggatggccggcccaggaacccctacgtgaagatgtacttcctgcctgacagaagtgacaagagcaagaggaggaccaagacagtgaagaagatcctggagcccaagtggaaccagacctttgtgtacagccacgtgcaccggcgggacttccgggagaggatgctggagatcaccgtgtgggaccagccccgggtgcaggaggaggagagcgagttcctgggggagatcctgattgagctggagacagccctgctggatgatgagccccactggtacaagctgcagacccatgatgagagcagcctgcccctgccccagcccagccccttcatgccccggcggcacatccacggggagagcagcagcaagaagctgcagaggagccagaggatcagtgacagcgacatcagtgactatgaggtggatgatggcatcggcgtggtgccccctgtgggctaccgcagcagcgcccgggagagcaagagcaccaccctgactgtgcctgagcagcagaggaccacccaccacaggagccgctctgtgagcccccacagaggaaatgaccagggcaagcccaggagccggctgcccaacgtgcccctgcagaggagcctggatgagatccaccccaccaggaggagccgcagccccaccaggcaccatgatgccagccgcagccctgtggaccacaggaccagagatgtggacagccagtacctgtctgagcaggacagcgagctgctgatgctgccccgggccaagaggggccgctctgcagaatgtctgcacaccaccaggcacctggtgcgccactacaagaccctgccccccaagatgcccctgctgcagagcagcagccactggaacatctacagcgagctgcagcccttcctggaccgggcccggagcgccagcaccaactgcctgcggccagacaccagcctgcacagccctgagcgggagaggatgcaccggcagaggagccccacccagagccccccagctgacaccagcttcagcagcagaagaggccggcagctgccccaggtgcctgtgcgcagcggcagcattgagcaggccagcctggtggtggaggagaggacccggcagatgaagatgaaggtgcaccgcttcaagcagaccactggaagtggcagcagccaggagctggaccgggagcagtacagcaagtacaacatccacaaggaccagtaccgcagctgtgacaacgtgtctgccaagagcagtgacagtgatgtgtctgatgtgtctgccatcagcaggaccagcagcgccagccggctgagcagcaccagcttcatgtctgagcagagcgagcggccccggggccgcatcagcagcttcacccccaagatgcagggccgcaggatgggcaccagcggccgcagcatcatgaagagcacctctgtgtctggagagatgtacaccctggagcacaatgatggcagccagagcgacacagctgtgggcaccgtgggcgctgggggcaagaagagaagaagcagcctgagcgccaaggtggtggccatcgtgtccagaagaagccgcagcaccagccagctgagccagacagagagcggccacaagaagctgaagagcaccatccagaggagcacagaaacaggcatggctgctgagatgaggaagatggtgcggcagcccagccgggagagcacagatggcagcatcaacagctacagcagcgagggcaacctgatcttccctggggtgcggctgggcgctgacagccagttcagtgacttcctggatggcctgggccctgcccagctggtgggccggcagaccctggccaccccagccatgggagacatccagatcggcatggaggacaagaagggccagctggaggtggaggtgatccgggcccggagcctgacccagaagccaggcagcaagagcaccccagccccctacgtgaaggtgtacctgctggagaatggagcctgcatcgccaagaagaagacccgcatcgccaggaagaccctggaccccctgtaccagcagagcctggtgtttgatgagagcccccagggcaaggtgctgcaggtgattgtgtggggagactatggccgcatggaccacaagtgcttcatgggcgtggcccagatcctgctggaggagctggacctgagctccatggtgattggctggtacaagctgtttcctcccagcagcctggtggaccccaccctgacccccctgacccggcgggccagccagagcagcctggagagcagcacaggccccccctgcatccgctcctag

SEQ ID NO: 268535 - DNA, 4446 bp, Artificial Sequence
  derived and/or modified sequence
atgagcagcgctgtgggcccccggggcccccggccccccaccgtgcccccacccatgcaggagctgcctgacctgagccacctgacagaggaggagaggaacatcatcatggctgtgatggaccggcagaaggaggaggaggagaaggaggaggccatgctgaagtgtgtggtgcgggacatggccaagccagctgcctgcaagaccccaagaaatgctgagaaccagccccaccagcccagcccccggctgcaccagcagtttgagagctacaaggagcaggtgaggaagatcggggaggaggcccggcgctaccagggcgagcacaaggatgatgcccccacctgtggcatctgccacaagaccaagtttgctgatggctgcggccacctgtgcagctactgcaggaccaagttctgtgcccgctgtggcggccgggtgtccctgcggagcaacaatgaaaacaagatcgtgatgtgggtgtgcaacctgtgcaggaagcagcaggagatcctgaccaagagcggggcctggttcttcggcagcggcccccagcagaccagccaggacggcaccctgagtgacacagccaccggggccggcagcgaggtgccccgggagaagaaggcccggctgcaggagaggagccgcagccagacccccctgagcacagctgctgccagcagccaggatgctgccccacccagcgcccccccagacaggagcaaaggagctgagcccagccagcaggccctgggccctgagcagaagcaggccagcagccgcagccgctctgagcccccccgggagaggaagaagaccccaggcctgtctgagcagaatggaaaaggagccctgaagtctgagaggaagagggtgcccaagaccagcgcccagcctgtggagggcgctgtggaggagcgggagaggaaggagcggcgggagagccggcggctggagaagggccgcagccaggactacccagacaccccagagaagagagatgagggcaaggccgcagatgaggagaagcagaggaaggaggaggactaccagacccgctacagaagtgaccccaacctggcccgctaccctgtgaagcccccacctgaggagcagcagatgaggatgcacgcccgggtgtcccgggcccggcatgagcggcggcacagtgatgtggccctgcccaggacagaggccggggccgccctgcctgagggcaaggccggcaagagggccccagctgctgcccgggccagccccccagacagcccccgggcctacagcgctgagaggacagctgagacccgggcccctggggccaagcagctgaccaaccacagccccccagcccccaggcatggccctgtgcctgctgaggcccctgagctgaaggcccaggagcccctgaggaagcagagccggctggaccccagcagcgctgtgctgatgaggaaggccaagcgggagaaggtggagaccatgctgagaaatgacagcctgagcagtgaccagagcgagagcgtgcggcccagcccccccaagccccacaggagcaagaggggcggcaagaagaggcagatgtctgtgagcagcagcgaggaggagggcgtgtccaccccagagtacaccagctgtgaagatgtggagctggagagcgagagcgtgtctgagaagggggacctggactactactggctggaccctgccacctggcacagccgggagaccagccccatcagcagccaccctgtgacctggcagcccagcaaggagggggaccggctgattggccgggtcatcctgaacaagaggaccaccatgcccaaggacagcggggccctgctgggcctgaaggtggtgggcggcaagatgacagacctgggccgcctgggcgccttcatcaccaaggtgaagaagggcagcctggctgatgtggtgggccacctgcgggctggagatgaggtgctggagtggaatggcaagcccctgcccggggccaccaatgaggaggtgtacaacatcatcctggagagcaagtctgagccccaggtggagatcatcgtgtcccggcccatcggggacatcccccgcatccctgagagcagccacccccccctggagagcagcagcagcagctttgagagccagaagatggagcggcccagcatcagcgtcatcagccccaccagccctggggccctgaaggatgccccccaggtgctgcccggccagctgtctgtgaagctgtggtatgacaaggtgggccaccagctgattgtgaatgtgctgcaggccacagacctgcctgcccgggtggatggccggcccaggaacccctacgtgaagatgtacttcctgcctgacagaagtgacaagagcaagaggaggaccaagacagtgaagaagatcctggagcccaagtggaaccagacctttgtgtacagccacgtgcaccggcgggacttccgggagaggatgctggagatcaccgtgtgggaccagccccgggtgcaggaggaggagagcgagttcctgggggagatcctgattgagctggagacagccctgctggatgatgagccccactggtacaagctgcagacccatgatgagagcagcctgcccctgccccagcccagccccttcatgccccggcggcacatccacggggagagcagcagcaagaagctgcagaggagccagaggatcagtgacagcgacatcagtgactatgaggtggatgatggcatcggcgtggtgccccctgtgggctaccgcagcagcgcccgggagagcaagagcaccaccctgactgtgcctgagcagcagaggaccacccaccacaggagccgctctgtgagcccccacagaggaaatgaccagggcaagcccaggagccggctgcccaacgtgcccctgcagaggagcctggatgagatccaccccaccaggaggagccgcagccccaccaggcaccatgatgccagccgcagccctgtggaccacaggaccagagatgtggacagccagtacctgtctgagcaggacagcgagctgctgatgctgccccgggccaagaggggccgctctgcagaatgtctgcacaccaccagcgagctgcagcccttcctggaccgggcccggagcgccagcaccaactgcctgcggccagacaccagcctgcacagccctgagcgggagaggatgcaccggcagaggagccccacccagagccccccagctgacaccagcttcagcagcagaagaggccggcagctgccccaggtgcctgtgcgcagcggcagcattgagcaggccagcctggtggtggaggagaggacccggcagatgaagatgaaggtgcaccgcttcaagcagaccactggaagtggcagcagccaggagctggaccgggagcagtacagcaagtacaacatccacaaggaccagtaccgcagctgtgacaacgtgtctgccaagagcagtgacagtgatgtgtctgatgtgtctgccatcagcaggaccagcagcgccagccggctgagcagcaccagcttcatgtctgagcagagcgagcggccccggggccgcatcagcagcttcacccccaagatgcagggccgcaggatgggcaccagcggccgcagcatcatgaagagcacctctgtgtctggagagatgtacaccctggagcacaatgatggcagccagagcgacacagctgtgggcaccgtgggcgctgggggcaagaagagaagaagcagcctgagcgccaaggtggtggccatcgtgtccagaagaagccgcagcaccagccagctgagccagacagagagcggccacaagaagctgaagagcaccatccagaggagcacagaaacaggcatggctgctgagatgaggaagatggtgcggcagcccagccgggagagcacagatggcagcatcaacagctacagcagcgagggcaacctgatcttccctggggtgcggctgggcgctgacagccagttcagtgacttcctggatggcctgggccctgcccagctggtgggccggcagaccctggccaccccagccatggccccctacgtgaaggtgtacctgctggagaatggagcctgcatcgccaagaagaagacccgcatcgccaggaagaccctggaccccctgtaccagcagagcctggtgtttgatgagagcccccagggcaaggtgctgcaggtgattgtgtggggagactatggccgcatggaccacaagtgcttcatgggcgtggcccagatcctgctggaggagctggacctgagctccatggtgattggctggtacaagctgtttcctcccagcagcctggtggaccccaccctgacccccctgacccggcgggccagccagagcagcctggagagcagcacaggccccccctgcatccgctcctag

SEQ ID NO: 268536 - DNA, 4446 bp, Artificial Sequence
  derived and/or modified sequence
atgagcagcgctgtgggcccccggggcccccggccccccaccgtgcccccacccatgcaggagctgcctgacctgagccacctgacagaggaggagaggaacatcatcatggctgtgatggaccggcagaaggaggaggaggagaaggaggaggccatgctgaagtgtgtggtgcgggacatggccaagccagctgcctgcaagaccccaagaaatgctgagaaccagccccaccagcccagcccccggctgcaccagcagtttgagagctacaaggagcaggtgaggaagatcggggaggaggcccggcgctaccagggcgagcacaaggatgatgcccccacctgtggcatctgccacaagaccaagtttgctgatggctgcggccacctgtgcagctactgcaggaccaagttctgtgcccgctgtggcggccgggtgtccctgcggagcaacaatgaagacaaggtggtgatgtgggtgtgcaacctgtgcaggaagcagcaggagatcctgaccaagagcggggcctggttcttcggcagcggcccccagcagaccagccaggacggcaccctgagtgacacagccaccggggccggcagcgaggtgccccgggagaagaaggcccggctgcaggagaggagccgcagccagacccccctgagcacagctgctgccagcagccaggatgctgccccacccagcgcccccccagacaggagcaaaggagctgagcccagccagcaggccctgggccctgagcagaagcaggccagcagccgcagccgctctgagcccccccgggagaggaagaagaccccaggcctgtctgagcagaatggaaaaggagccctgaagtctgagaggaagagggtgcccaagaccagcgcccagcctgtggagggcgctgtggaggagcgggagaggaaggagcggcgggagagccggcggctggagaagggccgcagccaggactacccagacaccccagagaagagagatgagggcaaggccgcagatgaggagaagcagaggaaggaggaggactaccagacccgctacagaagtgaccccaacctggcccgctaccctgtgaagcccccacctgaggagcagcagatgaggatgcacgcccgggtgtcccgggcccggcatgagcggcggcacagtgatgtggccctgcccaggacagaggccggggccgccctgcctgagggcaaggccggcaagagggccccagctgctgcccgggccagccccccagacagcccccgggcctacagcgctgagaggacagctgagacccgggcccctggggccaagcagctgaccaaccacagccccccagcccccaggcatggccctgtgcctgctgaggcccctgagctgaaggcccaggagcccctgaggaagcagagccggctggaccccagcagcgctgtgctgatgaggaaggccaagcgggagaaggtggagaccatgctgagaaatgacagcctgagcagtgaccagagcgagagcgtgcggcccagcccccccaagccccacaggagcaagaggggcggcaagaagaggcagatgtctgtgagcagcagcgaggaggagggcgtgtccaccccagagtacaccagctgtgaagatgtggagctggagagcgagagcgtgtctgagaagggggacctggactactactggctggaccctgccacctggcacagccgggagaccagccccatcagcagccaccctgtgacctggcagcccagcaaggagggggaccggctgattggccgggtcatcctgaacaagaggaccaccatgcccaaggacagcggggccctgctgggcctgaaggtggtgggcggcaagatgacagacctgggccgcctgggcgccttcatcaccaaggtgaagaagggcagcctggctgatgtggtgggccacctgcgggctggagatgaggtgctggagtggaatggcaagcccctgcccggggccaccaatgaggaggtgtacaacatcatcctggagagcaagtctgagccccaggtggagatcatcgtgtcccggcccatcggggacatcccccgcatccctgagagcagccacccccccctggagagcagcagcagcagctttgagagccagaagatggagcggcccagcatcagcgtcatcagccccaccagccctggggccctgaaggatgccccccaggtgctgcccggccagctgtctgtgaagctgtggtatgacaaggtgggccaccagctgattgtgaatgtgctgcaggccacagacctgcctgcccgggtggatggccggcccaggaacccctacgtgaagatgtacttcctgcctgacagaagtgacaagagcaagaggaggaccaagacagtgaagaagatcctggagcccaagtggaaccagacctttgtgtacagccacgtgcaccggcgggacttccgggagaggatgctggagatcaccgtgtgggaccagccccgggtgcaggaggaggagagcgagttcctgggggagatcctgattgagctggagacagccctgctggatgatgagccccactggtacaagctgcagacccatgatgagagcagcctgcccctgccccagcccagccccttcatgccccggcggcacatccacggggagagcagcagcaagaagctgcagaggagccagaggatcagtgacagcgacatcagtgactatgaggtggatgatggcatcggcgtggtgccccctgtgggctaccgcagcagcgcccgggagagcaagagcaccaccctgactgtgcctgagcagcagaggaccacccaccacaggagccgctctgtgagcccccacagaggaaatgaccagggcaagcccaggagccggctgcccaacgtgcccctgcagaggagcctggatgagatccaccccaccaggaggagccgcagccccaccaggcaccatgatgccagccgcagccctgtggaccacaggaccagagatgtggacagccagtacctgtctgagcaggacagcgagctgctgatgctgccccgggccaagaggggccgctctgcagaatgtctgcacaccaccagcgagctgcagcccttcctggaccgggcccggagcgccagcaccaactgcctgcggccagacaccagcctgcacagccctgagcgggagaggatgcaccggcagaggagccccacccagagccccccagctgacaccagcttcagcagcagaagaggccggcagctgccccaggtgcctgtgcgcagcggcagcattgagcaggccagcctggtggtggaggagaggacccggcagatgaagatgaaggtgcaccgcttcaagcagaccactggaagtggcagcagccaggagctggaccgggagcagtacagcaagtacaacatccacaaggaccagtaccgcagctgtgacaacgtgtctgccaagagcagtgacagtgatgtgtctgatgtgtctgccatcagcaggaccagcagcgccagccggctgagcagcaccagcttcatgtctgagcagagcgagcggccccggggccgcatcagcagcttcacccccaagatgcagggccgcaggatgggcaccagcggccgcagcatcatgaagagcacctctgtgtctggagagatgtacaccctggagcacaatgatggcagccagagcgacacagctgtgggcaccgtgggcgctgggggcaagaagagaagaagcagcctgagcgccaaggtggtggccatcgtgtccagaagaagccgcagcaccagccagctgagccagacagagagcggccacaagaagctgaagagcaccatccagaggagcacagaaacaggcatggctgctgagatgaggaagatggtgcggcagcccagccgggagagcacagatggcagcatcaacagctacagcagcgagggcaacctgatcttccctggggtgcggctgggcgctgacagccagttcagtgacttcctggatggcctgggccctgcccagctggtgggccggcagaccctggccaccccagccatggccccctacgtgaaggtgtacctgctggagaatggagcctgcatcgccaagaagaagacccgcatcgccaggaagaccctggaccccctgtaccagcagagcctggtgtttgatgagagcccccagggcaaggtgctgcaggtgattgtgtggggagactatggccgcatggaccacaagtgcttcatgggcgtggcccagatcctgctggaggagctggacctgagctccatggtgattggctggtacaagctgtttcctcccagcagcctggtggaccccaccctgacccccctgacccggcgggccagccagagcagcctggagagcagcacaggccccccctgcatccgctcctag

SEQ ID NO: 268537 - DNA, 3876 bp, Artificial Sequence
  derived and/or modified sequence
atgagcagcgccgtgggcccccggggcccccggccccccaccgtgcccccacccatgcaggagctgccagatttgtctcatctcaccgaggaggaacggaacatcattatggcagtgatggatcggcagaaagaggaggaggaaaaagaggaggccatgctcaaatgtgtcgtccgcgacatggccaaaccagcagcctgcaagacccctagaaatgccgagaaccagccacatcagccgtctcctcgccttcaccagcagtttgaatcctacaaggagcaagtaagaaaaatcggagaagaggctaggaggtatcagggagagcataaagacgatgcccccacctgtggtatctgtcacaagactaaattcgccgacggctgcggtcacctgtgttcatactgtaggaccaagttttgcgctaggtgtggcggtcgggtctcactgagatcaaataatgaggataaatacgtgatgtgggtttgtaatctgtgcagaaaacaacaggaaatcctgacaaagtctggggcctggttttttggaagcggaccccaacagacttctcaggatggcacactcagcgatacggccacaggtgcaggctctgaggtgccaagggagaaaaaagctcgcttacaggagcgatctaggtcccagacccctctttccacagccgcagcaagcagccaggacgccgctccgccctcagcgcctcctgaccgcagcaaaggcgccgagcccagccagcaagccctgggacctgagcagaaacaggcatctagccgcagtaggtctgaacctcccagagagagaaagaagaccccgggtctctccgagcaaaacggtaaaggtgcactcaaaagcgagcggaagcgggtacccaagacaagcgctcagccagtcgagggcgccgttgaggagagggagagaaaagaacggagagaatcgcgaaggctggagaaggggcgaagccaggattaccctgatactcctgaaaagagggacgagggcaaggcagcagacgaggaaaagcaacggaaggaggaagactaccagacgagatacagatctgatcctaatctggccaggtaccccgtgaaacctccccctgaggagcagcaaatgcgcatgcacgcgcgcgtctcacgcgcaaggcatgagcgaagacatagcgacgtagccctgccaagaaccgaagcaggagctgccttgcctgagggcaaggccggaaaaagggctccagctgctgctagagccagcccccccgactctccacgggcatactccgcggaacgaactgctgagacccgggctcctggtgctaagcaactcaccaaccattctccacccgcaccaagacatggaccagtccccgccgaggcacccgaactaaaggcccaagagccactgcgaaaacagtctcgcctcgacccctcatccgccgtactgatgcggaaggctaagagagaaaaggtggaaactatgttgagaaatgattcccttagcagcgaccaatcagaatcggtccggccaagcccccccaaaccccaccgctcaaaacgaggtggcaagaaaaggcagatgtccgtttcttcaagcgaagaagagggagtttctactcccgaatacaccagctgcgaggacgtggagttggagtctgaaagcgtgagtgaaaagggagatctggactactactggctggacccggccacatggcacagcagagagacaagtccaataagttcacatcccgtgacctggcagcccagcaaagaaggtgacaggctcattggaagggtcatactgaacaaaagaaccacaatgcccaaggattctggcgccctgctcggtctaaaagtggtgggcgggaaaatgaccgatctcgggaggctcggtgcttttattaccaaggttaagaaaggtagcctggccgacgtcgtgggccacctgcgggcaggcgacgaggtcctggaatggaatgggaagccgctgcctggcgctaccaatgaagaggtttacaacatcatcttggaatcaaagagcgaaccccaggtggaaattatcgttagccgcccgatcggagatattcccagaatccctgaaagcagtcatccgcccctggagagcagctcctctagttttgaatcgcagaagatggagaggccttctatctcggtaatcagccctacgagccccggagcattaaaagatgctccccaggtgttacccggtcagttgagtgtgaaactctggtacgacaaagtgggccaccagctcatcgtgaacgtactgcaggctactgacctgcctgccagggtagatggaaggcccaggaacccgtacgtcaaaatgtactttctgcccgatagatcagacaaaagcaagaggcgtactaaaacagtaaaaaagattctcgaaccgaagtggaaccaaaccttcgtatactctcacgttcatcgtcgggattttagagaaaggatgcttgagatcaccgtctgggaccagccccgcgttcaggaggaggaaagcgaattcctcggcgagatcttaattgagctggagacggcactgctcgatgacgagcctcactggtataaattgcagacccatgacgaaagttcactgccactccctcagcctagcccgttcatgccacgaaggcacatccacggagaaagctcctcgaagaagctgcagaggagccaacgtatttcggactccgacatcagcgactacgaagtagacgacgggatcggagtagtgccgcctggctacaggtccagcgcgagggagtccaagtctactaccctgaccgtgcccgaacagcaaaggacaacacaccatagaagccggagcgtctcccctcataggggtaatgaccagggaaagccgcggtcacgccttcccaatgttccccttcaaagatccctcgatgaaatccatcctacgcggagatcaaggtccccgaccagacatcacgatgcttcccgatctcctgtggaccaccgcactagggatgtcgactctcagtacctttcagaacaggatcgtatgcaccggcaacgttcccctactcaaagcccacccgctgacacctcgttctcttcccgccgcgggcggcagttaccccaggtgcctgtgcgctccggatcaattgaacaggagagtgggcacaaaaaactgaagtcaaccatacaaagaagcactgaaaccggaatggctgccgagatgcgcaaaatggttagacagccgtctagggaaagtacggatggctctataaattcttactcctccgaaggcaatctgattttcccaggagtccggctgggggccgactctcagttcagtgatttcctagacgggctgggtcccgctcagctcgtggggcggcaaaccctcgccacaccggcaatgggagacatccagatcggaatggaggataaaaaaggacagcttgaggtggaagtcatccgggctaggtcgttaactcagaagcccggctccaagagcacgcccgcaccatacgtgaaggtttatctgcttgaaaacggcgcatgtattgccaagaaaaaaacgaggatcgccaggaaaaccctggatcctttgtaccaacagtctctcgtatttgatgaatcaccccagggcaaggtattacaagtgatagtttggggagactatggaaggatggaccataagtgctttatgggcgtcgcacagatcctgctagaggagctggacctgtcgagcatggtgattggctggtataagctcttcccaccctccagcctagttgatcctaccttgacccctctgactcggagggcatcacagtcatccctggagtcaagcacagggccgccgtgtatcagaagttag

SEQ ID NO: 268538 - DNA, 4428 bp, Artificial Sequence
  derived and/or modified sequence
atgagcagcgccgtgggcccccggggcccccggccccccaccgtgcccccacctatgcaggaactgcccgatttaagccacctgacagaggaagaaaggaatatcataatggcagtaatggatcggcagaaggaagaagaggagaaagaagaggccatgctgaagtgcgtcgtgagggatatggcgaaacctgccgcgtgcaagacgccacgcaacgccgagaaccagccacaccagcctagccccaggctccatcagcagttcgagtcttacaaggaacaggtgcgcaagattggcgaggaggcccgtcgatatcagggggagcacaaagatgacgcccctacctgcgggatctgtcacaaaacaaaatttgctgacggctgcggtcatctctgctcatattgtcgaactaagttctgcgcaaggtgcggtggccgtgtcagcctgcggtctaacaatgaggacatctgcgtaatgtgggtgtgtaatttgtgcagaaagcagcaggaaatcctgactaagagcggcgcatggtttttcggatcggggccacagcagacatcacaggatggcactctttcggatacggcgacgggcgctggcagtgaagttccaagagagaagaaggcacgcctgcaggagaggtcacggtctcaaacacccctgtccacagccgccgcttcgtctcaggatgccgcacctccctccgcacctccggacagaagcaaaggcgcagaaccgagtcagcaggccttaggtcccgagcaaaagcaggcatctagtaggtcgcggagcgaacctccacgcgagaggaagaagacaccaggactgagtgaacagaatggaaagggcgctttgaagagcgaaaggaagagagtgcccaagactagcgcacaacccgtcgagggcgccgtggaagagcgggagagaaaagagcgacgcgaatctcgcagactggagaaaggccggagtcaggattaccccgatacacccgagaagcgagacgaaggcaaagctgcagatgaagaaaagcaacgcaaggaagaggactaccagacacgctaccggtctgatcccaatttagctagatatcctgtaaaacctcctcccgaggaacagcagatgcgcatgcatgcccgtgtaagccgtgctcggcatgaacgacgtcatagtgatgtcgcacttcctcgaaccgaggccggggcagccctgccagaaggtaaggcggggaaacgagccccagctgctgccagagcatcacccccggacagcccgcgcgcctatagcgccgagcgtacggccgagacgcgagctcccggtgccaaacagttaactaatcacagcccgcctgccccacgtcatggcccagtccccgcagaggcgccggagctgaaggctcaggagcctctcagaaagcaaagcaggttggatccaagctccgcagtccttatgaggaaggccaagagagaaaaggtcgagactatgctgagaaacgactccctctcttccgatcagtccgagtccgttaggcccagccccccgaaaccacaccggtccaagcgtgggggaaagaagcggcagatgtctgtctccagctccgaagaggagggggtgtccacccctgagtataccagctgcgaggatgtagaactggaatcagaatctgtgtctgaaaagggtgaccttgattactattggctggacccagccacatggcactcccgcgaaaccagtccaatctctagtcatccagtcacgtggcagccttcaaaagaaggggatcgactaattggacgagtcattctgaacaaaagaacaactatgccaaaggattctggtgccttgctcgggctcaaagtagtcggcggaaaaatgaccgaccttgggcggctgggggccttcatcaccaaggtgaaaaagggatctctcgctgacgtagttgggcacctgcgcgcaggagatgaggtcttagaatggaatgggaagcccctgcccggcgctacgaatgaggaagtctacaacatcattttagagagcaaatccgagccccaggtggagattatcgtgtcaagacccataggcgatatacctcgcatcccagagtcttctcacccaccattagagtcttcttcctcatccttcgagtctcagaaaatggaaaggccctctatatcggtgataagcccaacctctcctggagctctgaaggatgccccccaggttctgcccggccagctatccgtcaagttatggtacgacaaagtcggccaccaactgattgttaatgtgttgcaggcaacggacctgcctgccagggttgacggaaggccgcggaacccatatgttaagatgtattttctgccagatcgctcagacaagtcaaaaaggaggacaaaaaccgtgaagaagattcttgagcctaagtggaaccagacctttgtatattcacacgtccatagaagggactttcgcgaaaggatgctggagatcacagtgtgggatcagcctcgtgttcaggaggaagagagcgagtttctgggcgagattctcattgagctggagaccgctctcctggacgacgagcctcattggtacaagctgcagacacatgacgagagcagcctgccattgccccagccgagcccctttatgccccgtcgacatatacacggagaatccagttctaaaaagctgcaaagatcacagaggatttccgactcggacatttctgattacgaggtagatgatggaatcggcgtggtgccccctggataccggtcttccgcccgagagtccaaaagtaccactctgaccgtgcccgagcaacaacggactacacaccacagatcaaggagcgtgtcccctcatcggggaaatgaccaaggtaaacccagatcccggctccctaacgtgccactgcaacgaagcttagatgaaatccatcccacgagacgctcgaggtctccaactagacaccatgacgcttctcggagcccagtagaccataggacccgtgacgtcgactcacagtacctgagtgaacaggacagcgagctcttgatgctgcccagagccaaacgcggccggagtgcagagtgtttgcatactacccgtatgcaccgacaacgaagtcctactcagagtccccctgcagacacctccttcagcagtcggaggggaagacagttaccgcaggtccctgtgaggagtggatctattgagcaggcgagcttggtggttgaggagcgcacccgacaaatgaaaatgaaagtccacaggtttaagcagaccaccggctctggctctagtcaggaactagacagagagcagtattctaaatataatatccacaaagatcagtaccgatcgtgcgacaacgtcagcgcgaagtcttccgactccgatgtttccgatgtgtcagcaattagtaggactagcagcgcgagcagactttcttccacgagtttcatgagcgagcagtccgaacggccccgcggcaggatcagacgcatgggcacatccggaaggagcatcatgaagtcaacaagtgtctctggtgaaatgtatacactggagcataacgacggcagtcaatccgacaccgctgtgggaacagtgggggcgggaggaaagaaaagacgctccagcctgagcgcaaaggtcgttgctatcgtgtctcggcgaagccgatctacctctcagcttagtcagacagagagcggccataagaaactgaagtctactatacaaagatctacggagacaggaatggcagcagaaatgagaaagatggtgagacaaccgagtcgggagtcgaccgacggtagcattaatagctactctagtgaagggaatctgatcttcccaggcgtgaggctaggtgccgactcacaattctccgattttctagatggcttgggcccagcccagctggtgggacgccagaccctcgccacacccgcgatgggcgatatacagatcggcatggaggacaagaaagggcaattggaggtcgaggttataagggcaaggtctcttacccagaaaccaggatccaagtccacccctgctccatacgtgaaggtctatctgctggagaatggagcctgcatcgccaagaagaaaacaaggattgctcggaaaaccctcgatcccctctaccagcagagcttggtctttgacgagtccccccagggaaaggtgctgcaggtcatcgtatggggcgattacggcaggatggaccataaatgttttatgggcgtggctcaaatccttctggaggaactcgacctgagttccatggtgatcggatggtataagctttttcccccatcctccctggtcgaccccaccttaacccccctcaccaggagggcctcccagtctagtttggagtccagcactggaccaccttgcatccgcagctag

SEQ ID NO: 268539 - DNA, 4116 bp, Artificial Sequence
  derived and/or modified sequence
atgagcagcgccgtgggcccccggggcccccggccccccaccgtgccccctcccatgcaggaactgccggatctgtctcatcttacagaggaggaacggaacataataatggcggtcatggatcgtcaaaaggaggaggaggaaaaagaggaggctatgctgaagtgtgtcgtgcgcgacatggctaagcctgccgcctgtaaaacccccaggaatgctgagaaccagccccaccagccatcaccccggctgcaccagcagtttgagagctacaaggagcaggttaggaaaatcggggaggaagcacgccgataccagggggagcacaaagatgatgcccctacctgcggaatctgccacaaaacaaaattcgccgatggctgtgggcacctgtgctcctattgcaggacgaaattctgtgcgaggtgcggaggacgggtgtcccttcgcagtaacaacgaaaataagatcgttatgtgggtctgtaacctatgccgaaagcagcaggaaatattgacaaaatccggagcgtggttcttcgggagcggcccccaacagactagccaggacggcacgctcagcgatacagctactggagcgggtagcgaagttccccgcgagaaaaaggcacgcctacaggaaaggtcacggtcacaaacaccgttaagcacagcagccgcctcttcacaggacgccgcgccgccctccgcccctcctgatagaagtaaaggggcagagccctctcagcaagccttgggtcctgagcagaagcaggctagtagccggtcccggtctgaaccaccaagagaacgtaaaaaaacacctggactgtccgagcagaatggcaagggtgctctgaagagcgagcgcaagcgtgtgcccaaaactagcgctcaacccgtggagggggccgtggaggagcgggaacgtaaagagagaagagagtcaaggcggttagaaaaggggcggagtcaggactacccagatacaccagagaagcgcgacgagggcaaagctgctgatgaagaaaagcagcgcaaggaagaggactaccagacaaggtacaggagtgacccaaaccttgcgagatatccagtaaaaccaccccccgaggaacagcagatgaggatgcacgcgagggtttcaagggcaaggcatgaaaggcggcattccgatgtcgccctgccacgaaccgaggctggtgccgccctaccagaaggcaaggctggaaagcgagccccagccgctgcacgagctagtcctccagattcaccccgtgcctattcagccgagaggaccgctgagacacgggctcctggtgcgaaacagcttacaaaccacagcccaccagccccacggcacggtcccgtccctgctgaagcccctgagttgaaggcgcaggaaccgctacgcaagcagtccagactggacccttcatcagctgtgctgatgagaaaagcgaaacgggagaaggtggaaacaatgctgcgcaatgactcactgagctcagaccagtctgaatctgtgcggccgtcccctccaaaaccccaccgaagcaaaagaggcgggaagaagaggcagatgtctgtgagctcaagtgaggaggagggggtgtcgactcccgagtacacctcttgcgaggacgtggagcttgaatcagagagcgtgagcgaaaagggtgacttagattattattggcttgaccccgcgacgtggcacagtagagagactagccccatttcctcccacccagtgacctggcagccaagcaaagaaggcgatcggttgattggtagggtcatcttaaataagagaacaaccatgcccaaggattccggtgctctgctcggtctcaaggtcgtggggggaaagatgacggatttaggacgactgggtgcatttatcacaaaagttaaaaaaggttctctggctgacgttgtcggacatctgcgtgcaggcgacgaggtcctggagtggaatggcaagcctcttcctggagccaccaacgaggaggtctataatattattctggagtctaaatccgagccacaggtcgagataattgtgagccggcccataggggatattccacgcattccagagagcagtcatccaccattagagagcagctccagttcctttgagtctcaaaagatggagcggccgagtatttcagtgatttctcccaccagtcccggggccctgaaagatgccccacaggtgctgcctgggcagttaagtgtgaaactgtggtatgacaaagtgggccaccaactcattgtcaacgtgctccaggcaacagatctgccagcccgcgtggacggacgccctcgcaatccatatgtgaagatgtacttcctacccgataggtcagacaagtcaaagcgcaggaccaaaacagtgaaaaagattctagagccaaaatggaaccagacctttgtctatagccacgtccaccgcagagacttcagagaacgcatgctcgagattacggtctgggatcagcccagagtgcaagaggaagagagcgagtttctgggcgaaatcctcatcgagctagagaccgcgcttttagacgacgagcctcattggtataagcttcagacccacgatgagtctagccttccacttccccagccatccccattcatgccccggcggcatattcatggggaatcatcaagcaagaaactccagaggtcgcagcgcatcagtgattcggatatttccgattacgaggttgatgatgggatcggcgtcgtgcccccagtcggctatcgttcctcagcgcgtgagagcaagtcaactaccctgacagtgcccgaacaacagagaaccacccaccatcgatcgaggagtgtcagccctcacagaggtaacgaccaaggaaaacccagaagtagactgcctaatgtccctttgcagcggagtctggacgagatccaccctacacggcgttcaagaagccccacaagacatcatgatgcttctagaagccctgttgatcacagaaccagagatgttgattcccagtacttgtccgagcaggactcagaactgctgatgctccctcgggctaaacgaggtagatctgccgagtgcctgcacaccacctccgagctgcagccattcttggacagggcacggtctgccagtacaaattgtcttcggcctgatacatcactgcactcacccgagagggagagggggaggtggagtccatcactcgaccgaaggagacccccttcaccgaggatccagatacagcacgcctcccccgagaatgacaggatgcacaggcagcgcagtcctacccaatcccctcccgctgacactagttttagctccagaagaggccgacagctgcctcaagtccctgtgcggagtgggtctattgaacaagaatcagggcataagaaattaaaaagcactatccagaggagtaccgaaaccgggatggccgccgagatgcggaaaatggttcgccaaccaagccgagaaagcacagacggctccatcaactcctacagcagcgagggaaacctgatcttccctggcgtgagattaggcgccgactcccagttctctgatttcctggacggcttggggcccgcccagttggtcggccgacaaactctagctacgccagccatgggagatatccagattggcatggaggataaaaagggccagctagaggtggaggttatacgggctagaagcctgacccagaagccaggctcgaaatcgacccccgccccctacgtcaaggtgtatttactggagaacggcgcatgcatagccaagaaaaagacccggattgccaggaaaacactggaccccttatatcagcagtcacttgtgtttgatgaatctccgcaggggaaagttttacaggtgatagtctggggcgactacggccgaatggaccacaaatgctttatgggagtcgcccagatactgctcgaagaactcgacctgagcagtatggtaatcggctggtataaacttttccccccctcttccctagtagaccctaccctcactcctctgactcgcagagccagtcagtcttccttggaatcatcaactggtcccccgtgcattaggtcctag

SEQ ID NO: 268540 - DNA, 4626 bp, Artificial Sequence
  derived and/or modified sequence
atgagcagcgccgtgggcccccggggcccccggccccccaccgtgccaccaccaatgcaagagcttcctgacctgagccacctgacagaagaagaacgaaatattataatggctgttatggaccgccagaaggaggaagaggagaaggaggaggctatgctcaagtgtgtcgtgagggacatggccaaacccgctgcttgtaagaccccgcgcaatgcggagaatcagcctcatcaacccagcccaaggctgcaccagcagttcgaaagctacaaagagcaggtccggaagatcggagaggaggctagaaggtatcaaggcgaacataaagacgacgcccctacgtgtggtatttgtcataagactaagtttgctgacggctgcgggcacttatgctcctactgcagaaccaagttttgtgcgaggtgcggggggcgagtcagcctgcggtccaacaacgaggataagtatgtaatgtgggtctgcaacctgtgtcggaagcaacaggagatcctgacaaagagtggagcctggtttttcggatctggcccccagcaaacatcgcaggatgggacgttatctgatacagccactggagccgggagcgaagtcccaagggaaaaaaaagcccgattgcaagaacgttcccgtagccagacccccctgtctactgcggctgcctcgtcacaggacgccgcccccccatcagcgcctcctgatcgcagcaaaggagccgaaccatcccagcaggcactgggcccagagcagaagcaggcttcctcccgaagtcggtctgagcctcctagagagagaaaaaaaacccctgggctatccgagcagaacggaaaaggcgctctgaagtctgagcgtaagagagtcccaaagacctcagcccagcctgtggagggcgccgttgaagaacgagaaaggaaggaaaggcgcgagagcagaagattggaaaagggccgcagtcaggactatcccgatacacctgagaaacgggacgagggcaaagccgccgatgaggaaaaacagcggaaggaagaggattaccagactagatacagatctgacccaaatctggctaggtaccccgtgaaacccccccccgaagagcagcagatgcgtatgcacgctcgcgtctccagggcccggcatgaaagacggcattccgatgtggctctgccgcgcaccgaggcaggtgcagctcttccagaaggtaaggcaggtaaacgggccccggctgccgcccgagcgtcccctcctgactcacctcgagcatattctgccgagcgcactgccgagacacgggccccaggcgctaaacaactgacgaaccacagcccacctgccccccgccacggcccagttcccgccgaagctcctgagttgaaggcccaagaaccgctcagaaagcagtctcgactggatccgagctctgctgttctgatgcgcaaagctaaacgggaaaaagtggagaccatgctcaggaacgattccctgtcaagcgaccagtctgagagcgtccgcccctctcctccaaagcctcacagaagcaagcgaggtggtaaaaagaggcaaatgagcgtgtccagtagtgaggaggaaggcgtaagcacccccgagtacacaagttgtgaggacgtagaactcgaaagtgagtccgtcagtgaaaagggggacctggattattactggctggaccctgccacctggcattctcgggaaacctctcccatctcgagccaccctgtcacatggcagccaagtaaagagggcgatagactcatcggccgggtgattctgaataagagaactacaatgcccaaggattctggggctctgctcgggcttaaagtcgtcgggggaaagatgaccgatctgggcagactgggggcatttattacaaaagtcaaaaaaggttccctggcagacgtggtggggcacctccgcgcaggcgacgaagtccttgaatggaatggcaaaccactgcccggtgctacaaacgaggaggtatacaatatcatcctggagtcaaaaagcgaacctcaggtggagatcatcgtgagcaggccaattggtgacattccaagaatccctgagagtagccacccacccctggaatccagctccagcagctttgagagtcagaagatggaacgcccatccatctctgtcatctcccccacttctcctggtgccctcaaggacgccccccaggtgctgcccggtcagctgagtgtgaaactgtggtatgacaaagtggggcatcagctaattgtgaacgtccttcaggctaccgacctgccggccagggtagatggacggccaaggaacccatatgttaagatgtattttctgcccgatcgctcggacaaaagcaaaaggcggaccaagaccgtgaagaagattctggaaccaaaatggaaccagacttttgtgtactcacatgtccaccgccgtgatttcagagaacgaatgctggaaataacagtgtgggaccagccacgagtgcaggaagaagaatccgaatttcttggggagatcctcattgaactcgaaaccgccctgctggatgacgagccacattggtataaactccagactcacgacgagagcagtttgccactgccgcagccttcgccgttcatgcctagaagacacatccacggtgagagcagctccaaaaagctgcagcgatcccagaggatctccgattctgacattagcgactatgaagtcgatgacggaatcggagtagtaccacccgttggatacagatctagtgctagagaatcaaagtcgaccactttaacagttcctgagcagcagcggacaactcaccacagatcgcggtctgtttccccacacagaggcaacgatcagggcaaacctcgatctcggctgccaaatgtgcctttacagcgttcgttggacgagatccatcccacaaggcgctcccgctcgccgactcggcatcatgacgcaagcagatcaccagtggaccaccgtactcgcgatgtagatagccagtacctgagcgagcaggattcagaactgctgatgctaccaagagctaaacgggggagaagtgctgaatgtttacatactacccgccacctagttagacactacaagacgctcccaccaaaaatgccattgctgcagtcttcatcacactggaacatttattcagagctgcagcccttcttggatagggctcggtcagcctctaccaattgtctgcgaccagatactagcctgcattctcccgagagggaacgaatgcatagacagcgttcacctacacagagcccccctgctgacacctcatttagcagcaggcggggtaggcaactaccccaggtgcccgtacgatcggggtcgattgaacaggcctctctggttgtggaagaaagaacccggcaaatgaaaatgaaagtccataggttcaaacaaactactgggagcggatccagtcaggagttagaccgcgaacaatacagcaaatataacatacataaagatcagtaccgtagttgtgacaatgttagcgcaaagagctccgattcagacgtgtcagacgtgtctgcgatctcccgcacatctagtgcttcacgactcagctcgaccagcttcatgtctgagcagagcgaacgccccagaggacgtatttcttcctttacccccaagatgcaaggtagaaggatgggcactagcgggcgttcaattatgaaaagtacgtcggtttctggagaaatgtacacactagaacacaatgacgggtcccagagtgacacagcagtcgggacagtaggcgccggtggcaaaaagagacggtcaagtctgtcggcaaaagtggttgctattgtttctaggcgctcccgtagcactagccagctgagccagactgagagcgggcacaagaaactgaaaagtacaattcagaggagcaccgagacaggcatggctgccgagatgaggaagatggtgcgccaaccctcacgagaatccacagatggaagcatcaacagctacagctctgaaggcaacttaatctttccaggcgtgaggctgggagctgactctcaattctctgactttcttgacgggctgggtcccgcccagctggttgggagacagaccctggccacacccgccatgggcgatattcaaatcggtatggaggacaagaaaggacagttggaagtggaagtcattcgtgctcgatccctgacccaaaagcctggtagcaagagcactcccgccccgtacgttaaggtttatctgctggaaaatggggcctgtatcgccaaaaaaaaaacacgcattgctaggaaaacactcgaccccctgtatcagcaatctctggtctttgacgagtcacctcagggaaaagtgctgcaggtgattgtgtggggcgattacggtcggatggatcacaaatgtttcatgggcgtcgcacagattctgttagaggagctggatttgtcatcaatggtgatagggtggtacaaattatttcccccatcatcccttgtcgacccgacactgacccctctgactcgacgggccagccagagctcattagaatcttcaaccggccctccttgcattcggtcgtag

SEQ ID NO: 268541 - DNA, 4446 bp, Artificial Sequence
  derived and/or modified sequence
atgagcagcgccgtgggcccccggggcccccggccccccaccgtgccccctcccatgcaagaactccctgatctgtcgcacttaacagaagaggagagaaacatcattatggcagtcatggaccggcaaaaagaggaagaggagaaggaggaggccatgctaaaatgtgtggtgcgagacatggcaaagcctgctgcttgcaagacgcccagaaatgcagaaaaccagccacaccagccctccccccggctccaccagcagttcgaatcatacaaggaacaagtgaggaaaatcggcgaagaagcaaggcgctaccaaggcgagcacaaagatgatgctcccacatgtggcatttgccacaagaccaaattcgccgatggttgtggacacttatgtagctactgccggacaaaattctgtgcacggtgtggcggcagggtatcactgagatctaataacgagaataagatcgtaatgtgggtttgcaacttatgccggaagcagcaggaaattctgactaagtctggagcctggtttttcggcagcggacctcaacagacatcacaggatggaactctgagcgatactgcaacaggcgctggatcagaggtgcccagggagaaaaaagctaggctccaggaacggagccgttcgcagactcccctgagcaccgctgccgccagctcccaggatgcagcgcccccaagcgctccgcccgatcgatctaagggagccgagcctagccaacaggctcttgggcctgaacagaaacaggcttcatctagaagcaggagcgaaccgcctagagagcgcaaaaaaacacccggcctctccgaacagaatggcaagggagcactcaaaagcgaaaggaaaagggtgcccaagaccagtgcccagccagtcgaaggagccgtcgaagaaagggagaggaaagaacggagggagtctaggaggcttgaaaagggaaggtcccaggactacccggataccccagaaaaacgcgacgagggcaaagcagctgacgaggaaaaacagcgaaaagaggaggactaccagaccagataccggtcagatcccaatctcgcaagatacccagtcaaaccaccccctgaagagcagcaaatgcgcatgcatgctcgagtgtcccgcgctcgccacgagagacggcattcggatgtggccttgccaagaacagaagcaggggccgccctgcctgaaggtaaagctggaaagagagcacctgccgctgctcgtgcatcccctcccgatagccccagggcatattccgctgagagaacagctgagacgcgcgcccccggtgctaaacagcttacgaaccattctcctccagcaccacgacacggtccagtgccagcagaagcacctgaactgaaggcccaggagcctctgcgcaagcaatcgagactcgatccgagcagcgccgtcctgatgcggaaggccaagagggagaaagtcgaaacaatgctgagaaacgacagtctgtcatccgaccagtcagaatctgtccggccctccccaccaaagcctcaccggtctaaaaggggcggaaaaaaaaggcagatgagcgtcagttcatctgaagaggaaggagtgtcgaccccagagtacacatcatgtgaagatgttgagctcgagagtgagtctgtgtcagaaaagggggacctggattactactggttggacccagctacgtggcactctcgcgagacgagcccgatctctagccacccagtgacttggcagccctccaaagagggggatagactaattggaagagtgattctgaataaaaggaccacgatgcccaaggatagcggcgccttgcttggtctcaaggtggtcggggggaagatgactgatctaggtcgcctgggtgcctttataacaaaagtgaagaagggcagcctggccgacgtcgttggacatctacgagcaggggatgaagtgctcgagtggaatgggaaaccactgcccggcgctactaatgaggaggtctataacattatcctagagagtaagtctgagccacaagttgaaattatagtcagccgtccgatcggggacattcctaggatcccagagtcctctcatcctcccttggagagcagtagctcgagttttgaaagtcagaagatggaaagaccatctatctcagtaatttctcccacatctcccggggcactgaaagatgctcctcaggtgttgccgggacagctctcagtcaagctctggtacgataaggtcgggcaccagctcattgtgaatgtcctgcaggcgacagatcttcccgccagagtagatgggaggcctaggaacccttatgtgaagatgtacttccttccagatcggagcgataagagtaagcggcggacaaagaccgttaaaaagatcctggaacctaaatggaatcagacattcgtttactcacacgtgcaccgtcgggattttcgcgagcgtatgcttgaaatcaccgtttgggatcagcctcgcgtgcaggaggaagagtccgagtttttgggggaaatcctgatagaactggaaaccgcactgttagacgatgaaccccactggtacaaattgcagactcacgacgaatcctccttaccactccctcagccgtccccgttcatgccgcgacgtcacatccacggcgagtcgagtagcaaaaaactgcagcggagccagagaatatccgacagcgacatctctgactacgaagtggacgatgggatcggcgtcgtgcctccagtggggtatcgcagctcagcgcgtgaatcaaaaagcactacactcaccgtgccagagcagcagagaactacgcaccaccggtctagatccgtctcccctcacaggggaaacgaccaagggaagccccgctctcgcctgccgaacgttccattgcagcgcagtttagacgaaattcaccccacccgacgtagccgtagccccactaggcaccacgacgcaagccggtcgccagtggatcatcggactagggacgtggacagccagtacctgtccgaacaggatagtgagttacttatgctcccccgagccaaacgcgggcggagtgccgagtgcctgcacacaacaagcgagctgcagccatttcttgatagagctaggagtgcctctacaaattgtcttcggccggacacaagtctgcacagccctgaaagagagcgtatgcatcgccagcgaagcccaacccagtcacctccagccgacacttcgtttagttcaaggcgtggacgtcaacttcctcaagtcccagttcgttccgggagtatagaacaggcctctctggttgttgaggagaggacgcgtcaaatgaagatgaaggttcatcggtttaagcaaactacgggaagcggtagttcccaggagcttgacagggaacagtactcaaaatacaacatacacaaagatcaatacaggtcctgtgacaatgtgtcagcgaaatccagcgacagcgatgtttcagatgtcagtgcgattagcaggaccagttctgccagcaggttgagttccacaagctttatgtcagagcaatccgagcgcccccgggggagaattagcagctttacccccaagatgcagggacgccgtatgggcacgagcggacgcagcataatgaaaagtactagcgtgagtggggagatgtacacattggaacacaatgatggatcccagtcagacacggcagtgggcacagtcggagcgggcggtaaaaagcgaaggagctctctgagtgctaaagtggtggcaatcgtgagccggaggtctcggagtaccagccagctgtcgcagaccgaatctggtcacaaaaagctaaagtccacgattcagaggtctaccgagactggtatggccgctgaaatgaggaaaatggttagacagccttctcgggaaagcaccgatggcagtataaacagctactccagcgaaggcaatcttatcttcccgggggtgcggctcggagcagactcccagttcagcgactttctggacgggttaggacccgcacaactggtcggccggcagacattggcgacgccagcaatggccccgtacgtgaaagtgtatcttctggaaaatggggcttgtatagcaaagaagaagactaggatcgcccgcaaaaccctggatcctctataccagcagagtttggtgttcgacgaaagtcctcagggtaaggtgctgcaggtcatcgtgtggggtgattatggaaggatggatcacaagtgcttcatgggtgtggctcagatcctgctagaggaactagatctttccagtatggttataggatggtacaagctttttcccccatcttccctggtggatcccactcttactcctcttacaagacgcgctagccaaagttcgttggagtcgtctaccggccctccctgcataagatcctag

SEQ ID NO: 268542 - DNA, 4446 bp, Artificial Sequence
  derived and/or modified sequence
atgagcagcgccgtgggcccccggggcccccggccccccaccgtgcctccgcccatgcaggagcttccagatctctctcatctgactgaggaggagcgaaacataattatggcagtgatggatcgccagaaagaggaggaagaaaaagaagaagccatgctaaagtgcgtcgtgagagatatggctaagccagctgcatgtaagactcctcggaacgctgaaaatcaaccccaccagccttctccacgtctccaccaacagtttgaaagctataaagagcaggtgcgcaagattggagaagaagctcgccgctaccagggtgaacacaaggatgacgcgcccacttgtgggatttgtcataaaaccaagttcgcagacggttgcggacatctgtgctcttactgcagaacaaaattttgtgcccgctgtgggggtagggtgagtcttaggagcaataacgaggacaaagtggtgatgtgggtgtgcaatctgtgcaggaagcaacaagaaattctgactaagtcaggagcctggttttttggttcagggcctcagcaaactagtcaagatggaaccctgtcagataccgcgactggggccggatcagaagttccccgggaaaagaaggctaggctgcaggagaggtcacggagtcaaactcctttgtctacagccgctgccagttcgcaggatgctgctcccccctcggcaccccctgataggtctaagggcgccgaacctagtcaacaagctctggggcctgaacagaagcaggcatcatcccggagcagatccgaacctcctcgggagaggaaaaaaacacccgggctgtcagagcaaaacggaaaaggagccctcaagtctgagcgcaaaagagtgcctaagaccagcgcgcaacccgtggagggtgctgtagaggagagggaacgcaaggaaaggagggaaagccgccggctggaaaaggggcgaagtcaagattaccccgatacaccagagaagcgagacgaaggtaaagcagccgatgaagagaagcagagaaaagaggaggactaccaaactcgataccgttcagatcccaatctggcacggtacccggtaaagcccccgcccgaagaacagcaaatgagaatgcacgctcgggtttccagggcccggcacgagcgaagacacagtgacgtggcactgcccaggaccgaggctggggctgccctgccagaaggcaaagccggcaagcgggcacctgccgctgcaagagctagcccccctgatagtccacgggcttatagcgcggagagaacagccgagactagagctcctggggctaagcagctaaccaatcactccccgcccgccccccgacatggtccagtgccagctgaggcaccggaactcaaggctcaggaaccgctgagaaagcagtctcgactcgatccaagctctgcagtgctcatgcggaaagcgaagagagaaaaagtggagactatgctaaggaacgactctctttcttctgaccagagtgagagcgtgagacccagtccccctaagcctcaccggtccaagaggggcggaaagaaaaggcagatgtcagtcagttcctccgaggaggaaggcgtgtctacccctgagtacacgagttgtgaggatgttgagcttgaatccgaaagtgtgtccgagaaaggggacctcgactactattggctggaccccgcaacctggcacagcagggagacgagcccaatttcaagccaccccgttacatggcagcctagtaaagaaggcgaccgccttatcggacgggttattttaaacaagagaaccaccatgccaaaagatagcggagcgctcctggggctcaaggtggtaggcggaaaaatgactgatctgggccgactgggtgcctttatcactaaggttaagaaggggtccctcgctgacgtagtgggccatctgcgtgcgggggatgaggtattagaatggaatgggaagccgctcccaggggctaccaacgaagaggtgtacaacattattctcgagtccaagtcggagcctcaggtggagatcatcgtgtcaaggccaatcggagatattccacgcattccggagtcaagccatcctcctctagagtcctcatcatcaagctttgagagccaaaagatggaacggccaagcattagtgtcataagcccaacaagcccaggtgccctgaaagatgcacctcaggtgttgccgggacagctctcagtaaagctctggtatgataaagtcgggcaccagctaatcgtcaacgtgcttcaggcaacagacctgcccgctcgtgttgacggtcggcctcgcaatccatatgttaagatgtactttctgcccgatagatctgataaaagtaagagacgcaccaagactgtgaagaaaattctcgaacccaaatggaaccagaccttcgtctatagtcacgttcacagaagagattttcgcgaaaggatgttggaaattacagtttgggaccagccacgcgtgcaagaggaggagagcgagttcctgggtgagatcctgatagaactggaaactgctcttctcgacgatgagccgcattggtataagctgcagactcacgacgaaagtagcctgccattaccacagcctagccctttcatgcctcgccggcacatacatggggagagctcctcaaaaaagcttcagcgaagtcagaggatcagcgactctgatatcagcgactacgaagtcgatgacggaatcggtgtggtgccaccagtgggctacagaagctctgcacgggagtccaaatccaccacgttgactgtgcccgagcagcagaggaccacgcatcatagatcccggtctgtgtctcctcatcggggaaatgaccagggtaaacctcgatctagattgcccaatgtccctctccagcgctctctggacgaaattcatcctaccagaagatcccggtccccaactagacatcatgatgcatcccggtcaccggtggatcaccggacacgggacgtggactcacagtacctgagtgagcaggatagcgaattgctcatgttgccgagagcgaagagggggcgctctgccgaatgccttcacacaacaagcgagctccaaccctttctcgacagggctcgctccgccagcactaactgtttacggcctgataccagcttacacagtccagagagagaacgcatgcacagacagcggtctcccactcaaagcccgccggccgatacaagcttctctagtaggcgcggaaggcaattgcctcaggtccccgtgagatccggatcaatagagcaggcctcactggttgtcgaggagcgcaccagacagatgaaaatgaaggttcaccgcttcaagcagacgaccggttctgggtcatcccaagaactggaccgggaacagtattctaagtataatattcacaaagaccagtaccgcagctgtgataacgtatccgcaaagtctagcgatagcgacgtgtcagatgtgagtgctatctcccgaaccagctcagccagcagactctcaagtacctcctttatgtccgaacagagcgagagaccaaggggacggataagctcctttaccccaaagatgcagggcagacgtatgggaacttcgggcagaagtatcatgaaaagcaccagcgtgagcggtgaaatgtacaccctggaacacaatgacggctcacagagcgacacagctgtaggcactgttggagccggtggaaaaaagcggaggagcagcctgagcgccaaagtcgtggctatcgtctcaagacgaagcaggtccactagtcagctgtcccagactgaaagtgggcacaagaaactgaagtccactattcaaaggagcacagagactggtatggctgcagaaatgagaaaaatggtgcgccaaccttctcgagaatctaccgatggcagcatcaattcttatagtagtgagggtaatcttatcttccctggtgtaaggctcggggccgactctcagttctccgacttcttggacggcctggggcctgcccaattggtggggcggcaaactcttgccacacccgctatggccccttacgtcaaggtctacctgctggagaatggggcctgcatagctaagaaaaagactcggatcgcccggaaaacactggatcctctgtaccagcaaagtttggtatttgacgaatcaccacagggcaaagtgctgcaggtgatcgtatggggggattatggccgaatggaccataaatgctttatgggggttgctcagatactcctggaggagctcgacctgtcgtccatggtgatcgggtggtacaaattgtttcctccctcctctttggtggatcctactctgactccgttaaccaggagagcaagtcaaagcagcctggaaagtagtaccggccccccctgtatccgcagctag

SEQ ID NO: 268543 - DNA, 3876 bp, Artificial Sequence
  derived and/or modified sequence
atgagctctgcggtaggtcccaggggaccgcgacccccaactgtgcctccgccaatgcaagagcttccagatttgagtcacctaaccgaggaggagagaaatattattatggcagtgatggacagacagaaagaggaggaagagaaggaggaggctatgctgaaatgtgtcgtgagagacatggccaagcctgctgcatgcaaaacgccacgtaatgcagaaaaccagccccatcagccatctccaaggctgcaccagcagtttgaatcctataaagaacaggtgaggaaaatcggagaggaagccaggcgatatcagggggagcataaagacgatgccccaacttgtggcatctgtcataagacaaagtttgcagatgggtgcggccatctctgctcatactgtcgcacaaagttttgcgcaaggtgcgggggtcgcgtctcactgcgttctaacaatgaggacaagtacgtaatgtgggtctgcaatttatgccggaagcagcaggagattttaacgaaatcaggggcatggttctttggatccggcccacagcaaacctcacaggacgggacactaagcgataccgccacgggggctggatcagaagttccaagagaaaagaaggccaggctacaagagagaagtcggtcccagacccctttgagtactgctgcagcctcttctcaagacgccgctcctccttccgcccctcctgacaggtcaaaaggtgctgagccgagtcagcaggccctgggacctgagcagaagcaagcgtcctcccgctcccggtcagaaccacctcgagaacgcaaaaaaacccctgggctgtccgaacagaacggcaagggggctctgaaaagcgagaggaagcgcgttcctaaaacctccgcgcaaccggtggaaggagccgtggaggaacgcgaacgaaaagagcggcgtgagtcaaggcggctggagaagggacggtcacaggactaccccgatacaccggagaagcgtgacgaaggcaaggccgctgatgaagaaaaacagaggaaagaggaggattatcagactcggtaccgatccgaccctaatctggccagatacccagtgaaacctccccctgaggaacaacagatgcgcatgcacgccagggtctcccgcgctaggcacgagagacggcactccgacgttgcccttccaaggaccgaggctggcgctgccctgcctgagggcaaggcgggtaaaagagcgcctgcggcagcacgcgctagtccgcctgattcccccagagcctattctgcagagaggacagctgagaccagagcacccggtgccaagcagctgaccaaccatagcccccctgccccaaggcatggtccagtcccggctgaagcccctgaacttaaagcgcaggagcccctaagaaagcaatctcgcctggacccgagctcagctgtgttgatgaggaaggctaagagagagaaagtcgagacaatgctccgtaatgacagcctgtcaagcgatcagagcgaaagtgtgcgaccctccccaccaaagccccacaggagtaaacgcggaggcaaaaaaagacaaatgtctgtatcctcttcagaggaggagggcgtgagcactcccgagtacacctcatgtgaggatgtggaactggaatccgagagtgtgtccgagaagggagatctagactactactggctcgatccggcaacttggcacagccgagaaacatcaccaatcagttcgcaccccgtcacttggcaaccatccaaggagggtgaccgcctgattggcagagtcatactcaataagagaacaactatgcccaaagattctggagccctactggggctaaaagttgttggtggcaagatgaccgacctgggaaggttgggcgctttcatcacgaaggtcaaaaaaggaagtctggccgatgttgtgggtcaccttcgtgcgggagatgaagtgctcgagtggaatggtaaacccttacctggcgcaacaaatgaggaagtctacaatataattcttgagtcgaagtctgaacctcaagttgagatcattgtgagtcgtccgatcggggatatcccacgaattcctgaaagctctcatcctcctctcgaatcgagctccagctcttttgagagccagaagatggaacgaccaagcatcagtgtgatttcaccgaccagtcctggcgcactgaaagatgccccacaagttttacctgggcagctgagcgtcaagttatggtatgacaaagtcggccatcaattgattgtaaatgtcctccaggctaccgacctgcctgctcgagtcgacgggcgacctcggaatccctacgtaaagatgtacttcctgcctgaccgctcagacaagtccaaaagacgtacaaagacagtaaaaaagatcttagagccaaagtggaaccagaccttcgtttatagtcatgttcaccgtcgggattttcgagaacgaatgctggagattaccgtgtgggaccagcccagagtacaggaggaagaatcggagttcctaggagaaattcttattgaactcgaaaccgctctccttgacgacgagccgcattggtacaagttgcagactcatgacgagagcagtcttcccttgccacagcccagccctttcatgccgaggcgtcatatccacggcgagagtagctctaagaaactgcagcgctctcagcggatttccgattcagacatatccgattatgaggtggacgatggcatcggcgttgtgccacccggttacagatccagtgctcgagaatctaagtccacgactttgactgtgccagagcagcaaagaaccacacatcacaggtcacggtccgtgtcaccacatcgtggtaacgaccaagggaaacctcgttcgcgattacccaacgttcctcttcagcgctccttggatgagatccaccccaccagaaggtctcgctcccctacaagacaccatgatgccagccggagccctgtggatcataggacacgcgatgtcgattctcagtacctgagtgagcaggacagaatgcatagacagcgctctccaactcagtcaccccctgcagacacatctttctcgtctagacgaggaaggcagttgccgcaggtgcctgtaagatctggctccatagagcaggaaagcggccataaaaagctgaaaagcacaattcagaggtcaactgagacagggatggcagctgagatgcggaagatggtccgccagccctctagggaatcaaccgacggcagtatcaactcctacagctccgagggtaatctgatctttcctggagtgcggctgggcgctgactcacagttctcagatttcttggacggccttgggccagcacagctggtaggcaggcagacactggcaacacctgctatgggcgacattcagatcggcatggaagacaaaaaagggcaactcgaagtggaagtaatccgggcacgctcattgacgcagaaaccaggaagtaaaagcacgccagccccatacgtgaaagtatatttattagagaacggtgcttgtatagccaagaagaagaccagaatcgcgagaaagactctggatccactataccaacagtcgttagtgttcgacgagagtccccaggggaaggtgctccaggtcatcgtgtggggggactacggcaggatggatcataaatgctttatgggcgtcgcccagatcctccttgaggagctggacctcagcagtatggtcatcggctggtataagctttttccacccagttcacttgttgaccccacactcacccctctgaccagaagggcttcccagtcttcgctggaaagtagcaccggcccaccctgtatcagatcttag

SEQ ID NO: 268544 - DNA, 4428 bp, Artificial Sequence
  derived and/or modified sequence
atgtctagcgcagtgggcccacgcggtcctagacccccaacggtgccccctccgatgcaggagctgcctgacctgtcacacctgaccgaggaggaacgcaatattattatggcagtgatggaccgtcagaaagaggaggaggaaaaggaggaagccatgctgaagtgcgtggtgagggacatggccaagcccgctgcttgcaagacacccagaaatgcagagaaccagcctcaccagccatccccacgcctccatcagcagttcgaaagctacaaggagcaggtgagaaagatcggtgaggaggctcggcgttatcagggagaacataaggacgatgcgccaacttgtggcatctgccacaaaacaaagtttgcggacggatgcggccacttatgtagttattgcagaacaaaattttgcgctcggtgtggtggccgagtttctctgcgctcaaacaacgaggacatttgtgtcatgtgggtctgtaatctgtgtagaaagcagcaggagatcctcactaaaagtggtgcttggttcttcggctccgggccacagcagacttcacaagatgggacactctccgacacggcaaccggggctggcagcgaagtccctcgggagaagaaggccagactgcaagagagatccagatcccaaacgcccctatctaccgcagctgcatcttcgcaggatgctgctcctcccagcgctccacctgacaggtccaaaggagccgaaccgagccaacaggctttgggaccagaacagaagcaagcgtcctcgcggtccagatctgaaccaccgagggagcgaaagaaaacccccggactgtccgagcaaaacggcaaaggagccctaaagtctgagcgcaagagggtgccaaagaccagcgctcagcccgtggaaggggctgttgaggagcgcgaacggaaagaacggagagaatctcgaaggctagagaaaggcagaagtcaggactatcccgacactcctgagaagcgcgatgaagggaaagcagctgatgaagaaaagcaacggaaagaagaagattatcagactcggtatcggtcagacccaaatctcgctcggtaccctgtcaagcctcctcctgaggaacagcagatgcgaatgcatgcccgagtgtcaagggctcgtcacgaaaggcgacattcggacgtggctctgccccgtaccgaagcaggagcagctctccctgaagggaaggccggaaagcgtgccccagccgcagccagagcctctccaccagactccccccgtgcctattccgccgagcggacagcggagacaagggcgccaggcgctaagcagctgaccaaccactctcctcctgcacccagacacgggccagtacctgccgaggcgccagagctgaaagcccaggagcctttgcgtaagcaatcccgtctggatccatcttccgctgtcctgatgagaaaagctaaacgtgagaaggttgagaccatgctgagaaacgattccctttccagtgaccaaagtgaatctgtgaggccttcgccgcctaagccccataggagcaagcgcggtggcaagaaacgacaaatgagtgtgagctcatccgaggaggaaggagtaagcacgcctgaatatacaagctgtgaggatgtggagctggagtcggagagtgtaagcgagaagggggacctggactactactggttagacccagcaacttggcactctcgtgaaacgagcccaatcagttctcacccagtgacctggcagccctctaaggaaggggatcgcctcatcggcagagtgattctgaataagagaaccacaatgcccaaagactctggcgctctcctggggctcaaagtggtggggggaaagatgactgacctgggtcggttaggagccttcattacaaaagtcaagaaagggagtctggccgacgtggtggggcacttgcgtgctggtgatgaggtgctggagtggaacggaaaaccattgccgggagcgacgaacgaggaggtctataacatcatactcgagtccaagagcgagccacaggtcgaaatcatagtcagcagacccatcggcgatattcccagaattccagaatcttcccacccacccctggagtcatcgtctagtagttttgaatcccaaaaaatggaaaggcccagcatcagcgtgatctctccaacatcccccggagctctcaaggacgccccacaggtattacccggacagctaagcgtcaagctgtggtatgataaggtcggtcaccagctaatcgtgaatgtgctgcaggccaccgacctgcctgcaagggtagacggacggccacggaacccatatgtgaagatgtactttctgcccgatcgatctgataaaagcaaaagaaggactaagacggtcaaaaaaatactggagcctaagtggaatcagaccttcgtttacagtcacgtgcatcgcagggacttcagggaaagaatgctggaaattacagtctgggaccagccgagggtgcaggaagaggagagtgagttcttaggagagattctcattgaactggagacagccctgttggacgatgaacctcactggtacaagctgcaaactcacgatgagtctagccttcctcttcctcagccctccccctttatgcccagaaggcatatccacggtgagagcagtagcaagaaacttcagcgctcacagcggatttcagattccgatatctctgattacgaagtggacgatggtattggcgtcgttccaccaggatacagatcttccgcacgggagtctaagtctaccactctgaccgtgccggaacagcagagaaccacacaccaccgctcacgctctgtctcaccccaccggggtaatgaccaagggaagcctagaagcagacttcctaatgtgcccttgcaacggtctttggatgagattcatccaactcgaaggtctcgcagtcccacccgccaccatgatgccagtagaagccccgtcgaccataggactcgcgatgtggactcccagtatctcagcgagcaagattctgagcttctgatgttgcctcgggcaaaaagaggcaggtcagcagaatgcctgcataccacccgcatgcataggcagcggagtccgacccaatcaccacccgctgacacgtctttttcttctcgccgtgggagacagctgcctcaggtccccgtcaggtcaggctcaatcgaacaggctagtttagttgtggaagagcggacacgtcagatgaagatgaaagtacaccgtttcaaacagaccacaggttctgggtcgtctcaggagctcgaccgagagcaatatagcaaatacaacatacacaaggatcagtacagatcctgcgataatgttagcgcaaaatcctctgacagtgacgtgagcgacgtgtcagctatctcacggactagctccgcatcacgcctcagttcaacaagcttcatgtcagagcagtccgagagacccaggggcagaataagacggatgggcacgtccgggagatctattatgaaatctacctcagtgtctggcgaaatgtataccctggagcataatgacgggtctcagagtgataccgctgtaggaactgtcggcgctggcggaaaaaagcggagaagttccctgagcgcgaaagtcgtcgccattgtgagccggagatcacggtccactagccaattgagccaaacagagtccggacacaagaagttaaaatccactatccaacgatctaccgagaccggtatggctgcagagatgagaaaaatggtgcggcaaccttcccgcgagagcaccgatgggagcatcaatagctactccagcgagggcaatctcattttccccggtgtaaggttgggggctgactcacagttcagcgacttcctggatgggttgggccctgctcagctggtgggacgccagaccctggcaacaccggcaatgggtgacattcaaatcgggatggaggacaagaaagggcagctggaggtcgaggttattcgagctagaagcctgacccaaaaaccaggtagcaagagtacccccgctccttacgtcaaagtctacctgctggagaatggggcttgtattgcaaaaaaaaaaacccgcattgctcggaagaccctcgaccccctctaccagcagagcctggtgttcgatgagtcaccccaaggaaaggttctacaagtgattgtgtggggagattatggacgcatggatcacaaatgtttcatgggcgttgctcaaatcctgctggaggaacttgatctcagctccatggtaatcggatggtataaattatttccaccgtcctccctcgtggatcccaccctgactccacttacgaggcgcgcatctcaatcctctctagaaagctctacgggtcctccctgcatacgcagctag

SEQ ID NO: 268545 - DNA, 4116 bp, Artificial Sequence
  derived and/or modified sequence
atgtcttccgcagtcggccctcggggaccccgaccccctacggtgccacccccaatgcaggagctgccggacctctcccacttgacggaggaagagcgaaacataatcatggccgtgatggataggcagaaggaagaagaggaaaaggaggaggctatgcttaagtgcgtggttcgagatatggccaaacctgccgcttgcaaaacacctcggaacgcagaaaatcagccacaccagccctcaccccgattgcaccagcaatttgagagctataaggagcaggtccggaagatcggagaggaagcccgacgttatcagggggagcataaggacgacgccccaacctgcggaatctgtcataagaccaagttcgcagacggctgcggacacctctgttcttactgtcggaccaaattctgtgctagatgcggcggacgcgtgtcactcaggtctaataacgaaaataaaattgttatgtgggtgtgtaatctgtgtaggaaacaacaggaaatcctgaccaagtctggcgcatggttctttgggtctggtccccagcagaccagtcaagacggtacactgagtgacaccgcgaccggagcagggagcgaggtgccaagagagaagaaggcacggcttcaagagagatctaggagccagacaccattatctaccgccgcagcttcttcacaggatgccgctcctcccagtgcccctccagacagaagtaaaggtgcagaacctagtcagcaggcactggggccagagcagaagcaagcctcctcacggtcaaggagcgaaccaccacgcgagcgcaagaagaccccaggcttatccgagcagaatggaaaaggagcactaaaaagcgaaagaaagagagtgccaaagacttccgctcagcctgttgagggtgcagtcgaggagagggaacgaaaggagaggcgggagtcaagacgactcgagaagggccgttctcaggactatcccgataccccagagaaaagggacgaaggtaaggcggcagacgaagaaaagcagagaaaagaagaggattatcagacccgttatagatccgaccctaatcttgcccgatatccagtgaagcctcccccagaggaacagcagatgcgcatgcacgccagagtctcacgcgctcggcacgaacgtcgtcactctgatgtcgcactacccagaactgaggcaggagcagcgctgcccgagggcaaagcagggaaacgtgcccctgccgcagctagagcatcacccccagattcaccccgtgcatactctgccgagcggactgccgaaaccagagctccaggcgcaaaacagttgactaatcacagtcctccagcacctcggcatggcccagtcccggcagaagcccctgagcttaaggcacaggagccattgaggaagcagtcccggctcgatccgagctctgcagtgttaatgagaaaggccaaacgggagaaggtagagactatgctccgtaacgacagtttatcctccgaccagtcggagtccgtgcgtccttctccgccaaaaccccaccggagcaaacgcggaggtaaaaaaagacagatgagcgtcagtagcagtgaagaggagggcgtgtccacccccgaatatacctcgtgtgaggatgttgagctcgaatccgaatcagtgtcagagaagggcgacctcgactattattggctggaccccgctacatggcactcccgggaaacatctcctatctcatctcaccccgttacgtggcagccctccaaagagggagacaggttgatagggagggttatattaaataagaggaccacaatgccaaaggattcaggagctctactgggtctaaaagtggtgggtgggaagatgacagacctggggagactgggcgcatttattacaaaagtaaaaaaaggcagcctggcagatgtcgtcggtcacctccgtgccggtgacgaggtactggaatggaacggcaaaccgctgccaggagcaactaatgaagaggtgtataacattatcctcgagagtaagtcagagcctcaggtcgagataattgtgtcgaggcccattggagacattccaagaatccccgagtcctcccacccacccttagagagctcgagttcaagtttcgagtcgcagaagatggaacgcccttccatctccgtgatctcacctacctcccccggagcattaaaggacgccccacaggtgttacctggtcaattgtctgtaaagctttggtacgacaaagtcggccaccagctaattgttaatgttctacaggccacggatctgcccgcaagggtggatgggaggcccaggaacccttacgttaagatgtacttcctgcccgacagatctgacaaatctaagaggagaacaaaaaccgtgaagaaaatactcgagcctaagtggaaccagaccttcgtctattcacacgtccatcgcagggattttcgtgagaggatgctggagatcacggtttgggaccagccacgcgtccaagaagaggagagcgagtttctgggagaaatcctaatcgagcttgaaaccgctctgctggatgatgaaccccattggtataagttgcagactcacgatgagagcagcttgcctttgccccagcccagtccctttatgcccaggagacacatccatggagaaagcagcagtaagaaactacaaagaagccagaggattagcgatagtgatattagtgactatgaagtcgatgatggcataggagtcgtgccgccagtgggttaccgttccagtgcaagagaatcaaaatccactactttaaccgtgcctgagcaacagcgcactacccatcaccgaagtagatctgtgagcccgcatcgtggaaacgaccaaggcaaacctcgctctcggctgcctaacgtgcctttgcagcgttccctcgacgagatccatccaacaaggcggtcccgctccccgacacggcaccacgacgcctctcggagcccggtagatcaccgtactcgtgacgtcgactctcagtatttatccgaacaagactcagaactgctgatgctgcccagagccaagcgtggacgtagtgctgagtgtctccacactacctcagaattgcagccttttcttgatagggcacgcagcgcctctacaaattgtctccggccagacacatctctccatagccccgagcgggagcgcggtcgttggtccccctctctggatagacgaaggcctccctcaccaaggattcagatccaacatgcaagccccgagaatgatagaatgcatagacaacggtcgcccacacagagtcccccagccgacaccagcttctcgtctcgacgcggaaggcagctgccccaggtgccagtgaggtccggttctatcgagcaggaatcaggtcataagaagttgaaaagcactattcaaaggtccaccgaaacggggatggccgctgaaatgcgaaagatggtgagacaacctagccgggaaagcactgacggctccatcaattcgtacagcagcgagggaaacctgatcttcccaggtgttagactgggcgctgatagccagttcagcgatttccttgatggactggggccagctcagcttgttgggcgtcaaactctagccacaccggctatgggagacattcagatcgggatggaggataagaagggacaactagaggttgaagtcatcagggcaagaagtctcacccagaaacccggttccaaatctacccctgccccatacgttaaggtatacctgctggagaatggggcatgcattgccaaaaagaagacccggatcgctcgcaaaaccctggacccactgtaccagcagtcgctcgtgtttgatgagagtcctcaaggaaaagtactccaagtgatcgtgtggggggattacggccgaatggatcacaaatgctttatgggggtagcacagatcttactggaagagctggatctcagcagcatggtcatagggtggtacaaactcttcccaccctcctctctagtggatcccaccctgactcccctgacccggcgagcctctcaatcctcattggaatcatccactggacccccttgtattcgatcctag

SEQ ID NO: 268546 - DNA, 4626 bp, Artificial Sequence
  derived and/or modified sequence
atgagttcagccgtggggcctaggggccctcgtccccctaccgttcctcctcccatgcaagagttacccgacctgagtcacttaactgaagaggagcgaaatataattatggccgtcatggatcggcaaaaggaggaggaggagaaggaggaagcaatgttgaagtgtgtggtgcgagacatggctaagcctgctgcctgcaagactcccagaaacgcggaaaaccagccacaccagcccagccccagattacaccagcaattcgagtcatataaagagcaggttcggaagatcggtgaggaggccagacggtaccagggcgaacacaaggacgacgctcccacctgcggtatttgtcacaaaactaaattcgccgacgggtgcgggcatctgtgcagctactgccgcacaaagttttgcgctagatgcggcggacgcgtgagtcttaggagcaataacgaagacaaatacgtgatgtgggtgtgcaacttgtgcaggaaacaacaggaaatcctcaccaaatctggtgcttggtttttcgggtcagggcctcaacaaacatcccaggacggtactctcagtgacaccgccacaggcgcagggagcgaagtgcccagggagaaaaaagcacgcctccaggagaggagccgttcacagactcctcttagcactgccgctgcatcgtcacaggatgccgcacccccttctgcacctcccgacaggtctaagggcgctgagccctcccagcaagccttgggacccgaacagaaacaggccagttcccgcagccggagtgagcccccaagggaaagaaaaaagactccaggtctgtccgagcagaatggcaagggtgctctaaaaagcgaaaggaagagggtgcccaaaacctctgcacaaccagttgaaggcgctgttgaggaaagagagcgtaaggaacgtcgcgagtctcgcaggcttgagaaaggcaggtcccaggactacccagatactcctgaaaaacgggatgagggtaaggcagcagatgaagagaagcagagaaaggaggaagactaccagacacggtaccgctctgacccaaatctggcccgttatcccgttaaacctccccctgaggagcagcaaatgcggatgcatgcgcgtgttagccgcgctaggcatgaacgtagacacagtgatgttgctcttccccgtacagaagctggcgcagcattaccagagggcaaggcaggtaaaagggcccctgcggctgccagagcgtcccccccagactccccaagagcctactccgcggaacgaacagcggagacgagggcccctggcgctaagcagttgactaatcattcccccccagcgccacgccacggcccagtacccgcagaggccccagagctcaaagcacaggaaccccttaggaaacagtcaagacttgacccatcaagtgccgtacttatgagaaaggccaagagggagaaggtggaaacaatgcttaggaacgactctctaagtagtgaccagtctgaaagcgttcggccaagccccccaaaacctcacagatctaagagggggggaaagaagaggcaaatgtctgtgagcagctcagaagaggaaggagtctccacccctgaatacaccagctgtgaggacgttgagctggagtctgaatctgtgtcagaaaaaggagatttagattactactggttggaccccgcaacctggcactctcgggagacttcgccaatcagctcccatccagtgacttggcaaccaagtaaggagggggataggttaatcggacgcgtcatactaaataaacgtacaacaatgccaaaggactcaggtgctctgttgggcctgaaggtggttggtggaaaaatgaccgaccttggcagactgggagccttcatcacaaaggtaaagaaaggaagtcttgctgacgtggtcggccacctgcgggctggagacgaagtcctggaatggaatggcaagccgctgcctggtgccactaatgaagaagtgtacaacatcatactggagtccaagagtgaacctcaagtggagataatcgtttcgagaccaattggggacatcccgaggatcccagaaagtagtcacccaccactcgagtcaagttctagctctttcgagagccagaaaatggagagaccatcaatttccgtgatctcccctactagccctggtgcacttaaagacgcaccacaagttttgcccggtcagctttccgtgaagctctggtatgacaaggttggtcatcaactgattgtcaatgtgctgcaagctaccgatctgccggctagagtggatggacgtccacgcaacccatacgtcaaaatgtatttcctgccggataggtcagacaagtctaaacggagaaccaaaacagtgaagaagattctggagccgaaatggaatcagacttttgtgtacagccatgtccatcggagagattttcgggaaaggatgttggagattactgtgtgggaccagccacgggttcaggaggaagagtcagagttccttggcgaaattctgattgaactcgaaacggcactgctcgacgatgagccacactggtacaagctacagacacatgatgagtcaagcctgcccttacctcagccctccccgtttatgcccagaaggcatattcacggcgaaagttcatccaaaaagctccaacgctcgcagcgcatttccgattccgatatcagcgattatgaggtggacgatggcatcggcgtggtacccccagtgggttacagaagctccgcgcgagagtcgaagagcactaccctgacggttcccgaacaacagagaaccactcatcatagatctcgcagcgtatctccccaccgcggaaacgatcagggaaaaccacggtcaaggctgcccaatgtccctcttcagcggtcgctcgatgagatacatcccaccaggagatctcggtcccctacccgacaccacgatgcgagcagaagcccggtagaccaccgaacccgagacgttgacagccagtacctgagtgaacaggactcagaactcctgatgctgccgagagcgaagcgaggtaggagtgcagagtgcctacataccactagacacctagtgcggcattacaaaaccctgccgccaaaaatgccacttctgcaaagtagttctcactggaacatttactctgagcttcaaccattcctggatagggcgagatctgcctccacaaactgccttaggcccgacacctccctacatagcccagaacgggaacggatgcatagacagaggagccctacccagtcacccccagccgataccagctttagcagtcggagaggcaggcaactgcctcaagtacccgtaagatctggatcgattgaacaggccagcctggtggtggaggagagaaccaggcagatgaaaatgaaagtccatcgattcaagcagacgactggtagtggcagcagccaggaattagaccgcgaacagtatagcaagtataacattcacaaggaccaatacagaagttgcgacaatgtgtcagccaagagttcagattcagacgtgtccgacgtgtctgctatcagccggaccagttcagcctccagactgtcctcaacaagcttcatgtcagagcagtctgaacgtcctcggggtaggatttcctcttttacacccaagatgcagggacggaggatgggaacctcagggaggtccatcatgaaatctacgtcagtcagcggtgagatgtatacacttgagcataatgacggatcccaaagtgacactgccgtcggcacggttggcgctgggggaaagaaacgccgatccagcctcagcgcaaaggtcgtggctattgtgtcacgccgatcgagaagtacctcgcaacttagtcagactgagtccggccataagaaacttaaatcgacaattcagcgtagtaccgagactgggatggccgcagaaatgcgcaaaatggttaggcagccctcacgagaaagtaccgatggtagcatcaattcctactcatctgagggaaatttgattttcccaggcgtaagactgggtgctgacagccagttttctgacttccttgacgggctgggtcctgcccagcttgtcggacgtcagaccctggccactcccgctatgggggacattcagattggcatggaagataaaaaagggcagctagaggtagaagtaattagggctcgaagcctcacacagaaacctgggtccaagtccactccggcaccttacgtgaaggtatatcttttggagaacggcgcatgcatcgctaagaagaagacacggatcgcgaggaaaaccctggatccactgtaccagcagtccctggtatttgacgagagtcctcaggggaaggtgctgcaagtgattgtgtggggtgattacgggaggatggatcataaatgctttatgggcgtagcccaaatcctgctggaggagcttgacttgtcaagtatggtcatcggttggtataagttgtttccaccatcttcacttgtggatcccacccttacacccctcacacggagggctagtcaaagttcccttgagagttcaacaggcccaccctgtatccggtcctag

SEQ ID NO: 268547 - DNA, 4446 bp, Artificial Sequence
  derived and/or modified sequence
atgtctagcgccgtcggaccacgcggaccccgacctcctaccgttccacccccaatgcaagagctgcctgacctctcccaccttaccgaagaagaacgcaacataataatggctgtgatggatagacagaaagaagaggaggagaaagaggaagccatgttaaagtgcgttgtgagggatatggcaaagcctgccgcttgtaagacacccaggaatgctgaaaatcagccacaccagccttcaccgagactccatcagcagttcgagtcctataaggaacaggtgaggaaaatcggcgaggaggccaggagatatcaaggcgagcataaggatgatgcccctacatgcggcatatgccataagacaaaattcgcggacggctgcggtcatctttgtagttactgtagaactaagttctgcgccaggtgtggcggtagagtgtctttaagaagtaataacgagaataagatcgtcatgtgggtgtgtaacctctgccgaaagcagcaagaaatcctgaccaagtcgggagcttggttttttggcagcggccctcagcagacatcacaggacggcactcttagcgacaccgccacgggtgctggaagcgaggtacccagagagaaaaaggccagactgcaggaaaggtcccgctcccaaacacccctcagcacagccgcagcatccagtcaagacgccgcacctcctagtgctcctccagatagatcgaagggggctgagccctctcaacaggccctaggccctgaacagaaacaagccagctcccgaagcaggagtgagcctcctagagaaaggaagaaaacaccgggtctgagcgaacagaatgggaagggcgcattaaagagtgaaagaaaaagagttccaaagacatcagctcagccagtggaaggggctgtagaggaaagagaacgaaaggagcgaagggaaagccggagattggagaaaggcagatctcaggactatcctgacactccagagaagagggatgaaggaaaggcagcggatgaggaaaagcagagaaaagaggaggactatcagacccgctacagatccgatcccaatctggctcgctatccagtaaagcctccacccgaggagcagcagatgcgtatgcatgccagggtaagccgggcaaggcacgagcggagacactccgatgtcgcactgcccaggaccgaggctggagccgcactgcccgagggcaaagccggaaaacgagcacctgccgctgcacgggctagcccccctgacagtcctcgcgcttactccgcagagagaaccgctgagaccagagcccctggagctaagcagctcactaaccattctcccccagcccctagacacggacctgtgccagcagaggcaccagaactgaaagcccaggagccactgaggaagcagtctaggttggatccctccagtgccgtgcttatgagaaaggccaagcgtgagaaggtcgagacgatgctgagaaacgactctctgtcttcagaccagtctgagtccgttaggccgtcccctcccaagccccatagaagtaaaaggggtggcaaaaagcgccagatgagtgtgtcctcatcggaagaagagggggtatcaacaccggaatataccagctgcgaggacgtggaactcgaaagcgagtctgtgagcgagaagggagatctggactattactggctggatcctgccacctggcactctcgcgagacatctcctatctcctcccatcctgtcacatggcagcctagcaaggagggtgaccggctcataggcagagtgattctgaataagagaaccaccatgccgaaagattcaggcgcattgctgggactcaaagtggtcggcggaaaaatgacagatctaggacgcctcggagcattcattactaaagttaagaaaggctcgttggcggacgtcgtgggacatttgagggccggagacgaggtgctagaatggaacgggaagccactgccaggggctaccaacgaggaggtgtacaacattatcctggaaagtaaaagcgagcctcaggtcgagattattgtgtctaggcccattggggacattccaaggatcccagaatcaagccaccctcccctcgagtcctccagtagcagtttcgagtcacagaaaatggagcggccatccatttcagttatctctcctacctctcctggcgcactgaaagacgcaccccaggtcctcccaggtcaactgtccgtgaaactgtggtatgacaaagtagggcaccagctcatcgtgaacgtgttacaagctaccgatctgccggcacgggtggatggaagacctcgtaacccatatgtgaaaatgtattttctgcccgatagatcagataaaagcaaacgcagaaccaaaactgtgaagaaaattctagaaccaaagtggaaccagacgttcgtgtacagccacgtccatagacgcgacttccgcgaacgcatgctggaaatcacggtatgggaccaacctagggtccaggaggaggaatctgagtttctcggagagatactcatcgagctcgagacggccctgctggatgacgagccacactggtataagcttcagactcatgacgagtccagtctccctttaccccagccctccccatttatgcctcgtcgccatatccatggcgagtcaagctctaagaagttacagcgcagccagagaatctctgatagcgacatatcagactacgaggtagatgacggaataggggtagttcccccagtcggataccggagcagcgcaagggaaagcaagtcaaccaccctgacggttcctgaacagcaacggactacacatcatcgctcccggagcgtgtctccccataggggtaatgatcaagggaagcccaggtcacgtttgcctaacgttccactgcaaaggtccttagatgaaatccatcctaccaggcgttccagatcaccgaccaggcaccacgacgcctctcgctctccagtagatcaccgaacaagggacgtcgactcacaatacttaagcgaacaggactcagaactacttatgctgcctcgtgccaagcgcggtcgctcagcagagtgtctgcacaccacatctgaactgcagcctttcctggaccgtgccaggtctgcctcaacaaactgcctgagaccagatacatctctccacagtcccgaaagagagaggatgcacaggcagcggagccccacccagtctcctccagccgacacttccttctccagcaggagagggcgacagctcccacaggtgccagtgcgcagcggttccattgagcaggcgagtctggtggtcgaagagcgtacacggcagatgaagatgaaagtccaccgatttaaacagacgacaggatccgggtcatcccaggagctggacagagagcagtatagtaagtataatatccacaaggaccagtaccgcagttgcgataacgtgtccgcaaagagcagtgacagcgatgtgagtgatgtctctgcaatctcacgcacctccagtgcctccagactctcatctacctcttttatgagcgagcagtccgagaggcctcgtggcagaatttcttctttcactccgaaaatgcaaggtcggagaatgggaacaagcggcaggagtataatgaaatcaacatcagtgagcggagaaatgtacacacttgaacataacgacggatcccagtccgatacagcggtcgggacagtgggcgcaggtggaaaaaagagaaggtcttcactttcagcaaaggtggtcgctatagtgtcgcggaggagcagatccacgagtcagctgagtcaaacagagagcggacataaaaaactgaagagcaccattcagagaagcacagaaactggtatggccgcagagatgcgtaagatggtgcgccagccctctcgcgagagcacagacgggtccatcaatagttacagttccgaggggaacctaatcttcccaggcgtccggctgggggctgactcacagttttccgatttcctggacggcctgggccctgcacagctcgtgggccgtcagaccctggccactcccgctatggcaccatatgtgaaagtgtatttgctcgagaatggagcttgtattgcaaaaaaaaagactcgcatcgcaagaaagactttggaccctctttatcagcagagcctggtcttcgacgaaagcccacagggcaaggttctccaggtcatagtatggggtgattacgggcgaatggaccacaagtgtttcatgggcgtggcccagattcttctggaggagctcgacctgagttctatggtgatcggctggtacaaacttttccctcctagtagtcttgttgatcccacacttactccactgacaagaagagcttcccagagcagcctggagtcgtcaaccgggcctccttgcataagaagttag

SEQ ID NO: 268548 - DNA, 4446 bp, Artificial Sequence
  derived and/or modified sequence
atgtcaagtgctgtgggtcccagggggccacggccacccactgtcccgcctcctatgcaggagctgccagacctgagtcaccttaccgaggaggagagaaacatcatcatggcagtaatggaccggcagaaagaagaagaggaaaaagaggaagcgatgcttaagtgtgttgtgcgcgatatggctaaaccagctgcatgtaaaacgccgaggaacgccgagaaccaaccccatcagccttcccctcgattgcaccagcagttcgagtcatacaaggagcaggtccgaaagatcggggaggaggcacggaggtatcagggagaacataaggatgatgcacctacctgcggcatttgtcacaagactaaatttgctgatggatgcggccacctatgtagttactgccgcactaagttctgcgctcgttgcggaggccgagttagcctgcggtctaataacgaagataaggtcgttatgtgggtgtgcaatctgtgtcggaagcagcaagaaattctgaccaaatccggcgcttggtttttcggaagtggcccacagcagacctcacaggacggaactcttagcgatacagccacaggagcagggtcagaggtccctagagagaaaaaagcgagactgcaagaacgaagtcggtcccaaactcctctgtctacagcggcagcaagttctcaggacgctgcacctccgtcagcccctccagatagaagtaagggggctgaaccttcacaacaggctcttggacccgagcaaaagcaggcatcttctcgaagcagaagcgaaccccctcgagagagaaaaaagaccccaggattgagtgagcagaacggcaaaggcgcattgaaatctgagcgcaagcgggtacccaagacatccgctcaacctgtggagggcgcagtggaggaacgagagcggaaagaaagaagagagtctcgcaggctggaaaaggggagaagccaggactacccggatacaccagagaaacgcgacgagggaaaggctgccgatgaggaaaagcagagaaaggaagaggactatcagactaggtatcggagcgatccaaatctggctcgctaccccgttaagccccctccagaggagcagcaaatgcgcatgcatgcacgtgtctcgagggccagacacgagcggagacacagcgatgtggccctgcctagaaccgaagccggtgccgctctccccgagggaaaggccggaaagcgagctcctgctgcagctcgggcaagcccaccagattcccctagggcttatagtgctgaacgcactgccgagactcgcgcacccggtgccaaacagctcacaaaccactctcctccagcaccacggcacgggcctgtgccggctgaggctcccgaactaaaagcccaggaaccacttagaaagcagtctcgactggacccctccagcgcggtgctaatgagaaaagcgaaacgtgagaaagtggagaccatgttgaggaatgacagtttgagctccgaccaatccgagtccgtcagacccagccctcctaagcctcacagaagtaagaggggcggaaagaaacggcagatgagcgtctccagctctgaagaagaaggcgtgtctactcccgagtatacatcctgcgaagatgtggagcttgaaagcgaatcagtgtccgagaaaggtgatctggattactactggctcgatcctgccacctggcacagcagggagacttccccaatcagcagccatccggtaacatggcagcctagtaaggagggggaccggcttatcggacgggtgatcctgaacaaacgcaccacaatgccgaaggacagcggcgctctgctggggctcaaggtagtaggaggaaaaatgaccgacttaggaaggctgggcgcattcatcaccaaggtgaagaaggggtctctggccgacgtagttgggcacctgcgagctggtgacgaagtcctggagtggaatggcaaacctttgcccggagcgactaatgaagaggtgtataacattattctcgagagtaagtcagagcctcaagttgagatcatagtgtccaggcccattggggacattcctagaatcccagagagtagccaccctccactagaatcatcatcatcatctttcgagagccagaaaatggagagaccatccatcagcgtaatctctcccactagccccggagccttgaaagatgctcctcaggttctgcccggtcagctgagcgtcaagttgtggtacgataaggtgggccaccagctcatcgtgaatgtgttacaggctacagatttaccagcccgagtggatgggagacccagaaatccttatgtgaaaatgtatttccttcccgataggtctgacaagtctaagagaaggacaaaaaccgtcaaaaagattctggaaccaaaatggaaccagaccttcgtatactcacacgtgcaccgaagggattttagagagagaatgctcgaaattaccgtgtgggatcaacctcgcgtgcaggaagaggagtctgaattcctcggcgagatactgattgaattggaaaccgcccttcttgacgacgagccccactggtacaaacttcaaactcacgatgaatcatcactccctcttccccagccatcaccgtttatgccacgacggcatatacacggtgaaagctcttccaagaaactgcaacgaagccagcgtattagtgatagcgacattagtgattatgaggtagatgacggaatcggagtagtgccacccgtcggctatcgctcaagcgccagagaatctaaatccacaacattaactgtgcctgaacagcagcgaaccactcatcacagaagtaggagcgtgagcccacaccgcggaaatgaccaaggcaagccgaggtcaaggttgccgaacgtgccactacaacgctccctggacgaaatccaccccactaggcgaagcagatcgccaactaggcatcacgacgcctcacgtagtcccgtggaccatcgaactcgagacgtcgattctcagtacctttctgagcaggattccgaattgttgatgctgcctagagctaagcggggtagaagtgcagaatgtcttcacacgacatccgaactgcagccatttttggacagggcaagaagcgctagcaccaattgcctgcgccctgacacctccttgcattcgccagagagggaacggatgcatcgtcaaagaagccccacccagtcgccccctgcagacacgtccttcagctctcgcagaggcaggcagctaccgcaggtacctgtgcggagcggaagcattgaacaggccagtttagtagtggaagagaggaccagacagatgaaaatgaaagtccatcgcttcaaacagaccacgggctctggatctagccaggagctcgatcgagaacaatattcaaagtataacatccataaagatcagtatcgctcctgtgataatgtgtcggctaagtcctctgactctgatgtatccgacgtgagcgccataagtagaacctcctccgcttcccggctttcatcaacttcattcatgtctgaacagtcagaaagaccgagaggcagaatctcttcctttacacctaaaatgcaaggccgacgtatggggaccagcggcagaagcattatgaagtctacttccgtgagtggcgagatgtacaccctggagcacaatgacggttctcaatcagacactgctgtaggaacggtaggtgctggcggaaagaagcgtcgctcctcactgtctgccaaggtagtggcaatcgtcagccggcgatctagatccacaagccagttatcgcagactgagtccggacataagaaactgaaatctacaatccaaagatccactgagacgggcatggccgcagaaatgaggaagatggtgcgccaacccagccgtgagtccacagacggttcgatcaacagttactcttccgaaggcaatcttatttttccaggggtgaggctgggcgctgacagccagttttctgacttccttgacgggctggggcctgcccagctggtcgggagacagaccctggccacccccgcaatggcgccttacgtgaaggtgtatctgttggaaaatggggcttgcattgcaaagaagaagacccggatcgccaggaaaactctcgacccactctaccagcagtctcttgtttttgacgagtctcctcagggcaaggtgctgcaggttatcgtgtggggtgactacggacgaatggaccataaatgttttatgggagtggcccagatattacttgaggagctggatttatcatcaatggttattgggtggtataagcttttccccccttctagcctggtggaccctaccctcactcctctcaccaggcgcgcttctcagagcagtctcgagagttccaccgggccaccctgtatccgctcctag

SEQ ID NO: 268549 - DNA, 6382 bp, Artificial Sequence
  derived and/or modified sequence
caggggcgcagctgctgggcgtgcatccgaaaggtgagagccagagagcgagcagagggggcgggcaggccacgaaaatgtcctcggccgtggggccccgcggtcctcgcccacccacggtgcctccccccatgcaagagctgcccgacctgagccacctgaccgaagaggagaggaacattatcatggcagtgatggaccggcagaaggaagaggaggaaaaagaagaagccatgctcaagtgtgttgtcagggacatggcgaagcctgctgcctgcaaaacaccaagaaatgctgaaaaccagccccaccaaccttcaccgagattgcatcaacagtttgaaagctataaggaacaagtgagaaaaataggggaagaagcgcggcgttaccagggcgagcacaaagacgatgctccgacttgtggaatctgtcataaaacaaagtttgctgatgggtgcggtcatctctgctcctattgtcgcactaagttctgtgcgcgctgcggaggccgcgtgtctctacggtcaaacaacgaagataaatatgttatgtgggtatgcaatttatgtcgaaagcaacaagaaatcttaaccaaatctggggcatggttctttggaagtggccctcagcagacaagtcaggatggaaccctgagtgatacagctacaggtgctggctctgaggtaccaagagaaaagaaagcacgactccaagagcgatcgcggtctcagacacccctaagcacagcagctgcctcctcccaggatgctgctcctcccagcgcaccaccagacaggagcaaaggggctgagccctcgcagcaagccttggggcctgaacagaagcaggcttcatccaggtctagaagtgaacctcctagagagagaaagaagaccccagggctttccgagcagaatggcaaaggagccctgaagagcgagcggaaacgcgtgccaaagacctcagcgcagcccgtggagggggccgtcgaagaacgggagcgcaaagaaaggcgggaaagccgaaggcttgagaaagggcgatcacaggattacccagacacgccggaaaaacgggatgagggcaaagcggcggatgaggaaaagcaaagaaaagaggaggattatcagaccaggtaccgcagcgacccgaacctagctcggtacccggtgaaaccgccgcctgaggagcagcagatgcgcatgcacgcccgggtgtcccgcgccaggcacgagcggcgccacagcgacgtggcgctcccgcgcaccgaggcgggcgcggcgctgccggagggcaaggccggcaaacgcgcgccggcggcagccagggcctcgccgccggactcgccgcgggcttactcggctgagagaactgcggagaccagggcgccgggcgccaagcagctaacgaaccacagcccgccggcgcccagacatgggccggttcccgcagaagccccggagctcaaagcccaggagcccctcaggaagcagagccgcctggaccccagctcggcggtcctcatgcggaaggccaagcgcgagaaggtggagaccatgctgcggaacgactctttgagctcagaccagtccgagtcggtgcggccgtccccgcccaagccgcaccggtccaagagaggcggcaagaagcggcagatgtcggtgagcagctctgaggaggagggcgtgtcgacgcccgagtacaccagctgcgaggacgtggagctggagagcgagagcgtcagcgagaaaggtgatttggattattactggttggatcctgccacgtggcacagccgggagacatcacctattagttcgcatcctgtaacgtggcaaccatctaaagagggggaccgattaattggacgtgttattcttaacaagagaacaaccatgcccaaagactcaggtgcattgctgggtctgaaagttgttggaggaaaaatgactgacttaggacgacttggtgctttcatcaccaaagtaaagaagggtagcctagcagatgtagttggacacctaagagcaggggatgaagttctagaatggaatggtaaacccctgccgggagctacaaatgaagaagtttacaacattattttagaatcaaaatcagaacctcaagttgaaattattgtttcaaggcctattggtgacattccccggattcctgagagctcccaccctccactggagtccagttcaagttcctttgaatctcagaagatggaaaggccttccatttctgttatttctccaacaagtcctggagctctaaaagatgccccacaagtcttaccagggcaactttctgtgaagttgtggtatgataaagtgggacaccagctgattgtaaatgttctgcaagcaacagatctacctgctagagtagatggacgtcctcgaaatccctatgtaaaaatgtattttcttccagatagaagtgataaaagtaaaaggaggaccaaaacagtaaagaaaatactagaaccaaaatggaatcaaacttttgtctattcacatgtacatcgtagagattttagagaacgaatgttagaaataactgtgtgggaccaaccaagagtgcaagaagaagaaagtgaatttcttggagagatcctcatagaattggagacagcgcttttagatgatgaaccgcattggtataaacttcagacacatgatgagtcttcactacctctgcctcagccatcacctttcatgccaaggcgacatattcatggagaaagctctagcaaaaagctacaaagatctcagcgaatcagtgatagtgacatctcagattatgaggttgatgatggtattggcgtagttcctccaggctataggtctagtgctagagaaagtaaatctacaacattaactgtgccagaacagcaaagaacaactcatcaccgctcacgttcagtatctcctcatcgcggcaatgatcagggaaagccgcgttcacgtttaccaaatgtgccattacagaggagtttagatgaaattcatccaacaagaaggtcacgttctccaaccagacaccatgatgcctcccgaagtccagttgatcatagaaccagagatgtggatagtcagtatttatcagaacaagacagaatgcaccgacagagaagtccaacacaatctcctccagcagacacatcgttcagcagtcgcaggggaagacagctcccacaagtgccagtgagaagcggcagtatagaacaagagtcgggccacaaaaagttaaaaagtaccatccagagaagcacagaaacaggcatggcagctgaaatgagaaagatggtaaggcagccgagccgagagtctactgatggcagcatcaacagttacagctctgagggcaatttaatatttcctggagtgcgactgggagctgacagtcaattcagtgattttcttgatggattgggaccagcccagcttgttggccgccaaacccttgccacccctgcaatgggtgatatacaaataggaatggaggacaaaaagggccaattagaagtggaagtcattagagcacgaagcctcacacaaaagcctggttccaaatctacacctgctccatatgtcaaagtatatcttttggaaaatggggcctgtatagccaagaagaagacaagaattgcacgaaaaacccttgatcctttgtatcagcagtctctggtttttgatgaaagtccacagggtaaagttcttcaggtgattgtctggggagactatggcagaatggaccacaaatgctttatgggtgtggctcagatcttgttggaagaactcgacctgtccagcatggtgatcggatggtacaaattgttcccaccgtcctcactggtggatcccacactcactcccctcacccggcgggcttcccagtcatctctggaaagttcaactgggcctccctgtattcgatcatagtgaactcataccagagtcattccaataaaactctacttttcaggataataatctgaaccagatatttcatgatcgaaagcattgttggagacagacaatcaacttgtgttttgcctgtagtagtttttcaataatatgtcccaattgttatttaaaacatggcttcatatgacagaacaaggcaatctatcaaatttacaggaagaatcaacatgctggtgagagtcactgatgcttctaacaaatagaaaaagaggaaactttaaatccacgcatacacgtacacacacacatgcacacacacacacaccaaattgaacaaactggaaactctcactctgtgaaaagttgtattctacacatttctgcacagaccacaagcagtgttatttccctgatgtttgagttgttttgttcttttgtgtgttttgtttatttgtgtgttgtttgttggttttcgtttcttgagtttttgttttgttttcaccacatctgttatttccactagtttttttttggctgtgtcatgacaggcctcatgatgctaacagagattcttcccttcttttttccaaaagcaccaaaaaaaagggctgaagtagtctctgtagcatctccccaaagtgttaaacagctacataaggtgaagccaaggaagggtttcactagctttcattttataattatttaaagtcttatgtgtggatacccaagagacaaaaagttatcttccaaaataaataatcacagaagtacttttttaatgaagagcctatctgtttgcattctagaaaattaatttatggtttccattgttttgcatggaagacttttaaagaagtcaatctgcaactaatgctggggactaaaactaactgcataattgtactttgaaaacactccttgtaatgcctttttcttcctgatattaaaaaaatgctcatgtgtataaaccatactttgacttcccaaaaatggtgactaggaatggatttgagcctaagacactttgagctatgcccaggcttctcagccatacctcagtgtagacacatccatctgccctggaaagagcatggtatgagctgttcaatattccactggaaattccagttgaaatattctgcactaaactattgtttttattgaattttagtttacatttctttgagattgatgcaagcacaaagcttgattttttaatgcaaagtatcttactttttggggggaaaataaacaaaatgaactttcaatttgcattttcatttagtttctcttggccttgaatttcccttgtgacattctgtacatgtgctacaaactgcagtctctgcaggtgcattgatatgttctccctccttttatgagtcactccacttttgtgattacacaaatagagcagcatgacttggaactgttcagagctgcatgcacattttgtaaaaaaaaaaaattttaaaaagaaaagaaacaaaaggttatttaataatgtatgttagttccacataggccagcttgtatgttgcatgtacttgtacagtttgcttgttaattactataccgaaataaccaagaaatctaagccatccacttttgttatagacattttgcaggttttagccagactcagtctctgggtctgtggtgaaatgtctatagatggactttattttttaccctccggaaaacgtgatgtagtacggaccaaattccttctaataaatattttggtgtagattcctactgtggggctgtaacacatgtagacactgtgtacacactaggttttaattcatagacatactgcctgcaccaagtgaattatttattattatttacacatgccagaattatctgcccatcattccacagggcacagattgaccactgctcaccatgctgagtaggaggaactgaagcattggtgcacttctactagattccgttctgtcttagtggccaacaatcaactgattataattgggtagtatctttctattttgaccacttgtcttaacactcccctgtgcttttaaatgaaattccaattcatgtatgtaaacatgtttaataaaatttacttttcatgtcagtcagtagccatatgtgttctatgtcttgccagatttccattgtgggttctatggtgcaaaatgggagccaggccatgggaaggggaggctggggtttgttgtctgctgcgggcatttgacttgacttgtcactgcactatattatgtcttaatcgatggcccaaagggtactttgcatcacatacaagttttcacttcgtcagcctgtctaagtgagcacatgactatacttctgaaaagtggcattattaaaaataataaatctcagtaagaatcaaatggaaggttgttttctgctgctgtttgaatgtgctaataaaagagacaactctattg

SEQ ID NO: 268550 - DNA, 6934 bp, Artificial Sequence
  derived and/or modified sequence
caggggcgcagctgctgggcgtgcatccgaaaggtgagagccagagagcgagcagagggggcgggcaggccacgaaaatgtcctcggccgtggggccccgcggtcctcgcccacccacggtgcctccccccatgcaagagctgcccgacctgagccacctgaccgaagaggagaggaacattatcatggcagtgatggaccggcagaaggaagaggaggaaaaagaagaagccatgctcaagtgtgttgtcagggacatggcgaagcctgctgcctgcaaaacaccaagaaatgctgaaaaccagccccaccaaccttcaccgagattgcatcaacagtttgaaagctataaggaacaagtgagaaaaataggggaagaagcgcggcgttaccagggcgagcacaaagacgatgctccgacttgtggaatctgtcataaaacaaagtttgctgatgggtgcggtcatctctgctcctattgtcgcactaagttctgtgcgcgctgcggaggccgcgtgtctctacggtcaaacaacgaagacatttgtgttatgtgggtatgcaatttatgtcgaaagcaacaagaaatcttaaccaaatctggggcatggttctttggaagtggccctcagcagacaagtcaggatggaaccctgagtgatacagctacaggtgctggctctgaggtaccaagagaaaagaaagcacgactccaagagcgatcgcggtctcagacacccctaagcacagcagctgcctcctcccaggatgctgctcctcccagcgcaccaccagacaggagcaaaggggctgagccctcgcagcaagccttggggcctgaacagaagcaggcttcatccaggtctagaagtgaacctcctagagagagaaagaagaccccagggctttccgagcagaatggcaaaggagccctgaagagcgagcggaaacgcgtgccaaagacctcagcgcagcccgtggagggggccgtcgaagaacgggagcgcaaagaaaggcgggaaagccgaaggcttgagaaagggcgatcacaggattacccagacacgccggaaaaacgggatgagggcaaagcggcggatgaggaaaagcaaagaaaagaggaggattatcagaccaggtaccgcagcgacccgaacctagctcggtacccggtgaaaccgccgcctgaggagcagcagatgcgcatgcacgcccgggtgtcccgcgccaggcacgagcggcgccacagcgacgtggcgctcccgcgcaccgaggcgggcgcggcgctgccggagggcaaggccggcaaacgcgcgccggcggcagccagggcctcgccgccggactcgccgcgggcttactcggctgagagaactgcggagaccagggcgccgggcgccaagcagctaacgaaccacagcccgccggcgcccagacatgggccggttcccgcagaagccccggagctcaaagcccaggagcccctcaggaagcagagccgcctggaccccagctcggcggtcctcatgcggaaggccaagcgcgagaaggtggagaccatgctgcggaacgactctttgagctcagaccagtccgagtcggtgcggccgtccccgcccaagccgcaccggtccaagagaggcggcaagaagcggcagatgtcggtgagcagctctgaggaggagggcgtgtcgacgcccgagtacaccagctgcgaggacgtggagctggagagcgagagcgtcagcgagaaaggtgatttggattattactggttggatcctgccacgtggcacagccgggagacatcacctattagttcgcatcctgtaacgtggcaaccatctaaagagggggaccgattaattggacgtgttattcttaacaagagaacaaccatgcccaaagactcaggtgcattgctgggtctgaaagttgttggaggaaaaatgactgacttaggacgacttggtgctttcatcaccaaagtaaagaagggtagcctagcagatgtagttggacacctaagagcaggggatgaagttctagaatggaatggtaaacccctgccgggagctacaaatgaagaagtttacaacattattttagaatcaaaatcagaacctcaagttgaaattattgtttcaaggcctattggtgacattccccggattcctgagagctcccaccctccactggagtccagttcaagttcctttgaatctcagaagatggaaaggccttccatttctgttatttctccaacaagtcctggagctctaaaagatgccccacaagtcttaccagggcaactttctgtgaagttgtggtatgataaagtgggacaccagctgattgtaaatgttctgcaagcaacagatctacctgctagagtagatggacgtcctcgaaatccctatgtaaaaatgtattttcttccagatagaagtgataaaagtaaaaggaggaccaaaacagtaaagaaaatactagaaccaaaatggaatcaaacttttgtctattcacatgtacatcgtagagattttagagaacgaatgttagaaataactgtgtgggaccaaccaagagtgcaagaagaagaaagtgaatttcttggagagatcctcatagaattggagacagcgcttttagatgatgaaccgcattggtataaacttcagacacatgatgagtcttcactacctctgcctcagccatcacctttcatgccaaggcgacatattcatggagaaagctctagcaaaaagctacaaagatctcagcgaatcagtgatagtgacatctcagattatgaggttgatgatggtattggcgtagttcctccaggctataggtctagtgctagagaaagtaaatctacaacattaactgtgccagaacagcaaagaacaactcatcaccgctcacgttcagtatctcctcatcgcggcaatgatcagggaaagccgcgttcacgtttaccaaatgtgccattacagaggagtttagatgaaattcatccaacaagaaggtcacgttctccaaccagacaccatgatgcctcccgaagtccagttgatcatagaaccagagatgtggatagtcagtatttatcagaacaagacagtgagcttcttatgctgcccagagcaaaacgaggacgaagtgcagaatgcctacatactaccagaatgcaccgacagagaagtccaacacaatctcctccagcagacacatcgttcagcagtcgcaggggaagacagctcccacaagtgccagtgagaagcggcagtatagaacaagcaagcttagtagtggaggagcgaacaagacagatgaaaatgaaagtgcatcgatttaagcagacaacagggtctggttctagtcaagaacttgatcgcgagcaatattccaagtataacatacataaagatcagtacagaagctgtgataacgtctctgccaaatcatcagatagtgatgtcagtgatgtttccgccatttcccgaaccagcagtgcctcacgcctcagcagcacaagctttatgtcagagcaatctgagcgccccaggggtagaatcagacggatggggacttcaggaagatccatcatgaagagcaccagtgtcagtggagagatgtacacactggagcataatgacggcagccagtcagacacagctgtgggtacagttggagcaggtggaaagaaacggagatccagccttagtgccaaagtggttgccatagtgtctcgaaggagtagaagcacatcccagcttagtcaaacagagtcgggccacaaaaagttaaaaagtaccatccagagaagcacagaaacaggcatggcagctgaaatgagaaagatggtaaggcagccgagccgagagtctactgatggcagcatcaacagttacagctctgagggcaatttaatatttcctggagtgcgactgggagctgacagtcaattcagtgattttcttgatggattgggaccagcccagcttgttggccgccaaacccttgccacccctgcaatgggtgatatacaaataggaatggaggacaaaaagggccaattagaagtggaagtcattagagcacgaagcctcacacaaaagcctggttccaaatctacacctgctccatatgtcaaagtatatcttttggaaaatggggcctgtatagccaagaagaagacaagaattgcacgaaaaacccttgatcctttgtatcagcagtctctggtttttgatgaaagtccacagggtaaagttcttcaggtgattgtctggggagactatggcagaatggaccacaaatgctttatgggtgtggctcagatcttgttggaagaactcgacctgtccagcatggtgatcggatggtacaaattgttcccaccgtcctcactggtggatcccacactcactcccctcacccggcgggcttcccagtcatctctggaaagttcaactgggcctccctgtattcgatcatagtgaactcataccagagtcattccaataaaactctacttttcaggataataatctgaaccagatatttcatgatcgaaagcattgttggagacagacaatcaacttgtgttttgcctgtagtagtttttcaataatatgtcccaattgttatttaaaacatggcttcatatgacagaacaaggcaatctatcaaatttacaggaagaatcaacatgctggtgagagtcactgatgcttctaacaaatagaaaaagaggaaactttaaatccacgcatacacgtacacacacacatgcacacacacacacaccaaattgaacaaactggaaactctcactctgtgaaaagttgtattctacacatttctgcacagaccacaagcagtgttatttccctgatgtttgagttgttttgttcttttgtgtgttttgtttatttgtgtgttgtttgttggttttcgtttcttgagtttttgttttgttttcaccacatctgttatttccactagtttttttttggctgtgtcatgacaggcctcatgatgctaacagagattcttcccttcttttttccaaaagcaccaaaaaaaagggctgaagtagtctctgtagcatctccccaaagtgttaaacagctacataaggtgaagccaaggaagggtttcactagctttcattttataattatttaaagtcttatgtgtggatacccaagagacaaaaagttatcttccaaaataaataatcacagaagtacttttttaatgaagagcctatctgtttgcattctagaaaattaatttatggtttccattgttttgcatggaagacttttaaagaagtcaatctgcaactaatgctggggactaaaactaactgcataattgtactttgaaaacactccttgtaatgcctttttcttcctgatattaaaaaaatgctcatgtgtataaaccatactttgacttcccaaaaatggtgactaggaatggatttgagcctaagacactttgagctatgcccaggcttctcagccatacctcagtgtagacacatccatctgccctggaaagagcatggtatgagctgttcaatattccactggaaattccagttgaaatattctgcactaaactattgtttttattgaattttagtttacatttctttgagattgatgcaagcacaaagcttgattttttaatgcaaagtatcttactttttggggggaaaataaacaaaatgaactttcaatttgcattttcatttagtttctcttggccttgaatttcccttgtgacattctgtacatgtgctacaaactgcagtctctgcaggtgcattgatatgttctccctccttttatgagtcactccacttttgtgattacacaaatagagcagcatgacttggaactgttcagagctgcatgcacattttgtaaaaaaaaaaaattttaaaaagaaaagaaacaaaaggttatttaataatgtatgttagttccacataggccagcttgtatgttgcatgtacttgtacagtttgcttgttaattactataccgaaataaccaagaaatctaagccatccacttttgttatagacattttgcaggttttagccagactcagtctctgggtctgtggtgaaatgtctatagatggactttattttttaccctccggaaaacgtgatgtagtacggaccaaattccttctaataaatattttggtgtagattcctactgtggggctgtaacacatgtagacactgtgtacacactaggttttaattcatagacatactgcctgcaccaagtgaattatttattattatttacacatgccagaattatctgcccatcattccacagggcacagattgaccactgctcaccatgctgagtaggaggaactgaagcattggtgcacttctactagattccgttctgtcttagtggccaacaatcaactgattataattgggtagtatctttctattttgaccacttgtcttaacactcccctgtgcttttaaatgaaattccaattcatgtatgtaaacatgtttaataaaatttacttttcatgtcagtcagtagccatatgtgttctatgtcttgccagatttccattgtgggttctatggtgcaaaatgggagccaggccatgggaaggggaggctggggtttgttgtctgctgcgggcatttgacttgacttgtcactgcactatattatgtcttaatcgatggcccaaagggtactttgcatcacatacaagttttcacttcgtcagcctgtctaagtgagcacatgactatacttctgaaaagtggcattattaaaaataataaatctcagtaagaatcaaatggaaggttgttttctgctgctgtttgaatgtgctaataaaagagacaactctattg

SEQ ID NO: 268551 - DNA, 6622 bp, Artificial Sequence
  derived and/or modified sequence
caggggcgcagctgctgggcgtgcatccgaaaggtgagagccagagagcgagcagagggggcgggcaggccacgaaaatgtcctcggccgtggggccccgcggtcctcgcccacccacggtgcctccccccatgcaagagctgcccgacctgagccacctgaccgaagaggagaggaacattatcatggcagtgatggaccggcagaaggaagaggaggaaaaagaagaagccatgctcaagtgtgttgtcagggacatggcgaagcctgctgcctgcaaaacaccaagaaatgctgaaaaccagccccaccaaccttcaccgagattgcatcaacagtttgaaagctataaggaacaagtgagaaaaataggggaagaagcgcggcgttaccagggcgagcacaaagacgatgctccgacttgtggaatctgtcataaaacaaagtttgctgatgggtgcggtcatctctgctcctattgtcgcactaagttctgtgcgcgctgcggaggccgcgtgtctctacggtcaaacaacgaaaataaaattgttatgtgggtatgcaatttatgtcgaaagcaacaagaaatcttaaccaaatctggggcatggttctttggaagtggccctcagcagacaagtcaggatggaaccctgagtgatacagctacaggtgctggctctgaggtaccaagagaaaagaaagcacgactccaagagcgatcgcggtctcagacacccctaagcacagcagctgcctcctcccaggatgctgctcctcccagcgcaccaccagacaggagcaaaggggctgagccctcgcagcaagccttggggcctgaacagaagcaggcttcatccaggtctagaagtgaacctcctagagagagaaagaagaccccagggctttccgagcagaatggcaaaggagccctgaagagcgagcggaaacgcgtgccaaagacctcagcgcagcccgtggagggggccgtcgaagaacgggagcgcaaagaaaggcgggaaagccgaaggcttgagaaagggcgatcacaggattacccagacacgccggaaaaacgggatgagggcaaagcggcggatgaggaaaagcaaagaaaagaggaggattatcagaccaggtaccgcagcgacccgaacctagctcggtacccggtgaaaccgccgcctgaggagcagcagatgcgcatgcacgcccgggtgtcccgcgccaggcacgagcggcgccacagcgacgtggcgctcccgcgcaccgaggcgggcgcggcgctgccggagggcaaggccggcaaacgcgcgccggcggcagccagggcctcgccgccggactcgccgcgggcttactcggctgagagaactgcggagaccagggcgccgggcgccaagcagctaacgaaccacagcccgccggcgcccagacatgggccggttcccgcagaagccccggagctcaaagcccaggagcccctcaggaagcagagccgcctggaccccagctcggcggtcctcatgcggaaggccaagcgcgagaaggtggagaccatgctgcggaacgactctttgagctcagaccagtccgagtcggtgcggccgtccccgcccaagccgcaccggtccaagagaggcggcaagaagcggcagatgtcggtgagcagctctgaggaggagggcgtgtcgacgcccgagtacaccagctgcgaggacgtggagctggagagcgagagcgtcagcgagaaaggtgatttggattattactggttggatcctgccacgtggcacagccgggagacatcacctattagttcgcatcctgtaacgtggcaaccatctaaagagggggaccgattaattggacgtgttattcttaacaagagaacaaccatgcccaaagactcaggtgcattgctgggtctgaaagttgttggaggaaaaatgactgacttaggacgacttggtgctttcatcaccaaagtaaagaagggtagcctagcagatgtagttggacacctaagagcaggggatgaagttctagaatggaatggtaaacccctgccgggagctacaaatgaagaagtttacaacattattttagaatcaaaatcagaacctcaagttgaaattattgtttcaaggcctattggtgacattccccggattcctgagagctcccaccctccactggagtccagttcaagttcctttgaatctcagaagatggaaaggccttccatttctgttatttctccaacaagtcctggagctctaaaagatgccccacaagtcttaccagggcaactttctgtgaagttgtggtatgataaagtgggacaccagctgattgtaaatgttctgcaagcaacagatctacctgctagagtagatggacgtcctcgaaatccctatgtaaaaatgtattttcttccagatagaagtgataaaagtaaaaggaggaccaaaacagtaaagaaaatactagaaccaaaatggaatcaaacttttgtctattcacatgtacatcgtagagattttagagaacgaatgttagaaataactgtgtgggaccaaccaagagtgcaagaagaagaaagtgaatttcttggagagatcctcatagaattggagacagcgcttttagatgatgaaccgcattggtataaacttcagacacatgatgagtcttcactacctctgcctcagccatcacctttcatgccaaggcgacatattcatggagaaagctctagcaaaaagctacaaagatctcagcgaatcagtgatagtgacatctcagattatgaggttgatgatggtattggcgtagttcctccagtaggctataggtctagtgctagagaaagtaaatctacaacattaactgtgccagaacagcaaagaacaactcatcaccgctcacgttcagtatctcctcatcgcggcaatgatcagggaaagccgcgttcacgtttaccaaatgtgccattacagaggagtttagatgaaattcatccaacaagaaggtcacgttctccaaccagacaccatgatgcctcccgaagtccagttgatcatagaaccagagatgtggatagtcagtatttatcagaacaagacagtgagcttcttatgctgcccagagcaaaacgaggacgaagtgcagaatgcctacatactaccagtgaactgcagccctttcttgacagggctaggagtgctagtaccaactgcttgagaccagatactagtttgcattcaccagaacgagaaaggggtagatggtccccctccctagataggagacgacctcctagtcccaggattcaaatccagcatgcgtctccggagaatgacagaatgcaccgacagagaagtccaacacaatctcctccagcagacacatcgttcagcagtcgcaggggaagacagctcccacaagtgccagtgagaagcggcagtatagaacaagagtcgggccacaaaaagttaaaaagtaccatccagagaagcacagaaacaggcatggcagctgaaatgagaaagatggtaaggcagccgagccgagagtctactgatggcagcatcaacagttacagctctgagggcaatttaatatttcctggagtgcgactgggagctgacagtcaattcagtgattttcttgatggattgggaccagcccagcttgttggccgccaaacccttgccacccctgcaatgggtgatatacaaataggaatggaggacaaaaagggccaattagaagtggaagtcattagagcacgaagcctcacacaaaagcctggttccaaatctacacctgctccatatgtcaaagtatatcttttggaaaatggggcctgtatagccaagaagaagacaagaattgcacgaaaaacccttgatcctttgtatcagcagtctctggtttttgatgaaagtccacagggtaaagttcttcaggtgattgtctggggagactatggcagaatggaccacaaatgctttatgggtgtggctcagatcttgttggaagaactcgacctgtccagcatggtgatcggatggtacaaattgttcccaccgtcctcactggtggatcccacactcactcccctcacccggcgggcttcccagtcatctctggaaagttcaactgggcctccctgtattcgatcatagtgaactcataccagagtcattccaataaaactctacttttcaggataataatctgaaccagatatttcatgatcgaaagcattgttggagacagacaatcaacttgtgttttgcctgtagtagtttttcaataatatgtcccaattgttatttaaaacatggcttcatatgacagaacaaggcaatctatcaaatttacaggaagaatcaacatgctggtgagagtcactgatgcttctaacaaatagaaaaagaggaaactttaaatccacgcatacacgtacacacacacatgcacacacacacacaccaaattgaacaaactggaaactctcactctgtgaaaagttgtattctacacatttctgcacagaccacaagcagtgttatttccctgatgtttgagttgttttgttcttttgtgtgttttgtttatttgtgtgttgtttgttggttttcgtttcttgagtttttgttttgttttcaccacatctgttatttccactagtttttttttggctgtgtcatgacaggcctcatgatgctaacagagattcttcccttcttttttccaaaagcaccaaaaaaaagggctgaagtagtctctgtagcatctccccaaagtgttaaacagctacataaggtgaagccaaggaagggtttcactagctttcattttataattatttaaagtcttatgtgtggatacccaagagacaaaaagttatcttccaaaataaataatcacagaagtacttttttaatgaagagcctatctgtttgcattctagaaaattaatttatggtttccattgttttgcatggaagacttttaaagaagtcaatctgcaactaatgctggggactaaaactaactgcataattgtactttgaaaacactccttgtaatgcctttttcttcctgatattaaaaaaatgctcatgtgtataaaccatactttgacttcccaaaaatggtgactaggaatggatttgagcctaagacactttgagctatgcccaggcttctcagccatacctcagtgtagacacatccatctgccctggaaagagcatggtatgagctgttcaatattccactggaaattccagttgaaatattctgcactaaactattgtttttattgaattttagtttacatttctttgagattgatgcaagcacaaagcttgattttttaatgcaaagtatcttactttttggggggaaaataaacaaaatgaactttcaatttgcattttcatttagtttctcttggccttgaatttcccttgtgacattctgtacatgtgctacaaactgcagtctctgcaggtgcattgatatgttctccctccttttatgagtcactccacttttgtgattacacaaatagagcagcatgacttggaactgttcagagctgcatgcacattttgtaaaaaaaaaaaattttaaaaagaaaagaaacaaaaggttatttaataatgtatgttagttccacataggccagcttgtatgttgcatgtacttgtacagtttgcttgttaattactataccgaaataaccaagaaatctaagccatccacttttgttatagacattttgcaggttttagccagactcagtctctgggtctgtggtgaaatgtctatagatggactttattttttaccctccggaaaacgtgatgtagtacggaccaaattccttctaataaatattttggtgtagattcctactgtggggctgtaacacatgtagacactgtgtacacactaggttttaattcatagacatactgcctgcaccaagtgaattatttattattatttacacatgccagaattatctgcccatcattccacagggcacagattgaccactgctcaccatgctgagtaggaggaactgaagcattggtgcacttctactagattccgttctgtcttagtggccaacaatcaactgattataattgggtagtatctttctattttgaccacttgtcttaacactcccctgtgcttttaaatgaaattccaattcatgtatgtaaacatgtttaataaaatttacttttcatgtcagtcagtagccatatgtgttctatgtcttgccagatttccattgtgggttctatggtgcaaaatgggagccaggccatgggaaggggaggctggggtttgttgtctgctgcgggcatttgacttgacttgtcactgcactatattatgtcttaatcgatggcccaaagggtactttgcatcacatacaagttttcacttcgtcagcctgtctaagtgagcacatgactatacttctgaaaagtggcattattaaaaataataaatctcagtaagaatcaaatggaaggttgttttctgctgctgtttgaatgtgctaataaaagagacaactctattg

SEQ ID NO: 268552 - DNA, 7132 bp, Artificial Sequence
  derived and/or modified sequence
caggggcgcagctgctgggcgtgcatccgaaaggtgagagccagagagcgagcagagggggcgggcaggccacgaaaatgtcctcggccgtggggccccgcggtcctcgcccacccacggtgcctccccccatgcaagagctgcccgacctgagccacctgaccgaagaggagaggaacattatcatggcagtgatggaccggcagaaggaagaggaggaaaaagaagaagccatgctcaagtgtgttgtcagggacatggcgaagcctgctgcctgcaaaacaccaagaaatgctgaaaaccagccccaccaaccttcaccgagattgcatcaacagtttgaaagctataaggaacaagtgagaaaaataggggaagaagcgcggcgttaccagggcgagcacaaagacgatgctccgacttgtggaatctgtcataaaacaaagtttgctgatgggtgcggtcatctctgctcctattgtcgcactaagttctgtgcgcgctgcggaggccgcgtgtctctacggtcaaacaacgaagataaatatgttatgtgggtatgcaatttatgtcgaaagcaacaagaaatcttaaccaaatctggggcatggttctttggaagtggccctcagcagacaagtcaggatggaaccctgagtgatacagctacaggtgctggctctgaggtaccaagagaaaagaaagcacgactccaagagcgatcgcggtctcagacacccctaagcacagcagctgcctcctcccaggatgctgctcctcccagcgcaccaccagacaggagcaaaggggctgagccctcgcagcaagccttggggcctgaacagaagcaggcttcatccaggtctagaagtgaacctcctagagagagaaagaagaccccagggctttccgagcagaatggcaaaggagccctgaagagcgagcggaaacgcgtgccaaagacctcagcgcagcccgtggagggggccgtcgaagaacgggagcgcaaagaaaggcgggaaagccgaaggcttgagaaagggcgatcacaggattacccagacacgccggaaaaacgggatgagggcaaagcggcggatgaggaaaagcaaagaaaagaggaggattatcagaccaggtaccgcagcgacccgaacctagctcggtacccggtgaaaccgccgcctgaggagcagcagatgcgcatgcacgcccgggtgtcccgcgccaggcacgagcggcgccacagcgacgtggcgctcccgcgcaccgaggcgggcgcggcgctgccggagggcaaggccggcaaacgcgcgccggcggcagccagggcctcgccgccggactcgccgcgggcttactcggctgagagaactgcggagaccagggcgccgggcgccaagcagctaacgaaccacagcccgccggcgcccagacatgggccggttcccgcagaagccccggagctcaaagcccaggagcccctcaggaagcagagccgcctggaccccagctcggcggtcctcatgcggaaggccaagcgcgagaaggtggagaccatgctgcggaacgactctttgagctcagaccagtccgagtcggtgcggccgtccccgcccaagccgcaccggtccaagagaggcggcaagaagcggcagatgtcggtgagcagctctgaggaggagggcgtgtcgacgcccgagtacaccagctgcgaggacgtggagctggagagcgagagcgtcagcgagaaaggtgatttggattattactggttggatcctgccacgtggcacagccgggagacatcacctattagttcgcatcctgtaacgtggcaaccatctaaagagggggaccgattaattggacgtgttattcttaacaagagaacaaccatgcccaaagactcaggtgcattgctgggtctgaaagttgttggaggaaaaatgactgacttaggacgacttggtgctttcatcaccaaagtaaagaagggtagcctagcagatgtagttggacacctaagagcaggggatgaagttctagaatggaatggtaaacccctgccgggagctacaaatgaagaagtttacaacattattttagaatcaaaatcagaacctcaagttgaaattattgtttcaaggcctattggtgacattccccggattcctgagagctcccaccctccactggagtccagttcaagttcctttgaatctcagaagatggaaaggccttccatttctgttatttctccaacaagtcctggagctctaaaagatgccccacaagtcttaccagggcaactttctgtgaagttgtggtatgataaagtgggacaccagctgattgtaaatgttctgcaagcaacagatctacctgctagagtagatggacgtcctcgaaatccctatgtaaaaatgtattttcttccagatagaagtgataaaagtaaaaggaggaccaaaacagtaaagaaaatactagaaccaaaatggaatcaaacttttgtctattcacatgtacatcgtagagattttagagaacgaatgttagaaataactgtgtgggaccaaccaagagtgcaagaagaagaaagtgaatttcttggagagatcctcatagaattggagacagcgcttttagatgatgaaccgcattggtataaacttcagacacatgatgagtcttcactacctctgcctcagccatcacctttcatgccaaggcgacatattcatggagaaagctctagcaaaaagctacaaagatctcagcgaatcagtgatagtgacatctcagattatgaggttgatgatggtattggcgtagttcctccagtaggctataggtctagtgctagagaaagtaaatctacaacattaactgtgccagaacagcaaagaacaactcatcaccgctcacgttcagtatctcctcatcgcggcaatgatcagggaaagccgcgttcacgtttaccaaatgtgccattacagaggagtttagatgaaattcatccaacaagaaggtcacgttctccaaccagacaccatgatgcctcccgaagtccagttgatcatagaaccagagatgtggatagtcagtatttatcagaacaagacagtgagcttcttatgctgcccagagcaaaacgaggacgaagtgcagaatgcctacatactaccagacatcttgttaggcactataaaacattacctcccaagatgcctttattacagagcagttctcactggaatatttacagtgaactgcagccctttcttgacagggctaggagtgctagtaccaactgcttgagaccagatactagtttgcattcaccagaacgagaaagaatgcaccgacagagaagtccaacacaatctcctccagcagacacatcgttcagcagtcgcaggggaagacagctcccacaagtgccagtgagaagcggcagtatagaacaagcaagcttagtagtggaggagcgaacaagacagatgaaaatgaaagtgcatcgatttaagcagacaacagggtctggttctagtcaagaacttgatcgcgagcaatattccaagtataacatacataaagatcagtacagaagctgtgataacgtctctgccaaatcatcagatagtgatgtcagtgatgtttccgccatttcccgaaccagcagtgcctcacgcctcagcagcacaagctttatgtcagagcaatctgagcgccccaggggtagaatcagttcatttacccccaaaatgcaaggcagacggatggggacttcaggaagatccatcatgaagagcaccagtgtcagtggagagatgtacacactggagcataatgacggcagccagtcagacacagctgtgggtacagttggagcaggtggaaagaaacggagatccagccttagtgccaaagtggttgccatagtgtctcgaaggagtagaagcacatcccagcttagtcaaacagagtcgggccacaaaaagttaaaaagtaccatccagagaagcacagaaacaggcatggcagctgaaatgagaaagatggtaaggcagccgagccgagagtctactgatggcagcatcaacagttacagctctgagggcaatttaatatttcctggagtgcgactgggagctgacagtcaattcagtgattttcttgatggattgggaccagcccagcttgttggccgccaaacccttgccacccctgcaatgggtgatatacaaataggaatggaggacaaaaagggccaattagaagtggaagtcattagagcacgaagcctcacacaaaagcctggttccaaatctacacctgctccatatgtcaaagtatatcttttggaaaatggggcctgtatagccaagaagaagacaagaattgcacgaaaaacccttgatcctttgtatcagcagtctctggtttttgatgaaagtccacagggtaaagttcttcaggtgattgtctggggagactatggcagaatggaccacaaatgctttatgggtgtggctcagatcttgttggaagaactcgacctgtccagcatggtgatcggatggtacaaattgttcccaccgtcctcactggtggatcccacactcactcccctcacccggcgggcttcccagtcatctctggaaagttcaactgggcctccctgtattcgatcatagtgaactcataccagagtcattccaataaaactctacttttcaggataataatctgaaccagatatttcatgatcgaaagcattgttggagacagacaatcaacttgtgttttgcctgtagtagtttttcaataatatgtcccaattgttatttaaaacatggcttcatatgacagaacaaggcaatctatcaaatttacaggaagaatcaacatgctggtgagagtcactgatgcttctaacaaatagaaaaagaggaaactttaaatccacgcatacacgtacacacacacatgcacacacacacacaccaaattgaacaaactggaaactctcactctgtgaaaagttgtattctacacatttctgcacagaccacaagcagtgttatttccctgatgtttgagttgttttgttcttttgtgtgttttgtttatttgtgtgttgtttgttggttttcgtttcttgagtttttgttttgttttcaccacatctgttatttccactagtttttttttggctgtgtcatgacaggcctcatgatgctaacagagattcttcccttcttttttccaaaagcaccaaaaaaaagggctgaagtagtctctgtagcatctccccaaagtgttaaacagctacataaggtgaagccaaggaagggtttcactagctttcattttataattatttaaagtcttatgtgtggatacccaagagacaaaaagttatcttccaaaataaataatcacagaagtacttttttaatgaagagcctatctgtttgcattctagaaaattaatttatggtttccattgttttgcatggaagacttttaaagaagtcaatctgcaactaatgctggggactaaaactaactgcataattgtactttgaaaacactccttgtaatgcctttttcttcctgatattaaaaaaatgctcatgtgtataaaccatactttgacttcccaaaaatggtgactaggaatggatttgagcctaagacactttgagctatgcccaggcttctcagccatacctcagtgtagacacatccatctgccctggaaagagcatggtatgagctgttcaatattccactggaaattccagttgaaatattctgcactaaactattgtttttattgaattttagtttacatttctttgagattgatgcaagcacaaagcttgattttttaatgcaaagtatcttactttttggggggaaaataaacaaaatgaactttcaatttgcattttcatttagtttctcttggccttgaatttcccttgtgacattctgtacatgtgctacaaactgcagtctctgcaggtgcattgatatgttctccctccttttatgagtcactccacttttgtgattacacaaatagagcagcatgacttggaactgttcagagctgcatgcacattttgtaaaaaaaaaaaattttaaaaagaaaagaaacaaaaggttatttaataatgtatgttagttccacataggccagcttgtatgttgcatgtacttgtacagtttgcttgttaattactataccgaaataaccaagaaatctaagccatccacttttgttatagacattttgcaggttttagccagactcagtctctgggtctgtggtgaaatgtctatagatggactttattttttaccctccggaaaacgtgatgtagtacggaccaaattccttctaataaatattttggtgtagattcctactgtggggctgtaacacatgtagacactgtgtacacactaggttttaattcatagacatactgcctgcaccaagtgaattatttattattatttacacatgccagaattatctgcccatcattccacagggcacagattgaccactgctcaccatgctgagtaggaggaactgaagcattggtgcacttctactagattccgttctgtcttagtggccaacaatcaactgattataattgggtagtatctttctattttgaccacttgtcttaacactcccctgtgcttttaaatgaaattccaattcatgtatgtaaacatgtttaataaaatttacttttcatgtcagtcagtagccatatgtgttctatgtcttgccagatttccattgtgggttctatggtgcaaaatgggagccaggccatgggaaggggaggctggggtttgttgtctgctgcgggcatttgacttgacttgtcactgcactatattatgtcttaatcgatggcccaaagggtactttgcatcacatacaagttttcacttcgtcagcctgtctaagtgagcacatgactatacttctgaaaagtggcattattaaaaataataaatctcagtaagaatcaaatggaaggttgttttctgctgctgtttgaatgtgctaataaaagagacaactctattg

SEQ ID NO: 268553 - DNA, 6952 bp, Artificial Sequence
  derived and/or modified sequence
caggggcgcagctgctgggcgtgcatccgaaaggtgagagccagagagcgagcagagggggcgggcaggccacgaaaatgtcctcggccgtggggccccgcggtcctcgcccacccacggtgcctccccccatgcaagagctgcccgacctgagccacctgaccgaagaggagaggaacattatcatggcagtgatggaccggcagaaggaagaggaggaaaaagaagaagccatgctcaagtgtgttgtcagggacatggcgaagcctgctgcctgcaaaacaccaagaaatgctgaaaaccagccccaccaaccttcaccgagattgcatcaacagtttgaaagctataaggaacaagtgagaaaaataggggaagaagcgcggcgttaccagggcgagcacaaagacgatgctccgacttgtggaatctgtcataaaacaaagtttgctgatgggtgcggtcatctctgctcctattgtcgcactaagttctgtgcgcgctgcggaggccgcgtgtctctacggtcaaacaacgaaaataaaattgttatgtgggtatgcaatttatgtcgaaagcaacaagaaatcttaaccaaatctggggcatggttctttggaagtggccctcagcagacaagtcaggatggaaccctgagtgatacagctacaggtgctggctctgaggtaccaagagaaaagaaagcacgactccaagagcgatcgcggtctcagacacccctaagcacagcagctgcctcctcccaggatgctgctcctcccagcgcaccaccagacaggagcaaaggggctgagccctcgcagcaagccttggggcctgaacagaagcaggcttcatccaggtctagaagtgaacctcctagagagagaaagaagaccccagggctttccgagcagaatggcaaaggagccctgaagagcgagcggaaacgcgtgccaaagacctcagcgcagcccgtggagggggccgtcgaagaacgggagcgcaaagaaaggcgggaaagccgaaggcttgagaaagggcgatcacaggattacccagacacgccggaaaaacgggatgagggcaaagcggcggatgaggaaaagcaaagaaaagaggaggattatcagaccaggtaccgcagcgacccgaacctagctcggtacccggtgaaaccgccgcctgaggagcagcagatgcgcatgcacgcccgggtgtcccgcgccaggcacgagcggcgccacagcgacgtggcgctcccgcgcaccgaggcgggcgcggcgctgccggagggcaaggccggcaaacgcgcgccggcggcagccagggcctcgccgccggactcgccgcgggcttactcggctgagagaactgcggagaccagggcgccgggcgccaagcagctaacgaaccacagcccgccggcgcccagacatgggccggttcccgcagaagccccggagctcaaagcccaggagcccctcaggaagcagagccgcctggaccccagctcggcggtcctcatgcggaaggccaagcgcgagaaggtggagaccatgctgcggaacgactctttgagctcagaccagtccgagtcggtgcggccgtccccgcccaagccgcaccggtccaagagaggcggcaagaagcggcagatgtcggtgagcagctctgaggaggagggcgtgtcgacgcccgagtacaccagctgcgaggacgtggagctggagagcgagagcgtcagcgagaaaggtgatttggattattactggttggatcctgccacgtggcacagccgggagacatcacctattagttcgcatcctgtaacgtggcaaccatctaaagagggggaccgattaattggacgtgttattcttaacaagagaacaaccatgcccaaagactcaggtgcattgctgggtctgaaagttgttggaggaaaaatgactgacttaggacgacttggtgctttcatcaccaaagtaaagaagggtagcctagcagatgtagttggacacctaagagcaggggatgaagttctagaatggaatggtaaacccctgccgggagctacaaatgaagaagtttacaacattattttagaatcaaaatcagaacctcaagttgaaattattgtttcaaggcctattggtgacattccccggattcctgagagctcccaccctccactggagtccagttcaagttcctttgaatctcagaagatggaaaggccttccatttctgttatttctccaacaagtcctggagctctaaaagatgccccacaagtcttaccagggcaactttctgtgaagttgtggtatgataaagtgggacaccagctgattgtaaatgttctgcaagcaacagatctacctgctagagtagatggacgtcctcgaaatccctatgtaaaaatgtattttcttccagatagaagtgataaaagtaaaaggaggaccaaaacagtaaagaaaatactagaaccaaaatggaatcaaacttttgtctattcacatgtacatcgtagagattttagagaacgaatgttagaaataactgtgtgggaccaaccaagagtgcaagaagaagaaagtgaatttcttggagagatcctcatagaattggagacagcgcttttagatgatgaaccgcattggtataaacttcagacacatgatgagtcttcactacctctgcctcagccatcacctttcatgccaaggcgacatattcatggagaaagctctagcaaaaagctacaaagatctcagcgaatcagtgatagtgacatctcagattatgaggttgatgatggtattggcgtagttcctccagtaggctataggtctagtgctagagaaagtaaatctacaacattaactgtgccagaacagcaaagaacaactcatcaccgctcacgttcagtatctcctcatcgcggcaatgatcagggaaagccgcgttcacgtttaccaaatgtgccattacagaggagtttagatgaaattcatccaacaagaaggtcacgttctccaaccagacaccatgatgcctcccgaagtccagttgatcatagaaccagagatgtggatagtcagtatttatcagaacaagacagtgagcttcttatgctgcccagagcaaaacgaggacgaagtgcagaatgcctacatactaccagtgaactgcagccctttcttgacagggctaggagtgctagtaccaactgcttgagaccagatactagtttgcattcaccagaacgagaaagaatgcaccgacagagaagtccaacacaatctcctccagcagacacatcgttcagcagtcgcaggggaagacagctcccacaagtgccagtgagaagcggcagtatagaacaagcaagcttagtagtggaggagcgaacaagacagatgaaaatgaaagtgcatcgatttaagcagacaacagggtctggttctagtcaagaacttgatcgcgagcaatattccaagtataacatacataaagatcagtacagaagctgtgataacgtctctgccaaatcatcagatagtgatgtcagtgatgtttccgccatttcccgaaccagcagtgcctcacgcctcagcagcacaagctttatgtcagagcaatctgagcgccccaggggtagaatcagttcatttacccccaaaatgcaaggcagacggatggggacttcaggaagatccatcatgaagagcaccagtgtcagtggagagatgtacacactggagcataatgacggcagccagtcagacacagctgtgggtacagttggagcaggtggaaagaaacggagatccagccttagtgccaaagtggttgccatagtgtctcgaaggagtagaagcacatcccagcttagtcaaacagagtcgggccacaaaaagttaaaaagtaccatccagagaagcacagaaacaggcatggcagctgaaatgagaaagatggtaaggcagccgagccgagagtctactgatggcagcatcaacagttacagctctgagggcaatttaatatttcctggagtgcgactgggagctgacagtcaattcagtgattttcttgatggattgggaccagcccagcttgttggccgccaaacccttgccacccctgcaatggctccatatgtcaaagtatatcttttggaaaatggggcctgtatagccaagaagaagacaagaattgcacgaaaaacccttgatcctttgtatcagcagtctctggtttttgatgaaagtccacagggtaaagttcttcaggtgattgtctggggagactatggcagaatggaccacaaatgctttatgggtgtggctcagatcttgttggaagaactcgacctgtccagcatggtgatcggatggtacaaattgttcccaccgtcctcactggtggatcccacactcactcccctcacccggcgggcttcccagtcatctctggaaagttcaactgggcctccctgtattcgatcatagtgaactcataccagagtcattccaataaaactctacttttcaggataataatctgaaccagatatttcatgatcgaaagcattgttggagacagacaatcaacttgtgttttgcctgtagtagtttttcaataatatgtcccaattgttatttaaaacatggcttcatatgacagaacaaggcaatctatcaaatttacaggaagaatcaacatgctggtgagagtcactgatgcttctaacaaatagaaaaagaggaaactttaaatccacgcatacacgtacacacacacatgcacacacacacacaccaaattgaacaaactggaaactctcactctgtgaaaagttgtattctacacatttctgcacagaccacaagcagtgttatttccctgatgtttgagttgttttgttcttttgtgtgttttgtttatttgtgtgttgtttgttggttttcgtttcttgagtttttgttttgttttcaccacatctgttatttccactagtttttttttggctgtgtcatgacaggcctcatgatgctaacagagattcttcccttcttttttccaaaagcaccaaaaaaaagggctgaagtagtctctgtagcatctccccaaagtgttaaacagctacataaggtgaagccaaggaagggtttcactagctttcattttataattatttaaagtcttatgtgtggatacccaagagacaaaaagttatcttccaaaataaataatcacagaagtacttttttaatgaagagcctatctgtttgcattctagaaaattaatttatggtttccattgttttgcatggaagacttttaaagaagtcaatctgcaactaatgctggggactaaaactaactgcataattgtactttgaaaacactccttgtaatgcctttttcttcctgatattaaaaaaatgctcatgtgtataaaccatactttgacttcccaaaaatggtgactaggaatggatttgagcctaagacactttgagctatgcccaggcttctcagccatacctcagtgtagacacatccatctgccctggaaagagcatggtatgagctgttcaatattccactggaaattccagttgaaatattctgcactaaactattgtttttattgaattttagtttacatttctttgagattgatgcaagcacaaagcttgattttttaatgcaaagtatcttactttttggggggaaaataaacaaaatgaactttcaatttgcattttcatttagtttctcttggccttgaatttcccttgtgacattctgtacatgtgctacaaactgcagtctctgcaggtgcattgatatgttctccctccttttatgagtcactccacttttgtgattacacaaatagagcagcatgacttggaactgttcagagctgcatgcacattttgtaaaaaaaaaaaattttaaaaagaaaagaaacaaaaggttatttaataatgtatgttagttccacataggccagcttgtatgttgcatgtacttgtacagtttgcttgttaattactataccgaaataaccaagaaatctaagccatccacttttgttatagacattttgcaggttttagccagactcagtctctgggtctgtggtgaaatgtctatagatggactttattttttaccctccggaaaacgtgatgtagtacggaccaaattccttctaataaatattttggtgtagattcctactgtggggctgtaacacatgtagacactgtgtacacactaggttttaattcatagacatactgcctgcaccaagtgaattatttattattatttacacatgccagaattatctgcccatcattccacagggcacagattgaccactgctcaccatgctgagtaggaggaactgaagcattggtgcacttctactagattccgttctgtcttagtggccaacaatcaactgattataattgggtagtatctttctattttgaccacttgtcttaacactcccctgtgcttttaaatgaaattccaattcatgtatgtaaacatgtttaataaaatttacttttcatgtcagtcagtagccatatgtgttctatgtcttgccagatttccattgtgggttctatggtgcaaaatgggagccaggccatgggaaggggaggctggggtttgttgtctgctgcgggcatttgacttgacttgtcactgcactatattatgtcttaatcgatggcccaaagggtactttgcatcacatacaagttttcacttcgtcagcctgtctaagtgagcacatgactatacttctgaaaagtggcattattaaaaataataaatctcagtaagaatcaaatggaaggttgttttctgctgctgtttgaatgtgctaataaaagagacaactctattg

SEQ ID NO: 268554 - DNA, 5047 bp, Artificial Sequence
  derived and/or modified sequence
ctctcccgccgcgcctccgcctgcccgcccccgccggccgaggctgggctgcgggaggcggccgggcggccccgagcttcgctagggcgaccaaaacaaaggcagcatccggggctgggtggatgcaaacaaccatgaaagactgggttctcgctctccccggctctgctgctgctgctgctgccgccgccgccgctgctcctcctcctgccgccgccgctagggctccgctgtgagggggaagcaggggcgcagctgctgggcgtgcatccgaaaggtgagagccagagagcgagcagagggggcgggcaggccacgaaaatgtcctcggccgtggggccccgcggtcctcgcccacccacggtgcctccccccatgcaagagctgcccgacctgagccacctgaccgaagaggagaggaacattatcatggcagtgatggaccggcagaaggaagaggaggaaaaagaagaagccatgctcaagtgtgttgtcagggacatggcgaagcctgctgcctgcaaaacaccaagaaatgctgaaaaccagccccaccaaccttcaccgagattgcatcaacagtttgaaagctataaggaacaagtgagaaaaataggggaagaagcgcggcgttaccagggcgagcacaaagacgatgctccgacttgtggaatctgtcataaaacaaagtttgctgatgggtgcggtcatctctgctcctattgtcgcactaagttctgtgcgcgctgcggaggccgcgtgtctctacggtcaaacaacgaggacaaagtggttatgtgggtatgcaatttatgtcgaaagcaacaagaaatcttaaccaaatctggggcatggttctttggaagtggccctcagcagacaagtcaggatggaaccctgagtgatacagctacaggtgctggctctgaggtaccaagagaaaagaaagcacgactccaagagcgatcgcggtctcagacacccctaagcacagcagctgcctcctcccaggatgctgctcctcccagcgcaccaccagacaggagcaaaggggctgagccctcgcagcaagccttggggcctgaacagaagcaggcttcatccaggtctagaagtgaacctcctagagagagaaagaagaccccagggctttccgagcagaatggcaaaggagccctgaagagcgagcggaaacgcgtgccaaagacctcagcgcagcccgtggagggggccgtcgaagaacgggagcgcaaagaaaggcgggaaagccgaaggcttgagaaagggcgatcacaggattacccagacacgccggaaaaacgggatgagggcaaagcggcggatgaggaaaagcaaagaaaagaggaggattatcagaccaggtaccgcagcgacccgaacctagctcggtacccggtgaaaccgccgcctgaggagcagcagatgcgcatgcacgcccgggtgtcccgcgccaggcacgagcggcgccacagcgacgtggcgctcccgcgcaccgaggcgggcgcggcgctgccggagggcaaggccggcaaacgcgcgccggcggcagccagggcctcgccgccggactcgccgcgggcttactcggctgagagaactgcggagaccagggcgccgggcgccaagcagctaacgaaccacagcccgccggcgcccagacatgggccggttcccgcagaagccccggagctcaaagcccaggagcccctcaggaagcagagccgcctggaccccagctcggcggtcctcatgcggaaggccaagcgcgagaaggtggagaccatgctgcggaacgactctttgagctcagaccagtccgagtcggtgcggccgtccccgcccaagccgcaccggtccaagagaggcggcaagaagcggcagatgtcggtgagcagctctgaggaggagggcgtgtcgacgcccgagtacaccagctgcgaggacgtggagctggagagcgagagcgtcagcgagaaaggtgatttggattattactggttggatcctgccacgtggcacagccgggagacatcacctattagttcgcatcctgtaacgtggcaaccatctaaagagggggaccgattaattggacgtgttattcttaacaagagaacaaccatgcccaaagactcaggtgcattgctgggtctgaaagttgttggaggaaaaatgactgacttaggacgacttggtgctttcatcaccaaagtaaagaagggtagcctagcagatgtagttggacacctaagagcaggggatgaagttctagaatggaatggtaaacccctgccgggagctacaaatgaagaagtttacaacattattttagaatcaaaatcagaacctcaagttgaaattattgtttcaaggcctattggtgacattccccggattcctgagagctcccaccctccactggagtccagttcaagttcctttgaatctcagaagatggaaaggccttccatttctgttatttctccaacaagtcctggagctctaaaagatgccccacaagtcttaccagggcaactttctgtgaagttgtggtatgataaagtgggacaccagctgattgtaaatgttctgcaagcaacagatctacctgctagagtagatggacgtcctcgaaatccctatgtaaaaatgtattttcttccagatagaagtgataaaagtaaaaggaggaccaaaacagtaaagaaaatactagaaccaaaatggaatcaaacttttgtctattcacatgtacatcgtagagattttagagaacgaatgttagaaataactgtgtgggaccaaccaagagtgcaagaagaagaaagtgaatttcttggagagatcctcatagaattggagacagcgcttttagatgatgaaccgcattggtataaacttcagacacatgatgagtcttcactacctctgcctcagccatcacctttcatgccaaggcgacatattcatggagaaagctctagcaaaaagctacaaagatctcagcgaatcagtgatagtgacatctcagattatgaggttgatgatggtattggcgtagttcctccagtaggctataggtctagtgctagagaaagtaaatctacaacattaactgtgccagaacagcaaagaacaactcatcaccgctcacgttcagtatctcctcatcgcggcaatgatcagggaaagccgcgttcacgtttaccaaatgtgccattacagaggagtttagatgaaattcatccaacaagaaggtcacgttctccaaccagacaccatgatgcctcccgaagtccagttgatcatagaaccagagatgtggatagtcagtatttatcagaacaagacagtgagcttcttatgctgcccagagcaaaacgaggacgaagtgcagaatgcctacatactaccagtgaactgcagccctttcttgacagggctaggagtgctagtaccaactgcttgagaccagatactagtttgcattcaccagaacgagaaagaatgcaccgacagagaagtccaacacaatctcctccagcagacacatcgttcagcagtcgcaggggaagacagctcccacaagtgccagtgagaagcggcagtatagaacaagcaagcttagtagtggaggagcgaacaagacagatgaaaatgaaagtgcatcgatttaagcagacaacagggtctggttctagtcaagaacttgatcgcgagcaatattccaagtataacatacataaagatcagtacagaagctgtgataacgtctctgccaaatcatcagatagtgatgtcagtgatgtttccgccatttcccgaaccagcagtgcctcacgcctcagcagcacaagctttatgtcagagcaatctgagcgccccaggggtagaatcagttcatttacccccaaaatgcaaggcagacggatggggacttcaggaagatccatcatgaagagcaccagtgtcagtggagagatgtacacactggagcataatgacggcagccagtcagacacagctgtgggtacagttggagcaggtggaaagaaacggagatccagccttagtgccaaagtggttgccatagtgtctcgaaggagtagaagcacatcccagcttagtcaaacagagtcgggccacaaaaagttaaaaagtaccatccagagaagcacagaaacaggcatggcagctgaaatgagaaagatggtaaggcagccgagccgagagtctactgatggcagcatcaacagttacagctctgagggcaatttaatatttcctggagtgcgactgggagctgacagtcaattcagtgattttcttgatggattgggaccagcccagcttgttggccgccaaacccttgccacccctgcaatggctccatatgtcaaagtatatcttttggaaaatggggcctgtatagccaagaagaagacaagaattgcacgaaaaacccttgatcctttgtatcagcagtctctggtttttgatgaaagtccacagggtaaagttcttcaggtgattgtctggggagactatggcagaatggaccacaaatgctttatgggtgtggctcagatcttgttggaagaactcgacctgtccagcatggtgatcggatggtacaaattgttcccaccgtcctcactggtggatcccacactcactcccctcacccggcgggcttcccagtcatctctggaaagttcaactgggcctccctgtattcgatcatagtgaactcataccagagtcattccaataaaactctacttttcaggataataatctgaaccagatatttcatgatcgaaagcattgttggagacagacaatcaacttgtgttttgcctgtagtagtttttcaataatatgtcccaattgttatttaaaacatggcttcatatgacagaacaaggcaatctatcaaatttacaggaagaatcaacatgctggtgagagtcactgatgcttctaacaaatagaaaaagaggaaactttaaatccacgcatacac

SEQ ID NO: 268555 - DNA, 3876 bp, Artificial Sequence
  derived and/or modified sequence
atgagcagcgccgtgggccccagaggccccagaccccccaccgtgcccccccccatgcaggagctgcccgacctgagccacctgaccgaggaggagagaaacatcatcatggccgtgatggacagacagaaggaggaggaggagaaggaggaggccatgctgaagtgcgtggtgagagacatggccaagcccgccgcctgcaagacccccagaaacgccgagaaccagccccaccagcccagccccagactgcaccagcagttcgagagctacaaggagcaggtgagaaagatcggcgaggaggccagaagataccagggcgagcacaaggacgacgcccccacctgcggcatctgccacaagaccaagttcgccgacggctgcggccacctgtgcagctactgcagaaccaagttctgcgccagatgcggcggcagagtgagcctgagaagcaacaacgaggacaagtacgtgatgtgggtgtgcaacctgtgcagaaagcagcaggagatcctgaccaagagcggcgcctggttcttcggcagcggcccccagcagaccagccaggacggcaccctgagcgacaccgccaccggcgccggcagcgaggtgcccagagagaagaaggccagactgcaggagagaagcagaagccagacccccctgagcaccgccgccgccagcagccaggacgccgccccccccagcgccccccccgacagaagcaagggcgccgagcccagccagcaggccctgggccccgagcagaagcaggccagcagcagaagcagaagcgagccccccagagagagaaagaagacccccggcctgagcgagcagaacggcaagggcgccctgaagagcgagagaaagagagtgcccaagaccagcgcccagcccgtggagggcgccgtggaggagagagagagaaaggagagaagagagagcagaagactggagaagggcagaagccaggactaccccgacacccccgagaagagagacgagggcaaggccgccgacgaggagaagcagagaaaggaggaggactaccagaccagatacagaagcgaccccaacctggccagataccccgtgaagcccccccccgaggagcagcagatgagaatgcacgccagagtgagcagagccagacacgagagaagacacagcgacgtggccctgcccagaaccgaggccggcgccgccctgcccgagggcaaggccggcaagagagcccccgccgccgccagagccagcccccccgacagccccagagcctacagcgccgagagaaccgccgagaccagagcccccggcgccaagcagctgaccaaccacagcccccccgcccccagacacggccccgtgcccgccgaggcccccgagctgaaggcccaggagcccctgagaaagcagagcagactggaccccagcagcgccgtgctgatgagaaaggccaagagagagaaggtggagaccatgctgagaaacgacagcctgagcagcgaccagagcgagagcgtgagacccagcccccccaagccccacagaagcaagagaggcggcaagaagagacagatgagcgtgagcagcagcgaggaggagggcgtgagcacccccgagtacaccagctgcgaggacgtggagctggagagcgagagcgtgagcgagaagggcgacctggactactactggctggaccccgccacctggcacagcagagagaccagccccatcagcagccaccccgtgacctggcagcccagcaaggagggcgacagactgatcggcagagtgatcctgaacaagagaaccaccatgcccaaggacagcggcgccctgctgggcctgaaggtggtgggcggcaagatgaccgacctgggcagactgggcgccttcatcaccaaggtgaagaagggcagcctggccgacgtggtgggccacctgagagccggcgacgaggtgctggagtggaacggcaagcccctgcccggcgccaccaacgaggaggtgtacaacatcatcctggagagcaagagcgagccccaggtggagatcatcgtgagcagacccatcggcgacatccccagaatccccgagagcagccacccccccctggagagcagcagcagcagcttcgagagccagaagatggagagacccagcatcagcgtgatcagccccaccagccccggcgccctgaaggacgccccccaggtgctgcccggccagctgagcgtgaagctgtggtacgacaaggtgggccaccagctgatcgtgaacgtgctgcaggccaccgacctgcccgccagagtggacggcagacccagaaacccctacgtgaagatgtacttcctgcccgacagaagcgacaagagcaagagaagaaccaagaccgtgaagaagatcctggagcccaagtggaaccagaccttcgtgtacagccacgtgcacagaagagacttcagagagagaatgctggagatcaccgtgtgggaccagcccagagtgcaggaggaggagagcgagttcctgggcgagatcctgatcgagctggagaccgccctgctggacgacgagccccactggtacaagctgcagacccacgacgagagcagcctgcccctgccccagcccagccccttcatgcccagaagacacatccacggcgagagcagcagcaagaagctgcagagaagccagagaatcagcgacagcgacatcagcgactacgaggtggacgacggcatcggcgtggtgccccccggctacagaagcagcgccagagagagcaagagcaccaccctgaccgtgcccgagcagcagagaaccacccaccacagaagcagaagcgtgagcccccacagaggcaacgaccagggcaagcccagaagcagactgcccaacgtgcccctgcagagaagcctggacgagatccaccccaccagaagaagcagaagccccaccagacaccacgacgccagcagaagccccgtggaccacagaaccagagacgtggacagccagtacctgagcgagcaggacagaatgcacagacagagaagccccacccagagcccccccgccgacaccagcttcagcagcagaagaggcagacagctgccccaggtgcccgtgagaagcggcagcatcgagcaggagagcggccacaagaagctgaagagcaccatccagagaagcaccgagaccggcatggccgccgagatgagaaagatggtgagacagcccagcagagagagcaccgacggcagcatcaacagctacagcagcgagggcaacctgatcttccccggcgtgagactgggcgccgacagccagttcagcgacttcctggacggcctgggccccgcccagctggtgggcagacagaccctggccacccccgccatgggcgacatccagatcggcatggaggacaagaagggccagctggaggtggaggtgatcagagccagaagcctgacccagaagcccggcagcaagagcacccccgccccctacgtgaaggtgtacctgctggagaacggcgcctgcatcgccaagaagaagaccagaatcgccagaaagaccctggaccccctgtaccagcagagcctggtgttcgacgagagcccccagggcaaggtgctgcaggtgatcgtgtggggcgactacggcagaatggaccacaagtgcttcatgggcgtggcccagatcctgctggaggagctggacctgagcagcatggtgatcggctggtacaagctgttcccccccagcagcctggtggaccccaccctgacccccctgaccagaagagccagccagagcagcctggagagcagcaccggccccccctgcatcagaagctag

SEQ ID NO: 268556 - DNA, 4428 bp, Artificial Sequence
  derived and/or modified sequence
atgagcagcgccgtgggccccagaggccccagaccccccaccgtgcccccccccatgcaggagctgcccgacctgagccacctgaccgaggaggagagaaacatcatcatggccgtgatggacagacagaaggaggaggaggagaaggaggaggccatgctgaagtgcgtggtgagagacatggccaagcccgccgcctgcaagacccccagaaacgccgagaaccagccccaccagcccagccccagactgcaccagcagttcgagagctacaaggagcaggtgagaaagatcggcgaggaggccagaagataccagggcgagcacaaggacgacgcccccacctgcggcatctgccacaagaccaagttcgccgacggctgcggccacctgtgcagctactgcagaaccaagttctgcgccagatgcggcggcagagtgagcctgagaagcaacaacgaggacatctgcgtgatgtgggtgtgcaacctgtgcagaaagcagcaggagatcctgaccaagagcggcgcctggttcttcggcagcggcccccagcagaccagccaggacggcaccctgagcgacaccgccaccggcgccggcagcgaggtgcccagagagaagaaggccagactgcaggagagaagcagaagccagacccccctgagcaccgccgccgccagcagccaggacgccgccccccccagcgccccccccgacagaagcaagggcgccgagcccagccagcaggccctgggccccgagcagaagcaggccagcagcagaagcagaagcgagccccccagagagagaaagaagacccccggcctgagcgagcagaacggcaagggcgccctgaagagcgagagaaagagagtgcccaagaccagcgcccagcccgtggagggcgccgtggaggagagagagagaaaggagagaagagagagcagaagactggagaagggcagaagccaggactaccccgacacccccgagaagagagacgagggcaaggccgccgacgaggagaagcagagaaaggaggaggactaccagaccagatacagaagcgaccccaacctggccagataccccgtgaagcccccccccgaggagcagcagatgagaatgcacgccagagtgagcagagccagacacgagagaagacacagcgacgtggccctgcccagaaccgaggccggcgccgccctgcccgagggcaaggccggcaagagagcccccgccgccgccagagccagcccccccgacagccccagagcctacagcgccgagagaaccgccgagaccagagcccccggcgccaagcagctgaccaaccacagcccccccgcccccagacacggccccgtgcccgccgaggcccccgagctgaaggcccaggagcccctgagaaagcagagcagactggaccccagcagcgccgtgctgatgagaaaggccaagagagagaaggtggagaccatgctgagaaacgacagcctgagcagcgaccagagcgagagcgtgagacccagcccccccaagccccacagaagcaagagaggcggcaagaagagacagatgagcgtgagcagcagcgaggaggagggcgtgagcacccccgagtacaccagctgcgaggacgtggagctggagagcgagagcgtgagcgagaagggcgacctggactactactggctggaccccgccacctggcacagcagagagaccagccccatcagcagccaccccgtgacctggcagcccagcaaggagggcgacagactgatcggcagagtgatcctgaacaagagaaccaccatgcccaaggacagcggcgccctgctgggcctgaaggtggtgggcggcaagatgaccgacctgggcagactgggcgccttcatcaccaaggtgaagaagggcagcctggccgacgtggtgggccacctgagagccggcgacgaggtgctggagtggaacggcaagcccctgcccggcgccaccaacgaggaggtgtacaacatcatcctggagagcaagagcgagccccaggtggagatcatcgtgagcagacccatcggcgacatccccagaatccccgagagcagccacccccccctggagagcagcagcagcagcttcgagagccagaagatggagagacccagcatcagcgtgatcagccccaccagccccggcgccctgaaggacgccccccaggtgctgcccggccagctgagcgtgaagctgtggtacgacaaggtgggccaccagctgatcgtgaacgtgctgcaggccaccgacctgcccgccagagtggacggcagacccagaaacccctacgtgaagatgtacttcctgcccgacagaagcgacaagagcaagagaagaaccaagaccgtgaagaagatcctggagcccaagtggaaccagaccttcgtgtacagccacgtgcacagaagagacttcagagagagaatgctggagatcaccgtgtgggaccagcccagagtgcaggaggaggagagcgagttcctgggcgagatcctgatcgagctggagaccgccctgctggacgacgagccccactggtacaagctgcagacccacgacgagagcagcctgcccctgccccagcccagccccttcatgcccagaagacacatccacggcgagagcagcagcaagaagctgcagagaagccagagaatcagcgacagcgacatcagcgactacgaggtggacgacggcatcggcgtggtgccccccggctacagaagcagcgccagagagagcaagagcaccaccctgaccgtgcccgagcagcagagaaccacccaccacagaagcagaagcgtgagcccccacagaggcaacgaccagggcaagcccagaagcagactgcccaacgtgcccctgcagagaagcctggacgagatccaccccaccagaagaagcagaagccccaccagacaccacgacgccagcagaagccccgtggaccacagaaccagagacgtggacagccagtacctgagcgagcaggacagcgagctgctgatgctgcccagagccaagagaggcagaagcgccgagtgcctgcacaccaccagaatgcacagacagagaagccccacccagagcccccccgccgacaccagcttcagcagcagaagaggcagacagctgccccaggtgcccgtgagaagcggcagcatcgagcaggccagcctggtggtggaggagagaaccagacagatgaagatgaaggtgcacagattcaagcagaccaccggcagcggcagcagccaggagctggacagagagcagtacagcaagtacaacatccacaaggaccagtacagaagctgcgacaacgtgagcgccaagagcagcgacagcgacgtgagcgacgtgagcgccatcagcagaaccagcagcgccagcagactgagcagcaccagcttcatgagcgagcagagcgagagacccagaggcagaatcagaagaatgggcaccagcggcagaagcatcatgaagagcaccagcgtgagcggcgagatgtacaccctggagcacaacgacggcagccagagcgacaccgccgtgggcaccgtgggcgccggcggcaagaagagaagaagcagcctgagcgccaaggtggtggccatcgtgagcagaagaagcagaagcaccagccagctgagccagaccgagagcggccacaagaagctgaagagcaccatccagagaagcaccgagaccggcatggccgccgagatgagaaagatggtgagacagcccagcagagagagcaccgacggcagcatcaacagctacagcagcgagggcaacctgatcttccccggcgtgagactgggcgccgacagccagttcagcgacttcctggacggcctgggccccgcccagctggtgggcagacagaccctggccacccccgccatgggcgacatccagatcggcatggaggacaagaagggccagctggaggtggaggtgatcagagccagaagcctgacccagaagcccggcagcaagagcacccccgccccctacgtgaaggtgtacctgctggagaacggcgcctgcatcgccaagaagaagaccagaatcgccagaaagaccctggaccccctgtaccagcagagcctggtgttcgacgagagcccccagggcaaggtgctgcaggtgatcgtgtggggcgactacggcagaatggaccacaagtgcttcatgggcgtggcccagatcctgctggaggagctggacctgagcagcatggtgatcggctggtacaagctgttcccccccagcagcctggtggaccccaccctgacccccctgaccagaagagccagccagagcagcctggagagcagcaccggccccccctgcatcagaagctag

SEQ ID NO: 268557 - DNA, 4116 bp, Artificial Sequence
  derived and/or modified sequence
atgagcagcgccgtgggccccagaggccccagaccccccaccgtgcccccccccatgcaggagctgcccgacctgagccacctgaccgaggaggagagaaacatcatcatggccgtgatggacagacagaaggaggaggaggagaaggaggaggccatgctgaagtgcgtggtgagagacatggccaagcccgccgcctgcaagacccccagaaacgccgagaaccagccccaccagcccagccccagactgcaccagcagttcgagagctacaaggagcaggtgagaaagatcggcgaggaggccagaagataccagggcgagcacaaggacgacgcccccacctgcggcatctgccacaagaccaagttcgccgacggctgcggccacctgtgcagctactgcagaaccaagttctgcgccagatgcggcggcagagtgagcctgagaagcaacaacgagaacaagatcgtgatgtgggtgtgcaacctgtgcagaaagcagcaggagatcctgaccaagagcggcgcctggttcttcggcagcggcccccagcagaccagccaggacggcaccctgagcgacaccgccaccggcgccggcagcgaggtgcccagagagaagaaggccagactgcaggagagaagcagaagccagacccccctgagcaccgccgccgccagcagccaggacgccgccccccccagcgccccccccgacagaagcaagggcgccgagcccagccagcaggccctgggccccgagcagaagcaggccagcagcagaagcagaagcgagccccccagagagagaaagaagacccccggcctgagcgagcagaacggcaagggcgccctgaagagcgagagaaagagagtgcccaagaccagcgcccagcccgtggagggcgccgtggaggagagagagagaaaggagagaagagagagcagaagactggagaagggcagaagccaggactaccccgacacccccgagaagagagacgagggcaaggccgccgacgaggagaagcagagaaaggaggaggactaccagaccagatacagaagcgaccccaacctggccagataccccgtgaagcccccccccgaggagcagcagatgagaatgcacgccagagtgagcagagccagacacgagagaagacacagcgacgtggccctgcccagaaccgaggccggcgccgccctgcccgagggcaaggccggcaagagagcccccgccgccgccagagccagcccccccgacagccccagagcctacagcgccgagagaaccgccgagaccagagcccccggcgccaagcagctgaccaaccacagcccccccgcccccagacacggccccgtgcccgccgaggcccccgagctgaaggcccaggagcccctgagaaagcagagcagactggaccccagcagcgccgtgctgatgagaaaggccaagagagagaaggtggagaccatgctgagaaacgacagcctgagcagcgaccagagcgagagcgtgagacccagcccccccaagccccacagaagcaagagaggcggcaagaagagacagatgagcgtgagcagcagcgaggaggagggcgtgagcacccccgagtacaccagctgcgaggacgtggagctggagagcgagagcgtgagcgagaagggcgacctggactactactggctggaccccgccacctggcacagcagagagaccagccccatcagcagccaccccgtgacctggcagcccagcaaggagggcgacagactgatcggcagagtgatcctgaacaagagaaccaccatgcccaaggacagcggcgccctgctgggcctgaaggtggtgggcggcaagatgaccgacctgggcagactgggcgccttcatcaccaaggtgaagaagggcagcctggccgacgtggtgggccacctgagagccggcgacgaggtgctggagtggaacggcaagcccctgcccggcgccaccaacgaggaggtgtacaacatcatcctggagagcaagagcgagccccaggtggagatcatcgtgagcagacccatcggcgacatccccagaatccccgagagcagccacccccccctggagagcagcagcagcagcttcgagagccagaagatggagagacccagcatcagcgtgatcagccccaccagccccggcgccctgaaggacgccccccaggtgctgcccggccagctgagcgtgaagctgtggtacgacaaggtgggccaccagctgatcgtgaacgtgctgcaggccaccgacctgcccgccagagtggacggcagacccagaaacccctacgtgaagatgtacttcctgcccgacagaagcgacaagagcaagagaagaaccaagaccgtgaagaagatcctggagcccaagtggaaccagaccttcgtgtacagccacgtgcacagaagagacttcagagagagaatgctggagatcaccgtgtgggaccagcccagagtgcaggaggaggagagcgagttcctgggcgagatcctgatcgagctggagaccgccctgctggacgacgagccccactggtacaagctgcagacccacgacgagagcagcctgcccctgccccagcccagccccttcatgcccagaagacacatccacggcgagagcagcagcaagaagctgcagagaagccagagaatcagcgacagcgacatcagcgactacgaggtggacgacggcatcggcgtggtgccccccgtgggctacagaagcagcgccagagagagcaagagcaccaccctgaccgtgcccgagcagcagagaaccacccaccacagaagcagaagcgtgagcccccacagaggcaacgaccagggcaagcccagaagcagactgcccaacgtgcccctgcagagaagcctggacgagatccaccccaccagaagaagcagaagccccaccagacaccacgacgccagcagaagccccgtggaccacagaaccagagacgtggacagccagtacctgagcgagcaggacagcgagctgctgatgctgcccagagccaagagaggcagaagcgccgagtgcctgcacaccaccagcgagctgcagcccttcctggacagagccagaagcgccagcaccaactgcctgagacccgacaccagcctgcacagccccgagagagagagaggcagatggagccccagcctggacagaagaagaccccccagccccagaatccagatccagcacgccagccccgagaacgacagaatgcacagacagagaagccccacccagagcccccccgccgacaccagcttcagcagcagaagaggcagacagctgccccaggtgcccgtgagaagcggcagcatcgagcaggagagcggccacaagaagctgaagagcaccatccagagaagcaccgagaccggcatggccgccgagatgagaaagatggtgagacagcccagcagagagagcaccgacggcagcatcaacagctacagcagcgagggcaacctgatcttccccggcgtgagactgggcgccgacagccagttcagcgacttcctggacggcctgggccccgcccagctggtgggcagacagaccctggccacccccgccatgggcgacatccagatcggcatggaggacaagaagggccagctggaggtggaggtgatcagagccagaagcctgacccagaagcccggcagcaagagcacccccgccccctacgtgaaggtgtacctgctggagaacggcgcctgcatcgccaagaagaagaccagaatcgccagaaagaccctggaccccctgtaccagcagagcctggtgttcgacgagagcccccagggcaaggtgctgcaggtgatcgtgtggggcgactacggcagaatggaccacaagtgcttcatgggcgtggcccagatcctgctggaggagctggacctgagcagcatggtgatcggctggtacaagctgttcccccccagcagcctggtggaccccaccctgacccccctgaccagaagagccagccagagcagcctggagagcagcaccggccccccctgcatcagaagctag

SEQ ID NO: 268558 - DNA, 4626 bp, Artificial Sequence
  derived and/or modified sequence
atgagcagcgccgtgggccccagaggccccagaccccccaccgtgcccccccccatgcaggagctgcccgacctgagccacctgaccgaggaggagagaaacatcatcatggccgtgatggacagacagaaggaggaggaggagaaggaggaggccatgctgaagtgcgtggtgagagacatggccaagcccgccgcctgcaagacccccagaaacgccgagaaccagccccaccagcccagccccagactgcaccagcagttcgagagctacaaggagcaggtgagaaagatcggcgaggaggccagaagataccagggcgagcacaaggacgacgcccccacctgcggcatctgccacaagaccaagttcgccgacggctgcggccacctgtgcagctactgcagaaccaagttctgcgccagatgcggcggcagagtgagcctgagaagcaacaacgaggacaagtacgtgatgtgggtgtgcaacctgtgcagaaagcagcaggagatcctgaccaagagcggcgcctggttcttcggcagcggcccccagcagaccagccaggacggcaccctgagcgacaccgccaccggcgccggcagcgaggtgcccagagagaagaaggccagactgcaggagagaagcagaagccagacccccctgagcaccgccgccgccagcagccaggacgccgccccccccagcgccccccccgacagaagcaagggcgccgagcccagccagcaggccctgggccccgagcagaagcaggccagcagcagaagcagaagcgagccccccagagagagaaagaagacccccggcctgagcgagcagaacggcaagggcgccctgaagagcgagagaaagagagtgcccaagaccagcgcccagcccgtggagggcgccgtggaggagagagagagaaaggagagaagagagagcagaagactggagaagggcagaagccaggactaccccgacacccccgagaagagagacgagggcaaggccgccgacgaggagaagcagagaaaggaggaggactaccagaccagatacagaagcgaccccaacctggccagataccccgtgaagcccccccccgaggagcagcagatgagaatgcacgccagagtgagcagagccagacacgagagaagacacagcgacgtggccctgcccagaaccgaggccggcgccgccctgcccgagggcaaggccggcaagagagcccccgccgccgccagagccagcccccccgacagccccagagcctacagcgccgagagaaccgccgagaccagagcccccggcgccaagcagctgaccaaccacagcccccccgcccccagacacggccccgtgcccgccgaggcccccgagctgaaggcccaggagcccctgagaaagcagagcagactggaccccagcagcgccgtgctgatgagaaaggccaagagagagaaggtggagaccatgctgagaaacgacagcctgagcagcgaccagagcgagagcgtgagacccagcccccccaagccccacagaagcaagagaggcggcaagaagagacagatgagcgtgagcagcagcgaggaggagggcgtgagcacccccgagtacaccagctgcgaggacgtggagctggagagcgagagcgtgagcgagaagggcgacctggactactactggctggaccccgccacctggcacagcagagagaccagccccatcagcagccaccccgtgacctggcagcccagcaaggagggcgacagactgatcggcagagtgatcctgaacaagagaaccaccatgcccaaggacagcggcgccctgctgggcctgaaggtggtgggcggcaagatgaccgacctgggcagactgggcgccttcatcaccaaggtgaagaagggcagcctggccgacgtggtgggccacctgagagccggcgacgaggtgctggagtggaacggcaagcccctgcccggcgccaccaacgaggaggtgtacaacatcatcctggagagcaagagcgagccccaggtggagatcatcgtgagcagacccatcggcgacatccccagaatccccgagagcagccacccccccctggagagcagcagcagcagcttcgagagccagaagatggagagacccagcatcagcgtgatcagccccaccagccccggcgccctgaaggacgccccccaggtgctgcccggccagctgagcgtgaagctgtggtacgacaaggtgggccaccagctgatcgtgaacgtgctgcaggccaccgacctgcccgccagagtggacggcagacccagaaacccctacgtgaagatgtacttcctgcccgacagaagcgacaagagcaagagaagaaccaagaccgtgaagaagatcctggagcccaagtggaaccagaccttcgtgtacagccacgtgcacagaagagacttcagagagagaatgctggagatcaccgtgtgggaccagcccagagtgcaggaggaggagagcgagttcctgggcgagatcctgatcgagctggagaccgccctgctggacgacgagccccactggtacaagctgcagacccacgacgagagcagcctgcccctgccccagcccagccccttcatgcccagaagacacatccacggcgagagcagcagcaagaagctgcagagaagccagagaatcagcgacagcgacatcagcgactacgaggtggacgacggcatcggcgtggtgccccccgtgggctacagaagcagcgccagagagagcaagagcaccaccctgaccgtgcccgagcagcagagaaccacccaccacagaagcagaagcgtgagcccccacagaggcaacgaccagggcaagcccagaagcagactgcccaacgtgcccctgcagagaagcctggacgagatccaccccaccagaagaagcagaagccccaccagacaccacgacgccagcagaagccccgtggaccacagaaccagagacgtggacagccagtacctgagcgagcaggacagcgagctgctgatgctgcccagagccaagagaggcagaagcgccgagtgcctgcacaccaccagacacctggtgagacactacaagaccctgccccccaagatgcccctgctgcagagcagcagccactggaacatctacagcgagctgcagcccttcctggacagagccagaagcgccagcaccaactgcctgagacccgacaccagcctgcacagccccgagagagagagaatgcacagacagagaagccccacccagagcccccccgccgacaccagcttcagcagcagaagaggcagacagctgccccaggtgcccgtgagaagcggcagcatcgagcaggccagcctggtggtggaggagagaaccagacagatgaagatgaaggtgcacagattcaagcagaccaccggcagcggcagcagccaggagctggacagagagcagtacagcaagtacaacatccacaaggaccagtacagaagctgcgacaacgtgagcgccaagagcagcgacagcgacgtgagcgacgtgagcgccatcagcagaaccagcagcgccagcagactgagcagcaccagcttcatgagcgagcagagcgagagacccagaggcagaatcagcagcttcacccccaagatgcagggcagaagaatgggcaccagcggcagaagcatcatgaagagcaccagcgtgagcggcgagatgtacaccctggagcacaacgacggcagccagagcgacaccgccgtgggcaccgtgggcgccggcggcaagaagagaagaagcagcctgagcgccaaggtggtggccatcgtgagcagaagaagcagaagcaccagccagctgagccagaccgagagcggccacaagaagctgaagagcaccatccagagaagcaccgagaccggcatggccgccgagatgagaaagatggtgagacagcccagcagagagagcaccgacggcagcatcaacagctacagcagcgagggcaacctgatcttccccggcgtgagactgggcgccgacagccagttcagcgacttcctggacggcctgggccccgcccagctggtgggcagacagaccctggccacccccgccatgggcgacatccagatcggcatggaggacaagaagggccagctggaggtggaggtgatcagagccagaagcctgacccagaagcccggcagcaagagcacccccgccccctacgtgaaggtgtacctgctggagaacggcgcctgcatcgccaagaagaagaccagaatcgccagaaagaccctggaccccctgtaccagcagagcctggtgttcgacgagagcccccagggcaaggtgctgcaggtgatcgtgtggggcgactacggcagaatggaccacaagtgcttcatgggcgtggcccagatcctgctggaggagctggacctgagcagcatggtgatcggctggtacaagctgttcccccccagcagcctggtggaccccaccctgacccccctgaccagaagagccagccagagcagcctggagagcagcaccggccccccctgcatcagaagctag

SEQ ID NO: 268559 - DNA, 4446 bp, Artificial Sequence
  derived and/or modified sequence
atgagcagcgccgtgggccccagaggccccagaccccccaccgtgcccccccccatgcaggagctgcccgacctgagccacctgaccgaggaggagagaaacatcatcatggccgtgatggacagacagaaggaggaggaggagaaggaggaggccatgctgaagtgcgtggtgagagacatggccaagcccgccgcctgcaagacccccagaaacgccgagaaccagccccaccagcccagccccagactgcaccagcagttcgagagctacaaggagcaggtgagaaagatcggcgaggaggccagaagataccagggcgagcacaaggacgacgcccccacctgcggcatctgccacaagaccaagttcgccgacggctgcggccacctgtgcagctactgcagaaccaagttctgcgccagatgcggcggcagagtgagcctgagaagcaacaacgagaacaagatcgtgatgtgggtgtgcaacctgtgcagaaagcagcaggagatcctgaccaagagcggcgcctggttcttcggcagcggcccccagcagaccagccaggacggcaccctgagcgacaccgccaccggcgccggcagcgaggtgcccagagagaagaaggccagactgcaggagagaagcagaagccagacccccctgagcaccgccgccgccagcagccaggacgccgccccccccagcgccccccccgacagaagcaagggcgccgagcccagccagcaggccctgggccccgagcagaagcaggccagcagcagaagcagaagcgagccccccagagagagaaagaagacccccggcctgagcgagcagaacggcaagggcgccctgaagagcgagagaaagagagtgcccaagaccagcgcccagcccgtggagggcgccgtggaggagagagagagaaaggagagaagagagagcagaagactggagaagggcagaagccaggactaccccgacacccccgagaagagagacgagggcaaggccgccgacgaggagaagcagagaaaggaggaggactaccagaccagatacagaagcgaccccaacctggccagataccccgtgaagcccccccccgaggagcagcagatgagaatgcacgccagagtgagcagagccagacacgagagaagacacagcgacgtggccctgcccagaaccgaggccggcgccgccctgcccgagggcaaggccggcaagagagcccccgccgccgccagagccagcccccccgacagccccagagcctacagcgccgagagaaccgccgagaccagagcccccggcgccaagcagctgaccaaccacagcccccccgcccccagacacggccccgtgcccgccgaggcccccgagctgaaggcccaggagcccctgagaaagcagagcagactggaccccagcagcgccgtgctgatgagaaaggccaagagagagaaggtggagaccatgctgagaaacgacagcctgagcagcgaccagagcgagagcgtgagacccagcccccccaagccccacagaagcaagagaggcggcaagaagagacagatgagcgtgagcagcagcgaggaggagggcgtgagcacccccgagtacaccagctgcgaggacgtggagctggagagcgagagcgtgagcgagaagggcgacctggactactactggctggaccccgccacctggcacagcagagagaccagccccatcagcagccaccccgtgacctggcagcccagcaaggagggcgacagactgatcggcagagtgatcctgaacaagagaaccaccatgcccaaggacagcggcgccctgctgggcctgaaggtggtgggcggcaagatgaccgacctgggcagactgggcgccttcatcaccaaggtgaagaagggcagcctggccgacgtggtgggccacctgagagccggcgacgaggtgctggagtggaacggcaagcccctgcccggcgccaccaacgaggaggtgtacaacatcatcctggagagcaagagcgagccccaggtggagatcatcgtgagcagacccatcggcgacatccccagaatccccgagagcagccacccccccctggagagcagcagcagcagcttcgagagccagaagatggagagacccagcatcagcgtgatcagccccaccagccccggcgccctgaaggacgccccccaggtgctgcccggccagctgagcgtgaagctgtggtacgacaaggtgggccaccagctgatcgtgaacgtgctgcaggccaccgacctgcccgccagagtggacggcagacccagaaacccctacgtgaagatgtacttcctgcccgacagaagcgacaagagcaagagaagaaccaagaccgtgaagaagatcctggagcccaagtggaaccagaccttcgtgtacagccacgtgcacagaagagacttcagagagagaatgctggagatcaccgtgtgggaccagcccagagtgcaggaggaggagagcgagttcctgggcgagatcctgatcgagctggagaccgccctgctggacgacgagccccactggtacaagctgcagacccacgacgagagcagcctgcccctgccccagcccagccccttcatgcccagaagacacatccacggcgagagcagcagcaagaagctgcagagaagccagagaatcagcgacagcgacatcagcgactacgaggtggacgacggcatcggcgtggtgccccccgtgggctacagaagcagcgccagagagagcaagagcaccaccctgaccgtgcccgagcagcagagaaccacccaccacagaagcagaagcgtgagcccccacagaggcaacgaccagggcaagcccagaagcagactgcccaacgtgcccctgcagagaagcctggacgagatccaccccaccagaagaagcagaagccccaccagacaccacgacgccagcagaagccccgtggaccacagaaccagagacgtggacagccagtacctgagcgagcaggacagcgagctgctgatgctgcccagagccaagagaggcagaagcgccgagtgcctgcacaccaccagcgagctgcagcccttcctggacagagccagaagcgccagcaccaactgcctgagacccgacaccagcctgcacagccccgagagagagagaatgcacagacagagaagccccacccagagcccccccgccgacaccagcttcagcagcagaagaggcagacagctgccccaggtgcccgtgagaagcggcagcatcgagcaggccagcctggtggtggaggagagaaccagacagatgaagatgaaggtgcacagattcaagcagaccaccggcagcggcagcagccaggagctggacagagagcagtacagcaagtacaacatccacaaggaccagtacagaagctgcgacaacgtgagcgccaagagcagcgacagcgacgtgagcgacgtgagcgccatcagcagaaccagcagcgccagcagactgagcagcaccagcttcatgagcgagcagagcgagagacccagaggcagaatcagcagcttcacccccaagatgcagggcagaagaatgggcaccagcggcagaagcatcatgaagagcaccagcgtgagcggcgagatgtacaccctggagcacaacgacggcagccagagcgacaccgccgtgggcaccgtgggcgccggcggcaagaagagaagaagcagcctgagcgccaaggtggtggccatcgtgagcagaagaagcagaagcaccagccagctgagccagaccgagagcggccacaagaagctgaagagcaccatccagagaagcaccgagaccggcatggccgccgagatgagaaagatggtgagacagcccagcagagagagcaccgacggcagcatcaacagctacagcagcgagggcaacctgatcttccccggcgtgagactgggcgccgacagccagttcagcgacttcctggacggcctgggccccgcccagctggtgggcagacagaccctggccacccccgccatggccccctacgtgaaggtgtacctgctggagaacggcgcctgcatcgccaagaagaagaccagaatcgccagaaagaccctggaccccctgtaccagcagagcctggtgttcgacgagagcccccagggcaaggtgctgcaggtgatcgtgtggggcgactacggcagaatggaccacaagtgcttcatgggcgtggcccagatcctgctggaggagctggacctgagcagcatggtgatcggctggtacaagctgttcccccccagcagcctggtggaccccaccctgacccccctgaccagaagagccagccagagcagcctggagagcagcaccggccccccctgcatcagaagctag

SEQ ID NO: 268560 - DNA, 4446 bp, Artificial Sequence
  derived and/or modified sequence
atgagcagcgccgtgggccccagaggccccagaccccccaccgtgcccccccccatgcaggagctgcccgacctgagccacctgaccgaggaggagagaaacatcatcatggccgtgatggacagacagaaggaggaggaggagaaggaggaggccatgctgaagtgcgtggtgagagacatggccaagcccgccgcctgcaagacccccagaaacgccgagaaccagccccaccagcccagccccagactgcaccagcagttcgagagctacaaggagcaggtgagaaagatcggcgaggaggccagaagataccagggcgagcacaaggacgacgcccccacctgcggcatctgccacaagaccaagttcgccgacggctgcggccacctgtgcagctactgcagaaccaagttctgcgccagatgcggcggcagagtgagcctgagaagcaacaacgaggacaaggtggtgatgtgggtgtgcaacctgtgcagaaagcagcaggagatcctgaccaagagcggcgcctggttcttcggcagcggcccccagcagaccagccaggacggcaccctgagcgacaccgccaccggcgccggcagcgaggtgcccagagagaagaaggccagactgcaggagagaagcagaagccagacccccctgagcaccgccgccgccagcagccaggacgccgccccccccagcgccccccccgacagaagcaagggcgccgagcccagccagcaggccctgggccccgagcagaagcaggccagcagcagaagcagaagcgagccccccagagagagaaagaagacccccggcctgagcgagcagaacggcaagggcgccctgaagagcgagagaaagagagtgcccaagaccagcgcccagcccgtggagggcgccgtggaggagagagagagaaaggagagaagagagagcagaagactggagaagggcagaagccaggactaccccgacacccccgagaagagagacgagggcaaggccgccgacgaggagaagcagagaaaggaggaggactaccagaccagatacagaagcgaccccaacctggccagataccccgtgaagcccccccccgaggagcagcagatgagaatgcacgccagagtgagcagagccagacacgagagaagacacagcgacgtggccctgcccagaaccgaggccggcgccgccctgcccgagggcaaggccggcaagagagcccccgccgccgccagagccagcccccccgacagccccagagcctacagcgccgagagaaccgccgagaccagagcccccggcgccaagcagctgaccaaccacagcccccccgcccccagacacggccccgtgcccgccgaggcccccgagctgaaggcccaggagcccctgagaaagcagagcagactggaccccagcagcgccgtgctgatgagaaaggccaagagagagaaggtggagaccatgctgagaaacgacagcctgagcagcgaccagagcgagagcgtgagacccagcccccccaagccccacagaagcaagagaggcggcaagaagagacagatgagcgtgagcagcagcgaggaggagggcgtgagcacccccgagtacaccagctgcgaggacgtggagctggagagcgagagcgtgagcgagaagggcgacctggactactactggctggaccccgccacctggcacagcagagagaccagccccatcagcagccaccccgtgacctggcagcccagcaaggagggcgacagactgatcggcagagtgatcctgaacaagagaaccaccatgcccaaggacagcggcgccctgctgggcctgaaggtggtgggcggcaagatgaccgacctgggcagactgggcgccttcatcaccaaggtgaagaagggcagcctggccgacgtggtgggccacctgagagccggcgacgaggtgctggagtggaacggcaagcccctgcccggcgccaccaacgaggaggtgtacaacatcatcctggagagcaagagcgagccccaggtggagatcatcgtgagcagacccatcggcgacatccccagaatccccgagagcagccacccccccctggagagcagcagcagcagcttcgagagccagaagatggagagacccagcatcagcgtgatcagccccaccagccccggcgccctgaaggacgccccccaggtgctgcccggccagctgagcgtgaagctgtggtacgacaaggtgggccaccagctgatcgtgaacgtgctgcaggccaccgacctgcccgccagagtggacggcagacccagaaacccctacgtgaagatgtacttcctgcccgacagaagcgacaagagcaagagaagaaccaagaccgtgaagaagatcctggagcccaagtggaaccagaccttcgtgtacagccacgtgcacagaagagacttcagagagagaatgctggagatcaccgtgtgggaccagcccagagtgcaggaggaggagagcgagttcctgggcgagatcctgatcgagctggagaccgccctgctggacgacgagccccactggtacaagctgcagacccacgacgagagcagcctgcccctgccccagcccagccccttcatgcccagaagacacatccacggcgagagcagcagcaagaagctgcagagaagccagagaatcagcgacagcgacatcagcgactacgaggtggacgacggcatcggcgtggtgccccccgtgggctacagaagcagcgccagagagagcaagagcaccaccctgaccgtgcccgagcagcagagaaccacccaccacagaagcagaagcgtgagcccccacagaggcaacgaccagggcaagcccagaagcagactgcccaacgtgcccctgcagagaagcctggacgagatccaccccaccagaagaagcagaagccccaccagacaccacgacgccagcagaagccccgtggaccacagaaccagagacgtggacagccagtacctgagcgagcaggacagcgagctgctgatgctgcccagagccaagagaggcagaagcgccgagtgcctgcacaccaccagcgagctgcagcccttcctggacagagccagaagcgccagcaccaactgcctgagacccgacaccagcctgcacagccccgagagagagagaatgcacagacagagaagccccacccagagcccccccgccgacaccagcttcagcagcagaagaggcagacagctgccccaggtgcccgtgagaagcggcagcatcgagcaggccagcctggtggtggaggagagaaccagacagatgaagatgaaggtgcacagattcaagcagaccaccggcagcggcagcagccaggagctggacagagagcagtacagcaagtacaacatccacaaggaccagtacagaagctgcgacaacgtgagcgccaagagcagcgacagcgacgtgagcgacgtgagcgccatcagcagaaccagcagcgccagcagactgagcagcaccagcttcatgagcgagcagagcgagagacccagaggcagaatcagcagcttcacccccaagatgcagggcagaagaatgggcaccagcggcagaagcatcatgaagagcaccagcgtgagcggcgagatgtacaccctggagcacaacgacggcagccagagcgacaccgccgtgggcaccgtgggcgccggcggcaagaagagaagaagcagcctgagcgccaaggtggtggccatcgtgagcagaagaagcagaagcaccagccagctgagccagaccgagagcggccacaagaagctgaagagcaccatccagagaagcaccgagaccggcatggccgccgagatgagaaagatggtgagacagcccagcagagagagcaccgacggcagcatcaacagctacagcagcgagggcaacctgatcttccccggcgtgagactgggcgccgacagccagttcagcgacttcctggacggcctgggccccgcccagctggtgggcagacagaccctggccacccccgccatggccccctacgtgaaggtgtacctgctggagaacggcgcctgcatcgccaagaagaagaccagaatcgccagaaagaccctggaccccctgtaccagcagagcctggtgttcgacgagagcccccagggcaaggtgctgcaggtgatcgtgtggggcgactacggcagaatggaccacaagtgcttcatgggcgtggcccagatcctgctggaggagctggacctgagcagcatggtgatcggctggtacaagctgttcccccccagcagcctggtggaccccaccctgacccccctgaccagaagagccagccagagcagcctggagagcagcaccggccccccctgcatcagaagctag

SEQ ID NO: 268561 - protein, 444 aa, Artificial Sequence
  derived and/or modified sequence
MKSENERLQEELNKNLFDNLIEFLQKSHSGFQKNSRDLGGQIKLREIPTAALVLGVNVTDHDLTFGSLTEALQNNVTPYVVSLQAKDCPDMKHFLQKLISQLMDCCVDIKSKEEESVHVTQRKTHYSMDSLSSWYMTVTQKTDPKMLSKKRTTSSQWQSPPVVVILKDMESFATKVLQDFIIISSQHLHEFPLILIFGIATSPIIIHRLLPHAVSSLLCIELFQSLSCKEHLTTVLDKLLLTTQFPFKINEKVLQVLTNIFLYHDFSVQNFIKGLQLSLLEHFYSQPLSVLCCNLPEAKRRINFLSNNQCENIRRLPSFRRYVEKQASEKQVALLTNERYLKEETQLLLENLHVYHMNYFLVLRCLHKFTSSLPKYPLGRQIRELYCTCLEKNIWDSEEYASVLQLLRLGLAFLDIQLFGAQSGQELLLPLSWEANPSHAANLG

SEQ ID NO: 268562 - protein, 1213 aa, Artificial Sequence
  derived and/or modified sequence
MRSRNQGGESASDGHISCPKPSIIGNAGEKSLSEDAKKKKKSNRKEDDVMASGTVKRHLKTSGECERKTKKSLELSKEDLIQLLSIMEGELQAREDVIHMLKTEKTKPEVLEAHYGSAEPEKVLRVLHRDAILAQEKSIGEDVYEKPISELDRLEEKQKETYRRMLEQLLLAEKCHRRTVYELENEKHKHTDYMNKSDDFTNLLEQERERLKKLLEQEKAYQARKEKENAKRLNKLRDELVKLKSFALMLVDERQMHIEQLGLQSQKVQDLTQKLREEEEKLKAITSKSKEDRQKLLKLEVDFEHKASRFSQEHEEMNAKLANQESHNRQLRLKLVGLTQRIEELEETNKNLQKAEEELQELRDKIAKGECGNSSLMAEVENLRKRVLEMEGKDEEITKTESQCRELRKKLQEEEHHSKELRLEVEKLQKRMSELEKLEEAFSKSKSECTQLHLNLEKEKNLTKDLLNELEVVKSRVKELECSESRLEKAELSLKDDLTKLKSFTVMLVDERKNMMEKIKQEERKVDGLNKNFKVEQGKVMDVTEKLIEESKKLLKLKSEMEEKVYNLTRERDELIGKLKSEEEKSSELSCSVDLLKKRLDGIEEVEREITRGRSRKGSELTCPEDNKIKELTLEIERLKKRLQQLEVVEGDLMKTEDEYDQLEQKFRTEQDKANFLSQQLEEIKHQIAKNKAIEKGEVVSQEAELRHRFRLEEAKSRDLKAEVQALKEKIHELMNKEDQLSQLQVDYSVLQQRFMEEENKNKNMGQEVLNLTKELELSKRYSRALRPSVNGRRMVDVPVTSTGVQTDAVSGEAAEEETPAVFIRKSFQEENHIMSNLRQVGLKKPVERSSVLDRYPPAANELTMRKSWIPWMRKRENGPSITQEKGPRTNSSPGHPGEVVLSPKQGQPLHIRVTPDHENSTATLEITSPTSEEFFSSTTVIPTLGNQKPRITIIPSPNVMPQKQKSGDTTLGPERAMSPVTITTFSREKTPESGRGAFADRPTSPIQIMTVSTSAAPAEIAVSPESQEMPMGRTILKVTPEKQTVPTPVRKYNSNANIITTEDNKIHIHLGSQFKRSPGTSGEGVSPVITVRPVNVTAEKEVSTGTVLRSPRNHLSSRPGASKVTSTITITPVTTSSARGTQSVSGQDGSSQRPTPTRIPMSKGMKAGKPVVAAPGAGNLTKFEPRAETQSMKIELKKSAASSTTSLGGGKG

SEQ ID NO: 268563 - DNA, 3642 bp, Artificial Sequence
  derived and/or modified sequence
atgagaagcagaaaccagggcggcgagagcgccagcgacggccacatcagctgccccaagcccagcatcatcggcaacgccggcgagaagagcctgagcgaggacgccaagaagaagaagaagagcaacagaaaggaggacgacgtgatggccagcggcaccgtgaagagacacctgaagaccagcggcgagtgcgagagaaagaccaagaagagcctggagctgagcaaggaggacctgatccagctgctgagcatcatggagggcgagctgcaggccagagaggacgtgatccacatgctgaagaccgagaagaccaagcccgaggtgctggaggcccactacggcagcgccgagcccgagaaggtgctgagagtgctgcacagagacgccatcctggcccaggagaagagcatcggcgaggacgtgtacgagaagcccatcagcgagctggacagactggaggagaagcagaaggagacctacagaagaatgctggagcagctgctgctggccgagaagtgccacagaagaaccgtgtacgagctggagaacgagaagcacaagcacaccgactacatgaacaagagcgacgacttcaccaacctgctggagcaggagagagagagactgaagaagctgctggagcaggagaaggcctaccaggccagaaaggagaaggagaacgccaagagactgaacaagctgagagacgagctggtgaagctgaagagcttcgccctgatgctggtggacgagagacagatgcacatcgagcagctgggcctgcagagccagaaggtgcaggacctgacccagaagctgagagaggaggaggagaagctgaaggccatcaccagcaagagcaaggaggacagacagaagctgctgaagctggaggtggacttcgagcacaaggccagcagattcagccaggagcacgaggagatgaacgccaagctggccaaccaggagagccacaacagacagctgagactgaagctggtgggcctgacccagagaatcgaggagctggaggagaccaacaagaacctgcagaaggccgaggaggagctgcaggagctgagagacaagatcgccaagggcgagtgcggcaacagcagcctgatggccgaggtggagaacctgagaaagagagtgctggagatggagggcaaggacgaggagatcaccaagaccgagagccagtgcagagagctgagaaagaagctgcaggaggaggagcaccacagcaaggagctgagactggaggtggagaagctgcagaagagaatgagcgagctggagaagctggaggaggccttcagcaagagcaagagcgagtgcacccagctgcacctgaacctggagaaggagaagaacctgaccaaggacctgctgaacgagctggaggtggtgaagagcagagtgaaggagctggagtgcagcgagagcagactggagaaggccgagctgagcctgaaggacgacctgaccaagctgaagagcttcaccgtgatgctggtggacgagagaaagaacatgatggagaagatcaagcaggaggagagaaaggtggacggcctgaacaagaacttcaaggtggagcagggcaaggtgatggacgtgaccgagaagctgatcgaggagagcaagaagctgctgaagctgaagagcgagatggaggagaaggtgtacaacctgaccagagagagagacgagctgatcggcaagctgaagagcgaggaggagaagagcagcgagctgagctgcagcgtggacctgctgaagaagagactggacggcatcgaggaggtggagagagagatcaccagaggcagaagcagaaagggcagcgagctgacctgccccgaggacaacaagatcaaggagctgaccctggagatcgagagactgaagaagagactgcagcagctggaggtggtggagggcgacctgatgaagaccgaggacgagtacgaccagctggagcagaagttcagaaccgagcaggacaaggccaacttcctgagccagcagctggaggagatcaagcaccagatcgccaagaacaaggccatcgagaagggcgaggtggtgagccaggaggccgagctgagacacagattcagactggaggaggccaagagcagagacctgaaggccgaggtgcaggccctgaaggagaagatccacgagctgatgaacaaggaggaccagctgagccagctgcaggtggactacagcgtgctgcagcagagattcatggaggaggagaacaagaacaagaacatgggccaggaggtgctgaacctgaccaaggagctggagctgagcaagagatacagcagagccctgagacccagcgtgaacggcagaagaatggtggacgtgcccgtgaccagcaccggcgtgcagaccgacgccgtgagcggcgaggccgccgaggaggagacccccgccgtgttcatcagaaagagcttccaggaggagaaccacatcatgagcaacctgagacaggtgggcctgaagaagcccgtggagagaagcagcgtgctggacagatacccccccgccgccaacgagctgaccatgagaaagagctggatcccctggatgagaaagagagagaacggccccagcatcacccaggagaagggccccagaaccaacagcagccccggccaccccggcgaggtggtgctgagccccaagcagggccagcccctgcacatcagagtgacccccgaccacgagaacagcaccgccaccctggagatcaccagccccaccagcgaggagttcttcagcagcaccaccgtgatccccaccctgggcaaccagaagcccagaatcaccatcatccccagccccaacgtgatgccccagaagcagaagagcggcgacaccaccctgggccccgagagagccatgagccccgtgaccatcaccaccttcagcagagagaagacccccgagagcggcagaggcgccttcgccgacagacccaccagccccatccagatcatgaccgtgagcaccagcgccgcccccgccgagatcgccgtgagccccgagagccaggagatgcccatgggcagaaccatcctgaaggtgacccccgagaagcagaccgtgcccacccccgtgagaaagtacaacagcaacgccaacatcatcaccaccgaggacaacaagatccacatccacctgggcagccagttcaagagaagccccggcaccagcggcgagggcgtgagccccgtgatcaccgtgagacccgtgaacgtgaccgccgagaaggaggtgagcaccggcaccgtgctgagaagccccagaaaccacctgagcagcagacccggcgccagcaaggtgaccagcaccatcaccatcacccccgtgaccaccagcagcgccagaggcacccagagcgtgagcggccaggacggcagcagccagagacccacccccaccagaatccccatgagcaagggcatgaaggccggcaagcccgtggtggccgcccccggcgccggcaacctgaccaagttcgagcccagagccgagacccagagcatgaagatcgagctgaagaagagcgccgccagcagcaccaccagcctgggcggcggcaagggctag

SEQ ID NO: 268564 - DNA, 3345 bp, Artificial Sequence
  derived and/or modified sequence
atgctgaagaccgagaagaccaagcccgaggtgctggaggcccactacggcagcgccgagcccgagaaggtgctgagagtgctgcacagagacgccatcctggcccaggagaagagcatcggcgaggacgtgtacgagaagcccatcagcgagctggacagactggaggagaagcagaaggagacctacagaagaatgctggagcagctgctgctggccgagaagtgccacagaagaaccgtgtacgagctggagaacgagaagcacaagcacaccgactacatgaacaagagcgacgacttcaccaacctgctggagcaggagagagagagactgaagaagctgctggagcaggagaaggcctaccaggccagaaaggagaaggagaacgccaagagactgaacaagctgagagacgagctggtgaagctgaagagcttcgccctgatgctggtggacgagagacagatgcacatcgagcagctgggcctgcagagccagaaggtgcaggacctgacccagaagctgagagaggaggaggagaagctgaaggccatcaccagcaagagcaaggaggacagacagaagctgctgaagctggaggtggacttcgagcacaaggccagcagattcagccaggagcacgaggagatgaacgccaagctggccaaccaggagagccacaacagacagctgagactgaagctggtgggcctgacccagagaatcgaggagctggaggagaccaacaagaacctgcagaaggccgaggaggagctgcaggagctgagagacaagatcgccaagggcgagtgcggcaacagcagcctgatggccgaggtggagaacctgagaaagagagtgctggagatggagggcaaggacgaggagatcaccaagaccgagagccagtgcagagagctgagaaagaagctgcaggaggaggagcaccacagcaaggagctgagactggaggtggagaagctgcagaagagaatgagcgagctggagaagctggaggaggccttcagcaagagcaagagcgagtgcacccagctgcacctgaacctggagaaggagaagaacctgaccaaggacctgctgaacgagctggaggtggtgaagagcagagtgaaggagctggagtgcagcgagagcagactggagaaggccgagctgagcctgaaggacgacctgaccaagctgaagagcttcaccgtgatgctggtggacgagagaaagaacatgatggagaagatcaagcaggaggagagaaaggtggacggcctgaacaagaacttcaaggtggagcagggcaaggtgatggacgtgaccgagaagctgatcgaggagagcaagaagctgctgaagctgaagagcgagatggaggagaaggtgtacaacctgaccagagagagagacgagctgatcggcaagctgaagagcgaggaggagaagagcagcgagctgagctgcagcgtggacctgctgaagaagagactggacggcatcgaggaggtggagagagagatcaccagaggcagaagcagaaagggcagcgagctgacctgccccgaggacaacaagatcaaggagctgaccctggagatcgagagactgaagaagagactgcagcagctggaggtggtggagggcgacctgatgaagaccgaggacgagtacgaccagctggagcagaagttcagaaccgagcaggacaaggccaacttcctgagccagcagctggaggagatcaagcaccagatcgccaagaacaaggccatcgagaagggcgaggtggtgagccaggaggccgagctgagacacagattcagactggaggaggccaagagcagagacctgaaggccgaggtgcaggccctgaaggagaagatccacgagctgatgaacaaggaggaccagctgagccagctgcaggtggactacagcgtgctgcagcagagattcatggaggaggagaacaagaacaagaacatgggccaggaggtgctgaacctgaccaaggagctggagctgagcaagagatacagcagagccctgagacccagcgtgaacggcagaagaatggtggacgtgcccgtgaccagcaccggcgtgcagaccgacgccgtgagcggcgaggccgccgaggaggagacccccgccgtgttcatcagaaagagcttccaggaggagaaccacatcatgagcaacctgagacaggtgggcctgaagaagcccgtggagagaagcagcgtgctggacagatacccccccgccgccaacgagctgaccatgagaaagagctggatcccctggatgagaaagagagagaacggccccagcatcacccaggagaagggccccagaaccaacagcagccccggccaccccggcgaggtggtgctgagccccaagcagggccagcccctgcacatcagagtgacccccgaccacgagaacagcaccgccaccctggagatcaccagccccaccagcgaggagttcttcagcagcaccaccgtgatccccaccctgggcaaccagaagcccagaatcaccatcatccccagccccaacgtgatgccccagaagcagaagagcggcgacaccaccctgggccccgagagagccatgagccccgtgaccatcaccaccttcagcagagagaagacccccgagagcggcagaggcgccttcgccgacagacccaccagccccatccagatcatgaccgtgagcaccagcgccgcccccgccgagatcgccgtgagccccgagagccaggagatgcccatgggcagaaccatcctgaaggtgacccccgagaagcagaccgtgcccacccccgtgagaaagtacaacagcaacgccaacatcatcaccaccgaggacaacaagatccacatccacctgggcagccagttcaagagaagccccggcaccagcggcgagggcgtgagccccgtgatcaccgtgagacccgtgaacgtgaccgccgagaaggaggtgagcaccggcaccgtgctgagaagccccagaaaccacctgagcagcagacccggcgccagcaaggtgaccagcaccatcaccatcacccccgtgaccaccagcagcgccagaggcacccagagcgtgagcggccaggacggcagcagccagagacccacccccaccagaatccccatgagcaagggcatgaaggccggcaagcccgtggtggccgcccccggcgccggcaacctgaccaagttcgagcccagagccgagacccagagcatgaagatcgagctgaagaagagcgccgccagcagcaccaccagcctgggcggcggcaagggctag

SEQ ID NO: 268565 - DNA, 3642 bp, Artificial Sequence
  derived and/or modified sequence
atgaggagccgcaaccagggcggcgaatcggcaagcgatggccacatcagctgcccaaagccctcaatcattgggaacgcgggagaaaagtccctgagtgaagacgctaagaaaaagaagaagagtaaccgaaaagaggatgatgtgatggcctctggcacggtcaaacgtcaccttaagacctctggtgaatgtgaaagaaaaactaagaaaagtctggagcttagcaaggaggatctgatccagctgctctcgattatggagggggaacttcaagcgcgcgaggacgtgatccacatgctgaaaaccgagaaaactaaacccgaggtgctggaagcccactatggaagtgccgagcccgagaaagttttgcgcgtccttcacagagacgccattttagcacaggaaaaaagtataggagaagatgtatacgaaaagccaatctccgagctcgaccgtctggaggaaaaacagaaagaaacctacaggcggatgctcgaacaacttcttctcgccgagaaatgccaccggaggaccgtatacgaattggagaatgaaaagcataagcacacagactacatgaataagtctgacgactttactaatctcctggaacaggaacgcgagagactgaagaagctactggaacaggagaaggcataccaagctcggaaggaaaaagaaaacgctaaaagactaaataaactgagagatgaactggtaaagctcaaatcctttgctcttatgctcgtggacgagcgccagatgcacatcgagcagctcgggctccaaagccaaaaggtacaggaccttacacagaaactgagagaggaagaggagaagctgaaggctattactagtaagtcaaaggaagatcggcaaaaattactgaagcttgaagttgattttgaacataaggcctctagatttagccaagagcacgaggagatgaatgctaaactggcgaaccaggagtcacacaaccggcagctgcggttgaagttagtgggcttaactcaaagaatagaggagctggaggagaccaacaagaatctgcagaaggccgaggaggaattacaggagctcagggacaaaatagctaagggcgaatgtggtaactcctcgctgatggccgaagtcgagaatctgagaaagagagtacttgagatggaggggaaagatgaggagatcactaagactgagtcccagtgcagagagcttagaaaaaaattacaggaggaggagcatcactcgaaggagctgcggcttgaggttgagaaactgcagaaaaggatgagtgagcttgagaagttggaggaggccttctccaagtccaagtcggagtgcactcaactgcacctgaacctggagaaagaaaagaatttaacgaaggatttgttgaacgagctagaggttgtgaagagtagagtgaaggagctggagtgcagcgagagccgactcgaaaaggcggagctgagcttaaaggatgacctgacaaagcttaaatcctttacagttatgctggttgatgagaggaaaaacatgatggaaaaaatcaaacaagaagagaggaaagtggacggccttaacaagaacttcaaagtggagcagggtaaagtgatggatgtcactgagaaacttatcgaggaatccaaaaaactactaaaacttaagtccgaaatggaagagaaggtgtacaacctcaccagagagagggacgaactgatcggcaaacttaagagcgaagaagagaagagttccgaattgtcctgctctgttgatctgctgaaaaagcgtttggacggaatcgaggaagttgagagggagatcacgcgtggacgaagccgaaagggcagcgaattgacatgtcctgaggacaacaaaattaaggaattaacacttgagattgagcggctcaagaaacgcctccaacagctggaggttgttgaaggagatctgatgaaaactgaagacgagtacgaccagctggagcaaaagttccgcacagagcaagacaaagctaacttcttgagtcaacagctggaagagattaagcaccaaatcgccaagaataaagccatcgagaagggtgaagtcgtgtcccaggaggcagaattaaggcaccgtttccgactcgaggaggctaagagccgcgacctgaaggctgaagtacaggctttgaaagaaaaaatccacgagctgatgaataaggaggatcagctgagtcagctgcaagtggattatagtgtgcttcagcagcgttttatggaagaagaaaataagaataaaaatatgggacaggaggtcctaaacctcaccaaggagttggagctctcaaagcgctacagccgagccctgcggccttccgtcaatggacgccggatggtggacgttccagtcacatccactggagtgcagacagacgcggtgtctggcgaggcggccgaagaggaaactccagcagtattcattagaaaaagtttccaagaagaaaaccatatcatgagtaacttaagacaggtgggtctgaagaagcccgtggaaaggagctccgtactggatcgatacccaccagcggccaatgagcttaccatgcggaaatcctggattccctggatgcgtaaaagggaaaatgggccctctattacccaagagaagggccctagaacgaactccagccccggccatcctggagaggtagtcctgtcgcccaaacagggccagccactgcatatccgggtgacacctgaccacgaaaattcaactgctacactcgagatcacctcccctacaagtgaggagttcttttcgtcaacaactgttatcccaacactggggaaccaaaagcctagaattacaatcatccccagcccaaacgtgatgccacaaaagcagaagagcggggacacgacactaggcccagagagagcaatgtccccagtgactattactactttttcaagggagaaaacacctgaatccggacggggtgccttcgcggacaggcccacgagccctattcagatcatgaccgtgagcaccagcgcagcccctgccgagattgctgtgagccctgagtctcaggagatgccgatgggtcggacgattctaaaagtgactcccgaaaaacagaccgtccccactcccgtgaggaaatataattccaacgctaacattatcaccaccgaagacaataagatacacatccacctcggctcccagtttaagcgatccccaggcacctcaggagagggcgttagtcctgtcatcacggtgcggcccgtcaacgtcacagctgagaaagaggtcagtacaggcaccgtgttaaggtcaccacggaaccacctctcctcccggccgggcgcctccaaggtcacatctaccatcaccattactcccgttacgaccagcagtgcccgtggcacacagagcgtgtcagggcaggatggctcctcacaacgccccacaccgactcgaattccaatgtcaaagggcatgaaagcaggcaaacccgtcgtggccgcccccggggcaggcaatttgactaagtttgaacctagggccgagacacaaagcatgaaaatagaactcaaaaagtctgccgccagcagcaccacgtccctgggggggggcaagggctag

SEQ ID NO: 268566 - DNA, 3345 bp, Artificial Sequence
  derived and/or modified sequence
atgctgaagaccgagaaaacaaagccggaggtgctggaagcgcattatgggtctgcagagcctgagaaggtgctgcgggtgctccacagagacgccattctggcgcaagagaaaagtatcggagaagatgtgtacgagaaaccaatatcagagctggataggctggaggagaagcagaaagagacttacaggcgtatgctggaacagctgctgctcgcagagaagtgtcaccgtcggacagtttacgagctagagaatgagaaacacaaacatactgactacatgaataagtcagatgatttcacaaatctgttggaacaggagcgggaacgacttaagaagctcttggaacaggagaaggcataccaagcccgaaaagagaaagaaaatgccaaaaggttaaacaagctgcgggatgaactcgtgaagctgaaatcattcgccctaatgcttgtcgatgagcgacagatgcacatcgagcagttaggactgcagtctcagaaagtgcaggatttgacccagaaactgagggaggaagaggaaaaactgaaggccattacctcaaaatccaaggaggaccggcagaaattgctgaaacttgaagtagacttcgagcataaagcgagccgattttcacaggagcacgaagaaatgaatgctaagctcgccaatcaggagagccacaatcgtcaactgagactaaaactggtcgggctgacgcagaggattgaggagctagaggagacaaacaaaaacctgcagaaggctgaagaggaactgcaggagttgagggacaaaatcgcaaagggtgaatgtggaaattcatctttgatggccgaggtggagaatctcaggaagcgtgtacttgagatggagggaaaagacgaggaaataacaaaaaccgaaagccagtgccgagagcttaggaagaagctgcaggaggaagagcaccattccaaggagctgcgtcttgaggtcgaaaaacttcagaagcgaatgagcgaacttgaaaaacttgaggaggcattctcaaaatctaagtctgagtgcacgcagctgcatttgaacctcgagaaggagaagaatctgaccaaagacctgttaaatgagctggaagtggtgaagagtcgagtcaaggaactggagtgttctgagtcccggctggaaaaagctgagctttctctgaaggacgacttaaccaaactcaagtcctttactgtgatgctggtagatgaaaggaaaaacatgatggagaagatcaaacaggaagagcgcaaagtcgacggtctgaataagaattttaaggtcgagcagggtaaggttatggatgtcaccgaaaaattaattgaggaatcgaagaagctgctcaagctgaagagtgaaatggaggagaaggtgtataacctgacccgggaaagggatgagctgattggtaaactcaaatccgaagaggaaaaatcaagtgagctgagctgcagtgtcgatctgttgaagaaacggctcgatggaattgaagaggtggaacgtgaaatcacaagaggcaggtctcgcaagggatcggagctcacctgccctgaggacaacaagattaaggaattgaccttagagatagaacggctcaaaaaaaggctgcagcaactcgaggtggtcgaaggtgaccttatgaagacggaagatgagtacgaccagctggagcagaagttcagaacagaacaagacaaggctaattttctcagccagcagctcgaagagattaagcatcagattgctaagaacaaggctattgaaaagggcgaggtggtgagccaagaagccgaactccgacacagatttcggcttgaggaagccaagtcccgagatctaaaagcggaggttcaggccctcaaagagaaaatccatgaactgatgaacaaggaagatcagctgtcgcagctgcaagtggactactcagtcttacagcagcgatttatggaggaggagaataagaacaagaatatgggtcaggaggttctgaaccttactaaagagctggagctgtctaagcgatatagtcgcgcactgcggccctcagtcaatgggagacgcatggtggacgtccccgtgacctcgacaggcgtccagacagacgccgtgagcggtgaggcagctgaagaggagactcccgcagtgtttatcaggaagagtttccaggaggagaaccatattatgtcaaatctcagacaggtaggccttaagaagcctgtcgagcgatcatctgtgcttgacagataccctcctgccgccaacgagctgactatgcgaaaaagttggataccatggatgcggaagagggagaatgggccttcaatcactcaggaaaagggtccccggactaactcctcgcccggccatccaggcgaagtagtcctcagcccaaaacaggggcagcccttacacatacgggtcacccctgaccatgaaaacagcaccgcaaccctcgaaatcacctccccgacatctgaggagtttttttcaagcaccactgtgatcccaacattaggcaaccagaaacccaggatcactattattccaagcccgaatgtgatgcctcagaagcagaaatctggagatacaaccctcgggccggaaagggctatgtcgcccgtgacaataaccacattcagtagggagaagacgcctgagagcgggcggggagccttcgcagaccggcctacttcccctatccagatcatgaccgtctctacatccgccgcccctgccgaaatcgcggtgtcaccggagtcccaggagatgcccatggggcggacaatcctgaaggttacccctgaaaaacagactgtccctacccctgtgcgcaaatacaatagcaacgcaaacatcatcacaaccgaagataataagatccatatccacctgggcagccagttcaaacgctctccaggcacctccggcgagggagttagtcccgtgatcactgtgagacctgtcaacgtcaccgccgagaaagaggtctcaacaggaaccgtccttagatccccaaggaaccaccttagctctagaccaggcgcgagcaaggtgacctcaacaattacgatcactccagttaccacgagttccgctcgcggcacacagtcagtgagtggccaggacggctcttcccagaggccaactcccaccaggatccccatgagtaaggggatgaaagccgggaaaccggtggtcgctgcccccggagccggaaaccttactaagttcgagcctcgtgctgagacccaatctatgaaaattgagctaaagaagagtgccgcttcatcgaccaccagtctggggggtggtaagggctag

SEQ ID NO: 268567 - DNA, 4051 bp, Artificial Sequence
  derived and/or modified sequence
attcaataagctctctgttgattttttgagcccagtatgcgatttacattgtcagtcgtctgatcttgctgcactttctattacaggccagagaagatgtgatccacatgctgaagacagagaaaaccaagcctgaggttctggaggctcattacgggtctgcggagccagagaaagtgctgcgggtcctgcaccgagatgccattcttgcccaggagaaatccataggagaagatgtctatgagaaaccgatttcagagctggacagacttgaggaaaaacagaaagaaacctaccggcgcatgctagagcagctgttgctggccgagaagtgtcataggcgcaccgtatacgagttagagaacgagaagcataaacacactgactacatgaacaagagcgacgacttcaccaacctgctggagcaggagcgggagaggttaaaaaagctccttgaacaagaaaaggcttatcaagcccgcaaagaaaaggaaaatgctaaacgactcaataaactaagagatgagcttgttaaactcaaatcctttgcactcatgctggtggatgaaagacaaatgcacattgaacaacttggcctgcaaagccagaaagtacaggatcttactcagaagctgagggaagaagaagagaagctcaaagccattacttccaaatccaaagaagacagacagaaattgctcaagttagaagtggactttgaacacaaggcttcgaggttttctcaagagcatgaagagatgaacgctaaactggctaatcaagagtctcacaataggcaacttagactcaagctggttggcttaacccaaagaatcgaggagctagaagagaccaacaaaaatctgcagaaggcagaggaagaacttcaagaattaagagataaaattgccaaaggagaatgtggaaactctagcctcatggcagaagtggaaaatcttcgaaagcgtgtgcttgaaatggaaggtaaagatgaggagatcactaaaactgaatcccagtgtagggaattgaggaagaagctgcaagaggaagaacaccatagtaaggagctcagacttgaagttgagaagctacagaagagaatgtctgaactagagaaattggaagaagcatttagcaagagtaaatctgagtgcacccagctacatttaaatctggagaaagaaaagaacttaaccaaagacctgctaaatgaattggaggtggtcaagagtcgagttaaagaattggaatgttctgaaagtagattggaaaaggctgaattaagcctaaaagatgatcttaccaagttgaagtcatttaccgtgatgctggttgatgaaaggaaaaatatgatggaaaaaataaaacaagaagagagaaaagtggatggactcaataaaaattttaaggtggaacaaggaaaagttatggatgtaactgaaaaactaattgaagaaagtaagaaacttttaaaactaaaatctgaaatggaggaaaaagtatacaacttgacaagagaaagagatgagttgataggcaaattgaaaagtgaagaagaaaaatcctctgaattaagctgcagtgttgacttactaaagaagagacttgatggtatagaggaagtggaaagagaaataacaagaggaaggtcacgaaaagggtctgagctcacctgcccggaagataataagattaaggaactaacacttgaaattgagagactgaagaaacgtctccaacaattggaagtggtcgaaggggatttgatgaagacagaagatgagtatgatcagctggaacagaaatttagaactgagcaggataaggctaacttcctctctcaacaactagaggagatcaagcaccaaattgccaagaataaagcaatagagaagggtgaggttgtgagccaggaagctgaactgagacacagatttcggttggaagaagctaaaagtcgagacttaaaagccgaagtacaagctcttaaagagaagattcacgaattaatgaacaaagaagatcagctttctcagctccaggtagattattctgtacttcaacaaagatttatggaagaagaaaataagaacaaaaacatggggcaggaggttctcaatctgaccaaagagttggagctttccaagcgctacagcagagctcttaggcccagtgtgaatggaagaagaatggtggatgttcctgtgacgtcaactggagtccaaactgatgcagtcagcggtgaagcagcagaggaagaaacgccagctgtattcatacggaaatccttccaggaagaaaatcatattatgagtaatcttcggcaggtgggattgaagaaacccgtggaaagatcttctgttctagacaggtatcctccagcagcaaatgagctcactatgagaaagtcttggattccatggatgagaaagagggaaaacggcccctccatcactcaggagaaagggccccgaacaaattccagtccagggcacccaggagaggtagtcctttcaccaaagcagggccagcccctgcatattcgagtgacaccagaccacgagaacagcactgcgactttggagataacaagcccgacatctgaagaatttttttctagtaccactgtcattcctaccttagggaatcagaaaccaagaataaccattattccatcaccaaacgttatgcctcaaaaacaaaaaagtggagatactactcttggcccagaacgagccatgtccccagtcacaattactacattttccagagagaagactccagaaagtggaagaggcgcatttgcagacaggcccacatcccctattcagataatgacggtgtctacatcagcagcaccagctgagattgcagtttctcccgaatcccaggaaatgcccatgggacggacaatcctcaaagtcaccccagaaaaacagactgttccaactccagtacggaaatacaactccaatgccaatatcataaccacagaggacaataaaattcacattcacttagggtctcagtttaaacggtcccctgggacttcaggtgaaggagtcagtccagttattactgtccgaccagtaaacgtgacagccgaaaaggaggtttccaccggcactgtccttcgctctcccaggaatcacctctcctcacggcctggtgcaagcaaagtgacgagcactatcaccataacaccggtcacaacgtcatctgctcgaggaacccagtcagtgtcaggacaagacgggtcatcccagcggcctacacccacccgcattcctatgtcaaaaggtatgaaagcaggaaagccagtagtggcagccccaggagcaggaaatctgaccaaattcgagcctcgagctgagactcagtctatgaaaatagagctgaagaaatctgcagccagcagcaccacctctctcggaggggggaagggctgagggcagtggctaagggggtatgttgtgcagatgctactgctgccgtgaaagtgaaccttcatctgtttgtgccagttctttacatgtactaatttaagttttaaatattgtgtttataaaataaccaactaataaccatttgtctttcccattttgtgcatttgttttgatgctggggaacaaaattagcaaaactattgcttgctgcctagaagccagggcgtggtttctagttccagttttgcttctagcaagtggacccatcaatagacccatctgagcctgtttcctcatcagttagatgtggggactcaatcacacgctcttcaagtccggctcccatatttcctaattgcaagccaaatttaatgtaccttgttccacaataattttttattaaaaaaatcctattacaaaataagacatactttaactattgtcatttgcctctttcacatcatgaatttgctttatgtgctggaaaaaacatcacatagctatcacagggcctggacctctaaaattttgcaaaaacaaaaggttctaagatgatttcaggaaataatgtgaacatgtaataaaatggaaatgaaatatgg

SEQ ID NO: 268568 - DNA, 3642 bp, Artificial Sequence
  derived and/or modified sequence
atgaggagcaggaaccagggcggggagagcgccagtgatggccacatcagctgccccaagcccagcatcattggaaatgctggggagaagagcctgtctgaagatgccaagaagaagaagaagagcaacaggaaggaggatgatgtgatggccagcggcaccgtgaagaggcacctgaagaccagcggggagtgtgagaggaagaccaagaagagcctggagctgagcaaggaggacctgatccagctgctgagcatcatggagggggagctgcaggccagagaagatgtgatccacatgctgaagacagagaagaccaagccagaggtgctggaggcccactacggcagcgctgagcctgagaaggtgctgcgggtgctgcacagagatgccatcctggcccaggagaagagcattggagaagatgtgtatgagaagcccatcagcgagctggaccggctggaggagaagcagaaggagacctacagaaggatgctggagcagctgctgctggccgagaagtgccacagaagaacagtgtatgagctggagaatgagaagcacaagcacacagactacatgaacaagagtgatgacttcaccaacctgctggagcaggagcgggagcggctgaagaagctgctggagcaggagaaggcctaccaggccaggaaggagaaggaaaatgccaagaggctgaacaagctgagagatgagctggtgaagctgaagagctttgccctgatgctggtggatgagcggcagatgcacatcgagcagctgggcctgcagagccagaaggtgcaggacctgacccagaagctgcgggaggaggaggagaagctgaaggccatcaccagcaagagcaaagaagatcggcagaagctgctgaagctggaggtggactttgagcacaaggccagccgcttcagccaggagcacgaggagatgaatgccaagctggccaaccaggagagccacaaccggcagctgcggctgaagctggtgggcctgacccagagaattgaggagctggaggagaccaacaagaacctgcagaaggccgaggaggagctgcaggagctgcgggacaagatcgccaagggggagtgtggcaacagcagcctgatggccgaggtggagaacctgaggaagagggtgctggagatggagggcaaggatgaggagatcaccaagacagagagccagtgccgggagctgaggaagaagctgcaggaggaggagcaccacagcaaggagctgcggctggaggtggagaagctgcagaagaggatgtctgagctggagaagctggaggaggccttcagcaagagcaagtctgagtgcacccagctgcacctgaacctggagaaggagaagaacctgaccaaggacctgctgaatgagctggaggtggtgaagagccgggtgaaggagctggagtgcagcgagagccggctggagaaggccgagctgagcctgaaggatgacctgaccaagctgaagagcttcaccgtgatgctggtggatgagaggaagaacatgatggagaagatcaagcaggaggagaggaaggtggatggcctgaacaagaacttcaaggtggagcagggcaaggtgatggatgtgacagagaagctgattgaggagagcaagaagctgctgaagctgaagtctgagatggaggagaaggtgtacaacctgacccgggagagagatgagctgattggcaagctgaagtctgaggaggagaagagcagcgagctgagctgcagcgtggacctgctgaagaagaggctggatggcatcgaggaggtggagcgggagatcacccggggccgcagcaggaaaggaagtgagctgacctgcccagaggacaacaagatcaaggagctgaccctggagattgaaaggctgaagaagaggctgcagcagctggaggtggtggagggggacctgatgaagacagaagatgaatatgaccagctggagcagaagttcagaacagagcaggacaaggccaacttcctgagccagcagctggaggagatcaagcaccagatcgccaagaacaaggccatcgagaagggggaggtggtgtcccaggaggccgagctgcggcaccgcttccggctggaggaggccaagagccgggacctgaaggccgaggtgcaggccctgaaggagaagatccacgagctgatgaacaaggaggaccagctgagccagctgcaggtggactacagcgtgctgcagcagcgcttcatggaggaggagaacaagaacaagaacatgggccaggaggtgctgaacctgaccaaggagctggagctgagcaagcgctacagccgggccctgcggcccagcgtgaatggaagaaggatggtggatgtgcctgtgaccagcactggagtgcagacagatgctgtgtctggagaggccgctgaggaggagaccccagctgtgttcatcaggaagagcttccaggaggagaaccacatcatgagcaacctgcggcaggtgggcctgaagaagcctgtggagaggagctctgtgctggaccgctacccacctgctgccaatgagctgaccatgaggaagtcctggatcccctggatgaggaagagagaaaatggccccagcatcacccaggagaagggccccaggaccaacagcagccctggccaccctggagaggtggtgctgagccccaagcagggccagcccctgcacatccgggtgaccccagaccacgagaacagcacagccaccctggagatcaccagccccaccagcgaggagttcttcagcagcaccaccgtcatccccaccctgggcaaccagaagccccgcatcaccatcatccccagccccaacgtgatgccccagaagcagaagagcggggacaccaccctgggccctgagcgggccatgagccctgtgaccatcaccaccttcagccgggagaagaccccagagagcggccgcggggcctttgctgaccggcccaccagccccatccagatcatgacagtgtccaccagcgctgccccagctgagattgctgtgtccccagagagccaggagatgcccatgggccgcaccatcctgaaggtgaccccagagaagcagacagtgcccacccctgtgaggaagtacaacagcaatgccaacatcatcaccacagaggacaacaagatccacatccacctgggcagccagttcaagaggagccctggcaccagcggggagggcgtgtcccctgtgatcaccgtgcggcctgtgaatgtgacagctgagaaggaggtgtccactggaacagtgctgcggagccccaggaaccacctgagcagcaggcctggggccagcaaggtgaccagcaccatcaccatcacccctgtgaccaccagcagcgcccggggcacccagagcgtgtctggccaggacggcagcagccagaggcccacccccacccgcatccccatgagcaagggcatgaaggccggcaagcctgtggtggccgcccctggggccggcaacctgaccaagtttgagcccagggctgagacccagagcatgaagattgagctgaagaagtctgctgccagcagcaccaccagcctgggcggcggcaagggctag

SEQ ID NO: 268569 - DNA, 3345 bp, Artificial Sequence
  derived and/or modified sequence
atgctgaagacagagaagaccaagccagaggtgctggaggcccactacggcagcgctgagcctgagaaggtgctgcgggtgctgcacagagatgccatcctggcccaggagaagagcatcggggaggatgtgtatgagaagcccatcagcgagctggaccggctggaggagaagcagaaggagacctacagaaggatgctggagcagctgctgctggccgagaagtgccacagaagaacagtgtatgagctggagaatgagaagcacaagcacacagactacatgaacaagagtgatgacttcaccaacctgctggagcaggagcgggagcggctgaagaagctgctggagcaggagaaggcctaccaggccaggaaggagaaggaaaatgccaagaggctgaacaagctgagagatgagctggtgaagctgaagagctttgccctgatgctggtggatgagcggcagatgcacatcgagcagctgggcctgcagagccagaaggtgcaggacctgacccagaagctgcgggaggaggaggagaagctgaaggccatcaccagcaagagcaaggaggaccggcagaagctgctgaagctggaggtggactttgagcacaaggccagccgcttcagccaggagcacgaggagatgaatgccaagctggccaaccaggagagccacaaccggcagctgcggctgaagctggtgggcctgacccagagaattgaggagctggaggagaccaacaagaacctgcagaaggccgaggaggagctgcaggagctgcgggacaagatcgccaagggagaatgtggcaacagcagcctgatggccgaggtggagaacctgaggaagagggtgctggagatggagggcaaggatgaggagatcaccaagacagagagccagtgccgggagctgaggaagaagctgcaggaggaggagcaccacagcaaggagctgcggctggaggtggagaagctgcagaagaggatgtctgagctggagaagctggaggaggccttcagcaagagcaagtcagaatgtacccagctgcacctgaacctggagaaggagaagaacctgaccaaggacctgctgaatgagctggaggtggtgaagagccgggtgaaggagctggagtgcagcgagagccggctggagaaggccgagctgagcctgaaggatgacctgaccaagctgaagagcttcaccgtgatgctggtggatgagaggaagaacatgatggagaagatcaagcaggaggagaggaaggtggatggcctgaacaagaacttcaaggtggagcagggcaaggtgatggatgtgacagagaagctgattgaggagagcaagaagctgctgaagctgaagtctgagatggaggagaaggtgtacaacctgacccgggagagagatgagctgattggcaagctgaagtctgaggaggagaagagcagcgagctgagctgcagcgtggacctgctgaagaagaggctggatggcatcgaggaggtggagcgggagatcacccggggccgcagcaggaagggcagcgagctgacctgcccagaggacaacaagatcaaggagctgaccctggagattgagcggctgaagaagaggctgcagcagctggaggtggtggagggggacctgatgaagacagaagatgaatatgaccagctggagcagaagttcagaacagagcaggacaaggccaacttcctgagccagcagctggaggagatcaagcaccagatcgccaagaacaaggccattgaaaaaggagaggtggtgtcccaggaggccgagctgcggcaccgcttccggctggaggaggccaagagccgggacctgaaggccgaggtgcaggccctgaaggagaagatccacgagctgatgaacaaggaggaccagctgagccagctgcaggtggactacagcgtgctgcagcagcgcttcatggaggaggagaacaagaacaagaacatgggccaggaggtgctgaacctgaccaaggagctggagctgagcaagcgctacagccgggccctgcggcccagcgtgaatggccgcaggatggtggatgtgcctgtgaccagcactggagtgcagacagatgctgtgtctggagaggccgctgaggaggagaccccagctgtgttcatcaggaagagcttccaggaggagaaccacatcatgagcaacctgcggcaggtgggcctgaagaagcctgtggagaggagctctgtgctggaccgctaccccccagctgccaatgagctgaccatgaggaagtcctggatcccctggatgaggaagcgggagaatggccccagcatcacccaggagaagggccccaggaccaacagcagccctggccaccctggagaggtggtgctgagccccaagcagggccagcccctgcacatccgggtgaccccagaccacgagaacagcacagccaccctggagatcaccagccccaccagcgaggagttcttcagcagcaccaccgtcatccccaccctgggcaaccagaagccccgcatcaccatcatccccagccccaacgtgatgccccagaagcagaagagcggggacaccaccctgggccctgagcgggccatgagccctgtgaccatcaccaccttcagccgggagaagaccccagagagcggccgcggggcctttgctgaccggcccaccagccccatccagatcatgacagtgtccaccagcgctgccccagctgagattgctgtgtccccagagagccaggagatgcccatgggccgcaccatcctgaaggtgaccccagagaagcagacagtgcccacccctgtgaggaagtacaacagcaatgccaacatcatcaccacagaggacaacaagatccacatccacctgggcagccagttcaagaggagccctggcaccagcggggagggcgtgtcccctgtgatcaccgtgcggcctgtgaatgtgacagctgagaaggaggtgtccacaggcaccgtgctgcggagccccaggaaccacctgagcagcaggcctggggccagcaaggtgaccagcaccatcaccatcacccctgtgaccaccagcagcgcccggggcacccagagcgtgtctggccaggacggcagcagccagaggcccacccccacccgcatccccatgagcaagggcatgaaggccggcaagcctgtggtggccgcccctggagctggcaacctgaccaagtttgagcccagggctgagacccagagcatgaagattgagctgaagaagtctgctgccagcagcaccaccagcctgggcggcggcaaaggatag

SEQ ID NO: 268570 - DNA, 3642 bp, Artificial Sequence
  derived and/or modified sequence
atgcggagccggaaccagggcggcgagagcgccagcgacggccacatctcctgtcccaagccatctattattggaaacgcaggggagaaaagcctgtctgaagacgccaaaaagaagaaaaagagcaaccgaaaagaagacgacgttatggcctccggcaccgtcaagaggcatttaaaaacctcgggcgaatgtgagcgcaagacaaagaaaagcctagagctctcgaaagaggatctgattcagctcttgtcgattatggaaggcgagctgcaggcccgtgaagacgtgatccatatgcttaaaactgaaaagacaaaacccgaggtgctagaggctcattacggctcagcggagcctgagaaagttctaagagtgctgcatagggatgcgattctcgctcaggagaaatccatcggggaagacgtatacgagaagccgattagcgagcttgatcggctggaagagaaacaaaaagaaacttaccgccggatgcttgaacagctgctcttggcggagaagtgccaccgcaggactgtatacgaactggagaacgagaagcacaaacacacagactatatgaacaagtcagatgattttacaaatctcttggagcaggaaagagaaaggctgaagaaactgctcgagcaggagaaagcctaccaggcccggaaagagaaggagaacgctaagcgcttgaacaagctgcgcgatgaactggtgaagctcaagtctttcgccctaatgctggtcgacgagcgtcagatgcacatagaacagcttggactgcagtctcaaaaggtgcaggatctaacacagaagctgcgagaagaggaggagaaacttaaggcaatcacctcaaagtcaaaagaggaccggcaaaagctcttgaaattggaggttgactttgagcacaaagccagcaggttttctcaggagcacgaggaaatgaacgcaaagcttgccaatcaggaaagccataacaggcagttgagactgaagttggtgggtctcacccaacgtatcgaagaacttgaggagacaaacaagaacctccagaaggctgaggaggagctgcaggaactccgcgataaaattgctaaaggcgaatgtggtaactcgtccttgatggcagaagtggaaaatcttaggaaaagagtgctcgaaatggagggaaaagacgaagagattacaaaaacagaatcccaatgcagggaactgagaaaaaagttacaggaggaggagcaccattcaaaagagctcagacttgaggtggaaaaactgcagaagagaatgtctgaattagaaaaactggaagaggcatttagcaagagtaagtcagagtgcactcagctacatctgaacctggagaaggagaagaatcttacaaaggacctgcttaacgagttggaagtagtcaagtccagggtgaaagaactagaatgcagcgaatcacgactggagaaggccgagctgtcccttaaggacgatctcaccaaacttaagtccttcacagtcatgttggtagatgagcgcaagaacatgatggagaagataaagcaggaagagcggaaagtggatggcctcaataagaatttcaaggtagaacaagggaaggtgatggatgtgaccgagaaattgatcgaggaatccaagaagttgctgaagctgaagagcgagatggaagagaaagtgtataacttaaccagggagagagatgaactgatcggcaagctcaagtctgaagaagagaaaagcagtgaattatcctgtagcgtggacctgctcaagaagcggctggacggaatagaggaagtggagcgggaaattactcgggggagaagtcgaaagggcagtgagctcacatgtcccgaagacaataaaattaaggagctgaccctcgagatagagaggctcaagaaaaggctgcagcagctggaggttgtcgagggcgacctgatgaaaacagaagacgagtacgatcagctcgagcagaagtttaggacggagcaggataaagctaatttcctgtcccagcagctggaggagataaagcaccagatcgcaaagaataaagctatcgagaagggcgaagtcgtgtcacaggaagccgaacttagacatcgatttagactggaagaggctaagtccagggacctgaaagccgaagtccaagccctgaaggaaaaaatccacgagctgatgaacaaagaagatcagctctcccagctgcaggtggattacagtgtactgcagcagcggtttatggaagaggaaaacaagaacaaaaatatggggcaggaggtgctcaaccttactaaagaattagaattgtccaaacggtacagcagggctctccggccatccgtgaacggacgacggatggtagacgttccggtgaccagcaccggagttcagactgacgccgtctcaggtgaggctgccgaggaagagactcctgccgtgtttatcaggaaatcttttcaggaagaaaaccacataatgtcaaacttacggcaggtcggtttgaagaaacctgtggaacggagtagcgttttagatcgatatcctcccgcggccaatgaactgaccatgcggaagtcatggattccttggatgaggaagagggaaaatggccccagtattacacaggagaagggcccaagaacaaattcaagtccagggcaccctggagaagtggtcctgtctccgaagcagggacaacccctacacatcagggtaaccccagaccatgagaattccaccgccacccttgagatcacaagccctacctcagaggaatttttcagttccaccaccgtgataccaacacttggtaaccagaagccgcgaatcaccattattcctagccctaacgttatgccacagaagcaaaaatcaggagacactaccctggggcccgaacgcgccatgtcaccagtgaccattacaacattttctagggagaagacccccgaatcaggtcggggcgcctttgcggatagacctacatcccccatccagatcatgaccgtgtcaacttctgctgccccagctgagatagccgtgagccccgaaagtcaggaaatgcccatggggcgcacaatcctgaaggtgacacccgagaagcagacagtccccaccccagtgcgcaagtataattcaaatgcgaatatcatcacaacagaggataataaaattcacatacacctgggctcccagttcaaaagatcaccagggacgtccggcgagggcgtgtcgccagtgatcaccgtccgccctgtgaacgtgactgcagagaaagaagtgtcaacaggcactgtgctccgctctccaaggaaccatctaagtagccgaccgggggccagcaaggtgacatctactatcaccatcaccccagtgacaacttcctccgccagaggtacccagagcgtctctgggcaggacgggtcaagtcagagacctactcccacccgaatccctatgtctaaggggatgaaagccggcaagcctgtggttgccgctccaggagctgggaaccttactaaatttgagcctcgggcagaaacacagtcgatgaagattgagttgaaaaaatccgcagcgagttcaactacctcgttaggcggtggcaaaggctag

SEQ ID NO: 268571 - DNA, 3345 bp, Artificial Sequence
  derived and/or modified sequence
atgctgaagaccgagaagaccaagcccgaggtgctggaggcccactacggctccgccgaacctgaaaaggtgttgagggtactccatcgggatgcaatcctggctcaagaaaagagtatcggggaagacgtgtacgagaaaccaatatctgagctagatcgactggaagagaagcagaaggaaacctaccgtcggatgcttgagcagctgctcctggcagagaagtgtcatcgccggactgtctacgaattagagaacgagaaacacaaacacactgactacatgaacaagagtgacgattttacaaatcttctggagcaggaaagagaaagactcaagaaactgctggaacaggaaaaagcctaccaggccaggaaggaaaaggagaacgcaaaacggctcaacaagctccgggacgaactagtgaagctcaagtcatttgcacttatgctcgttgacgagaggcaaatgcacatcgaacagcttggcttgcagtctcagaaggtgcaggacctgacccagaagctgcgagaggaggaggagaagctgaaagccataacctcgaaatcaaaagaggacagacagaagctattgaaactagaggtggatttcgagcataaggcctccaggttttcccaggaacatgaggagatgaatgccaagctcgccaatcaggaatctcacaataggcagttgaggctgaaacttgtgggccttacccaaagaattgaggagctcgaggagactaacaagaatctccagaaggcagaagaagaactgcaagaattgcgggacaagatagctaaaggagagtgcggaaattcatcattaatggccgaggtggaaaatcttcgaaagagggttctggagatggaggggaaggatgaggagattacgaagaccgaatctcagtgtagagaattgagaaaaaaactgcaagaagaggagcatcactctaaagaactcagactggaggttgagaaactgcagaaacgcatgtcggagctggagaaactcgaagaggctttcagtaagtccaaaagtgaatgtacgcagctgcacctcaatctggagaaggagaagaatctaaccaaagaccttctaaatgaactggaagtcgtcaagtcccgagttaaagaattagagtgctccgaaagcagactagagaaggctgaactgtctctgaaggatgacttgaccaagcttaaatcatttaccgtcatgctcgtggacgaacgaaaaaatatgatggagaagattaaacaggaggaacgcaaagttgatggcctgaataagaattttaaagttgagcaaggcaaagtcatggatgtcactgaaaagctgatcgaagaatccaaaaaactactgaaactgaaaagcgagatggaggaaaaggtgtataacttaactcgggaaagggatgagctcatcggaaaattgaaaagcgaggaggagaagtcaagtgaactgagctgttctgtcgacttgctgaaaaaacgcctggacggaatcgaggaggtggaacgtgaaataacgagaggacgatccagaaaaggcagtgagctgacctgtcctgaggacaacaaaattaaagagctcaccctggagatcgagcggctcaagaaaagattgcagcaattggaagtggtagagggtgatctgatgaaaaccgaggatgaatacgatcagctcgagcaaaaatttaggacggagcaggacaaggctaacttcctgtcacaacagttagaggagatcaagcaccaaatcgctaagaataaggccattgaaaagggcgaagtggtaagccaggaggccgagttgcgccacaggttcagactggaggaggctaaaagcagggatctgaaagctgaagtacaggctcttaaggaaaagattcacgagttgatgaacaaggaggatcagctgagtcagctccaggtggactactcggtacttcagcaacgctttatggaggaagagaacaagaacaaaaatatgggtcaggaggtgctgaaccttactaaagagcttgagctatccaaaagatacagcagggccctgcgtcccagtgtgaatgggcgtaggatggtggatgtgcccgtgacatccactggggtgcaaaccgacgcggtaagtggtgaggcagccgaggaagagactccggcggtgtttataaggaaatcattccaagaggaaaaccatataatgtccaacctcaggcaggtgggcttgaagaagccagtggaacgatcatcggtactggaccgctaccctccggccgccaatgagcttacaatgagaaagtcttggataccatggatgcgcaagcgagaaaacggtccatctatcacccaggagaagggaccaagaaccaactcctctcccggccaccccggcgaggtggtgttgtcccccaagcaagggcagcccctccacataagagttacccctgaccacgagaactccacagcgactctggaaattacttccccgacaagtgaggagtttttctcttcgacaactgtcattcctacgttagggaaccagaagcctcggatcacaataatcccatctccaaatgtgatgccgcagaaacagaagtctggtgatacaactttggggcctgagagagctatgtctcccgtgactatcacaactttcagtagagaaaaaacaccagaatccgggagaggtgcttttgcggataggcccacctcaccaatccagatcatgaccgtttcaacatccgccgctccagccgaaatcgccgtatctcccgagtcccaggagatgcccatggggcggactattctgaaggtgacacctgagaaacagacagtgccgacgcctgtaaggaagtacaactctaatgctaacatcatcacaacggaggacaacaagatacacatccacttaggaagccagtttaaaaggtcaccaggaaccagtggggaaggcgtcagccccgtgataacagttaggccggtgaacgtgacagccgaaaaagaggtgtccaccgggaccgtgcttcggtccccaagaaatcatctgtcgagccgcccgggggccagtaaagtgacttctactatcacgattaccccagtgactactagttcagcccgtggcacgcaatctgtctccgggcaggatggatcttcccaacgaccaaccccaacacgaatacccatgagtaaagggatgaaggcaggtaaacccgttgtagcagcccccggcgcaggaaaccttacaaaatttgaaccccgtgccgaaacacaatccatgaagatagaactcaagaagtcagccgccagctctactacaagtctgggagggggcaagggatag

SEQ ID NO: 268572 - DNA, 3642 bp, Artificial Sequence
  derived and/or modified sequence
atgaggtctaggaaccagggaggcgagagtgccagcgatggtcatatcagctgcccgaagccctcaattataggcaacgccggagagaagtccctctctgaggatgctaagaaaaagaagaagtccaaccgcaaggaagatgacgtgatggccagcgggacagtgaaaaggcatctcaagacttcaggcgaatgtgagcgtaaaacaaaaaagtctctggaactttccaaggaggacctaattcagttgctgtcaatcatggaaggcgagctgcaagctagagaagacgtgatccatatgttgaagaccgagaagaccaagccggaggtgctggaagcccattacggatcagccgagcccgagaaggtcctgcgcgtgttgcatagagacgcgatactggcccaggagaaatcaataggggaggatgtgtacgagaagcccattagtgagttagaccgcctggaggaaaagcagaaggagacataccgcagaatgctggagcagcttctgctggccgaaaaatgccatcgtaggacagtttatgagctggagaacgagaaacataaacatacagactacatgaataagtccgatgactttactaacctgcttgaacaggagcgagagcggttgaagaaactccttgagcaggaaaaggcttaccaggctagaaaggagaaagagaatgccaagaggctgaacaaattacgtgacgagctggtcaaactgaaatcattcgccctgatgcttgtggacgagcgacagatgcatattgaacagctaggcctacagtcccagaaggtgcaggacctaacccagaagctccgtgaggaagaggaaaaactaaaagcgatcactagcaagagcaaggaagaccgccagaaattactaaaattggaggtggacttcgagcacaaagcgtctcgattttcacaagaacacgaggaaatgaatgcaaagctggcaaatcaagaaagccataatcggcagctgagactcaagctggtggggctcacacagagaatcgaagagctggaggagactaacaaaaacctgcagaaagcagaagaggagctgcaggaactacgcgacaagattgccaaaggggagtgtggcaacagtagtctaatggcagaggtcgagaatctgcgaaaacgagtcctggaaatggaagggaaggacgaagagatcaccaagacggagtcgcaatgtagagagctcaggaagaagctccaagaagaagaacaccactcaaaagagcttcggctagaggtggaaaagctacaaaaacgaatgtctgagcttgaaaaacttgaggaagccttttccaaaagcaaatcagaatgcacccagcttcacctaaatctggaaaaagagaagaacctgacgaaggatctgttgaacgagttagaggtcgtgaagagcagagtcaaggaattggaatgtagtgaaagtaggctggagaaggccgaactgagtttgaaagacgacctaaccaagctgaagagctttacagtaatgctggttgatgagcggaaaaacatgatggagaagatcaaacaggaggagaggaaagtcgatggccttaataaaaattttaaggtggaacaaggcaaggtgatggatgtcaccgaaaagttaatagaggaatctaaaaagcttctgaaactcaagtctgagatggaagagaaagtttataatctcactcgcgaaagggacgaactgattggaaagttgaaaagcgaagaggaaaagtcatctgagctgtcctgttcggtcgatctgctgaagaaaaggctggacggaatcgaagaggtggagcgcgagatcacacgcggtcgatcacggaagggtagtgagctgacttgcccagaggataacaaaattaaagagctgacgctcgaaatagaacggctgaaaaaacgactgcaacagctcgaggtggtggagggggaccttatgaagaccgaagatgaatatgaccagctcgagcagaagtttcgcacagagcaggacaaggctaacttcttgtcccagcaactggaagaaatcaagcaccaaatagccaaaaacaaggcaatagagaaaggggaggtggtcagccaggaagctgagctcagacataggttcaggctggaagaagctaaatcaagagacctcaaggccgaagttcaggccctgaaggaaaagatccacgagttgatgaacaaggaggatcaactgagccagcttcaagtggactacagcgtgctccagcagcggtttatggaagaggaaaacaaaaacaagaacatgggtcaggaggtgctgaaccttacaaaagagctggaactgagcaagcggtattcccgtgccctccgaccctccgttaacgggcgacggatggtggacgttcctgtgacatccacgggggttcagacggatgcggtctctggtgaggctgcggaggaagaaacaccagcagtgttcataaggaagtcctttcaggaagagaatcatataatgagcaatttaagacaggtggggcttaagaaacctgtggagcgaagttctgtgctggataggtaccctcctgcagcaaacgagcttaccatgagaaaatcttggatcccctggatgcgtaaacgcgagaatggcccttcaatcacccaggagaaagggcctcgtactaactccagtcctggacatcccggagaagtcgtactgtcaccaaaacagggacagccattacatatacgggtgactcctgatcatgaaaatagtactgccaccctggagatcacatcaccaacgagcgaagagttcttctcatctaccaccgtgattccgactctaggcaaccagaagccacgcatcaccattatccccagtccaaatgtgatgccccaaaaacagaagtccggcgatacgaccctaggcccagagcgcgcaatgtctcccgtgactattactacattttcaagagagaagacccccgagagcggcagaggcgctttcgccgacaggcccacatcacctattcagattatgaccgtctcaaccagcgccgcaccagccgaaatcgcagtctctcctgaatcacaggaaatgccaatggggagaacaatcctgaaggtaacgccagagaagcagacggtccctacaccggtacggaaatataactccaatgccaacatcataacaactgaagataacaagatccatattcacttgggctctcagtttaagcgatcgcccggaacctccggcgaaggagtgagcccagtgatcacagtcaggccagtgaacgttactgccgagaaggaggtgtccaccggaacagtgctgcggtcccctcgaaaccatttgtcaagccgcccaggtgcttcgaaggtaacttccacaatcactataaccccagtcacaactagctctgccagagggacacaatcagtatcgggtcaggacggatcctctcagaggcctacacctacccgaattcctatgtccaaaggcatgaaggctggcaaaccagtggtggcagccccaggggcagggaacctgaccaaattcgaaccgagagccgagacacagagcatgaagatcgagttgaagaaatcagccgcatcttctacaacgtccctcggcggtggaaagggctag

SEQ ID NO: 268573 - DNA, 3345 bp, Artificial Sequence
  derived and/or modified sequence
atgctgaagaccgagaaaacaaagcccgaggtcctggaggcgcattacggctcggccgagccagagaaggtgctgcgggtacttcaccgtgatgcgatcctggctcaagagaagtcaataggcgaggatgtgtatgagaagcccatctctgaattagataggttggaggagaagcagaaggagacatatcgaaggatgctggagcagctgcttctggcagaaaaatgtcatcggcgtaccgtatacgagttggagaacgaaaagcacaaacatacagactatatgaacaagagcgacgattttacgaacctgcttgagcaggaacgagaacgcctgaagaagttgttggagcaggagaaagcctaccaggccaggaaggagaaagagaacgcaaaacgactgaataagctgagggacgaactagtgaagctgaaatctttcgccctcatgctcgtggacgagaggcagatgcatatcgagcagctgggactgcaatctcaaaaggtccaagatttaactcagaaactgcgggaagaggaggagaagctgaaggcgatcacctctaaaagtaaagaggacaggcagaagcttctgaagttggaagtcgatttcgaacacaaggcgtcccgctttagtcaggagcacgaggagatgaatgcaaagttagccaaccaggagagccacaataggcagttgcggcttaaactagttggcctcacacagcgcattgaagaactcgaggagactaataaaaacctccagaaagcagaggaggagctgcaggagctgagagacaaaatcgcaaagggagagtgcggtaactcaagcctcatggcagaggtagaaaatctgaggaagagggtcctagagatggagggcaaggatgaagaaatcacaaagacagaatcccagtgcagagaattacggaagaagcttcaagaggaagaacatcactccaaagagttgcgtctggaagtggagaagctgcagaaacggatgagcgaattggagaagctggaggaggcattctccaagtcaaaaagcgagtgtacacaactgcacttaaatttggagaaagaaaagaacctcaccaaggaccttctgaacgagctggaggttgtgaaaagtcgagtaaaggaactggaatgcagcgagtccaggttagagaaggccgagctttccctcaaggacgatctcaccaagcttaaatccttcaccgttatgctcgttgacgagcgtaaaaatatgatggagaaaatcaagcaggaagagaggaaggtggacggcctcaataagaatttcaaagtcgaacagggtaaggtgatggatgtaacagagaagctgatcgaggagagcaagaaactgctgaaactcaagtcggagatggaagagaaagtttataacctcaccagagagcgtgacgagctcatcggaaagctaaaatctgaggaggagaagagttctgagctcagctgttccgtggacctcctcaaaaagaggcttgatgggatcgaggaagtagaacgcgaaatcactcgtgggcgatcccgaaagggttccgagctgacttgcccagaggacaataagattaaagagctgactctggagattgaaagactgaaaaagcggctgcagcaactcgaggtggtggagggggatctgatgaaaacggaggacgagtacgatcagctggaacaaaaattccggacggaacaggacaaggctaactttttaagccagcagctggaggaaatcaagcatcagattgccaaaaataaggccatagagaagggtgaggtagtcagccaggaggcagagctgcgccataggttccggctggaggaggccaagtctcgtgatctgaaagccgaagtgcaggccctcaaggagaagatccacgagcttatgaacaaggaggatcagttaagccagctgcaggttgactactctgttctgcagcagcgctttatggaggaggagaataaaaacaaaaatatggggcaggaggtactcaatctcaccaaagaattagagctgagcaaacggtactctcgagccctgcgccctagcgtgaatgggaggcggatggtggacgtcccggtgacctctactggagttcagaccgacgccgtctccggcgaagccgcagaagaggaaacccctgcggtgttcatcagaaaatctttccaggaggagaatcatattatgtccaacttgcgccaggtaggtctcaagaagcccgtcgagaggagctcagtgctggatcgctacccaccagccgcaaatgaacttactatgaggaagagttggatcccctggatgcggaaacgggaaaacggcccttcgatcactcaggagaaggggccaaggacaaactcatcccctggacatccaggcgaggttgtattaagccccaaacagggccagccattgcacataagggtgacgccagaccatgaaaactccacagccactcttgaaatcacaagcccaacatccgaagagttcttctcctctactactgtgatccctaccttgggcaaccagaaaccacggatcaccattatcccctccccgaatgtgatgcctcaaaaacagaaaagtggcgataccacactgggcccagaaagggccatgagtccagtgactatcacaacctttagccgggaaaaaacccccgaaagcggtagaggggcattcgccgacagaccgacttctccaatccaaatcatgaccgtgtcaacgtcagctgctccagccgagatcgctgtgtctcccgagtctcaggagatgccaatgggcaggaccattctcaaggtgacacctgagaagcagactgtgccaacacctgtgcgtaagtataacagcaacgcgaatataatcacaactgaggataataaaatacacatccacctcggaagccaattcaaacgctcaccaggtacaagtggtgaaggcgtgtctcctgtgatcaccgtaaggcctgtgaatgttaccgctgagaaggaggtaagcactggaaccgtgcttagatcgcccagaaatcatctgagctcaaggccaggcgctagtaaggtgacctcaactataactattaccccggtcactactagtagcgctcggggaactcagtccgtcagcggtcaggacgggagctctcagaggccaacacctacaaggattccaatgagcaagggaatgaaggccggaaaacccgtggtcgccgctccaggggctggcaatctcactaaattcgaacccagggccgaaactcagagcatgaagatcgaattaaaaaaatcagctgccagcagcacaacatccctcggcggaggcaagggatag

SEQ ID NO: 268574 - protein, 1295 aa, Artificial Sequence [sequence omitted]

SEQ ID NO: 268575 - protein, 1286 aa, Artificial Sequence
  derived and/or modified sequence
MEDGKPVWAPHPTDGFQMGNIVDIGPDSLTIEPLNQKGKTFLALINQVFPAEEDSKKDVEDNCSLMYLNEATLLHNIKVRYSKDRIYTYVANILIAVNPYFDIPKIYSSEAIKSYQGKSLGTRPPHVFAIADKAFRDMKVLKMSQSIIVSGESGAGKTENTKFVLRYLTESYGTGQDIDDRIVEANPLLEAFGNAKTVRNNNSSRFGKFVEIHFNEKSSVVGGFVSHYLLEKSRICVQGKEERNYHIFYRLCAGASEDIREKLHLSSPDNFRYLNRGCTRYFANKETDKQILQNRKSPEYLKAGSMKDPLLDDHGDFIRMCTAMKKIGLDDEEKLDLFRVVAGVLHLGNIDFEEAGSTSGGCNLKNKSAQSLEYCAELLGLDQDDLRVSLTTRVMLTTAGGTKGTVIKVPLKVEQANNARDALAKTVYSHLFDHVVNRVNQCFPFETSSYFIGVLDIAGFEYFEHNSFEQFCINYCNEKLQQFFNERILKEEQELYQKEGLGVNEVHYVDNQDCIDLIEAKLVGILDILDEENRLPQPSDQHFTSAVHQKHKDHFRLTIPRKSKLAVHRNIRDDEGFIIRHFAGAVCYETTQFVEKNNDALHMSLESLICESRDKFIRELFESSTNNNKDTKQKAGKLSFISVGNKFKTQLNLLLDKLRSTGASFIRCIKPNLKMTSHHFEGAQILSQLQCSGMVSVLDLMQGGYPSRASFHELYNMYKKYMPDKLARLDPRLFCKALFKALGLNENDYKFGLTKVFFRPGKFAEFDQIMKSDPDHLAELVKRVNHWLTCSRWKKVQWCSLSVIKLKNKIKYRAEACIKMQKTIRMWLCKRRHKPRIDGLVKVGTLKKRLDKFNEVVSVLKDGKPEMNKQIKNLEISIDTLMAKIKSTMMTQEQIQKEYDALVKSSEELLSALQKKKQQEEEAERLRRIQEEMEKERKRREEDEKRRRKEEEERRMKLEMEAKRKQEEEERKKREDDEKRIQAEVEAQLARQKEEESQQQAVLEQERRDRELALRIAQSEAELISDEAQADLALRRYLDSYPVTSKNDGTRPKMTPEQMAKEMSEFLSRGPAVLATKAAAGTKKYDLSKWKYAELRDTINTSCDIELLAACREEFHRRLKVYHAWKSKNKKRNTETEQRAPKSVTDYAQQNPAAQIPARQREIEMNRQQRFFRIPFIRPADQYKDPQSKKKGWWYAHFDGPWIARQMELHPDKPPILLVAGKDDMEMCELNLEETGLTRKRGAEILPRQFEEIWERCGGIQYLQNAIESRQARPTYATAMLQSLLK

SEQ ID NO: 268576 - protein, 174 aa, Artificial Sequence
  derived and/or modified sequence
KRREEDEKRRRKEEEERRMKLEMEAKRKQEEEERKKREDDEKRIQAEVEAQLARQKEEESQQQAVLEQERRDRELALRIAQSEAELISDEAQADLALRSLDSYPVTSKNDGTRPKMTPGPAVLATKAAAGTKKYDLSKWKYAELRDTINTSCDIELLAACREEFHRRLKVYHAW

SEQ ID NO: 268577 - DNA, 525 bp, Artificial Sequence
  derived and/or modified sequence
aagcggagggaggaggacgaaaagcgccggagaaaggaggaggaggaaagacggatgaaactcgagatggaggccaaaagaaaacaggaggaggaggagaggaagaaaagagaagacgatgagaagaggatacaggctgaggtggaagcccagctggctcggcagaaagaggaggagtcccaacagcaggcagtgctcgaacaggaacggcgtgatagggagctggccctccgtatagcgcagtctgaggcagagctgattagcgacgaggctcaggcagatctggccttgcggtctctggatagctaccccgtaaccagtaagaacgatggcactcgaccaaaaatgactcctggccctgcagtcctggcgaccaaggctgctgcagggactaaaaagtacgacctgtccaagtggaaatacgcagaactgagagacaccatcaacacctcctgcgacattgagctcttggccgcctgccgggaggagtttcaccggcggctgaaagtctatcatgcttggtag

SEQ ID NO: 268578 - DNA, 525 bp, Artificial Sequence
  derived and/or modified sequence
aagaggcgggaggaggatgagaagagaagaaggaaggaggaggaggagaggaggatgaagctggagatggaggccaagaggaagcaggaggaggaggagaggaagaagcgggaggatgatgagaagaggatccaggccgaggtggaggcccagctggcccggcagaaggaggaggagagccagcagcaggccgtgctggagcaggagcggcgggaccgggagctggccctgagaattgcccagagcgaggccgagctgatcagtgatgaggcccaggccgacctggccctgcggagcctggacagctaccctgtgaccagcaagaatgatggcacccggcccaagatgaccccaggccctgctgtgctggccaccaaggctgctgctggcaccaagaagtatgacctgagcaagtggaagtatgcagagctgcgggacaccatcaacaccagctgtgacatcgagctgctggccgcctgccgggaggagttccaccggcggctgaaggtgtaccacgcctggtag

SEQ ID NO: 268579 - DNA, 522 bp, Artificial Sequence
  derived and/or modified sequence
aaaagacgtgaagaagacgaaaaacgtcgaagaaaggaagaggaggaaaggcggatgaaacttgagatggaagcaaagagaaaacaagaagaagaagagagaaagaaaagggaagatgatgaaaaacgcattcaagctgaagtggaggcacagctggcccgacagaaggaggaggaatcccaacagcaagcagttctggagcaggagcgcagggaccgggagctggccctgaggattgcccagagtgaagccgagctcatcagtgatgaggcccaggccgacctggcgctgcggagcttggattcctatccggtaacttctaaaaatgatggaacaagacccaaaatgacaccaggtcctgctgtactagccaccaaagcagctgctggtactaagaaatatgatcttagtaaatggaaatatgcagaactacgtgataccatcaatacttcttgtgatattgagctcctggcagcttgcagagaagaatttcataggagactaaaagtgtatcatgcttgg

SEQ ID NO: 268580 - DNA, 525 bp, Artificial Sequence
  derived and/or modified sequence
aagcggcgggaggaggacgagaagcggcggcggaaggaggaggaggagcgcaggatgaaactcgaaatggaggccaaacgaaagcaggaggaagaggaaaggaaaaaacgggaagacgatgaaaaacgcatccaggccgaagtcgaggcccagctcgccagacagaaggaagaagagtctcaacagcaagccgtgcttgagcaggaacgccgagaccgtgagcttgctctgcgtatcgcccagtccgaggccgaactaatttcggacgaggctcaggcagatctcgccctgagaagtctcgattcatacccagtcacttcaaagaacgacggcactaggcccaaaatgacccccggccccgcagttctcgccaccaaggcggcagctggaacaaagaaatatgacctgtcaaaatggaagtacgctgaactcagggatactattaacacatcatgtgacatcgagctgttagccgcctgtcgggaggaattccataggcggttgaaagtctaccacgcgtggtag

SEQ ID NO: 268581 - DNA, 525 bp, Artificial Sequence
  derived and/or modified sequence
aagcgacgcgaggaggacgaaaagagacggaggaaggaggaagaggagcgccgtatgaaactggagatggaggccaaacggaagcaagaagaagaagagcgaaaaaaacgggaggatgatgaaaagcgcatccaggccgaagtggaggcacagctcgcacgccagaaggaggaggagtctcagcagcaggcagttttagaacaagagaggagggatagagagctggccctccgaatagcccaaagtgaggccgaactgatttcagatgaagctcaggctgacctggccctgcgatcactggattcatacccggtgacctctaagaatgacgggacacgacccaaaatgacacccggacccgctgtgctggcaacaaaggcagcagcaggcactaagaagtatgatctgtcgaaatggaaatacgctgaactgcgtgacacgattaacacctcatgtgatatcgaactattggccgcttgcagggaggagtttcatcgcagattaaaagtatatcatgcttggtag

SEQ ID NO: 268582 - DNA, 525 bp, Artificial Sequence
  derived and/or modified sequence
aagagaagagaggaggacgagaagagaagaagaaaggaggaggaggagagaagaatgaagctggagatggaggccaagagaaagcaggaggaggaggagagaaagaagagagaggacgacgagaagagaatccaggccgaggtggaggcccagctggccagacagaaggaggaggagagccagcagcaggccgtgctggagcaggagagaagagacagagagctggccctgagaatcgcccagagcgaggccgagctgatcagcgacgaggcccaggccgacctggccctgagaagcctggacagctaccccgtgaccagcaagaacgacggcaccagacccaagatgacccccggccccgccgtgctggccaccaaggccgccgccggcaccaagaagtacgacctgagcaagtggaagtacgccgagctgagagacaccatcaacaccagctgcgacatcgagctgctggccgcctgcagagaggagttccacagaagactgaaggtgtaccacgcctggtag

SEQ ID NO: 268583 - protein, 1253 aa, Artificial Sequence
  derived and/or modified sequence
MEDGKPVWAPHPTDGFQMGNIVDIGPDSLTIEPLNQKGKTFLALINQVFPAEEDSKKDVEDNCSLMYLNEATLLHNIKVRYSKDRIYTYVANILIAVNPYFDIPKIYSSEAIKSYQGKSLGTRPPHVFAIADKAFRDMKVLKMSQSIIVSGESGAGKTENTKFVLRYLTESYGTGQDIDDRIVEANPLLEAFGNAKTVRNNNSSRFGKFVEIHFNEKSSVVGGFVSHYLLEKSRICVQGKEERNYHIFYRLCAGASEDIREKLHLSSPDNFRYLNRGCTRYFANKETDKQILQNRKSPEYLKAGSMKDPLLDDHGDFIRMCTAMKKIGLDDEEKLDLFRVVAGVLHLGNIDFEEAGSTSGGCNLKNKSAQSLEYCAELLGLDQDDLRVSLTTRVMLTTAGGTKGTVIKVPLKVEQANNARDALAKTVYSHLFDHVVNRVNQCFPFETSSYFIGVLDIAGFEYFEHNSFEQFCINYCNEKLQQFFNERILKEEQELYQKEGLGVNEVHYVDNQDCIDLIEAKLVGILDILDEENRLPQPSDQHFTSAVHQKHKDHFRLTIPRKSKLAVHRNIRDDEGFIIRHFAGAVCYETTQFVEKNNDALHMSLESLICESRDKFIRELFESSTNNNKDTKQKAGKLSFISVGNKFKTQLNLLLDKLRSTGASFIRCIKPNLKMTSHHFEGAQILSQLQCSGMVSVLDLMQGGYPSRASFHELYNMYKKYMPDKLARLDPRLFCKALFKALGLNENDYKFGLTKVFFRPGKFAEFDQIMKSDPDHLAELVKRVNHWLTCSRWKKVQWCSLSVIKLKNKIKYRAEACIKMQKTIRMWLCKRRHKPRIDGLVKVGTLKKRLDKFNEVVSVLKDGKPEMNKQIKNLEISIDTLMAKIKSTMMTQEQIQKEYDALVKSSEELLSALQKKKQQEEEAERLRRIQEEMEKERKRREEDEKRRRKEEEERRMKLEMEAKRKQEEEERKKREDDEKRIQAEVEAQLARQKEEESQQQAVLEQERRDRELALRIAQSEAELISDEAQADLALRRGPAVLATKAAAGTKKYDLSKWKYAELRDTINTSCDIELLAACREEFHRRLKVYHAWKSKNKKRNTETEQRAPKSVTDYAQQNPAAQIPARQREIEMNRQQRFFRIPFIRPADQYKDPQSKKKGWWYAHFDGPWIARQMELHPDKPPILLVAGKDDMEMCELNLEETGLTRKRGAEILPRQFEEIWERCGGIQYLQNAIESRQARPTYATAMLQSLLK

SEQ ID NO: 268584 - protein, 50 aa, Artificial Sequence
  derived and/or modified sequence
MTEVQAMVEFSVELNKFYNVDLFQRGFYQIRASMKIPSRIPHRVEASLLH

SEQ ID NO: 268585 - DNA, 641 bp, Artificial Sequence
  derived and/or modified sequence
ggctccgcggttgcggtgtttgcggttgctgtgatggcgatgtgagggggcccggggcgggatggtgctgacccgggtcgggccgtcttcttgcagctggacaacgagctcctccgttcgacaggcgggggaagaggccgagccgggcgagagggttgaagatcaactggattatgtatttggttctggaatctcaaagcagtccacaaacaaattcttccttatgttgtctgtgtcaggctggagtgcagtggtgtgatctcagctcactgcaacctcctcctcaagggttcaagcgattctcctgcctcagcttcctgagtagctgggattacaggcccgtgccatcacacccagggggaacggtgtatttttaacaacgggaatcagtaactggaagtacaagattggttatttaataatgttaaaaatgaggctttgaaaagcagaggtgctgttatcagaatagtcttctgggtataaattaaaaatgactgaagttcaagcaatggtagaattctctgtggagctaaacaagttctacaatgtggatttgtttcagagaggtttttaccagattcgtgcttctatgaaaattccatcaagaattccccacagagtagaagctagtttgttgcatg

SEQ ID NO: 268586 - DNA, 546 bp, Artificial Sequence
  derived and/or modified sequence
gcgctgggccagtagccgagccgcggtgacgaaccggctccgcggttgcggtgtttgcggttgctgtgatggcgatgtgagggggcccggggcgggatggtgctgacccgggtcgggccgtcttcttgcagctggacaacgagctcctccgttcgacaggcgggggaagaggccgagccgggcgagagggttgaagatcaactggattatgtatttggttctggaatctcaaagcagtccacaaacaaattcttccttatgttgtctgtgtcagattcgagtatttgccaaatttctatgaagaactgcttcaagaattgggaagggtctgagattttaccccacttgcaagctgacaagttagtctgccacggtgccatggatgttggcaggacatgagagtcatggatcaaggtgctgttatcagaatagtcttctgggtataaattaaaaatgactgaagttcaagcaatggtagaattctctgtggagctaaacaagttctacaatgtggatttgtttcagagaggtttttaccagattcgt

SEQ ID NO: 268587 - protein, 1522 aa, Artificial Sequence
  derived and/or modified sequence
MKAVRNLLIYIFSTYLLVMFGFNAAQDFWCSTLVKGVIYGSYSVSEMFPKNFTNCTWTLENPDPTKYSIYLKFSKKDLSCSNFSLLAYQFDHFSHEKIKDLLRKNHSIMQLCNSKNAFVFLQYDKNFIQIRRVFPTNFPGLQKKGEEDQKSFFEFLVLNKVSPSQFGCHVLCTWLESCLKSENGRTESCGIMYTKCTCPQHLGEWGIDDQSLILLNNVVLPLNEQTEGCLTQELQTTQVCNLTREAKRPPKEEFGMMGDHTIKSQRPRSVHEKRVPQEQADAAKFMAQTGESGVEEWSQWSTCSVTCGQGSQVRTRTCVSPYGTHCSGPLRESRVCNNTALCPVHGVWEEWSPWSLCSFTCGRGQRTRTRSCTPPQYGGRPCEGPETHHKPCNIALCPVDGQWQEWSSWSQCSVTCSNGTQQRSRQCTAAAHGGSECRGPWAESRECYNPECTANGQWNQWGHWSGCSKSCDGGWERRIRTCQGAVITGQQCEGTGEEVRRCNEQRCPAPYEICPEDYLMSMVWKRTPAGDLAFNQCPLNATGTTSRRCSLSLHGVAFWEQPSFARCISNEYRHLQHSIKEHLAKGQRMLAGDGMSQVTKTLLDLTQRKNFYAGDLLMSVEILRNVTDTFKRASYIPASDGVQNFFQIVSNLLDEENKEKWEDAQQIYPGSIELMQVIEDFIHIVGMGMMDFQNSYLMTGNVVASIQKLPAASVLTDINFPMKGRKGMVDWARNSEDRVVIPKSIFTPVSSKELDESSVFVLGAVLYKNLDLILPTLRNYTVINSKIIVVTIRPEPKTTDSFLEIELAHLANGTLNPYCVLWDDSKTNESLGTWSTQGCKTVLTDASHTKCLCDRLSTFAILAQQPREIIMESSGTPSVTLIVGSGLSCLALITLAVVYAALWRYIRSERSIILINFCLSIISSNILILVGQTQTHNKSICTTTTAFLHFFFLASFCWVLTEAWQSYMAVTGKIRTRLIRKRFLCLGWGLPALVVATSVGFTRTKGYGTDHYCWLSLEGGLLYAFVGPAAAVVLVNMVIGILVFNKLVSRDGILDKKLKHRAGQMSEPHSGLTLKCAKCGVVSTTALSATTASNAMASLWSSCVVLPLLALTWMSAVLAMTDKRSILFQILFAVFDSLQGFVIVMVHCILRREVQDAFRCRLRNCQDPINADSSSSFPNGHAQIMTDFEKDVDIACRSVLHKDIGPCRAATITGTLSRISLNDDEEEKGTNPEGLSYSTLPGNVISKVIIQQPTGLHMPMSMNELSNPCLKKENSELRRTVYLCTDDNLRGADMDIVHPQERMMESDYIVMPRSSVNNQPSMKEESKMNIGMETLPHERLLHYKVNPEFNMNPPVMDQFNMNLEQHLAPQEHMQNLPFEPRTAVKNFMASELDDNAGLSRSETGSTISMSSLERRKSRYSDLDFEKVMHTRKRHMELFQELNQKFQTLDRFRDIPNTSSMENPAPNKNPWDTFKNPSEYPHYTTINVLDTEAKDALELRPAEWEKCLNLPLDVQEGDFQTEV

SEQ ID NO: 268588 - DNA, 4569 bp, Artificial Sequence
  derived and/or modified sequence
atgaaagcagtgagaaacctgctgatctatatatttagcacatacttgcttgtcatgtttggatttaacgctgcacaggacttctggtgctccaccttggtcaagggtgtcatttacgggtcttattcagtaagcgagatgtttccaaagaactttactaactgtacctggaccctagaaaatcctgacccaaccaagtacagtatttatctcaagttctccaagaaagacctgagctgttccaatttttcccttctggcttaccagtttgatcacttttcccacgaaaagatcaaggaccttttgaggaaaaaccacagcattatgcagctgtgtaactcaaaaaatgccttcgtgtttcttcagtacgataaaaatttcatccagatcaggcgcgtgttccccaccaattttcctggccttcagaagaagggtgaggaagaccagaagtctttcttcgagttcttggtcctcaacaaggtttccccatctcagttcggttgtcatgtactgtgtacctggttggaaagctgtctgaaaagcgaaaatgggagaactgagtcatgtggaataatgtataccaaatgtacttgcccacagcacctgggtgaatggggtattgacgaccagtccttaattttgctgaacaacgtcgtgcttcctttgaacgagcagactgagggctgcctgactcaagaacttcagaccactcaagtttgtaatcttactagagaagccaaacgtccccccaaggaggaattcggaatgatgggcgatcatacgatcaaatctcagcgcccacgatctgtgcacgaaaaaagagttcctcaggagcaggccgacgccgccaaatttatggcacagacaggcgagagtggcgttgaggaatggagtcaatggagcacatgctctgtgacttgtggccagggctcgcaagtgcgtacacgtacttgtgtgagtccctatgggacccactgtagtggccctttgcgcgagagtagagtgtgtaacaacaccgccttatgtccagtgcacggcgtgtgggaggaatggagcccatggagcctctgcagcttcacatgcggccgtggacagcgcacccgtactcggagctgcacgccaccgcaatatggcggaagaccctgcgagggaccggaaacacaccacaaaccatgtaacatcgccttgtgccctgtcgacgggcaatggcaggagtggagcagctggagtcagtgtagcgtgacttgttctaatggaacccagcagcggagtagacagtgtaccgcggccgcacacggaggctcagagtgcagaggcccatgggctgaaagcagagaatgctacaatcctgaatgtaccgccaatggccagtggaatcagtggggacactggtccgggtgcagtaagtcatgcgacggggggtgggagcggcgcattagaacctgccagggcgctgtcatcaccggacaacagtgcgaagggacaggtgaggaagtgagaaggtgtaatgagcagagatgcccagccccttacgagatttgcccagaagattacttgatgagtatggtgtggaagcggacgcctgctggcgacctggcttttaatcagtgccccttgaatgctactggaacgacatcacggcggtgtagcctgtcgctgcacggcgtggctttttgggagcagccaagttttgcgaggtgtatcagcaacgagtaccggcaccttcagcacagcatcaaagaacaccttgcaaaaggtcaaagaatgttggctggggacgggatgtcacaggtaacaaaaacactcctggatctaacccagcggaagaatttttacgcgggagacttgcttatgtctgtggagatactcaggaatgtcacagataccttcaagcgagctagttatatccctgcctcagacggtgtccagaacttctttcagatcgtatccaaccttttagacgaagagaataaggaaaagtgggaagatgcacaacagatctatcctggctcgattgagctgatgcaggtgatcgaagatttcattcatatcgtcggcatgggcatgatggattttcaaaacagctacctgatgacgggaaatgtcgtggcctccatccagaagctgcctgccgccagcgtacttacggacatcaactttcccatgaaaggcaggaagggaatggttgactgggcccgcaactctgaggacagagtggtgatccccaagagcattttcactcccgtcagctctaaggagttggatgaatcttctgtgttcgtgcttggtgcagttctctataaaaacttggacctgatactgcctacgctgaggaattacacggtgattaactctaaaattatcgttgttactatccggcccgagcccaagaccaccgattccttcttggagatcgaactggcgcaccttgcaaatggcactttaaacccatattgtgtgttatgggatgattccaagacaaacgagtccctgggaacctggtctacacagggctgcaaaaccgtgctgacggatgccagtcataccaaatgcctatgtgacaggctctcaacttttgcaatcttggcccaacagccacgggagatcatcatggaatcctcaggtaccccgagcgttacgctcatagtgggatctgggttgagttgtctcgccctcatcacacttgctgtggtctacgccgctttgtggagatatatcaggtctgagcggtcaatcatactcatcaacttttgcctgagcataatatcttctaacattctcatcctagtcggacagactcagactcacaataagtccatctgcacaacaacaactgccttcttacattttttcttcctggcgtctttctgctgggtgttgacagaagcctggcagtcctacatggcagtaactggaaagatacgaacccgactcataagaaaacgcttcctttgtttgggctggggcctgcctgctctggtggtggctactagtgttgggttcaccagaacgaaagggtacggcaccgatcattattgctggctgagcctcgagggcggactcctctacgcttttgtgggtccggcggctgcagtggttctggtcaacatggtcattggaattctcgtgttcaataaactggtctccagagacggaattttagacaagaagttaaaacatcgagccggacaaatgtcggaaccacatagcggactgacactgaaatgtgcaaagtgcggggtcgtgtccactaccgcgctttctgccaccaccgccagtaacgccatggcctccctgtggtcctcatgtgtggtgcttccgctgctggcactcacttggatgtctgcagttctcgccatgactgataagcggtcaattttattccagatactatttgcagtgtttgattccttgcaggggttcgtgatcgtgatggtgcattgcattctgaggcgagaagtacaagacgcatttcgttgtcgactcaggaactgccaggatcccataaacgccgacagttccagcagctttccaaacgggcatgctcaaatcatgactgactttgaaaaagatgtggacattgcctgccggagtgtcctccacaaagatattggaccctgcagggcagccactattacgggcacattatcgcgaatttctttgaacgacgacgaagaagagaaagggacaaaccccgagggcttaagctacagtaccttgcctgggaacgtgatttcgaaggtgatcattcagcagcccaccggcctccacatgccgatgtcgatgaatgagctcagcaatccttgcctaaaaaaggagaactccgagctccggcgcacagtctatttgtgtaccgacgataacttaaggggggctgacatggatattgtgcatccacaggagaggatgatggagtcggactacattgttatgccccggtcctccgttaacaatcagccctccatgaaggaggagagcaaaatgaacatcggcatggaaacactaccccacgaacgcttattgcactataaggtaaatcctgagtttaatatgaaccccccagtgatggatcaattcaacatgaacctagagcagcacttggcccctcaagagcacatgcagaatcttcccttcgagccccgaacggccgtcaaaaacttcatggcctcggagctcgacgacaacgcggggttgagcagatctgagacaggcagtactatctccatgtcatcacttgaacgaagaaaatctcggtattccgacttggattttgagaaggtgatgcacactcgcaagaggcacatggagttgtttcaggagttgaaccagaagttccagacacttgaccgctttcgtgacattccaaacacctctagcatggaaaaccctgcccccaacaaaaacccatgggatacttttaagaatccatcagaatacccccactatacgactatcaatgtgctagataccgaggccaaggacgcgctcgagctcaggcctgcggaatgggaaaagtgccttaatttgccccttgatgtgcaggaaggtgatttccagactgaagtgtag

SEQ ID NO: 268589 - DNA, 4569 bp, Artificial Sequence
  derived and/or modified sequence
atgaaggctgtgaggaacctgctgatctacatcttcagcacctacctgctggtgatgtttggcttcaatgctgcccaggacttctggtgcagcaccctggtgaagggcgtcatctacggcagctacagcgtgtctgagatgttccccaagaacttcaccaactgcacctggaccctggagaacccagaccccaccaagtacagcatctacctgaagttcagcaagaaggacctgagctgcagcaacttcagcctgctggcctaccagtttgaccacttcagccatgagaagatcaaggacctgctgaggaagaaccacagcatcatgcagctgtgcaacagcaagaatgcctttgtgttcctgcagtatgacaagaacttcatccagatcagaagagtcttccccaccaacttccctggcctgcagaagaagggggaggaggaccagaagagcttctttgagttcctggtgctgaacaaggtgagccccagccagtttggctgccacgtgctgtgcacctggctggagagctgcctgaagtcagaaaatggaagaacagagagctgtggcatcatgtacaccaagtgcacctgcccccagcacctgggggagtggggcattgatgaccagagcctcatcctgctgaacaacgtggtgctgcccctgaatgagcagacagagggctgcctgacccaggagctgcagaccacccaggtgtgcaacctgacccgggaggccaagaggcctcccaaggaggagtttggcatgatgggagaccacaccatcaagagccagaggcccaggtctgtgcatgagaagagggtgccccaggagcaggctgatgctgccaagttcatggcccagacaggagagagcggcgtggaggagtggagccagtggagcacctgcagcgtgacctgtggccagggcagccaggtgaggaccaggacctgtgtgagcccctacggcacccactgcagcggccccctgcgggagagccgggtgtgcaacaacacagccctgtgccctgtgcatggagtgtgggaggagtggagcccctggagcctgtgcagcttcacctgtggccggggccagaggaccaggaccaggagctgcaccccaccccagtatggaggccggccctgtgagggccctgagacccaccacaagccctgcaacatcgccctgtgccctgtggatggccagtggcaggagtggagctcctggagccagtgcagcgtgacctgcagcaatggcacccagcagaggagccggcagtgcacagctgctgcccacggcggcagcgagtgccggggcccctgggccgagagccgggagtgctacaacccagaatgtacagccaacggccagtggaaccagtggggccactggagcggctgcagcaagagctgtgatggcggctgggagcggcgcatccgcacctgccagggcgctgtgatcaccggccagcagtgtgagggcactggagaggaggtgcggcgctgcaatgagcagcgctgcccagccccctatgagatctgcccagaggactacctgatgtccatggtgtggaagaggaccccagctggggacctggccttcaaccagtgccccctgaatgccaccggcaccaccagccgccgctgcagcctgagcctgcacggcgtggccttctgggagcagcccagctttgcccgctgcatcagcaatgagtaccgccacctgcagcacagcatcaaggagcacctggccaagggccagaggatgctggccggagatggcatgagccaggtgaccaagaccctgctggacctgacccagaggaagaacttctacgccggggacctgctgatgtctgtggagatcctgagaaatgtgacagacaccttcaagagggccagctacatcccagccagtgatggagtgcagaacttcttccagatcgtgagcaacctgctggatgaggagaacaaggagaagtgggaggatgcccagcagatctacccaggcagcattgagctgatgcaggtgattgaggacttcatccacatcgtgggcatgggcatgatggacttccagaacagctacctgatgactggaaatgtggtggccagcatccagaagctgcctgctgcctctgtgctgacagacatcaacttccccatgaagggcaggaagggcatggtggactgggccagaaattctgaggacagagtggtgatccccaagagcatcttcacccctgtgagcagcaaggagctggatgagagctctgtgtttgtgctgggcgctgtgctgtacaagaacctggacctgatcctgcccaccctgaggaactacaccgtcatcaacagcaagatcatcgtggtgaccatccggcctgagcccaagaccacagacagcttcctggagattgagctggcccacctggccaacggcaccctgaacccctactgtgtgctgtgggatgacagcaagaccaatgaaagcctgggcacctggagcacccagggctgcaagacagtgctgacagatgccagccacaccaagtgcctgtgtgaccggctgagcacctttgccatcctggcccagcagccccgggagatcatcatggagagcagcggcacccccagcgtgaccctcatcgtgggcagcggcctgagctgcctggccctgatcaccctggccgtggtgtatgctgccctgtggagatacatccgctctgagaggagcatcatcctgatcaacttctgcctgagcatcatcagcagcaacatcctgatcctggtgggccagacccagacccacaacaagagcatctgcaccaccaccacagccttcctgcacttcttcttcctggccagcttctgctgggtgctgacagaggcctggcagagctacatggctgtgacaggcaagatccgcaccaggctcatcaggaagcgcttcctgtgcctgggctggggcctgcctgccctggtggtggccacctctgtgggcttcaccaggaccaagggctatggaacagaccactactgctggctgagcctggagggcggcctgctgtatgcctttgtgggccctgctgctgctgtggtgctggtgaacatggtgattggcatcctggtgttcaacaagctggtgtccagagatggcatcctggacaagaagctgaagcaccgggccggccagatgtctgagccccacagcggcctgaccctgaagtgtgccaagtgtggggtggtgtccaccacagccctgagcgccaccacagccagcaatgccatggccagcctgtggagcagctgtgtggtgctgcccctgctggccctgacctggatgtctgctgtgctggccatgacagacaagaggagcatcctcttccagatcctgtttgctgtgtttgacagcctgcagggctttgtgattgtgatggtgcactgcatcctgcggcgggaggtgcaggatgccttccgctgccgcctgaggaactgccaggaccccatcaatgctgacagcagcagcagcttccccaatggacatgcccagatcatgacagactttgagaaggatgtggacatcgcctgccgctctgtgctgcacaaggacatcggcccctgcagagctgccaccatcaccggcaccctgagccgcatcagcctgaatgatgatgaggaggagaagggcaccaaccctgagggcctgagctacagcaccctgcctggaaatgtcatcagcaaggtgatcatccagcagcccaccggcctgcacatgcccatgtccatgaatgagctgagcaacccctgcctgaagaaggaaaattctgagctgcggaggacagtgtacctgtgcacagatgacaacctgcggggagctgacatggacatcgtgcacccccaggagaggatgatggagagtgactacatcgtgatgcccaggagctctgtgaacaaccagcccagcatgaaggaggagagcaagatgaacatcggcatggagaccctgccccatgagcggctgctgcactacaaggtgaaccctgagttcaacatgaacccccctgtgatggaccagttcaacatgaacctggagcagcacctggccccccaggagcacatgcagaacctgccctttgagcccaggacagctgtgaagaacttcatggccagcgagctggatgacaatgccggcctgagccgctcagaaacaggcagcaccatctccatgagcagcctggagaggaggaagagccgctacagcgacctggactttgagaaggtgatgcacaccaggaagaggcacatggagctgttccaggagctgaaccagaagttccagaccctggaccgcttccgggacatccccaacaccagctccatggagaacccagcccccaacaagaacccctgggacaccttcaagaaccccagcgagtacccccactacaccaccatcaacgtgctggacacagaggccaaggatgccctggagctgcggcctgctgagtgggagaagtgcctgaacctgcccctggatgtgcaggagggggacttccagacagaggtgtag

SEQ ID NO: 268590 - DNA, 4569 bp, Artificial Sequence
  derived and/or modified sequence
atgaaggccgtgcggaacctgctgatctacatcttcagcacctacctactggtcatgtttggatttaacgcggcgcaagacttctggtgctccaccctggtcaaaggagtgatttatggatcttattccgtgtctgagatgttcccaaaaaacttcaccaattgcacatggacactggaaaacccagacccgactaagtacagcatttatctgaaattttccaaaaaagaccttagttgctccaatttcagcctcttggcctaccagttcgatcattttagccacgagaaaatcaaggacctgttacggaaaaatcattctataatgcagttgtgcaacagcaaaaacgcctttgtgttcctgcagtacgacaagaactttatccagataaggcgggtgtttcccacaaatttccccggcttacagaagaagggcgaggaagaccagaagagtttttttgaattccttgtgctaaataaagtgtcaccttcacagttcggatgtcacgtgttgtgtacgtggctggagagctgcctgaagagcgagaatgggcgcacagagagttgcggtatcatgtatacgaagtgcacttgccctcaacatttgggggagtggggaatagacgatcagtccctcattcttttgaacaatgtcgtgctgcccttgaacgaacagactgagggatgcctcacccaggagctccaaaccactcaggtgtgtaatctcacaagagaagcaaaaagaccaccgaaggaggagttcgggatgatgggcgatcacacgatcaaaagtcaaaggccaagaagtgtccacgagaagcgcgtcccacaagagcaagcggacgccgctaaattcatggctcagactggggagtctggcgtcgaggaatggagtcaatggtcgacctgttctgtcacatgtggccagggctctcaggtcaggacacgcacctgtgtgtccccctatgggacacactgctcaggcccgctgcgggaaagccgagtgtgcaataacacagccttgtgtcctgtgcacggcgtctgggaggaatggtcgccatggagcctgtgttcctttacttgcggccgggggcaaaggactaggacacgcagctgcacacctcctcagtacggcggaaggccatgtgagggccctgaaactcaccataaaccctgcaatatagccctctgccccgtggatgggcagtggcaagaatggtctagctggtcgcagtgttctgtcacgtgttcaaacgggacccagcagagatcccgtcagtgcaccgctgccgcccacgggggaagcgaatgccgtggaccatgggctgagagtcgcgaatgttacaaccctgaatgcaccgccaatggccagtggaaccagtggggccattggtctggctgttccaagtcgtgtgatggtgggtgggaacggcggataagaacctgccagggggcagtgatcacaggacagcagtgtgagggtacaggggaagaggtcagacggtgtaatgagcaaagatgcccagcaccttatgaaatctgccctgaggattacctgatgtcaatggtctggaaaagaactcctgccggcgacttggcctttaaccagtgcccactgaacgccaccggtacaacatcccgtaggtgctctctgagcttgcacggtgtcgccttttgggaacaacctagttttgcaagatgcatctcaaatgagtacaggcaccttcagcactccattaaggaacacctggctaagggacagcggatgcttgctggggacggaatgtcgcaggtgactaagaccctgctcgacctcacccagcgaaagaacttttacgctggcgatcttttgatgtccgtcgagatcttgcgcaacgttacagacacgtttaagagagccagttatatcccagcatcagacggtgtgcagaattttttccagatagtgtccaacctgttggacgaagaaaacaaagagaaatgggaggatgctcagcagatttaccctggatcaatagagttaatgcaggtgattgaggactttattcacatcgtgggaatgggaatgatggactttcaaaactcttatttgatgaccgggaatgtcgttgcttcgatacagaaattacctgctgcctctgtgctcacagatattaatttccctatgaagggcaggaaagggatggtggactgggcccgcaacagtgaagaccgcgtggtaatcccgaagtctatttttactccggtgagtagcaaagagctcgatgagagcagtgtctttgtacttggtgcagtgctgtataagaacctggatttgatcctgcccacgcttagaaactacacagtgattaattccaagatcatcgtggtgaccatccgacccgagcctaagaccactgatagcttcttagagatcgagctggcacacctagctaatgggacactgaacccttactgtgttttgtgggacgacagtaagacaaatgagagtttgggtacctggtcgactcagggctgtaaaaccgtgctcactgacgccagccatacaaagtgcctttgcgacagactgagtacatttgctatactggcacagcaacctagggaaatcataatggaatcttccgggacaccatccgttaccctgatcgtcggctcaggactgagttgtctggccttgattacactggccgtggtgtatgctgccctatggaggtacatcagatccgaaaggagcattatcctgatcaacttctgtctgtcaatcatttcttccaacatcttgatcctcgtcggacaaactcagactcataataagagcatctgtacgacgactacagcttttctgcatttcttttttttggcatcattttgttgggtgctcaccgaggcgtggcagtcctacatggcagtaacgggtaagattagaacacgcctgatccgcaagcggttcctttgcctaggttggggattacctgctttggtggtggcgacgagcgtgggctttacccgcacgaaaggttatggcactgaccattactgctggctctcactggagggtggattgctgtatgctttcgtgggcccagcagctgcggttgtgctcgtgaatatggtcattggaatcctcgtctttaataaactcgtgtcgcgtgacggtatcttggacaaaaaactaaagcatcgggctggtcagatgagcgaacctcactctggcctcactttaaagtgcgcgaaatgcggcgtggtcagtacaacggctctgagtgctaccacagccagtaatgccatggccagcctgtggtcctcgtgtgtcgtgcttccgctgctcgccctgacctggatgtccgctgtgctggcgatgaccgacaagcggagtattctgttccaaatactgttcgcagttttcgacagcctccaaggtttcgtgatcgtaatggtccactgtatcctccggcgcgaagtacaggatgctttccgatgcaggcttcgtaactgccaagatcccattaacgctgatagttccagttcatttcccaatgggcacgcgcagattatgaccgactttgagaaggatgtggatatagcatgtaggtccgtgctccacaaggatatcggaccttgcagggctgcgacaatcaccggtaccttgagccgaattagcctcaatgacgatgaggaggaaaagggtacgaaccctgagggcttatcatacagcacactgcccggcaacgtgatatctaaggtcatcatacagcagccaactgggttgcacatgccaatgtcgatgaacgaactgagcaacccatgccttaaaaaagagaactccgagctgcgcaggaccgtttacctgtgcactgatgacaacttgaggggggctgatatggacattgtgcatcctcaggaacgtatgatggaatcggactacatcgtcatgccccgttcctccgtcaataaccagccctccatgaaagaggagtctaagatgaacatcggcatggagaccctacctcacgagagactgctccattacaaggtgaatcccgagtttaatatgaacccccctgttatggatcagtttaacatgaatctcgagcagcacctggctccacaggaacacatgcaaaatctccctttcgagccccggactgctgtgaagaattttatggcatccgagctggacgacaatgctggcctgtccagatctgagaccgggagtacgattagcatgtcttctttggagcggcggaagtctcggtactcggaccttgacttcgagaaggtgatgcacactcgcaagcgacacatggaattgtttcaggagctgaaccaaaagttccagaccctcgacagattccgggatattcctaatacgagcagtatggaaaaccctgcaccaaataaaaacccctgggatacgtttaaaaaccctagcgaataccctcattacacaaccatcaatgtactagacacagaagcaaaagacgctctggagctgcgccccgccgagtgggaaaaatgcctgaaccttccattggacgttcaggaaggagatttccagactgaggtgtag

SEQ ID NO: 268591 - DNA, 4569 bp, Artificial Sequence
  derived and/or modified sequence
atgaaagccgtaaggaatctgcttatatacattttttctacttacctcttagtgatgttcggattcaacgccgcacaggacttttggtgctctaccttggtcaaaggggtaatttatggtagctacagcgtctccgaaatgtttcctaaaaactttactaattgtacctggacacttgaaaatcctgatccaaccaaatactctatttaccttaagtttagcaaaaaagacctgtcatgcagcaactttagcttattggcctaccagtttgaccatttcagccacgaaaaaattaaagacctcttgagaaagaatcatagcatcatgcagctatgcaacagcaaaaatgcttttgtatttctgcagtacgacaaaaacttcatccaaatacggagggtgtttcccacgaacttcccgggactgcagaagaagggcgaggaggatcaaaagagcttctttgagttccttgtgctcaacaaggtcagcccatcccagttcgggtgtcacgtgctgtgcacatggctggagtcttgcttaaaaagcgaaaacggcagaaccgaaagttgtggaatcatgtatactaagtgcacctgcccacagcacctgggagaatggggcattgatgatcaaagcttgatcctgctgaacaacgtcgtcctgcccctcaatgagcagacagaagggtgtctgacacaagagctgcagaccacacaggtgtgcaacttaactcgcgaggcaaagcgcccaccaaaggaggaatttggcatgatgggggaccacactattaagtcacagagacctagaagcgtgcacgagaaacgagtgcctcaggaacaggccgacgccgctaagttcatggctcagaccggcgaatctggcgttgaggagtggagccagtggtccacctgtagcgtgacatgcgggcagggctcacaggtgcgcaccaggacatgtgtctcgccctacggaactcactgcagtggtcccctgagagaatcccgtgtctgtaacaacaccgcgctatgcccagtgcacggagtttgggaagaatggagcccatggtcattgtgttctttcacatgtggcaggggccagagaacacggacgcgctcttgtacgcctccacagtacggcggacggccttgcgagggcccagagacccaccataaaccatgtaacattgccctgtgccctgttgacggacagtggcaagagtggtcttcatggtcccagtgttcagtgacatgctctaacgggacccaacagaggtcccggcagtgcactgccgcagctcacggtggctccgagtgcagggggccttgggcggagtctcgagagtgctacaaccccgagtgtacagccaatggacagtggaaccagtggggccattggagtggttgcagcaagtcatgcgatggcggttgggagcgtcgcattcggacttgccagggtgctgtcattactggacagcagtgtgagggcacgggtgaggaggtacgaaggtgtaatgagcaacggtgtcctgcgccttacgagatttgcccggaggactaccttatgtccatggtctggaaaaggactcccgctggggatctggcattcaaccaatgccccctgaatgctactgggacgacttcgcgcaggtgctcgttatccctgcacggtgtggccttctgggagcagcctagcttcgctcgctgtatttccaacgagtaccgacacctgcagcacagcattaaagagcacctcgccaaaggccagaggatgctcgctggcgacggcatgagtcaggtgactaagacgctcctggatctgacgcagaggaagaacttttatgcaggagatttgttaatgtccgtggagatccttcgaaacgtgactgacacattcaagagggcctcctatatccccgcatcagatggagttcagaatttcttccagattgtgtcaaacttgctcgatgaagagaataaggaaaaatgggaagacgcacaacagatctaccctggatctattgagctgatgcaggtcattgaagacttcatacacattgtaggcatgggcatgatggatttccaaaacagctatctgatgactggaaacgtggtcgcttccattcagaaattacccgctgcgtcagttctgacagatattaactttcctatgaaggggaggaaagggatggtggattgggccaggaactctgaggaccgcgtggttattcctaagagtatctttaccccagtctcctctaaggagctggacgagtcctctgtgtttgtcctgggggcagtgctgtacaaaaacctggacctcatccttcctactctcaggaactacacagttattaattctaagatcattgtagtaacgattcggccagagcccaagacaacggactctttcttggaaattgagttggcccatctggccaatggcacactgaacccctactgtgtgctgtgggacgattcaaaaactaacgaaagtttgggcacctggtccactcaggggtgtaagactgtcctaacagacgcgagccacaccaaatgcctgtgcgacaggctatctacctttgccatactcgctcagcagcctcgggagatcattatggaaagttccggcacgcctagtgtgactctgattgtgggcagcggcctgtcgtgcttagccttgattacactggcagtcgtttatgctgccctgtggagatacattagatcggagaggtcaatcatcttgataaatttctgcctaagtataattagcagtaacattcttatcctggtggggcagacacagacccataataagagtatttgcacgaccactacagcatttctccacttctttttcttggctagcttttgctgggtcttgactgaggcctggcaatcctacatggccgtgacaggaaagatccgtacccggctcatcagaaaacgcttcctgtgcctggggtgggggctcccagccttagtcgtagctacctctgtgggctttaccaggactaaaggctacgggactgatcattattgctggctcagtctggaaggagggctgctgtacgctttcgttggacccgcagccgctgtcgtgctcgtgaacatggtaatcggcattctggtgtttaacaagctcgtatccagggacggcatcctcgacaaaaaactcaagcatcgggcaggtcaaatgagtgagccccactccggcctaactctgaagtgcgctaagtgcggcgtggtgtccactaccgctctgtctgctacaacagcgtccaacgctatggccagcttgtggagctcttgcgtggtgctccctctgctggccctcacgtggatgagcgccgtgcttgccatgactgataagcggtcaattttattccagatattgttcgcagtgtttgactctctgcagggtttcgtgatcgtaatggttcactgtattttgcgtagggaggtccaggatgcctttcgttgtcgcctgcgcaactgccaggacccaattaacgccgatagctccagcagcttccccaatggccacgcccagatcatgaccgattttgagaaggacgtggatattgcatgccgctcagtcttgcacaaggatatcggcccttgccgcgcagctacaatcaccggaacgttgagccgcatttcactcaatgatgacgaagaggagaaaggaacaaaccctgagggcctgtcctatagtactctgcctgggaacgtcatcagcaaagtgatcattcagcagcctaccgggctgcacatgcctatgagcatgaacgagctgtctaacccttgcctaaaaaaggagaacagcgaactgcgcaggactgtctacttgtgcaccgacgataacctgagaggggcagatatggatatcgtgcaccctcaagagagaatgatggaatctgactatatagtgatgcctagaagctcagtgaacaatcaaccctctatgaaggaggaatctaaaatgaacatcggcatggagaccctgcctcatgaacgtcttctacactataaggtcaacccggagttcaatatgaaccccccagtcatggatcagttcaatatgaacctagaacagcatctggcgccacaggagcacatgcagaatctgccgttcgaacctcggactgccgtgaagaattttatggcaagcgagcttgatgacaatgctggactctcacgatccgaaaccggttccaccatctcgatgtctagcctggagcgcagaaaatcccggtatagcgacttggactttgaaaaggtgatgcatactagaaagaggcatatggagttattccaggaacttaatcagaagttccagactttggataggttccgggacatcccgaataccagttcaatggaaaatcctgccccaaacaaaaatccttgggacaccttcaaaaacccctccgagtacccgcactatacaacaatcaatgtcctggacaccgaggccaaagatgccttagagctcaggcctgccgagtgggagaaatgcctgaatctgcccctggacgttcaggagggtgactttcagaccgaagtttag

SEQ ID NO: 268592 - DNA, 6010 bp, Artificial Sequence
  derived and/or modified sequence
ctttccgacatcaccagccaaggatttttttccccgctctccttagtcgccgtccgtccatcagtacctgcaggggggaggaggaggagggaggaaagcggaaagaggaaaaagcataagcttgagccttccgatccgaccacgaatactcctgtaataaacccaccgccccaacaaatctgccatagcagccgccgccgccgccggtcacttctcgtctcagcgctttctttgcttcttggtttgttgggggtagcttttatgaaacaaatctttgctattaagccacttacattttggggggttccttagagtctcccttgggggggcttctccctccctttagcccccctcggtttggaggttggattcagttggatacggcgcaaggttctgggctcctgctggcttttttttcctctctctcatcgacccccctttggttcccaccccccaccttttgcttttcgtatgtatgcatttttaaaaataaatcctgattttggaagctgagccggggaaaatgggcaacggtgattgggaccgaaggggagtctctccgtcactgttgctgggacgcgtgcctgtgctggtgtcttagagcaagagcctccctgagctttcggagtggaagaacagtggaagagactgcagcctaaagacttttaaaattaacttggcatcacttttatcagctcaaaggctaaacaaacaaacaaaagcagtgtcatttattctaagaaataacttcttaaaggttaaagctgaaaaatattcaagttatttttggataacaacttacagaggccaaatgacataggatgaaggctgttcgtaacctgctgatttatatattttccacctatctcctggttatgtttggatttaatgctgcccaagacttctggtgttcaactttggtgaagggagtcatttatggatcgtattctgtaagtgaaatgtttcctaaaaactttacaaactgcacttggacgctggaaaatccagatccaaccaaatatagcatttacctgaaattttccaaaaaggaccttagctgctctaacttttcactcctggcttatcagtttgatcatttttcccatgaaaaaataaaggatcttttaagaaagaatcattctataatgcaactctgcaattccaagaatgctttcgtttttctacagtatgataaaaattttattcaaatacgtcgagtatttccaactaatttcccaggattacagaaaaaaggggaagaagatcagaaatctttttttgagtttttggtattgaacaaggtcagcccaagccagtttggttgccatgtattatgtacttggttggagagctgcttaaaatcagaaaatgggagaacagaatcatgtgggatcatgtatacaaaatgcacctgccctcagcatttgggagagtgggggatcgacgaccagtcgctgattttgttaaataacgtggtgttacccctgaatgagcagacagagggctgcctgacccaggagctgcaaaccacccaagtctgcaatcttaccagggaggccaagcgaccacccaaagaagaatttggaatgatgggagatcatacaattaaaagtcagcgacctcgatctgttcatgaaaaaagggtccctcaggaacaagctgatgctgctaaatttatggcacaaactggtgaatctggtgtggaagagtggtcccagtggagcacatgttcggttacttgtggtcaagggtcgcaggtgcgaaccagaacttgtgtatcaccttacgggacacactgcagcggcccattaagagaatcaagggtttgcaataacactgccctctgtccagtacacggagtatgggaggaatggtcaccatggagtttatgttcatttacatgtggtcgaggccaaagaacaagaacaaggtcatgcacacctcctcagtatggaggaaggccgtgtgaaggacctgaaacacatcataagccttgtaatattgctctttgcccagttgatggacagtggcaagagtggagttcgtggagccagtgctcagtaacgtgctcgaatgggactcagcagagaagccggcagtgcactgcagctgcccatggaggctccgaatgcagagggccatgggcagaaagcagagagtgctataaccctgaatgtacagccaatggtcaatggaatcagtggggtcattggagtggttgttccaagtcctgtgatggcggctgggaaaggcgaataaggacctgtcagggtgcagtgataacagggcagcaatgtgaaggaacgggcgaagaagtgagaagatgcaatgagcagcgatgccctgcaccttatgaaatatgccctgaggattatctgatgtcgatggtgtggaaaagaactccagcaggcgacttggcattcaatcaatgtcccctgaatgccacaggcaccactagcagacgctgctctctcagtcttcatggagtggccttctgggaacagccgagctttgcaagatgcatatcaaatgagtacagacacttgcagcattcaattaaagagcaccttgctaaggggcagcgaatgctggcaggtgatggaatgtcccaggtgaccaagacactgttggatttaactcagagaaaaaatttctatgcaggcgatcttctgatgtctgtggagatcctgagaaatgtgacagacacatttaaaagggcaagttacatccctgcatctgatggtgtccagaacttctttcaaatagttagcaaccttctagatgaagaaaacaaggaaaaatgggaagatgcacaacagatttatccagggtcaatagagttaatgcaggtgattgaagattttatacacattgttggaatggggatgatggactttcagaattcatacttaatgactggaaatgtagtggctagtattcagaagcttcctgcagcctctgttctaacagacatcaactttccaatgaaaggacggaagggaatggttgactgggcaagaaactcagaagatagggtagtaattccaaaaagcattttcactccggtgtcatcaaaagaattagatgaatcatctgtatttgttcttggcgcagtcctatacaaaaacttagatctaattttgcccactttgagaaattatactgtcattaattccaaaatcatcgtggtcacaataaggcctgaacccaaaacaaccgattcgtttctggagatagaactagctcatttggctaatggtactttgaatccctattgtgtattgtgggatgactccaaaacgaacgagtctttgggaacgtggtccacccagggatgtaaaactgtgcttaccgatgcatcccatacgaaatgcttatgtgatcgtctctctaccttcgccattttggctcagcaacctagagaaataatcatggaatcctctggcacaccttcagttaccctaatagtaggcagtggtctttcttgcttggccttgattaccctagcagttgtctatgcagcattatggaggtacatacgctctgagagatccataatactaattaacttctgcctgtctatcatctcatccaatatcctcatactggttggacagactcagacacataataagagtatctgcacaaccaccactgcatttttgcactttttcttcctggcttcattctgttgggttttgactgaggcgtggcaatcatatatggctgtaactggaaaaattaggacacggcttataagaaaacgctttttgtgccttggatggggtttaccagcattagtagtggccacatcagtaggcttcaccagaacaaaaggatatggcactgatcactactgctggctctctcttgaaggaggactactctatgcttttgtgggacctgcagccgctgttgtcctggtcaacatggtgattggcattttggtatttaataaacttgtttccagagatggaatcctagataaaaagctcaaacacagagccggtcagatgagtgagcctcatagcggtttgacgctcaaatgtgccaagtgtggagtagtttcaacaacagctttgtcagccaccaccgccagtaacgccatggcgtctctttggagctcctgtgtggtgttgccccttctggctttgacgtggatgtctgcggttctggccatgacagataaacgctccatattgtttcaaatactttttgctgtgtttgattcattgcaaggctttgttatagtcatggtccactgcattcttcggagagaggttcaggatgcatttagatgccgattgagaaactgtcaggatcccatcaatgcagattcttcgagttcgtttcctaatgggcatgctcaaatcatgacagactttgaaaaggatgtagacattgcctgtcgatcagttcttcataaggatattggtccttgccgagcagccacaataacaggaacactttctaggatttctctaaatgatgatgaagaagaaaagggaacaaaccctgaagggctaagctattcaacattgcctggaaatgtcatttccaaagtcatcatccagcaacccacaggtttgcacatgcccatgagtatgaatgagcttagcaatccatgtttgaaaaaagaaaatagtgaattgcggagaactgtgtacttatgtacggatgataatttgagaggggctgacatggacatagtccatcctcaagaaagaatgatggaaagtgactatattgtgatgcccagaagttctgtaaataaccagccttcaatgaaagaagaaagcaaaatgaatattggcatggaaaccttgccgcatgaaaggctattgcactacaaagtaaaccctgaattcaatatgaatccccctgtaatggaccagttcaatatgaacttagagcaacatctcgcaccccaggaacatatgcagaatttgccctttgaacctcgcacagctgtgaagaatttcatggcctctgagttggatgataatgcaggactatcaagaagtgaaactggatcaacgatatcaatgagttctttagagagaagaaaatcacgatattcagaccttgactttgagaaggtcatgcatacaaggaagaggcatatggaactatttcaagaactaaatcagaaatttcaaactttggacagatttcgggatataccaaatacaagcagtatggaaaaccccgcaccaaacaagaatccatgggacactttcaaaaaccccagtgaatacccgcattacaccacaatcaatgtcttagacacagaggcaaaggatgctttggaactgaggccagcagagtgggagaagtgtctgaatttgcctctggatgtgcaagagggtgactttcaaacagaagtttaaaaaaatcaaaatggactaaggtagagacaaaactttattgcactgacacttaagacttgggaagcctgacatttctatctggacagtgtgactatcttatgtcaggaccttcatgtgccaaacgtcagtggtgttttcatatggtaacttctcactagtcaggctagtggagagatgaccaggtgtacagttctgaccatcctgtgttgtaagtacccgtggaatggatttgtaaggtaatctttatagataaacctcaagcaacgattcatgttgtaaccgcttcatatggtttagttttcaaaaaacttcaccatgaagcacaatgtatatatttatgcagtttttaaagtttataacagtctgtttggccattactacactttttactttataatataaaagcaaagtttttgtcattaaatgaatgtttgttgagctacattcttcattgctttaaatgcaataaagtaataatctcacttttatatgaataatatatttcacatctttattattgcagttttctctagaaagctctgagaagctttctctgctgcagctgtgtataaaatatttaaaatgttgtatggtgtaaataaacttttgtctacatatca

SEQ ID NO: 268593 - DNA, 4569 bp, Artificial Sequence
  derived and/or modified sequence
atgaaggccgtgagaaacctgctgatctacatcttcagcacctacctgctggtgatgttcggcttcaacgccgcccaggacttctggtgcagcaccctggtgaagggcgtgatctacggcagctacagcgtgagcgagatgttccccaagaacttcaccaactgcacctggaccctggagaaccccgaccccaccaagtacagcatctacctgaagttcagcaagaaggacctgagctgcagcaacttcagcctgctggcctaccagttcgaccacttcagccacgagaagatcaaggacctgctgagaaagaaccacagcatcatgcagctgtgcaacagcaagaacgccttcgtgttcctgcagtacgacaagaacttcatccagatcagaagagtgttccccaccaacttccccggcctgcagaagaagggcgaggaggaccagaagagcttcttcgagttcctggtgctgaacaaggtgagccccagccagttcggctgccacgtgctgtgcacctggctggagagctgcctgaagagcgagaacggcagaaccgagagctgcggcatcatgtacaccaagtgcacctgcccccagcacctgggcgagtggggcatcgacgaccagagcctgatcctgctgaacaacgtggtgctgcccctgaacgagcagaccgagggctgcctgacccaggagctgcagaccacccaggtgtgcaacctgaccagagaggccaagagaccccccaaggaggagttcggcatgatgggcgaccacaccatcaagagccagagacccagaagcgtgcacgagaagagagtgccccaggagcaggccgacgccgccaagttcatggcccagaccggcgagagcggcgtggaggagtggagccagtggagcacctgcagcgtgacctgcggccagggcagccaggtgagaaccagaacctgcgtgagcccctacggcacccactgcagcggccccctgagagagagcagagtgtgcaacaacaccgccctgtgccccgtgcacggcgtgtgggaggagtggagcccctggagcctgtgcagcttcacctgcggcagaggccagagaaccagaaccagaagctgcacccccccccagtacggcggcagaccctgcgagggccccgagacccaccacaagccctgcaacatcgccctgtgccccgtggacggccagtggcaggagtggagcagctggagccagtgcagcgtgacctgcagcaacggcacccagcagagaagcagacagtgcaccgccgccgcccacggcggcagcgagtgcagaggcccctgggccgagagcagagagtgctacaaccccgagtgcaccgccaacggccagtggaaccagtggggccactggagcggctgcagcaagagctgcgacggcggctgggagagaagaatcagaacctgccagggcgccgtgatcaccggccagcagtgcgagggcaccggcgaggaggtgagaagatgcaacgagcagagatgccccgccccctacgagatctgccccgaggactacctgatgagcatggtgtggaagagaacccccgccggcgacctggccttcaaccagtgccccctgaacgccaccggcaccaccagcagaagatgcagcctgagcctgcacggcgtggccttctgggagcagcccagcttcgccagatgcatcagcaacgagtacagacacctgcagcacagcatcaaggagcacctggccaagggccagagaatgctggccggcgacggcatgagccaggtgaccaagaccctgctggacctgacccagagaaagaacttctacgccggcgacctgctgatgagcgtggagatcctgagaaacgtgaccgacaccttcaagagagccagctacatccccgccagcgacggcgtgcagaacttcttccagatcgtgagcaacctgctggacgaggagaacaaggagaagtgggaggacgcccagcagatctaccccggcagcatcgagctgatgcaggtgatcgaggacttcatccacatcgtgggcatgggcatgatggacttccagaacagctacctgatgaccggcaacgtggtggccagcatccagaagctgcccgccgccagcgtgctgaccgacatcaacttccccatgaagggcagaaagggcatggtggactgggccagaaacagcgaggacagagtggtgatccccaagagcatcttcacccccgtgagcagcaaggagctggacgagagcagcgtgttcgtgctgggcgccgtgctgtacaagaacctggacctgatcctgcccaccctgagaaactacaccgtgatcaacagcaagatcatcgtggtgaccatcagacccgagcccaagaccaccgacagcttcctggagatcgagctggcccacctggccaacggcaccctgaacccctactgcgtgctgtgggacgacagcaagaccaacgagagcctgggcacctggagcacccagggctgcaagaccgtgctgaccgacgccagccacaccaagtgcctgtgcgacagactgagcaccttcgccatcctggcccagcagcccagagagatcatcatggagagcagcggcacccccagcgtgaccctgatcgtgggcagcggcctgagctgcctggccctgatcaccctggccgtggtgtacgccgccctgtggagatacatcagaagcgagagaagcatcatcctgatcaacttctgcctgagcatcatcagcagcaacatcctgatcctggtgggccagacccagacccacaacaagagcatctgcaccaccaccaccgccttcctgcacttcttcttcctggccagcttctgctgggtgctgaccgaggcctggcagagctacatggccgtgaccggcaagatcagaaccagactgatcagaaagagattcctgtgcctgggctggggcctgcccgccctggtggtggccaccagcgtgggcttcaccagaaccaagggctacggcaccgaccactactgctggctgagcctggagggcggcctgctgtacgccttcgtgggccccgccgccgccgtggtgctggtgaacatggtgatcggcatcctggtgttcaacaagctggtgagcagagacggcatcctggacaagaagctgaagcacagagccggccagatgagcgagccccacagcggcctgaccctgaagtgcgccaagtgcggcgtggtgagcaccaccgccctgagcgccaccaccgccagcaacgccatggccagcctgtggagcagctgcgtggtgctgcccctgctggccctgacctggatgagcgccgtgctggccatgaccgacaagagaagcatcctgttccagatcctgttcgccgtgttcgacagcctgcagggcttcgtgatcgtgatggtgcactgcatcctgagaagagaggtgcaggacgccttcagatgcagactgagaaactgccaggaccccatcaacgccgacagcagcagcagcttccccaacggccacgcccagatcatgaccgacttcgagaaggacgtggacatcgcctgcagaagcgtgctgcacaaggacatcggcccctgcagagccgccaccatcaccggcaccctgagcagaatcagcctgaacgacgacgaggaggagaagggcaccaaccccgagggcctgagctacagcaccctgcccggcaacgtgatcagcaaggtgatcatccagcagcccaccggcctgcacatgcccatgagcatgaacgagctgagcaacccctgcctgaagaaggagaacagcgagctgagaagaaccgtgtacctgtgcaccgacgacaacctgagaggcgccgacatggacatcgtgcacccccaggagagaatgatggagagcgactacatcgtgatgcccagaagcagcgtgaacaaccagcccagcatgaaggaggagagcaagatgaacatcggcatggagaccctgccccacgagagactgctgcactacaaggtgaaccccgagttcaacatgaacccccccgtgatggaccagttcaacatgaacctggagcagcacctggccccccaggagcacatgcagaacctgcccttcgagcccagaaccgccgtgaagaacttcatggccagcgagctggacgacaacgccggcctgagcagaagcgagaccggcagcaccatcagcatgagcagcctggagagaagaaagagcagatacagcgacctggacttcgagaaggtgatgcacaccagaaagagacacatggagctgttccaggagctgaaccagaagttccagaccctggacagattcagagacatccccaacaccagcagcatggagaaccccgcccccaacaagaacccctgggacaccttcaagaaccccagcgagtacccccactacaccaccatcaacgtgctggacaccgaggccaaggacgccctggagctgagacccgccgagtgggagaagtgcctgaacctgcccctggacgtgcaggagggcgacttccagaccgaggtgtag

SEQ ID NO: 268594 - protein, 841 aa, Artificial Sequence
  derived and/or modified sequence
MSVDEKPDSPMYVYESTVHCTNILLGLNDQRKKDILCDVTLIVERKEFRAHRAVLAACSEYFWQALVGQTKNDLVVSLPEEVTARGFGPLLQFAYTAKLLLSRENIREVIRCAEFLRMHNLEDSCFSFLQTQLLNSEDGLFVCRKDAACQRPHEDCENSAGEEEDEEEETMDSETAKMACPRDQMLPEPISFEAAAIPVAEKEEALLPEPDVPTDTKESSEKDALTQYPRYKKYQLACTKNVYNASSHSTSGFASTFREDNSSNSLKPGLARGQIKSEPPSEENEEESITLCLSGDEPDAKDRAGDVEMDRKQPSPAPTPTAPAGAACLERSRSVASPSCLRSLFSITKSVELSGLPSTSQQHFARSPACPFDKGITQGDLKTDYTPFTGNYGQPHVGQKEVSNFTMGSPLRGPGLEALCKQEGELDRRSVIFSSSACDQVSTSVHSYSGVSSLDKDLSEPVPKGLWVGAGQSLPSSQAYSHGGLMADHLPGRMRPNTSCPVPIKVCPRSPPLETRTRTSSSCSSYSYAEDGSGGSPCSLPLCEFSSSPCSQGARFLATEHQEPGLMGDGMYNQVRPQIKCEQSYGTNSSDESGSFSEADSESCPVQDRGQEVKLPFPVDQITDLPRNDFQMMIKMHKLTSEQLEFIHDVRRRSKNRIAAQRCRKRKLDCIQNLECEIRKLVCEKEKLLSERNQLKACMGELLDNFSCLSQEVCRDIQSPEQIQALHRYCPVLRPMDLPTASSINPAPLGAEQNIAASQCAVGENVPCCLEPGAAPPGPPWAPSNTSENCTSGRRLEGTDPGTFSERGPPLEPRSQTVTVDFCQEMTDKCTTDEQPRKDYT

SEQ ID NO: 268595 - DNA, 9215 bp, Artificial Sequence
  derived and/or modified sequence
aaacagcgccgagccgccgccgcctcagcagcagcagcagcagcagcagcggcagcagcggccgtgcacgcccgggctgcggtcgcacagcgctaacgtgagcggccgccgccctcgccaccccgcctgcccactcccgccgccgccccgctctcgctttccccccggcctcccctcgccccttcccctcccccttcccggcgcactcggggggctgggaacgagctgccatgtgatgcgcgtcccctccgcgagctttcggtgacccacgaactgcccacctcgccggctgccgggagggggctgcgagccgggaagacgcggggaagaggaggcggaaaaggacgcaaagttctccggcgagcgcgttcgttcacatagctcccagttttaacatttcgccacctactgaagacatcatttgggaccaagctgatgagcccttgaagcacagcagataagagtgttgctgttgatcatctttgcctgggaagttgaatgataaagccagaagaaagcatgctttctgatcatttgcagctgtctgcttcagaaagtgagggctccaggaatgaggagaatcttcaagaacttcctcgcactgtgacatgtctgatcccttgctcccatccctgcagcatgaacaaggtggacactcactgacctgtcacaaggttgccccacaaaactttggggtccatgtctgaatggattgccagagccttctcatctctcccttcgcccagttccctgcatcctaagactcgaaggcagcacaggacctggaaaaattacatggtgtgaacggcatgtctgtggatgagaagcctgactcccccatgtatgtgtatgagtccacagtccactgcaccaacatcctcctgggcctcaatgaccagcggaaaaaggatattctctgtgacgtgactttgatcgtggagaggaaggagttccgggcccaccgggctgtgctggccgcatgcagtgaatatttttggcaggcgctggttggacagacaaaaaatgatttggtggtcagcttgcctgaggaggtcacagccaggggctttgggccgctgttacagtttgcctacactgccaagctgttactcagcagagaaaacatccgcgaggtcatccgctgtgctgagttcctgcgcatgcacaacctggaggactcctgcttcagcttcctgcagacccagctcctgaacagtgaggatggcctgtttgtgtgccggaaggatgctgcgtgccagcgcccacacgaggactgcgagaactctgcaggagaggaggaggatgaagaggaggagacgatggattcagagacggccaagatggcttgccccagggaccagatgcttccagagcccatcagctttgaggccgccgccatccccgtagcagagaaggaagaagccctgctgcccgagcctgacgtgcccacagacaccaaggagagctcagaaaaggacgcgttaacgcagtaccccagatacaagaaataccagcttgcatgtaccaagaatgtctataatgcatcatcacacagtacctcaggttttgcaagcacattccgggaagataactctagcaacagcctcaagccggggcttgccagggggcagattaaaagtgagccgcccagtgaagagaatgaggaagagagcatcacgctctgcctgtctggagatgagcctgacgccaaggacagagcgggggatgtcgagatggaccggaaacagcccagccctgcccctacccccacggccccagctggggccgcctgcctggagagatccaggagcgtggcctcgccctcctgcttaaggtctctgttcagcataacgaaaagtgtggagctgtctggcctgcccagtacatctcagcagcactttgccaggagtccagcctgcccttttgacaaggggatcactcagggtgaccttaaaactgactacacccctttcacagggaattatggacagccccacgtgggccagaaggaggtgtccaacttcaccatggggtcgcccctcagggggcctgggttggaggctctctgtaaacaggagggagagctggaccggaggagcgtgatcttctcctccagcgcttgtgaccaagtgagcacctcggtgcattcttattctggggtgagcagtttggacaaagacctctctgagccggtgccaaagggtctgtgggtgggagccggccagtccctccccagctcgcaggcctactcccacggtgggctgatggccgaccacttgccaggaaggatgcggcccaacaccagctgcccggtaccaatcaaagtctgccctcgctcaccccccttggagaccaggaccaggacttccagctcctgctcttcctattcctacgcggaggacgggagcgggggctcaccctgcagcctccctctctgtgagttctcctcctcgccctgttcccagggagccagattccttgccacagaacatcaggaaccaggcctgatgggagatggaatgtacaaccaagtgcggccccaaattaaatgtgagcagtcttatggaaccaactccagtgacgaatccggatcgttctcggaagcagacagtgagtcgtgtcctgtgcaggacaggggccaggaggtaaaacttccttttcctgtagatcaaatcacagatcttccaaggaacgatttccagatgatgattaaaatgcacaagctaacctcagaacagttagagtttattcatgatgtccgacggcgcagcaagaaccgcatcgcggcccagcgctgccgcaaaaggaaactggactgtattcagaatttagaatgtgaaatccgcaaattggtgtgtgagaaagagaaactgttgtcagagaggaatcaactgaaagcatgcatgggggaactgttggacaacttctcctgcctttcccaggaagtttgccgagacatccagagccccgagcagatccaggccctgcatcggtattgccctgtcctcagacccatggacttgcccacggcctccagtattaaccctgcgcccttgggtgctgagcagaacattgcggcctcccaatgcgcagtgggggaaaacgtgccctgctgcttggagccaggcgcggctccccccggacccccctgggcacccagcaacacctccgagaattgtacctctgggaggagactagaaggcactgacccgggaaccttctcagagagaggacctcctcttgaacccaggagccaaacagtgaccgtggacttctgccaggaaatgactgataagtgtacaactgacgaacagcccaggaaagattatacctagtgactcggctctgcctcccagtccgcacacctctcccatccaggcgttcttcagtcagcctgtggcactgttcatctgctgtcccgaagaaaccgagaacacatttggtgcacactacagcggtcttagcagcaatactgttccgaagtatcctctcctcttctcgagcaggagtgatagttaccttcacaatggtgctaccccttgcccaggcaaggaaagacagcagtgatgacactgtctgtctgtggctcaatttcagtcttcacagggatagactacaacacctctaggccccaaccacggattttttttctcagtggcccatgtcacaaaccctatctcaggaatttcttctgaatgttcaatttttttcattgaagacagcttctatacacatcaaagttttatagctagactgtacatattatatataatatatatataaaatatatatatatatatatatatatccatatgcaaaagtcctgcatgcctcaactttctcatcctaaaactggaaacttatttctcatttagaaacaggttccaacattcctcttcttttgtctctgatgctagaactagtttggtaactgttaacatggtcatttttcttgcttcacagttcaattttcaattcgtacttatttatggacaaaattcagtgttggaagctttttcccaaggttttatttcagatttctttttcgtttggtttggttttggcacctccaagtggtgtcatttgagcattgtaggtttgttttttgtttgtttggggggttttgtttgtttttgtttttgtttttgttttccttgcagatactgtacagtaatggtcaactttgccacttgcactgagttttgggtcaaacctattttcttaaatgaagttgtaacttcggtataactcaagtatactgtatattctttgcttttagttaaaaaagtaaaacattttagctaattaaaaagcactcaggtgataattatgtaggaaaaacaatcttgccaaataatgaattcatcctaggatgtgtagacaataatctgcttgaatatttttatatttcacctcctccccacctttccctaagcaaagtttaaacgcagatagagagttcagagttgatgctggatgttcagattcctaagtggggagagagtttggacatctcactcaaaagtacatcagaaaaacaggaatccgtgattttataccagaactcagcaggcattggctcctagaaatcaagttagaaagttttcacccagggagtaagtcccattcatttcaacacgtcctgaggcctcggcttgctcttggaagtgttgtgcagtaggacctgctcccctgaaggacggggccaaccagccactggctttcctgcccaggcttggcctcccaggacatctggcctgaggggatttgaatcacagccccgaaggtcctgccttcaccccattgggagagagcagggcatcctggcatctgcgatccatccctgacacaggctgacacattctttctcctttccttctccaaaggcttggagttttcttctgaggtttttctgccagtgtcttgtctgaaggcagacttcattctgaggctttggacaagctatcaccgggaaccctccctgtccccttcccgaatcacacacataccctaccctcacctgatgataattttctcttcttgctgcaaaactggttggcttgcaacccagagagagcagcttcccttggctctggggccgtgttggccccagccacgtttacaggaaggtgtgccccagaggaggaggaatcagctccctcgctccagtggccttgggtccgggtctcactgagcagcccgagggccactccagcccggctggggaagagagtcctgaacggtttgatgtggggatggggtggtgggcagtggggaatagatggttgactttgtttctttatttgtgccattgtttggacaatattaaagctgcatgtaaaaggggaaattagtatatgatgtaggctaaaagtgaaatcatagtaacatatgttttagtattattaacttttttctgtacaaatattagcactaaatgtttaaatatgtatgaatgccagaaatttgtcagttcatgcagtaggataaaaaaaaaaaaaaaaaaaaaaaaaaggcttttctttttaaacagttccacttttaaaacctgcctctgggtttttgttttttcttgtttgtgtgtgtgtgtgtgtgtgtgtgtgtgtgtgtgtgtgtgtgtgtgtgtgtctgaaacagatcttgataaagctctgtgttggagctgctggtttttgttatggttgttggaatttcttggcctactaggacagttctgtgcttcaccatgaggtttgcctttgtggaaaactggtgacagtgagaatataaactcaatgtgaatcacgtgatacttcgcaggcgtgtgttacagtggagtcagctgacagtattttgctttttaactctattgttgcctttccaagtgacctctcctcttcttttaaaaaaagaacactttctgctcatatcataaccaggtccaacccagcttcttggcatgaggtttaccctggtaacaactcatgtgcaactggtagtcttgaccacattccatccatttcctcaggtttctgtggttcagtagcccagacctgtttggcagccatttctagcaggggcggggcctctttatttctctccaccctaactcagacctcaccttcctcccacccacccctgccttgcttttcttcctcttcccccaacctaacttctgccatgggaactggttaaaaacactgctctaaaaaccatcttccaatttcatagagatttctcacaagttatttcattcataatccaccatgaacagtgactagcttcgtgcagttgttcatgtgatgtgtgtgtgtcttttcctattcagaactatgtgcttgtcaaaattatttctgggttgattcaaagggaggacttgctggggaccagaatccaaacggcctcaagtggaattttaaaacctagcctgtctcttttccctgggatccctctgtcaaccccacgccttttaggaaaaagaaaagtgagtgaacagcaaggaagagtgtttgcacagtacagtaacatttggttgttcttaaggctcttttcttacaaaaataagagaccctccaaccacgggctgtttaggaggatgcctgcttgggtctccaaatggctggggtaggaatggttgttggggcagagccagtggaggtgagtgaccctgagactaatgaacatcccacctaaatccagtcctccccttggatctgcctttgtcctgcttgtgtatccaggcaacctcttttcaagttggtcaggctttggacaggtgagtgatttgctgtatgtgtttgtttctctgcgttacctgggggtgccttgattaaaatcgaactttattacatactgattctggaacaaaacagttagaaaaactttaaaaaaaaaaaaaccgacaaagttacgaggccatcctgctatttatcttctgagttcccagcaatgactcaggcatcagagatgatgctgcagtggaaaacctgactctgtgtgtctgcaactgaatgttgtgcgagtaatttattaactgtctttctaaaggtttgctgcttttaagatgcactataattcgggatgtaatccttacattgcttttccaaggaagggaacaaaagtctagtgattagtatgccaactgccactactccttcaaaaggagccaggaccagcgacaagactcatgagaggactggctaaagtgaagtgtgcacagtgtgaagtttaatgctgttgtcaagaggcctaaacccacattttctcttttaatattttatgattgccatcaaagaagaagaaaaagaaggaacagacaaaggtttgaaaatgataagcctgttaagacaccaaaaactcctgtcccgtgaagctgcttgacatcctgtggagtagcataatcctctcaaaatgaggaagagctgcctgcaaagctttctcaagtccctatttggctacctacttctctacattatgccccatttaaactaggagctgtcttagaaatgacttcaaactgcttcactattgcttacagtttaggaggagtctcagatccagaaggagcaagaatcaagtttggtcctcaaatgactgtaaatagactaaagaacaaggtgttttttgtttttgtttttgttttctaagaataaagctgttcgttgtatcatgagttagtgtttcttccccaaactgaagactgtgttggaagtgcaatttctggtgagtcagtccacaatacaatgccctgtgtggagttggtattcatacaggaaatctgtgtgcacgaggcattgtgtgttgaaagtgtatgtttatagtactgcctgagccatctcatgaccccagcgtccaaaaccgatgctgtagaacagaacatatctgtacacaaatagtgtgtgcaaatagcatttgtacatagaaaagtctcattgtggcagattgagcataaattattcaactgacggtgcaaaaacattacttgcaaagaaaagtttatagtattttcctacactccaccctgggagatgatatttctatcaaatgaatatcagtgcattttaaatgtaatatgaaaacgatgctgccattttgtgaagaatacccacttggttgcagaggccaactttcatagctttgatttaatgttgtgacacggtgtatgcattttgctgtcaagcaatggataaacagctctgactttcattctcattccagtttattgacctcagataaaacactggcccttcttagaagcagaagtgtgcaccaagaccattcatttcaggtagactcacattcagtgccaagtgctcccatgggaataatcagacgcatatgttgcgaaagagtgaagggacttggacaaagaggggttttcctacagatggatgctcagtcttctaccaaaacatgtttggaggcagaactatgacctccccttaagtcctaacaatgtattttgtgtgtgcaaatcctgggatgcccgtttcacgctctgacataaagacatggcacctctagtgagtgatcaggaagattccatatgcatttgggagcttcaggtgcttgttagacacagtgagccattcaaggcaagcaccacctttgctagtgaggccaagagagcctgtgacaatttgacaatttgttccagaaccagtctgatgcaagtgcacctctaatatatgccttacaaactccagaggccatattcaaaacagggtcttctcagtgtatgcaaggggctgcagcccctcttctcttcctccccaggttgaacaatacggacagttttcacacatatctacctgtataaccctctgtacctctcataactggtcaacgactgtaacaggttacatcaggtgtttttctacatactttttacacagattctatgcgattaatgtaatttaattcaatgcatcattttattgtactagttcttaggcttgtccttatttttttctaagtgattgtggtttttctcgtggtttttattgtaaaaaatgaaaggctgttgatgcttattctctgtaactaagaatttttaccttttgggggaaaaaagcattgctatgaactaatgaattgaaacttcatttactcattgtaaatacactattgtgcaaaaaaagttttcactcaattgaattgctagtgttaactgaattttgtctagacaccatttctgttgatgaaataaagacatatcattatgcattgtaaactga

SEQ ID NO: 268596 - DNA, 9113 bp, Artificial Sequence
  derived and/or modified sequence
gcggccgccgccctcgccaccccgcctgcccactcccgccgccgccccgctctcgctttccccccggcctcccctcgccccttcccctcccccttcccggcgcactcggggggctgggaacgagctgccatgtgatgcgcgtcccctccgcgagctttcggtgacccacgaactgcccacctcgccggctgccgggagggggctgcgagccgggaagacgcggggaagaggaggcggaaaaggacgcaaagttctccggcgagcgcgttcgttcacatagctcccagttttaacatttcgccacctactgaagacatcatttgggaccaagctgatgagcccttgaagcacagcagataagagtgttgctgttgatcatctttgcctgggaagttgaatgataaagccagaagaaagcatgctttctgatcatttgcagctgtctgcttcagaaagtgagggctccaggaatgaggagaatcttcaagaacttcctcgcactgtgacatgtctgatcccttgctcccatccctgcagcatgaacaaggtggacactcactgacctgtcacaaggttgccccacaaaactttggggtccatgtctgaatggattgccagagccttctcatctctcccttcgcccagttccctgcatcctaagactcgaaggcagcacaggacctggaaaaattacatggtgtgaacggcatgtctgtggatgagaagcctgactcccccatgtatgtgtatgagtccacagtccactgcaccaacatcctcctgggcctcaatgaccagcggaaaaaggatattctctgtgacgtgactttgatcgtggagaggaaggagttccgggcccaccgggctgtgctggccgcatgcagtgaatatttttggcaggcgctggttggacagacaaaaaatgatttggtggtcagcttgcctgaggaggtcacagccaggggctttgggccgctgttacagtttgcctacactgccaagctgttactcagcagagaaaacatccgcgaggtcatccgctgtgctgagttcctgcgcatgcacaacctggaggactcctgcttcagcttcctgcagacccagctcctgaacagtgaggatggcctgtttgtgtgccggaaggatgctgcgtgccagcgcccacacgaggactgcgagaactctgcaggagaggaggaggatgaagaggaggagacgatggattcagagacggccaagatggcttgccccagggaccagatgcttccagagcccatcagctttgaggccgccgccatccccgtagcagagaaggaagaagccctgctgcccgagcctgacgtgcccacagacaccaaggagagctcagaaaaggacgcgttaacgcagtaccccagatacaagaaataccagcttgcatgtaccaagaatgtctataatgcatcatcacacagtacctcaggttttgcaagcacattccgggaagataactctagcaacagcctcaagccggggcttgccagggggcagattaaaagtgagccgcccagtgaagagaatgaggaagagagcatcacgctctgcctgtctggagatgagcctgacgccaaggacagagcgggggatgtcgagatggaccggaaacagcccagccctgcccctacccccacggccccagctggggccgcctgcctggagagatccaggagcgtggcctcgccctcctgcttaaggtctctgttcagcataacgaaaagtgtggagctgtctggcctgcccagtacatctcagcagcactttgccaggagtccagcctgcccttttgacaaggggatcactcagggtgaccttaaaactgactacacccctttcacagggaattatggacagccccacgtgggccagaaggaggtgtccaacttcaccatggggtcgcccctcagggggcctgggttggaggctctctgtaaacaggagggagagctggaccggaggagcgtgatcttctcctccagcgcttgtgaccaagtgagcacctcggtgcattcttattctggggtgagcagtttggacaaagacctctctgagccggtgccaaagggtctgtgggtgggagccggccagtccctccccagctcgcaggcctactcccacggtgggctgatggccgaccacttgccaggaaggatgcggcccaacaccagctgcccggtaccaatcaaagtctgccctcgctcaccccccttggagaccaggaccaggacttccagctcctgctcttcctattcctacgcggaggacgggagcgggggctcaccctgcagcctccctctctgtgagttctcctcctcgccctgttcccagggagccagattccttgccacagaacatcaggaaccaggcctgatgggagatggaatgtacaaccaagtgcggccccaaattaaatgtgagcagtcttatggaaccaactccagtgacgaatccggatcgttctcggaagcagacagtgagtcgtgtcctgtgcaggacaggggccaggaggtaaaacttccttttcctgtagatcaaatcacagatcttccaaggaacgatttccagatgatgattaaaatgcacaagctaacctcagaacagttagagtttattcatgatgtccgacggcgcagcaagaaccgcatcgcggcccagcgctgccgcaaaaggaaactggactgtattcagaatttagaatgtgaaatccgcaaattggtgtgtgagaaagagaaactgttgtcagagaggaatcaactgaaagcatgcatgggggaactgttggacaacttctcctgcctttcccaggaagtttgccgagacatccagagccccgagcagatccaggccctgcatcggtattgccctgtcctcagacccatggacttgcccacggcctccagtattaaccctgcgcccttgggtgctgagcagaacattgcggcctcccaatgcgcagtgggggaaaacgtgccctgctgcttggagccaggcgcggctccccccggacccccctgggcacccagcaacacctccgagaattgtacctctgggaggagactagaaggcactgacccgggaaccttctcagagagaggacctcctcttgaacccaggagccaaacagtgaccgtggacttctgccaggaaatgactgataagtgtacaactgacgaacagcccaggaaagattatacctagtgactcggctctgcctcccagtccgcacacctctcccatccaggcgttcttcagtcagcctgtggcactgttcatctgctgtcccgaagaaaccgagaacacatttggtgcacactacagcggtcttagcagcaatactgttccgaagtatcctctcctcttctcgagcaggagtgatagttaccttcacaatggtgctaccccttgcccaggcaaggaaagacagcagtgatgacactgtctgtctgtggctcaatttcagtcttcacagggatagactacaacacctctaggccccaaccacggattttttttctcagtggcccatgtcacaaaccctatctcaggaatttcttctgaatgttcaatttttttcattgaagacagcttctatacacatcaaagttttatagctagactgtacatattatatataatatatatataaaatatatatatatatatatatatatccatatgcaaaagtcctgcatgcctcaactttctcatcctaaaactggaaacttatttctcatttagaaacaggttccaacattcctcttcttttgtctctgatgctagaactagtttggtaactgttaacatggtcatttttcttgcttcacagttcaattttcaattcgtacttatttatggacaaaattcagtgttggaagctttttcccaaggttttatttcagatttctttttcgtttggtttggttttggcacctccaagtggtgtcatttgagcattgtaggtttgttttttgtttgtttggggggttttgtttgtttttgtttttgtttttgttttccttgcagatactgtacagtaatggtcaactttgccacttgcactgagttttgggtcaaacctattttcttaaatgaagttgtaacttcggtataactcaagtatactgtatattctttgcttttagttaaaaaagtaaaacattttagctaattaaaaagcactcaggtgataattatgtaggaaaaacaatcttgccaaataatgaattcatcctaggatgtgtagacaataatctgcttgaatatttttatatttcacctcctccccacctttccctaagcaaagtttaaacgcagatagagagttcagagttgatgctggatgttcagattcctaagtggggagagagtttggacatctcactcaaaagtacatcagaaaaacaggaatccgtgattttataccagaactcagcaggcattggctcctagaaatcaagttagaaagttttcacccagggagtaagtcccattcatttcaacacgtcctgaggcctcggcttgctcttggaagtgttgtgcagtaggacctgctcccctgaaggacggggccaaccagccactggctttcctgcccaggcttggcctcccaggacatctggcctgaggggatttgaatcacagccccgaaggtcctgccttcaccccattgggagagagcagggcatcctggcatctgcgatccatccctgacacaggctgacacattctttctcctttccttctccaaaggcttggagttttcttctgaggtttttctgccagtgtcttgtctgaaggcagacttcattctgaggctttggacaagctatcaccgggaaccctccctgtccccttcccgaatcacacacataccctaccctcacctgatgataattttctcttcttgctgcaaaactggttggcttgcaacccagagagagcagcttcccttggctctggggccgtgttggccccagccacgtttacaggaaggtgtgccccagaggaggaggaatcagctccctcgctccagtggccttgggtccgggtctcactgagcagcccgagggccactccagcccggctggggaagagagtcctgaacggtttgatgtggggatggggtggtgggcagtggggaatagatggttgactttgtttctttatttgtgccattgtttggacaatattaaagctgcatgtaaaaggggaaattagtatatgatgtaggctaaaagtgaaatcatagtaacatatgttttagtattattaacttttttctgtacaaatattagcactaaatgtttaaatatgtatgaatgccagaaatttgtcagttcatgcagtaggataaaaaaaaaaaaaaaaaaaaaaaaaaggcttttctttttaaacagttccacttttaaaacctgcctctgggtttttgttttttcttgtttgtgtgtgtgtgtgtgtgtgtgtgtgtgtgtgtgtgtgtgtgtgtgtgtgtctgaaacagatcttgataaagctctgtgttggagctgctggtttttgttatggttgttggaatttcttggcctactaggacagttctgtgcttcaccatgaggtttgcctttgtggaaaactggtgacagtgagaatataaactcaatgtgaatcacgtgatacttcgcaggcgtgtgttacagtggagtcagctgacagtattttgctttttaactctattgttgcctttccaagtgacctctcctcttcttttaaaaaaagaacactttctgctcatatcataaccaggtccaacccagcttcttggcatgaggtttaccctggtaacaactcatgtgcaactggtagtcttgaccacattccatccatttcctcaggtttctgtggttcagtagcccagacctgtttggcagccatttctagcaggggcggggcctctttatttctctccaccctaactcagacctcaccttcctcccacccacccctgccttgcttttcttcctcttcccccaacctaacttctgccatgggaactggttaaaaacactgctctaaaaaccatcttccaatttcatagagatttctcacaagttatttcattcataatccaccatgaacagtgactagcttcgtgcagttgttcatgtgatgtgtgtgtgtcttttcctattcagaactatgtgcttgtcaaaattatttctgggttgattcaaagggaggacttgctggggaccagaatccaaacggcctcaagtggaattttaaaacctagcctgtctcttttccctgggatccctctgtcaaccccacgccttttaggaaaaagaaaagtgagtgaacagcaaggaagagtgtttgcacagtacagtaacatttggttgttcttaaggctcttttcttacaaaaataagagaccctccaaccacgggctgtttaggaggatgcctgcttgggtctccaaatggctggggtaggaatggttgttggggcagagccagtggaggtgagtgaccctgagactaatgaacatcccacctaaatccagtcctccccttggatctgcctttgtcctgcttgtgtatccaggcaacctcttttcaagttggtcaggctttggacaggtgagtgatttgctgtatgtgtttgtttctctgcgttacctgggggtgccttgattaaaatcgaactttattacatactgattctggaacaaaacagttagaaaaactttaaaaaaaaaaaaaccgacaaagttacgaggccatcctgctatttatcttctgagttcccagcaatgactcaggcatcagagatgatgctgcagtggaaaacctgactctgtgtgtctgcaactgaatgttgtgcgagtaatttattaactgtctttctaaaggtttgctgcttttaagatgcactataattcgggatgtaatccttacattgcttttccaaggaagggaacaaaagtctagtgattagtatgccaactgccactactccttcaaaaggagccaggaccagcgacaagactcatgagaggactggctaaagtgaagtgtgcacagtgtgaagtttaatgctgttgtcaagaggcctaaacccacattttctcttttaatattttatgattgccatcaaagaagaagaaaaagaaggaacagacaaaggtttgaaaatgataagcctgttaagacaccaaaaactcctgtcccgtgaagctgcttgacatcctgtggagtagcataatcctctcaaaatgaggaagagctgcctgcaaagctttctcaagtccctatttggctacctacttctctacattatgccccatttaaactaggagctgtcttagaaatgacttcaaactgcttcactattgcttacagtttaggaggagtctcagatccagaaggagcaagaatcaagtttggtcctcaaatgactgtaaatagactaaagaacaaggtgttttttgtttttgtttttgttttctaagaataaagctgttcgttgtatcatgagttagtgtttcttccccaaactgaagactgtgttggaagtgcaatttctggtgagtcagtccacaatacaatgccctgtgtggagttggtattcatacaggaaatctgtgtgcacgaggcattgtgtgttgaaagtgtatgtttatagtactgcctgagccatctcatgaccccagcgtccaaaaccgatgctgtagaacagaacatatctgtacacaaatagtgtgtgcaaatagcatttgtacatagaaaagtctcattgtggcagattgagcataaattattcaactgacggtgcaaaaacattacttgcaaagaaaagtttatagtattttcctacactccaccctgggagatgatatttctatcaaatgaatatcagtgcattttaaatgtaatatgaaaacgatgctgccattttgtgaagaatacccacttggttgcagaggccaactttcatagctttgatttaatgttgtgacacggtgtatgcattttgctgtcaagcaatggataaacagctctgactttcattctcattccagtttattgacctcagataaaacactggcccttcttagaagcagaagtgtgcaccaagaccattcatttcaggtagactcacattcagtgccaagtgctcccatgggaataatcagacgcatatgttgcgaaagagtgaagggacttggacaaagaggggttttcctacagatggatgctcagtcttctaccaaaacatgtttggaggcagaactatgacctccccttaagtcctaacaatgtattttgtgtgtgcaaatcctgggatgcccgtttcacgctctgacataaagacatggcacctctagtgagtgatcaggaagattccatatgcatttgggagcttcaggtgcttgttagacacagtgagccattcaaggcaagcaccacctttgctagtgaggccaagagagcctgtgacaatttgacaatttgttccagaaccagtctgatgcaagtgcacctctaatatatgccttacaaactccagaggccatattcaaaacagggtcttctcagtgtatgcaaggggctgcagcccctcttctcttcctccccaggttgaacaatacggacagttttcacacatatctacctgtataaccctctgtacctctcataactggtcaacgactgtaacaggttacatcaggtgtttttctacatactttttacacagattctatgcgattaatgtaatttaattcaatgcatcattttattgtactagttcttaggcttgtccttatttttttctaagtgattgtggtttttctcgtggtttttattgtaaaaaatgaaaggctgttgatgcttattctctgtaactaagaatttttaccttttgggggaaaaaagcattgctatgaactaatgaattgaaacttcatttactcattgtaaatacactattgtgcaaaaaaagttttcactcaattgaattgctagtgttaactgaattttgtctagacaccatttctgttgatgaaataaagacatatcattatgcattgtaaactg

SEQ ID NO: 268597 - DNA, 3981 bp, Artificial Sequence
  derived and/or modified sequence
gcggccgccgccctcgccaccccgcctgcccactcccgccgccgccccgctctcgctttccccccggcctcccctcgccccttcccctcccccttcccggcgcactcggggggctgggaacgagctgccatgtgatgcgcgtcccctccgcgagctttcggtgacccacgaactgcccacctcgccggctgccgggagggggctgcgagccgggaagacgcggggaagaggaggcggaaaaggacgcaaagttctccggcgagctgtctgcttcagaaagtgagggctccaggaatgaggagaatcttcaagaacttcctcgcactgtgacatgtctgatcccttgctcccatccctgcagcatgaacaaggtggacactcactgacctgtcacaaggttgccccacaaaactttggggtccatgtctgaatggattgccagagccttctcatctctcccttcgcccagttccctgcatcctaagactcgaaggcagcacaggacctggaaaaattacatggtgtgaacggcatgtctgtggatgagaagcctgactcccccatgtatgtgtatgagtccacagtccactgcaccaacatcctcctgggcctcaatgaccagcggaaaaaggatattctctgtgacgtgactttgatcgtggagaggaaggagttccgggcccaccgggctgtgctggccgcatgcagtgaatatttttggcaggcgctggttggacagacaaaaaatgatttggtggtcagcttgcctgaggaggtcacagccaggggctttgggccgctgttacagtttgcctacactgccaagctgttactcagcagagaaaacatccgcgaggtcatccgctgtgctgagttcctgcgcatgcacaacctggaggactcctgcttcagcttcctgcagacccagctcctgaacagtgaggatggcctgtttgtgtgccggaaggatgctgcgtgccagcgcccacacgaggactgcgagaactctgcaggagaggaggaggatgaagaggaggagacgatggattcagagacggccaagatggcttgccccagggaccagatgcttccagagcccatcagctttgaggccgccgccatccccgtagcagagaaggaagaagccctgctgcccgagcctgacgtgcccacagacaccaaggagagctcagaaaaggacgcgttaacgcagtaccccagatacaagaaataccagcttgcatgtaccaagaatgtctataatgcatcatcacacagtacctcaggttttgcaagcacattccgggaagataactctagcaacagcctcaagccggggcttgccagggggcagattaaaagtgagccgcccagtgaagagaatgaggaagagagcatcacgctctgcctgtctggagatgagcctgacgccaaggacagagcgggggatgtcgagatggaccggaaacagcccagccctgcccctacccccacggccccagctggggccgcctgcctggagagatccaggagcgtggcctcgccctcctgcttaaggtctctgttcagcataacgaaaagtgtggagctgtctggcctgcccagtacatctcagcagcactttgccaggagtccagcctgcccttttgacaaggggatcactcagggtgaccttaaaactgactacacccctttcacagggaattatggacagccccacgtgggccagaaggaggtgtccaacttcaccatggggtcgcccctcagggggcctgggttggaggctctctgtaaacaggagggagagctggaccggaggagcgtgatcttctcctccagcgcttgtgaccaagtgagcacctcggtgcattcttattctggggtgagcagtttggacaaagacctctctgagccggtgccaaagggtctgtgggtgggagccggccagtccctccccagctcgcaggcctactcccacggtgggctgatggccgaccacttgccaggaaggatgcggcccaacaccagctgcccggtaccaatcaaagtctgccctcgctcaccccccttggagaccaggaccaggacttccagctcctgctcttcctattcctacgcggaggacgggagcgggggctcaccctgcagcctccctctctgtgagttctcctcctcgccctgttcccagggagccagattccttgccacagaacatcaggaaccaggcctgatgggagatggaatgtacaaccaagtgcggccccaaattaaatgtgagcagtcttatggaaccaactccagtgacgaatccggatcgttctcggaagcagacagtgagtcgtgtcctgtgcaggacaggggccaggaggtaaaacttccttttcctgtagatcaaatcacagatcttccaaggaacgatttccagatgatgattaaaatgcacaagctaacctcagaacagttagagtttattcatgatgtccgacggcgcagcaagaaccgcatcgcggcccagcgctgccgcaaaaggaaactggactgtattcagaatttagaatgtgaaatccgcaaattggtgtgtgagaaagagaaactgttgtcagagaggaatcaactgaaagcatgcatgggggaactgttggacaacttctcctgcctttcccaggaagtttgccgagacatccagagccccgagcagatccaggccctgcatcggtattgccctgtcctcagacccatggacttgcccacggcctccagtattaaccctgcgcccttgggtgctgagcagaacattgcggcctcccaatgcgcagtgggggaaaacgtgccctgctgcttggagccaggcgcggctccccccggacccccctgggcacccagcaacacctccgagaattgtacctctgggaggagactagaaggcactgacccgggaaccttctcagagagaggacctcctcttgaacccaggagccaaacagtgaccgtggacttctgccaggaaatgactgataagtgtacaactgacgaacagcccaggaaagattatacctagtgactcggctctgcctcccagtccgcacacctctcccatccaggcgttcttcagtcagcctgtggcactgttcatctgctgtcccgaagaaaccgagaacacatttggtgcacactacagcggtcttagcagcaatactgttccgaagtatcctctcctcttctcgagcaggagtgatagttaccttcacaatggtgctaccccttgcccaggcaaggaaagacagcagtgatgacactgtctgtctgtggctcaatttcagtcttcacagggatagactacaacacctctaggccccaaccacggattttttttctcagtggcccatgtcacaaaccctatctcaggaatttcttctgaatgttcaatttttttcattgaagacagcttctatacacatcaaagttttatagctagactgtacatattatatataatatatatataaaatatatatatatatatatatatatccatatgcaaaagtcctgcatgcctcaactttctcatcctaaaactggaaacttatttctcatttagaaacaggttccaacattcctcttcttttgtctctgatgctagaactagtttggtaactgttaacatggtcatttttcttgcttcacagttcaattttcaattcgtacttatttatggacaaaattcagtgttggaagctttttcccaaggttttatttcagatttctttttcgtttggtttggttttggcacctccaagtggtgtcatttgagcattgtaggtttgttttttgtttgtttggggggttttgtttgtttttgtttttgtttttgttttccttgcagatactgtacagtaatggtcaactttgccacttgcactgagttttgggtcaaacctattttcttaaatgaagttgtaacttcggtataactcaagtata

SEQ ID NO: 268598 - DNA, 9108 bp, Artificial Sequence
  derived and/or modified sequence
gtcaacaatgtagcgattgagagtgtgggcgttccggggagagcgcaagccgcgcggcgcggagcaaacagcgccgagccgccgccgcctcagcagcagcagcagcagcagcagcggcagcagcggccgtgcacgcccgggctgcggtcgcacagcgctaacgtgagcggccgccgccctcgccaccccgcctgcccactcccgccgccgccccgctctcgctttccccccggcctcccctcgccccttcccctcccccttcccggcgcactcggggggctgggaacgagctgccatgtgatgcgcgtcccctccgcgagctttcggtgacccacgaactgcccacctcgccggctgccgggagggggctgcgagccgggaagacgcggggaagaggaggcggaaaaggacgcaaagttctccggcgagtgcagctgtctgcttcagaaagtgagggctccaggaatgaggagaatcttcaagaacttcctcgcactgtgacatgtctgatcccttgctcccatccctgcagcatgaacaaggtggacactcactgacctgtcacaaggttgccccacaaaactttggggtccatgtctgaatggattgccagagccttctcatctctcccttcgcccagttccctgcatcctaagactcgaaggcagcacaggacctggaaaaattacatggtgtgaacggcatgtctgtggatgagaagcctgactcccccatgtatgtgtatgagtccacagtccactgcaccaacatcctcctgggcctcaatgaccagcggaaaaaggatattctctgtgacgtgactttgatcgtggagaggaaggagttccgggcccaccgggctgtgctggccgcatgcagtgaatatttttggcaggcgctggttggacagacaaaaaatgatttggtggtcagcttgcctgaggaggtcacagccaggggctttgggccgctgttacagtttgcctacactgccaagctgttactcagcagagaaaacatccgcgaggtcatccgctgtgctgagttcctgcgcatgcacaacctggaggactcctgcttcagcttcctgcagacccagctcctgaacagtgaggatggcctgtttgtgtgccggaaggatgctgcgtgccagcgcccacacgaggactgcgagaactctgcaggagaggaggaggatgaagaggaggagacgatggattcagagacggccaagatggcttgccccagggaccagatgcttccagagcccatcagctttgaggccgccgccatccccgtagcagagaaggaagaagccctgctgcccgagcctgacgtgcccacagacaccaaggagagctcagaaaaggacgcgttaacgcagtaccccagatacaagaaataccagcttgcatgtaccaagaatgtctataatgcatcatcacacagtacctcaggttttgcaagcacattccgggaagataactctagcaacagcctcaagccggggcttgccagggggcagattaaaagtgagccgcccagtgaagagaatgaggaagagagcatcacgctctgcctgtctggagatgagcctgacgccaaggacagagcgggggatgtcgagatggaccggaaacagcccagccctgcccctacccccacggccccagctggggccgcctgcctggagagatccaggagcgtggcctcgccctcctgcttaaggtctctgttcagcataacgaaaagtgtggagctgtctggcctgcccagtacatctcagcagcactttgccaggagtccagcctgcccttttgacaaggggatcactcagggtgaccttaaaactgactacacccctttcacagggaattatggacagccccacgtgggccagaaggaggtgtccaacttcaccatggggtcgcccctcagggggcctgggttggaggctctctgtaaacaggagggagagctggaccggaggagcgtgatcttctcctccagcgcttgtgaccaagtgagcacctcggtgcattcttattctggggtgagcagtttggacaaagacctctctgagccggtgccaaagggtctgtgggtgggagccggccagtccctccccagctcgcaggcctactcccacggtgggctgatggccgaccacttgccaggaaggatgcggcccaacaccagctgcccggtaccaatcaaagtctgccctcgctcaccccccttggagaccaggaccaggacttccagctcctgctcttcctattcctacgcggaggacgggagcgggggctcaccctgcagcctccctctctgtgagttctcctcctcgccctgttcccagggagccagattccttgccacagaacatcaggaaccaggcctgatgggagatggaatgtacaaccaagtgcggccccaaattaaatgtgagcagtcttatggaaccaactccagtgacgaatccggatcgttctcggaagcagacagtgagtcgtgtcctgtgcaggacaggggccaggaggtaaaacttccttttcctgtagatcaaatcacagatcttccaaggaacgatttccagatgatgattaaaatgcacaagctaacctcagaacagttagagtttattcatgatgtccgacggcgcagcaagaaccgcatcgcggcccagcgctgccgcaaaaggaaactggactgtattcagaatttagaatgtgaaatccgcaaattggtgtgtgagaaagagaaactgttgtcagagaggaatcaactgaaagcatgcatgggggaactgttggacaacttctcctgcctttcccaggaagtttgccgagacatccagagccccgagcagatccaggccctgcatcggtattgccctgtcctcagacccatggacttgcccacggcctccagtattaaccctgcgcccttgggtgctgagcagaacattgcggcctcccaatgcgcagtgggggaaaacgtgccctgctgcttggagccaggcgcggctccccccggacccccctgggcacccagcaacacctccgagaattgtacctctgggaggagactagaaggcactgacccgggaaccttctcagagagaggacctcctcttgaacccaggagccaaacagtgaccgtggacttctgccaggaaatgactgataagtgtacaactgacgaacagcccaggaaagattatacctagtgactcggctctgcctcccagtccgcacacctctcccatccaggcgttcttcagtcagcctgtggcactgttcatctgctgtcccgaagaaaccgagaacacatttggtgcacactacagcggtcttagcagcaatactgttccgaagtatcctctcctcttctcgagcaggagtgatagttaccttcacaatggtgctaccccttgcccaggcaaggaaagacagcagtgatgacactgtctgtctgtggctcaatttcagtcttcacagggatagactacaacacctctaggccccaaccacggattttttttctcagtggcccatgtcacaaaccctatctcaggaatttcttctgaatgttcaatttttttcattgaagacagcttctatacacatcaaagttttatagctagactgtacatattatatataatatatatataaaatatatatatatatatatatatatccatatgcaaaagtcctgcatgcctcaactttctcatcctaaaactggaaacttatttctcatttagaaacaggttccaacattcctcttcttttgtctctgatgctagaactagtttggtaactgttaacatggtcatttttcttgcttcacagttcaattttcaattcgtacttatttatggacaaaattcagtgttggaagctttttcccaaggttttatttcagatttctttttcgtttggtttggttttggcacctccaagtggtgtcatttgagcattgtaggtttgttttttgtttgtttggggggttttgtttgtttttgtttttgtttttgttttccttgcagatactgtacagtaatggtcaactttgccacttgcactgagttttgggtcaaacctattttcttaaatgaagttgtaacttcggtataactcaagtatactgtatattctttgcttttagttaaaaaagtaaaacattttagctaattaaaaagcactcaggtgataattatgtaggaaaaacaatcttgccaaataatgaattcatcctaggatgtgtagacaataatctgcttgaatatttttatatttcacctcctccccacctttccctaagcaaagtttaaacgcagatagagagttcagagttgatgctggatgttcagattcctaagtggggagagagtttggacatctcactcaaaagtacatcagaaaaacaggaatccgtgattttataccagaactcagcaggcattggctcctagaaatcaagttagaaagttttcacccagggagtaagtcccattcatttcaacacgtcctgaggcctcggcttgctcttggaagtgttgtgcagtaggacctgctcccctgaaggacggggccaaccagccactggctttcctgcccaggcttggcctcccaggacatctggcctgaggggatttgaatcacagccccgaaggtcctgccttcaccccattgggagagagcagggcatcctggcatctgcgatccatccctgacacaggctgacacattctttctcctttccttctccaaaggcttggagttttcttctgaggtttttctgccagtgtcttgtctgaaggcagacttcattctgaggctttggacaagctatcaccgggaaccctccctgtccccttcccgaatcacacacataccctaccctcacctgatgataattttctcttcttgctgcaaaactggttggcttgcaacccagagagagcagcttcccttggctctggggccgtgttggccccagccacgtttacaggaaggtgtgccccagaggaggaggaatcagctccctcgctccagtggccttgggtccgggtctcactgagcagcccgagggccactccagcccggctggggaagagagtcctgaacggtttgatgtggggatggggtggtgggcagtggggaatagatggttgactttgtttctttatttgtgccattgtttggacaatattaaagctgcatgtaaaaggggaaattagtatatgatgtaggctaaaagtgaaatcatagtaacatatgttttagtattattaacttttttctgtacaaatattagcactaaatgtttaaatatgtatgaatgccagaaatttgtcagttcatgcagtaggataaaaaaaaaaaaaaaaaaaaaaaaaaggcttttctttttaaacagttccacttttaaaacctgcctctgggtttttgttttttcttgtttgtgtgtgtgtgtgtgtgtgtgtgtgtgtgtgtgtgtgtgtgtgtgtgtgtctgaaacagatcttgataaagctctgtgttggagctgctggtttttgttatggttgttggaatttcttggcctactaggacagttctgtgcttcaccatgaggtttgcctttgtggaaaactggtgacagtgagaatataaactcaatgtgaatcacgtgatacttcgcaggcgtgtgttacagtggagtcagctgacagtattttgctttttaactctattgttgcctttccaagtgacctctcctcttcttttaaaaaaagaacactttctgctcatatcataaccaggtccaacccagcttcttggcatgaggtttaccctggtaacaactcatgtgcaactggtagtcttgaccacattccatccatttcctcaggtttctgtggttcagtagcccagacctgtttggcagccatttctagcaggggcggggcctctttatttctctccaccctaactcagacctcaccttcctcccacccacccctgccttgcttttcttcctcttcccccaacctaacttctgccatgggaactggttaaaaacactgctctaaaaaccatcttccaatttcatagagatttctcacaagttatttcattcataatccaccatgaacagtgactagcttcgtgcagttgttcatgtgatgtgtgtgtgtcttttcctattcagaactatgtgcttgtcaaaattatttctgggttgattcaaagggaggacttgctggggaccagaatccaaacggcctcaagtggaattttaaaacctagcctgtctcttttccctgggatccctctgtcaaccccacgccttttaggaaaaagaaaagtgagtgaacagcaaggaagagtgtttgcacagtacagtaacatttggttgttcttaaggctcttttcttacaaaaataagagaccctccaaccacgggctgtttaggaggatgcctgcttgggtctccaaatggctggggtaggaatggttgttggggcagagccagtggaggtgagtgaccctgagactaatgaacatcccacctaaatccagtcctccccttggatctgcctttgtcctgcttgtgtatccaggcaacctcttttcaagttggtcaggctttggacaggtgagtgatttgctgtatgtgtttgtttctctgcgttacctgggggtgccttgattaaaatcgaactttattacatactgattctggaacaaaacagttagaaaaactttaaaaaaaaaaaaaccgacaaagttacgaggccatcctgctatttatcttctgagttcccagcaatgactcaggcatcagagatgatgctgcagtggaaaacctgactctgtgtgtctgcaactgaatgttgtgcgagtaatttattaactgtctttctaaaggtttgctgcttttaagatgcactataattcgggatgtaatccttacattgcttttccaaggaagggaacaaaagtctagtgattagtatgccaactgccactactccttcaaaaggagccaggaccagcgacaagactcatgagaggactggctaaagtgaagtgtgcacagtgtgaagtttaatgctgttgtcaagaggcctaaacccacattttctcttttaatattttatgattgccatcaaagaagaagaaaaagaaggaacagacaaaggtttgaaaatgataagcctgttaagacaccaaaaactcctgtcccgtgaagctgcttgacatcctgtggagtagcataatcctctcaaaatgaggaagagctgcctgcaaagctttctcaagtccctatttggctacctacttctctacattatgccccatttaaactaggagctgtcttagaaatgacttcaaactgcttcactattgcttacagtttaggaggagtctcagatccagaaggagcaagaatcaagtttggtcctcaaatgactgtaaatagactaaagaacaaggtgttttttgtttttgtttttgttttctaagaataaagctgttcgttgtatcatgagttagtgtttcttccccaaactgaagactgtgttggaagtgcaatttctggtgagtcagtccacaatacaatgccctgtgtggagttggtattcatacaggaaatctgtgtgcacgaggcattgtgtgttgaaagtgtatgtttatagtactgcctgagccatctcatgaccccagcgtccaaaaccgatgctgtagaacagaacatatctgtacacaaatagtgtgtgcaaatagcatttgtacatagaaaagtctcattgtggcagattgagcataaattattcaactgacggtgcaaaaacattacttgcaaagaaaagtttatagtattttcctacactccaccctgggagatgatatttctatcaaatgaatatcagtgcattttaaatgtaatatgaaaacgatgctgccattttgtgaagaatacccacttggttgcagaggccaactttcatagctttgatttaatgttgtgacacggtgtatgcattttgctgtcaagcaatggataaacagctctgactttcattctcattccagtttattgacctcagataaaacactggcccttcttagaagcagaagtgtgcaccaagaccattcatttcaggtagactcacattcagtgccaagtgctcccatgggaataatcagacgcatatgttgcgaaagagtgaagggacttggacaaagaggggttttcctacagatggatgctcagtcttctaccaaaacatgtttggaggcagaactatgacctccccttaagtcctaacaatgtattttgtgtgtgcaaatcctgggatgcccgtttcacgctctgacataaagacatggcacctctagtgagtgatcaggaagattccatatgcatttgggagcttcaggtgcttgttagacacagtgagccattcaaggcaagcaccacctttgctagtgaggccaagagagcctgtgacaatttgacaatttgttccagaaccagtctgatgcaagtgcacctctaatatatgccttacaaactccagaggccatattcaaaacagggtcttctcagtgtatgcaaggggctgcagcccctcttctcttcctccccaggttgaacaatacggacagttttcacacatatctacctgtataaccctctgtacctctcataactggtcaacgactgtaacaggttacatcaggtgtttttctacatactttttacacagattctatgcgattaatgtaatttaattcaatgcatcattttattgtactagttcttaggcttgtccttatttttttctaagtgattgtggtttttctcgtggtttttattgtaaaaaatgaaaggctgttgatgcttattctctgtaactaagaatttttaccttttgggggaaaaaagcattgctatgaactaatgaattgaaacttcatttactcattgtaaatacactattgtgcaaaaaaagttttcactcaattgaattgctagtgttaactgaattttgtctagacaccatttctgttgatgaaataaagacatatcattatgcattgtaaactg

SEQ ID NO: 268599 - protein, 81 aa, Artificial Sequence
  derived and/or modified sequence
MSVDEKPDSPMYVYESTVHCTNILLGLNDQRKKDILCDVTLIVERKEFRAHRAVLAACSEYFWQALVGQTKNDLVVSLPEE

SEQ ID NO: 268600 - DNA, 2526 bp, Artificial Sequence
  derived and/or modified sequence
atgagtgtggatgaaaaacctgatagtcccatgtacgtgtacgagtctacagtccattgcactaacatactgctgggcctcaatgatcagcgcaaaaaggatatactctgcgacgtgacgctgattgtagagcggaaagagtttagggcccaccgggctgttttagccgcatgctcagagtacttctggcaagcactcgtggggcagaccaaaaacgaccttgtagtgtctctgcccgaagaggtcacagctcgcggattcggaccacttttgcagtttgcctatacagccaagctccttctctctagggaaaacatccgggaggtcatccgttgtgctgagttcctcaggatgcataacctggaggattcctgcttttcctttctgcagacacaattgcttaattccgaggacggcttattcgtctgtaggaaggacgccgcatgccagcggcctcatgaggactgtgaaaactctgctggggaggaggaagatgaggaagaggaaacaatggatagtgagacggctaaaatggcttgccctagagaccagatgctgcctgaacccatctcctttgaagcagcagccattcccgttgctgaaaaggaggaggctttgttgcctgaaccagatgttcctacagatacaaaggagtcctccgaaaaggatgcactgacacagtaccctagatataaaaaataccaactggcctgtacaaagaacgtttacaacgcgtcatctcacagtacaagcgggttcgctagcacatttagagaagacaactcatcaaattcattaaagcctggattggccagaggccagatcaaatcagagccaccatccgaggaaaatgaagaggaaagtataactctgtgtctgtccggggacgaaccagatgcgaaggacagagcgggcgatgtggaaatggataggaagcaaccaagccctgctcctacccccaccgctcccgccggggcggcctgccttgaacggagccgttccgtggcctccccctcatgcctgcgttcgttgttctcgattaccaagtcagtggaactgtccggattgccaagcacttctcagcaacacttcgcacggagccctgcatgtccttttgataaagggatcacccaaggcgacctcaaaacggattatactccattcacgggaaactacggtcagccacacgtgggccagaaggaagtgagtaactttaccatggggtctccgctgcgtggaccagggctcgaagccctctgtaagcaagagggagagctggataggagatctgtgattttctcttcaagtgcctgtgatcaagttagcacgtctgtgcactcctatagcggagtctccagcctcgataaggacctgagcgagccagtccctaagggcctctgggtcggcgcaggtcagtctctgccgtcttctcaggcctacagccatggaggcctgatggccgatcacctgcccggacgaatgcgccccaataccagctgcccagttcctattaaggtgtgtccccgcagcccgccgctcgagactaggacacggacttccagcagctgctcctcctacagttacgctgaggatgggagcggcggctcgccctgttcacttcccttgtgcgagttttcttcatctccatgtagtcaaggcgcgcggtttctggccactgaacaccaagagcctgggttgatgggcgatggcatgtataaccaggtcaggccacagatcaaatgtgaacagtcatatgggaccaattcttctgatgagtccggatcgttctcggaggcagacagcgaaagctgccccgtccaggacagagggcaggaggttaaactaccattcccagtggaccagattaccgacctgcctcgcaacgatttccagatgatgattaaaatgcataaattaacgagcgagcagctggagtttatacacgacgtgagacggcgcagtaagaacaggatcgccgcacaaagatgccggaagcgaaagctggattgtatccaaaacctcgaatgtgaaatccggaagctggtctgcgagaaggagaagcttctgtcagagcgcaaccagctgaaggcctgcatgggagagctgcttgataacttctcgtgcttgtcccaggaggtatgtagggacatacagagtccagaacagatccaagccttacatcgctactgtcctgtgctccggcctatggatttgccaacagccagctccataaatcccgcccccctgggcgctgaacagaacatcgccgcttctcaatgtgcagttggagaaaatgtgccttgttgcttggagccaggtgctgcgccaccaggccctccgtgggcccccagtaacacatcagagaactgcacaagtggcaggcgactggagggaacagatccaggcacattctcggaaagaggcccccctctggaaccccgcagccagacagtgactgtcgatttctgtcaagagatgactgacaagtgcacaacagatgaacaacccaggaaagactacacatag

SEQ ID NO: 268601 - DNA, 2526 bp, Artificial Sequence
  derived and/or modified sequence
atgtctgtggacgagaagccagactccccaatgtacgtgtacgagagcaccgtacactgcacaaatattctgctcggcctgaatgaccagcgcaaaaaagatatcctatgcgacgtaactctcatcgtggaacgcaaggagttccgcgcacacagggccgtgttggcagcctgcagcgaatatttctggcaggcccttgtggggcagacgaaaaatgatttggttgtgtccttgcccgaggaagtcaccgctcgaggcttcggaccgctgcttcagtttgcctataccgccaaattacttttaagtcgtgaaaatatccgggaggttattcgttgtgcagaatttctcagaatgcacaatctcgaagatagttgttttagtttcctgcagactcagctgctcaattctgaggacggtctgttcgtttgtcgcaaggacgctgcctgtcagagaccacacgaagactgtgagaactcggcaggagaagaggaggacgaggaggaagagaccatggacagtgagaccgcaaaaatggcctgtccgagggatcaaatgttacccgagcccataagtttcgaagcggctgccatccccgtggcggagaaggaggaggcattgctgcccgagcctgatgtcccgaccgacacaaaggagtcctccgaaaaagacgcattgacgcagtaccccaggtataagaagtaccagctcgcctgtactaagaatgtgtataatgctagttcccattctactagcggctttgcatcaaccttccgagaagacaactccagcaattccctgaagccaggactggcgcgaggccagattaaatccgagccgccaagcgaagaaaacgaggaggagtccatcacgctttgcctgtccggcgacgagcctgatgctaaagacagggctggcgatgtcgagatggataggaaacaacccagccccgcgccaacgcctacagctcctgcaggagctgcatgcctcgaacgctctcgtagcgtcgcaagcccatcctgtttgcgctcattgttttcaattaccaagtctgtcgagctgtcgggcctcccgtctacgtcccagcagcactttgcgagaagccccgcttgtcccttcgataagggaattacccaaggtgacctgaaaacggactataccccatttactggcaactatgggcagccacacgtgggtcaaaaagaggtctccaactttactatgggcagcccattacgagggccaggattggaagcactctgcaaacaagagggcgagcttgatagaagatctgtcatttttagttcaagtgcctgcgatcaagtctctacatccgtacactcatacagtggcgtatcatccctggacaaagacctcagcgaacccgttcctaaaggattatgggttggcgccggccagtccctgccttcgtcgcaagcttattctcatggaggcctgatggccgaccacttgcctggcaggatgcggcctaatacatcttgccctgtacccatcaaagtgtgccctagatccccacctctggaaactcgaacacggacatcttcctcctgctcttcctattcatacgctgaggacgggagcgggggttccccttgcagcttgccgctgtgcgaattctcatcctcaccttgtagccagggagctagattcctggcaactgagcatcaggagcctggcctcatgggcgacggcatgtacaaccaggttcgcccacagataaagtgtgaacaaagctacggtacaaatagctctgatgaatccggctcattttcggaggcagatagcgagtcatgcccggttcaggacagaggccaggaggtcaaacttccatttccagtggaccagattacggatctgccacggaacgatttccagatgatgatcaagatgcataagctcacgagcgagcaattggaattcatccatgatgtgcgccgcaggtccaagaataggatagcggcacaaagatgccgaaagagaaagttggattgcatccagaatttggagtgcgagatcaggaaactggtctgtgagaaggaaaaactgctgagcgaacgcaaccaactcaaagcatgcatgggagaacttctcgataacttctcctgtctgtctcaagaggtttgccgcgacatccagagccctgaacagatccaagccctccataggtactgccctgtcctgcggcccatggatctccccacagccagctcaatcaacccagcacctctcggtgccgaacaaaacatcgccgcgagccagtgtgcagtgggggaaaacgtgccttgttgtctcgagccaggggctgcgccccctggaccaccctgggccccgtccaatacctctgagaattgtacttctggccggcgcctggaaggtaccgacccgggtacgtttagcgaacgcggcccgcctctggagcctcgcagccagaccgtgacagtagacttttgtcaagagatgaccgataagtgtaccacagatgagcagcctcgcaaggattacacctag

SEQ ID NO: 268602 - DNA, 2526 bp, Artificial Sequence
  derived and/or modified sequence
atgtcagtggatgaaaaaccggattctcccatgtatgtgtacgaatctacagtccattgcacaaatatactcctgggtttgaacgatcaacggaaaaaggacatcctgtgtgatgtcaccctgatagttgagcgaaaggagtttcgggcgcaccgggcggtcctggccgcctgctccgagtacttctggcaggccttggtcgggcaaaccaaaaacgacctggtggtctcactgcctgaagaagtaaccgcccggggctttggacccctgttacaatttgcatacactgccaaacttttactgtctcgagagaacatcagagaagtcatacgatgtgctgagttcttaaggatgcacaacctagaagattcatgcttcagcttcttacagactcagctgctgaactcagaagacggtttgtttgtgtgtcgcaaggacgctgcctgccaaagaccacatgaagattgcgaaaacagtgccggagaggaagaggatgaagaagaggaaacgatggactcagagaccgccaagatggcctgtcctcgagaccagatgcttcctgaacccatttcctttgaagcggccgccatccccgtggccgagaaagaagaggcactcctgcctgagcctgatgtcccgacagacacaaaagagtcatctgaaaaagacgctctgacacagtatcctcgctacaaaaagtaccaactggcctgcaccaagaacgtctacaatgcctcttctcattcgaccagtgggtttgcctcgacctttcgggaagacaacagcagtaactctttgaaaccaggcttggcccgaggccagataaagtcagaacccccatccgaggagaatgaagaggagtctattaccctgtgcctaagcggcgatgaacctgatgccaaagaccgcgccggcgatgttgagatggatcgcaagcagccttcacccgcgccgacgcccacggcgcctgctggggcagcttgcttagaaagatccaggagcgtcgcatcaccctcctgtctcagaagcttgttctctatcacaaaatcggtagaactgtctggcctccctagtacgagtcaacagcatttcgcccgctctcctgcgtgcccttttgacaaaggaattactcagggagatctgaagacggattacaccccctttacagggaattatgggcagccccatgtcggacagaaagaggtctcaaacttcacaatgggctcgccactgagaggccctgggctggaagcgctatgtaagcaagagggtgagttggaccgaagatccgtcatattctctagttctgcatgtgaccaggtctctacctctgtccacagctactctggcgtgtcttctttggacaaggacctcagcgagccagtccccaaagggctgtgggtgggcgctgggcagagcttgccatccagccaggcctactcccacggcggcctgatggccgatcatctacctgggcgtatgagacccaacacctcttgcccggtccctattaaggtgtgccctcggagtccccctctagaaacaagaaccagaacatcctcctcatgctcatcctatagttatgcagaagatggctcgggcggttccccttgttcactgcctctgtgtgagttttcatcctcaccatgtagccagggggcccgattcttagcaactgaacaccaggaacccggtctcatgggggacggcatgtataaccaggtgcggccacaaatcaaatgcgagcagagttacgggacgaatagttcagatgaatcaggatccttctctgaggcggactcagaaagttgtccggttcaggaccggggacaggaggtcaagctgccctttcctgtcgaccagatcaccgacctcccccgtaacgacttccagatgatgataaagatgcacaaactgacctccgagcagcttgaattcatccacgacgtgcgccggcgctctaagaataggatagccgcccagcgatgccggaaacgcaagttggattgcatacagaatcttgagtgcgagattcgcaaactggtttgtgagaaagaaaagcttctcagcgaacgcaaccagcttaaagcatgtatgggggaattactggacaatttttcttgcctgagccaagaagtgtgccgggacatccagtcaccagaacagatccaggccctgcaccggtactgtcctgtgttgaggcccatggacctgccaaccgcgtcaagcataaacccagcccccttaggcgctgagcaaaacattgccgcctcccagtgcgcagttggcgaaaacgtgccctgctgtttagaaccaggcgcagcacctccaggacctccatgggccccaagtaacacatcggagaattgtacctccggacgacgcctggaagggactgatccaggcacattttctgaacgtggtccccctctggaaccacgaagtcagacagtaactgtagacttctgccaggagatgacggataaatgcaccactgatgaacagccccggaaggattacacctag

SEQ ID NO: 268603 - DNA, 2526 bp, Artificial Sequence
  derived and/or modified sequence
atgtctgtggatgagaagccagacagccccatgtatgtgtatgagagcacagtgcactgcaccaacatcctgctgggcctgaatgaccagaggaagaaggacatcctgtgtgatgtgaccctcatcgtggagaggaaggagttccgggcccacagagctgtgctggccgcctgcagcgagtacttctggcaggccctggtgggccagaccaagaatgacctggtggtgtccctgcctgaggaggtgacagcccggggcttcggccccctgctgcagtttgcctacacagccaagctgctgctgagccgggagaacatccgggaggtgatccgctgtgccgagttcctgaggatgcacaacctggaggacagctgcttctccttcctgcagacccagctgctgaacagtgaagatggcctgtttgtgtgcaggaaggatgctgcctgccagaggcctcatgaggactgtgaaaattctgctggggaggaggaggatgaggaggaggagaccatggattctgaaacagccaagatggcctgcccccgggaccagatgctgcctgagcccatcagctttgaggccgccgccatccctgtggccgagaaggaggaggccctgctgcctgagccagatgtgcccacagacaccaaggagagcagcgagaaggatgccctgacccagtacccccgctacaagaagtaccagctggcctgcaccaagaatgtgtacaatgccagcagccacagcaccagcggctttgccagcaccttccgggaggacaacagcagcaacagcctgaagccaggcctggcccggggccagatcaagtctgagcccccatctgaagaaaatgaggaggagagcatcaccctgtgcctgtctggagatgagccagatgccaaggacagagctggagatgtggagatggacaggaagcagcccagccctgcccccacccccacagccccagctggggccgcctgcctggagaggagccgctctgtggccagccccagctgcctgcggagcctcttcagcatcaccaagtctgtggagctgagcggcctgcccagcaccagccagcagcactttgcccggagccctgcctgcccctttgacaagggcatcacccagggcgacctgaagacagactacacccccttcaccggcaactacggccagccccacgtgggccagaaggaggtgagcaacttcaccatgggcagccccctgcggggccctggcctggaggccctgtgcaagcaggagggggagctggaccggcgcagcgtcatcttcagcagcagcgcctgtgaccaggtgtccacctctgtgcacagctacagcggcgtgagcagcctggacaaggacctgtctgagcctgtgcccaagggcctgtgggtgggcgccggccagagcctgcccagcagccaggcctacagccacggcggcctgatggctgaccacctgcccggccgcatgaggcccaacaccagctgccctgtgcccatcaaggtgtgccccaggagcccccccctggagaccaggaccaggaccagcagcagctgcagcagctacagctatgcagaagatggcagcggcggcagcccctgcagcctgcccctgtgtgagttcagcagcagcccctgcagccagggcgcccgcttcctggccacagagcaccaggagcccggcctgatgggagatggcatgtacaaccaggtgcggccccagatcaagtgtgagcagagctatggcaccaacagcagtgatgaaagtggcagcttcagcgaggccgacagcgagagctgccctgtgcaggaccggggccaggaggtgaagctgcccttccctgtggaccagatcacagacctgcccagaaatgacttccagatgatgatcaagatgcacaagctgaccagcgagcagctggagttcatccatgatgtgagaagaagaagcaagaacagaattgctgcccagcgctgcaggaagaggaagctggactgcatccagaacctggagtgtgagatcaggaagctggtgtgtgagaaggagaagctgctgtctgagaggaaccagctgaaggcctgcatgggagagctgctggacaacttcagctgcctgagccaggaggtgtgccgggacatccagagccctgagcagatccaggccctgcaccgctactgccctgtgctgcggcccatggacctgcccacagccagcagcatcaacccagcccccctgggcgctgagcagaacattgctgccagccagtgtgctgtgggggagaatgtgccctgctgcctggagcccggggccgcccctcctggccccccctgggcccccagcaacaccagcgagaactgcaccagcggccggcggctggagggcacagatcctggcaccttcagcgagcggggcccccccctggagcccaggagccagacagtgacagtggacttctgccaggagatgacagacaagtgcaccacagatgagcagcccaggaaggactacacctag

SEQ ID NO: 268604 - DNA, 2526 bp, Artificial Sequence
  derived and/or modified sequence
atgagcgtggacgagaagcccgacagccccatgtacgtgtacgagtccactgtgcactgcacaaatatactactgggtctgaacgatcagagaaagaaagacattctgtgcgatgtgactttgattgtagaacgtaaggagtttcgagctcatagggctgttctggccgcttgctcggagtacttttggcaggccctggttggccagaccaaaaacgacctggtggtcagcttgcccgaggaggtgaccgctcgcggcttcgggcccctgttgcagttcgcttataccgcaaagcttctgctaagtcgggaaaatatcagggaggtcatcagatgtgccgagtttctccgaatgcataacttagaggacagctgtttttcattcctgcagactcagctcttgaatagcgaggatgggctgttcgtgtgtcggaaagatgctgcctgtcagagaccccacgaagactgcgaaaacagtgccggagaggaagaagatgaggaggaggagacaatggattcggaaacagccaaaatggcctgcccacgggaccaaatgcttccagagccgattagctttgaggccgcggccatcccagtggccgagaaggaagaagcgttattaccagaaccagacgtgcccaccgacacaaaagagagttctgaaaaagacgccttaacccagtacccaaggtataaaaagtatcagttggcttgcacaaaaaatgtgtacaacgccagttcccatagcacgtccggttttgcttctacgttcagggaagataacagctcaaactccttgaagccaggcctagcacgcgggcagattaaatccgaacccccctccgaggagaatgaggaggagagcatcacactgtgtctgtccggtgacgaaccagatgctaaggacagggcgggtgacgtcgagatggatagaaaacagccctctcccgcccccacccccactgcccctgcaggcgccgcctgtctggaaagatccagatctgtcgccagtccctcttgtctccggagcctgttttcaatcactaagagcgttgagctttctggattgcctagcacatcccagcagcacttcgctcggagcccggcttgcccctttgacaaggggataacacaaggggatcttaagacagattatacacctttcacgggtaattacggccagccacatgtaggacagaaagaggtctctaactttaccatgggtagccctctgagaggcccaggactcgaggcactctgcaagcaggaaggagaactggatcggaggagtgtgattttcagttcatcagcctgtgatcaggtatctacctccgtgcatagttacagtggcgtctcctctctcgacaaagaccttagcgagcccgtccccaaaggactctgggtcggggcgggccagtccctaccttcaagccaggcatacagccatggcggactcatggcggaccacttgcctggtagaatgagacctaatacatcttgtcccgttccaatcaaggtttgtccaagatctcctcccctagaaactagaacacggacaagctcttcctgtagctcttattcgtacgctgaggatggcagcggcggttcaccatgtagtctgccactttgtgagttctcttcctcaccctgcagccagggagctcgattcctggcaaccgaacaccaggagcctggcctcatgggggatggaatgtacaatcaggtgaggcctcagatcaagtgtgagcagtcatatggcacaaatagttcagatgagagtggttcattcagcgaggccgattcagaaagctgtcctgtgcaggaccgcggccaggaagtgaaactcccgttccccgtggaccagattacagacctccctagaaacgatttccagatgatgattaaaatgcacaaactgacatccgagcaattggagttcattcatgatgttaggaggagatctaaaaataggattgctgctcaaagatgtcggaaacgaaagctggactgcatccaaaatctcgaatgcgagatcaggaagctcgtctgcgaaaaagagaaactactcagtgagagaaatcagctgaaagcctgcatgggggaactgctggacaactttagctgtctcagccaagaggtctgtagggatatacagtcccctgaacagattcaagcactgcaccgctactgtccggttttacgacccatggatctgcccaccgcttcgagtatcaaccccgctcccttaggcgccgagcagaatatcgccgcctcccaatgtgccgtgggagaaaatgtgccctgctgtctcgagccaggagctgcccctcctggccccccctgggcacccagtaacacgtcagaaaactgcacctctggaaggcgcttagagggtaccgaccccggaaccttctccgagcggggcccgccccttgagcctaggtctcagacagtaaccgtagatttctgtcaggaaatgacagataaatgtacaaccgatgagcagccgagaaaagactacacctag

SEQ ID NO: 268605 - DNA, 2526 bp, Artificial Sequence
  derived and/or modified sequence
atgagcgtggacgagaagcccgacagccccatgtacgtgtacgagtcgacagtccattgcaccaatattctactgggtctgaatgatcagcggaagaaagatatcttatgtgatgtcactcttatcgtcgagcggaaggagttccgggctcatagggctgtactcgcagcatgttccgaatacttttggcaagcactcgtcggccaaaccaagaacgaccttgtcgtgtccctccctgaggaggtgactgccagaggatttgggcctttgctccagtttgcgtatacagcgaaactgctgttgtcaagggaaaacataagggaagtgatccgctgcgccgagttcctgcggatgcataatctcgaggacagctgtttttcttttctacagacccaactgctcaactccgaagacggactgtttgtgtgcaggaaagacgccgcctgccagagaccacatgaggattgtgaaaacagcgctggtgaggaagaggacgaggaggaggagactatggattctgagactgcaaagatggcttgcccacgggatcagatgctgcctgagcctatttcattcgaggccgctgccatccccgtcgcggaaaaagaagaggcgttgctgccagaaccagacgtgcctaccgacactaaagagagcagcgaaaaggatgccctgacacaatacccaagatataagaaatatcagctcgcttgtacgaagaacgtctataatgcctcaagccacagtacttctggcttcgcctctacattccgagaggataattcgtctaactctcttaaaccagggctggctcgggggcaaatcaagtcagaaccacccagtgaggagaacgaggaggaatcaataacactttgcctgtccggggatgaacccgacgccaaggacagggccggagatgtggaaatggaccgaaagcagccatcccccgcacctacgcctaccgccccagccggggctgcctgcctggaacggagcagatccgttgccagtccttcttgtttacgaagcctgttttccattaccaaatcggtcgagttatccgggctgccatctacaagtcagcagcactttgcgcggtcccccgcttgtccttttgataaaggtataacccagggcgatcttaagactgattatacccctttcaccgggaattatgggcagccccatgtaggacagaaagaggtgtccaatttcaccatgggcagcccattacgtgggccagggctcgaggctctttgcaaacaggagggcgagttggatcggaggagcgttattttttcgtcttctgcgtgtgaccaagtcagtacctccgtgcacagctattctggggtgagttccctcgacaaagacctgagtgaaccggtcccaaaaggtctatgggtgggtgcaggacagagtttacccagtagccaggcttacagccacggcggactgatggctgaccatctccccggtagaatgcggcccaatacttcatgcccagtcccaatcaaggtatgtcctcgatcacctccgcttgaaactcggacccgcactagttcctcctgctccagctattcatatgccgaagatggaagcggcggcagcccatgctccttgcctctatgcgagttcagcagctctccctgcagccagggcgccagatttctcgccaccgagcaccaggagccaggcctgatgggggatggaatgtataatcaggtacggccacaaatcaaatgcgagcaatcatacggcaccaactcatcggacgagtcaggttctttctctgaggccgattccgaaagttgtccagtgcaggaccgggggcaagaggtgaaactaccctttccagtcgatcaaatcaccgacctgccaagaaacgatttccagatgatgatcaagatgcacaagctcacctccgaacagctggagtttattcatgatgtgaggaggcgaagcaaaaacaggattgcagctcagcgctgtcggaagcggaagctagactgtatccagaatctggagtgcgaaattcgaaaactagtttgcgagaaggaaaaactgctgtctgagaggaaccagcttaaggcatgtatgggcgagctgctcgataatttctcatgcctgtcccaggaagtctgcagggacattcagtctccagagcagattcaggctttacacaggtactgtcctgtactgcgccctatggatctgccaaccgcttcctctatcaatcccgcaccgctcggagccgaacagaacattgctgccagtcagtgcgctgtaggtgaaaacgtgccttgttgcctggagcccggcgctgctccgcccggccccccttgggcgccaagtaacaccagtgagaactgcaccagcgggcggaggctggaagggacagacccagggactttttcggagcgcgggcctcctctcgagcccaggagccagacggtcactgtagacttttgccaggagatgacagacaagtgtacaacagatgagcaaccccggaaggactatacctag

SEQ ID NO: 268606 - DNA, 2526 bp, Artificial Sequence
  derived and/or modified sequence
atgagcgtggacgagaagcccgacagccccatgtacgtgtacgagtctaccgtgcactgcactaatatcctcctggggctcaatgaccagaggaagaaggacatcctgtgcgatgtcacacttatcgtcgagcgtaaggagttccgggcccatcgcgcagtcttggcggcctgttcagagtacttctggcaggctcttgtgggacaaacaaagaacgatttggttgtttccctaccggaggaggtgactgctaggggatttgggccactcttacagttcgcatacacagctaagctccttttgagcagagaaaacattcgagaagtgattcggtgtgctgagttcctgaggatgcataacctagaggattcttgcttttctttcctgcaaacacaactgctaaatagtgaggatgggttgttcgtgtgcaggaaagatgccgcttgtcagcgccctcacgaggattgcgagaactctgccggagaggaggaggatgaagaggaggaaactatggatagcgaaaccgccaagatggcttgtcctagggaccaaatgctgccagaaccaatctctttcgaagcagccgccataccagtggccgagaaagaggaagctctgctgcctgagcctgatgtgccgacagatacaaaggagagctctgaaaaggatgccctcacgcagtatccgcgatataaaaaataccagctggcctgcacaaaaaatgtgtacaacgcctcttcacattctacctcggggtttgcttccacgttccgtgaggacaactctagcaattccctgaaacccggcctcgcccgcggtcagattaaaagcgagcctccgtctgaggaaaatgaggaggagagcatcactctatgtctgtctggagatgaaccagatgccaaggaccgggcaggggacgtcgagatggataggaaacaaccatctccggcaccgacaccaactgcccccgccggggcagcctgtctggagcgctctcggagtgtggctagccctagctgcctgagaagcctgtttagcatcacaaagtcagtggaactgagcgggctgccgagtacctcccagcagcacttcgctcgcagcccagcgtgcccctttgacaaggggattacgcaaggtgatctcaaaaccgattatactcctttcacggggaattacggacagccgcacgtgggtcaaaaggaggtgtcaaattttacaatgggctcccctctgcggggaccgggcctggaagccctctgcaaacaggagggggagcttgacaggaggagtgtcatcttctcatcctctgcatgcgaccaagtctctacttcagtgcacagttactccggggtgagctcccttgataaagacctgtcggaacctgtgcctaagggcttgtgggtgggggcaggacagtcgctcccaagcagccaggcatacagccacggcggattgatggccgatcatctgcctggtcggatgagacccaacacgagctgtccagttcctattaaggtgtgtcctagaagtccaccactggaaacgagaaccaggaccagtagttcctgctcttcttatagctatgcggaagacggcagtggcgggtctccatgctcactgcctctctgtgaattctccagttctccatgtagccagggagcacggtttctcgcgaccgaacaccaagagcctggtctgatgggcgatggcatgtacaatcaggttagaccccagatcaagtgtgaacagagttatggtaccaatagcagcgatgaatccgggtctttctcagaagctgattcagagagctgtccagttcaagataggggccaggaggtgaaactgccatttcctgtcgatcagattacggatttgccccgaaatgattttcagatgatgatcaagatgcataagctgacaagcgagcaactagagttcattcatgacgtgaggcggaggtctaaaaatcggatcgccgcccagcggtgccgaaagcgaaaacttgactgcattcagaacttggaatgcgaaattagaaaattggtttgcgaaaaggagaagctactgagcgagcggaatcagttgaaagcctgcatgggagagctgcttgacaacttcagttgcttatcccaggaggtgtgtagagacatccagtcccccgaacagatccaggccctgcaccggtattgcccagtcctgcggccaatggatctgcctactgccagctctatcaacccagctccccttggagcggagcagaatatcgccgcttctcagtgcgcagtgggcgagaatgttccctgctgtctcgagccgggagcagcaccacccgggcctccatgggccccatctaacacgtccgaaaattgtacctccggaagaagactggagggtacagatcccggcacattcagcgaaaggggccccccgctggaacctagatcccagaccgttaccgtcgatttttgtcaggagatgacagacaagtgtaccacagacgaacagcctcggaaagactatacctag

SEQ ID NO: 268607 - DNA, 2526 bp, Artificial Sequence
  derived and/or modified sequence
atgagcgtcgacgagaagccagatagtcctatgtatgtctacgagagcaccgttcattgcactaatatcctgttgggcttgaacgatcagcgcaaaaaagatattctgtgtgatgtcacgttgatcgtggagaggaaggagttcagggcacatcgggctgtcctggctgcttgctcagaatatttttggcaggccctggtaggacaaaccaagaatgatctcgttgtatctctgccagaggaagttacggctcgtggatttggaccgctgcttcagttcgcttacacagccaagctgcttcttagcagagagaacatcagagaggtcatcagatgtgcagaatttttgagaatgcacaatctggaagattcctgtttctctttcctgcagacccagttgctaaactcagaagatggtcttttcgtctgtagaaaggacgcggcatgtcagcgaccccacgaagattgcgagaattccgccggtgaggaggaagacgaggaggaagaaactatggactccgagactgcgaagatggcatgcccacgagaccagatgctgcctgaaccaatttccttcgaggcagctgctatccctgtcgccgagaaagaagaggcccttttgccagaacctgatgtgcctacggacactaaggagagctcggagaaggatgcgctcacgcaatatccccgttacaaaaagtatcaactcgcctgcaccaagaatgtttacaacgcctccagtcatagtacatctgggttcgcaagtacattcagagaggataatagcagcaactcccttaagcccggactggccagaggacagattaaatccgagccaccgtccgaggaaaacgaagaggaaagtatcactctgtgcctgtctggagacgagcccgacgcaaaggatcgcgcaggcgacgttgaaatggaccgaaagcagccgtcgccagctcccacccctactgccccagcaggcgcagcttgcctggaaagaagtaggagcgtagccagccctagctgcctgcgatccctgttcagcatcaccaagagtgttgagttgtctgggttgcctagcacatcccagcaacactttgcccgaagtcccgcttgcccctttgataagggaatcacccaaggcgatttgaagacagactacacccccttcacaggcaactatgggcagcctcacgttggacaaaaagaagtctcgaacttcaccatgggctctcccttgaggggccctggcctggaagccctgtgcaagcaggagggcgagttggaccggaggagtgtaatcttttcatccagtgcttgcgaccaagtgtcaacttccgttcatagctattccggtgtgtcctctctcgataaggatctgtccgagcctgtacccaaaggactctgggtgggggctgggcagagcctgcccagctctcaggcatatagccacggcggtctgatggccgatcatctgccgggtcgcatgcgtcccaacacctcttgccccgtgcccataaaagtgtgccccagatccccccctctggaaaccagaacacgtacatccagttcttgctcatcctacagctatgctgaagatggcagtggaggatccccttgcagtcttccgctttgtgaattcagtagctccccgtgttcgcagggcgctcggttcctggccacggaacaccaggagcccggactgatgggggacgggatgtacaatcaagtaagaccccagattaaatgtgaacaaagctatggtacaaatagttctgacgagtccggcagtttcagcgaagcagatagtgaatcctgccccgtgcaggatagaggccaggaagtgaagctgccctttcccgtggaccagatcacagatttgcccagaaatgactttcaaatgatgatcaagatgcacaaacttacatcggagcagttggaattcattcatgacgtccgccgtaggagcaagaatcggatcgcggcacaaaggtgccggaaacgaaaactcgattgtattcagaatctagagtgcgagatcaggaagttagtgtgcgagaaagagaagctgctgagcgagcgtaaccagctcaaggcctgcatgggggagctgctcgacaactttagttgcctgagccaggaggtttgtcgggacattcagtctcctgagcaaatccaggcattgcacaggtattgccccgtgctgcggccaatggatctcccaaccgcttcaagtatcaatcccgctccgctgggagcggagcagaatatcgcggcttcgcaatgtgccgtcggcgaaaatgtgccctgctgtctcgaacccggagctgccccaccaggaccaccatgggcaccgagtaatacatcagagaactgcacaagtggcaggcgcctggagggcactgacccaggaacttttagcgagaggggtccaccccttgagccaagatcccagaccgtaaccgtcgacttctgccaggagatgactgacaaatgcaccaccgatgagcaacctcgaaaggactatacctag

SEQ ID NO: 268608 - DNA, 2526 bp, Artificial Sequence
  derived and/or modified sequence
atgtctgtagatgaaaaaccggatagtcccatgtacgtgtatgaatctacagtgcattgtacaaacatactgctggggctgaacgatcaacggaagaaggatatactttgcgacgtcactctaatcgtggaacgcaaagaatttcgcgctcaccgagccgtgttggccgcttgcagcgaatacttctggcaagcgctggtggggcagaccaagaacgacttggtggtgagtctcccagaggaagtaaccgccagagggttcggcccattgcttcagtttgcatatacagcaaagctgcttttaagccgcgagaatataagagaggtgattaggtgcgcagaattcctgcgcatgcacaatttagaggacagctgtttctcatttctgcagactcaactgctcaacagcgaagacggactgttcgtctgtcgcaaggacgcagcctgtcaacgccctcacgaagattgcgagaatagtgctggtgaagaggaggatgaagaagaggagaccatggattctgagaccgccaaaatggcatgtcctcgggaccaaatgctgcccgaaccaattagttttgaagcagctgcgatcccagtcgctgaaaaggaagaggcactgctgccagagccggatgtacctacggacacaaaggagagttctgagaaagacgcactgacacagtatcctcgctataagaagtaccagcttgcgtgtaccaagaacgtttataatgccagctctcatagcacgtccggatttgcgtcgacatttagagaagataattcgtctaactcgcttaagccgggtcttgcacgcggtcaaatcaagtccgaacccccttccgaggagaatgaggaggagagcattaccctatgcctgagtggagacgaacccgatgcgaaagatagggctggggacgttgaaatggataggaagcaacctagtcccgcacctacccctaccgctcccgctggcgctgcttgtctcgagcgtagtagatccgtggcctctccctcctgtctccgctccctgttctctattactaagtccgtggaactatccgggctgccaagtacctctcagcagcactttgcgagaagtccggcatgcccatttgataaaggaatcacccaaggggatctgaaaacagattatacccctttcacaggcaactacggccagcctcacgtgggacaaaaggaagtaagcaatttcactatggggtccccactgcgtggaccaggcctggaagccttatgtaaacaggaaggtgagctcgatcgcaggtcagtgattttttcaagcagcgcttgtgatcaggtcagcaccagtgtccacagctactctggggtcagcagcctggacaaagacctaagtgaaccagtgcctaagggcctgtgggtcggtgcaggacagtcgctaccatcatcccaggcctactcccacggaggcctgatggccgatcatctgcccggtcgtatgagaccaaatacctcttgcccggtacccatcaaagtatgtccaaggtctcctcccttggagacacggacccggaccagttcatcttgttcatcctacagttacgctgaagacggctctggcggttccccatgcagcctcccgctgtgtgaattctcatcaagtccctgcagccaaggagcacgattcctggccactgagcatcaagaaccaggcctcatgggggatggcatgtacaaccaggtccgtcctcagatcaagtgcgaacaatcatatggcacgaattcctccgacgagtctggaagctttagtgaagcggattccgagtcctgtcctgtgcaggaccgtggccaagaggtgaagctgccattccctgtggaccagatcacagatctgccacgcaacgacttccagatgatgatcaaaatgcacaaactgaccagtgaacagttagagtttatccacgatgtgaggcgcagatccaagaaccgcatcgcggctcagcgttgtagaaaacgtaaactggactgcatacagaacctggaatgcgagattcggaaattagtatgtgagaaggaaaagttactaagtgaacgcaatcaactgaaggcctgcatgggcgagttgctggacaacttcagctgtctcagccaggaagtttgcagagatattcagtcccctgagcagatccaagctttgcacagatactgcccagtactgaggccaatggatctgcccaccgcctcctcaattaatcccgcacccctgggcgctgaacagaacatagcagcctcccaatgtgccgtcggagaaaacgtgccctgttgtctcgaacctggcgctgccccacctggcccaccgtgggccccttctaacacgagcgaaaactgtacctctggcaggagactcgaggggactgaccccggaactttctcagagagaggtcctccactggagccacgtagccagaccgtcaccgtggacttttgccaggaaatgactgataaatgcaccaccgatgagcagcccagaaaggactatacctag

SEQ ID NO: 268609 - DNA, 2526 bp, Artificial Sequence
  derived and/or modified sequence
atgagtgtggacgaaaagcccgactcccccatgtacgtgtatgagtccacagtccactgcactaatattcttctcggtctgaacgaccagcgaaagaaggacattttgtgtgatgtaaccctgattgtcgagcggaaggaattccgcgctcatcgagcagtgctggccgcttgcagcgaatacttttggcaggcactggtgggccagacaaaaaatgatctggtggtgtctcttcctgaagaggtaactgccaggggattcggtcctcttctccagtttgcctacaccgcaaagttgctcctgagccgggagaatatacgcgaggtcatccgctgcgccgaatttctgcgcatgcacaacttagaagattcgtgcttcagcttcttgcagacccaactgctgaatagcgaggatggacttttcgtgtgtcgaaaagacgccgcatgtcagaggccacatgaagactgcgaaaattccgctggggaggaggaggatgaggaagaagaaactatggactccgagacagcaaaaatggcttgccctcgggatcagatgctgccagagccaatcagcttcgaggctgccgctatccccgtcgccgaaaaagaggaggccctcctacccgagcccgatgtccctaccgacacaaaagaatcaagcgagaaggacgctctgacccagtaccctagatataaaaagtaccagctggcttgtacaaaaaacgtatacaatgcaagttcccactccaccagcgggtttgcttctaccttcagagaggacaactcttcaaactcactgaaacctggcctcgccagagggcaaatcaaatcagaaccgccttctgaggagaacgaagaggagagcatcaccctttgtttgtccggagatgagccagatgctaaggatcgcgcaggagacgtcgagatggacaggaaacaaccgtctcctgccccaactcctactgccccagccggtgctgcctgcctagagcggtcccgctctgtggcttctccgtcttgtctgcgtagccttttctccataactaagtccgtggagcttagtggactgccatcaacatcgcagcagcattttgctcgctcaccggcttgtccatttgacaaaggaattacacagggcgaccttaaaaccgattacacaccctttacggggaattacggacagccgcatgtcggccagaaagaagtctcaaatttcaccatggggtcaccattgcgtggtccagggcttgaggccctttgcaaacaggagggcgagttagatcggagatccgtgattttctcttctagtgcgtgcgaccaagtctcaacaagcgtccactcctacagcggagtctcctccctggacaaggatttgtccgagcctgtgcccaaaggcctgtgggtaggtgcaggtcagagcctccccagttcccaggcctatagccacggcggtctgatggccgaccaccttccagggaggatgaggccaaatacctcctgtcccgtgcccataaaggtttgtccgagatccccaccccttgagactcgaactcgaactagctcctcttgcagttcgtacagctatgctgaggatggcagtggagggagtccttgtagtctccccctgtgcgaatttagcagttctccctgttcccagggtgccaggttcctggctactgagcaccaagaaccgggactcatgggggatggtatgtacaaccaagtgcgtccgcagatcaagtgcgagcagtcttacggcaccaattcttccgacgaatccggttcattcagtgaagctgatagcgagtcatgcccagtccaggaccgcggtcaggaggtgaagctgccctttcccgtggaccagatcaccgatctccctcgtaatgatttccagatgatgatcaaaatgcacaagcttacctcagaacagcttgagttcattcatgatgttcggcgtcgctcaaagaatcggatagcggctcagcggtgtaggaagcggaagctggactgcatccagaatctcgagtgcgagattagaaagttggtctgtgaaaaagagaaattgctgagcgagcggaatcagttaaaagcttgcatgggtgagctcctggataattttagttgtctcagtcaggaagtttgcagggacattcagtcccccgaacagatccaggcactgcatcgctattgcccagttctccggccaatggatctaccaacggcatcatctatcaatccagccccacttggggctgagcagaacattgctgcatcccaatgcgcagtgggggagaatgtgccttgctgtttggagccaggcgcagctcctcctggacccccatgggccccttctaacacatcagaaaattgcacttccggcagacggttggagggcacagacccaggcacgttcagcgaacgcggacccccattagagccacgctcccaaacagtcaccgttgatttctgccaggagatgacagacaagtgtacaacagatgagcaacctcggaaagattacacatag

SEQ ID NO: 268610 - DNA, 2526 bp, Artificial Sequence
  derived and/or modified sequence
atgagcgtggacgagaagcccgacagccccatgtacgtgtacgagagcaccgtgcactgcaccaacatcctgctgggcctgaacgaccagagaaagaaggacatcctgtgcgacgtgaccctgatcgtggagagaaaggagttcagagcccacagagccgtgctggccgcctgcagcgagtacttctggcaggccctggtgggccagaccaagaacgacctggtggtgagcctgcccgaggaggtgaccgccagaggcttcggccccctgctgcagttcgcctacaccgccaagctgctgctgagcagagagaacatcagagaggtgatcagatgcgccgagttcctgagaatgcacaacctggaggacagctgcttcagcttcctgcagacccagctgctgaacagcgaggacggcctgttcgtgtgcagaaaggacgccgcctgccagagaccccacgaggactgcgagaacagcgccggcgaggaggaggacgaggaggaggagaccatggacagcgagaccgccaagatggcctgccccagagaccagatgctgcccgagcccatcagcttcgaggccgccgccatccccgtggccgagaaggaggaggccctgctgcccgagcccgacgtgcccaccgacaccaaggagagcagcgagaaggacgccctgacccagtaccccagatacaagaagtaccagctggcctgcaccaagaacgtgtacaacgccagcagccacagcaccagcggcttcgccagcaccttcagagaggacaacagcagcaacagcctgaagcccggcctggccagaggccagatcaagagcgagccccccagcgaggagaacgaggaggagagcatcaccctgtgcctgagcggcgacgagcccgacgccaaggacagagccggcgacgtggagatggacagaaagcagcccagccccgcccccacccccaccgcccccgccggcgccgcctgcctggagagaagcagaagcgtggccagccccagctgcctgagaagcctgttcagcatcaccaagagcgtggagctgagcggcctgcccagcaccagccagcagcacttcgccagaagccccgcctgccccttcgacaagggcatcacccagggcgacctgaagaccgactacacccccttcaccggcaactacggccagccccacgtgggccagaaggaggtgagcaacttcaccatgggcagccccctgagaggccccggcctggaggccctgtgcaagcaggagggcgagctggacagaagaagcgtgatcttcagcagcagcgcctgcgaccaggtgagcaccagcgtgcacagctacagcggcgtgagcagcctggacaaggacctgagcgagcccgtgcccaagggcctgtgggtgggcgccggccagagcctgcccagcagccaggcctacagccacggcggcctgatggccgaccacctgcccggcagaatgagacccaacaccagctgccccgtgcccatcaaggtgtgccccagaagcccccccctggagaccagaaccagaaccagcagcagctgcagcagctacagctacgccgaggacggcagcggcggcagcccctgcagcctgcccctgtgcgagttcagcagcagcccctgcagccagggcgccagattcctggccaccgagcaccaggagcccggcctgatgggcgacggcatgtacaaccaggtgagaccccagatcaagtgcgagcagagctacggcaccaacagcagcgacgagagcggcagcttcagcgaggccgacagcgagagctgccccgtgcaggacagaggccaggaggtgaagctgcccttccccgtggaccagatcaccgacctgcccagaaacgacttccagatgatgatcaagatgcacaagctgaccagcgagcagctggagttcatccacgacgtgagaagaagaagcaagaacagaatcgccgcccagagatgcagaaagagaaagctggactgcatccagaacctggagtgcgagatcagaaagctggtgtgcgagaaggagaagctgctgagcgagagaaaccagctgaaggcctgcatgggcgagctgctggacaacttcagctgcctgagccaggaggtgtgcagagacatccagagccccgagcagatccaggccctgcacagatactgccccgtgctgagacccatggacctgcccaccgccagcagcatcaaccccgcccccctgggcgccgagcagaacatcgccgccagccagtgcgccgtgggcgagaacgtgccctgctgcctggagcccggcgccgccccccccggccccccctgggcccccagcaacaccagcgagaactgcaccagcggcagaagactggagggcaccgaccccggcaccttcagcgagagaggcccccccctggagcccagaagccagaccgtgaccgtggacttctgccaggagatgaccgacaagtgcaccaccgacgagcagcccagaaaggactacacctag

SEQ ID NO: 268611 - protein, 162 aa, Artificial Sequence
  derived and/or modified sequence
MGNTKARLLYEANLPENFRRPQTDQAVEFFIRDKYEKKKYYDKNAIAITNISSSDAPLQPLVSSPSLQAAVDKNKLEKEKEKKKEEKKREKEPEKPAKPLTAEKLQKKDQQLEPKKSTSPKKAAEPTVDLLGLVWRKIEKEKSERQLVEVEELTFMYCFPKN

SEQ ID NO: 268612 - protein, 125 aa, Artificial Sequence
  derived and/or modified sequence
  misc_feature (1)..(1): Xaa can be any naturally occurring amino acid
XKYYDKNAIAITNISSSDAPLQPLVSSPSLQAAVDKNKLEKEKEKKKEEKKREKEPEKPAKPLTAEKLQKKDQQLEPKKSTSPKKAAEPTVDLLGLVWRKIEKEKSERQLVEVEELTFMYCFPKN

SEQ ID NO: 268613 - DNA, 489 bp, Artificial Sequence
  derived and/or modified sequence
atgggcaataccaaagctaggctgctctatgaggctaacctccctgagaattttaggcggcctcagactgatcaggccgtggagttttttatccgcgataaatacgagaagaagaaatactacgataaaaatgccatagccatcactaacatttcaagtagcgatgcccctttgcagcccctggtgtccagtcctagtctgcaggctgccgttgacaagaacaagttggagaaggaaaaagaaaagaaaaaggaggagaaaaaaagagagaaggaacccgagaaacccgccaagccccttacagcggaaaaactgcagaagaaagaccaacagctggagccaaagaaatctacctcccccaagaaggcggcagagccaactgtcgacctcctgggactcgtctggcgtaaaattgaaaaagagaagagcgaaagacagttggttgaagtggaggagctcaccttcatgtactgctttcccaagaattag

SEQ ID NO: 268614 - DNA, 414 bp, Artificial Sequence
  derived and/or modified sequence
atggctacccgctcatgcagagagaaagcgcagaaactgaatgaacaacaccaactcattctgtctaaattgttacgtgaggaggacaataaatactgcgcagattgtgaggctaaaggaccaagatgggcgtcctggaacattggggtatttatttgcataaggtgcgctggcatccatcggaatctgggcgtgcacatctctagggttaaatctgtcaacctcgatcagtggacagcagagcaaattcaatgcatgcaggacatgggcaatactaaggccagactgctctatgaagctaatctgcccgagaactttcggagaccacaaaccgaccacgaggacatcattctagaaaccaccgcagtcattaccctactcttaaataaatgtctaccctatgccaaaccctag

SEQ ID NO: 268615 - DNA, 378 bp, Artificial Sequence
  derived and/or modified sequence
tgaaagtactacgataaaaacgccatcgcaatcacaaatatcagcagctcggacgctccactccagccattggttagctcccccagcctgcaggccgccgtagacaaaaacaagctcgagaaagagaaagaaaagaaaaaagaagagaaaaagcgagagaaggagcctgagaaacccgcgaaaccgttgacggctgagaaacttcagaaaaaggatcagcagctggagcctaaaaagtctacctcaccaaagaaggcagccgaacctacggttgaccttcttggactggtgtggaggaaaatcgaaaaagaaaagagcgagaggcagctggtggaggtggaggaactgactttcatgtattgcttccccaaaaactag

SEQ ID NO: 268616 - DNA, 189 bp, Artificial Sequence
  derived and/or modified sequence
atgcttttcctcaaactgagtgtgttccgcgccgtcgaattctttattagggataaatacgaaaagaagaaatactatgataagaacgcaatcgctattaccaacatctcgtcctccgacgctccactgcagcctctggtgagtagtccatctcttcaggctgcagttgacaagaacaaacttgagtag

SEQ ID NO: 268617 - DNA, 489 bp, Artificial Sequence
  derived and/or modified sequence
atgggcaacaccaaggcccggctgctgtatgaggccaacctgcctgagaacttcagaagaccccagacagaccaggccgtggagttcttcatccgggacaagtatgagaagaagaagtactatgacaagaatgccatcgccatcaccaacatcagcagcagtgatgcccccctgcagcccctggtgagcagccccagcctgcaggccgctgtggacaagaacaagctggagaaggagaaggagaagaagaaggaggagaagaagcgggagaaggagcctgagaagccagccaagcccctgacagctgagaagctgcagaagaaggaccagcagctggagcccaagaagagcaccagccccaagaaggctgctgagcccaccgtggacctgctgggcctggtgtggaggaagattgagaaggagaagtctgagcggcagctggtggaggtggaggagctgaccttcatgtactgcttccccaagaactag

SEQ ID NO: 268618 - DNA, 414 bp, Artificial Sequence
  derived and/or modified sequence
atggccaccaggagctgccgggagaaggcccagaagctgaatgagcagcaccagctgatcctgagcaagctgctgcgggaggaggacaacaagtactgtgccgactgtgaggccaagggcccccgctgggcctcctggaacatcggggtcttcatctgcatccgctgtgccggcatccacaggaacctgggcgtgcacatcagccgggtgaagtctgtgaacctggaccagtggacagctgagcagatccagtgcatgcaggacatgggcaacaccaaggcccggctgctgtatgaggccaacctgcctgagaacttcagaagaccccagacagaccacgaggacatcatcctggagaccacagctgtgatcaccctgctgctgaacaagtgcctgccctatgccaagccctag

SEQ ID NO: 268619 - DNA, 378 bp, Artificial Sequence
  derived and/or modified sequence
tgaaaatactatgacaagaatgccatcgccatcaccaacatcagcagcagtgatgcccccctgcagcccctggtgagcagccccagcctgcaggccgctgtggacaagaacaagctggagaaggagaaggagaagaagaaggaggagaagaagcgggagaaggagcctgagaagccagccaagcccctgacagctgagaagctgcagaagaaggaccagcagctggagcccaagaagagcaccagccccaagaaggctgctgagcccaccgtggacctgctgggcctggtgtggaggaagattgagaaggagaagtctgagcggcagctggtggaggtggaggagctgaccttcatgtactgcttccccaagaactag

SEQ ID NO: 268620 - DNA, 189 bp, Artificial Sequence
  derived and/or modified sequence
atgctgttcctgaagctgtctgtgttccgggctgtggagttcttcatccgggacaagtatgagaagaagaagtactatgacaagaatgccatcgccatcaccaacatcagcagcagtgatgcccccctgcagcccctggtgagcagccccagcctgcaggccgctgtggacaagaacaagctggagtag

SEQ ID NO: 268621 - DNA, 489 bp, Artificial Sequence
  derived and/or modified sequence
atgggcaacaccaaggcccggctgctgtacgaggccaacctgcccgagaactttcggaggccccagacagaccaggcagtggaattttttatccgggacaagtacgaaaaaaagaagtattatgacaaaaacgcaatcgccattaccaacatatcatcgagtgatgcccctctgcaacctcttgtatcctccccatccctgcaagctgctgttgataagaataaactggagaaggagaaagagaagaaaaaagaagagaagaaacgggaaaaagagcccgagaaacccgccaaaccacttaccgcggagaagctgcaaaaaaaagatcaacagctggaacccaaaaaatctacaagccctaagaaggccgcagaaccgacagtagaccttcttggtctggtttggcgaaagatcgaaaaagagaagagcgagaggcagttagtggaagtcgaagagctaaccttcatgtactgtttccccaagaattag

SEQ ID NO: 268622 - DNA, 414 bp, Artificial Sequence
  derived and/or modified sequence
atggccacccggagctgccgggagaaggcccagaagctgaacgagcaacaccagcttatcctctccaagctgctcagggaagaggacaataagtactgtgctgactgcgaggcgaaggggcctaggtgggcaagttggaacataggtgttttcatctgcatccggtgtgcagggattcatcgcaatttaggagtgcatattagccgagtcaaaagtgtcaatctggatcagtggacagccgagcagatccagtgtatgcaggacatgggcaacacaaaagcacggctattatacgaggccaatctgcccgaaaatttcagacgacctcaaaccgatcacgaggacattatcttagaaacgacagctgtgatcaccctattgctgaataagtgtctgccatatgctaagccttag
